United States Patent Application Publication US 2005/0255487 A1 - sequence listing, part 90

SEQ ID NO: 2475028 - RNA, 19 nt, Homo sapiens
  misc_RNA (1)...(19): siRNA sense strand
aggaaugucaagagccuga

SEQ ID NO: 2475029 - RNA, 19 nt, Homo sapiens
  misc_RNA (1)...(19): siRNA sense strand
acacugaggaauaacaaca

SEQ ID NO: 2475030 - RNA, 19 nt, Homo sapiens
  misc_RNA (1)...(19): siRNA sense strand
guagagacugccuggccaa

SEQ ID NO: 2475031 - RNA, 19 nt, Homo sapiens
  misc_RNA (1)...(19): siRNA sense strand
cgauaaaguuucacugcag

SEQ ID NO: 2475032 - RNA, 19 nt, Homo sapiens
  misc_RNA (1)...(19): siRNA sense strand
agagaguggugcuggaaag

SEQ ID NO: 2475033 - RNA, 19 nt, Homo sapiens
  misc_RNA (1)...(19): siRNA sense strand
ccagagaggccaugcucca

SEQ ID NO: 2475034 - RNA, 19 nt, Homo sapiens
  misc_RNA (1)...(19): siRNA sense strand
gauuagaaccaucagggca

SEQ ID NO: 2475035 - RNA, 19 nt, Homo sapiens
  misc_RNA (1)...(19): siRNA sense strand
aggacgugcugcuggagau

SEQ ID NO: 2475036 - RNA, 19 nt, Homo sapiens
  misc_RNA (1)...(19): siRNA sense strand
cgagcuaaugagagaguac

SEQ ID NO: 2475037 - RNA, 19 nt, Homo sapiens
  misc_RNA (1)...(19): siRNA sense strand
ggacauaaugcaugggcaa

SEQ ID NO: 2475038 - RNA, 19 nt, Homo sapiens
  misc_RNA (1)...(19): siRNA sense strand
aggaauuaaucaagagcaa

SEQ ID NO: 2475039 - RNA, 19 nt, Homo sapiens
  misc_RNA (1)...(19): siRNA sense strand
ccaaaguaaaggagagcaa

SEQ ID NO: 2475040 - RNA, 19 nt, Homo sapiens
  misc_RNA (1)...(19): siRNA sense strand
acaaagaagacauguguaa

SEQ ID NO: 2475041 - RNA, 19 nt, Homo sapiens
  misc_RNA (1)...(19): siRNA sense strand
cugaagaacuagaugaaca

SEQ ID NO: 2475042 - RNA, 19 nt, Homo sapiens
  misc_RNA (1)...(19): siRNA sense strand
ccuuagagaaugugccaaa

SEQ ID NO: 2475043 - RNA, 19 nt, Homo sapiens
  misc_RNA (1)...(19): siRNA sense strand
gcaaaugccuccaugggaa

SEQ ID NO: 2475044 - RNA, 19 nt, Homo sapiens
  misc_RNA (1)...(19): siRNA sense strand
gggcauuaguggugcaguu

SEQ ID NO: 2475045 - RNA, 19 nt, Homo sapiens
  misc_RNA (1)...(19): siRNA sense strand
gguacaacgagaugacaua

SEQ ID NO: 2475046 - RNA, 19 nt, Homo sapiens
  misc_RNA (1)...(19): siRNA sense strand
uggaaaaccugaagaaauu

SEQ ID NO: 2475047 - RNA, 19 nt, Homo sapiens
  misc_RNA (1)...(19): siRNA sense strand
ggaccauagaauuguguua

SEQ ID NO: 2475048 - RNA, 19 nt, Homo sapiens
  misc_RNA (1)...(19): siRNA sense strand
ggaagaaaucaggaggaaa

SEQ ID NO: 2475049 - RNA, 19 nt, Homo sapiens
  misc_RNA (1)...(19): siRNA sense strand
ccaggaagaucauggaaaa

SEQ ID NO: 2475050 - RNA, 19 nt, Homo sapiens
  misc_RNA (1)...(19): siRNA sense strand
uggaaagacugcagacaga

SEQ ID NO: 2475051 - RNA, 19 nt, Homo sapiens
  misc_RNA (1)...(19): siRNA sense strand
ccauguggcuggaggauca

SEQ ID NO: 2475052 - RNA, 19 nt, Homo sapiens
  misc_RNA (1)...(19): siRNA sense strand
ccuuauugucuuugagaau

SEQ ID NO: 2475053 - RNA, 19 nt, Homo sapiens
  misc_RNA (1)...(19): siRNA sense strand
aaaguaaaggagagcaaua

SEQ ID NO: 2475054 - RNA, 19 nt, Homo sapiens
  misc_RNA (1)...(19): siRNA sense strand
cggcaauuagagaaaguua

SEQ ID NO: 2475055 - RNA, 19 nt, Homo sapiens
  misc_RNA (1)...(19): siRNA sense strand
gcuuauuggcauaggccua

SEQ ID NO: 2475056 - RNA, 19 nt, Homo sapiens
  misc_RNA (1)...(19): siRNA sense strand
gaauuaaucaagagcaaga

SEQ ID NO: 2475057 - RNA, 19 nt, Homo sapiens
  misc_RNA (1)...(19): siRNA sense strand
gguacuggauaaaggaaca

SEQ ID NO: 2475058 - RNA, 19 nt, Homo sapiens
  misc_RNA (1)...(19): siRNA sense strand
gugaaagaauacuagaaga

SEQ ID NO: 2475059 - RNA, 19 nt, Homo sapiens
  misc_RNA (1)...(19): siRNA sense strand
caucagugaacaagaggaa

SEQ ID NO: 2475060 - RNA, 19 nt, Homo sapiens
  misc_RNA (1)...(19): siRNA sense strand
caaagagacaugcgagaau

SEQ ID NO: 2475061 - RNA, 19 nt, Homo sapiens
  misc_RNA (1)...(19): siRNA sense strand
gagaaugugccaaagcaaa

SEQ ID NO: 2475062 - RNA, 19 nt, Homo sapiens
  misc_RNA (1)...(19): siRNA sense strand
caacugaagcaaugggaca

SEQ ID NO: 2475063 - RNA, 19 nt, Homo sapiens
  misc_RNA (1)...(19): siRNA sense strand
uugaagugcuaaugaggaa

SEQ ID NO: 2475064 - RNA, 19 nt, Homo sapiens
  misc_RNA (1)...(19): siRNA sense strand
gaauagauuggauuggaaa

SEQ ID NO: 2475065 - RNA, 19 nt, Homo sapiens
  misc_RNA (1)...(19): siRNA sense strand
cuauagacuucgugcauca

SEQ ID NO: 2475066 - RNA, 19 nt, Homo sapiens
  misc_RNA (1)...(19): siRNA sense strand
caggaggguagcagaauua

SEQ ID NO: 2475067 - RNA, 19 nt, Homo sapiens
  misc_RNA (1)...(19): siRNA sense strand
cuuauggauuggagaauuu

SEQ ID NO: 2475068 - RNA, 19 nt, Homo sapiens
  misc_RNA (1)...(19): siRNA sense strand
caucauuacuguucaucaa

SEQ ID NO: 2475069 - RNA, 19 nt, Homo sapiens
  misc_RNA (1)...(19): siRNA sense strand
guaacaacuacaugaggaa

SEQ ID NO: 2475070 - RNA, 19 nt, Homo sapiens
  misc_RNA (1)...(19): siRNA sense strand
cuacaugaggaaugaaauu

SEQ ID NO: 2475071 - RNA, 19 nt, Homo sapiens
  misc_RNA (1)...(19): siRNA sense strand
gaagaagguacauggaaca

SEQ ID NO: 2475072 - RNA, 19 nt, Homo sapiens
  misc_RNA (1)...(19): siRNA sense strand
gagcaauauauggaagaaa

SEQ ID NO: 2475073 - RNA, 19 nt, Homo sapiens
  misc_RNA (1)...(19): siRNA sense strand
uggaggagcuggagaagca

SEQ ID NO: 2475074 - RNA, 19 nt, Homo sapiens
  misc_RNA (1)...(19): siRNA sense strand
uggcugaacucguggcaga

SEQ ID NO: 2475075 - RNA, 19 nt, Homo sapiens
  misc_RNA (1)...(19): siRNA sense strand
aggacaugcuagcagguua

SEQ ID NO: 2475076 - RNA, 19 nt, Homo sapiens
  misc_RNA (1)...(19): siRNA sense strand
gcuccaugguuccaggaua

SEQ ID NO: 2475077 - RNA, 19 nt, Homo sapiens
  misc_RNA (1)...(19): siRNA sense strand
uggaagaaaucaggaggaa

SEQ ID NO: 2475078 - RNA, 19 nt, Homo sapiens
  misc_RNA (1)...(19): siRNA sense strand
uaguuuagccagugaguuu

SEQ ID NO: 2475079 - RNA, 19 nt, Homo sapiens
  misc_RNA (1)...(19): siRNA sense strand
cugaguuaccuguggacaa

SEQ ID NO: 2475080 - RNA, 19 nt, Homo sapiens
  misc_RNA (1)...(19): siRNA sense strand
ccuacugugugaaagaaua

SEQ ID NO: 2475081 - RNA, 19 nt, Homo sapiens
  misc_RNA (1)...(19): siRNA sense strand
ccucugaacuuuugaagaa

SEQ ID NO: 2475082 - RNA, 19 nt, Homo sapiens
  misc_RNA (1)...(19): siRNA sense strand
gcauucagcaacaggaaau

SEQ ID NO: 2475083 - RNA, 19 nt, Homo sapiens
  misc_RNA (1)...(19): siRNA sense strand
gagccguauuggaggugua

SEQ ID NO: 2475084 - RNA, 19 nt, Homo sapiens
  misc_RNA (1)...(19): siRNA sense strand
aaacaagagaugaccgauu

SEQ ID NO: 2475085 - RNA, 19 nt, Homo sapiens
  misc_RNA (1)...(19): siRNA sense strand
uggaugcagcagagaguua

SEQ ID NO: 2475086 - RNA, 19 nt, Homo sapiens
  misc_RNA (1)...(19): siRNA sense strand
gaccagugauccaggaaga

SEQ ID NO: 2475087 - RNA, 19 nt, Homo sapiens
  misc_RNA (1)...(19): siRNA sense strand
ggaacagcauucagcaaca

SEQ ID NO: 2475088 - RNA, 19 nt, Homo sapiens
  misc_RNA (1)...(19): siRNA sense strand
uggacaacuugguuauuaa

SEQ ID NO: 2475089 - RNA, 19 nt, Homo sapiens
  misc_RNA (1)...(19): siRNA sense strand
ccucgauguugcagugauu

SEQ ID NO: 2475090 - RNA, 19 nt, Homo sapiens
  misc_RNA (1)...(19): siRNA sense strand
ugguugaagcagugaaaca

SEQ ID NO: 2475091 - RNA, 19 nt, Homo sapiens
  misc_RNA (1)...(19): siRNA sense strand
agaauagauuggauuggaa

SEQ ID NO: 2475092 - RNA, 19 nt, Homo sapiens
  misc_RNA (1)...(19): siRNA sense strand
cuucaagucuggauaguca

SEQ ID NO: 2475093 - RNA, 19 nt, Homo sapiens
  misc_RNA (1)...(19): siRNA sense strand
uggaagaauuuaagcagca

SEQ ID NO: 2475094 - RNA, 19 nt, Homo sapiens
  misc_RNA (1)...(19): siRNA sense strand
acauaaugcaugggcaaua

SEQ ID NO: 2475095 - RNA, 19 nt, Homo sapiens
  misc_RNA (1)...(19): siRNA sense strand
caggaaaugcagacccuaa

SEQ ID NO: 2475096 - RNA, 19 nt, Homo sapiens
  misc_RNA (1)...(19): siRNA sense strand
ggaugauggcugugugcau

SEQ ID NO: 2475097 - RNA, 19 nt, Homo sapiens
  misc_RNA (1)...(19): siRNA sense strand
caugaagcaaguagaguau

SEQ ID NO: 2475098 - RNA, 19 nt, Homo sapiens
  misc_RNA (1)...(19): siRNA sense strand
guggaaaggaugggcuaua

SEQ ID NO: 2475099 - RNA, 19 nt, Homo sapiens
  misc_RNA (1)...(19): siRNA sense strand
acaaacaggaccauagaau

SEQ ID NO: 2475100 - RNA, 19 nt, Homo sapiens
  misc_RNA (1)...(19): siRNA sense strand
cuacaagugcagaaaugaa

SEQ ID NO: 2475101 - RNA, 19 nt, Homo sapiens
  misc_RNA (1)...(19): siRNA sense strand
ccaucaaggugucggcgga

SEQ ID NO: 2475102 - RNA, 19 nt, Homo sapiens
  misc_RNA (1)...(19): siRNA sense strand
gggaauaugaggagguaga

SEQ ID NO: 2475103 - RNA, 19 nt, Homo sapiens
  misc_RNA (1)...(19): siRNA sense strand
uugaagaugcagugagaaa

SEQ ID NO: 2475104 - RNA, 19 nt, Homo sapiens
  misc_RNA (1)...(19): siRNA sense strand
gaauauaugcagugguaca

SEQ ID NO: 2475105 - RNA, 19 nt, Homo sapiens
  misc_RNA (1)...(19): siRNA sense strand
cuguagaggucgaguuaga

SEQ ID NO: 2475106 - RNA, 19 nt, Homo sapiens
  misc_RNA (1)...(19): siRNA sense strand
cuacaaaucuuaaugguga

SEQ ID NO: 2475107 - RNA, 19 nt, Homo sapiens
  misc_RNA (1)...(19): siRNA sense strand
uuucaggaguggagcuaaa

SEQ ID NO: 2475108 - RNA, 19 nt, Homo sapiens
  misc_RNA (1)...(19): siRNA sense strand
cauaaagagacaagaggau

SEQ ID NO: 2475109 - RNA, 19 nt, Homo sapiens
  misc_RNA (1)...(19): siRNA sense strand
cuucaagaacaaucagaaa

SEQ ID NO: 2475110 - RNA, 19 nt, Homo sapiens
  misc_RNA (1)...(19): siRNA sense strand
aggucgaguuagaggccaa

SEQ ID NO: 2475111 - RNA, 19 nt, Homo sapiens
  misc_RNA (1)...(19): siRNA sense strand
acgaaaagauaguggaguu

SEQ ID NO: 2475112 - RNA, 19 nt, Homo sapiens
  misc_RNA (1)...(19): siRNA sense strand
gaaacagaagcuugggaau

SEQ ID NO: 2475113 - RNA, 19 nt, Homo sapiens
  misc_RNA (1)...(19): siRNA sense strand
ggauauuagaccugcuauu

SEQ ID NO: 2475114 - RNA, 19 nt, Homo sapiens
  misc_RNA (1)...(19): siRNA sense strand
uugaaaugauggagaagga

SEQ ID NO: 2475115 - RNA, 19 nt, Homo sapiens
  misc_RNA (1)...(19): siRNA sense strand
aguuagaggccaagagcca

SEQ ID NO: 2475116 - RNA, 19 nt, Homo sapiens
  misc_RNA (1)...(19): siRNA sense strand
uugaugaugccuugggaaa

SEQ ID NO: 2475117 - RNA, 19 nt, Homo sapiens
  misc_RNA (1)...(19): siRNA sense strand
uggcaaucaugcugaaaga

SEQ ID NO: 2475118 - RNA, 19 nt, Homo sapiens
  misc_RNA (1)...(19): siRNA sense strand
ucagaguagaggagaguuu

SEQ ID NO: 2475119 - RNA, 19 nt, Homo sapiens
  misc_RNA (1)...(19): siRNA sense strand
ccauauuagcagacuggaa

SEQ ID NO: 2475120 - RNA, 19 nt, Homo sapiens
  misc_RNA (1)...(19): siRNA sense strand
ggauaagagcuguccuaga

SEQ ID NO: 2475121 - RNA, 19 nt, Homo sapiens
  misc_RNA (1)...(19): siRNA sense strand
caaucaugcugaaagaaaa

SEQ ID NO: 2475122 - RNA, 19 nt, Homo sapiens
  misc_RNA (1)...(19): siRNA sense strand
cuuccuuauccaagaauua

SEQ ID NO: 2475123 - RNA, 19 nt, Homo sapiens
  misc_RNA (1)...(19): siRNA sense strand
gugcauauccacaaaccaa

SEQ ID NO: 2475124 - RNA, 19 nt, Homo sapiens
  misc_RNA (1)...(19): siRNA sense strand
ccagaagcucggacaggaa

SEQ ID NO: 2475125 - RNA, 19 nt, Homo sapiens
  misc_RNA (1)...(19): siRNA sense strand
auuugaagaugcagugaga

SEQ ID NO: 2475126 - RNA, 19 nt, Homo sapiens
  misc_RNA (1)...(19): siRNA sense strand
uggaguuggagcagggauu

SEQ ID NO: 2475127 - RNA, 19 nt, Homo sapiens
  misc_RNA (1)...(19): siRNA sense strand
uggaaagauuuaacacaca

SEQ ID NO: 2475128 - RNA, 19 nt, Homo sapiens
  misc_RNA (1)...(19): siRNA sense strand
cguaucagucuuugaaaca

SEQ ID NO: 2475129 - RNA, 19 nt, Homo sapiens
  misc_RNA (1)...(19): siRNA sense strand
acaggaacugagacagaua

SEQ ID NO: 2475130 - RNA, 19 nt, Homo sapiens
  misc_RNA (1)...(19): siRNA sense strand
cagcaaagaaggaaguauc

SEQ ID NO: 2475131 - RNA, 19 nt, Homo sapiens
  misc_RNA (1)...(19): siRNA sense strand
agaacacaaccucggaaua

SEQ ID NO: 2475132 - RNA, 19 nt, Homo sapiens
  misc_RNA (1)...(19): siRNA sense strand
gcaggugauggaaaggaua

SEQ ID NO: 2475133 - RNA, 19 nt, Homo sapiens
  misc_RNA (1)...(19): siRNA sense strand
guggauaagagcuguccua

SEQ ID NO: 2475134 - RNA, 19 nt, Homo sapiens
  misc_RNA (1)...(19): siRNA sense strand
cugaagauggguugagguu

SEQ ID NO: 2475135 - RNA, 19 nt, Homo sapiens
  misc_RNA (1)...(19): siRNA sense strand
gggaaucaaguacuggaaa

SEQ ID NO: 2475136 - RNA, 19 nt, Homo sapiens
  misc_RNA (1)...(19): siRNA sense strand
aaaugauggagaaggauga

SEQ ID NO: 2475137 - RNA, 19 nt, Homo sapiens
  misc_RNA (1)...(19): siRNA sense strand
agaaacagaagcuugggaa

SEQ ID NO: 2475138 - RNA, 19 nt, Homo sapiens
  misc_RNA (1)...(19): siRNA sense strand
ggauguucguacuggaagu

SEQ ID NO: 2475139 - RNA, 19 nt, Homo sapiens
  misc_RNA (1)...(19): siRNA sense strand
cugucuaaacauaaagaga

SEQ ID NO: 2475140 - RNA, 19 nt, Homo sapiens
  misc_RNA (1)...(19): siRNA sense strand
ucuuaauggugaauguaca

SEQ ID NO: 2475141 - RNA, 19 nt, Homo sapiens
  misc_RNA (1)...(19): siRNA sense strand
cagacuggaaugaagauau

SEQ ID NO: 2475142 - RNA, 19 nt, Homo sapiens
  misc_RNA (1)...(19): siRNA sense strand
agcaacaauauuugaggaa

SEQ ID NO: 2475143 - RNA, 19 nt, Homo sapiens
  misc_RNA (1)...(19): siRNA sense strand
caaugguuguucagagcuu

SEQ ID NO: 2475144 - RNA, 19 nt, Homo sapiens
  misc_RNA (1)...(19): siRNA sense strand
cuaaagaauuugaagaugc

SEQ ID NO: 2475145 - RNA, 19 nt, Homo sapiens
  misc_RNA (1)...(19): siRNA sense strand
cauuguaugcucaaaguau

SEQ ID NO: 2475146 - RNA, 19 nt, Homo sapiens
  misc_RNA (1)...(19): siRNA sense strand
ccagauggcaggugaugga

SEQ ID NO: 2475147 - RNA, 19 nt, Homo sapiens
  misc_RNA (1)...(19): siRNA sense strand
auucacaggagcaacaaua

SEQ ID NO: 2475148 - RNA, 19 nt, Homo sapiens
  misc_RNA (1)...(19): siRNA sense strand
ccagaaaagcucuugauuu

SEQ ID NO: 2475149 - RNA, 19 nt, Homo sapiens
  misc_RNA (1)...(19): siRNA sense strand
cuggagauuggguacgaaa

SEQ ID NO: 2475150 - RNA, 19 nt, Homo sapiens
  misc_RNA (1)...(19): siRNA sense strand
agauaguggaguuggagca

SEQ ID NO: 2475151 - RNA, 19 nt, Homo sapiens
  misc_RNA (1)...(19): siRNA sense strand
gaggggagcagcagugaua

SEQ ID NO: 2475152 - RNA, 19 nt, Homo sapiens
  misc_RNA (1)...(19): siRNA sense strand
gaacagacuucuaauccca

SEQ ID NO: 2475153 - RNA, 19 nt, Homo sapiens
  misc_RNA (1)...(19): siRNA sense strand
gcuucaagaacaaucagaa

SEQ ID NO: 2475154 - RNA, 19 nt, Homo sapiens
  misc_RNA (1)...(19): siRNA sense strand
gaaucagaguggugaacag

SEQ ID NO: 2475155 - RNA, 19 nt, Homo sapiens
  misc_RNA (1)...(19): siRNA sense strand
ccaugagacuacaaaucuu

SEQ ID NO: 2475156 - RNA, 19 nt, Homo sapiens
  misc_RNA (1)...(19): siRNA sense strand
caggcuugcagguguuaaa

SEQ ID NO: 2475157 - RNA, 19 nt, Homo sapiens
  misc_RNA (1)...(19): siRNA sense strand
caugaggacagaauggauu

SEQ ID NO: 2475158 - RNA, 19 nt, Homo sapiens
  misc_RNA (1)...(19): siRNA sense strand
aguauugacugcuggacca

SEQ ID NO: 2475159 - RNA, 19 nt, Homo sapiens
  misc_RNA (1)...(19): siRNA sense strand
gaggauagccggacccgua

SEQ ID NO: 2475160 - RNA, 19 nt, Homo sapiens
  misc_RNA (1)...(19): siRNA sense strand
ggaacgugaucgaggcuug

SEQ ID NO: 2475161 - RNA, 19 nt, Homo sapiens
  misc_RNA (1)...(19): siRNA sense strand
caccagaucaugagggacu

SEQ ID NO: 2475162 - RNA, 19 nt, Homo sapiens
  misc_RNA (1)...(19): siRNA sense strand
aggucaacgugcaggguac

SEQ ID NO: 2475163 - RNA, 19 nt, Homo sapiens
  misc_RNA (1)...(19): siRNA sense strand
gugaaggccaccagaucau

SEQ ID NO: 2475164 - RNA, 19 nt, Homo sapiens
  misc_RNA (1)...(19): siRNA sense strand
ccacgggcaucuacgguga

SEQ ID NO: 2475165 - RNA, 19 nt, Homo sapiens
  misc_RNA (1)...(19): siRNA sense strand
acaggagcuaugaggauuu

SEQ ID NO: 2475166 - RNA, 19 nt, Homo sapiens
  misc_RNA (1)...(19): siRNA sense strand
aaacaauaguagugggcaa

SEQ ID NO: 2475167 - RNA, 19 nt, Homo sapiens
  misc_RNA (1)...(19): siRNA sense strand
gagcaaugacaaugcgaaa

SEQ ID NO: 2475168 - RNA, 19 nt, Homo sapiens
  misc_RNA (1)...(19): siRNA sense strand
acucauaaguggaugguau

SEQ ID NO: 2475169 - RNA, 19 nt, Homo sapiens
  misc_RNA (1)...(19): siRNA sense strand
caaacaaacacaugggaau

SEQ ID NO: 2475170 - RNA, 19 nt, Homo sapiens
  misc_RNA (1)...(19): siRNA sense strand
ccgaaauacuggaagggau

SEQ ID NO: 2475171 - RNA, 19 nt, Homo sapiens
  misc_RNA (1)...(19): siRNA sense strand
ggaagagaaacaagaggaa

SEQ ID NO: 2475172 - RNA, 19 nt, Homo sapiens
  misc_RNA (1)...(19): siRNA sense strand
gcugaguggcaaagagcaa

SEQ ID NO: 2475173 - RNA, 19 nt, Homo sapiens
  misc_RNA (1)...(19): siRNA sense strand
gggucagacagcagugaaa

SEQ ID NO: 2475174 - RNA, 19 nt, Homo sapiens
  misc_RNA (1)...(19): siRNA sense strand
aggaggaggaggaggaaca

SEQ ID NO: 2475175 - RNA, 19 nt, Homo sapiens
  misc_RNA (1)...(19): siRNA sense strand
ucaagaaggagcaggaaga

SEQ ID NO: 2475176 - RNA, 19 nt, Homo sapiens
  misc_RNA (1)...(19): siRNA sense strand
cuacagaacagcuggugaa

SEQ ID NO: 2475177 - RNA, 19 nt, Homo sapiens
  misc_RNA (1)...(19): siRNA sense strand
gagcagagaccaagccgaa

SEQ ID NO: 2475178 - RNA, 19 nt, Homo sapiens
  misc_RNA (1)...(19): siRNA sense strand
ggauaagagggaagaaaau

SEQ ID NO: 2475179 - RNA, 19 nt, Homo sapiens
  misc_RNA (1)...(19): siRNA sense strand
cguagagaacccagcauua

SEQ ID NO: 2475180 - RNA, 19 nt, Homo sapiens
  misc_RNA (1)...(19): siRNA sense strand
agaaggagcaggaagagaa

SEQ ID NO: 2475181 - RNA, 19 nt, Homo sapiens
  misc_RNA (1)...(19): siRNA sense strand
cgucagaguucaaguucau

SEQ ID NO: 2475182 - RNA, 19 nt, Homo sapiens
  misc_RNA (1)...(19): siRNA sense strand
gaauauugaaugaggacca

SEQ ID NO: 2475183 - RNA, 19 nt, Homo sapiens
  misc_RNA (1)...(19): siRNA sense strand
cggauaagagggaagaaaa

SEQ ID NO: 2475184 - RNA, 19 nt, Homo sapiens
  misc_RNA (1)...(19): siRNA sense strand
cugcaaagucuguggagca

SEQ ID NO: 2475185 - RNA, 19 nt, Homo sapiens
  misc_RNA (1)...(19): siRNA sense strand
gcacugaagcugaacgaca

SEQ ID NO: 2475186 - RNA, 19 nt, Homo sapiens
  misc_RNA (1)...(19): siRNA sense strand
cugcaguaguaaagaagau

SEQ ID NO: 2475187 - RNA, 19 nt, Homo sapiens
  misc_RNA (1)...(19): siRNA sense strand
agaaacaagaggaagucaa

SEQ ID NO: 2475188 - RNA, 19 nt, Homo sapiens
  misc_RNA (1)...(19): siRNA sense strand
aagcgaaccaucaaagaaa

SEQ ID NO: 2475189 - RNA, 19 nt, Homo sapiens
  misc_RNA (1)...(19): siRNA sense strand
ccggauaagagggaagaaa

SEQ ID NO: 2475190 - RNA, 19 nt, Homo sapiens
  misc_RNA (1)...(19): siRNA sense strand
uggcaaagagcaaugacaa

SEQ ID NO: 2475191 - RNA, 19 nt, Homo sapiens
  misc_RNA (1)...(19): siRNA sense strand
cagugaagauaaacaucaa

SEQ ID NO: 2475192 - RNA, 19 nt, Homo sapiens
  misc_RNA (1)...(19): siRNA sense strand
ggcaaagagcaaugacaau

SEQ ID NO: 2475193 - RNA, 19 nt, Homo sapiens
  misc_RNA (1)...(19): siRNA sense strand
aagagaaacaagaggaagu

SEQ ID NO: 2475194 - RNA, 19 nt, Homo sapiens
  misc_RNA (1)...(19): siRNA sense strand
gcgacugauugaagcaaga

SEQ ID NO: 2475195 - RNA, 19 nt, Homo sapiens
  misc_RNA (1)...(19): siRNA sense strand
aguauauaccuccggauaa

SEQ ID NO: 2475196 - RNA, 19 nt, Homo sapiens
  misc_RNA (1)...(19): siRNA sense strand
aggcuuuggcaguuggaua

SEQ ID NO: 2475197 - RNA, 19 nt, Homo sapiens
  misc_RNA (1)...(19): siRNA sense strand
caggauucccaaagaaauu

SEQ ID NO: 2475198 - RNA, 19 nt, Homo sapiens
  misc_RNA (1)...(19): siRNA sense strand
cagcacaggaggaggagga

SEQ ID NO: 2475199 - RNA, 19 nt, Homo sapiens
  misc_RNA (1)...(19): siRNA sense strand
ccugagagccugaggaaug

SEQ ID NO: 2475200 - RNA, 19 nt, Homo sapiens
  misc_RNA (1)...(19): siRNA sense strand
cuuccaaauaagcggcaua

SEQ ID NO: 2475201 - RNA, 19 nt, Homo sapiens
  misc_RNA (1)...(19): siRNA sense strand
aggaacagcaggaggagga

SEQ ID NO: 2475202 - RNA, 19 nt, Homo sapiens
  misc_RNA (1)...(19): siRNA sense strand
ggucagugguccaaggaac

SEQ ID NO: 2475203 - RNA, 19 nt, Homo sapiens
  misc_RNA (1)...(19): siRNA sense strand
caaucagagagcagaaaca

SEQ ID NO: 2475204 - RNA, 19 nt, Homo sapiens
  misc_RNA (1)...(19): siRNA sense strand
acuacaucccagaaaguua

SEQ ID NO: 2475205 - RNA, 19 nt, Homo sapiens
  misc_RNA (1)...(19): siRNA sense strand
aggagcaggaagagaaaca

SEQ ID NO: 2475206 - RNA, 19 nt, Homo sapiens
  misc_RNA (1)...(19): siRNA sense strand
cggcauaaagcaauugaga

SEQ ID NO: 2475207 - RNA, 19 nt, Homo sapiens
  misc_RNA (1)...(19): siRNA sense strand
aggaggaggaggaggagga

SEQ ID NO: 2475208 - RNA, 19 nt, Homo sapiens
  misc_RNA (1)...(19): siRNA sense strand
aggaggaggaggaggagga

SEQ ID NO: 2475209 - RNA, 19 nt, Homo sapiens
  misc_RNA (1)...(19): siRNA sense strand
aggaggaggaggaggagga

SEQ ID NO: 2475210 - RNA, 19 nt, Homo sapiens
  misc_RNA (1)...(19): siRNA sense strand
ugggaaacuaugucauuaa

SEQ ID NO: 2475211 - RNA, 19 nt, Homo sapiens
  misc_RNA (1)...(19): siRNA sense strand
accuauaacaggaggacuu

SEQ ID NO: 2475212 - RNA, 19 nt, Homo sapiens
  misc_RNA (1)...(19): siRNA sense strand
gcagagaccaagccgaaau

SEQ ID NO: 2475213 - RNA, 19 nt, Homo sapiens
  misc_RNA (1)...(19): siRNA sense strand
aaguauauaccuccggaua

SEQ ID NO: 2475214 - RNA, 19 nt, Homo sapiens
  misc_RNA (1)...(19): siRNA sense strand
cuauaaaccaaaugaccuu

SEQ ID NO: 2475215 - RNA, 19 nt, Homo sapiens
  misc_RNA (1)...(19): siRNA sense strand
agaacaagcggauagauau

SEQ ID NO: 2475216 - RNA, 19 nt, Homo sapiens
  misc_RNA (1)...(19): siRNA sense strand
caacaaacgcuaaaaguca

SEQ ID NO: 2475217 - RNA, 19 nt, Homo sapiens
  misc_RNA (1)...(19): siRNA sense strand
gugaagacugaaccagaaa

SEQ ID NO: 2475218 - RNA, 19 nt, Homo sapiens
  misc_RNA (1)...(19): siRNA sense strand
agaaugaggaggaggugga

SEQ ID NO: 2475219 - RNA, 19 nt, Homo sapiens
  misc_RNA (1)...(19): siRNA sense strand
gaaaugaagaauaaggaac

SEQ ID NO: 2475220 - RNA, 19 nt, Homo sapiens
  misc_RNA (1)...(19): siRNA sense strand
agcaagaacccuucaggaa

SEQ ID NO: 2475221 - RNA, 19 nt, Homo sapiens
  misc_RNA (1)...(19): siRNA sense strand
gagaguagcaggagggguu

SEQ ID NO: 2475222 - RNA, 19 nt, Homo sapiens
  misc_RNA (1)...(19): siRNA sense strand
uugcaaaagugaagacuga

SEQ ID NO: 2475223 - RNA, 19 nt, Homo sapiens
  misc_RNA (1)...(19): siRNA sense strand
ccgagccagugaagauaaa

SEQ ID NO: 2475224 - RNA, 19 nt, Homo sapiens
  misc_RNA (1)...(19): siRNA sense strand
acacaugggaauauugaau

SEQ ID NO: 2475225 - RNA, 19 nt, Homo sapiens
  misc_RNA (1)...(19): siRNA sense strand
ggcauaaagcaauugagaa

SEQ ID NO: 2475226 - RNA, 19 nt, Homo sapiens
  misc_RNA (1)...(19): siRNA sense strand
gcucaaaccacucagcgua

SEQ ID NO: 2475227 - RNA, 19 nt, Homo sapiens
  misc_RNA (1)...(19): siRNA sense strand
agugaagacugaaccagaa

SEQ ID NO: 2475228 - RNA, 19 nt, Homo sapiens
  misc_RNA (1)...(19): siRNA sense strand
guuugauucccgagagauu

SEQ ID NO: 2475229 - RNA, 19 nt, Homo sapiens
  misc_RNA (1)...(19): siRNA sense strand
auguaaugaaguuggccua

SEQ ID NO: 2475230 - RNA, 19 nt, Homo sapiens
  misc_RNA (1)...(19): siRNA sense strand
cuuuggaaccuguguguca

SEQ ID NO: 2475231 - RNA, 19 nt, Homo sapiens
  misc_RNA (1)...(19): siRNA sense strand
ccaaugugguauauggucu

SEQ ID NO: 2475232 - RNA, 19 nt, Homo sapiens
  misc_RNA (1)...(19): siRNA sense strand
augcagacacuuugcccaa

SEQ ID NO: 2475233 - RNA, 19 nt, Homo sapiens
  misc_RNA (1)...(19): siRNA sense strand
gagaacugcuggaaggaga

SEQ ID NO: 2475234 - RNA, 19 nt, Homo sapiens
  misc_RNA (1)...(19): siRNA sense strand
agugauaaagaguggaaga

SEQ ID NO: 2475235 - RNA, 19 nt, Homo sapiens
  misc_RNA (1)...(19): siRNA sense strand
ugaaaguaaagaaggaaca

SEQ ID NO: 2475236 - RNA, 19 nt, Homo sapiens
  misc_RNA (1)...(19): siRNA sense strand
guaugauauuuguggcaga

SEQ ID NO: 2475237 - RNA, 19 nt, Homo sapiens
  misc_RNA (1)...(19): siRNA sense strand
aggacugaguggacgguuu

SEQ ID NO: 2475238 - RNA, 19 nt, Homo sapiens
  misc_RNA (1)...(19): siRNA sense strand
cuucaaccggaaugggaaa

SEQ ID NO: 2475239 - RNA, 19 nt, Homo sapiens
  misc_RNA (1)...(19): siRNA sense strand
aggaacaagaggcggauga

SEQ ID NO: 2475240 - RNA, 19 nt, Homo sapiens
  misc_RNA (1)...(19): siRNA sense strand
ggagagaacugcuggaagg

SEQ ID NO: 2475241 - RNA, 19 nt, Homo sapiens
  misc_RNA (1)...(19): siRNA sense strand
agauguuucagaagaagaa

SEQ ID NO: 2475242 - RNA, 19 nt, Homo sapiens
  misc_RNA (1)...(19): siRNA sense strand
aguaaagaaggaacaaaca

SEQ ID NO: 2475243 - RNA, 19 nt, Homo sapiens
  misc_RNA (1)...(19): siRNA sense strand
agcugaaaguaaagaagga

SEQ ID NO: 2475244 - RNA, 19 nt, Homo sapiens
  misc_RNA (1)...(19): siRNA sense strand
ccaucauuggccacagaua

SEQ ID NO: 2475245 - RNA, 19 nt, Homo sapiens
  misc_RNA (1)...(19): siRNA sense strand
cagcuaucuauguggauca

SEQ ID NO: 2475246 - RNA, 19 nt, Homo sapiens
  misc_RNA (1)...(19): siRNA sense strand
aggaggaacaagaggcgga

SEQ ID NO: 2475247 - RNA, 19 nt, Homo sapiens
  misc_RNA (1)...(19): siRNA sense strand
gcugaaaguaaagaaggaa

SEQ ID NO: 2475248 - RNA, 19 nt, Homo sapiens
  misc_RNA (1)...(19): siRNA sense strand
aaguaaagaaggaacaaac

SEQ ID NO: 2475249 - RNA, 19 nt, Homo sapiens
  misc_RNA (1)...(19): siRNA sense strand
cggacgagaacuggagaga

SEQ ID NO: 2475250 - RNA, 19 nt, Homo sapiens
  misc_RNA (1)...(19): siRNA sense strand
cagcugaacucuacaggca

SEQ ID NO: 2475251 - RNA, 19 nt, Homo sapiens
  misc_RNA (1)...(19): siRNA sense strand
ccgcaaugcccugggucaa

SEQ ID NO: 2475252 - RNA, 19 nt, Homo sapiens
  misc_RNA (1)...(19): siRNA sense strand
aggcugagagugaagagaa

SEQ ID NO: 2475253 - RNA, 19 nt, Homo sapiens
  misc_RNA (1)...(19): siRNA sense strand
cugagagugaagagaauga

SEQ ID NO: 2475254 - RNA, 19 nt, Homo sapiens
  misc_RNA (1)...(19): siRNA sense strand
gcugugaaguguuugccua

SEQ ID NO: 2475255 - RNA, 19 nt, Homo sapiens
  misc_RNA (1)...(19): siRNA sense strand
caagaagaguggagggcug

SEQ ID NO: 2475256 - RNA, 19 nt, Homo sapiens
  misc_RNA (1)...(19): siRNA sense strand
ccuaaucacuaaaaggcaa

SEQ ID NO: 2475257 - RNA, 19 nt, Homo sapiens
  misc_RNA (1)...(19): siRNA sense strand
cggaaguggucaagcagag

SEQ ID NO: 2475258 - RNA, 19 nt, Homo sapiens
  misc_RNA (1)...(19): siRNA sense strand
agaggaugcagauguacaa

SEQ ID NO: 2475259 - RNA, 19 nt, Homo sapiens
  misc_RNA (1)...(19): siRNA sense strand
ccacuggacguuugcaaaa

SEQ ID NO: 2475260 - RNA, 19 nt, Homo sapiens
  misc_RNA (1)...(19): siRNA sense strand
ccaaggaggugauggugga

SEQ ID NO: 2475261 - RNA, 19 nt, Homo sapiens
  misc_RNA (1)...(19): siRNA sense strand
gaaacaagauugaccucga

SEQ ID NO: 2475262 - RNA, 19 nt, Homo sapiens
  misc_RNA (1)...(19): siRNA sense strand
agguuaucauccugggaga

SEQ ID NO: 2475263 - RNA, 19 nt, Homo sapiens
  misc_RNA (1)...(19): siRNA sense strand
cggagguggagcuguacaa

SEQ ID NO: 2475264 - RNA, 19 nt, Homo sapiens
  misc_RNA (1)...(19): siRNA sense strand
ggaaugcacuuaagcagga

SEQ ID NO: 2475265 - RNA, 19 nt, Homo sapiens
  misc_RNA (1)...(19): siRNA sense strand
aggaagaaaguguugcuga

SEQ ID NO: 2475266 - RNA, 19 nt, Homo sapiens
  misc_RNA (1)...(19): siRNA sense strand
gugccaaggaggccaucaa

SEQ ID NO: 2475267 - RNA, 19 nt, Homo sapiens
  misc_RNA (1)...(19): siRNA sense strand
cagcaggacaggaacgguu

SEQ ID NO: 2475268 - RNA, 19 nt, Homo sapiens
  misc_RNA (1)...(19): siRNA sense strand
ccacaauaggagcugacuu

SEQ ID NO: 2475269 - RNA, 19 nt, Homo sapiens
  misc_RNA (1)...(19): siRNA sense strand
acacagagcccgaggagga

SEQ ID NO: 2475270 - RNA, 19 nt, Homo sapiens
  misc_RNA (1)...(19): siRNA sense strand
ggaccauugggaagggcaa

SEQ ID NO: 2475271 - RNA, 19 nt, Homo sapiens
  misc_RNA (1)...(19): siRNA sense strand
uugccaaaugggaaagaaa

SEQ ID NO: 2475272 - RNA, 19 nt, Homo sapiens
  misc_RNA (1)...(19): siRNA sense strand
cggagcuguuucagggcaa

SEQ ID NO: 2475273 - RNA, 19 nt, Homo sapiens
  misc_RNA (1)...(19): siRNA sense strand
aggcggagcugaaggagga

SEQ ID NO: 2475274 - RNA, 19 nt, Homo sapiens
  misc_RNA (1)...(19): siRNA sense strand
acgcuguacucucgagcaa

SEQ ID NO: 2475275 - RNA, 19 nt, Homo sapiens
  misc_RNA (1)...(19): siRNA sense strand
augaaagacaaauggauca

SEQ ID NO: 2475276 - RNA, 19 nt, Homo sapiens
  misc_RNA (1)...(19): siRNA sense strand
ggugaggaguugaagccau

SEQ ID NO: 2475277 - RNA, 19 nt, Homo sapiens
  misc_RNA (1)...(19): siRNA sense strand
gggaagaaaucaaagaguc

SEQ ID NO: 2475278 - RNA, 19 nt, Homo sapiens
  misc_RNA (1)...(19): siRNA sense strand
gaaggaagcucgagccaag

SEQ ID NO: 2475279 - RNA, 19 nt, Homo sapiens
  misc_RNA (1)...(19): siRNA sense strand
gcgaguacucagagggaag

SEQ ID NO: 2475280 - RNA, 19 nt, Homo sapiens
  misc_RNA (1)...(19): siRNA sense strand
uugaggugaugguggguau

SEQ ID NO: 2475281 - RNA, 19 nt, Homo sapiens
  misc_RNA (1)...(19): siRNA sense strand
agcaaaucaugaaagacaa

SEQ ID NO: 2475282 - RNA, 19 nt, Homo sapiens
  misc_RNA (1)...(19): siRNA sense strand
ccuugggaucaaacggaaa

SEQ ID NO: 2475283 - RNA, 19 nt, Homo sapiens
  misc_RNA (1)...(19): siRNA sense strand
ggaagaaaucaaagagucc

SEQ ID NO: 2475284 - RNA, 19 nt, Homo sapiens
  misc_RNA (1)...(19): siRNA sense strand
aguugaagccauacacaga

SEQ ID NO: 2475285 - RNA, 19 nt, Homo sapiens
  misc_RNA (1)...(19): siRNA sense strand
acacacgggaagaaaucaa

SEQ ID NO: 2475286 - RNA, 19 nt, Homo sapiens
  misc_RNA (1)...(19): siRNA sense strand
augaugacccgcagaaaca

SEQ ID NO: 2475287 - RNA, 19 nt, Homo sapiens
  misc_RNA (1)...(19): siRNA sense strand
acuguugccaaaugggaaa

SEQ ID NO: 2475288 - RNA, 19 nt, Homo sapiens
  misc_RNA (1)...(19): siRNA sense strand
agaucaggucgcagacgaa

SEQ ID NO: 2475289 - RNA, 19 nt, Homo sapiens
  misc_RNA (1)...(19): siRNA sense strand
gcaugaaggagaaggaagc

SEQ ID NO: 2475290 - RNA, 19 nt, Homo sapiens
  misc_RNA (1)...(19): siRNA sense strand
ugaaagacaaauggaucaa

SEQ ID NO: 2475291 - RNA, 19 nt, Homo sapiens
  misc_RNA (1)...(19): siRNA sense strand
gcugaggaccauugggaag

SEQ ID NO: 2475292 - RNA, 19 nt, Homo sapiens
  misc_RNA (1)...(19): siRNA sense strand
caugaaagacaaauggauc

SEQ ID NO: 2475293 - RNA, 19 nt, Homo sapiens
  misc_RNA (1)...(19): siRNA sense strand
ugaugguggguaugggcua

SEQ ID NO: 2475294 - RNA, 19 nt, Homo sapiens
  misc_RNA (1)...(19): siRNA sense strand
acacaagaaaagagagaaa

SEQ ID NO: 2475295 - RNA, 19 nt, Homo sapiens
  misc_RNA (1)...(19): siRNA sense strand
caacacaagaaaagagaga

SEQ ID NO: 2475296 - RNA, 19 nt, Homo sapiens
  misc_RNA (1)...(19): siRNA sense strand
ugaagaaaacucagcuaaa

SEQ ID NO: 2475297 - RNA, 19 nt, Homo sapiens
  misc_RNA (1)...(19): siRNA sense strand
ccgaaucaacacaagaaaa

SEQ ID NO: 2475298 - RNA, 19 nt, Homo sapiens
  misc_RNA (1)...(19): siRNA sense strand
aaacuggggaugaagaaaa

SEQ ID NO: 2475299 - RNA, 19 nt, Homo sapiens
  misc_RNA (1)...(19): siRNA sense strand
uggcagugaccaagagcua

SEQ ID NO: 2475300 - RNA, 19 nt, Homo sapiens
  misc_RNA (1)...(19): siRNA sense strand
ccaacaagcaccuggccau

SEQ ID NO: 2475301 - RNA, 19 nt, Homo sapiens
  misc_RNA (1)...(19): siRNA sense strand
agccaggaccaaagggcaa

SEQ ID NO: 2475302 - RNA, 19 nt, Homo sapiens
  misc_RNA (1)...(19): siRNA sense strand
ccaucaauguggagcgcua

SEQ ID NO: 2475303 - RNA, 19 nt, Homo sapiens
  misc_RNA (1)...(19): siRNA sense strand
ccuucugaguccuggguuu

SEQ ID NO: 2475304 - RNA, 19 nt, Homo sapiens
  misc_RNA (1)...(19): siRNA sense strand
ccucugugcuggugggugu

SEQ ID NO: 2475305 - RNA, 19 nt, Homo sapiens
  misc_RNA (1)...(19): siRNA sense strand
ccucugaguuccuggagca

SEQ ID NO: 2475306 - RNA, 19 nt, Homo sapiens
  misc_RNA (1)...(19): siRNA sense strand
gugugugggugaaggccuu

SEQ ID NO: 2475307 - RNA, 19 nt, Homo sapiens
  misc_RNA (1)...(19): siRNA sense strand
cagcaacucaccagcgaca

SEQ ID NO: 2475308 - RNA, 19 nt, Homo sapiens
  misc_RNA (1)...(19): siRNA sense strand
caaaagaaaucaaggucaa

SEQ ID NO: 2475309 - RNA, 19 nt, Homo sapiens
  misc_RNA (1)...(19): siRNA sense strand
guucaggaagacuggauua

SEQ ID NO: 2475310 - RNA, 19 nt, Homo sapiens
  misc_RNA (1)...(19): siRNA sense strand
cgacauauuguaaacgcua

SEQ ID NO: 2475311 - RNA, 19 nt, Homo sapiens
  misc_RNA (1)...(19): siRNA sense strand
ggucaagaucuggaagcaa

SEQ ID NO: 2475312 - RNA, 19 nt, Homo sapiens
  misc_RNA (1)...(19): siRNA sense strand
gaucuggaagcaagaagaa

SEQ ID NO: 2475313 - RNA, 19 nt, Homo sapiens
  misc_RNA (1)...(19): siRNA sense strand
gcaaaagaaaucaagguca

SEQ ID NO: 2475314 - RNA, 19 nt, Homo sapiens
  misc_RNA (1)...(19): siRNA sense strand
ucuggaagcaagaagaaaa

SEQ ID NO: 2475315 - RNA, 19 nt, Homo sapiens
  misc_RNA (1)...(19): siRNA sense strand
gagcuggcaugguggaagu

SEQ ID NO: 2475316 - RNA, 19 nt, Homo sapiens
  misc_RNA (1)...(19): siRNA sense strand
gacauauuguaaacgcuaa

SEQ ID NO: 2475317 - RNA, 19 nt, Homo sapiens
  misc_RNA (1)...(19): siRNA sense strand
caaaagaaaucaaggucaa

SEQ ID NO: 2475318 - RNA, 19 nt, Homo sapiens
  misc_RNA (1)...(19): siRNA sense strand
guucaggaagacuggauua

SEQ ID NO: 2475319 - RNA, 19 nt, Homo sapiens
  misc_RNA (1)...(19): siRNA sense strand
cgacauauuguaaacgcua

SEQ ID NO: 2475320 - RNA, 19 nt, Homo sapiens
  misc_RNA (1)...(19): siRNA sense strand
ggucaagaucuggaagcaa

SEQ ID NO: 2475321 - RNA, 19 nt, Homo sapiens
  misc_RNA (1)...(19): siRNA sense strand
gaucuggaagcaagaagaa

SEQ ID NO: 2475322 - RNA, 19 nt, Homo sapiens
  misc_RNA (1)...(19): siRNA sense strand
gcaaaagaaaucaagguca

SEQ ID NO: 2475323 - RNA, 19 nt, Homo sapiens
  misc_RNA (1)...(19): siRNA sense strand
ucuggaagcaagaagaaaa

SEQ ID NO: 2475324 - RNA, 19 nt, Homo sapiens
  misc_RNA (1)...(19): siRNA sense strand
gagcuggcaugguggaagu

SEQ ID NO: 2475325 - RNA, 19 nt, Homo sapiens
  misc_RNA (1)...(19): siRNA sense strand
gacauauuguaaacgcuaa

SEQ ID NO: 2475326 - RNA, 19 nt, Homo sapiens
  misc_RNA (1)...(19): siRNA sense strand
caaaagaaaucaaggucaa

SEQ ID NO: 2475327 - RNA, 19 nt, Homo sapiens
  misc_RNA (1)...(19): siRNA sense strand
gcaagauguuaauaagaca

SEQ ID NO: 2475328 - RNA, 19 nt, Homo sapiens
  misc_RNA (1)...(19): siRNA sense strand
guucaggaagacuggauua

SEQ ID NO: 2475329 - RNA, 19 nt, Homo sapiens
  misc_RNA (1)...(19): siRNA sense strand
cgacauauuguaaacgcua

SEQ ID NO: 2475330 - RNA, 19 nt, Homo sapiens
  misc_RNA (1)...(19): siRNA sense strand
ggucaagaucuggaagcaa

SEQ ID NO: 2475331 - RNA, 19 nt, Homo sapiens
  misc_RNA (1)...(19): siRNA sense strand
gaucuggaagcaagaagaa

SEQ ID NO: 2475332 - RNA, 19 nt, Homo sapiens
  misc_RNA (1)...(19): siRNA sense strand
gcaaaagaaaucaagguca

SEQ ID NO: 2475333 - RNA, 19 nt, Homo sapiens
  misc_RNA (1)...(19): siRNA sense strand
cagcaagauguuaauaaga

SEQ ID NO: 2475334 - RNA, 19 nt, Homo sapiens
  misc_RNA (1)...(19): siRNA sense strand
ucuggaagcaagaagaaaa

SEQ ID NO: 2475335 - RNA, 19 nt, Homo sapiens
  misc_RNA (1)...(19): siRNA sense strand
gagcuggcaugguggaagu

SEQ ID NO: 2475336 - RNA, 19 nt, Homo sapiens
  misc_RNA (1)...(19): siRNA sense strand
gacauauuguaaacgcuaa

SEQ ID NO: 2475337 - RNA, 19 nt, Homo sapiens
  misc_RNA (1)...(19): siRNA sense strand
agguauaaguagcaggaua

SEQ ID NO: 2475338 - RNA, 19 nt, Homo sapiens
  misc_RNA (1)...(19): siRNA sense strand
aaaagaaacuacaggggaa

SEQ ID NO: 2475339 - RNA, 19 nt, Homo sapiens
  misc_RNA (1)...(19): siRNA sense strand
cugaaguugacgagggauu

SEQ ID NO: 2475340 - RNA, 19 nt, Homo sapiens
  misc_RNA (1)...(19): siRNA sense strand
gccacaaauuugaaagaca

SEQ ID NO: 2475341 - RNA, 19 nt, Homo sapiens
  misc_RNA (1)...(19): siRNA sense strand
agacauggaaauacagaau

SEQ ID NO: 2475342 - RNA, 19 nt, Homo sapiens
  misc_RNA (1)...(19): siRNA sense strand
gugcaaauguuaacaggga

SEQ ID NO: 2475343 - RNA, 19 nt, Homo sapiens
  misc_RNA (1)...(19): siRNA sense strand
caagaagaacugauggaga

SEQ ID NO: 2475344 - RNA, 19 nt, Homo sapiens
  misc_RNA (1)...(19): siRNA sense strand
agucacaauuguaguaaca

SEQ ID NO: 2475345 - RNA, 19 nt, Homo sapiens
  misc_RNA (1)...(19): siRNA sense strand
ccucaaagggagaugcuga

SEQ ID NO: 2475346 - RNA, 19 nt, Homo sapiens
  misc_RNA (1)...(19): siRNA sense strand
guggaaaagacauggaaau

SEQ ID NO: 2475347 - RNA, 19 nt, Homo sapiens
  misc_RNA (1)...(19): siRNA sense strand
agaauuauauccagagcca

SEQ ID NO: 2475348 - RNA, 19 nt, Homo sapiens
  misc_RNA (1)...(19): siRNA sense strand
ggaaagaaccacagacggu

SEQ ID NO: 2475349 - RNA, 19 nt, Homo sapiens
  misc_RNA (1)...(19): siRNA sense strand
uggaaaagacauggaaaua

SEQ ID NO: 2475350 - RNA, 19 nt, Homo sapiens
  misc_RNA (1)...(19): siRNA sense strand
aaucuguguuuguggauau

SEQ ID NO: 2475351 - RNA, 19 nt, Homo sapiens
  misc_RNA (1)...(19): siRNA sense strand
aauuauauccagagccauu

SEQ ID NO: 2475352 - RNA, 19 nt, Homo sapiens
  misc_RNA (1)...(19): siRNA sense strand
ccacagacggucaggagga

SEQ ID NO: 2475353 - RNA, 19 nt, Homo sapiens
  misc_RNA (1)...(19): siRNA sense strand
guuuaagacauuaccagaa

SEQ ID NO: 2475354 - RNA, 19 nt, Homo sapiens
  misc_RNA (1)...(19): siRNA sense strand
ucgacaacauguaagaaaa

SEQ ID NO: 2475355 - RNA, 19 nt, Homo sapiens
  misc_RNA (1)...(19): siRNA sense strand
agaaagggguuguggagga

SEQ ID NO: 2475356 - RNA, 19 nt, Homo sapiens
  misc_RNA (1)...(19): siRNA sense strand
agaagaacugauggagaua

SEQ ID NO: 2475357 - RNA, 19 nt, Homo sapiens
  misc_RNA (1)...(19): siRNA sense strand
aagugagaaucuugagcuu

SEQ ID NO: 2475358 - RNA, 19 nt, Homo sapiens
  misc_RNA (1)...(19): siRNA sense strand
auacagaauuaacagguca

SEQ ID NO: 2475359 - RNA, 19 nt, Homo sapiens
  misc_RNA (1)...(19): siRNA sense strand
cgacaacauguaagaaaau

SEQ ID NO: 2475360 - RNA, 19 nt, Homo sapiens
  misc_RNA (1)...(19): siRNA sense strand
ccucauccucaaagggaga

SEQ ID NO: 2475361 - RNA, 19 nt, Homo sapiens
  misc_RNA (1)...(19): siRNA sense strand
gguccauggcucugacuga

SEQ ID NO: 2475362 - RNA, 19 nt, Homo sapiens
  misc_RNA (1)...(19): siRNA sense strand
cagagagcccaaagugaga

SEQ ID NO: 2475363 - RNA, 19 nt, Homo sapiens
  misc_RNA (1)...(19): siRNA sense strand
uggauauccucgacaacau

SEQ ID NO: 2475364 - RNA, 19 nt, Homo sapiens
  misc_RNA (1)...(19): siRNA sense strand
gcuaaugcaauaaaggcuu

SEQ ID NO: 2475365 - RNA, 19 nt, Homo sapiens
  misc_RNA (1)...(19): siRNA sense strand
cucgacaacauguaagaaa

SEQ ID NO: 2475366 - RNA, 19 nt, Homo sapiens
  misc_RNA (1)...(19): siRNA sense strand
gagaaugggaucuagcuca

SEQ ID NO: 2475367 - RNA, 19 nt, Homo sapiens
  misc_RNA (1)...(19): siRNA sense strand
gggcugggacagaugccaa

SEQ ID NO: 2475368 - RNA, 19 nt, Homo sapiens
  misc_RNA (1)...(19): siRNA sense strand
ccaugaaaucuaauaagga

SEQ ID NO: 2475369 - RNA, 19 nt, Homo sapiens
  misc_RNA (1)...(19): siRNA sense strand
ccucucgaauaucaagaaa

SEQ ID NO: 2475370 - RNA, 19 nt, Homo sapiens
  misc_RNA (1)...(19): siRNA sense strand
gcagaaaugugcauagcag

SEQ ID NO: 2475371 - RNA, 19 nt, Homo sapiens
  misc_RNA (1)...(19): siRNA sense strand
gguggaaaagacauggaaa

SEQ ID NO: 2475372 - RNA, 19 nt, Homo sapiens
  misc_RNA (1)...(19): siRNA sense strand
aggaaaagaaaaugggaau

SEQ ID NO: 2475373 - RNA, 19 nt, Homo sapiens
  misc_RNA (1)...(19): siRNA sense strand
aauggaagcugaaggguga

SEQ ID NO: 2475374 - RNA, 19 nt, Homo sapiens
  misc_RNA (1)...(19): siRNA sense strand
uugaaaggaaggaguuuaa

SEQ ID NO: 2475375 - RNA, 19 nt, Homo sapiens
  misc_RNA (1)...(19): siRNA sense strand
agaaagaagcccaggcacu

SEQ ID NO: 2475376 - RNA, 19 nt, Homo sapiens
  misc_RNA (1)...(19): siRNA sense strand
acgucaaccaggacaauua

SEQ ID NO: 2475377 - RNA, 19 nt, Homo sapiens
  misc_RNA (1)...(19): siRNA sense strand
aggccaauguggagcagau

SEQ ID NO: 2475378 - RNA, 19 nt, Homo sapiens
  misc_RNA (1)...(19): siRNA sense strand
acagauuguaugaggccua

SEQ ID NO: 2475379 - RNA, 19 nt, Homo sapiens
  misc_RNA (1)...(19): siRNA sense strand
ggaaauggggagugcaaga

SEQ ID NO: 2475380 - RNA, 19 nt, Homo sapiens
  misc_RNA (1)...(19): siRNA sense strand
acaauuacaucgaugcauu

SEQ ID NO: 2475381 - RNA, 19 nt, Homo sapiens
  misc_RNA (1)...(19): siRNA sense strand
auaucaggcuucaggaaaa

SEQ ID NO: 2475382 - RNA, 19 nt, Homo sapiens
  misc_RNA (1)...(19): siRNA sense strand
ccaaguaacaaaagugcua

SEQ ID NO: 2475383 - RNA, 19 nt, Homo sapiens
  misc_RNA (1)...(19): siRNA sense strand
aggccuauguagaauggaa

SEQ ID NO: 2475384 - RNA, 19 nt, Homo sapiens
  misc_RNA (1)...(19): siRNA sense strand
gcaucuugccugugcguca

SEQ ID NO: 2475385 - RNA, 19 nt, Homo sapiens
  misc_RNA (1)...(19): siRNA sense strand
uugaacaauccaagaaaga

SEQ ID NO: 2475386 - RNA, 19 nt, Homo sapiens
  misc_RNA (1)...(19): siRNA sense strand
auucagaggaggaagcuuu

SEQ ID NO: 2475387 - RNA, 19 nt, Homo sapiens
  misc_RNA (1)...(19): siRNA sense strand
ccaaaagaugggaggcaga

SEQ ID NO: 2475388 - RNA, 19 nt, Homo sapiens
  misc_RNA (1)...(19): siRNA sense strand
gcacuaagguggcugguug

SEQ ID NO: 2475389 - RNA, 19 nt, Homo sapiens
  misc_RNA (1)...(19): siRNA sense strand
caggaaaagaaaaugggaa

SEQ ID NO: 2475390 - RNA, 19 nt, Homo sapiens
  misc_RNA (1)...(19): siRNA sense strand
gcauuugaguguauggugu

SEQ ID NO: 2475391 - RNA, 19 nt, Homo sapiens
  misc_RNA (1)...(19): siRNA sense strand
gaaaggaaggaguuuaaaa

SEQ ID NO: 2475392 - RNA, 19 nt, Homo sapiens
  misc_RNA (1)...(19): siRNA sense strand
gcaagauggacauacaaaa

SEQ ID NO: 2475393 - RNA, 19 nt, Homo sapiens
  misc_RNA (1)...(19): siRNA sense strand
ggaaaagaaaaugggaauu

SEQ ID NO: 2475394 - RNA, 19 nt, Homo sapiens
  misc_RNA (1)...(19): siRNA sense strand
uggggaaguuugaaaggaa

SEQ ID NO: 2475395 - RNA, 19 nt, Homo sapiens
  misc_RNA (1)...(19): siRNA sense strand
caugaagaguccccgaaaa

SEQ ID NO: 2475396 - RNA, 19 nt, Homo sapiens
  misc_RNA (1)...(19): siRNA sense strand
ggaggaagcaccuacgcau

SEQ ID NO: 2475397 - RNA, 19 nt, Homo sapiens
  misc_RNA (1)...(19): siRNA sense strand
cuuugaacaauccaagaaa

SEQ ID NO: 2475398 - RNA, 19 nt, Homo sapiens
  misc_RNA (1)...(19): siRNA sense strand
ccaguuugcaagauggaca

SEQ ID NO: 2475399 - RNA, 19 nt, Homo sapiens
  misc_RNA (1)...(19): siRNA sense strand
caucgaugcauuugagugu

SEQ ID NO: 2475400 - RNA, 19 nt, Homo sapiens
  misc_RNA (1)...(19): siRNA sense strand
ucgaugcauuugaguguau

SEQ ID NO: 2475401 - RNA, 19 nt, Homo sapiens
  misc_RNA (1)...(19): siRNA sense strand
aguucauacuggugagaaa

SEQ ID NO: 2475402 - RNA, 19 nt, Homo sapiens
  misc_RNA (1)...(19): siRNA sense strand
aguucauacuggugagaaa

SEQ ID NO: 2475403 - RNA, 19 nt, Homo sapiens
  misc_RNA (1)...(19): siRNA sense strand
gugugaagagugugggaaa

SEQ ID NO: 2475404 - RNA, 19 nt, Homo sapiens
  misc_RNA (1)...(19): siRNA sense strand
gugugaggaaugugggaaa

SEQ ID NO: 2475405 - RNA, 19 nt, Homo sapiens
  misc_RNA (1)...(19): siRNA sense strand
gggaaguccuuuaggcuca

SEQ ID NO: 2475406 - RNA, 19 nt, Homo sapiens
  misc_RNA (1)...(19): siRNA sense strand
cguucaugcugauggaaau

SEQ ID NO: 2475407 - RNA, 19 nt, Homo sapiens
  misc_RNA (1)...(19): siRNA sense strand
acuuaaagcccaucagaau

SEQ ID NO: 2475408 - RNA, 19 nt, Homo sapiens
  misc_RNA (1)...(19): siRNA sense strand
uauucauaccggugagaaa

SEQ ID NO: 2475409 - RNA, 19 nt, Homo sapiens
  misc_RNA (1)...(19): siRNA sense strand
aauucauacgggagagaaa

SEQ ID NO: 2475410 - RNA, 19 nt, Homo sapiens
  misc_RNA (1)...(19): siRNA sense strand
gguuuuaguuauagccaua

SEQ ID NO: 2475411 - RNA, 19 nt, Homo sapiens
  misc_RNA (1)...(19): siRNA sense strand
ccuuauaagugugaggaau

SEQ ID NO: 2475412 - RNA, 19 nt, Homo sapiens
  misc_RNA (1)...(19): siRNA sense strand
uugaaguacaucagagaau

SEQ ID NO: 2475413 - RNA, 19 nt, Homo sapiens
  misc_RNA (1)...(19): siRNA sense strand
uauucauagcgcugagaaa

SEQ ID NO: 2475414 - RNA, 19 nt, Homo sapiens
  misc_RNA (1)...(19): siRNA sense strand
gcguucaugcugauggaaa

SEQ ID NO: 2475415 - RNA, 19 nt, Homo sapiens
  misc_RNA (1)...(19): siRNA sense strand
auguaaagaauguggggaa

SEQ ID NO: 2475416 - RNA, 19 nt, Homo sapiens
  misc_RNA (1)...(19): siRNA sense strand
uguaaagaauguggggaaa

SEQ ID NO: 2475417 - RNA, 19 nt, Homo sapiens
  misc_RNA (1)...(19): siRNA sense strand
gcugagaaacccuacgaau

SEQ ID NO: 2475418 - RNA, 19 nt, Homo sapiens
  misc_RNA (1)...(19): siRNA sense strand
auguaaagaaugugggaag

SEQ ID NO: 2475419 - RNA, 19 nt, Homo sapiens
  misc_RNA (1)...(19): siRNA sense strand
cuuuaguguaucuggacaa

SEQ ID NO: 2475420 - RNA, 19 nt, Homo sapiens
  misc_RNA (1)...(19): siRNA sense strand
agaauucauaccagugaua

SEQ ID NO: 2475421 - RNA, 19 nt, Homo sapiens
  misc_RNA (1)...(19): siRNA sense strand
ggguauucauagugguaag

SEQ ID NO: 2475422 - RNA, 19 nt, Homo sapiens
  misc_RNA (1)...(19): siRNA sense strand
gggaagucuuuuagguuca

SEQ ID NO: 2475423 - RNA, 19 nt, Homo sapiens
  misc_RNA (1)...(19): siRNA sense strand
uaauaguagccaugaacuu

SEQ ID NO: 2475424 - RNA, 19 nt, Homo sapiens
  misc_RNA (1)...(19): siRNA sense strand
ccaugaacuuaguauacau

SEQ ID NO: 2475425 - RNA, 19 nt, Homo sapiens
  misc_RNA (1)...(19): siRNA sense strand
cccuaugaauguaacaaau

SEQ ID NO: 2475426 - RNA, 19 nt, Homo sapiens
  misc_RNA (1)...(19): siRNA sense strand
ccuugaaguacaucagaga

SEQ ID NO: 2475427 - RNA, 19 nt, Homo sapiens
  misc_RNA (1)...(19): siRNA sense strand
ucuuaauaguagccaugaa

SEQ ID NO: 2475428 - RNA, 19 nt, Homo sapiens
  misc_RNA (1)...(19): siRNA sense strand
gaauguaacaaauguggga

SEQ ID NO: 2475429 - RNA, 19 nt, Homo sapiens
  misc_RNA (1)...(19): siRNA sense strand
agugauaaacccuaugaau

SEQ ID NO: 2475430 - RNA, 19 nt, Homo sapiens
  misc_RNA (1)...(19): siRNA sense strand
aagaaaauggggaggcuuu

SEQ ID NO: 2475431 - RNA, 19 nt, Homo sapiens
  misc_RNA (1)...(19): siRNA sense strand
cuuauaagugugaggaaug

SEQ ID NO: 2475432 - RNA, 19 nt, Homo sapiens
  misc_RNA (1)...(19): siRNA sense strand
ccgaacucaugcuggugaa

SEQ ID NO: 2475433 - RNA, 19 nt, Homo sapiens
  misc_RNA (1)...(19): siRNA sense strand
ccauaaacucacuauacau

SEQ ID NO: 2475434 - RNA, 19 nt, Homo sapiens
  misc_RNA (1)...(19): siRNA sense strand
cugaguauucacaguggua

SEQ ID NO: 2475435 - RNA, 19 nt, Homo sapiens
  misc_RNA (1)...(19): siRNA sense strand
agagaauucauacgggaga

SEQ ID NO: 2475436 - RNA, 19 nt, Homo sapiens
  misc_RNA (1)...(19): siRNA sense strand
cauuugaaaguguugagaa

SEQ ID NO: 2475437 - RNA, 19 nt, Homo sapiens
  misc_RNA (1)...(19): siRNA sense strand
caggguauucauaguggua

SEQ ID NO: 2475438 - RNA, 19 nt, Homo sapiens
  misc_RNA (1)...(19): siRNA sense strand
gugcaguaccugagggaca

SEQ ID NO: 2475439 - RNA, 19 nt, Homo sapiens
  misc_RNA (1)...(19): siRNA sense strand
ccuucgaggaccuggagaa

SEQ ID NO: 2475440 - RNA, 19 nt, Homo sapiens
  misc_RNA (1)...(19): siRNA sense strand
gcgagauauugcuggggua

SEQ ID NO: 2475441 - RNA, 19 nt, Homo sapiens
  misc_RNA (1)...(19): siRNA sense strand
gcauggagcuguuugagga

SEQ ID NO: 2475442 - RNA, 19 nt, Homo sapiens
  misc_RNA (1)...(19): siRNA sense strand
ucagacagcuucaaggaga

SEQ ID NO: 2475443 - RNA, 19 nt, Homo sapiens
  misc_RNA (1)...(19): siRNA sense strand
aaggcuuccuggagagcua

SEQ ID NO: 2475444 - RNA, 19 nt, Homo sapiens
  misc_RNA (1)...(19): siRNA sense strand
aggcgacggaggaggaaga

SEQ ID NO: 2475445 - RNA, 19 nt, Homo sapiens
  misc_RNA (1)...(19): siRNA sense strand
agccagagucacagcggaa

SEQ ID NO: 2475446 - RNA, 19 nt, Homo sapiens
  misc_RNA (1)...(19): siRNA sense strand
cugaagaggcgacggagga

SEQ ID NO: 2475447 - RNA, 19 nt, Homo sapiens
  misc_RNA (1)...(19): siRNA sense strand
cagagaagcuggagucccu

SEQ ID NO: 2475448 - RNA, 19 nt, Homo sapiens
  misc_RNA (1)...(19): siRNA sense strand
caacacggcuggagcugga

SEQ ID NO: 2475449 - RNA, 19 nt, Homo sapiens
  misc_RNA (1)...(19): siRNA sense strand
uucuggaagacaagaguaa

SEQ ID NO: 2475450 - RNA, 19 nt, Homo sapiens
  misc_RNA (1)...(19): siRNA sense strand
ggucgguccugaaagccaa

SEQ ID NO: 2475451 - RNA, 19 nt, Homo sapiens
  misc_RNA (1)...(19): siRNA sense strand
ccagagggauggaggaguc

SEQ ID NO: 2475452 - RNA, 19 nt, Homo sapiens
  misc_RNA (1)...(19): siRNA sense strand
cccaaaggcuuccuggaga

SEQ ID NO: 2475453 - RNA, 19 nt, Homo sapiens
  misc_RNA (1)...(19): siRNA sense strand
gcuacagugaccaggacuu

SEQ ID NO: 2475454 - RNA, 19 nt, Homo sapiens
  misc_RNA (1)...(19): siRNA sense strand
uggaagauggguugaucaa

SEQ ID NO: 2475455 - RNA, 19 nt, Homo sapiens
  misc_RNA (1)...(19): siRNA sense strand
caagcaaauaggagaaaau

SEQ ID NO: 2475456 - RNA, 19 nt, Homo sapiens
  misc_RNA (1)...(19): siRNA sense strand
ucugaucaaaggagguaaa

SEQ ID NO: 2475457 - RNA, 19 nt, Homo sapiens
  misc_RNA (1)...(19): siRNA sense strand
cagacauauacauggaaga

SEQ ID NO: 2475458 - RNA, 19 nt, Homo sapiens
  misc_RNA (1)...(19): siRNA sense strand
gaacugugguguauggcga

SEQ ID NO: 2475459 - RNA, 19 nt, Homo sapiens
  misc_RNA (1)...(19): siRNA sense strand
ugaucaagcaaauaggaga

SEQ ID NO: 2475460 - RNA, 19 nt, Homo sapiens
  misc_RNA (1)...(19): siRNA sense strand
ccgggauauuggcgccaua

SEQ ID NO: 2475461 - RNA, 19 nt, Homo sapiens
  misc_RNA (1)...(19): siRNA sense strand
aggcuguaggaaaggacaa

SEQ ID NO: 2475462 - RNA, 19 nt, Homo sapiens
  misc_RNA (1)...(19): siRNA sense strand
gggacaaggcuguggucac

SEQ ID NO: 2475463 - RNA, 19 nt, Homo sapiens
  misc_RNA (1)...(19): siRNA sense strand
acaacaucuuugaaggcau

SEQ ID NO: 2475464 - RNA, 19 nt, Homo sapiens
  misc_RNA (1)...(19): siRNA sense strand
ggaagaaauugaaggcuca

SEQ ID NO: 2475465 - RNA, 19 nt, Homo sapiens
  misc_RNA (1)...(19): siRNA sense strand
ccaacuuagccaagacaau

SEQ ID NO: 2475466 - RNA, 19 nt, Homo sapiens
  misc_RNA (1)...(19): siRNA sense strand
agaaagagguccaugguug

SEQ ID NO: 2475467 - RNA, 19 nt, Homo sapiens
  misc_RNA (1)...(19): siRNA sense strand
gcucauagacuuugggcug

SEQ ID NO: 2475468 - RNA, 19 nt, Homo sapiens
  misc_RNA (1)...(19): siRNA sense strand
uggaagaaauugaaggcuc

SEQ ID NO: 2475469 - RNA, 19 nt, Homo sapiens
  misc_RNA (1)...(19): siRNA sense strand
agugacuguucgagauuau

SEQ ID NO: 2475470 - RNA, 19 nt, Homo sapiens
  misc_RNA (1)...(19): siRNA sense strand
ggauaagggaguagaccuc

SEQ ID NO: 2475471 - RNA, 19 nt, Homo sapiens
  misc_RNA (1)...(19): siRNA sense strand
agaggaagaaagaggucca

SEQ ID NO: 2475472 - RNA, 19 nt, Homo sapiens
  misc_RNA (1)...(19): siRNA sense strand
gcuuaauugugguggccua

SEQ ID NO: 2475473 - RNA, 19 nt, Homo sapiens
  misc_RNA (1)...(19): siRNA sense strand
uuggaagacaucagagaaa

SEQ ID NO: 2475474 - RNA, 19 nt, Homo sapiens
  misc_RNA (1)...(19): siRNA sense strand
cuuaaaagagagagaugaa

SEQ ID NO: 2475475 - RNA, 19 nt, Homo sapiens
  misc_RNA (1)...(19): siRNA sense strand
aauccagagagaagugaua

SEQ ID NO: 2475476 - RNA, 19 nt, Homo sapiens
  misc_RNA (1)...(19): siRNA sense strand
cauaugaagaaguggacca

SEQ ID NO: 2475477 - RNA, 19 nt, Homo sapiens
  misc_RNA (1)...(19): siRNA sense strand
agugauaaaccaaaugcaa

SEQ ID NO: 2475478 - RNA, 19 nt, Homo sapiens
  misc_RNA (1)...(19): siRNA sense strand
cuacaaagauggaucaccu

SEQ ID NO: 2475479 - RNA, 19 nt, Homo sapiens
  misc_RNA (1)...(19): siRNA sense strand
cuugcaaaggaaugugaua

SEQ ID NO: 2475480 - RNA, 19 nt, Homo sapiens
  misc_RNA (1)...(19): siRNA sense strand
aagaaguggaccaagaaaa

SEQ ID NO: 2475481 - RNA, 19 nt, Homo sapiens
  misc_RNA (1)...(19): siRNA sense strand
uccagagagaagugauaaa

SEQ ID NO: 2475482 - RNA, 19 nt, Homo sapiens
  misc_RNA (1)...(19): siRNA sense strand
cgguggaggaagaugcuuu

SEQ ID NO: 2475483 - RNA, 19 nt, Homo sapiens
  misc_RNA (1)...(19): siRNA sense strand
gcauaagcugccaaaccaa

SEQ ID NO: 2475484 - RNA, 19 nt, Homo sapiens
  misc_RNA (1)...(19): siRNA sense strand
agguggaaacagcggauga

SEQ ID NO: 2475485 - RNA, 19 nt, Homo sapiens
  misc_RNA (1)...(19): siRNA sense strand
ucuguggacccgugagcaa

SEQ ID NO: 2475486 - RNA, 19 nt, Homo sapiens
  misc_RNA (1)...(19): siRNA sense strand
acuagaagaauauacggaa

SEQ ID NO: 2475487 - RNA, 19 nt, Homo sapiens
  misc_RNA (1)...(19): siRNA sense strand
ucauguggccggaagaaaa

SEQ ID NO: 2475488 - RNA, 19 nt, Homo sapiens
  misc_RNA (1)...(19): siRNA sense strand
aagugaacccauaugaaga

SEQ ID NO: 2475489 - RNA, 19 nt, Homo sapiens
  misc_RNA (1)...(19): siRNA sense strand
aagucugguuacauugaaa

SEQ ID NO: 2475490 - RNA, 19 nt, Homo sapiens
  misc_RNA (1)...(19): siRNA sense strand
agacaaagccacaacgcaa

SEQ ID NO: 2475491 - RNA, 19 nt, Homo sapiens
  misc_RNA (1)...(19): siRNA sense strand
aggugcagguggaggugaa

SEQ ID NO: 2475492 - RNA, 19 nt, Homo sapiens
  misc_RNA (1)...(19): siRNA sense strand
aggugaaguaugagggcca

SEQ ID NO: 2475493 - RNA, 19 nt, Homo sapiens
  misc_RNA (1)...(19): siRNA sense strand
cuaugaaguggcagaguca

SEQ ID NO: 2475494 - RNA, 19 nt, Homo sapiens
  misc_RNA (1)...(19): siRNA sense strand
uggugggcccagagagcaa

SEQ ID NO: 2475495 - RNA, 19 nt, Homo sapiens
  misc_RNA (1)...(19): siRNA sense strand
auccaugccuacaaggaaa

SEQ ID NO: 2475496 - RNA, 19 nt, Homo sapiens
  misc_RNA (1)...(19): siRNA sense strand
acuguaggcugcugggaca

SEQ ID NO: 2475497 - RNA, 19 nt, Homo sapiens
  misc_RNA (1)...(19): siRNA sense strand
agggagccguggaggugaa

SEQ ID NO: 2475498 - RNA, 19 nt, Homo sapiens
  misc_RNA (1)...(19): siRNA sense strand
gcauugaggucuucaccca

SEQ ID NO: 2475499 - RNA, 19 nt, Homo sapiens
  misc_RNA (1)...(19): siRNA sense strand
gcaccgugugugaugacaa

SEQ ID NO: 2475500 - RNA, 19 nt, Homo sapiens
  misc_RNA (1)...(19): siRNA sense strand
aauuauaucuuccagguga

SEQ ID NO: 2475501 - RNA, 19 nt, Homo sapiens
  misc_RNA (1)...(19): siRNA sense strand
augaaguggcagagucaga

SEQ ID NO: 2475502 - RNA, 19 nt, Homo sapiens
  misc_RNA (1)...(19): siRNA sense strand
gcaaaggguccugggcaga

SEQ ID NO: 2475503 - RNA, 19 nt, Homo sapiens
  misc_RNA (1)...(19): siRNA sense strand
ucuccaagucugcggauca

SEQ ID NO: 2475504 - RNA, 19 nt, Homo sapiens
  misc_RNA (1)...(19): siRNA sense strand
cuguggaguuggaggaaau

SEQ ID NO: 2475505 - RNA, 19 nt, Homo sapiens
  misc_RNA (1)...(19): siRNA sense strand
ugaauauggaggaggacua

SEQ ID NO: 2475506 - RNA, 19 nt, Homo sapiens
  misc_RNA (1)...(19): siRNA sense strand
gaaugaauauggaggagga

SEQ ID NO: 2475507 - RNA, 19 nt, Homo sapiens
  misc_RNA (1)...(19): siRNA sense strand
aagugaaguuaguagcaaa

SEQ ID NO: 2475508 - RNA, 19 nt, Homo sapiens
  misc_RNA (1)...(19): siRNA sense strand
aaguagugauucagaggaa

SEQ ID NO: 2475509 - RNA, 19 nt, Homo sapiens
  misc_RNA (1)...(19): siRNA sense strand
acuucaauuugguaggaua

SEQ ID NO: 2475510 - RNA, 19 nt, Homo sapiens
  misc_RNA (1)...(19): siRNA sense strand
cuucaauuugguaggauaa

SEQ ID NO: 2475511 - RNA, 19 nt, Homo sapiens
  misc_RNA (1)...(19): siRNA sense strand
aggaagaaugggagcaaca

SEQ ID NO: 2475512 - RNA, 19 nt, Homo sapiens
  misc_RNA (1)...(19): siRNA sense strand
aaagauacugagacagaaa

SEQ ID NO: 2475513 - RNA, 19 nt, Homo sapiens
  misc_RNA (1)...(19): siRNA sense strand
gagcauaagccaagcaaac

SEQ ID NO: 2475514 - RNA, 19 nt, Homo sapiens
  misc_RNA (1)...(19): siRNA sense strand
acauaaggauuuugaggua

SEQ ID NO: 2475515 - RNA, 19 nt, Homo sapiens
  misc_RNA (1)...(19): siRNA sense strand
uggaggaaccaaugaggaa

SEQ ID NO: 2475516 - RNA, 19 nt, Homo sapiens
  misc_RNA (1)...(19): siRNA sense strand
agaccaagaagaagaccaa

SEQ ID NO: 2475517 - RNA, 19 nt, Homo sapiens
  misc_RNA (1)...(19): siRNA sense strand
aagaagaagaccaagaaga

SEQ ID NO: 2475518 - RNA, 19 nt, Homo sapiens
  misc_RNA (1)...(19): siRNA sense strand
aggaaauaccauucaguuu

SEQ ID NO: 2475519 - RNA, 19 nt, Homo sapiens
  misc_RNA (1)...(19): siRNA sense strand
cagaaucacaugacagcaa

SEQ ID NO: 2475520 - RNA, 19 nt, Homo sapiens
  misc_RNA (1)...(19): siRNA sense strand
caaguauggcucaggacaa

SEQ ID NO: 2475521 - RNA, 19 nt, Homo sapiens
  misc_RNA (1)...(19): siRNA sense strand
aagaagaccaagaagaaga

SEQ ID NO: 2475522 - RNA, 19 nt, Homo sapiens
  misc_RNA (1)...(19): siRNA sense strand
ucgcaauaaugcagaaguu

SEQ ID NO: 2475523 - RNA, 19 nt, Homo sapiens
  misc_RNA (1)...(19): siRNA sense strand
uggaaauagaacagaacuu

SEQ ID NO: 2475524 - RNA, 19 nt, Homo sapiens
  misc_RNA (1)...(19): siRNA sense strand
ggagaaaagaauaugaaga

SEQ ID NO: 2475525 - RNA, 19 nt, Homo sapiens
  misc_RNA (1)...(19): siRNA sense strand
auuacagagaaaugggaaa

SEQ ID NO: 2475526 - RNA, 19 nt, Homo sapiens
  misc_RNA (1)...(19): siRNA sense strand
uggagaugaaagugaggaa

SEQ ID NO: 2475527 - RNA, 19 nt, Homo sapiens
  misc_RNA (1)...(19): siRNA sense strand
gaaaagugucagagcguau

SEQ ID NO: 2475528 - RNA, 19 nt, Homo sapiens
  misc_RNA (1)...(19): siRNA sense strand
ggauagcagauaagauaga

SEQ ID NO: 2475529 - RNA, 19 nt, Homo sapiens
  misc_RNA (1)...(19): siRNA sense strand
augcagaaguuuaugggau

SEQ ID NO: 2475530 - RNA, 19 nt, Homo sapiens
  misc_RNA (1)...(19): siRNA sense strand
cuggagggcaaguggaaau

SEQ ID NO: 2475531 - RNA, 19 nt, Homo sapiens
  misc_RNA (1)...(19): siRNA sense strand
uggucugccuccugaaaua

SEQ ID NO: 2475532 - RNA, 19 nt, Homo sapiens
  misc_RNA (1)...(19): siRNA sense strand
ggcuauuacaucagagaca

SEQ ID NO: 2475533 - RNA, 19 nt, Homo sapiens
  misc_RNA (1)...(19): siRNA sense strand
cagaaaacuaugaaagaga

SEQ ID NO: 2475534 - RNA, 19 nt, Homo sapiens
  misc_RNA (1)...(19): siRNA sense strand
cgacagaagaagaggaagg

SEQ ID NO: 2475535 - RNA, 19 nt, Homo sapiens
  misc_RNA (1)...(19): siRNA sense strand
guacaagucaugaugguca

SEQ ID NO: 2475536 - RNA, 19 nt, Homo sapiens
  misc_RNA (1)...(19): siRNA sense strand
aggcagaaacugaagcuga

SEQ ID NO: 2475537 - RNA, 19 nt, Homo sapiens
  misc_RNA (1)...(19): siRNA sense strand
agaagaggaaggugguuau

SEQ ID NO: 2475538 - RNA, 19 nt, Homo sapiens
  misc_RNA (1)...(19): siRNA sense strand
gaaguaacacagagccaau

SEQ ID NO: 2475539 - RNA, 19 nt, Homo sapiens
  misc_RNA (1)...(19): siRNA sense strand
aaacacaagcaaagacaga

SEQ ID NO: 2475540 - RNA, 19 nt, Homo sapiens
  misc_RNA (1)...(19): siRNA sense strand
aaacugaagcugaagugaa

SEQ ID NO: 2475541 - RNA, 19 nt, Homo sapiens
  misc_RNA (1)...(19): siRNA sense strand
ugguacugauggagaugaa

SEQ ID NO: 2475542 - RNA, 19 nt, Homo sapiens
  misc_RNA (1)...(19): siRNA sense strand
aaguauggcucaggacaaa

SEQ ID NO: 2475543 - RNA, 19 nt, Homo sapiens
  misc_RNA (1)...(19): siRNA sense strand
cuagacaugcgcagacaaa

SEQ ID NO: 2475544 - RNA, 19 nt, Homo sapiens
  misc_RNA (1)...(19): siRNA sense strand
aagaagaggaaggugguua

SEQ ID NO: 2475545 - RNA, 19 nt, Homo sapiens
  misc_RNA (1)...(19): siRNA sense strand
aagcaaagacagaccacau

SEQ ID NO: 2475546 - RNA, 19 nt, Homo sapiens
  misc_RNA (1)...(19): siRNA sense strand
agaccaggcgacagaagaa

SEQ ID NO: 2475547 - RNA, 19 nt, Homo sapiens
  misc_RNA (1)...(19): siRNA sense strand
ggauuguguuacucaagaa

SEQ ID NO: 2475548 - RNA, 19 nt, Homo sapiens
  misc_RNA (1)...(19): siRNA sense strand
aaguggaaauagaacagaa

SEQ ID NO: 2475549 - RNA, 19 nt, Homo sapiens
  misc_RNA (1)...(19): siRNA sense strand
aggcugaacucaugagaag

SEQ ID NO: 2475550 - RNA, 19 nt, Homo sapiens
  misc_RNA (1)...(19): siRNA sense strand
ccaaagugaaccacguaau

SEQ ID NO: 2475551 - RNA, 19 nt, Homo sapiens
  misc_RNA (1)...(19): siRNA sense strand
ugaccuaauucgaagacca

SEQ ID NO: 2475552 - RNA, 19 nt, Homo sapiens
  misc_RNA (1)...(19): siRNA sense strand
aagaauaugaagaagacga

SEQ ID NO: 2475553 - RNA, 19 nt, Homo sapiens
  misc_RNA (1)...(19): siRNA sense strand
auacaaaggaagaauggga

SEQ ID NO: 2475554 - RNA, 19 nt, Homo sapiens
  misc_RNA (1)...(19): siRNA sense strand
guagugauucagaggaaca

SEQ ID NO: 2475555 - RNA, 19 nt, Homo sapiens
  misc_RNA (1)...(19): siRNA sense strand
agaacuuccuuaacaacaa

SEQ ID NO: 2475556 - RNA, 19 nt, Homo sapiens
  misc_RNA (1)...(19): siRNA sense strand
cauuuguggaggaucgaaa

SEQ ID NO: 2475557 - RNA, 19 nt, Homo sapiens
  misc_RNA (1)...(19): siRNA sense strand
acaugacagcaaaggcaua

SEQ ID NO: 2475558 - RNA, 19 nt, Homo sapiens
  misc_RNA (1)...(19): siRNA sense strand
caucagagacaguggcaac

SEQ ID NO: 2475559 - RNA, 19 nt, Homo sapiens
  misc_RNA (1)...(19): siRNA sense strand
gaugaaauugugcaagaau

SEQ ID NO: 2475560 - RNA, 19 nt, Homo sapiens
  misc_RNA (1)...(19): siRNA sense strand
uaugagaacaccagaacau

SEQ ID NO: 2475561 - RNA, 19 nt, Homo sapiens
  misc_RNA (1)...(19): siRNA sense strand
caccagaacauaugaacuu

SEQ ID NO: 2475562 - RNA, 19 nt, Homo sapiens
  misc_RNA (1)...(19): siRNA sense strand
ggaggaaccaaugaggaaa

SEQ ID NO: 2475563 - RNA, 19 nt, Homo sapiens
  misc_RNA (1)...(19): siRNA sense strand
guuuauugaaggaggaaga

SEQ ID NO: 2475564 - RNA, 19 nt, Homo sapiens
  misc_RNA (1)...(19): siRNA sense strand
cuacugagcugcaggacga

SEQ ID NO: 2475565 - RNA, 19 nt, Homo sapiens
  misc_RNA (1)...(19): siRNA sense strand
cucuaaaggaagaagauau

SEQ ID NO: 2475566 - RNA, 19 nt, Homo sapiens
  misc_RNA (1)...(19): siRNA sense strand
ggaguuuauugaaggagga

SEQ ID NO: 2475567 - RNA, 19 nt, Homo sapiens
  misc_RNA (1)...(19): siRNA sense strand
guugcaaaccagaacacaa

SEQ ID NO: 2475568 - RNA, 19 nt, Homo sapiens
  misc_RNA (1)...(19): siRNA sense strand
ccgaggagacagaggugga

SEQ ID NO: 2475569 - RNA, 19 nt, Homo sapiens
  misc_RNA (1)...(19): siRNA sense strand
caaagauaguggcagcuga

SEQ ID NO: 2475570 - RNA, 19 nt, Homo sapiens
  misc_RNA (1)...(19): siRNA sense strand
ucgaaguguaguaagaaga

SEQ ID NO: 2475571 - RNA, 19 nt, Homo sapiens
  misc_RNA (1)...(19): siRNA sense strand
ugauugucaugcagcgcaa

SEQ ID NO: 2475572 - RNA, 19 nt, Homo sapiens
  misc_RNA (1)...(19): siRNA sense strand
agacagagguggagguccc

SEQ ID NO: 2475573 - RNA, 19 nt, Homo sapiens
  misc_RNA (1)...(19): siRNA sense strand
aggagaagcuggagcaccu

SEQ ID NO: 2475574 - RNA, 19 nt, Homo sapiens
  misc_RNA (1)...(19): siRNA sense strand
agagauuugugcugggagu

SEQ ID NO: 2475575 - RNA, 19 nt, Homo sapiens
  misc_RNA (1)...(19): siRNA sense strand
ccaggcugacugagagauu

SEQ ID NO: 2475576 - RNA, 19 nt, Homo sapiens
  misc_RNA (1)...(19): siRNA sense strand
ggauauguucguggagaca

SEQ ID NO: 2475577 - RNA, 19 nt, Homo sapiens
  misc_RNA (1)...(19): siRNA sense strand
uggagaagcaggucagacu

SEQ ID NO: 2475578 - RNA, 19 nt, Homo sapiens
  misc_RNA (1)...(19): siRNA sense strand
gcucaguaguacagagaau

SEQ ID NO: 2475579 - RNA, 19 nt, Homo sapiens
  misc_RNA (1)...(19): siRNA sense strand
ggauauucaccuugcgaaa

SEQ ID NO: 2475580 - RNA, 19 nt, Homo sapiens
  misc_RNA (1)...(19): siRNA sense strand
gggauauaugcaugagaaa

SEQ ID NO: 2475581 - RNA, 19 nt, Homo sapiens
  misc_RNA (1)...(19): siRNA sense strand
agucauagcuuacaggcaa

SEQ ID NO: 2475582 - RNA, 19 nt, Homo sapiens
  misc_RNA (1)...(19): siRNA sense strand
cagaguaguugcuggucaa

SEQ ID NO: 2475583 - RNA, 19 nt, Homo sapiens
  misc_RNA (1)...(19): siRNA sense strand
ggaaagugucacagaagau

SEQ ID NO: 2475584 - RNA, 19 nt, Homo sapiens
  misc_RNA (1)...(19): siRNA sense strand
gccaaagaaaguacggaaa

SEQ ID NO: 2475585 - RNA, 19 nt, Homo sapiens
  misc_RNA (1)...(19): siRNA sense strand
aagcauuguaggugagaau

SEQ ID NO: 2475586 - RNA, 19 nt, Homo sapiens
  misc_RNA (1)...(19): siRNA sense strand
cuaugaagagccaaagaaa

SEQ ID NO: 2475587 - RNA, 19 nt, Homo sapiens
  misc_RNA (1)...(19): siRNA sense strand
acauuguaccucagaguaa

SEQ ID NO: 2475588 - RNA, 19 nt, Homo sapiens
  misc_RNA (1)...(19): siRNA sense strand
ggaaagauguauucggaag

SEQ ID NO: 2475589 - RNA, 19 nt, Homo sapiens
  misc_RNA (1)...(19): siRNA sense strand
cggagggcguggaguagaa

SEQ ID NO: 2475590 - RNA, 19 nt, Homo sapiens
  misc_RNA (1)...(19): siRNA sense strand
aggacuaugaagagccaaa

SEQ ID NO: 2475591 - RNA, 19 nt, Homo sapiens
  misc_RNA (1)...(19): siRNA sense strand
acagguuggucuuggacaa

SEQ ID NO: 2475592 - RNA, 19 nt, Homo sapiens
  misc_RNA (1)...(19): siRNA sense strand
cagaaucaucagagagcau

SEQ ID NO: 2475593 - RNA, 19 nt, Homo sapiens
  misc_RNA (1)...(19): siRNA sense strand
augaagagccaaagaaagu

SEQ ID NO: 2475594 - RNA, 19 nt, Homo sapiens
  misc_RNA (1)...(19): siRNA sense strand
cugaagaagaggcugcuaa

SEQ ID NO: 2475595 - RNA, 19 nt, Homo sapiens
  misc_RNA (1)...(19): siRNA sense strand
caguggaaugcuagaagaa

SEQ ID NO: 2475596 - RNA, 19 nt, Homo sapiens
  misc_RNA (1)...(19): siRNA sense strand
gcagcaacacagugcacaa

SEQ ID NO: 2475597 - RNA, 19 nt, Homo sapiens
  misc_RNA (1)...(19): siRNA sense strand
cugcaguggaguuguuuaa

SEQ ID NO: 2475598 - RNA, 19 nt, Homo sapiens
  misc_RNA (1)...(19): siRNA sense strand
agauaaggaguaugaugaa

SEQ ID NO: 2475599 - RNA, 19 nt, Homo sapiens
  misc_RNA (1)...(19): siRNA sense strand
aagcaagcauuguagguga

SEQ ID NO: 2475600 - RNA, 19 nt, Homo sapiens
  misc_RNA (1)...(19): siRNA sense strand
uugcaguacauacgggaaa

SEQ ID NO: 2475601 - RNA, 19 nt, Homo sapiens
  misc_RNA (1)...(19): siRNA sense strand
cuauucaagaagaggaaga

SEQ ID NO: 2475602 - RNA, 19 nt, Homo sapiens
  misc_RNA (1)...(19): siRNA sense strand
gcguggaguagaacagaau

SEQ ID NO: 2475603 - RNA, 19 nt, Homo sapiens
  misc_RNA (1)...(19): siRNA sense strand
ugaucuagcccuuaaguau

SEQ ID NO: 2475604 - RNA, 19 nt, Homo sapiens
  misc_RNA (1)...(19): siRNA sense strand
gaaugaaacuuaucccaga

SEQ ID NO: 2475605 - RNA, 19 nt, Homo sapiens
  misc_RNA (1)...(19): siRNA sense strand
gcagaguaguugcugguca

SEQ ID NO: 2475606 - RNA, 19 nt, Homo sapiens
  misc_RNA (1)...(19): siRNA sense strand
ccuccagaguugugaaucu

SEQ ID NO: 2475607 - RNA, 19 nt, Homo sapiens
  misc_RNA (1)...(19): siRNA sense strand
gaaacuuaucccagagcuu

SEQ ID NO: 2475608 - RNA, 19 nt, Homo sapiens
  misc_RNA (1)...(19): siRNA sense strand
gagagauguuugagaagcu

SEQ ID NO: 2475609 - RNA, 19 nt, Homo sapiens
  misc_RNA (1)...(19): siRNA sense strand
gggaaagauguauucggaa

SEQ ID NO: 2475610 - RNA, 19 nt, Homo sapiens
  misc_RNA (1)...(19): siRNA sense strand
augaaguggcacaaagcaa

SEQ ID NO: 2475611 - RNA, 19 nt, Homo sapiens
  misc_RNA (1)...(19): siRNA sense strand
aguacauacgggaaacaaa

SEQ ID NO: 2475612 - RNA, 19 nt, Homo sapiens
  misc_RNA (1)...(19): siRNA sense strand
cauugaaggcacagcacau

SEQ ID NO: 2475613 - RNA, 19 nt, Homo sapiens
  misc_RNA (1)...(19): siRNA sense strand
aaagagaagcauaucggua

SEQ ID NO: 2475614 - RNA, 19 nt, Homo sapiens
  misc_RNA (1)...(19): siRNA sense strand
agaacagaaucaucagaga

SEQ ID NO: 2475615 - RNA, 19 nt, Homo sapiens
  misc_RNA (1)...(19): siRNA sense strand
aagagaagcauaucgguau

SEQ ID NO: 2475616 - RNA, 19 nt, Homo sapiens
  misc_RNA (1)...(19): siRNA sense strand
ccaggaaugaacaguggaa

SEQ ID NO: 2475617 - RNA, 19 nt, Homo sapiens
  misc_RNA (1)...(19): siRNA sense strand
agccaaagaaaguacggaa

SEQ ID NO: 2475618 - RNA, 19 nt, Homo sapiens
  misc_RNA (1)...(19): siRNA sense strand
guggaguagaacagaauca

SEQ ID NO: 2475619 - RNA, 19 nt, Homo sapiens
  misc_RNA (1)...(19): siRNA sense strand
cuauguuuaaucugggaua

SEQ ID NO: 2475620 - RNA, 19 nt, Homo sapiens
  misc_RNA (1)...(19): siRNA sense strand
gucauagcuuacaggcaaa

SEQ ID NO: 2475621 - RNA, 19 nt, Homo sapiens
  misc_RNA (1)...(19): siRNA sense strand
ucacagaagauaucagcuu

SEQ ID NO: 2475622 - RNA, 19 nt, Homo sapiens
  misc_RNA (1)...(19): siRNA sense strand
gugcggugcugcugagcuu

SEQ ID NO: 2475623 - RNA, 19 nt, Homo sapiens
  misc_RNA (1)...(19): siRNA sense strand
aggaaugaacaguggaaug

SEQ ID NO: 2475624 - RNA, 19 nt, Homo sapiens
  misc_RNA (1)...(19): siRNA sense strand
aaugaacaguggaaugcua

SEQ ID NO: 2475625 - RNA, 19 nt, Homo sapiens
  misc_RNA (1)...(19): siRNA sense strand
ccaaagaaaguacggaaac

SEQ ID NO: 2475626 - RNA, 19 nt, Homo sapiens
  misc_RNA (1)...(19): siRNA sense strand
gcagaugcaggaagcagaa

SEQ ID NO: 2475627 - RNA, 19 nt, Homo sapiens
  misc_RNA (1)...(19): siRNA sense strand
auaaagauggcgauuacaa

SEQ ID NO: 2475628 - RNA, 19 nt, Homo sapiens
  misc_RNA (1)...(19): siRNA sense strand
gcgagagagauguuugaga

SEQ ID NO: 2475629 - RNA, 19 nt, Homo sapiens
  misc_RNA (1)...(19): siRNA sense strand
uaagaauguaugugaacga

SEQ ID NO: 2475630 - RNA, 19 nt, Homo sapiens
  misc_RNA (1)...(19): siRNA sense strand
agcaauaagaaaagccaaa

SEQ ID NO: 2475631 - RNA, 19 nt, Homo sapiens
  misc_RNA (1)...(19): siRNA sense strand
ugagaaaggacugggcauu

SEQ ID NO: 2475632 - RNA, 19 nt, Homo sapiens
  misc_RNA (1)...(19): siRNA sense strand
cgauagaaguacagcccaa

SEQ ID NO: 2475633 - RNA, 19 nt, Homo sapiens
  misc_RNA (1)...(19): siRNA sense strand
ggaagaaugcagugcguca

SEQ ID NO: 2475634 - RNA, 19 nt, Homo sapiens
  misc_RNA (1)...(19): siRNA sense strand
caguauggacaguggauga

SEQ ID NO: 2475635 - RNA, 19 nt, Homo sapiens
  misc_RNA (1)...(19): siRNA sense strand
acaacaacaugcuggaaaa

SEQ ID NO: 2475636 - RNA, 19 nt, Homo sapiens
  misc_RNA (1)...(19): siRNA sense strand
cagaagaaaccacaggcaa

SEQ ID NO: 2475637 - RNA, 19 nt, Homo sapiens
  misc_RNA (1)...(19): siRNA sense strand
gggcaauggagcauaccaa

SEQ ID NO: 2475638 - RNA, 19 nt, Homo sapiens
  misc_RNA (1)...(19): siRNA sense strand
ccuucaaccucuugcucaa

SEQ ID NO: 2475639 - RNA, 19 nt, Homo sapiens
  misc_RNA (1)...(19): siRNA sense strand
ccaacagcaacgagaguga

SEQ ID NO: 2475640 - RNA, 19 nt, Homo sapiens
  misc_RNA (1)...(19): siRNA sense strand
aggcaugauuccaacagaa

SEQ ID NO: 2475641 - RNA, 19 nt, Homo sapiens
  misc_RNA (1)...(19): siRNA sense strand
cuucaauggcugagaauag

SEQ ID NO: 2475642 - RNA, 19 nt, Homo sapiens
  misc_RNA (1)...(19): siRNA sense strand
ugacagcaguccaggcaga

SEQ ID NO: 2475643 - RNA, 19 nt, Homo sapiens
  misc_RNA (1)...(19): siRNA sense strand
aggaacaguugcagcuuca

SEQ ID NO: 2475644 - RNA, 19 nt, Homo sapiens
  misc_RNA (1)...(19): siRNA sense strand
cuguacacgucaaagaaga

SEQ ID NO: 2475645 - RNA, 19 nt, Homo sapiens
  misc_RNA (1)...(19): siRNA sense strand
gcgccaaggccuucugaca

SEQ ID NO: 2475646 - RNA, 19 nt, Homo sapiens
  misc_RNA (1)...(19): siRNA sense strand
aaaacagccuaaagagcaa

SEQ ID NO: 2475647 - RNA, 19 nt, Homo sapiens
  misc_RNA (1)...(19): siRNA sense strand
acaaauacaacgugcccau

SEQ ID NO: 2475648 - RNA, 19 nt, Homo sapiens
  misc_RNA (1)...(19): siRNA sense strand
caauacgggaagagcugaa

SEQ ID NO: 2475649 - RNA, 19 nt, Homo sapiens
  misc_RNA (1)...(19): siRNA sense strand
agaagaaaccacaggcaac

SEQ ID NO: 2475650 - RNA, 19 nt, Homo sapiens
  misc_RNA (1)...(19): siRNA sense strand
acgaagaugaaccaguaaa

SEQ ID NO: 2475651 - RNA, 19 nt, Homo sapiens
  misc_RNA (1)...(19): siRNA sense strand
ugacaaacaaccagcucuu

SEQ ID NO: 2475652 - RNA, 19 nt, Homo sapiens
  misc_RNA (1)...(19): siRNA sense strand
uuauaagaacgcagaaguu

SEQ ID NO: 2475653 - RNA, 19 nt, Homo sapiens
  misc_RNA (1)...(19): siRNA sense strand
cagagauuacgaagaugaa

SEQ ID NO: 2475654 - RNA, 19 nt, Homo sapiens
  misc_RNA (1)...(19): siRNA sense strand
caguaaacgaggacaugga

SEQ ID NO: 2475655 - RNA, 19 nt, Homo sapiens
  misc_RNA (1)...(19): siRNA sense strand
ucccaagaggaaugacaaa

SEQ ID NO: 2475656 - RNA, 19 nt, Homo sapiens
  misc_RNA (1)...(19): siRNA sense strand
gcuucaacuuuuacaacaa

SEQ ID NO: 2475657 - RNA, 19 nt, Homo sapiens
  misc_RNA (1)...(19): siRNA sense strand
ggaaagaagugacaagugc

SEQ ID NO: 2475658 - RNA, 19 nt, Homo sapiens
  misc_RNA (1)...(19): siRNA sense strand
caguggaugaaguagaauu

SEQ ID NO: 2475659 - RNA, 19 nt, Homo sapiens
  misc_RNA (1)...(19): siRNA sense strand
aagcagugugcgaagauuu

SEQ ID NO: 2475660 - RNA, 19 nt, Homo sapiens
  misc_RNA (1)...(19): siRNA sense strand
ccuuaauaaugaacccaca

SEQ ID NO: 2475661 - RNA, 19 nt, Homo sapiens
  misc_RNA (1)...(19): siRNA sense strand
cagcaaguuaguggauuaa

SEQ ID NO: 2475662 - RNA, 19 nt, Homo sapiens
  misc_RNA (1)...(19): siRNA sense strand
cuaaagagcaacagcaggu

SEQ ID NO: 2475663 - RNA, 19 nt, Homo sapiens
  misc_RNA (1)...(19): siRNA sense strand
ugcucauacugcagaagaa

SEQ ID NO: 2475664 - RNA, 19 nt, Homo sapiens
  misc_RNA (1)...(19): siRNA sense strand
gcugugaagcagugugcga

SEQ ID NO: 2475665 - RNA, 19 nt, Homo sapiens
  misc_RNA (1)...(19): siRNA sense strand
uguacagcaguuagagcua

SEQ ID NO: 2475666 - RNA, 19 nt, Homo sapiens
  misc_RNA (1)...(19): siRNA sense strand
cgccaaggccuucugacaa

SEQ ID NO: 2475667 - RNA, 19 nt, Homo sapiens
  misc_RNA (1)...(19): siRNA sense strand
aagaugaaccaguaaacga

SEQ ID NO: 2475668 - RNA, 19 nt, Homo sapiens
  misc_RNA (1)...(19): siRNA sense strand
agaaaugguuccaccguga

SEQ ID NO: 2475669 - RNA, 19 nt, Homo sapiens
  misc_RNA (1)...(19): siRNA sense strand
cuacagcacuggaggugga

SEQ ID NO: 2475670 - RNA, 19 nt, Homo sapiens
  misc_RNA (1)...(19): siRNA sense strand
ccagaaaagaagcgaagga

SEQ ID NO: 2475671 - RNA, 19 nt, Homo sapiens
  misc_RNA (1)...(19): siRNA sense strand
gccucaagaccaaggagau

SEQ ID NO: 2475672 - RNA, 19 nt, Homo sapiens
  misc_RNA (1)...(19): siRNA sense strand
acaucaucucagugguuua

SEQ ID NO: 2475673 - RNA, 19 nt, Homo sapiens
  misc_RNA (1)...(19): siRNA sense strand
gguacaaagagaagcaccu

SEQ ID NO: 2475674 - RNA, 19 nt, Homo sapiens
  misc_RNA (1)...(19): siRNA sense strand
cuuugaaaucguacaauga

SEQ ID NO: 2475675 - RNA, 19 nt, Homo sapiens
  misc_RNA (1)...(19): siRNA sense strand
acacaaagaacuauggcaa

SEQ ID NO: 2475676 - RNA, 19 nt, Homo sapiens
  misc_RNA (1)...(19): siRNA sense strand
gagcaaaacagaagaagaa

SEQ ID NO: 2475677 - RNA, 19 nt, Homo sapiens
  misc_RNA (1)...(19): siRNA sense strand
aggaagaagaagacgacua

SEQ ID NO: 2475678 - RNA, 19 nt, Homo sapiens
  misc_RNA (1)...(19): siRNA sense strand
guuuagugcuagaaggaga

SEQ ID NO: 2475679 - RNA, 19 nt, Homo sapiens
  misc_RNA (1)...(19): siRNA sense strand
aggauagacaguaaggaua

SEQ ID NO: 2475680 - RNA, 19 nt, Homo sapiens
  misc_RNA (1)...(19): siRNA sense strand
ugauuuggcuaaagaggaa

SEQ ID NO: 2475681 - RNA, 19 nt, Homo sapiens
  misc_RNA (1)...(19): siRNA sense strand
ccaggaagaugauggccaa

SEQ ID NO: 2475682 - RNA, 19 nt, Homo sapiens
  misc_RNA (1)...(19): siRNA sense strand
cagcgaugccauagagaga

SEQ ID NO: 2475683 - RNA, 19 nt, Homo sapiens
  misc_RNA (1)...(19): siRNA sense strand
gagaagacaaugugcugaa

SEQ ID NO: 2475684 - RNA, 19 nt, Homo sapiens
  misc_RNA (1)...(19): siRNA sense strand
gaagaaagcuuauuccgua

SEQ ID NO: 2475685 - RNA, 19 nt, Homo sapiens
  misc_RNA (1)...(19): siRNA sense strand
ggagauaauuguauggaag

SEQ ID NO: 2475686 - RNA, 19 nt, Homo sapiens
  misc_RNA (1)...(19): siRNA sense strand
agggaaugguguugauaca

SEQ ID NO: 2475687 - RNA, 19 nt, Homo sapiens
  misc_RNA (1)...(19): siRNA sense strand
ucuuuaggauagacaguaa

SEQ ID NO: 2475688 - RNA, 19 nt, Homo sapiens
  misc_RNA (1)...(19): siRNA sense strand
uagaaggagacaaggaaau

SEQ ID NO: 2475689 - RNA, 19 nt, Homo sapiens
  misc_RNA (1)...(19): siRNA sense strand
ucaugaagacugaagggaa

SEQ ID NO: 2475690 - RNA, 19 nt, Homo sapiens
  misc_RNA (1)...(19): siRNA sense strand
gggacuugacuuuggagaa

SEQ ID NO: 2475691 - RNA, 19 nt, Homo sapiens
  misc_RNA (1)...(19): siRNA sense strand
cacaaagaacuauggcaaa

SEQ ID NO: 2475692 - RNA, 19 nt, Homo sapiens
  misc_RNA (1)...(19): siRNA sense strand
agaaaggcauagaggaacu

SEQ ID NO: 2475693 - RNA, 19 nt, Homo sapiens
  misc_RNA (1)...(19): siRNA sense strand
gcgaugccauagagagaau

SEQ ID NO: 2475694 - RNA, 19 nt, Homo sapiens
  misc_RNA (1)...(19): siRNA sense strand
ccgaggagcugaaggccuu

SEQ ID NO: 2475695 - RNA, 19 nt, Homo sapiens
  misc_RNA (1)...(19): siRNA sense strand
cuagaaggagacaaggaaa

SEQ ID NO: 2475696 - RNA, 19 nt, Homo sapiens
  misc_RNA (1)...(19): siRNA sense strand
uccauuugcuaaaggaaua

SEQ ID NO: 2475697 - RNA, 19 nt, Homo sapiens
  misc_RNA (1)...(19): siRNA sense strand
aggaauaguguuugggcga

SEQ ID NO: 2475698 - RNA, 19 nt, Homo sapiens
  misc_RNA (1)...(19): siRNA sense strand
uaggaagggaguugauuua

SEQ ID NO: 2475699 - RNA, 19 nt, Homo sapiens
  misc_RNA (1)...(19): siRNA sense strand
augcaaugaauaugggcaa

SEQ ID NO: 2475700 - RNA, 19 nt, Homo sapiens
  misc_RNA (1)...(19): siRNA sense strand
agacugaugauuuggcuaa

SEQ ID NO: 2475701 - RNA, 19 nt, Homo sapiens
  misc_RNA (1)...(19): siRNA sense strand
ucauaguaguucaggagau

SEQ ID NO: 2475702 - RNA, 19 nt, Homo sapiens
  misc_RNA (1)...(19): siRNA sense strand
agagagauuauuuggagaa

SEQ ID NO: 2475703 - RNA, 19 nt, Homo sapiens
  misc_RNA (1)...(19): siRNA sense strand
acagaagaagaacgggaaa

SEQ ID NO: 2475704 - RNA, 19 nt, Homo sapiens
  misc_RNA (1)...(19): siRNA sense strand
gcuagaaggagacaaggaa

SEQ ID NO: 2475705 - RNA, 19 nt, Homo sapiens
  misc_RNA (1)...(19): siRNA sense strand
gaauaguguuugggcgauu

SEQ ID NO: 2475706 - RNA, 19 nt, Homo sapiens
  misc_RNA (1)...(19): siRNA sense strand
cagaggauguccaggagau

SEQ ID NO: 2475707 - RNA, 19 nt, Homo sapiens
  misc_RNA (1)...(19): siRNA sense strand
ggauucucuugcugaguua

SEQ ID NO: 2475708 - RNA, 19 nt, Homo sapiens
  misc_RNA (1)...(19): siRNA sense strand
cuucuuuauuccagagaga

SEQ ID NO: 2475709 - RNA, 19 nt, Homo sapiens
  misc_RNA (1)...(19): siRNA sense strand
ugguucaaguucagaagaa

SEQ ID NO: 2475710 - RNA, 19 nt, Homo sapiens
  misc_RNA (1)...(19): siRNA sense strand
gagauaauuguauggaaga

SEQ ID NO: 2475711 - RNA, 19 nt, Homo sapiens
  misc_RNA (1)...(19): siRNA sense strand
ugacaucaaggaagugaaa

SEQ ID NO: 2475712 - RNA, 19 nt, Homo sapiens
  misc_RNA (1)...(19): siRNA sense strand
agaaggagacaaggaaaua

SEQ ID NO: 2475713 - RNA, 19 nt, Homo sapiens
  misc_RNA (1)...(19): siRNA sense strand
ugcuaaaggaauaguguuu

SEQ ID NO: 2475714 - RNA, 19 nt, Homo sapiens
  misc_RNA (1)...(19): siRNA sense strand
agugaauacagcaggaaca

SEQ ID NO: 2475715 - RNA, 19 nt, Homo sapiens
  misc_RNA (1)...(19): siRNA sense strand
cucuagucuuuaugggaaa

SEQ ID NO: 2475716 - RNA, 19 nt, Homo sapiens
  misc_RNA (1)...(19): siRNA sense strand
agguagaguuuaaagcuca

SEQ ID NO: 2475717 - RNA, 19 nt, Homo sapiens
  misc_RNA (1)...(19): siRNA sense strand
gccaagcacaugaggagaa

SEQ ID NO: 2475718 - RNA, 19 nt, Homo sapiens
  misc_RNA (1)...(19): siRNA sense strand
gcacaugaggagaaaggca

SEQ ID NO: 2475719 - RNA, 19 nt, Homo sapiens
  misc_RNA (1)...(19): siRNA sense strand
aagaagaagacgacuauga

SEQ ID NO: 2475720 - RNA, 19 nt, Homo sapiens
  misc_RNA (1)...(19): siRNA sense strand
guucaaguucagaagaaga

SEQ ID NO: 2475721 - RNA, 19 nt, Homo sapiens
  misc_RNA (1)...(19): siRNA sense strand
cauggaauucuuuaggaua

SEQ ID NO: 2475722 - RNA, 19 nt, Homo sapiens
  misc_RNA (1)...(19): siRNA sense strand
caggcuuaguacugaacaa

SEQ ID NO: 2475723 - RNA, 19 nt, Homo sapiens
  misc_RNA (1)...(19): siRNA sense strand
guugaagauuccugugaca

SEQ ID NO: 2475724 - RNA, 19 nt, Homo sapiens
  misc_RNA (1)...(19): siRNA sense strand
cgagaagcugugaagagaa

SEQ ID NO: 2475725 - RNA, 19 nt, Homo sapiens
  misc_RNA (1)...(19): siRNA sense strand
caaggagagucaagcccua

SEQ ID NO: 2475726 - RNA, 19 nt, Homo sapiens
  misc_RNA (1)...(19): siRNA sense strand
aggagauaauuguauggaa

SEQ ID NO: 2475727 - RNA, 19 nt, Homo sapiens
  misc_RNA (1)...(19): siRNA sense strand
ucuccaaaguggccagauu

SEQ ID NO: 2475728 - RNA, 19 nt, Homo sapiens
  misc_RNA (1)...(19): siRNA sense strand
gacaguaaggauagcgcaa

SEQ ID NO: 2475729 - RNA, 19 nt, Homo sapiens
  misc_RNA (1)...(19): siRNA sense strand
caagugaacuccugggacu

SEQ ID NO: 2475730 - RNA, 19 nt, Homo sapiens
  misc_RNA (1)...(19): siRNA sense strand
caagagaagcugcagcaau

SEQ ID NO: 2475731 - RNA, 19 nt, Homo sapiens
  misc_RNA (1)...(19): siRNA sense strand
acucugagacuaaggguga

SEQ ID NO: 2475732 - RNA, 19 nt, Homo sapiens
  misc_RNA (1)...(19): siRNA sense strand
auuaauugguccugcugaa

SEQ ID NO: 2475733 - RNA, 19 nt, Homo sapiens
  misc_RNA (1)...(19): siRNA sense strand
gaagcugugaagagaagaa

SEQ ID NO: 2475734 - RNA, 19 nt, Homo sapiens
  misc_RNA (1)...(19): siRNA sense strand
gagaagaacagccgaguac

SEQ ID NO: 2475735 - RNA, 19 nt, Homo sapiens
  misc_RNA (1)...(19): siRNA sense strand
cagaggaagugauggugga

SEQ ID NO: 2475736 - RNA, 19 nt, Homo sapiens
  misc_RNA (1)...(19): siRNA sense strand
ugaaagcaagguagaguuu

SEQ ID NO: 2475737 - RNA, 19 nt, Homo sapiens
  misc_RNA (1)...(19): siRNA sense strand
uaucgaagagagaagacaa

SEQ ID NO: 2475738 - RNA, 19 nt, Homo sapiens
  misc_RNA (1)...(19): siRNA sense strand
gaauggaaguucaaggagu

SEQ ID NO: 2475739 - RNA, 19 nt, Homo sapiens
  misc_RNA (1)...(19): siRNA sense strand
ggagagaaauuucagccaa

SEQ ID NO: 2475740 - RNA, 19 nt, Homo sapiens
  misc_RNA (1)...(19): siRNA sense strand
ccaacagauaagaaaggaa

SEQ ID NO: 2475741 - RNA, 19 nt, Homo sapiens
  misc_RNA (1)...(19): siRNA sense strand
cuaagaacaaugaggccuu

SEQ ID NO: 2475742 - RNA, 19 nt, Homo sapiens
  misc_RNA (1)...(19): siRNA sense strand
cugaagacuaccagaggga

SEQ ID NO: 2475743 - RNA, 19 nt, Homo sapiens
  misc_RNA (1)...(19): siRNA sense strand
gagagaaauuucagccaag

SEQ ID NO: 2475744 - RNA, 19 nt, Homo sapiens
  misc_RNA (1)...(19): siRNA sense strand
ccugugaacaagagccaga

SEQ ID NO: 2475745 - RNA, 19 nt, Homo sapiens
  misc_RNA (1)...(19): siRNA sense strand
aggcagaguuucagugcuc

SEQ ID NO: 2475746 - RNA, 19 nt, Homo sapiens
  misc_RNA (1)...(19): siRNA sense strand
gcaaauagucaagaagcca

SEQ ID NO: 2475747 - RNA, 19 nt, Homo sapiens
  misc_RNA (1)...(19): siRNA sense strand
ccugauaaacugaggcaga

SEQ ID NO: 2475748 - RNA, 19 nt, Homo sapiens
  misc_RNA (1)...(19): siRNA sense strand
acuuaaagaagaugaccaa

SEQ ID NO: 2475749 - RNA, 19 nt, Homo sapiens
  misc_RNA (1)...(19): siRNA sense strand
ugauauuccagaugugaaa

SEQ ID NO: 2475750 - RNA, 19 nt, Homo sapiens
  misc_RNA (1)...(19): siRNA sense strand
aauuaaagcagcugaacuu

SEQ ID NO: 2475751 - RNA, 19 nt, Homo sapiens
  misc_RNA (1)...(19): siRNA sense strand
ugguuuaguuguagaagau

SEQ ID NO: 2475752 - RNA, 19 nt, Homo sapiens
  misc_RNA (1)...(19): siRNA sense strand
gugcuaaaacuguggcaua

SEQ ID NO: 2475753 - RNA, 19 nt, Homo sapiens
  misc_RNA (1)...(19): siRNA sense strand
aggaagaacaacaugaaca

SEQ ID NO: 2475754 - RNA, 19 nt, Homo sapiens
  misc_RNA (1)...(19): siRNA sense strand
gggaggacucagaagaaaa

SEQ ID NO: 2475755 - RNA, 19 nt, Homo sapiens
  misc_RNA (1)...(19): siRNA sense strand
aggaaggugagcaggcuaa

SEQ ID NO: 2475756 - RNA, 19 nt, Homo sapiens
  misc_RNA (1)...(19): siRNA sense strand
guaacaaaguggaaagccu

SEQ ID NO: 2475757 - RNA, 19 nt, Homo sapiens
  misc_RNA (1)...(19): siRNA sense strand
acucagaagaaaaggacaa

SEQ ID NO: 2475758 - RNA, 19 nt, Homo sapiens
  misc_RNA (1)...(19): siRNA sense strand
gaaaaggacaacaggaaga

SEQ ID NO: 2475759 - RNA, 19 nt, Homo sapiens
  misc_RNA (1)...(19): siRNA sense strand
aggcagaagcuacagacaa

SEQ ID NO: 2475760 - RNA, 19 nt, Homo sapiens
  misc_RNA (1)...(19): siRNA sense strand
cccagagcauauaaagaaa

SEQ ID NO: 2475761 - RNA, 19 nt, Homo sapiens
  misc_RNA (1)...(19): siRNA sense strand
cuuuacaggucaugcaaga

SEQ ID NO: 2475762 - RNA, 19 nt, Homo sapiens
  misc_RNA (1)...(19): siRNA sense strand
aggacaacaggaagaacaa

SEQ ID NO: 2475763 - RNA, 19 nt, Homo sapiens
  misc_RNA (1)...(19): siRNA sense strand
aagaaaaggacaacaggaa

SEQ ID NO: 2475764 - RNA, 19 nt, Homo sapiens
  misc_RNA (1)...(19): siRNA sense strand
aauuggaccugaaggaaaa

SEQ ID NO: 2475765 - RNA, 19 nt, Homo sapiens
  misc_RNA (1)...(19): siRNA sense strand
cccugaaauuggaguucua

SEQ ID NO: 2475766 - RNA, 19 nt, Homo sapiens
  misc_RNA (1)...(19): siRNA sense strand
uauuugagaaggugaagaa

SEQ ID NO: 2475767 - RNA, 19 nt, Homo sapiens
  misc_RNA (1)...(19): siRNA sense strand
cugcaggggcucuggauaa

SEQ ID NO: 2475768 - RNA, 19 nt, Homo sapiens
  misc_RNA (1)...(19): siRNA sense strand
acaaauuaaagcagcugaa

SEQ ID NO: 2475769 - RNA, 19 nt, Homo sapiens
  misc_RNA (1)...(19): siRNA sense strand
acugugaccuggagcguau

SEQ ID NO: 2475770 - RNA, 19 nt, Homo sapiens
  misc_RNA (1)...(19): siRNA sense strand
ggauguaugggcuccgaaa

SEQ ID NO: 2475771 - RNA, 19 nt, Homo sapiens
  misc_RNA (1)...(19): siRNA sense strand
ccuacaucccagagcauau

SEQ ID NO: 2475772 - RNA, 19 nt, Homo sapiens
  misc_RNA (1)...(19): siRNA sense strand
ugaaauuggaguucuacaa

SEQ ID NO: 2475773 - RNA, 19 nt, Homo sapiens
  misc_RNA (1)...(19): siRNA sense strand
uguggaagaaggugauauu

SEQ ID NO: 2475774 - RNA, 19 nt, Homo sapiens
  misc_RNA (1)...(19): siRNA sense strand
ccuaaucaucauugcauau

SEQ ID NO: 2475775 - RNA, 19 nt, Homo sapiens
  misc_RNA (1)...(19): siRNA sense strand
cugauaaacugaggcagaa

SEQ ID NO: 2475776 - RNA, 19 nt, Homo sapiens
  misc_RNA (1)...(19): siRNA sense strand
aggaauuggaccugaagga

SEQ ID NO: 2475777 - RNA, 19 nt, Homo sapiens
  misc_RNA (1)...(19): siRNA sense strand
gcccauaaucgacuggaau

SEQ ID NO: 2475778 - RNA, 19 nt, Homo sapiens
  misc_RNA (1)...(19): siRNA sense strand
cucucuaagucaugauauu

SEQ ID NO: 2475779 - RNA, 19 nt, Homo sapiens
  misc_RNA (1)...(19): siRNA sense strand
ucugaagcgagcugguuua

SEQ ID NO: 2475780 - RNA, 19 nt, Homo sapiens
  misc_RNA (1)...(19): siRNA sense strand
cugguuuaguuguagaaga

SEQ ID NO: 2475781 - RNA, 19 nt, Homo sapiens
  misc_RNA (1)...(19): siRNA sense strand
ucagauguguuaugagcga

SEQ ID NO: 2475782 - RNA, 19 nt, Homo sapiens
  misc_RNA (1)...(19): siRNA sense strand
aagaaaguugacagugcua

SEQ ID NO: 2475783 - RNA, 19 nt, Homo sapiens
  misc_RNA (1)...(19): siRNA sense strand
gaaaucuggaagagcugua

SEQ ID NO: 2475784 - RNA, 19 nt, Homo sapiens
  misc_RNA (1)...(19): siRNA sense strand
ccaagcuggugaugcucaa

SEQ ID NO: 2475785 - RNA, 19 nt, Homo sapiens
  misc_RNA (1)...(19): siRNA sense strand
auuuggaccuucagcagua

SEQ ID NO: 2475786 - RNA, 19 nt, Homo sapiens
  misc_RNA (1)...(19): siRNA sense strand
aaggacaacaggaagaaca

SEQ ID NO: 2475787 - RNA, 19 nt, Homo sapiens
  misc_RNA (1)...(19): siRNA sense strand
ccuuauacuggcuguucua

SEQ ID NO: 2475788 - RNA, 19 nt, Homo sapiens
  misc_RNA (1)...(19): siRNA sense strand
gaguauguccgucaggaga

SEQ ID NO: 2475789 - RNA, 19 nt, Homo sapiens
  misc_RNA (1)...(19): siRNA sense strand
ggaaauuggugaaagugua

SEQ ID NO: 2475790 - RNA, 19 nt, Homo sapiens
  misc_RNA (1)...(19): siRNA sense strand
cggcaggauaagaaagaua

SEQ ID NO: 2475791 - RNA, 19 nt, Homo sapiens
  misc_RNA (1)...(19): siRNA sense strand
gcauggugcuugugggaga

SEQ ID NO: 2475792 - RNA, 19 nt, Homo sapiens
  misc_RNA (1)...(19): siRNA sense strand
cuaaaguggauaagggaga

SEQ ID NO: 2475793 - RNA, 19 nt, Homo sapiens
  misc_RNA (1)...(19): siRNA sense strand
ccaaugaaguggaccgcau

SEQ ID NO: 2475794 - RNA, 19 nt, Homo sapiens
  misc_RNA (1)...(19): siRNA sense strand
aaguguacguggagaggau

SEQ ID NO: 2475795 - RNA, 19 nt, Homo sapiens
  misc_RNA (1)...(19): siRNA sense strand
ucagagugguuguggcgaa

SEQ ID NO: 2475796 - RNA, 19 nt, Homo sapiens
  misc_RNA (1)...(19): siRNA sense strand
ugacuaagaaauucagcaa

SEQ ID NO: 2475797 - RNA, 19 nt, Homo sapiens
  misc_RNA (1)...(19): siRNA sense strand
aggcaguaguagucaccaa

SEQ ID NO: 2475798 - RNA, 19 nt, Homo sapiens
  misc_RNA (1)...(19): siRNA sense strand
ccaaaauacaggugauuga

SEQ ID NO: 2475799 - RNA, 19 nt, Homo sapiens
  misc_RNA (1)...(19): siRNA sense strand
uggcgaaaucaaugacaau

SEQ ID NO: 2475800 - RNA, 19 nt, Homo sapiens
  misc_RNA (1)...(19): siRNA sense strand
uguggaaauuggugaaagu

SEQ ID NO: 2475801 - RNA, 19 nt, Homo sapiens
  misc_RNA (1)...(19): siRNA sense strand
gguggagcuaagagaguga

SEQ ID NO: 2475802 - RNA, 19 nt, Homo sapiens
  misc_RNA (1)...(19): siRNA sense strand
agguggugacuaagaaauu

SEQ ID NO: 2475803 - RNA, 19 nt, Homo sapiens
  misc_RNA (1)...(19): siRNA sense strand
gcuucagccagccggguua

SEQ ID NO: 2475804 - RNA, 19 nt, Homo sapiens
  misc_RNA (1)...(19): siRNA sense strand
acgcaugcuuugaggcagu

SEQ ID NO: 2475805 - RNA, 19 nt, Homo sapiens
  misc_RNA (1)...(19): siRNA sense strand
aguggauaagggagaauau

SEQ ID NO: 2475806 - RNA, 19 nt, Homo sapiens
  misc_RNA (1)...(19): siRNA sense strand
ccaccagaguuuaugccau

SEQ ID NO: 2475807 - RNA, 19 nt, Homo sapiens
  misc_RNA (1)...(19): siRNA sense strand
cuucucaaauucagggcuu

SEQ ID NO: 2475808 - RNA, 19 nt, Homo sapiens
  misc_RNA (1)...(19): siRNA sense strand
caagguggugacuaagaaa

SEQ ID NO: 2475809 - RNA, 19 nt, Homo sapiens
  misc_RNA (1)...(19): siRNA sense strand
gcuccaaaauacaggugau

SEQ ID NO: 2475810 - RNA, 19 nt, Homo sapiens
  misc_RNA (1)...(19): siRNA sense strand
ggagaacucacaauggaga

SEQ ID NO: 2475811 - RNA, 19 nt, Homo sapiens
  misc_RNA (1)...(19): siRNA sense strand
agcaaaggugguagagaaa

SEQ ID NO: 2475812 - RNA, 19 nt, Homo sapiens
  misc_RNA (1)...(19): siRNA sense strand
guuaauuaagccagacaaa

SEQ ID NO: 2475813 - RNA, 19 nt, Homo sapiens
  misc_RNA (1)...(19): siRNA sense strand
gguauuaggcagugcuaca

SEQ ID NO: 2475814 - RNA, 19 nt, Homo sapiens
  misc_RNA (1)...(19): siRNA sense strand
cagacaaacccaauggaau

SEQ ID NO: 2475815 - RNA, 19 nt, Homo sapiens
  misc_RNA (1)...(19): siRNA sense strand
agguagaacuuuaugcaga

SEQ ID NO: 2475816 - RNA, 19 nt, Homo sapiens
  misc_RNA (1)...(19): siRNA sense strand
uauaugaaguauugcgaga

SEQ ID NO: 2475817 - RNA, 19 nt, Homo sapiens
  misc_RNA (1)...(19): siRNA sense strand
agucagaaugggaaagaca

SEQ ID NO: 2475818 - RNA, 19 nt, Homo sapiens
  misc_RNA (1)...(19): siRNA sense strand
ugauagucagaaugggaaa

SEQ ID NO: 2475819 - RNA, 19 nt, Homo sapiens
  misc_RNA (1)...(19): siRNA sense strand
cuacagaaccaguuggagu

SEQ ID NO: 2475820 - RNA, 19 nt, Homo sapiens
  misc_RNA (1)...(19): siRNA sense strand
uauaaugaccaguggcaga

SEQ ID NO: 2475821 - RNA, 19 nt, Homo sapiens
  misc_RNA (1)...(19): siRNA sense strand
cuggaaugagcuugaagaa

SEQ ID NO: 2475822 - RNA, 19 nt, Homo sapiens
  misc_RNA (1)...(19): siRNA sense strand
agauucaagcagagcguau

SEQ ID NO: 2475823 - RNA, 19 nt, Homo sapiens
  misc_RNA (1)...(19): siRNA sense strand
aggcagugcuacaagggau

SEQ ID NO: 2475824 - RNA, 19 nt, Homo sapiens
  misc_RNA (1)...(19): siRNA sense strand
cagaauauuguggaggaua

SEQ ID NO: 2475825 - RNA, 19 nt, Homo sapiens
  misc_RNA (1)...(19): siRNA sense strand
gugguagaauauagugaga

SEQ ID NO: 2475826 - RNA, 19 nt, Homo sapiens
  misc_RNA (1)...(19): siRNA sense strand
ccaugaacuuugaggagcu

SEQ ID NO: 2475827 - RNA, 19 nt, Homo sapiens
  misc_RNA (1)...(19): siRNA sense strand
augcauuauuccaugguau

SEQ ID NO: 2475828 - RNA, 19 nt, Homo sapiens
  misc_RNA (1)...(19): siRNA sense strand
ccuacuacguuucuggaau

SEQ ID NO: 2475829 - RNA, 19 nt, Homo sapiens
  misc_RNA (1)...(19): siRNA sense strand
caugaguuuugaugggaaa

SEQ ID NO: 2475830 - RNA, 19 nt, Homo sapiens
  misc_RNA (1)...(19): siRNA sense strand
gaacaaaguuucuauggcu

SEQ ID NO: 2475831 - RNA, 19 nt, Homo sapiens
  misc_RNA (1)...(19): siRNA sense strand
ugaaguauugcgagaagau

SEQ ID NO: 2475832 - RNA, 19 nt, Homo sapiens
  misc_RNA (1)...(19): siRNA sense strand
cuaugcuggagaaggauua

SEQ ID NO: 2475833 - RNA, 19 nt, Homo sapiens
  misc_RNA (1)...(19): siRNA sense strand
ccagaauauuguggaggau

SEQ ID NO: 2475834 - RNA, 19 nt, Homo sapiens
  misc_RNA (1)...(19): siRNA sense strand
aaguauugcgagaagauga

SEQ ID NO: 2475835 - RNA, 19 nt, Homo sapiens
  misc_RNA (1)...(19): siRNA sense strand
gauauggagcaaagaggca

SEQ ID NO: 2475836 - RNA, 19 nt, Homo sapiens
  misc_RNA (1)...(19): siRNA sense strand
uggaagagaagaacaaagu

SEQ ID NO: 2475837 - RNA, 19 nt, Homo sapiens
  misc_RNA (1)...(19): siRNA sense strand
cccagaauauuguggagga

SEQ ID NO: 2475838 - RNA, 19 nt, Homo sapiens
  misc_RNA (1)...(19): siRNA sense strand
agaugggaaugguggucuu

SEQ ID NO: 2475839 - RNA, 19 nt, Homo sapiens
  misc_RNA (1)...(19): siRNA sense strand
ugucaauguuuaugaaccu

SEQ ID NO: 2475840 - RNA, 19 nt, Homo sapiens
  misc_RNA (1)...(19): siRNA sense strand
guuugugguauaugaagua

SEQ ID NO: 2475841 - RNA, 19 nt, Homo sapiens
  misc_RNA (1)...(19): siRNA sense strand
gaauggaguucaugagcug

SEQ ID NO: 2475842 - RNA, 19 nt, Homo sapiens
  misc_RNA (1)...(19): siRNA sense strand
caaaggugguagagaaaac

SEQ ID NO: 2475843 - RNA, 19 nt, Homo sapiens
  misc_RNA (1)...(19): siRNA sense strand
gcucaguaucagagagaau

SEQ ID NO: 2475844 - RNA, 19 nt, Homo sapiens
  misc_RNA (1)...(19): siRNA sense strand
aggcaagauugaagacaca

SEQ ID NO: 2475845 - RNA, 19 nt, Homo sapiens
  misc_RNA (1)...(19): siRNA sense strand
cuggauaagcugaagaaaa

SEQ ID NO: 2475846 - RNA, 19 nt, Homo sapiens
  misc_RNA (1)...(19): siRNA sense strand
cccaggaggaagagacuaa

SEQ ID NO: 2475847 - RNA, 19 nt, Homo sapiens
  misc_RNA (1)...(19): siRNA sense strand
ucgagaagguccaggcuga

SEQ ID NO: 2475848 - RNA, 19 nt, Homo sapiens
  misc_RNA (1)...(19): siRNA sense strand
uggagaucuuagagcaaau

SEQ ID NO: 2475849 - RNA, 19 nt, Homo sapiens
  misc_RNA (1)...(19): siRNA sense strand
aggcugaggcugagagacu

SEQ ID NO: 2475850 - RNA, 19 nt, Homo sapiens
  misc_RNA (1)...(19): siRNA sense strand
agcaaaugaaugaggauga

SEQ ID NO: 2475851 - RNA, 19 nt, Homo sapiens
  misc_RNA (1)...(19): siRNA sense strand
ucugaggagcaguggacaa

SEQ ID NO: 2475852 - RNA, 19 nt, Homo sapiens
  misc_RNA (1)...(19): siRNA sense strand
caagauaguggcagaaaau

SEQ ID NO: 2475853 - RNA, 19 nt, Homo sapiens
  misc_RNA (1)...(19): siRNA sense strand
acaggauggauguggagaa

SEQ ID NO: 2475854 - RNA, 19 nt, Homo sapiens
  misc_RNA (1)...(19): siRNA sense strand
uggagaaaggcaagauuga

SEQ ID NO: 2475855 - RNA, 19 nt, Homo sapiens
  misc_RNA (1)...(19): siRNA sense strand
gguugagaaaggcgagaca

SEQ ID NO: 2475856 - RNA, 19 nt, Homo sapiens
  misc_RNA (1)...(19): siRNA sense strand
caggagagacccaggagga

SEQ ID NO: 2475857 - RNA, 19 nt, Homo sapiens
  misc_RNA (1)...(19): siRNA sense strand
cguggaauggaaugagauu

SEQ ID NO: 2475858 - RNA, 19 nt, Homo sapiens
  misc_RNA (1)...(19): siRNA sense strand
acucaggagaggagccauu

SEQ ID NO: 2475859 - RNA, 19 nt, Homo sapiens
  misc_RNA (1)...(19): siRNA sense strand
aggaggaagcucaguauca

SEQ ID NO: 2475860 - RNA, 19 nt, Homo sapiens
  misc_RNA (1)...(19): siRNA sense strand
uugaaaaccagaugcguua

SEQ ID NO: 2475861 - RNA, 19 nt, Homo sapiens
  misc_RNA (1)...(19): siRNA sense strand
auaagaugggucugaaauu

SEQ ID NO: 2475862 - RNA, 19 nt, Homo sapiens
  misc_RNA (1)...(19): siRNA sense strand
uggauaagcugaagaaaac

SEQ ID NO: 2475863 - RNA, 19 nt, Homo sapiens
  misc_RNA (1)...(19): siRNA sense strand
cugaggagcaguggacaaa

SEQ ID NO: 2475864 - RNA, 19 nt, Homo sapiens
  misc_RNA (1)...(19): siRNA sense strand
gcucaacgucacugaaaau

SEQ ID NO: 2475865 - RNA, 19 nt, Homo sapiens
  misc_RNA (1)...(19): siRNA sense strand
gcugaagaguguugaaaac

SEQ ID NO: 2475866 - RNA, 19 nt, Homo sapiens
  misc_RNA (1)...(19): siRNA sense strand
cuagaggaggagaggcuga

SEQ ID NO: 2475867 - RNA, 19 nt, Homo sapiens
  misc_RNA (1)...(19): siRNA sense strand
uggauguggagaaaggcaa

SEQ ID NO: 2475868 - RNA, 19 nt, Homo sapiens
  misc_RNA (1)...(19): siRNA sense strand
auggagaaccucagccgaa

SEQ ID NO: 2475869 - RNA, 19 nt, Homo sapiens
  misc_RNA (1)...(19): siRNA sense strand
agcuggaagacguggaaaa

SEQ ID NO: 2475870 - RNA, 19 nt, Homo sapiens
  misc_RNA (1)...(19): siRNA sense strand
acagugaauuuaaacgaca

SEQ ID NO: 2475871 - RNA, 19 nt, Homo sapiens
  misc_RNA (1)...(19): siRNA sense strand
cagcaagccgggugggaau

SEQ ID NO: 2475872 - RNA, 19 nt, Homo sapiens
  misc_RNA (1)...(19): siRNA sense strand
aggccuaccuucugggcaa

SEQ ID NO: 2475873 - RNA, 19 nt, Homo sapiens
  misc_RNA (1)...(19): siRNA sense strand
ggaaauggguccaccagga

SEQ ID NO: 2475874 - RNA, 19 nt, Homo sapiens
  misc_RNA (1)...(19): siRNA sense strand
gcacagaggagaagagcag

SEQ ID NO: 2475875 - RNA, 19 nt, Homo sapiens
  misc_RNA (1)...(19): siRNA sense strand
ggauaacuguucaggagga

SEQ ID NO: 2475876 - RNA, 19 nt, Homo sapiens
  misc_RNA (1)...(19): siRNA sense strand
uggcggagcagaugaggaa

SEQ ID NO: 2475877 - RNA, 19 nt, Homo sapiens
  misc_RNA (1)...(19): siRNA sense strand
gcggagcagaugaggaaga

SEQ ID NO: 2475878 - RNA, 19 nt, Homo sapiens
  misc_RNA (1)...(19): siRNA sense strand
uguggagcacggagggaaa

SEQ ID NO: 2475879 - RNA, 19 nt, Homo sapiens
  misc_RNA (1)...(19): siRNA sense strand
guuccagcacagaggagaa

SEQ ID NO: 2475880 - RNA, 19 nt, Homo sapiens
  misc_RNA (1)...(19): siRNA sense strand
cugcaaugggccuguggua

SEQ ID NO: 2475881 - RNA, 19 nt, Homo sapiens
  misc_RNA (1)...(19): siRNA sense strand
guagcgucugcgagggaaa

SEQ ID NO: 2475882 - RNA, 19 nt, Homo sapiens
  misc_RNA (1)...(19): siRNA sense strand
ccacagggcugaaggaagc

SEQ ID NO: 2475883 - RNA, 19 nt, Homo sapiens
  misc_RNA (1)...(19): siRNA sense strand
ggaggauccgagugugaau

SEQ ID NO: 2475884 - RNA, 19 nt, Homo sapiens
  misc_RNA (1)...(19): siRNA sense strand
agaccaagaacuaugacau

SEQ ID NO: 2475885 - RNA, 19 nt, Homo sapiens
  misc_RNA (1)...(19): siRNA sense strand
aggaacagauggagucgga

SEQ ID NO: 2475886 - RNA, 19 nt, Homo sapiens
  misc_RNA (1)...(19): siRNA sense strand
ggaaggugaaacacggaca

SEQ ID NO: 2475887 - RNA, 19 nt, Homo sapiens
  misc_RNA (1)...(19): siRNA sense strand
aagcagaaagaaaggaaaa

SEQ ID NO: 2475888 - RNA, 19 nt, Homo sapiens
  misc_RNA (1)...(19): siRNA sense strand
gguguuacguauaggcuca

SEQ ID NO: 2475889 - RNA, 19 nt, Homo sapiens
  misc_RNA (1)...(19): siRNA sense strand
gaagauggauaaauggcau

SEQ ID NO: 2475890 - RNA, 19 nt, Homo sapiens
  misc_RNA (1)...(19): siRNA sense strand
cagcuaaacuacaggaggu

SEQ ID NO: 2475891 - RNA, 19 nt, Homo sapiens
  misc_RNA (1)...(19): siRNA sense strand
gaagaacgaacaaggccaa

SEQ ID NO: 2475892 - RNA, 19 nt, Homo sapiens
  misc_RNA (1)...(19): siRNA sense strand
uggagaugauccugaacau

SEQ ID NO: 2475893 - RNA, 19 nt, Homo sapiens
  misc_RNA (1)...(19): siRNA sense strand
acagaagguuuuaaaggaa

SEQ ID NO: 2475894 - RNA, 19 nt, Homo sapiens
  misc_RNA (1)...(19): siRNA sense strand
cggcuuaggaugugagcuc

SEQ ID NO: 2475895 - RNA, 19 nt, Homo sapiens
  misc_RNA (1)...(19): siRNA sense strand
cugcaguagcuuccacaaa

SEQ ID NO: 2475896 - RNA, 19 nt, Homo sapiens
  misc_RNA (1)...(19): siRNA sense strand
caaaugaaaucuccagcca

SEQ ID NO: 2475897 - RNA, 19 nt, Homo sapiens
  misc_RNA (1)...(19): siRNA sense strand
aagcagaaagaaaggaaaa

SEQ ID NO: 2475898 - RNA, 19 nt, Homo sapiens
  misc_RNA (1)...(19): siRNA sense strand
gguguuacguauaggcuca

SEQ ID NO: 2475899 - RNA, 19 nt, Homo sapiens
  misc_RNA (1)...(19): siRNA sense strand
gaagauggauaaauggcau

SEQ ID NO: 2475900 - RNA, 19 nt, Homo sapiens
  misc_RNA (1)...(19): siRNA sense strand
cagcuaaacuacaggaggu

SEQ ID NO: 2475901 - RNA, 19 nt, Homo sapiens
  misc_RNA (1)...(19): siRNA sense strand
gaagaacgaacaaggccaa

SEQ ID NO: 2475902 - RNA, 19 nt, Homo sapiens
  misc_RNA (1)...(19): siRNA sense strand
uggagaugauccugaacau

SEQ ID NO: 2475903 - RNA, 19 nt, Homo sapiens
  misc_RNA (1)...(19): siRNA sense strand
acagaagguuuuaaaggaa

SEQ ID NO: 2475904 - RNA, 19 nt, Homo sapiens
  misc_RNA (1)...(19): siRNA sense strand
cggcuuaggaugugagcuc

SEQ ID NO: 2475905 - RNA, 19 nt, Homo sapiens
  misc_RNA (1)...(19): siRNA sense strand
cugcaguagcuuccacaaa

SEQ ID NO: 2475906 - RNA, 19 nt, Homo sapiens
  misc_RNA (1)...(19): siRNA sense strand
caaaugaaaucuccagcca

SEQ ID NO: 2475907 - RNA, 19 nt, Homo sapiens
  misc_RNA (1)...(19): siRNA sense strand
aagcagaaagaaaggaaaa

SEQ ID NO: 2475908 - RNA, 19 nt, Homo sapiens
  misc_RNA (1)...(19): siRNA sense strand
gguguuacguauaggcuca

SEQ ID NO: 2475909 - RNA, 19 nt, Homo sapiens
  misc_RNA (1)...(19): siRNA sense strand
gaagauggauaaauggcau

SEQ ID NO: 2475910 - RNA, 19 nt, Homo sapiens
  misc_RNA (1)...(19): siRNA sense strand
cagcuaaacuacaggaggu

SEQ ID NO: 2475911 - RNA, 19 nt, Homo sapiens
  misc_RNA (1)...(19): siRNA sense strand
gaagaacgaacaaggccaa

SEQ ID NO: 2475912 - RNA, 19 nt, Homo sapiens
  misc_RNA (1)...(19): siRNA sense strand
uggagaugauccugaacau

SEQ ID NO: 2475913 - RNA, 19 nt, Homo sapiens
  misc_RNA (1)...(19): siRNA sense strand
acagaagguuuuaaaggaa

SEQ ID NO: 2475914 - RNA, 19 nt, Homo sapiens
  misc_RNA (1)...(19): siRNA sense strand
cugcaguagcuuccacaaa

SEQ ID NO: 2475915 - RNA, 19 nt, Homo sapiens
  misc_RNA (1)...(19): siRNA sense strand
caaaugaaaucuccagcca

SEQ ID NO: 2475916 - RNA, 19 nt, Homo sapiens
  misc_RNA (1)...(19): siRNA sense strand
auucauugucggagggaaa

SEQ ID NO: 2475917 - RNA, 19 nt, Homo sapiens
  misc_RNA (1)...(19): siRNA sense strand
aaacuauugucgugggcua

SEQ ID NO: 2475918 - RNA, 19 nt, Homo sapiens
  misc_RNA (1)...(19): siRNA sense strand
aauauaaacugguacggaa

SEQ ID NO: 2475919 - RNA, 19 nt, Homo sapiens
  misc_RNA (1)...(19): siRNA sense strand
cugacaaaaccaagaguaa

SEQ ID NO: 2475920 - RNA, 19 nt, Homo sapiens
  misc_RNA (1)...(19): siRNA sense strand
acauggaaucauuaggaua

SEQ ID NO: 2475921 - RNA, 19 nt, Homo sapiens
  misc_RNA (1)...(19): siRNA sense strand
aggcaagcaaacugacaaa

SEQ ID NO: 2475922 - RNA, 19 nt, Homo sapiens
  misc_RNA (1)...(19): siRNA sense strand
ccuaauggguauugggcgu

SEQ ID NO: 2475923 - RNA, 19 nt, Homo sapiens
  misc_RNA (1)...(19): siRNA sense strand
guacagagacaacaggaca

SEQ ID NO: 2475924 - RNA, 19 nt, Homo sapiens
  misc_RNA (1)...(19): siRNA sense strand
agacaacaggacaaggcaa

SEQ ID NO: 2475925 - RNA, 19 nt, Homo sapiens
  misc_RNA (1)...(19): siRNA sense strand
acaucuauuuggcgaucaa

SEQ ID NO: 2475926 - RNA, 19 nt, Homo sapiens
  misc_RNA (1)...(19): siRNA sense strand
auaacuuccuaauggguau

SEQ ID NO: 2475927 - RNA, 19 nt, Homo sapiens
  misc_RNA (1)...(19): siRNA sense strand
ggugguauggucaggaaaa

SEQ ID NO: 2475928 - RNA, 19 nt, Homo sapiens
  misc_RNA (1)...(19): siRNA sense strand
uggacaauguuaaagcaga

SEQ ID NO: 2475929 - RNA, 19 nt, Homo sapiens
  misc_RNA (1)...(19): siRNA sense strand
ugggcuacgcuuugaggaa

SEQ ID NO: 2475930 - RNA, 19 nt, Homo sapiens
  misc_RNA (1)...(19): siRNA sense strand
gacaaaaccaagaguaaca

SEQ ID NO: 2475931 - RNA, 19 nt, Homo sapiens
  misc_RNA (1)...(19): siRNA sense strand
ucaccaacggcgaggaagu

SEQ ID NO: 2475932 - RNA, 19 nt, Homo sapiens
  misc_RNA (1)...(19): siRNA sense strand
gggcuaaaggcugcaacaa

SEQ ID NO: 2475933 - RNA, 19 nt, Homo sapiens
  misc_RNA (1)...(19): siRNA sense strand
cuacacauuugauuggaca

SEQ ID NO: 2475934 - RNA, 19 nt, Homo sapiens
  misc_RNA (1)...(19): siRNA sense strand
agacauuaaaccagauaac

SEQ ID NO: 2475935 - RNA, 19 nt, Homo sapiens
  misc_RNA (1)...(19): siRNA sense strand
cuucagugacagaugguaa

SEQ ID NO: 2475936 - RNA, 19 nt, Homo sapiens
  misc_RNA (1)...(19): siRNA sense strand
acgagaagcgggugaaacu

SEQ ID NO: 2475937 - RNA, 19 nt, Homo sapiens
  misc_RNA (1)...(19): siRNA sense strand
aagccagugcaaaggagaa

SEQ ID NO: 2475938 - RNA, 19 nt, Homo sapiens
  misc_RNA (1)...(19): siRNA sense strand
acaaugaagcugugaaaau

SEQ ID NO: 2475939 - RNA, 19 nt, Homo sapiens
  misc_RNA (1)...(19): siRNA sense strand
aguuuaaagaagauagcca

SEQ ID NO: 2475940 - RNA, 19 nt, Homo sapiens
  misc_RNA (1)...(19): siRNA sense strand
guuuaaagaagauagccau

SEQ ID NO: 2475941 - RNA, 19 nt, Homo sapiens
  misc_RNA (1)...(19): siRNA sense strand
uguggaagugguuggaaga

SEQ ID NO: 2475942 - RNA, 19 nt, Homo sapiens
  misc_RNA (1)...(19): siRNA sense strand
gcaaaagaacagaaagcaa

SEQ ID NO: 2475943 - RNA, 19 nt, Homo sapiens
  misc_RNA (1)...(19): siRNA sense strand
aggaaaguaaagaggaaga

SEQ ID NO: 2475944 - RNA, 19 nt, Homo sapiens
  misc_RNA (1)...(19): siRNA sense strand
guauagauguugcugggaa

SEQ ID NO: 2475945 - RNA, 19 nt, Homo sapiens
  misc_RNA (1)...(19): siRNA sense strand
cauuggaggucuugggcuu

SEQ ID NO: 2475946 - RNA, 19 nt, Homo sapiens
  misc_RNA (1)...(19): siRNA sense strand
agaaagcaaacgagcagaa

SEQ ID NO: 2475947 - RNA, 19 nt, Homo sapiens
  misc_RNA (1)...(19): siRNA sense strand
caaccaaggcagggaaaga

SEQ ID NO: 2475948 - RNA, 19 nt, Homo sapiens
  misc_RNA (1)...(19): siRNA sense strand
uggaagacacccuaaacaa

SEQ ID NO: 2475949 - RNA, 19 nt, Homo sapiens
  misc_RNA (1)...(19): siRNA sense strand
cgucuguauuggagucauu

SEQ ID NO: 2475950 - RNA, 19 nt, Homo sapiens
  misc_RNA (1)...(19): siRNA sense strand
ccuaauuauuucagguauc

SEQ ID NO: 2475951 - RNA, 19 nt, Homo sapiens
  misc_RNA (1)...(19): siRNA sense strand
ucaaugacauguauggaga

SEQ ID NO: 2475952 - RNA, 19 nt, Homo sapiens
  misc_RNA (1)...(19): siRNA sense strand
guaaagaggaagagaccag

SEQ ID NO: 2475953 - RNA, 19 nt, Homo sapiens
  misc_RNA (1)...(19): siRNA sense strand
cgguaucuuuggauggaga

SEQ ID NO: 2475954 - RNA, 19 nt, Homo sapiens
  misc_RNA (1)...(19): siRNA sense strand
acacccuaaacaagagaaa

SEQ ID NO: 2475955 - RNA, 19 nt, Homo sapiens
  misc_RNA (1)...(19): siRNA sense strand
gccaaaugaaguuaccaaa

SEQ ID NO: 2475956 - RNA, 19 nt, Homo sapiens
  misc_RNA (1)...(19): siRNA sense strand
ccauaauguuggcugucau

SEQ ID NO: 2475957 - RNA, 19 nt, Homo sapiens
  misc_RNA (1)...(19): siRNA sense strand
aaauacacauacugggcau

SEQ ID NO: 2475958 - RNA, 19 nt, Homo sapiens
  misc_RNA (1)...(19): siRNA sense strand
cuuaguaguuaugggaaga

SEQ ID NO: 2475959 - RNA, 19 nt, Homo sapiens
  misc_RNA (1)...(19): siRNA sense strand
cuaugggacuuguagccaa

SEQ ID NO: 2475960 - RNA, 19 nt, Homo sapiens
  misc_RNA (1)...(19): siRNA sense strand
cagcagaaucuccggacca

SEQ ID NO: 2475961 - RNA, 19 nt, Homo sapiens
  misc_RNA (1)...(19): siRNA sense strand
ggcccaaggaggaggaaag

SEQ ID NO: 2475962 - RNA, 19 nt, Homo sapiens
  misc_RNA (1)...(19): siRNA sense strand
ucuccagcgcugugggauu

SEQ ID NO: 2475963 - RNA, 19 nt, Homo sapiens
  misc_RNA (1)...(19): siRNA sense strand
ccuugagaaagcuggaaaa

SEQ ID NO: 2475964 - RNA, 19 nt, Homo sapiens
  misc_RNA (1)...(19): siRNA sense strand
uugcaaauggaguguguca

SEQ ID NO: 2475965 - RNA, 19 nt, Homo sapiens
  misc_RNA (1)...(19): siRNA sense strand
agcgaagugucauggauau

SEQ ID NO: 2475966 - RNA, 19 nt, Homo sapiens
  misc_RNA (1)...(19): siRNA sense strand
augggaagagucagcauua

SEQ ID NO: 2475967 - RNA, 19 nt, Homo sapiens
  misc_RNA (1)...(19): siRNA sense strand
aucuuuggauggagaggaa

SEQ ID NO: 2475968 - RNA, 19 nt, Homo sapiens
  misc_RNA (1)...(19): siRNA sense strand
agggaaagauaagucuaaa

SEQ ID NO: 2475969 - RNA, 19 nt, Homo sapiens
  misc_RNA (1)...(19): siRNA sense strand
gcuauaccucucuggaaau

SEQ ID NO: 2475970 - RNA, 19 nt, Homo sapiens
  misc_RNA (1)...(19): siRNA sense strand
ucuuaguaguuaugggaag

SEQ ID NO: 2475971 - RNA, 19 nt, Homo sapiens
  misc_RNA (1)...(19): siRNA sense strand
aaacaaaggucucagccaa

SEQ ID NO: 2475972 - RNA, 19 nt, Homo sapiens
  misc_RNA (1)...(19): siRNA sense strand
uugucaaaccagugaagaa

SEQ ID NO: 2475973 - RNA, 19 nt, Homo sapiens
  misc_RNA (1)...(19): siRNA sense strand
ggaaaagaggauaugggua

SEQ ID NO: 2475974 - RNA, 19 nt, Homo sapiens
  misc_RNA (1)...(19): siRNA sense strand
uggacaaagcaguugaaca

SEQ ID NO: 2475975 - RNA, 19 nt, Homo sapiens
  misc_RNA (1)...(19): siRNA sense strand
gaacagaaacaaaggucuc

SEQ ID NO: 2475976 - RNA, 19 nt, Homo sapiens
  misc_RNA (1)...(19): siRNA sense strand
guucauuugaccuggcaau

SEQ ID NO: 2475977 - RNA, 19 nt, Homo sapiens
  misc_RNA (1)...(19): siRNA sense strand
caauauuggaaaagaggau

SEQ ID NO: 2475978 - RNA, 19 nt, Homo sapiens
  misc_RNA (1)...(19): siRNA sense strand
aagcaguugaacagaaaca

SEQ ID NO: 2475979 - RNA, 19 nt, Homo sapiens
  misc_RNA (1)...(19): siRNA sense strand
ccuuaugccucgaaccuga

SEQ ID NO: 2475980 - RNA, 19 nt, Homo sapiens
  misc_RNA (1)...(19): siRNA sense strand
cuaaagaacaauuccgagu

SEQ ID NO: 2475981 - RNA, 19 nt, Homo sapiens
  misc_RNA (1)...(19): siRNA sense strand
uguuaaaucuccuuggugu

SEQ ID NO: 2475982 - RNA, 19 nt, Homo sapiens
  misc_RNA (1)...(19): siRNA sense strand
uugacauagaugaugcaaa

SEQ ID NO: 2475983 - RNA, 19 nt, Homo sapiens
  misc_RNA (1)...(19): siRNA sense strand
gaaacaaaggucucagcca

SEQ ID NO: 2475984 - RNA, 19 nt, Homo sapiens
  misc_RNA (1)...(19): siRNA sense strand
aaacagauccgcaagcuga

SEQ ID NO: 2475985 - RNA, 19 nt, Homo sapiens
  misc_RNA (1)...(19): siRNA sense strand
ucuuucagcacuuggacaa

SEQ ID NO: 2475986 - RNA, 19 nt, Homo sapiens
  misc_RNA (1)...(19): siRNA sense strand
ugggcuacuucaaagacaa

SEQ ID NO: 2475987 - RNA, 19 nt, Homo sapiens
  misc_RNA (1)...(19): siRNA sense strand
cugaaaugcaugugaggau

SEQ ID NO: 2475988 - RNA, 19 nt, Homo sapiens
  misc_RNA (1)...(19): siRNA sense strand
ucaucaaggcagaauacaa

SEQ ID NO: 2475989 - RNA, 19 nt, Homo sapiens
  misc_RNA (1)...(19): siRNA sense strand
cugaauguccacagugaau

SEQ ID NO: 2475990 - RNA, 19 nt, Homo sapiens
  misc_RNA (1)...(19): siRNA sense strand
ccucgaguguccagagcau

SEQ ID NO: 2475991 - RNA, 19 nt, Homo sapiens
  misc_RNA (1)...(19): siRNA sense strand
caucaauguuccugccuga

SEQ ID NO: 2475992 - RNA, 19 nt, Homo sapiens
  misc_RNA (1)...(19): siRNA sense strand
ggggaaagacccagaaagu

SEQ ID NO: 2475993 - RNA, 19 nt, Homo sapiens
  misc_RNA (1)...(19): siRNA sense strand
ggcagagagcacuggacua

SEQ ID NO: 2475994 - RNA, 19 nt, Homo sapiens
  misc_RNA (1)...(19): siRNA sense strand
ccaacuucaucaaggcaga

SEQ ID NO: 2475995 - RNA, 19 nt, Homo sapiens
  misc_RNA (1)...(19): siRNA sense strand
auacaagggccgaguuacu

SEQ ID NO: 2475996 - RNA, 19 nt, Homo sapiens
  misc_RNA (1)...(19): siRNA sense strand
ggauccucccagaaguaaa

SEQ ID NO: 2475997 - RNA, 19 nt, Homo sapiens
  misc_RNA (1)...(19): siRNA sense strand
ccacagugaauacgagcca

SEQ ID NO: 2475998 - RNA, 19 nt, Homo sapiens
  misc_RNA (1)...(19): siRNA sense strand
ugaaugaaaucguggcuca

SEQ ID NO: 2475999 - RNA, 19 nt, Homo sapiens
  misc_RNA (1)...(19): siRNA sense strand
cagaagaaauucaacagca

SEQ ID NO: 2476000 - RNA, 19 nt, Homo sapiens
  misc_RNA (1)...(19): siRNA sense strand
uuguggaaacucuggauaa

SEQ ID NO: 2476001 - RNA, 19 nt, Homo sapiens
  misc_RNA (1)...(19): siRNA sense strand
gcucaaaacaggcuggaga

SEQ ID NO: 2476002 - RNA, 19 nt, Homo sapiens
  misc_RNA (1)...(19): siRNA sense strand
gaacaucaacauuggcgau

SEQ ID NO: 2476003 - RNA, 19 nt, Homo sapiens
  misc_RNA (1)...(19): siRNA sense strand
uggauaaguguuucgaaaa

SEQ ID NO: 2476004 - RNA, 19 nt, Homo sapiens
  misc_RNA (1)...(19): siRNA sense strand
gaaccgacaugcugggaga

SEQ ID NO: 2476005 - RNA, 19 nt, Homo sapiens
  misc_RNA (1)...(19): siRNA sense strand
ggacaagaauuccagccaa

SEQ ID NO: 2476006 - RNA, 19 nt, Homo sapiens
  misc_RNA (1)...(19): siRNA sense strand
gaggaggagcagagcgaga

SEQ ID NO: 2476007 - RNA, 19 nt, Homo sapiens
  misc_RNA (1)...(19): siRNA sense strand
gugagaaggucuuggggau

SEQ ID NO: 2476008 - RNA, 19 nt, Homo sapiens
  misc_RNA (1)...(19): siRNA sense strand
gcaccuaugucccuggcua

SEQ ID NO: 2476009 - RNA, 19 nt, Homo sapiens
  misc_RNA (1)...(19): siRNA sense strand
aggaggaggagcagagcga

SEQ ID NO: 2476010 - RNA, 19 nt, Homo sapiens
  misc_RNA (1)...(19): siRNA sense strand
agguggacgccgugcacaa

SEQ ID NO: 2476011 - RNA, 19 nt, Homo sapiens
  misc_RNA (1)...(19): siRNA sense strand
gugacuucuugcugaguga

SEQ ID NO: 2476012 - RNA, 19 nt, Homo sapiens
  misc_RNA (1)...(19): siRNA sense strand
cgucaggagagaaacccaa

SEQ ID NO: 2476013 - RNA, 19 nt, Homo sapiens
  misc_RNA (1)...(19): siRNA sense strand
ggauugugguacagaacac

SEQ ID NO: 2476014 - RNA, 19 nt, Homo sapiens
  misc_RNA (1)...(19): siRNA sense strand
gaaccgacaugcugggaga

SEQ ID NO: 2476015 - RNA, 19 nt, Homo sapiens
  misc_RNA (1)...(19): siRNA sense strand
ggacaagaauuccagccaa

SEQ ID NO: 2476016 - RNA, 19 nt, Homo sapiens
  misc_RNA (1)...(19): siRNA sense strand
gaggaggagcagagcgaga

SEQ ID NO: 2476017 - RNA, 19 nt, Homo sapiens
  misc_RNA (1)...(19): siRNA sense strand
gugagaaggucuuggggau

SEQ ID NO: 2476018 - RNA, 19 nt, Homo sapiens
  misc_RNA (1)...(19): siRNA sense strand
gcaccuaugucccuggcua

SEQ ID NO: 2476019 - RNA, 19 nt, Homo sapiens
  misc_RNA (1)...(19): siRNA sense strand
aggaggaggagcagagcga

SEQ ID NO: 2476020 - RNA, 19 nt, Homo sapiens
  misc_RNA (1)...(19): siRNA sense strand
agguggacgccgugcacaa

SEQ ID NO: 2476021 - RNA, 19 nt, Homo sapiens
  misc_RNA (1)...(19): siRNA sense strand
gugacuucuugcugaguga

SEQ ID NO: 2476022 - RNA, 19 nt, Homo sapiens
  misc_RNA (1)...(19): siRNA sense strand
cgucaggagagaaacccaa

SEQ ID NO: 2476023 - RNA, 19 nt, Homo sapiens
  misc_RNA (1)...(19): siRNA sense strand
ggauugugguacagaacac

SEQ ID NO: 2476024 - RNA, 19 nt, Homo sapiens
  misc_RNA (1)...(19): siRNA sense strand
gaaccgacaugcugggaga

SEQ ID NO: 2476025 - RNA, 19 nt, Homo sapiens
  misc_RNA (1)...(19): siRNA sense strand
ggacaagaauuccagccaa

SEQ ID NO: 2476026 - RNA, 19 nt, Homo sapiens
  misc_RNA (1)...(19): siRNA sense strand
gaggaggagcagagcgaga

SEQ ID NO: 2476027 - RNA, 19 nt, Homo sapiens
  misc_RNA (1)...(19): siRNA sense strand
gugagaaggucuuggggau

SEQ ID NO: 2476028 - RNA, 19 nt, Homo sapiens
  misc_RNA (1)...(19): siRNA sense strand
gcaccuaugucccuggcua

SEQ ID NO: 2476029 - RNA, 19 nt, Homo sapiens
  misc_RNA (1)...(19): siRNA sense strand
aggaggaggagcagagcga

SEQ ID NO: 2476030 - RNA, 19 nt, Homo sapiens
  misc_RNA (1)...(19): siRNA sense strand
agguggacgccgugcacaa

SEQ ID NO: 2476031 - RNA, 19 nt, Homo sapiens
  misc_RNA (1)...(19): siRNA sense strand
gugacuucuugcugaguga

SEQ ID NO: 2476032 - RNA, 19 nt, Homo sapiens
  misc_RNA (1)...(19): siRNA sense strand
cgucaggagagaaacccaa

SEQ ID NO: 2476033 - RNA, 19 nt, Homo sapiens
  misc_RNA (1)...(19): siRNA sense strand
ggauugugguacagaacac

SEQ ID NO: 2476034 - RNA, 19 nt, Homo sapiens
  misc_RNA (1)...(19): siRNA sense strand
cccaaaaggacaaggacaa

SEQ ID NO: 2476035 - RNA, 19 nt, Homo sapiens
  misc_RNA (1)...(19): siRNA sense strand
agaggaaaggccuggagaa

SEQ ID NO: 2476036 - RNA, 19 nt, Homo sapiens
  misc_RNA (1)...(19): siRNA sense strand
guucugaaggcgaggcuga

SEQ ID NO: 2476037 - RNA, 19 nt, Homo sapiens
  misc_RNA (1)...(19): siRNA sense strand
cccuuaaacucgaacccaa

SEQ ID NO: 2476038 - RNA, 19 nt, Homo sapiens
  misc_RNA (1)...(19): siRNA sense strand
caaaagucaaagaaggcaa

SEQ ID NO: 2476039 - RNA, 19 nt, Homo sapiens
  misc_RNA (1)...(19): siRNA sense strand
ggcaacacgcugagagauc

SEQ ID NO: 2476040 - RNA, 19 nt, Homo sapiens
  misc_RNA (1)...(19): siRNA sense strand
aggaaaggccuggagaaaa

SEQ ID NO: 2476041 - RNA, 19 nt, Homo sapiens
  misc_RNA (1)...(19): siRNA sense strand
aaggcgaggcugagagcga

SEQ ID NO: 2476042 - RNA, 19 nt, Homo sapiens
  misc_RNA (1)...(19): siRNA sense strand
acgagaagaccauggacaa

SEQ ID NO: 2476043 - RNA, 19 nt, Homo sapiens
  misc_RNA (1)...(19): siRNA sense strand
ccaaggagaagaaggccaa

SEQ ID NO: 2476044 - RNA, 19 nt, Homo sapiens
  misc_RNA (1)...(19): siRNA sense strand
uggacaaagcccuggagaa

SEQ ID NO: 2476045 - RNA, 19 nt, Homo sapiens
  misc_RNA (1)...(19): siRNA sense strand
cugacaagcccaacagcaa

SEQ ID NO: 2476046 - RNA, 19 nt, Homo sapiens
  misc_RNA (1)...(19): siRNA sense strand
gggagaacgagaagaccau

SEQ ID NO: 2476047 - RNA, 19 nt, Homo sapiens
  misc_RNA (1)...(19): siRNA sense strand
aucauaaacccaagggcaa

SEQ ID NO: 2476048 - RNA, 19 nt, Homo sapiens
  misc_RNA (1)...(19): siRNA sense strand
gcaacaacgagaaccguga

SEQ ID NO: 2476049 - RNA, 19 nt, Homo sapiens
  misc_RNA (1)...(19): siRNA sense strand
aaucauaaacccaagggca

SEQ ID NO: 2476050 - RNA, 19 nt, Homo sapiens
  misc_RNA (1)...(19): siRNA sense strand
cgggcacacccaaggagaa

SEQ ID NO: 2476051 - RNA, 19 nt, Homo sapiens
  misc_RNA (1)...(19): siRNA sense strand
acgagaagaccauggacaa

SEQ ID NO: 2476052 - RNA, 19 nt, Homo sapiens
  misc_RNA (1)...(19): siRNA sense strand
ccaaggagaagaaggccaa

SEQ ID NO: 2476053 - RNA, 19 nt, Homo sapiens
  misc_RNA (1)...(19): siRNA sense strand
uggacaaagcccuggagaa

SEQ ID NO: 2476054 - RNA, 19 nt, Homo sapiens
  misc_RNA (1)...(19): siRNA sense strand
cugacaagcccaacagcaa

SEQ ID NO: 2476055 - RNA, 19 nt, Homo sapiens
  misc_RNA (1)...(19): siRNA sense strand
gggagaacgagaagaccau

SEQ ID NO: 2476056 - RNA, 19 nt, Homo sapiens
  misc_RNA (1)...(19): siRNA sense strand
aucauaaacccaagggcaa

SEQ ID NO: 2476057 - RNA, 19 nt, Homo sapiens
  misc_RNA (1)...(19): siRNA sense strand
gcaacaacgagaaccguga

SEQ ID NO: 2476058 - RNA, 19 nt, Homo sapiens
  misc_RNA (1)...(19): siRNA sense strand
aaucauaaacccaagggca

SEQ ID NO: 2476059 - RNA, 19 nt, Homo sapiens
  misc_RNA (1)...(19): siRNA sense strand
cgggcacacccaaggagaa

SEQ ID NO: 2476060 - RNA, 19 nt, Homo sapiens
  misc_RNA (1)...(19): siRNA sense strand
acgagaagaccauggacaa

SEQ ID NO: 2476061 - RNA, 19 nt, Homo sapiens
  misc_RNA (1)...(19): siRNA sense strand
ccaaggagaagaaggccaa

SEQ ID NO: 2476062 - RNA, 19 nt, Homo sapiens
  misc_RNA (1)...(19): siRNA sense strand
uggacaaagcccuggagaa

SEQ ID NO: 2476063 - RNA, 19 nt, Homo sapiens
  misc_RNA (1)...(19): siRNA sense strand
cugacaagcccaacagcaa

SEQ ID NO: 2476064 - RNA, 19 nt, Homo sapiens
  misc_RNA (1)...(19): siRNA sense strand
gggagaacgagaagaccau

SEQ ID NO: 2476065 - RNA, 19 nt, Homo sapiens
  misc_RNA (1)...(19): siRNA sense strand
aucauaaacccaagggcaa

SEQ ID NO: 2476066 - RNA, 19 nt, Homo sapiens
  misc_RNA (1)...(19): siRNA sense strand
gcaacaacgagaaccguga

SEQ ID NO: 2476067 - RNA, 19 nt, Homo sapiens
  misc_RNA (1)...(19): siRNA sense strand
aaucauaaacccaagggca

SEQ ID NO: 2476068 - RNA, 19 nt, Homo sapiens
  misc_RNA (1)...(19): siRNA sense strand
cgggcacacccaaggagaa

SEQ ID NO: 2476069 - RNA, 19 nt, Homo sapiens
  misc_RNA (1)...(19): siRNA sense strand
acgagaagaccauggacaa

SEQ ID NO: 2476070 - RNA, 19 nt, Homo sapiens
  misc_RNA (1)...(19): siRNA sense strand
ccaaggagaagaaggccaa

SEQ ID NO: 2476071 - RNA, 19 nt, Homo sapiens
  misc_RNA (1)...(19): siRNA sense strand
uggacaaagcccuggagaa

SEQ ID NO: 2476072 - RNA, 19 nt, Homo sapiens
  misc_RNA (1)...(19): siRNA sense strand
cugacaagcccaacagcaa

SEQ ID NO: 2476073 - RNA, 19 nt, Homo sapiens
  misc_RNA (1)...(19): siRNA sense strand
gggagaacgagaagaccau

SEQ ID NO: 2476074 - RNA, 19 nt, Homo sapiens
  misc_RNA (1)...(19): siRNA sense strand
aucauaaacccaagggcaa

SEQ ID NO: 2476075 - RNA, 19 nt, Homo sapiens
  misc_RNA (1)...(19): siRNA sense strand
gcaacaacgagaaccguga

SEQ ID NO: 2476076 - RNA, 19 nt, Homo sapiens
  misc_RNA (1)...(19): siRNA sense strand
aaucauaaacccaagggca

SEQ ID NO: 2476077 - RNA, 19 nt, Homo sapiens
  misc_RNA (1)...(19): siRNA sense strand
cgggcacacccaaggagaa

SEQ ID NO: 2476078 - RNA, 19 nt, Homo sapiens
  misc_RNA (1)...(19): siRNA sense strand
aggcauuagcugaaagaaa

SEQ ID NO: 2476079 - RNA, 19 nt, Homo sapiens
  misc_RNA (1)...(19): siRNA sense strand
cauuacaaguacucggcaa

SEQ ID NO: 2476080 - RNA, 19 nt, Homo sapiens
  misc_RNA (1)...(19): siRNA sense strand
agaaauaaccuccggagca

SEQ ID NO: 2476081 - RNA, 19 nt, Homo sapiens
  misc_RNA (1)...(19): siRNA sense strand
gaugaagaaacuugcaaaa

SEQ ID NO: 2476082 - RNA, 19 nt, Homo sapiens
  misc_RNA (1)...(19): siRNA sense strand
uggugaaaggagagguaca

SEQ ID NO: 2476083 - RNA, 19 nt, Homo sapiens
  misc_RNA (1)...(19): siRNA sense strand
cacuggaacaacagauaaa

SEQ ID NO: 2476084 - RNA, 19 nt, Homo sapiens
  misc_RNA (1)...(19): siRNA sense strand
augaaagaucagaugucaa

SEQ ID NO: 2476085 - RNA, 19 nt, Homo sapiens
  misc_RNA (1)...(19): siRNA sense strand
gggaagaaaucgacuggac

SEQ ID NO: 2476086 - RNA, 19 nt, Homo sapiens
  misc_RNA (1)...(19): siRNA sense strand
gaagaaaucgacuggacca

SEQ ID NO: 2476087 - RNA, 19 nt, Homo sapiens
  misc_RNA (1)...(19): siRNA sense strand
agcaguugaucguggaaca

SEQ ID NO: 2476088 - RNA, 19 nt, Homo sapiens
  misc_RNA (1)...(19): siRNA sense strand
ucguggaacagcaggauga

SEQ ID NO: 2476089 - RNA, 19 nt, Homo sapiens
  misc_RNA (1)...(19): siRNA sense strand
agggauuguuucagagaug

SEQ ID NO: 2476090 - RNA, 19 nt, Homo sapiens
  misc_RNA (1)...(19): siRNA sense strand
uguggugaaaggagaggua

SEQ ID NO: 2476091 - RNA, 19 nt, Homo sapiens
  misc_RNA (1)...(19): siRNA sense strand
augcaacugaauugaguau

SEQ ID NO: 2476092 - RNA, 19 nt, Homo sapiens
  misc_RNA (1)...(19): siRNA sense strand
ccagaaucgccgagggcuu

SEQ ID NO: 2476093 - RNA, 19 nt, Homo sapiens
  misc_RNA (1)...(19): siRNA sense strand
uuaucaagcuaaugagcga

SEQ ID NO: 2476094 - RNA, 19 nt, Homo sapiens
  misc_RNA (1)...(19): siRNA sense strand
gaucaauaaagcuguccua

SEQ ID NO: 2476095 - RNA, 19 nt, Homo sapiens
  misc_RNA (1)...(19): siRNA sense strand
gagaacagauggcggugca

SEQ ID NO: 2476096 - RNA, 19 nt, Homo sapiens
  misc_RNA (1)...(19): siRNA sense strand
gugcaaagaucauagcuac

SEQ ID NO: 2476097 - RNA, 19 nt, Homo sapiens
  misc_RNA (1)...(19): siRNA sense strand
aagacuggccagaggcaca

SEQ ID NO: 2476098 - RNA, 19 nt, Homo sapiens
  misc_RNA (1)...(19): siRNA sense strand
gcacagaggaucucagccu

SEQ ID NO: 2476099 - RNA, 19 nt, Homo sapiens
  misc_RNA (1)...(19): siRNA sense strand
ucaauaaagcuguccuaca

SEQ ID NO: 2476100 - RNA, 19 nt, Homo sapiens
  misc_RNA (1)...(19): siRNA sense strand
uggugguguucaagggaaa

SEQ ID NO: 2476101 - RNA, 19 nt, Homo sapiens
  misc_RNA (1)...(19): siRNA sense strand
uggugaagauucugaggau

SEQ ID NO: 2476102 - RNA, 19 nt, Homo sapiens
  misc_RNA (1)...(19): siRNA sense strand
aaucccaguacaagagaaa

SEQ ID NO: 2476103 - RNA, 19 nt, Homo sapiens
  misc_RNA (1)...(19): siRNA sense strand
aggcagugauggugauagu

SEQ ID NO: 2476104 - RNA, 19 nt, Homo sapiens
  misc_RNA (1)...(19): siRNA sense strand
ugauguuggugguguucaa

SEQ ID NO: 2476105 - RNA, 19 nt, Homo sapiens
  misc_RNA (1)...(19): siRNA sense strand
gcagcacagcagaggaaga

SEQ ID NO: 2476106 - RNA, 19 nt, Homo sapiens
  misc_RNA (1)...(19): siRNA sense strand
uuugugagagugaggauaa

SEQ ID NO: 2476107 - RNA, 19 nt, Homo sapiens
  misc_RNA (1)...(19): siRNA sense strand
aagaaaagcagcaucuaaa

SEQ ID NO: 2476108 - RNA, 19 nt, Homo sapiens
  misc_RNA (1)...(19): siRNA sense strand
aggauaaugacgaagacuu

SEQ ID NO: 2476109 - RNA, 19 nt, Homo sapiens
  misc_RNA (1)...(19): siRNA sense strand
agaugauguuggugguguu

SEQ ID NO: 2476110 - RNA, 19 nt, Homo sapiens
  misc_RNA (1)...(19): siRNA sense strand
ggaagaugauguugguggu

SEQ ID NO: 2476111 - RNA, 19 nt, Homo sapiens
  misc_RNA (1)...(19): siRNA sense strand
ugauggugauagugcuaau

SEQ ID NO: 2476112 - RNA, 19 nt, Homo sapiens
  misc_RNA (1)...(19): siRNA sense strand
aagaaaucccaguacaaga

SEQ ID NO: 2476113 - RNA, 19 nt, Homo sapiens
  misc_RNA (1)...(19): siRNA sense strand
cuuuaucagugaaggaacu

SEQ ID NO: 2476114 - RNA, 19 nt, Homo sapiens
  misc_RNA (1)...(19): siRNA sense strand
caguagaaaagaaagagaa

SEQ ID NO: 2476115 - RNA, 19 nt, Homo sapiens
  misc_RNA (1)...(19): siRNA sense strand
caagaaauccagaacagca

SEQ ID NO: 2476116 - RNA, 19 nt, Homo sapiens
  misc_RNA (1)...(19): siRNA sense strand
ccuuuaaacaagaaaucca

SEQ ID NO: 2476117 - RNA, 19 nt, Homo sapiens
  misc_RNA (1)...(19): siRNA sense strand
cagcaccaaaggaguuaaa

SEQ ID NO: 2476118 - RNA, 19 nt, Homo sapiens
  misc_RNA (1)...(19): siRNA sense strand
ggaaagaagaaaucccagu

SEQ ID NO: 2476119 - RNA, 19 nt, Homo sapiens
  misc_RNA (1)...(19): siRNA sense strand
auaagauuacuguggaaga

SEQ ID NO: 2476120 - RNA, 19 nt, Homo sapiens
  misc_RNA (1)...(19): siRNA sense strand
agugauggugauagugcua

SEQ ID NO: 2476121 - RNA, 19 nt, Homo sapiens
  misc_RNA (1)...(19): siRNA sense strand
gccugugagacauaagaaa

SEQ ID NO: 2476122 - RNA, 19 nt, Homo sapiens
  misc_RNA (1)...(19): siRNA sense strand
cugaaagcaagaaaccuaa

SEQ ID NO: 2476123 - RNA, 19 nt, Homo sapiens
  misc_RNA (1)...(19): siRNA sense strand
agucaauuacucacaguuu

SEQ ID NO: 2476124 - RNA, 19 nt, Homo sapiens
  misc_RNA (1)...(19): siRNA sense strand
ggcaguaguaaaauagaaa

SEQ ID NO: 2476125 - RNA, 19 nt, Homo sapiens
  misc_RNA (1)...(19): siRNA sense strand
caucuaaagcugcagcaca

SEQ ID NO: 2476126 - RNA, 19 nt, Homo sapiens
  misc_RNA (1)...(19): siRNA sense strand
cuucaaauacguagagcaa

SEQ ID NO: 2476127 - RNA, 19 nt, Homo sapiens
  misc_RNA (1)...(19): siRNA sense strand
agaacggagauuugagaua

SEQ ID NO: 2476128 - RNA, 19 nt, Homo sapiens
  misc_RNA (1)...(19): siRNA sense strand
ugaugaaagucaaugggaa

SEQ ID NO: 2476129 - RNA, 19 nt, Homo sapiens
  misc_RNA (1)...(19): siRNA sense strand
gggucauacauguggauau

SEQ ID NO: 2476130 - RNA, 19 nt, Homo sapiens
  misc_RNA (1)...(19): siRNA sense strand
cuguggaaacaauggaaua

SEQ ID NO: 2476131 - RNA, 19 nt, Homo sapiens
  misc_RNA (1)...(19): siRNA sense strand
cuaaaauguacguggauau

SEQ ID NO: 2476132 - RNA, 19 nt, Homo sapiens
  misc_RNA (1)...(19): siRNA sense strand
gcuggaaacaaaugaugaa

SEQ ID NO: 2476133 - RNA, 19 nt, Homo sapiens
  misc_RNA (1)...(19): siRNA sense strand
gaugaaagucaaugggaac

SEQ ID NO: 2476134 - RNA, 19 nt, Homo sapiens
  misc_RNA (1)...(19): siRNA sense strand
agucauaaccauaccuauu

SEQ ID NO: 2476135 - RNA, 19 nt, Homo sapiens
  misc_RNA (1)...(19): siRNA sense strand
cacauuucuucaugggaua

SEQ ID NO: 2476136 - RNA, 19 nt, Homo sapiens
  misc_RNA (1)...(19): siRNA sense strand
cugcaauugugaugaaagu

SEQ ID NO: 2476137 - RNA, 19 nt, Homo sapiens
  misc_RNA (1)...(19): siRNA sense strand
acuacauagaccaaaguua

SEQ ID NO: 2476138 - RNA, 19 nt, Homo sapiens
  misc_RNA (1)...(19): siRNA sense strand
gggcagauagugaaacaca

SEQ ID NO: 2476139 - RNA, 19 nt, Homo sapiens
  misc_RNA (1)...(19): siRNA sense strand
ccacauuucuucaugggau

SEQ ID NO: 2476140 - RNA, 19 nt, Homo sapiens
  misc_RNA (1)...(19): siRNA sense strand
cugucuagcagguugcaaa

SEQ ID NO: 2476141 - RNA, 19 nt, Homo sapiens
  misc_RNA (1)...(19): siRNA sense strand
gaaagauaucaaugcauca

SEQ ID NO: 2476142 - RNA, 19 nt, Homo sapiens
  misc_RNA (1)...(19): siRNA sense strand
gccccaaacuccaaauaaa

SEQ ID NO: 2476143 - RNA, 19 nt, Homo sapiens
  misc_RNA (1)...(19): siRNA sense strand
gaaaaggaucaaacagcua

SEQ ID NO: 2476144 - RNA, 19 nt, Homo sapiens
  misc_RNA (1)...(19): siRNA sense strand
acugaacaccguuggaauu

SEQ ID NO: 2476145 - RNA, 19 nt, Homo sapiens
  misc_RNA (1)...(19): siRNA sense strand
gagaaagauaucaaugcau

SEQ ID NO: 2476146 - RNA, 19 nt, Homo sapiens
  misc_RNA (1)...(19): siRNA sense strand
ggaaauaauccagugacau

SEQ ID NO: 2476147 - RNA, 19 nt, Homo sapiens
  misc_RNA (1)...(19): siRNA sense strand
agagaugaugcuuguacaa

SEQ ID NO: 2476148 - RNA, 19 nt, Homo sapiens
  misc_RNA (1)...(19): siRNA sense strand
uuuaaaggaaucuggguca

SEQ ID NO: 2476149 - RNA, 19 nt, Homo sapiens
  misc_RNA (1)...(19): siRNA sense strand
cagcuuuauugcuaagaca

SEQ ID NO: 2476150 - RNA, 19 nt, Homo sapiens
  misc_RNA (1)...(19): siRNA sense strand
gggugaaugcccaagagau

SEQ ID NO: 2476151 - RNA, 19 nt, Homo sapiens
  misc_RNA (1)...(19): siRNA sense strand
aagcaaacuuagaauccuu

SEQ ID NO: 2476152 - RNA, 19 nt, Homo sapiens
  misc_RNA (1)...(19): siRNA sense strand
gcuaagacacuaggugcaa

SEQ ID NO: 2476153 - RNA, 19 nt, Homo sapiens
  misc_RNA (1)...(19): siRNA sense strand
guuguuucauuaugggaau

SEQ ID NO: 2476154 - RNA, 19 nt, Homo sapiens
  misc_RNA (1)...(19): siRNA sense strand
ggaaccagucuguggaaac

SEQ ID NO: 2476155 - RNA, 19 nt, Homo sapiens
  misc_RNA (1)...(19): siRNA sense strand
uguggaaacaauggaauaa

SEQ ID NO: 2476156 - RNA, 19 nt, Homo sapiens
  misc_RNA (1)...(19): siRNA sense strand
uggaaauuugcuugugauu

SEQ ID NO: 2476157 - RNA, 19 nt, Homo sapiens
  misc_RNA (1)...(19): siRNA sense strand
aggcacaaccuucagagaa

SEQ ID NO: 2476158 - RNA, 19 nt, Homo sapiens
  misc_RNA (1)...(19): siRNA sense strand
gggaaccagucuguggaaa

SEQ ID NO: 2476159 - RNA, 19 nt, Homo sapiens
  misc_RNA (1)...(19): siRNA sense strand
cuaacaucuuauugggagu

SEQ ID NO: 2476160 - RNA, 19 nt, Homo sapiens
  misc_RNA (1)...(19): siRNA sense strand
acgagcacuaggaggaauu

SEQ ID NO: 2476161 - RNA, 19 nt, Homo sapiens
  misc_RNA (1)...(19): siRNA sense strand
aggaauucuagcuccaaua

SEQ ID NO: 2476162 - RNA, 19 nt, Homo sapiens
  misc_RNA (1)...(19): siRNA sense strand
ccuucagagaauaagaaaa

SEQ ID NO: 2476163 - RNA, 19 nt, Homo sapiens
  misc_RNA (1)...(19): siRNA sense strand
ugucaugcugauuguuaaa

SEQ ID NO: 2476164 - RNA, 19 nt, Homo sapiens
  misc_RNA (1)...(19): siRNA sense strand
cugcaguuguuuggaagua

SEQ ID NO: 2476165 - RNA, 19 nt, Homo sapiens
  misc_RNA (1)...(19): siRNA sense strand
guguaaggaaggagaagau

SEQ ID NO: 2476166 - RNA, 19 nt, Homo sapiens
  misc_RNA (1)...(19): siRNA sense strand
cugcacagcuugacccuua

SEQ ID NO: 2476167 - RNA, 19 nt, Homo sapiens
  misc_RNA (1)...(19): siRNA sense strand
agucgcagguggugguaca

SEQ ID NO: 2476168 - RNA, 19 nt, Homo sapiens
  misc_RNA (1)...(19): siRNA sense strand
cugccgaugcccaggaaga

SEQ ID NO: 2476169 - RNA, 19 nt, Homo sapiens
  misc_RNA (1)...(19): siRNA sense strand
aaugaaaccaggaagaaaa

SEQ ID NO: 2476170 - RNA, 19 nt, Homo sapiens
  misc_RNA (1)...(19): siRNA sense strand
aaacagagcagcagcagca

SEQ ID NO: 2476171 - RNA, 19 nt, Homo sapiens
  misc_RNA (1)...(19): siRNA sense strand
agagaauauuggauggauc

SEQ ID NO: 2476172 - RNA, 19 nt, Homo sapiens
  misc_RNA (1)...(19): siRNA sense strand
cagcagcagcagagaugau

SEQ ID NO: 2476173 - RNA, 19 nt, Homo sapiens
  misc_RNA (1)...(19): siRNA sense strand
uuuuaaaggcaaagugcua

SEQ ID NO: 2476174 - RNA, 19 nt, Homo sapiens
  misc_RNA (1)...(19): siRNA sense strand
cguuaguguucgcgauuuu

SEQ ID NO: 2476175 - RNA, 19 nt, Homo sapiens
  misc_RNA (1)...(19): siRNA sense strand
gaacaauggagccagcuga

SEQ ID NO: 2476176 - RNA, 19 nt, Homo sapiens
  misc_RNA (1)...(19): siRNA sense strand
gcagcagagaugauaacau

SEQ ID NO: 2476177 - RNA, 19 nt, Homo sapiens
  misc_RNA (1)...(19): siRNA sense strand
ggcaaguuuaagaaggaua

SEQ ID NO: 2476178 - RNA, 19 nt, Homo sapiens
  misc_RNA (1)...(19): siRNA sense strand
gagaauccguccaugggaa

SEQ ID NO: 2476179 - RNA, 19 nt, Homo sapiens
  misc_RNA (1)...(19): siRNA sense strand
ccaccaaacagaacgagga

SEQ ID NO: 2476180 - RNA, 19 nt, Homo sapiens
  misc_RNA (1)...(19): siRNA sense strand
agaauccguccaugggaaa

SEQ ID NO: 2476181 - RNA, 19 nt, Homo sapiens
  misc_RNA (1)...(19): siRNA sense strand
ccuuaauggaagacucaga

SEQ ID NO: 2476182 - RNA, 19 nt, Homo sapiens
  misc_RNA (1)...(19): siRNA sense strand
caccaaacagaacgaggaa

SEQ ID NO: 2476183 - RNA, 19 nt, Homo sapiens
  misc_RNA (1)...(19): siRNA sense strand
gcacauugcugcugggagu

SEQ ID NO: 2476184 - RNA, 19 nt, Homo sapiens
  misc_RNA (1)...(19): siRNA sense strand
agaaugaagaguugaguau

SEQ ID NO: 2476185 - RNA, 19 nt, Homo sapiens
  misc_RNA (1)...(19): siRNA sense strand
guuauuagaaggaggaaaa

SEQ ID NO: 2476186 - RNA, 19 nt, Homo sapiens
  misc_RNA (1)...(19): siRNA sense strand
ggaaaaucaccaaaagaua

SEQ ID NO: 2476187 - RNA, 19 nt, Homo sapiens
  misc_RNA (1)...(19): siRNA sense strand
gugauaaaggaaaggaaga

SEQ ID NO: 2476188 - RNA, 19 nt, Homo sapiens
  misc_RNA (1)...(19): siRNA sense strand
aaacaacaugacagagaaa

SEQ ID NO: 2476189 - RNA, 19 nt, Homo sapiens
  misc_RNA (1)...(19): siRNA sense strand
cuguauuucuagugccaaa

SEQ ID NO: 2476190 - RNA, 19 nt, Homo sapiens
  misc_RNA (1)...(19): siRNA sense strand
caugaaagagugccagaaa

SEQ ID NO: 2476191 - RNA, 19 nt, Homo sapiens
  misc_RNA (1)...(19): siRNA sense strand
ggauaagguuggaaaauca

SEQ ID NO: 2476192 - RNA, 19 nt, Homo sapiens
  misc_RNA (1)...(19): siRNA sense strand
gauaaaggaaaggaagaaa

SEQ ID NO: 2476193 - RNA, 19 nt, Homo sapiens
  misc_RNA (1)...(19): siRNA sense strand
caauagaacacuugaagca

SEQ ID NO: 2476194 - RNA, 19 nt, Homo sapiens
  misc_RNA (1)...(19): siRNA sense strand
aaagauagguuaugccgaa

SEQ ID NO: 2476195 - RNA, 19 nt, Homo sapiens
  misc_RNA (1)...(19): siRNA sense strand
gugccaaaauggaaauaua

SEQ ID NO: 2476196 - RNA, 19 nt, Homo sapiens
  misc_RNA (1)...(19): siRNA sense strand
ugaagaaagagaugcagaa

SEQ ID NO: 2476197 - RNA, 19 nt, Homo sapiens
  misc_RNA (1)...(19): siRNA sense strand
cacaagaaccugaagaaga

SEQ ID NO: 2476198 - RNA, 19 nt, Homo sapiens
  misc_RNA (1)...(19): siRNA sense strand
agcuagaggaauugcaaua

SEQ ID NO: 2476199 - RNA, 19 nt, Homo sapiens
  misc_RNA (1)...(19): siRNA sense strand
cgcacaaauuggauggauu

SEQ ID NO: 2476200 - RNA, 19 nt, Homo sapiens
  misc_RNA (1)...(19): siRNA sense strand
ggaaugagugacacagcaa

SEQ ID NO: 2476201 - RNA, 19 nt, Homo sapiens
  misc_RNA (1)...(19): siRNA sense strand
gccgaagggaugugggaau

SEQ ID NO: 2476202 - RNA, 19 nt, Homo sapiens
  misc_RNA (1)...(19): siRNA sense strand
gagaaauauaagcaagaga

SEQ ID NO: 2476203 - RNA, 19 nt, Homo sapiens
  misc_RNA (1)...(19): siRNA sense strand
guuauuaccuaguggggaa

SEQ ID NO: 2476204 - RNA, 19 nt, Homo sapiens
  misc_RNA (1)...(19): siRNA sense strand
ucuacagguucaugacaaa

SEQ ID NO: 2476205 - RNA, 19 nt, Homo sapiens
  misc_RNA (1)...(19): siRNA sense strand
cagaaguuuccuugaggua

SEQ ID NO: 2476206 - RNA, 19 nt, Homo sapiens
  misc_RNA (1)...(19): siRNA sense strand
ugauaaaggaaaggaagaa

SEQ ID NO: 2476207 - RNA, 19 nt, Homo sapiens
  misc_RNA (1)...(19): siRNA sense strand
cgaagaagaagcuguccaa

SEQ ID NO: 2476208 - RNA, 19 nt, Homo sapiens
  misc_RNA (1)...(19): siRNA sense strand
gugaacgagccaaggauau

SEQ ID NO: 2476209 - RNA, 19 nt, Homo sapiens
  misc_RNA (1)...(19): siRNA sense strand
ucaaacaacaugacagaga

SEQ ID NO: 2476210 - RNA, 19 nt, Homo sapiens
  misc_RNA (1)...(19): siRNA sense strand
gaaggaaauacuugcaaaa

SEQ ID NO: 2476211 - RNA, 19 nt, Homo sapiens
  misc_RNA (1)...(19): siRNA sense strand
aaguaagcacgaagaagaa

SEQ ID NO: 2476212 - RNA, 19 nt, Homo sapiens
  misc_RNA (1)...(19): siRNA sense strand
acgccauggugaaagcaua

SEQ ID NO: 2476213 - RNA, 19 nt, Homo sapiens
  misc_RNA (1)...(19): siRNA sense strand
cagcaguaacagaugauuu

SEQ ID NO: 2476214 - RNA, 19 nt, Homo sapiens
  misc_RNA (1)...(19): siRNA sense strand
aggaaaggaagaaaugcaa

SEQ ID NO: 2476215 - RNA, 19 nt, Homo sapiens
  misc_RNA (1)...(19): siRNA sense strand
aagaagaagcuguccaaaa

SEQ ID NO: 2476216 - RNA, 19 nt, Homo sapiens
  misc_RNA (1)...(19): siRNA sense strand
ccaggcauuacuagagaaa

SEQ ID NO: 2476217 - RNA, 19 nt, Homo sapiens
  misc_RNA (1)...(19): siRNA sense strand
ggauauuuaaacaggacuu

SEQ ID NO: 2476218 - RNA, 19 nt, Homo sapiens
  misc_RNA (1)...(19): siRNA sense strand
acucagacuuuaauggaca

SEQ ID NO: 2476219 - RNA, 19 nt, Homo sapiens
  misc_RNA (1)...(19): siRNA sense strand
guuacuaaggcuugaugaa

SEQ ID NO: 2476220 - RNA, 19 nt, Homo sapiens
  misc_RNA (1)...(19): siRNA sense strand
cuggaaacuccuucugaaa

SEQ ID NO: 2476221 - RNA, 19 nt, Homo sapiens
  misc_RNA (1)...(19): siRNA sense strand
agaaagagaugcagaaaac

SEQ ID NO: 2476222 - RNA, 19 nt, Homo sapiens
  misc_RNA (1)...(19): siRNA sense strand
agaucuuaauggaggcaga

SEQ ID NO: 2476223 - RNA, 19 nt, Homo sapiens
  misc_RNA (1)...(19): siRNA sense strand
aaccugaagaagaaggaaa

SEQ ID NO: 2476224 - RNA, 19 nt, Homo sapiens
  misc_RNA (1)...(19): siRNA sense strand
gauucaaacuguagaggac

SEQ ID NO: 2476225 - RNA, 19 nt, Homo sapiens
  misc_RNA (1)...(19): siRNA sense strand
cucaauuccuugugaucua

SEQ ID NO: 2476226 - RNA, 19 nt, Homo sapiens
  misc_RNA (1)...(19): siRNA sense strand
uggauaaaccacagucaau

SEQ ID NO: 2476227 - RNA, 19 nt, Homo sapiens
  misc_RNA (1)...(19): siRNA sense strand
uggauuuaaugcagcaauu

SEQ ID NO: 2476228 - RNA, 19 nt, Homo sapiens
  misc_RNA (1)...(19): siRNA sense strand
uggcuaaugaagaaagaga

SEQ ID NO: 2476229 - RNA, 19 nt, Homo sapiens
  misc_RNA (1)...(19): siRNA sense strand
uagaacacuugaagcaaau

SEQ ID NO: 2476230 - RNA, 19 nt, Homo sapiens
  misc_RNA (1)...(19): siRNA sense strand
ccacaaaggucaaagaucc

SEQ ID NO: 2476231 - RNA, 19 nt, Homo sapiens
  misc_RNA (1)...(19): siRNA sense strand
ccucauugaagcuguggaa

SEQ ID NO: 2476232 - RNA, 19 nt, Homo sapiens
  misc_RNA (1)...(19): siRNA sense strand
caucaggcaaugagaacau

SEQ ID NO: 2476233 - RNA, 19 nt, Homo sapiens
  misc_RNA (1)...(19): siRNA sense strand
ccacugaggauauguguca

SEQ ID NO: 2476234 - RNA, 19 nt, Homo sapiens
  misc_RNA (1)...(19): siRNA sense strand
cuuccaaggcuuucuguua

SEQ ID NO: 2476235 - RNA, 19 nt, Homo sapiens
  misc_RNA (1)...(19): siRNA sense strand
ggaaaggaagaaaugcaau

SEQ ID NO: 2476236 - RNA, 19 nt, Homo sapiens
  misc_RNA (1)...(19): siRNA sense strand
cagaaugaagaguugagua

SEQ ID NO: 2476237 - RNA, 19 nt, Homo sapiens
  misc_RNA (1)...(19): siRNA sense strand
ggaaguguuugcauggaga

SEQ ID NO: 2476238 - RNA, 19 nt, Homo sapiens
  misc_RNA (1)...(19): siRNA sense strand
gcaagaugaaaguggccau

SEQ ID NO: 2476239 - RNA, 19 nt, Homo sapiens
  misc_RNA (1)...(19): siRNA sense strand
cugcacagauaucaaacaa

SEQ ID NO: 2476240 - RNA, 19 nt, Homo sapiens
  misc_RNA (1)...(19): siRNA sense strand
gaagaaggggaauguguaa

SEQ ID NO: 2476241 - RNA, 19 nt, Homo sapiens
  misc_RNA (1)...(19): siRNA sense strand
ccugcauugugguggguuu

SEQ ID NO: 2476242 - RNA, 19 nt, Homo sapiens
  misc_RNA (1)...(19): siRNA sense strand
gggaugugggaaugaguga

SEQ ID NO: 2476243 - RNA, 19 nt, Homo sapiens
  misc_RNA (1)...(19): siRNA sense strand
uguacuuggcugaaagcaa

SEQ ID NO: 2476244 - RNA, 19 nt, Homo sapiens
  misc_RNA (1)...(19): siRNA sense strand
aggagaaggagaaggagaa

SEQ ID NO: 2476245 - RNA, 19 nt, Homo sapiens
  misc_RNA (1)...(19): siRNA sense strand
aggagaaggagaaggagaa

SEQ ID NO: 2476246 - RNA, 19 nt, Homo sapiens
  misc_RNA (1)...(19): siRNA sense strand
aggagaaggagaaggagaa

SEQ ID NO: 2476247 - RNA, 19 nt, Homo sapiens
  misc_RNA (1)...(19): siRNA sense strand
gaggagaaggagaaggaga

SEQ ID NO: 2476248 - RNA, 19 nt, Homo sapiens
  misc_RNA (1)...(19): siRNA sense strand
acgcagaggagcuggccaa

SEQ ID NO: 2476249 - RNA, 19 nt, Homo sapiens
  misc_RNA (1)...(19): siRNA sense strand
agauugagaaggagcgaga

SEQ ID NO: 2476250 - RNA, 19 nt, Homo sapiens
  misc_RNA (1)...(19): siRNA sense strand
gggugcagaacgagaucua

SEQ ID NO: 2476251 - RNA, 19 nt, Homo sapiens
  misc_RNA (1)...(19): siRNA sense strand
uggaggugacugagaagaa

SEQ ID NO: 2476252 - RNA, 19 nt, Homo sapiens
  misc_RNA (1)...(19): siRNA sense strand
aaggagaaggagaaggaga

SEQ ID NO: 2476253 - RNA, 19 nt, Homo sapiens
  misc_RNA (1)...(19): siRNA sense strand
aaggagaaggagaaggaga

SEQ ID NO: 2476254 - RNA, 19 nt, Homo sapiens
  misc_RNA (1)...(19): siRNA sense strand
gcgugaaagcccaagagau

SEQ ID NO: 2476255 - RNA, 19 nt, Homo sapiens
  misc_RNA (1)...(19): siRNA sense strand
acucagagcugcugcggca

SEQ ID NO: 2476256 - RNA, 19 nt, Homo sapiens
  misc_RNA (1)...(19): siRNA sense strand
agaaggagaaggagccaga

SEQ ID NO: 2476257 - RNA, 19 nt, Homo sapiens
  misc_RNA (1)...(19): siRNA sense strand
ucacagagccucaucgaga

SEQ ID NO: 2476258 - RNA, 19 nt, Homo sapiens
  misc_RNA (1)...(19): siRNA sense strand
uggacauccuagagcauga

SEQ ID NO: 2476259 - RNA, 19 nt, Homo sapiens
  misc_RNA (1)...(19): siRNA sense strand
cgcaguaaucugaagaaga

SEQ ID NO: 2476260 - RNA, 19 nt, Homo sapiens
  misc_RNA (1)...(19): siRNA sense strand
cgggaugagcugcugacaa

SEQ ID NO: 2476261 - RNA, 19 nt, Homo sapiens
  misc_RNA (1)...(19): siRNA sense strand
ccaagugugcccagcggaa

SEQ ID NO: 2476262 - RNA, 19 nt, Homo sapiens
  misc_RNA (1)...(19): siRNA sense strand
ugagaagaauguccgggaa

SEQ ID NO: 2476263 - RNA, 19 nt, Homo sapiens
  misc_RNA (1)...(19): siRNA sense strand
aggagaaggagccagacaa

SEQ ID NO: 2476264 - RNA, 19 nt, Homo sapiens
  misc_RNA (1)...(19): siRNA sense strand
uggcccaacuggaggagau

SEQ ID NO: 2476265 - RNA, 19 nt, Homo sapiens
  misc_RNA (1)...(19): siRNA sense strand
agaaggaccaguaccgcaa

SEQ ID NO: 2476266 - RNA, 19 nt, Homo sapiens
  misc_RNA (1)...(19): siRNA sense strand
cccuagaagccugggcaaa

SEQ ID NO: 2476267 - RNA, 19 nt, Homo sapiens
  misc_RNA (1)...(19): siRNA sense strand
ccuaagagauccuucagca

SEQ ID NO: 2476268 - RNA, 19 nt, Homo sapiens
  misc_RNA (1)...(19): siRNA sense strand
agaagagagcccuggacca

SEQ ID NO: 2476269 - RNA, 19 nt, Homo sapiens
  misc_RNA (1)...(19): siRNA sense strand
gcaccaaggcucugcugga

SEQ ID NO: 2476270 - RNA, 19 nt, Homo sapiens
  misc_RNA (1)...(19): siRNA sense strand
cccaauucuugaugacaga

SEQ ID NO: 2476271 - RNA, 19 nt, Homo sapiens
  misc_RNA (1)...(19): siRNA sense strand
acuuggagccugagcgagu

SEQ ID NO: 2476272 - RNA, 19 nt, Homo sapiens
  misc_RNA (1)...(19): siRNA sense strand
ugggaaagccggaaggccu

SEQ ID NO: 2476273 - RNA, 19 nt, Homo sapiens
  misc_RNA (1)...(19): siRNA sense strand
gagaagaauguccgggaag

SEQ ID NO: 2476274 - RNA, 19 nt, Homo sapiens
  misc_RNA (1)...(19): siRNA sense strand
cuugcaagagagagagaaa

SEQ ID NO: 2476275 - RNA, 19 nt, Homo sapiens
  misc_RNA (1)...(19): siRNA sense strand
uugaagaagaugaggcaau

SEQ ID NO: 2476276 - RNA, 19 nt, Homo sapiens
  misc_RNA (1)...(19): siRNA sense strand
cgucguagaaacuggaaau

SEQ ID NO: 2476277 - RNA, 19 nt, Homo sapiens
  misc_RNA (1)...(19): siRNA sense strand
aaguguuugugguggauua

SEQ ID NO: 2476278 - RNA, 19 nt, Homo sapiens
  misc_RNA (1)...(19): siRNA sense strand
uggcacaaagccugggaaa

SEQ ID NO: 2476279 - RNA, 19 nt, Homo sapiens
  misc_RNA (1)...(19): siRNA sense strand
ccaagaugccacuggugaa

SEQ ID NO: 2476280 - RNA, 19 nt, Homo sapiens
  misc_RNA (1)...(19): siRNA sense strand
ccuacaaguggcagauauu

SEQ ID NO: 2476281 - RNA, 19 nt, Homo sapiens
  misc_RNA (1)...(19): siRNA sense strand
cagaugugguauuaaucaa

SEQ ID NO: 2476282 - RNA, 19 nt, Homo sapiens
  misc_RNA (1)...(19): siRNA sense strand
aagaugaggcaauucgaaa

SEQ ID NO: 2476283 - RNA, 19 nt, Homo sapiens
  misc_RNA (1)...(19): siRNA sense strand
gcuuuagaauccagggaac

SEQ ID NO: 2476284 - RNA, 19 nt, Homo sapiens
  misc_RNA (1)...(19): siRNA sense strand
gggaaauaugaaccagauu

SEQ ID NO: 2476285 - RNA, 19 nt, Homo sapiens
  misc_RNA (1)...(19): siRNA sense strand
agagcuugcaagagagaga

SEQ ID NO: 2476286 - RNA, 19 nt, Homo sapiens
  misc_RNA (1)...(19): siRNA sense strand
gugauucaagugaggcaaa

SEQ ID NO: 2476287 - RNA, 19 nt, Homo sapiens
  misc_RNA (1)...(19): siRNA sense strand
ggaacaguuaauucugaaa

SEQ ID NO: 2476288 - RNA, 19 nt, Homo sapiens
  misc_RNA (1)...(19): siRNA sense strand
ucgaguaaccagugccauu

SEQ ID NO: 2476289 - RNA, 19 nt, Homo sapiens
  misc_RNA (1)...(19): siRNA sense strand
acuuaaaugaugagcaugu

SEQ ID NO: 2476290 - RNA, 19 nt, Homo sapiens
  misc_RNA (1)...(19): siRNA sense strand
augaugagcaugucaacaa

SEQ ID NO: 2476291 - RNA, 19 nt, Homo sapiens
  misc_RNA (1)...(19): siRNA sense strand
caaaaugaacucagauaga

SEQ ID NO: 2476292 - RNA, 19 nt, Homo sapiens
  misc_RNA (1)...(19): siRNA sense strand
gaguuuauugugauggaau

SEQ ID NO: 2476293 - RNA, 19 nt, Homo sapiens
  misc_RNA (1)...(19): siRNA sense strand
agaccugguguuaggguuu

SEQ ID NO: 2476294 - RNA, 19 nt, Homo sapiens
  misc_RNA (1)...(19): siRNA sense strand
uggugaagaaggugcauca

SEQ ID NO: 2476295 - RNA, 19 nt, Homo sapiens
  misc_RNA (1)...(19): siRNA sense strand
ccauaguaacacauacaau

SEQ ID NO: 2476296 - RNA, 19 nt, Homo sapiens
  misc_RNA (1)...(19): siRNA sense strand
gcucagaagauggucgaau

SEQ ID NO: 2476297 - RNA, 19 nt, Homo sapiens
  misc_RNA (1)...(19): siRNA sense strand
uuccaauaugcaaggauaa

SEQ ID NO: 2476298 - RNA, 19 nt, Homo sapiens
  misc_RNA (1)...(19): siRNA sense strand
cuggaaauugaaagagcuu

SEQ ID NO: 2476299 - RNA, 19 nt, Homo sapiens
  misc_RNA (1)...(19): siRNA sense strand
ucugaaauauggaaugcau

SEQ ID NO: 2476300 - RNA, 19 nt, Homo sapiens
  misc_RNA (1)...(19): siRNA sense strand
agauacaaagcaucacaaa

SEQ ID NO: 2476301 - RNA, 19 nt, Homo sapiens
  misc_RNA (1)...(19): siRNA sense strand
ggcacaaagccugggaaau

SEQ ID NO: 2476302 - RNA, 19 nt, Homo sapiens
  misc_RNA (1)...(19): siRNA sense strand
auugaaagagcuugcaaga

SEQ ID NO: 2476303 - RNA, 19 nt, Homo sapiens
  misc_RNA (1)...(19): siRNA sense strand
aagcuaaggauuucuggaa

SEQ ID NO: 2476304 - RNA, 19 nt, Homo sapiens
  misc_RNA (1)...(19): siRNA sense strand
ucuggaaggcugugauuca

SEQ ID NO: 2476305 - RNA, 19 nt, Homo sapiens
  misc_RNA (1)...(19): siRNA sense strand
gagagagaaaacauggaua

SEQ ID NO: 2476306 - RNA, 19 nt, Homo sapiens
  misc_RNA (1)...(19): siRNA sense strand
ucccaaauguguggagauu

SEQ ID NO: 2476307 - RNA, 19 nt, Homo sapiens
  misc_RNA (1)...(19): siRNA sense strand
ugaugaaaggcaauaccaa

SEQ ID NO: 2476308 - RNA, 19 nt, Homo sapiens
  misc_RNA (1)...(19): siRNA sense strand
augaaaggcaauaccaaga

SEQ ID NO: 2476309 - RNA, 19 nt, Homo sapiens
  misc_RNA (1)...(19): siRNA sense strand
cgucagcgucguagaaacu

SEQ ID NO: 2476310 - RNA, 19 nt, Homo sapiens
  misc_RNA (1)...(19): siRNA sense strand
acagaugaugaaaggcaau

SEQ ID NO: 2476311 - RNA, 19 nt, Homo sapiens
  misc_RNA (1)...(19): siRNA sense strand
cagaaagaggugaugaaug

SEQ ID NO: 2476312 - RNA, 19 nt, Homo sapiens
  misc_RNA (1)...(19): siRNA sense strand
auacagaugaugaaaggca

SEQ ID NO: 2476313 - RNA, 19 nt, Homo sapiens
  misc_RNA (1)...(19): siRNA sense strand
agaugccacuggugaagaa

SEQ ID NO: 2476314 - RNA, 19 nt, Homo sapiens
  misc_RNA (1)...(19): siRNA sense strand
gugaagaaggugcaucaau

SEQ ID NO: 2476315 - RNA, 19 nt, Homo sapiens
  misc_RNA (1)...(19): siRNA sense strand
guaaaguggacaucagcca

SEQ ID NO: 2476316 - RNA, 19 nt, Homo sapiens
  misc_RNA (1)...(19): siRNA sense strand
ccauagaguagaagcuaag

SEQ ID NO: 2476317 - RNA, 19 nt, Homo sapiens
  misc_RNA (1)...(19): siRNA sense strand
gcuauuuggagguggacaa

SEQ ID NO: 2476318 - RNA, 19 nt, Homo sapiens
  misc_RNA (1)...(19): siRNA sense strand
auaaaugcagcucgggaaa

SEQ ID NO: 2476319 - RNA, 19 nt, Homo sapiens
  misc_RNA (1)...(19): siRNA sense strand
aaacacaacucgccggaga

SEQ ID NO: 2476320 - RNA, 19 nt, Homo sapiens
  misc_RNA (1)...(19): siRNA sense strand
cagcaggaagaaaggccaa

SEQ ID NO: 2476321 - RNA, 19 nt, Homo sapiens
  misc_RNA (1)...(19): siRNA sense strand
cccagaacugcgaggcuua

SEQ ID NO: 2476322 - RNA, 19 nt, Homo sapiens
  misc_RNA (1)...(19): siRNA sense strand
cagaaguuauccaggccau

SEQ ID NO: 2476323 - RNA, 19 nt, Homo sapiens
  misc_RNA (1)...(19): siRNA sense strand
aagagaggcuggaagcuga

SEQ ID NO: 2476324 - RNA, 19 nt, Homo sapiens
  misc_RNA (1)...(19): siRNA sense strand
uauaaaugcagcucgggaa

SEQ ID NO: 2476325 - RNA, 19 nt, Homo sapiens
  misc_RNA (1)...(19): siRNA sense strand
gcguggauguggaggaccu

SEQ ID NO: 2476326 - RNA, 19 nt, Homo sapiens
  misc_RNA (1)...(19): siRNA sense strand
ggacuauaaugcaacgacu

SEQ ID NO: 2476327 - RNA, 19 nt, Homo sapiens
  misc_RNA (1)...(19): siRNA sense strand
cugcacaggccuuggggaa

SEQ ID NO: 2476328 - RNA, 19 nt, Homo sapiens
  misc_RNA (1)...(19): siRNA sense strand
uauacgaggacuuggugaa

SEQ ID NO: 2476329 - RNA, 19 nt, Homo sapiens
  misc_RNA (1)...(19): siRNA sense strand
aggaaaguuuauauggacu

SEQ ID NO: 2476330 - RNA, 19 nt, Homo sapiens
  misc_RNA (1)...(19): siRNA sense strand
ccuucgacguggccaggaa

SEQ ID NO: 2476331 - RNA, 19 nt, Homo sapiens
  misc_RNA (1)...(19): siRNA sense strand
acuuuauauacgaggacuu

SEQ ID NO: 2476332 - RNA, 19 nt, Homo sapiens
  misc_RNA (1)...(19): siRNA sense strand
ccccagugcugcugagcua

SEQ ID NO: 2476333 - RNA, 19 nt, Homo sapiens
  misc_RNA (1)...(19): siRNA sense strand
ugaccaucaugcuggccaa

SEQ ID NO: 2476334 - RNA, 19 nt, Homo sapiens
  misc_RNA (1)...(19): siRNA sense strand
gaauuucaggccagggaca

SEQ ID NO: 2476335 - RNA, 19 nt, Homo sapiens
  misc_RNA (1)...(19): siRNA sense strand
gaacaaauuaggaagcuga

SEQ ID NO: 2476336 - RNA, 19 nt, Homo sapiens
  misc_RNA (1)...(19): siRNA sense strand
agcuaagaauggagcaaca

SEQ ID NO: 2476337 - RNA, 19 nt, Homo sapiens
  misc_RNA (1)...(19): siRNA sense strand
cuacaagaugagacaaaca

SEQ ID NO: 2476338 - RNA, 19 nt, Homo sapiens
  misc_RNA (1)...(19): siRNA sense strand
acacaaggcuacugaggcu

SEQ ID NO: 2476339 - RNA, 19 nt, Homo sapiens
  misc_RNA (1)...(19): siRNA sense strand
cugucuuaaugcacgauaa

SEQ ID NO: 2476340 - RNA, 19 nt, Homo sapiens
  misc_RNA (1)...(19): siRNA sense strand
gcauuaacucacagaccuu

SEQ ID NO: 2476341 - RNA, 19 nt, Homo sapiens
  misc_RNA (1)...(19): siRNA sense strand
gcagcuaagaauggagcaa

SEQ ID NO: 2476342 - RNA, 19 nt, Homo sapiens
  misc_RNA (1)...(19): siRNA sense strand
gagacaaacagaucgggau

SEQ ID NO: 2476343 - RNA, 19 nt, Homo sapiens
  misc_RNA (1)...(19): siRNA sense strand
cauaauaucuugugguacc

SEQ ID NO: 2476344 - RNA, 19 nt, Homo sapiens
  misc_RNA (1)...(19): siRNA sense strand
guauaauaauagugugguc

SEQ ID NO: 2476345 - RNA, 19 nt, Homo sapiens
  misc_RNA (1)...(19): siRNA sense strand
cugacagcaugguagaaga

SEQ ID NO: 2476346 - RNA, 19 nt, Homo sapiens
  misc_RNA (1)...(19): siRNA sense strand
gcuauaucacugacagcau

SEQ ID NO: 2476347 - RNA, 19 nt, Homo sapiens
  misc_RNA (1)...(19): siRNA sense strand
ggccaugcacacaaggcua

SEQ ID NO: 2476348 - RNA, 19 nt, Homo sapiens
  misc_RNA (1)...(19): siRNA sense strand
gcucacugcugcugggcaa

SEQ ID NO: 2476349 - RNA, 19 nt, Homo sapiens
  misc_RNA (1)...(19): siRNA sense strand
gagaaugaggagacgguga

SEQ ID NO: 2476350 - RNA, 19 nt, Homo sapiens
  misc_RNA (1)...(19): siRNA sense strand
caagaugaucguaggcgaa

SEQ ID NO: 2476351 - RNA, 19 nt, Homo sapiens
  misc_RNA (1)...(19): siRNA sense strand
ccaagaugaucguaggcga

SEQ ID NO: 2476352 - RNA, 19 nt, Homo sapiens
  misc_RNA (1)...(19): siRNA sense strand
acggagaaggagaagaauu

SEQ ID NO: 2476353 - RNA, 19 nt, Homo sapiens
  misc_RNA (1)...(19): siRNA sense strand
ucguaggcgaagagaagaa

SEQ ID NO: 2476354 - RNA, 19 nt, Homo sapiens
  misc_RNA (1)...(19): siRNA sense strand
ucguuaaggaggagcugaa

SEQ ID NO: 2476355 - RNA, 19 nt, Homo sapiens
  misc_RNA (1)...(19): siRNA sense strand
agaauuacgccaagcgcau

SEQ ID NO: 2476356 - RNA, 19 nt, Homo sapiens
  misc_RNA (1)...(19): siRNA sense strand
ggauuuaccacgacggcga

SEQ ID NO: 2476357 - RNA, 19 nt, Homo sapiens
  misc_RNA (1)...(19): siRNA sense strand
aggagaagaauuacgccaa

SEQ ID NO: 2476358 - RNA, 19 nt, Homo sapiens
  misc_RNA (1)...(19): siRNA sense strand
cagcggugggcgagaauga

SEQ ID NO: 2476359 - RNA, 19 nt, Homo sapiens
  misc_RNA (1)...(19): siRNA sense strand
ggguguacgggcagaacau

SEQ ID NO: 2476360 - RNA, 19 nt, Homo sapiens
  misc_RNA (1)...(19): siRNA sense strand
agaucaaaccgcuacgcaa

SEQ ID NO: 2476361 - RNA, 19 nt, Homo sapiens
  misc_RNA (1)...(19): siRNA sense strand
cuugugaacccaaaguaaa

SEQ ID NO: 2476362 - RNA, 19 nt, Homo sapiens
  misc_RNA (1)...(19): siRNA sense strand
ccaagacgguggaggacgu

SEQ ID NO: 2476363 - RNA, 19 nt, Homo sapiens
  misc_RNA (1)...(19): siRNA sense strand
ugggcaacgugcuggucaa

SEQ ID NO: 2476364 - RNA, 19 nt, Homo sapiens
  misc_RNA (1)...(19): siRNA sense strand
cuuccuacccggucagcaa

SEQ ID NO: 2476365 - RNA, 19 nt, Homo sapiens
  misc_RNA (1)...(19): siRNA sense strand
acaccaugucugagaucau

SEQ ID NO: 2476366 - RNA, 19 nt, Homo sapiens
  misc_RNA (1)...(19): siRNA sense strand
uggagaagagcaaguccua

SEQ ID NO: 2476367 - RNA, 19 nt, Homo sapiens
  misc_RNA (1)...(19): siRNA sense strand
cagaacaucaauaacgaga

SEQ ID NO: 2476368 - RNA, 19 nt, Homo sapiens
  misc_RNA (1)...(19): siRNA sense strand
uuaaggaggagcugaacau

SEQ ID NO: 2476369 - RNA, 19 nt, Homo sapiens
  misc_RNA (1)...(19): siRNA sense strand
gcggcacggagaaggagaa

SEQ ID NO: 2476370 - RNA, 19 nt, Homo sapiens
  misc_RNA (1)...(19): siRNA sense strand
gcucacugcugcugggcaa

SEQ ID NO: 2476371 - RNA, 19 nt, Homo sapiens
  misc_RNA (1)...(19): siRNA sense strand
gagaaugaggagacgguga

SEQ ID NO: 2476372 - RNA, 19 nt, Homo sapiens
  misc_RNA (1)...(19): siRNA sense strand
caagaugaucguaggcgaa

SEQ ID NO: 2476373 - RNA, 19 nt, Homo sapiens
  misc_RNA (1)...(19): siRNA sense strand
ccaagaugaucguaggcga

SEQ ID NO: 2476374 - RNA, 19 nt, Homo sapiens
  misc_RNA (1)...(19): siRNA sense strand
acggagaaggagaagaauu

SEQ ID NO: 2476375 - RNA, 19 nt, Homo sapiens
  misc_RNA (1)...(19): siRNA sense strand
ucguaggcgaagagaagaa

SEQ ID NO: 2476376 - RNA, 19 nt, Homo sapiens
  misc_RNA (1)...(19): siRNA sense strand
ucguuaaggaggagcugaa

SEQ ID NO: 2476377 - RNA, 19 nt, Homo sapiens
  misc_RNA (1)...(19): siRNA sense strand
agaauuacgccaagcgcau

SEQ ID NO: 2476378 - RNA, 19 nt, Homo sapiens
  misc_RNA (1)...(19): siRNA sense strand
ggauuuaccacgacggcga

SEQ ID NO: 2476379 - RNA, 19 nt, Homo sapiens
  misc_RNA (1)...(19): siRNA sense strand
aggagaagaauuacgccaa

SEQ ID NO: 2476380 - RNA, 19 nt, Homo sapiens
  misc_RNA (1)...(19): siRNA sense strand
cagcggugggcgagaauga

SEQ ID NO: 2476381 - RNA, 19 nt, Homo sapiens
  misc_RNA (1)...(19): siRNA sense strand
ggguguacgggcagaacau

SEQ ID NO: 2476382 - RNA, 19 nt, Homo sapiens
  misc_RNA (1)...(19): siRNA sense strand
agaucaaaccgcuacgcaa

SEQ ID NO: 2476383 - RNA, 19 nt, Homo sapiens
  misc_RNA (1)...(19): siRNA sense strand
cuugugaacccaaaguaaa

SEQ ID NO: 2476384 - RNA, 19 nt, Homo sapiens
  misc_RNA (1)...(19): siRNA sense strand
ccaagacgguggaggacgu

SEQ ID NO: 2476385 - RNA, 19 nt, Homo sapiens
  misc_RNA (1)...(19): siRNA sense strand
ugggcaacgugcuggucaa

SEQ ID NO: 2476386 - RNA, 19 nt, Homo sapiens
  misc_RNA (1)...(19): siRNA sense strand
cuuccuacccggucagcaa

SEQ ID NO: 2476387 - RNA, 19 nt, Homo sapiens
  misc_RNA (1)...(19): siRNA sense strand
acaccaugucugagaucau

SEQ ID NO: 2476388 - RNA, 19 nt, Homo sapiens
  misc_RNA (1)...(19): siRNA sense strand
uggagaagagcaaguccua

SEQ ID NO: 2476389 - RNA, 19 nt, Homo sapiens
  misc_RNA (1)...(19): siRNA sense strand
cagaacaucaauaacgaga

SEQ ID NO: 2476390 - RNA, 19 nt, Homo sapiens
  misc_RNA (1)...(19): siRNA sense strand
uuaaggaggagcugaacau

SEQ ID NO: 2476391 - RNA, 19 nt, Homo sapiens
  misc_RNA (1)...(19): siRNA sense strand
gcggcacggagaaggagaa

SEQ ID NO: 2476392 - RNA, 19 nt, Homo sapiens
  misc_RNA (1)...(19): siRNA sense strand
gcucacugcugcugggcaa

SEQ ID NO: 2476393 - RNA, 19 nt, Homo sapiens
  misc_RNA (1)...(19): siRNA sense strand
gagaaugaggagacgguga

SEQ ID NO: 2476394 - RNA, 19 nt, Homo sapiens
  misc_RNA (1)...(19): siRNA sense strand
caagaugaucguaggcgaa

SEQ ID NO: 2476395 - RNA, 19 nt, Homo sapiens
  misc_RNA (1)...(19): siRNA sense strand
ccaagaugaucguaggcga

SEQ ID NO: 2476396 - RNA, 19 nt, Homo sapiens
  misc_RNA (1)...(19): siRNA sense strand
acggagaaggagaagaauu

SEQ ID NO: 2476397 - RNA, 19 nt, Homo sapiens
  misc_RNA (1)...(19): siRNA sense strand
ucguaggcgaagagaagaa

SEQ ID NO: 2476398 - RNA, 19 nt, Homo sapiens
  misc_RNA (1)...(19): siRNA sense strand
ucguuaaggaggagcugaa

SEQ ID NO: 2476399 - RNA, 19 nt, Homo sapiens
  misc_RNA (1)...(19): siRNA sense strand
agaauuacgccaagcgcau

SEQ ID NO: 2476400 - RNA, 19 nt, Homo sapiens
  misc_RNA (1)...(19): siRNA sense strand
ggauuuaccacgacggcga

SEQ ID NO: 2476401 - RNA, 19 nt, Homo sapiens
  misc_RNA (1)...(19): siRNA sense strand
aggagaagaauuacgccaa

SEQ ID NO: 2476402 - RNA, 19 nt, Homo sapiens
  misc_RNA (1)...(19): siRNA sense strand
cagcggugggcgagaauga

SEQ ID NO: 2476403 - RNA, 19 nt, Homo sapiens
  misc_RNA (1)...(19): siRNA sense strand
ggguguacgggcagaacau

SEQ ID NO: 2476404 - RNA, 19 nt, Homo sapiens
  misc_RNA (1)...(19): siRNA sense strand
agaucaaaccgcuacgcaa

SEQ ID NO: 2476405 - RNA, 19 nt, Homo sapiens
  misc_RNA (1)...(19): siRNA sense strand
cuugugaacccaaaguaaa

SEQ ID NO: 2476406 - RNA, 19 nt, Homo sapiens
  misc_RNA (1)...(19): siRNA sense strand
ccaagacgguggaggacgu

SEQ ID NO: 2476407 - RNA, 19 nt, Homo sapiens
  misc_RNA (1)...(19): siRNA sense strand
ugggcaacgugcuggucaa

SEQ ID NO: 2476408 - RNA, 19 nt, Homo sapiens
  misc_RNA (1)...(19): siRNA sense strand
cuuccuacccggucagcaa

SEQ ID NO: 2476409 - RNA, 19 nt, Homo sapiens
  misc_RNA (1)...(19): siRNA sense strand
acaccaugucugagaucau

SEQ ID NO: 2476410 - RNA, 19 nt, Homo sapiens
  misc_RNA (1)...(19): siRNA sense strand
uggagaagagcaaguccua

SEQ ID NO: 2476411 - RNA, 19 nt, Homo sapiens
  misc_RNA (1)...(19): siRNA sense strand
cagaacaucaauaacgaga

SEQ ID NO: 2476412 - RNA, 19 nt, Homo sapiens
  misc_RNA (1)...(19): siRNA sense strand
uuaaggaggagcugaacau

SEQ ID NO: 2476413 - RNA, 19 nt, Homo sapiens
  misc_RNA (1)...(19): siRNA sense strand
gcggcacggagaaggagaa

SEQ ID NO: 2476414 - RNA, 19 nt, Homo sapiens
  misc_RNA (1)...(19): siRNA sense strand
ccuacagucugcaaggcua

SEQ ID NO: 2476415 - RNA, 19 nt, Homo sapiens
  misc_RNA (1)...(19): siRNA sense strand
cugaggaaggguagcagua

SEQ ID NO: 2476416 - RNA, 19 nt, Homo sapiens
  misc_RNA (1)...(19): siRNA sense strand
guacagaagucuuugcaag

SEQ ID NO: 2476417 - RNA, 19 nt, Homo sapiens
  misc_RNA (1)...(19): siRNA sense strand
aggaaggguagcaguaaca

SEQ ID NO: 2476418 - RNA, 19 nt, Homo sapiens
  misc_RNA (1)...(19): siRNA sense strand
cuucuuaccugcuagccaa

SEQ ID NO: 2476419 - RNA, 19 nt, Homo sapiens
  misc_RNA (1)...(19): siRNA sense strand
ggcaaauccaagaggaaau

SEQ ID NO: 2476420 - RNA, 19 nt, Homo sapiens
  misc_RNA (1)...(19): siRNA sense strand
ggaagaaagccaaggaggu

SEQ ID NO: 2476421 - RNA, 19 nt, Homo sapiens
  misc_RNA (1)...(19): siRNA sense strand
ucacagaacuggaaaccca

SEQ ID NO: 2476422 - RNA, 19 nt, Homo sapiens
  misc_RNA (1)...(19): siRNA sense strand
ccaagagccugguggccau

SEQ ID NO: 2476423 - RNA, 19 nt, Homo sapiens
  misc_RNA (1)...(19): siRNA sense strand
cuggagagugagaagcuaa

SEQ ID NO: 2476424 - RNA, 19 nt, Homo sapiens
  misc_RNA (1)...(19): siRNA sense strand
ucggcaaauccaagaggaa

SEQ ID NO: 2476425 - RNA, 19 nt, Homo sapiens
  misc_RNA (1)...(19): siRNA sense strand
cggacagcuuugaacagaa

SEQ ID NO: 2476426 - RNA, 19 nt, Homo sapiens
  misc_RNA (1)...(19): siRNA sense strand
gguccagaaacgagaagga

SEQ ID NO: 2476427 - RNA, 19 nt, Homo sapiens
  misc_RNA (1)...(19): siRNA sense strand
caugcaagauggaggguug

SEQ ID NO: 2476428 - RNA, 19 nt, Homo sapiens
  misc_RNA (1)...(19): siRNA sense strand
gcuuugaacagaaggucuu

SEQ ID NO: 2476429 - RNA, 19 nt, Homo sapiens
  misc_RNA (1)...(19): siRNA sense strand
uguccgagcugcaggagga

SEQ ID NO: 2476430 - RNA, 19 nt, Homo sapiens
  misc_RNA (1)...(19): siRNA sense strand
cgaugcuggaggagaauga

SEQ ID NO: 2476431 - RNA, 19 nt, Homo sapiens
  misc_RNA (1)...(19): siRNA sense strand
uggagagugagaagcuaaa

SEQ ID NO: 2476432 - RNA, 19 nt, Homo sapiens
  misc_RNA (1)...(19): siRNA sense strand
agguauuaauugacuggau

SEQ ID NO: 2476433 - RNA, 19 nt, Homo sapiens
  misc_RNA (1)...(19): siRNA sense strand
aaucauugugaaagaccua

SEQ ID NO: 2476434 - RNA, 19 nt, Homo sapiens
  misc_RNA (1)...(19): siRNA sense strand
uccagaaacgagaaggaau

SEQ ID NO: 2476435 - RNA, 19 nt, Homo sapiens
  misc_RNA (1)...(19): siRNA sense strand
cagaugaacugcaggccaa

SEQ ID NO: 2476436 - RNA, 19 nt, Homo sapiens
  misc_RNA (1)...(19): siRNA sense strand
agaucaauuucuuggugaa

SEQ ID NO: 2476437 - RNA, 19 nt, Homo sapiens
  misc_RNA (1)...(19): siRNA sense strand
ccacaaagcaggcacgagu

SEQ ID NO: 2476438 - RNA, 19 nt, Homo sapiens
  misc_RNA (1)...(19): siRNA sense strand
cguaaguuggagagauuga

SEQ ID NO: 2476439 - RNA, 19 nt, Homo sapiens
  misc_RNA (1)...(19): siRNA sense strand
gaugaaagagcauggagga

SEQ ID NO: 2476440 - RNA, 19 nt, Homo sapiens
  misc_RNA (1)...(19): siRNA sense strand
gagaccaaccugacgggua

SEQ ID NO: 2476441 - RNA, 19 nt, Homo sapiens
  misc_RNA (1)...(19): siRNA sense strand
aggugaauaauuuggucaa

SEQ ID NO: 2476442 - RNA, 19 nt, Homo sapiens
  misc_RNA (1)...(19): siRNA sense strand
gaacaauggaggaggccag

SEQ ID NO: 2476443 - RNA, 19 nt, Homo sapiens
  misc_RNA (1)...(19): siRNA sense strand
ccuuagauacuuuugguaa

SEQ ID NO: 2476444 - RNA, 19 nt, Homo sapiens
  misc_RNA (1)...(19): siRNA sense strand
cgcuaaacgaauugguguu

SEQ ID NO: 2476445 - RNA, 19 nt, Homo sapiens
  misc_RNA (1)...(19): siRNA sense strand
gaucaugacaacuggccca

SEQ ID NO: 2476446 - RNA, 19 nt, Homo sapiens
  misc_RNA (1)...(19): siRNA sense strand
cugcuaagaugcaagggaa

SEQ ID NO: 2476447 - RNA, 19 nt, Homo sapiens
  misc_RNA (1)...(19): siRNA sense strand
gauugaugccacaggaaaa

SEQ ID NO: 2476448 - RNA, 19 nt, Homo sapiens
  misc_RNA (1)...(19): siRNA sense strand
agcagaaagcuaugggcaa

SEQ ID NO: 2476449 - RNA, 19 nt, Homo sapiens
  misc_RNA (1)...(19): siRNA sense strand
accacaaagcagaaagcua

SEQ ID NO: 2476450 - RNA, 19 nt, Homo sapiens
  misc_RNA (1)...(19): siRNA sense strand
ugucgugcacccugggaaa

SEQ ID NO: 2476451 - RNA, 19 nt, Homo sapiens
  misc_RNA (1)...(19): siRNA sense strand
aggagugguuggaggaaag

SEQ ID NO: 2476452 - RNA, 19 nt, Homo sapiens
  misc_RNA (1)...(19): siRNA sense strand
aagcuaugggcaaggaaga

SEQ ID NO: 2476453 - RNA, 19 nt, Homo sapiens
  misc_RNA (1)...(19): siRNA sense strand
gcagaaagcuaugggcaag

SEQ ID NO: 2476454 - RNA, 19 nt, Homo sapiens
  misc_RNA (1)...(19): siRNA sense strand
uggagacacuggugaggga

SEQ ID NO: 2476455 - RNA, 19 nt, Homo sapiens
  misc_RNA (1)...(19): siRNA sense strand
gcuggaagcugaagccacu

SEQ ID NO: 2476456 - RNA, 19 nt, Homo sapiens
  misc_RNA (1)...(19): siRNA sense strand
gagaggagugguuggagga

SEQ ID NO: 2476457 - RNA, 19 nt, Homo sapiens
  misc_RNA (1)...(19): siRNA sense strand
gugaaagcagaaauggaga

SEQ ID NO: 2476458 - RNA, 19 nt, Homo sapiens
  misc_RNA (1)...(19): siRNA sense strand
gagacacuggugagggaga

SEQ ID NO: 2476459 - RNA, 19 nt, Homo sapiens
  misc_RNA (1)...(19): siRNA sense strand
caaccuaccucaugagccu

SEQ ID NO: 2476460 - RNA, 19 nt, Homo sapiens
  misc_RNA (1)...(19): siRNA sense strand
ucaugagccugcuggccaa

SEQ ID NO: 2476461 - RNA, 19 nt, Homo sapiens
  misc_RNA (1)...(19): siRNA sense strand
aggaaagauggaugagaac

SEQ ID NO: 2476462 - RNA, 19 nt, Homo sapiens
  misc_RNA (1)...(19): siRNA sense strand
aggcaggucgaguggcauu

SEQ ID NO: 2476463 - RNA, 19 nt, Homo sapiens
  misc_RNA (1)...(19): siRNA sense strand
gggaaauguccuaggaaaa

SEQ ID NO: 2476464 - RNA, 19 nt, Homo sapiens
  misc_RNA (1)...(19): siRNA sense strand
accuauaaaccgaggaauu

SEQ ID NO: 2476465 - RNA, 19 nt, Homo sapiens
  misc_RNA (1)...(19): siRNA sense strand
ccuucagcauagagagaga

SEQ ID NO: 2476466 - RNA, 19 nt, Homo sapiens
  misc_RNA (1)...(19): siRNA sense strand
guaauaugccuaaagggua

SEQ ID NO: 2476467 - RNA, 19 nt, Homo sapiens
  misc_RNA (1)...(19): siRNA sense strand
ccgaggaauucaugaucau

SEQ ID NO: 2476468 - RNA, 19 nt, Homo sapiens
  misc_RNA (1)...(19): siRNA sense strand
ucggauggaccaagagcaa

SEQ ID NO: 2476469 - RNA, 19 nt, Homo sapiens
  misc_RNA (1)...(19): siRNA sense strand
gcaaaugacuugugccuug

SEQ ID NO: 2476470 - RNA, 19 nt, Homo sapiens
  misc_RNA (1)...(19): siRNA sense strand
auaaaagauugcugggaca

SEQ ID NO: 2476471 - RNA, 19 nt, Homo sapiens
  misc_RNA (1)...(19): siRNA sense strand
gguaauaugccuaaagggu

SEQ ID NO: 2476472 - RNA, 19 nt, Homo sapiens
  misc_RNA (1)...(19): siRNA sense strand
ggauauuacagaagcugga

SEQ ID NO: 2476473 - RNA, 19 nt, Homo sapiens
  misc_RNA (1)...(19): siRNA sense strand
ugguaaggauggcaagcau

SEQ ID NO: 2476474 - RNA, 19 nt, Homo sapiens
  misc_RNA (1)...(19): siRNA sense strand
ucgaaggauaaaugccaua

SEQ ID NO: 2476475 - RNA, 19 nt, Homo sapiens
  misc_RNA (1)...(19): siRNA sense strand
ggaagaagaagcaggaagg

SEQ ID NO: 2476476 - RNA, 19 nt, Homo sapiens
  misc_RNA (1)...(19): siRNA sense strand
aaccagaagaaccgagauu

SEQ ID NO: 2476477 - RNA, 19 nt, Homo sapiens
  misc_RNA (1)...(19): siRNA sense strand
ucaaagaacuucaaggaga

SEQ ID NO: 2476478 - RNA, 19 nt, Homo sapiens
  misc_RNA (1)...(19): siRNA sense strand
gaacuaaacuucugggcca

SEQ ID NO: 2476479 - RNA, 19 nt, Homo sapiens
  misc_RNA (1)...(19): siRNA sense strand
ccaucaaacaugagguaga

SEQ ID NO: 2476480 - RNA, 19 nt, Homo sapiens
  misc_RNA (1)...(19): siRNA sense strand
cugccaaggaacagggaau

SEQ ID NO: 2476481 - RNA, 19 nt, Homo sapiens
  misc_RNA (1)...(19): siRNA sense strand
gcacagacuuggcuggaca

SEQ ID NO: 2476482 - RNA, 19 nt, Homo sapiens
  misc_RNA (1)...(19): siRNA sense strand
cagccaaauauaugcacaa

SEQ ID NO: 2476483 - RNA, 19 nt, Homo sapiens
  misc_RNA (1)...(19): siRNA sense strand
ccugagaaggugugcaaca

SEQ ID NO: 2476484 - RNA, 19 nt, Homo sapiens
  misc_RNA (1)...(19): siRNA sense strand
gaaugugacuacugggagu

SEQ ID NO: 2476485 - RNA, 19 nt, Homo sapiens
  misc_RNA (1)...(19): siRNA sense strand
gagaaggggaagugaugaa

SEQ ID NO: 2476486 - RNA, 19 nt, Homo sapiens
  misc_RNA (1)...(19): siRNA sense strand
gagaauggcugguacgaug

SEQ ID NO: 2476487 - RNA, 19 nt, Homo sapiens
  misc_RNA (1)...(19): siRNA sense strand
cagaaggugcagaugucaa

SEQ ID NO: 2476488 - RNA, 19 nt, Homo sapiens
  misc_RNA (1)...(19): siRNA sense strand
aucacaaaccaguggacaa

SEQ ID NO: 2476489 - RNA, 19 nt, Homo sapiens
  misc_RNA (1)...(19): siRNA sense strand
ccugaucacccgagaggau

SEQ ID NO: 2476490 - RNA, 19 nt, Homo sapiens
  misc_RNA (1)...(19): siRNA sense strand
gagaugagccguaaccgua

SEQ ID NO: 2476491 - RNA, 19 nt, Homo sapiens
  misc_RNA (1)...(19): siRNA sense strand
cgacaaggacagcaagacu

SEQ ID NO: 2476492 - RNA, 19 nt, Homo sapiens
  misc_RNA (1)...(19): siRNA sense strand
ucaacaacaggcugaacaa

SEQ ID NO: 2476493 - RNA, 19 nt, Homo sapiens
  misc_RNA (1)...(19): siRNA sense strand
cuucaaggagaaugugauu

SEQ ID NO: 2476494 - RNA, 19 nt, Homo sapiens
  misc_RNA (1)...(19): siRNA sense strand
agaggaaugaaaugggaca

SEQ ID NO: 2476495 - RNA, 19 nt, Homo sapiens
  misc_RNA (1)...(19): siRNA sense strand
accaagagaagcagcggaa

SEQ ID NO: 2476496 - RNA, 19 nt, Homo sapiens
  misc_RNA (1)...(19): siRNA sense strand
ggcaggaagcuuuggagau

SEQ ID NO: 2476497 - RNA, 19 nt, Homo sapiens
  misc_RNA (1)...(19): siRNA sense strand
uggcagaugugcuggucga

SEQ ID NO: 2476498 - RNA, 19 nt, Homo sapiens
  misc_RNA (1)...(19): siRNA sense strand
cgguggaggacucagacaa

SEQ ID NO: 2476499 - RNA, 19 nt, Homo sapiens
  misc_RNA (1)...(19): siRNA sense strand
ccguaaccguauugccgaa

SEQ ID NO: 2476500 - RNA, 19 nt, Homo sapiens
  misc_RNA (1)...(19): siRNA sense strand
cagauaagugacaagauca

SEQ ID NO: 2476501 - RNA, 19 nt, Homo sapiens
  misc_RNA (1)...(19): siRNA sense strand
aagccaaguaccaagagaa

SEQ ID NO: 2476502 - RNA, 19 nt, Homo sapiens
  misc_RNA (1)...(19): siRNA sense strand
gcugguacgaugaagaaca

SEQ ID NO: 2476503 - RNA, 19 nt, Homo sapiens
  misc_RNA (1)...(19): siRNA sense strand
ccgaguuccaggagcgaca

SEQ ID NO: 2476504 - RNA, 19 nt, Homo sapiens
  misc_RNA (1)...(19): siRNA sense strand
ugaccaagaaguugaagca

SEQ ID NO: 2476505 - RNA, 19 nt, Homo sapiens
  misc_RNA (1)...(19): siRNA sense strand
ggccaagagagccaagcaa

SEQ ID NO: 2476506 - RNA, 19 nt, Homo sapiens
  misc_RNA (1)...(19): siRNA sense strand
ggccaagcagacagccaaa

SEQ ID NO: 2476507 - RNA, 19 nt, Homo sapiens
  misc_RNA (1)...(19): siRNA sense strand
ugaugaagcuucugaggac

SEQ ID NO: 2476508 - RNA, 19 nt, Homo sapiens
  misc_RNA (1)...(19): siRNA sense strand
ccaagaaguugaagcagug

SEQ ID NO: 2476509 - RNA, 19 nt, Homo sapiens
  misc_RNA (1)...(19): siRNA sense strand
gcuuuggagaugagccgua

SEQ ID NO: 2476510 - RNA, 19 nt, Homo sapiens
  misc_RNA (1)...(19): siRNA sense strand
cagacaagcagcuacucaa

SEQ ID NO: 2476511 - RNA, 19 nt, Homo sapiens
  misc_RNA (1)...(19): siRNA sense strand
accaagaaguugaagcagu

SEQ ID NO: 2476512 - RNA, 19 nt, Homo sapiens
  misc_RNA (1)...(19): siRNA sense strand
aagaaacacucccaggaca

SEQ ID NO: 2476513 - RNA, 19 nt, Homo sapiens
  misc_RNA (1)...(19): siRNA sense strand
gugccaacaauaugcaaga

SEQ ID NO: 2476514 - RNA, 19 nt, Homo sapiens
  misc_RNA (1)...(19): siRNA sense strand
gagccaagcaaaggcacaa

SEQ ID NO: 2476515 - RNA, 19 nt, Homo sapiens
  misc_RNA (1)...(19): siRNA sense strand
gggccagaagauaaagaaa

SEQ ID NO: 2476516 - RNA, 19 nt, Homo sapiens
  misc_RNA (1)...(19): siRNA sense strand
cggcagaucuucagccaga

SEQ ID NO: 2476517 - RNA, 19 nt, Homo sapiens
  misc_RNA (1)...(19): siRNA sense strand
gggaaauggagaagcaccu

SEQ ID NO: 2476518 - RNA, 19 nt, Homo sapiens
  misc_RNA (1)...(19): siRNA sense strand
cagaagauaaagaaaucca

SEQ ID NO: 2476519 - RNA, 19 nt, Homo sapiens
  misc_RNA (1)...(19): siRNA sense strand
ccgcagggaaggaggagaa

SEQ ID NO: 2476520 - RNA, 19 nt, Homo sapiens
  misc_RNA (1)...(19): siRNA sense strand
ggagaagagcaauggcaga

SEQ ID NO: 2476521 - RNA, 19 nt, Homo sapiens
  misc_RNA (1)...(19): siRNA sense strand
cgagaugaaaacugggaua

SEQ ID NO: 2476522 - RNA, 19 nt, Homo sapiens
  misc_RNA (1)...(19): siRNA sense strand
ccuaaaucaggaagaucua

SEQ ID NO: 2476523 - RNA, 19 nt, Homo sapiens
  misc_RNA (1)...(19): siRNA sense strand
aggccaaagacuucggcaa

SEQ ID NO: 2476524 - RNA, 19 nt, Homo sapiens
  misc_RNA (1)...(19): siRNA sense strand
aauccguagaagaaggaaa

SEQ ID NO: 2476525 - RNA, 19 nt, Homo sapiens
  misc_RNA (1)...(19): siRNA sense strand
gauucugcagauugggaaa

SEQ ID NO: 2476526 - RNA, 19 nt, Homo sapiens
  misc_RNA (1)...(19): siRNA sense strand
gaaaacugggauaaggaaa

SEQ ID NO: 2476527 - RNA, 19 nt, Homo sapiens
  misc_RNA (1)...(19): siRNA sense strand
gggaaggaggagaagagca

SEQ ID NO: 2476528 - RNA, 19 nt, Homo sapiens
  misc_RNA (1)...(19): siRNA sense strand
aaggaaagaaauggagcaa

SEQ ID NO: 2476529 - RNA, 19 nt, Homo sapiens
  misc_RNA (1)...(19): siRNA sense strand
aagaggaugaggaagaaau

SEQ ID NO: 2476530 - RNA, 19 nt, Homo sapiens
  misc_RNA (1)...(19): siRNA sense strand
ugggauaaggaaauagaga

SEQ ID NO: 2476531 - RNA, 19 nt, Homo sapiens
  misc_RNA (1)...(19): siRNA sense strand
ucagcugacaagaggaauu

SEQ ID NO: 2476532 - RNA, 19 nt, Homo sapiens
  misc_RNA (1)...(19): siRNA sense strand
cugaaacagcacaaacaau

SEQ ID NO: 2476533 - RNA, 19 nt, Homo sapiens
  misc_RNA (1)...(19): siRNA sense strand
cuaacgaugaagaaacaau

SEQ ID NO: 2476534 - RNA, 19 nt, Homo sapiens
  misc_RNA (1)...(19): siRNA sense strand
agaaaaugcuucaagagga

SEQ ID NO: 2476535 - RNA, 19 nt, Homo sapiens
  misc_RNA (1)...(19): siRNA sense strand
gcaagaggagacagccgua

SEQ ID NO: 2476536 - RNA, 19 nt, Homo sapiens
  misc_RNA (1)...(19): siRNA sense strand
acaagacaauuauaggaga

SEQ ID NO: 2476537 - RNA, 19 nt, Homo sapiens
  misc_RNA (1)...(19): siRNA sense strand
caggaagaucuaaggaaag

SEQ ID NO: 2476538 - RNA, 19 nt, Homo sapiens
  misc_RNA (1)...(19): siRNA sense strand
auucaagaacagugggaaa

SEQ ID NO: 2476539 - RNA, 19 nt, Homo sapiens
  misc_RNA (1)...(19): siRNA sense strand
ccauauuaaagaagaggaa

SEQ ID NO: 2476540 - RNA, 19 nt, Homo sapiens
  misc_RNA (1)...(19): siRNA sense strand
agugagauuccaagaaaua

SEQ ID NO: 2476541 - RNA, 19 nt, Homo sapiens
  misc_RNA (1)...(19): siRNA sense strand
acgagaaagcaaugaaauu

SEQ ID NO: 2476542 - RNA, 19 nt, Homo sapiens
  misc_RNA (1)...(19): siRNA sense strand
ccaucuaagcgaagaguga

SEQ ID NO: 2476543 - RNA, 19 nt, Homo sapiens
  misc_RNA (1)...(19): siRNA sense strand
cauugauuucugaggguaa

SEQ ID NO: 2476544 - RNA, 19 nt, Homo sapiens
  misc_RNA (1)...(19): siRNA sense strand
gugacagugcgaugggaaa

SEQ ID NO: 2476545 - RNA, 19 nt, Homo sapiens
  misc_RNA (1)...(19): siRNA sense strand
gaacaggccuucuugggaa

SEQ ID NO: 2476546 - RNA, 19 nt, Homo sapiens
  misc_RNA (1)...(19): siRNA sense strand
ggaaugauacuguaggaga

SEQ ID NO: 2476547 - RNA, 19 nt, Homo sapiens
  misc_RNA (1)...(19): siRNA sense strand
uuacagacagugauggaaa

SEQ ID NO: 2476548 - RNA, 19 nt, Homo sapiens
  misc_RNA (1)...(19): siRNA sense strand
agauagcagcuguggagaa

SEQ ID NO: 2476549 - RNA, 19 nt, Homo sapiens
  misc_RNA (1)...(19): siRNA sense strand
gagugagauuccaagaaau

SEQ ID NO: 2476550 - RNA, 19 nt, Homo sapiens
  misc_RNA (1)...(19): siRNA sense strand
guaaauauucacaggcuca

SEQ ID NO: 2476551 - RNA, 19 nt, Homo sapiens
  misc_RNA (1)...(19): siRNA sense strand
cggcacagagucaaguaaa

SEQ ID NO: 2476552 - RNA, 19 nt, Homo sapiens
  misc_RNA (1)...(19): siRNA sense strand
uggccagaauagagggcau

SEQ ID NO: 2476553 - RNA, 19 nt, Homo sapiens
  misc_RNA (1)...(19): siRNA sense strand
agucaaagacagagccguu

SEQ ID NO: 2476554 - RNA, 19 nt, Homo sapiens
  misc_RNA (1)...(19): siRNA sense strand
gaaugugcucuguggaaau

SEQ ID NO: 2476555 - RNA, 19 nt, Homo sapiens
  misc_RNA (1)...(19): siRNA sense strand
auucacaggcucagaggaa

SEQ ID NO: 2476556 - RNA, 19 nt, Homo sapiens
  misc_RNA (1)...(19): siRNA sense strand
aagaaguccaagaagcaaa

SEQ ID NO: 2476557 - RNA, 19 nt, Homo sapiens
  misc_RNA (1)...(19): siRNA sense strand
aagaacagugggaaacaaa

SEQ ID NO: 2476558 - RNA, 19 nt, Homo sapiens
  misc_RNA (1)...(19): siRNA sense strand
aguuacggcucuaaggaau

SEQ ID NO: 2476559 - RNA, 19 nt, Homo sapiens
  misc_RNA (1)...(19): siRNA sense strand
aagaaauagacgauagcuu

SEQ ID NO: 2476560 - RNA, 19 nt, Homo sapiens
  misc_RNA (1)...(19): siRNA sense strand
ugaggaugcuugugaggau

SEQ ID NO: 2476561 - RNA, 19 nt, Homo sapiens
  misc_RNA (1)...(19): siRNA sense strand
aggaaaagggagauaaaga

SEQ ID NO: 2476562 - RNA, 19 nt, Homo sapiens
  misc_RNA (1)...(19): siRNA sense strand
gcgaagagugagauuccaa

SEQ ID NO: 2476563 - RNA, 19 nt, Homo sapiens
  misc_RNA (1)...(19): siRNA sense strand
aggaggaggacuacgagaa

SEQ ID NO: 2476564 - RNA, 19 nt, Homo sapiens
  misc_RNA (1)...(19): siRNA sense strand
acgauuguaucaugagcaa

SEQ ID NO: 2476565 - RNA, 19 nt, Homo sapiens
  misc_RNA (1)...(19): siRNA sense strand
acagagucaaguaaagaaa

SEQ ID NO: 2476566 - RNA, 19 nt, Homo sapiens
  misc_RNA (1)...(19): siRNA sense strand
gggcauugcugaagacccu

SEQ ID NO: 2476567 - RNA, 19 nt, Homo sapiens
  misc_RNA (1)...(19): siRNA sense strand
agaggaaaagggagauaaa

SEQ ID NO: 2476568 - RNA, 19 nt, Homo sapiens
  misc_RNA (1)...(19): siRNA sense strand
ugggaaacaaaauggaaaa

SEQ ID NO: 2476569 - RNA, 19 nt, Homo sapiens
  misc_RNA (1)...(19): siRNA sense strand
ccagcaagucaaagacaga

SEQ ID NO: 2476570 - RNA, 19 nt, Homo sapiens
  misc_RNA (1)...(19): siRNA sense strand
guguauggccccagaggaa

SEQ ID NO: 2476571 - RNA, 19 nt, Homo sapiens
  misc_RNA (1)...(19): siRNA sense strand
ucuugaugaucuugccaaa

SEQ ID NO: 2476572 - RNA, 19 nt, Homo sapiens
  misc_RNA (1)...(19): siRNA sense strand
gucugaagauccaaaggaa

SEQ ID NO: 2476573 - RNA, 19 nt, Homo sapiens
  misc_RNA (1)...(19): siRNA sense strand
ggauagagauugcagaggu

SEQ ID NO: 2476574 - RNA, 19 nt, Homo sapiens
  misc_RNA (1)...(19): siRNA sense strand
uguuggaggaacugcauua

SEQ ID NO: 2476575 - RNA, 19 nt, Homo sapiens
  misc_RNA (1)...(19): siRNA sense strand
cugaagacccuaagguguu

SEQ ID NO: 2476576 - RNA, 19 nt, Homo sapiens
  misc_RNA (1)...(19): siRNA sense strand
ggacagucucaauaauaau

SEQ ID NO: 2476577 - RNA, 19 nt, Homo sapiens
  misc_RNA (1)...(19): siRNA sense strand
cuacgagaaagcaaugaaa

SEQ ID NO: 2476578 - RNA, 19 nt, Homo sapiens
  misc_RNA (1)...(19): siRNA sense strand
gcaccuuuaaugcaagaaa

SEQ ID NO: 2476579 - RNA, 19 nt, Homo sapiens
  misc_RNA (1)...(19): siRNA sense strand
gagauaaagacgaccaacu

SEQ ID NO: 2476580 - RNA, 19 nt, Homo sapiens
  misc_RNA (1)...(19): siRNA sense strand
acacaaaccaucuaagcga

SEQ ID NO: 2476581 - RNA, 19 nt, Homo sapiens
  misc_RNA (1)...(19): siRNA sense strand
aguaaagaaagccaacaua

SEQ ID NO: 2476582 - RNA, 19 nt, Homo sapiens
  misc_RNA (1)...(19): siRNA sense strand
aagaagcugcugaaguaaa

SEQ ID NO: 2476583 - RNA, 19 nt, Homo sapiens
  misc_RNA (1)...(19): siRNA sense strand
caccaaagagucagagagu

SEQ ID NO: 2476584 - RNA, 19 nt, Homo sapiens
  misc_RNA (1)...(19): siRNA sense strand
gaaaggaccacauggagga

SEQ ID NO: 2476585 - RNA, 19 nt, Homo sapiens
  misc_RNA (1)...(19): siRNA sense strand
gaauagagggcauugcuga

SEQ ID NO: 2476586 - RNA, 19 nt, Homo sapiens
  misc_RNA (1)...(19): siRNA sense strand
gggagauaaagacgaccaa

SEQ ID NO: 2476587 - RNA, 19 nt, Homo sapiens
  misc_RNA (1)...(19): siRNA sense strand
ccuacauauuaucugcaaa

SEQ ID NO: 2476588 - RNA, 19 nt, Homo sapiens
  misc_RNA (1)...(19): siRNA sense strand
gcugaagacccuaaggugu

SEQ ID NO: 2476589 - RNA, 19 nt, Homo sapiens
  misc_RNA (1)...(19): siRNA sense strand
ggguaaauauucacaggcu

SEQ ID NO: 2476590 - RNA, 19 nt, Homo sapiens
  misc_RNA (1)...(19): siRNA sense strand
ugccaaaaggauagagauu

SEQ ID NO: 2476591 - RNA, 19 nt, Homo sapiens
  misc_RNA (1)...(19): siRNA sense strand
aggagauauugcaccuuua

SEQ ID NO: 2476592 - RNA, 19 nt, Homo sapiens
  misc_RNA (1)...(19): siRNA sense strand
gugggaaacaaaauggaaa

SEQ ID NO: 2476593 - RNA, 19 nt, Homo sapiens
  misc_RNA (1)...(19): siRNA sense strand
aggaaaugcuccacgcagu

SEQ ID NO: 2476594 - RNA, 19 nt, Homo sapiens
  misc_RNA (1)...(19): siRNA sense strand
ggaauucagaaaagggauu

SEQ ID NO: 2476595 - RNA, 19 nt, Homo sapiens
  misc_RNA (1)...(19): siRNA sense strand
gaggacuacgagaaagcaa

SEQ ID NO: 2476596 - RNA, 19 nt, Homo sapiens
  misc_RNA (1)...(19): siRNA sense strand
ccaacucaacaaagaaaca

SEQ ID NO: 2476597 - RNA, 19 nt, Homo sapiens
  misc_RNA (1)...(19): siRNA sense strand
agucagaggaacagaggaa

SEQ ID NO: 2476598 - RNA, 19 nt, Homo sapiens
  misc_RNA (1)...(19): siRNA sense strand
aggagaaggagcagcgcaa

SEQ ID NO: 2476599 - RNA, 19 nt, Homo sapiens
  misc_RNA (1)...(19): siRNA sense strand
ccguggagggccagaagaa

SEQ ID NO: 2476600 - RNA, 19 nt, Homo sapiens
  misc_RNA (1)...(19): siRNA sense strand
cacaagaccacuagggaca

SEQ ID NO: 2476601 - RNA, 19 nt, Homo sapiens
  misc_RNA (1)...(19): siRNA sense strand
aagccgagaaggaggaaaa

SEQ ID NO: 2476602 - RNA, 19 nt, Homo sapiens
  misc_RNA (1)...(19): siRNA sense strand
gaacagaggaagaugcgca

SEQ ID NO: 2476603 - RNA, 19 nt, Homo sapiens
  misc_RNA (1)...(19): siRNA sense strand
cgcaaaaguucaagaggca

SEQ ID NO: 2476604 - RNA, 19 nt, Homo sapiens
  misc_RNA (1)...(19): siRNA sense strand
caacgcgagcugagggaga

SEQ ID NO: 2476605 - RNA, 19 nt, Homo sapiens
  misc_RNA (1)...(19): siRNA sense strand
aggaagagcaguugcagca

SEQ ID NO: 2476606 - RNA, 19 nt, Homo sapiens
  misc_RNA (1)...(19): siRNA sense strand
cagaggaagaugcgcaaaa

SEQ ID NO: 2476607 - RNA, 19 nt, Homo sapiens
  misc_RNA (1)...(19): siRNA sense strand
uggaagagguggugguguc

SEQ ID NO: 2476608 - RNA, 19 nt, Homo sapiens
  misc_RNA (1)...(19): siRNA sense strand
gcaaaagaauucuggugga

SEQ ID NO: 2476609 - RNA, 19 nt, Homo sapiens
  misc_RNA (1)...(19): siRNA sense strand
aggcccagaaggaggaaga

SEQ ID NO: 2476610 - RNA, 19 nt, Homo sapiens
  misc_RNA (1)...(19): siRNA sense strand
ccaggagucacgugcacaa

SEQ ID NO: 2476611 - RNA, 19 nt, Homo sapiens
  misc_RNA (1)...(19): siRNA sense strand
aggccaaggcugaggagcu

SEQ ID NO: 2476612 - RNA, 19 nt, Homo sapiens
  misc_RNA (1)...(19): siRNA sense strand
agaugguacuagaggccca

SEQ ID NO: 2476613 - RNA, 19 nt, Homo sapiens
  misc_RNA (1)...(19): siRNA sense strand
aggagcaaccagaggacca

SEQ ID NO: 2476614 - RNA, 19 nt, Homo sapiens
  misc_RNA (1)...(19): siRNA sense strand
aggaagaugcgcaaaagaa

SEQ ID NO: 2476615 - RNA, 19 nt, Homo sapiens
  misc_RNA (1)...(19): siRNA sense strand
cgaucaaccucuuuggcaa

SEQ ID NO: 2476616 - RNA, 19 nt, Homo sapiens
  misc_RNA (1)...(19): siRNA sense strand
ggaaggaggaggugggaac

SEQ ID NO: 2476617 - RNA, 19 nt, Homo sapiens
  misc_RNA (1)...(19): siRNA sense strand
ccuugaacggguugaguca

SEQ ID NO: 2476618 - RNA, 19 nt, Homo sapiens
  misc_RNA (1)...(19): siRNA sense strand
cgggagaccagcagagugu

SEQ ID NO: 2476619 - RNA, 19 nt, Homo sapiens
  misc_RNA (1)...(19): siRNA sense strand
aggaggaggaagggaggaa

SEQ ID NO: 2476620 - RNA, 19 nt, Homo sapiens
  misc_RNA (1)...(19): siRNA sense strand
aggaagaugccucggcuga

SEQ ID NO: 2476621 - RNA, 19 nt, Homo sapiens
  misc_RNA (1)...(19): siRNA sense strand
ggaucagagaccugccgaa

SEQ ID NO: 2476622 - RNA, 19 nt, Homo sapiens
  misc_RNA (1)...(19): siRNA sense strand
ucgugggaccgcagcauaa

SEQ ID NO: 2476623 - RNA, 19 nt, Homo sapiens
  misc_RNA (1)...(19): siRNA sense strand
gacccagcaccgaggagaa

SEQ ID NO: 2476624 - RNA, 19 nt, Homo sapiens
  misc_RNA (1)...(19): siRNA sense strand
cagucuugcugcuggacga

SEQ ID NO: 2476625 - RNA, 19 nt, Homo sapiens
  misc_RNA (1)...(19): siRNA sense strand
ugguagaaagacaggaaca

SEQ ID NO: 2476626 - RNA, 19 nt, Homo sapiens
  misc_RNA (1)...(19): siRNA sense strand
gcaaacuucauuaagggaa

SEQ ID NO: 2476627 - RNA, 19 nt, Homo sapiens
  misc_RNA (1)...(19): siRNA sense strand
gguucagcucuaugggaau

SEQ ID NO: 2476628 - RNA, 19 nt, Homo sapiens
  misc_RNA (1)...(19): siRNA sense strand
gguagaaagacaggaacau

SEQ ID NO: 2476629 - RNA, 19 nt, Homo sapiens
  misc_RNA (1)...(19): siRNA sense strand
aaucagagccacaccgaga

SEQ ID NO: 2476630 - RNA, 19 nt, Homo sapiens
  misc_RNA (1)...(19): siRNA sense strand
agcccaacccguaggaaau

SEQ ID NO: 2476631 - RNA, 19 nt, Homo sapiens
  misc_RNA (1)...(19): siRNA sense strand
ugguucagcucuaugggaa

SEQ ID NO: 2476632 - RNA, 19 nt, Homo sapiens
  misc_RNA (1)...(19): siRNA sense strand
agugguagaaagacaggaa

SEQ ID NO: 2476633 - RNA, 19 nt, Homo sapiens
  misc_RNA (1)...(19): siRNA sense strand
gcggugaaucagagccaca

SEQ ID NO: 2476634 - RNA, 19 nt, Homo sapiens
  misc_RNA (1)...(19): siRNA sense strand
caaacuucauuaagggaac

SEQ ID NO: 2476635 - RNA, 19 nt, Homo sapiens
  misc_RNA (1)...(19): siRNA sense strand
gggcaaaugugguggacag

SEQ ID NO: 2476636 - RNA, 19 nt, Homo sapiens
  misc_RNA (1)...(19): siRNA sense strand
cagcagaugucuuggcagu

SEQ ID NO: 2476637 - RNA, 19 nt, Homo sapiens
  misc_RNA (1)...(19): siRNA sense strand
gguucaagacgcaaggaca

SEQ ID NO: 2476638 - RNA, 19 nt, Homo sapiens
  misc_RNA (1)...(19): siRNA sense strand
guggaugacagcaggucua

SEQ ID NO: 2476639 - RNA, 19 nt, Homo sapiens
  misc_RNA (1)...(19): siRNA sense strand
ugucacagcaggugccaau

SEQ ID NO: 2476640 - RNA, 19 nt, Homo sapiens
  misc_RNA (1)...(19): siRNA sense strand
caucuggagacaaagacaa

SEQ ID NO: 2476641 - RNA, 19 nt, Homo sapiens
  misc_RNA (1)...(19): siRNA sense strand
cagaauccagcgugggaca

SEQ ID NO: 2476642 - RNA, 19 nt, Homo sapiens
  misc_RNA (1)...(19): siRNA sense strand
gacagcaggucuaaggaca

SEQ ID NO: 2476643 - RNA, 19 nt, Homo sapiens
  misc_RNA (1)...(19): siRNA sense strand
ccagaagacacccagaaaa

SEQ ID NO: 2476644 - RNA, 19 nt, Homo sapiens
  misc_RNA (1)...(19): siRNA sense strand
agaggaccguggagggcau

SEQ ID NO: 2476645 - RNA, 19 nt, Homo sapiens
  misc_RNA (1)...(19): siRNA sense strand
gucuaugagccuucagaau

SEQ ID NO: 2476646 - RNA, 19 nt, Homo sapiens
  misc_RNA (1)...(19): siRNA sense strand
aagucagagucuagugguu

SEQ ID NO: 2476647 - RNA, 19 nt, Homo sapiens
  misc_RNA (1)...(19): siRNA sense strand
ggaaaagaugucaggaaaa

SEQ ID NO: 2476648 - RNA, 19 nt, Homo sapiens
  misc_RNA (1)...(19): siRNA sense strand
aagaaaaggcaaauggaua

SEQ ID NO: 2476649 - RNA, 19 nt, Homo sapiens
  misc_RNA (1)...(19): siRNA sense strand
ggucaagaauaaaucccaa

SEQ ID NO: 2476650 - RNA, 19 nt, Homo sapiens
  misc_RNA (1)...(19): siRNA sense strand
acuccaagccagacagcaa

SEQ ID NO: 2476651 - RNA, 19 nt, Homo sapiens
  misc_RNA (1)...(19): siRNA sense strand
ggggaaaagaugucaggaa

SEQ ID NO: 2476652 - RNA, 19 nt, Homo sapiens
  misc_RNA (1)...(19): siRNA sense strand
agaaaaggcaaauggauau

SEQ ID NO: 2476653 - RNA, 19 nt, Homo sapiens
  misc_RNA (1)...(19): siRNA sense strand
guggaugcuuaaagugcaa

SEQ ID NO: 2476654 - RNA, 19 nt, Homo sapiens
  misc_RNA (1)...(19): siRNA sense strand
augcagacucagugccaua

SEQ ID NO: 2476655 - RNA, 19 nt, Homo sapiens
  misc_RNA (1)...(19): siRNA sense strand
ccagcuagagccaggacaa

SEQ ID NO: 2476656 - RNA, 19 nt, Homo sapiens
  misc_RNA (1)...(19): siRNA sense strand
gagaagauugagaggauac

SEQ ID NO: 2476657 - RNA, 19 nt, Homo sapiens
  misc_RNA (1)...(19): siRNA sense strand
cagguaaagaaaaggcaaa

SEQ ID NO: 2476658 - RNA, 19 nt, Homo sapiens
  misc_RNA (1)...(19): siRNA sense strand
agccauuggaacaggaaau

SEQ ID NO: 2476659 - RNA, 19 nt, Homo sapiens
  misc_RNA (1)...(19): siRNA sense strand
guuucuauuuccaggcauu

SEQ ID NO: 2476660 - RNA, 19 nt, Homo sapiens
  misc_RNA (1)...(19): siRNA sense strand
acauguacguugugcgagu

SEQ ID NO: 2476661 - RNA, 19 nt, Homo sapiens
  misc_RNA (1)...(19): siRNA sense strand
gauugagaggauacagaau

SEQ ID NO: 2476662 - RNA, 19 nt, Homo sapiens
  misc_RNA (1)...(19): siRNA sense strand
gguagauguuauuguaaac

SEQ ID NO: 2476663 - RNA, 19 nt, Homo sapiens
  misc_RNA (1)...(19): siRNA sense strand
aggaaguacacaucgguuu

SEQ ID NO: 2476664 - RNA, 19 nt, Homo sapiens
  misc_RNA (1)...(19): siRNA sense strand
gagugugaacagaggaagu

SEQ ID NO: 2476665 - RNA, 19 nt, Homo sapiens
  misc_RNA (1)...(19): siRNA sense strand
aggcaaauggauaucaaga

SEQ ID NO: 2476666 - RNA, 19 nt, Homo sapiens
  misc_RNA (1)...(19): siRNA sense strand
ucggaaaucagguguguca

SEQ ID NO: 2476667 - RNA, 19 nt, Homo sapiens
  misc_RNA (1)...(19): siRNA sense strand
aaggacauuuaaucggaaa

SEQ ID NO: 2476668 - RNA, 19 nt, Homo sapiens
  misc_RNA (1)...(19): siRNA sense strand
cagacagcaaugggagaaa

SEQ ID NO: 2476669 - RNA, 19 nt, Homo sapiens
  misc_RNA (1)...(19): siRNA sense strand
aaugaaaaucggugcaauu

SEQ ID NO: 2476670 - RNA, 19 nt, Homo sapiens
  misc_RNA (1)...(19): siRNA sense strand
agauauagccacugaacag

SEQ ID NO: 2476671 - RNA, 19 nt, Homo sapiens
  misc_RNA (1)...(19): siRNA sense strand
gagccaggacaaucagaau

SEQ ID NO: 2476672 - RNA, 19 nt, Homo sapiens
  misc_RNA (1)...(19): siRNA sense strand
acucagugccauaugucaa

SEQ ID NO: 2476673 - RNA, 19 nt, Homo sapiens
  misc_RNA (1)...(19): siRNA sense strand
ccuacgcaauagagaagau

SEQ ID NO: 2476674 - RNA, 19 nt, Homo sapiens
  misc_RNA (1)...(19): siRNA sense strand
ccauaaaggacaaguucac

SEQ ID NO: 2476675 - RNA, 19 nt, Homo sapiens
  misc_RNA (1)...(19): siRNA sense strand
augcuguauccuauggaaa

SEQ ID NO: 2476676 - RNA, 19 nt, Homo sapiens
  misc_RNA (1)...(19): siRNA sense strand
ccagaauaucucauaacuu

SEQ ID NO: 2476677 - RNA, 19 nt, Homo sapiens
  misc_RNA (1)...(19): siRNA sense strand
aagagugugaacagaggaa

SEQ ID NO: 2476678 - RNA, 19 nt, Homo sapiens
  misc_RNA (1)...(19): siRNA sense strand
cagaagaagaggagugcga

SEQ ID NO: 2476679 - RNA, 19 nt, Homo sapiens
  misc_RNA (1)...(19): siRNA sense strand
cggaagaggugucucccua

SEQ ID NO: 2476680 - RNA, 19 nt, Homo sapiens
  misc_RNA (1)...(19): siRNA sense strand
acggagaagaggaggagga

SEQ ID NO: 2476681 - RNA, 19 nt, Homo sapiens
  misc_RNA (1)...(19): siRNA sense strand
gaggaagaggagcgcggaa

SEQ ID NO: 2476682 - RNA, 19 nt, Homo sapiens
  misc_RNA (1)...(19): siRNA sense strand
ccaacauccgcgaaaggaa

SEQ ID NO: 2476683 - RNA, 19 nt, Homo sapiens
  misc_RNA (1)...(19): siRNA sense strand
gggacggagaagaggagga

SEQ ID NO: 2476684 - RNA, 19 nt, Homo sapiens
  misc_RNA (1)...(19): siRNA sense strand
gaagaaggaaagcggcuga

SEQ ID NO: 2476685 - RNA, 19 nt, Homo sapiens
  misc_RNA (1)...(19): siRNA sense strand
gagggaagacccaggagga

SEQ ID NO: 2476686 - RNA, 19 nt, Homo sapiens
  misc_RNA (1)...(19): siRNA sense strand
uggagagcugugagaagaa

SEQ ID NO: 2476687 - RNA, 19 nt, Homo sapiens
  misc_RNA (1)...(19): siRNA sense strand
cggagaagaggaggaggaa

SEQ ID NO: 2476688 - RNA, 19 nt, Homo sapiens
  misc_RNA (1)...(19): siRNA sense strand
agcugugagaagaaggaaa

SEQ ID NO: 2476689 - RNA, 19 nt, Homo sapiens
  misc_RNA (1)...(19): siRNA sense strand
cccaagaggaaaaggguga

SEQ ID NO: 2476690 - RNA, 19 nt, Homo sapiens
  misc_RNA (1)...(19): siRNA sense strand
gaagaagaggagugcgaag

SEQ ID NO: 2476691 - RNA, 19 nt, Homo sapiens
  misc_RNA (1)...(19): siRNA sense strand
gagaagaaggaaagcggcu

SEQ ID NO: 2476692 - RNA, 19 nt, Homo sapiens
  misc_RNA (1)...(19): siRNA sense strand
cugcacauguuuacaauaa

SEQ ID NO: 2476693 - RNA, 19 nt, Homo sapiens
  misc_RNA (1)...(19): siRNA sense strand
ugugaagagagaagacaua

SEQ ID NO: 2476694 - RNA, 19 nt, Homo sapiens
  misc_RNA (1)...(19): siRNA sense strand
ccauauugauucugcacau

SEQ ID NO: 2476695 - RNA, 19 nt, Homo sapiens
  misc_RNA (1)...(19): siRNA sense strand
ucgaaauaccaguguguga

SEQ ID NO: 2476696 - RNA, 19 nt, Homo sapiens
  misc_RNA (1)...(19): siRNA sense strand
ggguugugguccuggccaa

SEQ ID NO: 2476697 - RNA, 19 nt, Homo sapiens
  misc_RNA (1)...(19): siRNA sense strand
aggccauggagaaguguaa

SEQ ID NO: 2476698 - RNA, 19 nt, Homo sapiens
  misc_RNA (1)...(19): siRNA sense strand
cuuacuucaaccagagaaa

SEQ ID NO: 2476699 - RNA, 19 nt, Homo sapiens
  misc_RNA (1)...(19): siRNA sense strand
gggaucccaucgagaagaa

SEQ ID NO: 2476700 - RNA, 19 nt, Homo sapiens
  misc_RNA (1)...(19): siRNA sense strand
gcuacaaugagcagcgcau

SEQ ID NO: 2476701 - RNA, 19 nt, Homo sapiens
  misc_RNA (1)...(19): siRNA sense strand
cucuagaggccgucaaauu

SEQ ID NO: 2476702 - RNA, 19 nt, Homo sapiens
  misc_RNA (1)...(19): siRNA sense strand
gugugaagagagaagacau

SEQ ID NO: 2476703 - RNA, 19 nt, Homo sapiens
  misc_RNA (1)...(19): siRNA sense strand
cagaggagaugaaagccau

SEQ ID NO: 2476704 - RNA, 19 nt, Homo sapiens
  misc_RNA (1)...(19): siRNA sense strand
aguguaaagaugcaggauu

SEQ ID NO: 2476705 - RNA, 19 nt, Homo sapiens
  misc_RNA (1)...(19): siRNA sense strand
aaguaaagcucuagaggcc

SEQ ID NO: 2476706 - RNA, 19 nt, Homo sapiens
  misc_RNA (1)...(19): siRNA sense strand
cuuggaaaggucacugaaa

SEQ ID NO: 2476707 - RNA, 19 nt, Homo sapiens
  misc_RNA (1)...(19): siRNA sense strand
auggagaaguguaaagaug

SEQ ID NO: 2476708 - RNA, 19 nt, Homo sapiens
  misc_RNA (1)...(19): siRNA sense strand
cuggauuucugcaagucaa

SEQ ID NO: 2476709 - RNA, 19 nt, Homo sapiens
  misc_RNA (1)...(19): siRNA sense strand
cgaaauaccagugugugaa

SEQ ID NO: 2476710 - RNA, 19 nt, Homo sapiens
  misc_RNA (1)...(19): siRNA sense strand
cugcacauguuuacaauaa

SEQ ID NO: 2476711 - RNA, 19 nt, Homo sapiens
  misc_RNA (1)...(19): siRNA sense strand
ugugaagagagaagacaua

SEQ ID NO: 2476712 - RNA, 19 nt, Homo sapiens
  misc_RNA (1)...(19): siRNA sense strand
ccauauugauucugcacau

SEQ ID NO: 2476713 - RNA, 19 nt, Homo sapiens
  misc_RNA (1)...(19): siRNA sense strand
ucgaaauaccaguguguga

SEQ ID NO: 2476714 - RNA, 19 nt, Homo sapiens
  misc_RNA (1)...(19): siRNA sense strand
ggguugugguccuggccaa

SEQ ID NO: 2476715 - RNA, 19 nt, Homo sapiens
  misc_RNA (1)...(19): siRNA sense strand
aggccauggagaaguguaa

SEQ ID NO: 2476716 - RNA, 19 nt, Homo sapiens
  misc_RNA (1)...(19): siRNA sense strand
cuuacuucaaccagagaaa

SEQ ID NO: 2476717 - RNA, 19 nt, Homo sapiens
  misc_RNA (1)...(19): siRNA sense strand
gggaucccaucgagaagaa

SEQ ID NO: 2476718 - RNA, 19 nt, Homo sapiens
  misc_RNA (1)...(19): siRNA sense strand
gcuacaaugagcagcgcau

SEQ ID NO: 2476719 - RNA, 19 nt, Homo sapiens
  misc_RNA (1)...(19): siRNA sense strand
cucuagaggccgucaaauu

SEQ ID NO: 2476720 - RNA, 19 nt, Homo sapiens
  misc_RNA (1)...(19): siRNA sense strand
gugugaagagagaagacau

SEQ ID NO: 2476721 - RNA, 19 nt, Homo sapiens
  misc_RNA (1)...(19): siRNA sense strand
cagaggagaugaaagccau

SEQ ID NO: 2476722 - RNA, 19 nt, Homo sapiens
  misc_RNA (1)...(19): siRNA sense strand
aguguaaagaugcaggauu

SEQ ID NO: 2476723 - RNA, 19 nt, Homo sapiens
  misc_RNA (1)...(19): siRNA sense strand
aaguaaagcucuagaggcc

SEQ ID NO: 2476724 - RNA, 19 nt, Homo sapiens
  misc_RNA (1)...(19): siRNA sense strand
cuuggaaaggucacugaaa

SEQ ID NO: 2476725 - RNA, 19 nt, Homo sapiens
  misc_RNA (1)...(19): siRNA sense strand
auggagaaguguaaagaug

SEQ ID NO: 2476726 - RNA, 19 nt, Homo sapiens
  misc_RNA (1)...(19): siRNA sense strand
cuggauuucugcaagucaa

SEQ ID NO: 2476727 - RNA, 19 nt, Homo sapiens
  misc_RNA (1)...(19): siRNA sense strand
cgaaauaccagugugugaa

SEQ ID NO: 2476728 - RNA, 19 nt, Homo sapiens
  misc_RNA (1)...(19): siRNA sense strand
gcuauaaccuggaggguga

SEQ ID NO: 2476729 - RNA, 19 nt, Homo sapiens
  misc_RNA (1)...(19): siRNA sense strand
ggaaagagcgggagaggag

SEQ ID NO: 2476730 - RNA, 19 nt, Homo sapiens
  misc_RNA (1)...(19): siRNA sense strand
gggaggaugaggaggacga

SEQ ID NO: 2476731 - RNA, 19 nt, Homo sapiens
  misc_RNA (1)...(19): siRNA sense strand
uggaugagaucaacgggua

SEQ ID NO: 2476732 - RNA, 19 nt, Homo sapiens
  misc_RNA (1)...(19): siRNA sense strand
cggccugcucugugacaaa

SEQ ID NO: 2476733 - RNA, 19 nt, Homo sapiens
  misc_RNA (1)...(19): siRNA sense strand
gcaucaacgccgagccuga

SEQ ID NO: 2476734 - RNA, 19 nt, Homo sapiens
  misc_RNA (1)...(19): siRNA sense strand
ggaugagaucaacggguau

SEQ ID NO: 2476735 - RNA, 19 nt, Homo sapiens
  misc_RNA (1)...(19): siRNA sense strand
ggaugggcaaggagugcaa

SEQ ID NO: 2476736 - RNA, 19 nt, Homo sapiens
  misc_RNA (1)...(19): siRNA sense strand
gaucgauggcugcggguca

SEQ ID NO: 2476737 - RNA, 19 nt, Homo sapiens
  misc_RNA (1)...(19): siRNA sense strand
cguguguggaugagaucaa

SEQ ID NO: 2476738 - RNA, 19 nt, Homo sapiens
  misc_RNA (1)...(19): siRNA sense strand
gccacaaggacgugcucua

SEQ ID NO: 2476739 - RNA, 19 nt, Homo sapiens
  misc_RNA (1)...(19): siRNA sense strand
gagaacuacuacagcgcca

SEQ ID NO: 2476740 - RNA, 19 nt, Homo sapiens
  misc_RNA (1)...(19): siRNA sense strand
ccugcaaggaccuggugaa

SEQ ID NO: 2476741 - RNA, 19 nt, Homo sapiens
  misc_RNA (1)...(19): siRNA sense strand
ccuacugccaugagaacau

SEQ ID NO: 2476742 - RNA, 19 nt, Homo sapiens
  misc_RNA (1)...(19): siRNA sense strand
uuaaggaguaccaggccaa

SEQ ID NO: 2476743 - RNA, 19 nt, Homo sapiens
  misc_RNA (1)...(19): siRNA sense strand
aggucaagguggagacggu

SEQ ID NO: 2476744 - RNA, 19 nt, Homo sapiens
  misc_RNA (1)...(19): siRNA sense strand
ggaacugugagaaggcuga

SEQ ID NO: 2476745 - RNA, 19 nt, Homo sapiens
  misc_RNA (1)...(19): siRNA sense strand
gcacaugcaucgaugaggu

SEQ ID NO: 2476746 - RNA, 19 nt, Homo sapiens
  misc_RNA (1)...(19): siRNA sense strand
ucgaugagguggacgccuu

SEQ ID NO: 2476747 - RNA, 19 nt, Homo sapiens
  misc_RNA (1)...(19): siRNA sense strand
augaggaggacgaggaucu

SEQ ID NO: 2476748 - RNA, 19 nt, Homo sapiens
  misc_RNA (1)...(19): siRNA sense strand
cccuggaggcggagaaguu

SEQ ID NO: 2476749 - RNA, 19 nt, Homo sapiens
  misc_RNA (1)...(19): siRNA sense strand
gcuauaaccuggaggguga

SEQ ID NO: 2476750 - RNA, 19 nt, Homo sapiens
  misc_RNA (1)...(19): siRNA sense strand
ggaaagagcgggagaggag

SEQ ID NO: 2476751 - RNA, 19 nt, Homo sapiens
  misc_RNA (1)...(19): siRNA sense strand
gggaggaugaggaggacga

SEQ ID NO: 2476752 - RNA, 19 nt, Homo sapiens
  misc_RNA (1)...(19): siRNA sense strand
uggaugagaucaacgggua

SEQ ID NO: 2476753 - RNA, 19 nt, Homo sapiens
  misc_RNA (1)...(19): siRNA sense strand
cggccugcucugugacaaa

SEQ ID NO: 2476754 - RNA, 19 nt, Homo sapiens
  misc_RNA (1)...(19): siRNA sense strand
gcaucaacgccgagccuga

SEQ ID NO: 2476755 - RNA, 19 nt, Homo sapiens
  misc_RNA (1)...(19): siRNA sense strand
ggaugagaucaacggguau

SEQ ID NO: 2476756 - RNA, 19 nt, Homo sapiens
  misc_RNA (1)...(19): siRNA sense strand
ggaugggcaaggagugcaa

SEQ ID NO: 2476757 - RNA, 19 nt, Homo sapiens
  misc_RNA (1)...(19): siRNA sense strand
gaucgauggcugcggguca

SEQ ID NO: 2476758 - RNA, 19 nt, Homo sapiens
  misc_RNA (1)...(19): siRNA sense strand
cguguguggaugagaucaa

SEQ ID NO: 2476759 - RNA, 19 nt, Homo sapiens
  misc_RNA (1)...(19): siRNA sense strand
gccacaaggacgugcucua

SEQ ID NO: 2476760 - RNA, 19 nt, Homo sapiens
  misc_RNA (1)...(19): siRNA sense strand
gagaacuacuacagcgcca

SEQ ID NO: 2476761 - RNA, 19 nt, Homo sapiens
  misc_RNA (1)...(19): siRNA sense strand
ccugcaaggaccuggugaa

SEQ ID NO: 2476762 - RNA, 19 nt, Homo sapiens
  misc_RNA (1)...(19): siRNA sense strand
ccuacugccaugagaacau

SEQ ID NO: 2476763 - RNA, 19 nt, Homo sapiens
  misc_RNA (1)...(19): siRNA sense strand
uuaaggaguaccaggccaa

SEQ ID NO: 2476764 - RNA, 19 nt, Homo sapiens
  misc_RNA (1)...(19): siRNA sense strand
aggucaagguggagacggu

SEQ ID NO: 2476765 - RNA, 19 nt, Homo sapiens
  misc_RNA (1)...(19): siRNA sense strand
ggaacugugagaaggcuga

SEQ ID NO: 2476766 - RNA, 19 nt, Homo sapiens
  misc_RNA (1)...(19): siRNA sense strand
gcacaugcaucgaugaggu

SEQ ID NO: 2476767 - RNA, 19 nt, Homo sapiens
  misc_RNA (1)...(19): siRNA sense strand
ucgaugagguggacgccuu

SEQ ID NO: 2476768 - RNA, 19 nt, Homo sapiens
  misc_RNA (1)...(19): siRNA sense strand
augaggaggacgaggaucu

SEQ ID NO: 2476769 - RNA, 19 nt, Homo sapiens
  misc_RNA (1)...(19): siRNA sense strand
cccuggaggcggagaaguu

SEQ ID NO: 2476770 - RNA, 19 nt, Homo sapiens
  misc_RNA (1)...(19): siRNA sense strand
gggagacagaagaggagaa

SEQ ID NO: 2476771 - RNA, 19 nt, Homo sapiens
  misc_RNA (1)...(19): siRNA sense strand
ggccaugguuuguuggaga

SEQ ID NO: 2476772 - RNA, 19 nt, Homo sapiens
  misc_RNA (1)...(19): siRNA sense strand
gggaagaggccaugguuug

SEQ ID NO: 2476773 - RNA, 19 nt, Homo sapiens
  misc_RNA (1)...(19): siRNA sense strand
uugagaaacugaagccaga

SEQ ID NO: 2476774 - RNA, 19 nt, Homo sapiens
  misc_RNA (1)...(19): siRNA sense strand
cagcccugacuuugagaaa

SEQ ID NO: 2476775 - RNA, 19 nt, Homo sapiens
  misc_RNA (1)...(19): siRNA sense strand
ggagaagauucguguggac

SEQ ID NO: 2476776 - RNA, 19 nt, Homo sapiens
  misc_RNA (1)...(19): siRNA sense strand
gcccugacuuugagaaacu

SEQ ID NO: 2476777 - RNA, 19 nt, Homo sapiens
  misc_RNA (1)...(19): siRNA sense strand
guguggacauuuuggagaa

SEQ ID NO: 2476778 - RNA, 19 nt, Homo sapiens
  misc_RNA (1)...(19): siRNA sense strand
agaagauucguguggacau

SEQ ID NO: 2476779 - RNA, 19 nt, Homo sapiens
  misc_RNA (1)...(19): siRNA sense strand
gggagacagaagaggagaa

SEQ ID NO: 2476780 - RNA, 19 nt, Homo sapiens
  misc_RNA (1)...(19): siRNA sense strand
ggccaugguuuguuggaga

SEQ ID NO: 2476781 - RNA, 19 nt, Homo sapiens
  misc_RNA (1)...(19): siRNA sense strand
gggaagaggccaugguuug

SEQ ID NO: 2476782 - RNA, 19 nt, Homo sapiens
  misc_RNA (1)...(19): siRNA sense strand
uugagaaacugaagccaga

SEQ ID NO: 2476783 - RNA, 19 nt, Homo sapiens
  misc_RNA (1)...(19): siRNA sense strand
cagcccugacuuugagaaa

SEQ ID NO: 2476784 - RNA, 19 nt, Homo sapiens
  misc_RNA (1)...(19): siRNA sense strand
ggagaagauucguguggac

SEQ ID NO: 2476785 - RNA, 19 nt, Homo sapiens
  misc_RNA (1)...(19): siRNA sense strand
gcccugacuuugagaaacu

SEQ ID NO: 2476786 - RNA, 19 nt, Homo sapiens
  misc_RNA (1)...(19): siRNA sense strand
guguggacauuuuggagaa

SEQ ID NO: 2476787 - RNA, 19 nt, Homo sapiens
  misc_RNA (1)...(19): siRNA sense strand
agaagauucguguggacau

SEQ ID NO: 2476788 - RNA, 19 nt, Homo sapiens
  misc_RNA (1)...(19): siRNA sense strand
gggagacagaagaggagaa

SEQ ID NO: 2476789 - RNA, 19 nt, Homo sapiens
  misc_RNA (1)...(19): siRNA sense strand
cagcccugacuuugagaaa

SEQ ID NO: 2476790 - RNA, 19 nt, Homo sapiens
  misc_RNA (1)...(19): siRNA sense strand
ggagaagauucguguggac

SEQ ID NO: 2476791 - RNA, 19 nt, Homo sapiens
  misc_RNA (1)...(19): siRNA sense strand
gcccugacuuugagaaacu

SEQ ID NO: 2476792 - RNA, 19 nt, Homo sapiens
  misc_RNA (1)...(19): siRNA sense strand
guguggacauuuuggagaa

SEQ ID NO: 2476793 - RNA, 19 nt, Homo sapiens
  misc_RNA (1)...(19): siRNA sense strand
agaagauucguguggacau

SEQ ID NO: 2476794 - RNA, 19 nt, Homo sapiens
  misc_RNA (1)...(19): siRNA sense strand
gggacgaggaccagcacaa

SEQ ID NO: 2476795 - RNA, 19 nt, Homo sapiens
  misc_RNA (1)...(19): siRNA sense strand
ucgagaaccugcuggccaa

SEQ ID NO: 2476796 - RNA, 19 nt, Homo sapiens
  misc_RNA (1)...(19): siRNA sense strand
cgagagaguacuacagcga

SEQ ID NO: 2476797 - RNA, 19 nt, Homo sapiens
  misc_RNA (1)...(19): siRNA sense strand
acauccugcucgugggcua

SEQ ID NO: 2476798 - RNA, 19 nt, Homo sapiens
  misc_RNA (1)...(19): siRNA sense strand
ucaucgaggccgucaacaa

SEQ ID NO: 2476799 - RNA, 19 nt, Homo sapiens
  misc_RNA (1)...(19): siRNA sense strand
acggugacuuugaggccua

SEQ ID NO: 2476800 - RNA, 19 nt, Homo sapiens
  misc_RNA (1)...(19): siRNA sense strand
aagacauuguggcgagaga

SEQ ID NO: 2476801 - RNA, 19 nt, Homo sapiens
  misc_RNA (1)...(19): siRNA sense strand
ccgacgaguaccagcucua

SEQ ID NO: 2476802 - RNA, 19 nt, Homo sapiens
  misc_RNA (1)...(19): siRNA sense strand
aguucaaugccaggagaaa

SEQ ID NO: 2476803 - RNA, 19 nt, Homo sapiens
  misc_RNA (1)...(19): siRNA sense strand
gggacgaggaccagcacaa

SEQ ID NO: 2476804 - RNA, 19 nt, Homo sapiens
  misc_RNA (1)...(19): siRNA sense strand
ucgagaaccugcuggccaa

SEQ ID NO: 2476805 - RNA, 19 nt, Homo sapiens
  misc_RNA (1)...(19): siRNA sense strand
cgagagaguacuacagcga

SEQ ID NO: 2476806 - RNA, 19 nt, Homo sapiens
  misc_RNA (1)...(19): siRNA sense strand
acauccugcucgugggcua

SEQ ID NO: 2476807 - RNA, 19 nt, Homo sapiens
  misc_RNA (1)...(19): siRNA sense strand
ucaucgaggccgucaacaa

SEQ ID NO: 2476808 - RNA, 19 nt, Homo sapiens
  misc_RNA (1)...(19): siRNA sense strand
acggugacuuugaggccua

SEQ ID NO: 2476809 - RNA, 19 nt, Homo sapiens
  misc_RNA (1)...(19): siRNA sense strand
aagacauuguggcgagaga

SEQ ID NO: 2476810 - RNA, 19 nt, Homo sapiens
  misc_RNA (1)...(19): siRNA sense strand
ccgacgaguaccagcucua

SEQ ID NO: 2476811 - RNA, 19 nt, Homo sapiens
  misc_RNA (1)...(19): siRNA sense strand
aguucaaugccaggagaaa

SEQ ID NO: 2476812 - RNA, 19 nt, Homo sapiens
  misc_RNA (1)...(19): siRNA sense strand
gggacgaggaccagcacaa

SEQ ID NO: 2476813 - RNA, 19 nt, Homo sapiens
  misc_RNA (1)...(19): siRNA sense strand
ucgagaaccugcuggccaa

SEQ ID NO: 2476814 - RNA, 19 nt, Homo sapiens
  misc_RNA (1)...(19): siRNA sense strand
cgagagaguacuacagcga

SEQ ID NO: 2476815 - RNA, 19 nt, Homo sapiens
  misc_RNA (1)...(19): siRNA sense strand
acauccugcucgugggcua

SEQ ID NO: 2476816 - RNA, 19 nt, Homo sapiens
  misc_RNA (1)...(19): siRNA sense strand
ucaucgaggccgucaacaa

SEQ ID NO: 2476817 - RNA, 19 nt, Homo sapiens
  misc_RNA (1)...(19): siRNA sense strand
acggugacuuugaggccua

SEQ ID NO: 2476818 - RNA, 19 nt, Homo sapiens
  misc_RNA (1)...(19): siRNA sense strand
aagacauuguggcgagaga

SEQ ID NO: 2476819 - RNA, 19 nt, Homo sapiens
  misc_RNA (1)...(19): siRNA sense strand
ccgacgaguaccagcucua

SEQ ID NO: 2476820 - RNA, 19 nt, Homo sapiens
  misc_RNA (1)...(19): siRNA sense strand
aguucaaugccaggagaaa

SEQ ID NO: 2476821 - RNA, 19 nt, Homo sapiens
  misc_RNA (1)...(19): siRNA sense strand
gggacgaggaccagcacaa

SEQ ID NO: 2476822 - RNA, 19 nt, Homo sapiens
  misc_RNA (1)...(19): siRNA sense strand
ucgagaaccugcuggccaa

SEQ ID NO: 2476823 - RNA, 19 nt, Homo sapiens
  misc_RNA (1)...(19): siRNA sense strand
cgagagaguacuacagcga

SEQ ID NO: 2476824 - RNA, 19 nt, Homo sapiens
  misc_RNA (1)...(19): siRNA sense strand
acauccugcucgugggcua

SEQ ID NO: 2476825 - RNA, 19 nt, Homo sapiens
  misc_RNA (1)...(19): siRNA sense strand
ucaucgaggccgucaacaa

SEQ ID NO: 2476826 - RNA, 19 nt, Homo sapiens
  misc_RNA (1)...(19): siRNA sense strand
acggugacuuugaggccua

SEQ ID NO: 2476827 - RNA, 19 nt, Homo sapiens
  misc_RNA (1)...(19): siRNA sense strand
aagacauuguggcgagaga

SEQ ID NO: 2476828 - RNA, 19 nt, Homo sapiens
  misc_RNA (1)...(19): siRNA sense strand
ccgacgaguaccagcucua

SEQ ID NO: 2476829 - RNA, 19 nt, Homo sapiens
  misc_RNA (1)...(19): siRNA sense strand
aguucaaugccaggagaaa

SEQ ID NO: 2476830 - RNA, 19 nt, Homo sapiens
  misc_RNA (1)...(19): siRNA sense strand
gggacgaggaccagcacaa

SEQ ID NO: 2476831 - RNA, 19 nt, Homo sapiens
  misc_RNA (1)...(19): siRNA sense strand
ucgagaaccugcuggccaa

SEQ ID NO: 2476832 - RNA, 19 nt, Homo sapiens
  misc_RNA (1)...(19): siRNA sense strand
cgagagaguacuacagcga

SEQ ID NO: 2476833 - RNA, 19 nt, Homo sapiens
  misc_RNA (1)...(19): siRNA sense strand
acauccugcucgugggcua

SEQ ID NO: 2476834 - RNA, 19 nt, Homo sapiens
  misc_RNA (1)...(19): siRNA sense strand
ucaucgaggccgucaacaa

SEQ ID NO: 2476835 - RNA, 19 nt, Homo sapiens
  misc_RNA (1)...(19): siRNA sense strand
acggugacuuugaggccua

SEQ ID NO: 2476836 - RNA, 19 nt, Homo sapiens
  misc_RNA (1)...(19): siRNA sense strand
aagacauuguggcgagaga

SEQ ID NO: 2476837 - RNA, 19 nt, Homo sapiens
  misc_RNA (1)...(19): siRNA sense strand
ccgacgaguaccagcucua

SEQ ID NO: 2476838 - RNA, 19 nt, Homo sapiens
  misc_RNA (1)...(19): siRNA sense strand
aguucaaugccaggagaaa

SEQ ID NO: 2476839 - RNA, 19 nt, Homo sapiens
  misc_RNA (1)...(19): siRNA sense strand
gggacgaggaccagcacaa

SEQ ID NO: 2476840 - RNA, 19 nt, Homo sapiens
  misc_RNA (1)...(19): siRNA sense strand
ucgagaaccugcuggccaa

SEQ ID NO: 2476841 - RNA, 19 nt, Homo sapiens
  misc_RNA (1)...(19): siRNA sense strand
cgagagaguacuacagcga

SEQ ID NO: 2476842 - RNA, 19 nt, Homo sapiens
  misc_RNA (1)...(19): siRNA sense strand
acauccugcucgugggcua

SEQ ID NO: 2476843 - RNA, 19 nt, Homo sapiens
  misc_RNA (1)...(19): siRNA sense strand
ucaucgaggccgucaacaa

SEQ ID NO: 2476844 - RNA, 19 nt, Homo sapiens
  misc_RNA (1)...(19): siRNA sense strand
acggugacuuugaggccua

SEQ ID NO: 2476845 - RNA, 19 nt, Homo sapiens
  misc_RNA (1)...(19): siRNA sense strand
aagacauuguggcgagaga

SEQ ID NO: 2476846 - RNA, 19 nt, Homo sapiens
  misc_RNA (1)...(19): siRNA sense strand
ccgacgaguaccagcucua

SEQ ID NO: 2476847 - RNA, 19 nt, Homo sapiens
  misc_RNA (1)...(19): siRNA sense strand
aguucaaugccaggagaaa

SEQ ID NO: 2476848 - RNA, 19 nt, Homo sapiens
  misc_RNA (1)...(19): siRNA sense strand
gggacgaggaccagcacaa

SEQ ID NO: 2476849 - RNA, 19 nt, Homo sapiens
  misc_RNA (1)...(19): siRNA sense strand
ucgagaaccugcuggccaa

SEQ ID NO: 2476850 - RNA, 19 nt, Homo sapiens
  misc_RNA (1)...(19): siRNA sense strand
cgagagaguacuacagcga

SEQ ID NO: 2476851 - RNA, 19 nt, Homo sapiens
  misc_RNA (1)...(19): siRNA sense strand
acauccugcucgugggcua

SEQ ID NO: 2476852 - RNA, 19 nt, Homo sapiens
  misc_RNA (1)...(19): siRNA sense strand
ucaucgaggccgucaacaa

SEQ ID NO: 2476853 - RNA, 19 nt, Homo sapiens
  misc_RNA (1)...(19): siRNA sense strand
acggugacuuugaggccua

SEQ ID NO: 2476854 - RNA, 19 nt, Homo sapiens
  misc_RNA (1)...(19): siRNA sense strand
aagacauuguggcgagaga

SEQ ID NO: 2476855 - RNA, 19 nt, Homo sapiens
  misc_RNA (1)...(19): siRNA sense strand
ccgacgaguaccagcucua

SEQ ID NO: 2476856 - RNA, 19 nt, Homo sapiens
  misc_RNA (1)...(19): siRNA sense strand
aguucaaugccaggagaaa

SEQ ID NO: 2476857 - RNA, 19 nt, Homo sapiens
  misc_RNA (1)...(19): siRNA sense strand
gggacgaggaccagcacaa

SEQ ID NO: 2476858 - RNA, 19 nt, Homo sapiens
  misc_RNA (1)...(19): siRNA sense strand
ucgagaaccugcuggccaa

SEQ ID NO: 2476859 - RNA, 19 nt, Homo sapiens
  misc_RNA (1)...(19): siRNA sense strand
cgagagaguacuacagcga

SEQ ID NO: 2476860 - RNA, 19 nt, Homo sapiens
  misc_RNA (1)...(19): siRNA sense strand
acauccugcucgugggcua

SEQ ID NO: 2476861 - RNA, 19 nt, Homo sapiens
  misc_RNA (1)...(19): siRNA sense strand
ucaucgaggccgucaacaa

SEQ ID NO: 2476862 - RNA, 19 nt, Homo sapiens
  misc_RNA (1)...(19): siRNA sense strand
acggugacuuugaggccua

SEQ ID NO: 2476863 - RNA, 19 nt, Homo sapiens
  misc_RNA (1)...(19): siRNA sense strand
aagacauuguggcgagaga

SEQ ID NO: 2476864 - RNA, 19 nt, Homo sapiens
  misc_RNA (1)...(19): siRNA sense strand
ccgacgaguaccagcucua

SEQ ID NO: 2476865 - RNA, 19 nt, Homo sapiens
  misc_RNA (1)...(19): siRNA sense strand
aguucaaugccaggagaaa

SEQ ID NO: 2476866 - RNA, 19 nt, Homo sapiens
  misc_RNA (1)...(19): siRNA sense strand
cggaaagccgugaggaaga

SEQ ID NO: 2476867 - RNA, 19 nt, Homo sapiens
  misc_RNA (1)...(19): siRNA sense strand
uugaagaggagaagaggaa

SEQ ID NO: 2476868 - RNA, 19 nt, Homo sapiens
  misc_RNA (1)...(19): siRNA sense strand
cggcacagcucuuggagga

SEQ ID NO: 2476869 - RNA, 19 nt, Homo sapiens
  misc_RNA (1)...(19): siRNA sense strand
aggagaagaggaagaagaa

SEQ ID NO: 2476870 - RNA, 19 nt, Homo sapiens
  misc_RNA (1)...(19): siRNA sense strand
ggugaaacugguagacaga

SEQ ID NO: 2476871 - RNA, 19 nt, Homo sapiens
  misc_RNA (1)...(19): siRNA sense strand
acuccaaguuugaugaaaa

SEQ ID NO: 2476872 - RNA, 19 nt, Homo sapiens
  misc_RNA (1)...(19): siRNA sense strand
aagaagaagcagaacugaa

SEQ ID NO: 2476873 - RNA, 19 nt, Homo sapiens
  misc_RNA (1)...(19): siRNA sense strand
uggcacagucggaggccua

SEQ ID NO: 2476874 - RNA, 19 nt, Homo sapiens
  misc_RNA (1)...(19): siRNA sense strand
cccggaaagccgugaggaa

SEQ ID NO: 2476875 - RNA, 19 nt, Homo sapiens
  misc_RNA (1)...(19): siRNA sense strand
gggcaagccaagaagcuga

SEQ ID NO: 2476876 - RNA, 19 nt, Homo sapiens
  misc_RNA (1)...(19): siRNA sense strand
cacagagccacuugagaaa

SEQ ID NO: 2476877 - RNA, 19 nt, Homo sapiens
  misc_RNA (1)...(19): siRNA sense strand
aagccaagaagcugaagaa

SEQ ID NO: 2476878 - RNA, 19 nt, Homo sapiens
  misc_RNA (1)...(19): siRNA sense strand
cuauauggcagcccggaaa

SEQ ID NO: 2476879 - RNA, 19 nt, Homo sapiens
  misc_RNA (1)...(19): siRNA sense strand
ggagaagaggaagaagaaa

SEQ ID NO: 2476880 - RNA, 19 nt, Homo sapiens
  misc_RNA (1)...(19): siRNA sense strand
aggaacaagaagcagcaaa

SEQ ID NO: 2476881 - RNA, 19 nt, Homo sapiens
  misc_RNA (1)...(19): siRNA sense strand
ccuuauuaaaagagagaga

SEQ ID NO: 2476882 - RNA, 19 nt, Homo sapiens
  misc_RNA (1)...(19): siRNA sense strand
cugcagaccgccugaguga

SEQ ID NO: 2476883 - RNA, 19 nt, Homo sapiens
  misc_RNA (1)...(19): siRNA sense strand
gagaagaagaagcagaacu

SEQ ID NO: 2476884 - RNA, 19 nt, Homo sapiens
  misc_RNA (1)...(19): siRNA sense strand
gggacaacauccugccuga

SEQ ID NO: 2476885 - RNA, 19 nt, Homo sapiens
  misc_RNA (1)...(19): siRNA sense strand
ugcaugaacauuacggaua

SEQ ID NO: 2476886 - RNA, 19 nt, Homo sapiens
  misc_RNA (1)...(19): siRNA sense strand
ucuucgaggcucaggagaa

SEQ ID NO: 2476887 - RNA, 19 nt, Homo sapiens
  misc_RNA (1)...(19): siRNA sense strand
cagacucacgggagaggaa

SEQ ID NO: 2476888 - RNA, 19 nt, Homo sapiens
  misc_RNA (1)...(19): siRNA sense strand
uggagguguugcuggaaga

SEQ ID NO: 2476889 - RNA, 19 nt, Homo sapiens
  misc_RNA (1)...(19): siRNA sense strand
gaaaacgacugcuggguca

SEQ ID NO: 2476890 - RNA, 19 nt, Homo sapiens
  misc_RNA (1)...(19): siRNA sense strand
aggcucugcuggagaacau

SEQ ID NO: 2476891 - RNA, 19 nt, Homo sapiens
  misc_RNA (1)...(19): siRNA sense strand
gaagaggccugaagcggca

SEQ ID NO: 2476892 - RNA, 19 nt, Homo sapiens
  misc_RNA (1)...(19): siRNA sense strand
ggccguuggagaucagaaa

SEQ ID NO: 2476893 - RNA, 19 nt, Homo sapiens
  misc_RNA (1)...(19): siRNA sense strand
agaagcucuacaaggaaua

SEQ ID NO: 2476894 - RNA, 19 nt, Homo sapiens
  misc_RNA (1)...(19): siRNA sense strand
ugaacuuuguccagaagau

SEQ ID NO: 2476895 - RNA, 19 nt, Homo sapiens
  misc_RNA (1)...(19): siRNA sense strand
uggacaacgguuacggcua

SEQ ID NO: 2476896 - RNA, 19 nt, Homo sapiens
  misc_RNA (1)...(19): siRNA sense strand
ggggagaagaagaagcaga

SEQ ID NO: 2476897 - RNA, 19 nt, Homo sapiens
  misc_RNA (1)...(19): siRNA sense strand
cagaacugaauaagaacuu

SEQ ID NO: 2476898 - RNA, 19 nt, Homo sapiens
  misc_RNA (1)...(19): siRNA sense strand
ugguauugcugugggccaa

SEQ ID NO: 2476899 - RNA, 19 nt, Homo sapiens
  misc_RNA (1)...(19): siRNA sense strand
uaugacaagaagacagcaa

SEQ ID NO: 2476900 - RNA, 19 nt, Homo sapiens
  misc_RNA (1)...(19): siRNA sense strand
cagcaaagggcaagccaag

SEQ ID NO: 2476901 - RNA, 19 nt, Homo sapiens
  misc_RNA (1)...(19): siRNA sense strand
ggguugaagaggagaagag

SEQ ID NO: 2476902 - RNA, 19 nt, Homo sapiens
  misc_RNA (1)...(19): siRNA sense strand
agacauggaagcucugaau

SEQ ID NO: 2476903 - RNA, 19 nt, Homo sapiens
  misc_RNA (1)...(19): siRNA sense strand
augggaagcuggugccuga

SEQ ID NO: 2476904 - RNA, 19 nt, Homo sapiens
  misc_RNA (1)...(19): siRNA sense strand
cuggaagaagccaaggauu

SEQ ID NO: 2476905 - RNA, 19 nt, Homo sapiens
  misc_RNA (1)...(19): siRNA sense strand
ugaguaugugccagaaauu

SEQ ID NO: 2476906 - RNA, 19 nt, Homo sapiens
  misc_RNA (1)...(19): siRNA sense strand
cagaauuccgagaaggagu

SEQ ID NO: 2476907 - RNA, 19 nt, Homo sapiens
  misc_RNA (1)...(19): siRNA sense strand
agggcaaagagcucagcaa

SEQ ID NO: 2476908 - RNA, 19 nt, Homo sapiens
  misc_RNA (1)...(19): siRNA sense strand
cggaaagccgugaggaaga

SEQ ID NO: 2476909 - RNA, 19 nt, Homo sapiens
  misc_RNA (1)...(19): siRNA sense strand
uugaagaggagaagaggaa

SEQ ID NO: 2476910 - RNA, 19 nt, Homo sapiens
  misc_RNA (1)...(19): siRNA sense strand
cggcacagcucuuggagga

SEQ ID NO: 2476911 - RNA, 19 nt, Homo sapiens
  misc_RNA (1)...(19): siRNA sense strand
aggagaagaggaagaagaa

SEQ ID NO: 2476912 - RNA, 19 nt, Homo sapiens
  misc_RNA (1)...(19): siRNA sense strand
ggugaaacugguagacaga

SEQ ID NO: 2476913 - RNA, 19 nt, Homo sapiens
  misc_RNA (1)...(19): siRNA sense strand
acuccaaguuugaugaaaa

SEQ ID NO: 2476914 - RNA, 19 nt, Homo sapiens
  misc_RNA (1)...(19): siRNA sense strand
aagaagaagcagaacugaa

SEQ ID NO: 2476915 - RNA, 19 nt, Homo sapiens
  misc_RNA (1)...(19): siRNA sense strand
uggcacagucggaggccua

SEQ ID NO: 2476916 - RNA, 19 nt, Homo sapiens
  misc_RNA (1)...(19): siRNA sense strand
cccggaaagccgugaggaa

SEQ ID NO: 2476917 - RNA, 19 nt, Homo sapiens
  misc_RNA (1)...(19): siRNA sense strand
gggcaagccaagaagcuga

SEQ ID NO: 2476918 - RNA, 19 nt, Homo sapiens
  misc_RNA (1)...(19): siRNA sense strand
cacagagccacuugagaaa

SEQ ID NO: 2476919 - RNA, 19 nt, Homo sapiens
  misc_RNA (1)...(19): siRNA sense strand
cuauauggcagcccggaaa

SEQ ID NO: 2476920 - RNA, 19 nt, Homo sapiens
  misc_RNA (1)...(19): siRNA sense strand
ggagaagaggaagaagaaa

SEQ ID NO: 2476921 - RNA, 19 nt, Homo sapiens
  misc_RNA (1)...(19): siRNA sense strand
aggaacaagaagcagcaaa

SEQ ID NO: 2476922 - RNA, 19 nt, Homo sapiens
  misc_RNA (1)...(19): siRNA sense strand
ccuuauuaaaagagagaga

SEQ ID NO: 2476923 - RNA, 19 nt, Homo sapiens
  misc_RNA (1)...(19): siRNA sense strand
cugcagaccgccugaguga

SEQ ID NO: 2476924 - RNA, 19 nt, Homo sapiens
  misc_RNA (1)...(19): siRNA sense strand
gagaagaagaagcagaacu

SEQ ID NO: 2476925 - RNA, 19 nt, Homo sapiens
  misc_RNA (1)...(19): siRNA sense strand
gggacaacauccugccuga

SEQ ID NO: 2476926 - RNA, 19 nt, Homo sapiens
  misc_RNA (1)...(19): siRNA sense strand
ugcaugaacauuacggaua

SEQ ID NO: 2476927 - RNA, 19 nt, Homo sapiens
  misc_RNA (1)...(19): siRNA sense strand
cagacucacgggagaggaa

SEQ ID NO: 2476928 - RNA, 19 nt, Homo sapiens
  misc_RNA (1)...(19): siRNA sense strand
uggagguguugcuggaaga

SEQ ID NO: 2476929 - RNA, 19 nt, Homo sapiens
  misc_RNA (1)...(19): siRNA sense strand
gaaaacgacugcuggguca

SEQ ID NO: 2476930 - RNA, 19 nt, Homo sapiens
  misc_RNA (1)...(19): siRNA sense strand
aggcucugcuggagaacau

SEQ ID NO: 2476931 - RNA, 19 nt, Homo sapiens
  misc_RNA (1)...(19): siRNA sense strand
gaagaggccugaagcggca

SEQ ID NO: 2476932 - RNA, 19 nt, Homo sapiens
  misc_RNA (1)...(19): siRNA sense strand
ggccguuggagaucagaaa

SEQ ID NO: 2476933 - RNA, 19 nt, Homo sapiens
  misc_RNA (1)...(19): siRNA sense strand
ugaacuuuguccagaagau

SEQ ID NO: 2476934 - RNA, 19 nt, Homo sapiens
  misc_RNA (1)...(19): siRNA sense strand
uggacaacgguuacggcua

SEQ ID NO: 2476935 - RNA, 19 nt, Homo sapiens
  misc_RNA (1)...(19): siRNA sense strand
ggggagaagaagaagcaga

SEQ ID NO: 2476936 - RNA, 19 nt, Homo sapiens
  misc_RNA (1)...(19): siRNA sense strand
cagaacugaauaagaacuu

SEQ ID NO: 2476937 - RNA, 19 nt, Homo sapiens
  misc_RNA (1)...(19): siRNA sense strand
ugguauugcugugggccaa

SEQ ID NO: 2476938 - RNA, 19 nt, Homo sapiens
  misc_RNA (1)...(19): siRNA sense strand
uaugacaagaagacagcaa

SEQ ID NO: 2476939 - RNA, 19 nt, Homo sapiens
  misc_RNA (1)...(19): siRNA sense strand
cagcaaagggcaagccaag

SEQ ID NO: 2476940 - RNA, 19 nt, Homo sapiens
  misc_RNA (1)...(19): siRNA sense strand
ggguugaagaggagaagag

SEQ ID NO: 2476941 - RNA, 19 nt, Homo sapiens
  misc_RNA (1)...(19): siRNA sense strand
agacauggaagcucugaau

SEQ ID NO: 2476942 - RNA, 19 nt, Homo sapiens
  misc_RNA (1)...(19): siRNA sense strand
augggaagcuggugccuga

SEQ ID NO: 2476943 - RNA, 19 nt, Homo sapiens
  misc_RNA (1)...(19): siRNA sense strand
cuggaagaagccaaggauu

SEQ ID NO: 2476944 - RNA, 19 nt, Homo sapiens
  misc_RNA (1)...(19): siRNA sense strand
ugaguaugugccagaaauu

SEQ ID NO: 2476945 - RNA, 19 nt, Homo sapiens
  misc_RNA (1)...(19): siRNA sense strand
cagaauuccgagaaggagu

SEQ ID NO: 2476946 - RNA, 19 nt, Homo sapiens
  misc_RNA (1)...(19): siRNA sense strand
agggcaaagagcucagcaa

SEQ ID NO: 2476947 - RNA, 19 nt, Homo sapiens
  misc_RNA (1)...(19): siRNA sense strand
agccaaggacaaugagauu

SEQ ID NO: 2476948 - RNA, 19 nt, Homo sapiens
  misc_RNA (1)...(19): siRNA sense strand
ggacugaggaaccgcgaca

SEQ ID NO: 2476949 - RNA, 19 nt, Homo sapiens
  misc_RNA (1)...(19): siRNA sense strand
cagccaaggacaaugagau

SEQ ID NO: 2476950 - RNA, 19 nt, Homo sapiens
  misc_RNA (1)...(19): siRNA sense strand
ucaaguucuuucugcgcua

SEQ ID NO: 2476951 - RNA, 19 nt, Homo sapiens
  misc_RNA (1)...(19): siRNA sense strand
agccaaggacaaugagauu

SEQ ID NO: 2476952 - RNA, 19 nt, Homo sapiens
  misc_RNA (1)...(19): siRNA sense strand
ggacugaggaaccgcgaca

SEQ ID NO: 2476953 - RNA, 19 nt, Homo sapiens
  misc_RNA (1)...(19): siRNA sense strand
cagccaaggacaaugagau

SEQ ID NO: 2476954 - RNA, 19 nt, Homo sapiens
  misc_RNA (1)...(19): siRNA sense strand
ucaaguucuuucugcgcua

SEQ ID NO: 2476955 - RNA, 19 nt, Homo sapiens
  misc_RNA (1)...(19): siRNA sense strand
gggaauggacagagagacu

SEQ ID NO: 2476956 - RNA, 19 nt, Homo sapiens
  misc_RNA (1)...(19): siRNA sense strand
gguuauuugacuugggaau

SEQ ID NO: 2476957 - RNA, 19 nt, Homo sapiens
  misc_RNA (1)...(19): siRNA sense strand
cuuacaaacaccauggaaa

SEQ ID NO: 2476958 - RNA, 19 nt, Homo sapiens
  misc_RNA (1)...(19): siRNA sense strand
ucgaauuggaagucacaua

SEQ ID NO: 2476959 - RNA, 19 nt, Homo sapiens
  misc_RNA (1)...(19): siRNA sense strand
aauuuaacgugcugcagaa

SEQ ID NO: 2476960 - RNA, 19 nt, Homo sapiens
  misc_RNA (1)...(19): siRNA sense strand
cuucauaauucgucccaca

SEQ ID NO: 2476961 - RNA, 19 nt, Homo sapiens
  misc_RNA (1)...(19): siRNA sense strand
cugcgaaagagaaagucua

SEQ ID NO: 2476962 - RNA, 19 nt, Homo sapiens
  misc_RNA (1)...(19): siRNA sense strand
cuaucuagcaccaaagaga

SEQ ID NO: 2476963 - RNA, 19 nt, Homo sapiens
  misc_RNA (1)...(19): siRNA sense strand
ucaagaaccaagaaagcuu

SEQ ID NO: 2476964 - RNA, 19 nt, Homo sapiens
  misc_RNA (1)...(19): siRNA sense strand
gucuaugaacggaaguuaa

SEQ ID NO: 2476965 - RNA, 19 nt, Homo sapiens
  misc_RNA (1)...(19): siRNA sense strand
uaaagcugcgaaagagaaa

SEQ ID NO: 2476966 - RNA, 19 nt, Homo sapiens
  misc_RNA (1)...(19): siRNA sense strand
acuucaacacccaggagaa

SEQ ID NO: 2476967 - RNA, 19 nt, Homo sapiens
  misc_RNA (1)...(19): siRNA sense strand
gcucccacggcaagauaaa

SEQ ID NO: 2476968 - RNA, 19 nt, Homo sapiens
  misc_RNA (1)...(19): siRNA sense strand
gucuaugaacagugucaaa

SEQ ID NO: 2476969 - RNA, 19 nt, Homo sapiens
  misc_RNA (1)...(19): siRNA sense strand
ccugaaaacauggaagaaa

SEQ ID NO: 2476970 - RNA, 19 nt, Homo sapiens
  misc_RNA (1)...(19): siRNA sense strand
ccuuaaucuuugcaagcau

SEQ ID NO: 2476971 - RNA, 19 nt, Homo sapiens
  misc_RNA (1)...(19): siRNA sense strand
ucuucaucuuuuagggaaa

SEQ ID NO: 2476972 - RNA, 19 nt, Homo sapiens
  misc_RNA (1)...(19): siRNA sense strand
auguugagccacaaagaau

SEQ ID NO: 2476973 - RNA, 19 nt, Homo sapiens
  misc_RNA (1)...(19): siRNA sense strand
ggacagagagacugaggag

SEQ ID NO: 2476974 - RNA, 19 nt, Homo sapiens
  misc_RNA (1)...(19): siRNA sense strand
uuacaaacaccauggaaac

SEQ ID NO: 2476975 - RNA, 19 nt, Homo sapiens
  misc_RNA (1)...(19): siRNA sense strand
cugaaaacauggaagaaac

SEQ ID NO: 2476976 - RNA, 19 nt, Homo sapiens
  misc_RNA (1)...(19): siRNA sense strand
acggaaguuaaaagggaaa

SEQ ID NO: 2476977 - RNA, 19 nt, Homo sapiens
  misc_RNA (1)...(19): siRNA sense strand
caguugugcuccugguuca

SEQ ID NO: 2476978 - RNA, 19 nt, Homo sapiens
  misc_RNA (1)...(19): siRNA sense strand
gcuuuguuacuuugaguuu

SEQ ID NO: 2476979 - RNA, 19 nt, Homo sapiens
  misc_RNA (1)...(19): siRNA sense strand
gaacggaaguuaaaaggga

SEQ ID NO: 2476980 - RNA, 19 nt, Homo sapiens
  misc_RNA (1)...(19): siRNA sense strand
acuugggaauggacagaga

SEQ ID NO: 2476981 - RNA, 19 nt, Homo sapiens
  misc_RNA (1)...(19): siRNA sense strand
uuggaagguucaaagucua

SEQ ID NO: 2476982 - RNA, 19 nt, Homo sapiens
  misc_RNA (1)...(19): siRNA sense strand
cuuguuuaccauagcuuua

SEQ ID NO: 2476983 - RNA, 19 nt, Homo sapiens
  misc_RNA (1)...(19): siRNA sense strand
accaaagagauaccggaua

SEQ ID NO: 2476984 - RNA, 19 nt, Homo sapiens
  misc_RNA (1)...(19): siRNA sense strand
agucagaggcagagcagaa

SEQ ID NO: 2476985 - RNA, 19 nt, Homo sapiens
  misc_RNA (1)...(19): siRNA sense strand
aggagaagcacaagaccaa

SEQ ID NO: 2476986 - RNA, 19 nt, Homo sapiens
  misc_RNA (1)...(19): siRNA sense strand
gagcacuagccgagagaca

SEQ ID NO: 2476987 - RNA, 19 nt, Homo sapiens
  misc_RNA (1)...(19): siRNA sense strand
ggcaaagagaagaaggaga

SEQ ID NO: 2476988 - RNA, 19 nt, Homo sapiens
  misc_RNA (1)...(19): siRNA sense strand
gagaagaaggagaagcaca

SEQ ID NO: 2476989 - RNA, 19 nt, Homo sapiens
  misc_RNA (1)...(19): siRNA sense strand
gaacaaaucuucaggucag

SEQ ID NO: 2476990 - RNA, 19 nt, Homo sapiens
  misc_RNA (1)...(19): siRNA sense strand
augccauccucgagaagaa

SEQ ID NO: 2476991 - RNA, 19 nt, Homo sapiens
  misc_RNA (1)...(19): siRNA sense strand
accaacaggaugagggcua

SEQ ID NO: 2476992 - RNA, 19 nt, Homo sapiens
  misc_RNA (1)...(19): siRNA sense strand
ggaacaaaucuucagguca

SEQ ID NO: 2476993 - RNA, 19 nt, Homo sapiens
  misc_RNA (1)...(19): siRNA sense strand
aagagaagaaggagaagca

SEQ ID NO: 2476994 - RNA, 19 nt, Homo sapiens
  misc_RNA (1)...(19): siRNA sense strand
aggaugagggcuauggcaa

SEQ ID NO: 2476995 - RNA, 19 nt, Homo sapiens
  misc_RNA (1)...(19): siRNA sense strand
ugaaagacgugguggucgu

SEQ ID NO: 2476996 - RNA, 19 nt, Homo sapiens
  misc_RNA (1)...(19): siRNA sense strand
caacagauugccaaggaca

SEQ ID NO: 2476997 - RNA, 19 nt, Homo sapiens
  misc_RNA (1)...(19): siRNA sense strand
agcaaaaccuugagauuca

SEQ ID NO: 2476998 - RNA, 19 nt, Homo sapiens
  misc_RNA (1)...(19): siRNA sense strand
agacacugcacaagacaau

SEQ ID NO: 2476999 - RNA, 19 nt, Homo sapiens
  misc_RNA (1)...(19): siRNA sense strand
aggagggcaaagagaagaa

SEQ ID NO: 2477000 - RNA, 19 nt, Homo sapiens
  misc_RNA (1)...(19): siRNA sense strand
agaagaaugacauggagca

SEQ ID NO: 2477001 - RNA, 19 nt, Homo sapiens
  misc_RNA (1)...(19): siRNA sense strand
gagcccaagaggaggaagu

SEQ ID NO: 2477002 - RNA, 19 nt, Homo sapiens
  misc_RNA (1)...(19): siRNA sense strand
agaaggugucgaugcacua

SEQ ID NO: 2477003 - RNA, 19 nt, Homo sapiens
  misc_RNA (1)...(19): siRNA sense strand
caacauuggcagucggaug

SEQ ID NO: 2477004 - RNA, 19 nt, Homo sapiens
  misc_RNA (1)...(19): siRNA sense strand
cugcacaagacaaugguga

SEQ ID NO: 2477005 - RNA, 19 nt, Homo sapiens
  misc_RNA (1)...(19): siRNA sense strand
cacgauggauggaagccaa

SEQ ID NO: 2477006 - RNA, 19 nt, Homo sapiens
  misc_RNA (1)...(19): siRNA sense strand
ucaaauguggcgugcccaa

SEQ ID NO: 2477007 - RNA, 19 nt, Homo sapiens
  misc_RNA (1)...(19): siRNA sense strand
ucgaaggagggcaaagaga

SEQ ID NO: 2477008 - RNA, 19 nt, Homo sapiens
  misc_RNA (1)...(19): siRNA sense strand
aagcacuagagaagaauga

SEQ ID NO: 2477009 - RNA, 19 nt, Homo sapiens
  misc_RNA (1)...(19): siRNA sense strand
agacaauggugacccgcuu

SEQ ID NO: 2477010 - RNA, 19 nt, Homo sapiens
  misc_RNA (1)...(19): siRNA sense strand
aagaaugacauggagcaaa

SEQ ID NO: 2477011 - RNA, 19 nt, Homo sapiens
  misc_RNA (1)...(19): siRNA sense strand
agucagaggcagagcagaa

SEQ ID NO: 2477012 - RNA, 19 nt, Homo sapiens
  misc_RNA (1)...(19): siRNA sense strand
aggagaagcacaagaccaa

SEQ ID NO: 2477013 - RNA, 19 nt, Homo sapiens
  misc_RNA (1)...(19): siRNA sense strand
gagcacuagccgagagaca

SEQ ID NO: 2477014 - RNA, 19 nt, Homo sapiens
  misc_RNA (1)...(19): siRNA sense strand
ggcaaagagaagaaggaga

SEQ ID NO: 2477015 - RNA, 19 nt, Homo sapiens
  misc_RNA (1)...(19): siRNA sense strand
gagaagaaggagaagcaca

SEQ ID NO: 2477016 - RNA, 19 nt, Homo sapiens
  misc_RNA (1)...(19): siRNA sense strand
gaacaaaucuucaggucag

SEQ ID NO: 2477017 - RNA, 19 nt, Homo sapiens
  misc_RNA (1)...(19): siRNA sense strand
augccauccucgagaagaa

SEQ ID NO: 2477018 - RNA, 19 nt, Homo sapiens
  misc_RNA (1)...(19): siRNA sense strand
accaacaggaugagggcua

SEQ ID NO: 2477019 - RNA, 19 nt, Homo sapiens
  misc_RNA (1)...(19): siRNA sense strand
ggaacaaaucuucagguca

SEQ ID NO: 2477020 - RNA, 19 nt, Homo sapiens
  misc_RNA (1)...(19): siRNA sense strand
aagagaagaaggagaagca

SEQ ID NO: 2477021 - RNA, 19 nt, Homo sapiens
  misc_RNA (1)...(19): siRNA sense strand
aggaugagggcuauggcaa

SEQ ID NO: 2477022 - RNA, 19 nt, Homo sapiens
  misc_RNA (1)...(19): siRNA sense strand
ugaaagacgugguggucgu

SEQ ID NO: 2477023 - RNA, 19 nt, Homo sapiens
  misc_RNA (1)...(19): siRNA sense strand
caacagauugccaaggaca

SEQ ID NO: 2477024 - RNA, 19 nt, Homo sapiens
  misc_RNA (1)...(19): siRNA sense strand
agcaaaaccuugagauuca

SEQ ID NO: 2477025 - RNA, 19 nt, Homo sapiens
  misc_RNA (1)...(19): siRNA sense strand
agacacugcacaagacaau

SEQ ID NO: 2477026 - RNA, 19 nt, Homo sapiens
  misc_RNA (1)...(19): siRNA sense strand
aggagggcaaagagaagaa

SEQ ID NO: 2477027 - RNA, 19 nt, Homo sapiens
  misc_RNA (1)...(19): siRNA sense strand
agaagaaugacauggagca

SEQ ID NO: 2477028 - RNA, 19 nt, Homo sapiens
  misc_RNA (1)...(19): siRNA sense strand
gagcccaagaggaggaagu

SEQ ID NO: 2477029 - RNA, 19 nt, Homo sapiens
  misc_RNA (1)...(19): siRNA sense strand
agaaggugucgaugcacua

SEQ ID NO: 2477030 - RNA, 19 nt, Homo sapiens
  misc_RNA (1)...(19): siRNA sense strand
caacauuggcagucggaug

SEQ ID NO: 2477031 - RNA, 19 nt, Homo sapiens
  misc_RNA (1)...(19): siRNA sense strand
cugcacaagacaaugguga

SEQ ID NO: 2477032 - RNA, 19 nt, Homo sapiens
  misc_RNA (1)...(19): siRNA sense strand
cacgauggauggaagccaa

SEQ ID NO: 2477033 - RNA, 19 nt, Homo sapiens
  misc_RNA (1)...(19): siRNA sense strand
ucaaauguggcgugcccaa

SEQ ID NO: 2477034 - RNA, 19 nt, Homo sapiens
  misc_RNA (1)...(19): siRNA sense strand
ucgaaggagggcaaagaga

SEQ ID NO: 2477035 - RNA, 19 nt, Homo sapiens
  misc_RNA (1)...(19): siRNA sense strand
aagcacuagagaagaauga

SEQ ID NO: 2477036 - RNA, 19 nt, Homo sapiens
  misc_RNA (1)...(19): siRNA sense strand
agacaauggugacccgcuu

SEQ ID NO: 2477037 - RNA, 19 nt, Homo sapiens
  misc_RNA (1)...(19): siRNA sense strand
aagaaugacauggagcaaa

SEQ ID NO: 2477038 - RNA, 19 nt, Homo sapiens
  misc_RNA (1)...(19): siRNA sense strand
ugaucaaacucuaugggaa

SEQ ID NO: 2477039 - RNA, 19 nt, Homo sapiens
  misc_RNA (1)...(19): siRNA sense strand
gaucaaacucuaugggaag

SEQ ID NO: 2477040 - RNA, 19 nt, Homo sapiens
  misc_RNA (1)...(19): siRNA sense strand
agccaauacgggugaacaa

SEQ ID NO: 2477041 - RNA, 19 nt, Homo sapiens
  misc_RNA (1)...(19): siRNA sense strand
agaaggacuccaaggguga

SEQ ID NO: 2477042 - RNA, 19 nt, Homo sapiens
  misc_RNA (1)...(19): siRNA sense strand
aggcuauggcuuuguggaa

SEQ ID NO: 2477043 - RNA, 19 nt, Homo sapiens
  misc_RNA (1)...(19): siRNA sense strand
uuguggaauucuugaguga

SEQ ID NO: 2477044 - RNA, 19 nt, Homo sapiens
  misc_RNA (1)...(19): siRNA sense strand
augccaaaggauagaguca

SEQ ID NO: 2477045 - RNA, 19 nt, Homo sapiens
  misc_RNA (1)...(19): siRNA sense strand
gaacaaagcaucagcucac

SEQ ID NO: 2477046 - RNA, 19 nt, Homo sapiens
  misc_RNA (1)...(19): siRNA sense strand
aggcaacuccaaagguuau

SEQ ID NO: 2477047 - RNA, 19 nt, Homo sapiens
  misc_RNA (1)...(19): siRNA sense strand
cugagauugaugagaaguu

SEQ ID NO: 2477048 - RNA, 19 nt, Homo sapiens
  misc_RNA (1)...(19): siRNA sense strand
ggccuggaugagaagguua

SEQ ID NO: 2477049 - RNA, 19 nt, Homo sapiens
  misc_RNA (1)...(19): siRNA sense strand
ccaaauucucagauggaaa

SEQ ID NO: 2477050 - RNA, 19 nt, Homo sapiens
  misc_RNA (1)...(19): siRNA sense strand
gguccaaagaaaugaguuu

SEQ ID NO: 2477051 - RNA, 19 nt, Homo sapiens
  misc_RNA (1)...(19): siRNA sense strand
uggaagaaccaaagaagau

SEQ ID NO: 2477052 - RNA, 19 nt, Homo sapiens
  misc_RNA (1)...(19): siRNA sense strand
aggaauuagccucaggaaa

SEQ ID NO: 2477053 - RNA, 19 nt, Homo sapiens
  misc_RNA (1)...(19): siRNA sense strand
ggaaaaguaugguggccaa

SEQ ID NO: 2477054 - RNA, 19 nt, Homo sapiens
  misc_RNA (1)...(19): siRNA sense strand
cugaagacuauguggagua

SEQ ID NO: 2477055 - RNA, 19 nt, Homo sapiens
  misc_RNA (1)...(19): siRNA sense strand
aggaaaagaagaagaagaa

SEQ ID NO: 2477056 - RNA, 19 nt, Homo sapiens
  misc_RNA (1)...(19): siRNA sense strand
caggaaaauuaguggaaca

SEQ ID NO: 2477057 - RNA, 19 nt, Homo sapiens
  misc_RNA (1)...(19): siRNA sense strand
ggacagucaucaaaggaca

SEQ ID NO: 2477058 - RNA, 19 nt, Homo sapiens
  misc_RNA (1)...(19): siRNA sense strand
ccgcaaaggagcaugugaa

SEQ ID NO: 2477059 - RNA, 19 nt, Homo sapiens
  misc_RNA (1)...(19): siRNA sense strand
aagaagaagcaucgaaaga

SEQ ID NO: 2477060 - RNA, 19 nt, Homo sapiens
  misc_RNA (1)...(19): siRNA sense strand
cagaagaacacaugaaaau

SEQ ID NO: 2477061 - RNA, 19 nt, Homo sapiens
  misc_RNA (1)...(19): siRNA sense strand
ugaaagaggaaaagaagaa

SEQ ID NO: 2477062 - RNA, 19 nt, Homo sapiens
  misc_RNA (1)...(19): siRNA sense strand
agcuagaagaacagcgaaa

SEQ ID NO: 2477063 - RNA, 19 nt, Homo sapiens
  misc_RNA (1)...(19): siRNA sense strand
gcucuaaguaugaggagga

SEQ ID NO: 2477064 - RNA, 19 nt, Homo sapiens
  misc_RNA (1)...(19): siRNA sense strand
ucgagaagauauugcaaaa

SEQ ID NO: 2477065 - RNA, 19 nt, Homo sapiens
  misc_RNA (1)...(19): siRNA sense strand
aagaaagcauccuggaaaa

SEQ ID NO: 2477066 - RNA, 19 nt, Homo sapiens
  misc_RNA (1)...(19): siRNA sense strand
gugaagaugaggaugaaga

SEQ ID NO: 2477067 - RNA, 19 nt, Homo sapiens
  misc_RNA (1)...(19): siRNA sense strand
gcuacaauccagaagaaca

SEQ ID NO: 2477068 - RNA, 19 nt, Homo sapiens
  misc_RNA (1)...(19): siRNA sense strand
cgcaaaggagcaugugaaa

SEQ ID NO: 2477069 - RNA, 19 nt, Homo sapiens
  misc_RNA (1)...(19): siRNA sense strand
aaguugaugaagaaggaaa

SEQ ID NO: 2477070 - RNA, 19 nt, Homo sapiens
  misc_RNA (1)...(19): siRNA sense strand
aagaaaugaguuuggaaga

SEQ ID NO: 2477071 - RNA, 19 nt, Homo sapiens
  misc_RNA (1)...(19): siRNA sense strand
gaggaaaagaagaagaaga

SEQ ID NO: 2477072 - RNA, 19 nt, Homo sapiens
  misc_RNA (1)...(19): siRNA sense strand
agaaacuccaagaggaauu

SEQ ID NO: 2477073 - RNA, 19 nt, Homo sapiens
  misc_RNA (1)...(19): siRNA sense strand
acgaauuacuguccggaau

SEQ ID NO: 2477074 - RNA, 19 nt, Homo sapiens
  misc_RNA (1)...(19): siRNA sense strand
ggagaaagaagaaggagcu

SEQ ID NO: 2477075 - RNA, 19 nt, Homo sapiens
  misc_RNA (1)...(19): siRNA sense strand
aaacuagagcaaugagaga

SEQ ID NO: 2477076 - RNA, 19 nt, Homo sapiens
  misc_RNA (1)...(19): siRNA sense strand
auccagaugaagugaguua

SEQ ID NO: 2477077 - RNA, 19 nt, Homo sapiens
  misc_RNA (1)...(19): siRNA sense strand
ggagaagcugggaaggaga

SEQ ID NO: 2477078 - RNA, 19 nt, Homo sapiens
  misc_RNA (1)...(19): siRNA sense strand
agaaccuacugaagaggaa

SEQ ID NO: 2477079 - RNA, 19 nt, Homo sapiens
  misc_RNA (1)...(19): siRNA sense strand
aaauggaggcauauagaau

SEQ ID NO: 2477080 - RNA, 19 nt, Homo sapiens
  misc_RNA (1)...(19): siRNA sense strand
gaaccaaagaagaugacca

SEQ ID NO: 2477081 - RNA, 19 nt, Homo sapiens
  misc_RNA (1)...(19): siRNA sense strand
gagagaauccuuaugccaa

SEQ ID NO: 2477082 - RNA, 19 nt, Homo sapiens
  misc_RNA (1)...(19): siRNA sense strand
cauugaaagcccagaaacu

SEQ ID NO: 2477083 - RNA, 19 nt, Homo sapiens
  misc_RNA (1)...(19): siRNA sense strand
ggggagaagaggaaccaaa

SEQ ID NO: 2477084 - RNA, 19 nt, Homo sapiens
  misc_RNA (1)...(19): siRNA sense strand
aguuguagaugcaguuaau

SEQ ID NO: 2477085 - RNA, 19 nt, Homo sapiens
  misc_RNA (1)...(19): siRNA sense strand
ugccaaugcaggaaagaau

SEQ ID NO: 2477086 - RNA, 19 nt, Homo sapiens
  misc_RNA (1)...(19): siRNA sense strand
auagugaagaugaggauga

SEQ ID NO: 2477087 - RNA, 19 nt, Homo sapiens
  misc_RNA (1)...(19): siRNA sense strand
gagaaagaagaaggagcua

SEQ ID NO: 2477088 - RNA, 19 nt, Homo sapiens
  misc_RNA (1)...(19): siRNA sense strand
gggaagagggaucggugga

SEQ ID NO: 2477089 - RNA, 19 nt, Homo sapiens
  misc_RNA (1)...(19): siRNA sense strand
ccagaagaacacaugaaaa

SEQ ID NO: 2477090 - RNA, 19 nt, Homo sapiens
  misc_RNA (1)...(19): siRNA sense strand
acuagagcaaugagagaga

SEQ ID NO: 2477091 - RNA, 19 nt, Homo sapiens
  misc_RNA (1)...(19): siRNA sense strand
guacucaagacaugggaca

SEQ ID NO: 2477092 - RNA, 19 nt, Homo sapiens
  misc_RNA (1)...(19): siRNA sense strand
cuaaguaugaggaggaugu

SEQ ID NO: 2477093 - RNA, 19 nt, Homo sapiens
  misc_RNA (1)...(19): siRNA sense strand
aguaugaggaggaugugaa

SEQ ID NO: 2477094 - RNA, 19 nt, Homo sapiens
  misc_RNA (1)...(19): siRNA sense strand
guauauuucuucagugcca

SEQ ID NO: 2477095 - RNA, 19 nt, Homo sapiens
  misc_RNA (1)...(19): siRNA sense strand
ggcagauccuacaaagcua

SEQ ID NO: 2477096 - RNA, 19 nt, Homo sapiens
  misc_RNA (1)...(19): siRNA sense strand
caggauucgagaagauauu

SEQ ID NO: 2477097 - RNA, 19 nt, Homo sapiens
  misc_RNA (1)...(19): siRNA sense strand
caugggaagccuaugacaa

SEQ ID NO: 2477098 - RNA, 19 nt, Homo sapiens
  misc_RNA (1)...(19): siRNA sense strand
ugagauaacuggggaagaa

SEQ ID NO: 2477099 - RNA, 19 nt, Homo sapiens
  misc_RNA (1)...(19): siRNA sense strand
gaagaugaccagagaggac

SEQ ID NO: 2477100 - RNA, 19 nt, Homo sapiens
  misc_RNA (1)...(19): siRNA sense strand
ggaucguacuggaaagaag

SEQ ID NO: 2477101 - RNA, 19 nt, Homo sapiens
  misc_RNA (1)...(19): siRNA sense strand
uguugaagaguaugccaaa

SEQ ID NO: 2477102 - RNA, 19 nt, Homo sapiens
  misc_RNA (1)...(19): siRNA sense strand
guaugguggccaagaacau

SEQ ID NO: 2477103 - RNA, 19 nt, Homo sapiens
  misc_RNA (1)...(19): siRNA sense strand
augaggaggaugugaagau

SEQ ID NO: 2477104 - RNA, 19 nt, Homo sapiens
  misc_RNA (1)...(19): siRNA sense strand
cauauagaaugaaacguca

SEQ ID NO: 2477105 - RNA, 19 nt, Homo sapiens
  misc_RNA (1)...(19): siRNA sense strand
augccaaagcccaggugaa

SEQ ID NO: 2477106 - RNA, 19 nt, Homo sapiens
  misc_RNA (1)...(19): siRNA sense strand
agaucagccacgagguaau

SEQ ID NO: 2477107 - RNA, 19 nt, Homo sapiens
  misc_RNA (1)...(19): siRNA sense strand
ccguaugcagcacaagaaa

SEQ ID NO: 2477108 - RNA, 19 nt, Homo sapiens
  misc_RNA (1)...(19): siRNA sense strand
ucaagaaggagcagcagga

SEQ ID NO: 2477109 - RNA, 19 nt, Homo sapiens
  misc_RNA (1)...(19): siRNA sense strand
gcgaggcggacgaugacaa

SEQ ID NO: 2477110 - RNA, 19 nt, Homo sapiens
  misc_RNA (1)...(19): siRNA sense strand
cugcugaacgaaagugaca

SEQ ID NO: 2477111 - RNA, 19 nt, Homo sapiens
  misc_RNA (1)...(19): siRNA sense strand
cgaaaaggcacgagcacuu

SEQ ID NO: 2477112 - RNA, 19 nt, Homo sapiens
  misc_RNA (1)...(19): siRNA sense strand
acuuaauacuucagaccuu

SEQ ID NO: 2477113 - RNA, 19 nt, Homo sapiens
  misc_RNA (1)...(19): siRNA sense strand
ugaugauguagaagaguau

SEQ ID NO: 2477114 - RNA, 19 nt, Homo sapiens
  misc_RNA (1)...(19): siRNA sense strand
guuuaaugagcuagaacga

SEQ ID NO: 2477115 - RNA, 19 nt, Homo sapiens
  misc_RNA (1)...(19): siRNA sense strand
gauugaacgaccagagcca

SEQ ID NO: 2477116 - RNA, 19 nt, Homo sapiens
  misc_RNA (1)...(19): siRNA sense strand
agaugaagaaugaagcuga

SEQ ID NO: 2477117 - RNA, 19 nt, Homo sapiens
  misc_RNA (1)...(19): siRNA sense strand
guauaugauugaacgacca

SEQ ID NO: 2477118 - RNA, 19 nt, Homo sapiens
  misc_RNA (1)...(19): siRNA sense strand
aaggauauagcuagugcaa

SEQ ID NO: 2477119 - RNA, 19 nt, Homo sapiens
  misc_RNA (1)...(19): siRNA sense strand
uuaaugagcuagaacgagu

SEQ ID NO: 2477120 - RNA, 19 nt, Homo sapiens
  misc_RNA (1)...(19): siRNA sense strand
acuucuugauacagugaau

SEQ ID NO: 2477121 - RNA, 19 nt, Homo sapiens
  misc_RNA (1)...(19): siRNA sense strand
ccgcuuucaucaaggcuga

SEQ ID NO: 2477122 - RNA, 19 nt, Homo sapiens
  misc_RNA (1)...(19): siRNA sense strand
uuuaaagauggcaaggcaa

SEQ ID NO: 2477123 - RNA, 19 nt, Homo sapiens
  misc_RNA (1)...(19): siRNA sense strand
cgaaaaggcacgagcacuu

SEQ ID NO: 2477124 - RNA, 19 nt, Homo sapiens
  misc_RNA (1)...(19): siRNA sense strand
acuuaauacuucagaccuu

SEQ ID NO: 2477125 - RNA, 19 nt, Homo sapiens
  misc_RNA (1)...(19): siRNA sense strand
ugaugauguagaagaguau

SEQ ID NO: 2477126 - RNA, 19 nt, Homo sapiens
  misc_RNA (1)...(19): siRNA sense strand
guuuaaugagcuagaacga

SEQ ID NO: 2477127 - RNA, 19 nt, Homo sapiens
  misc_RNA (1)...(19): siRNA sense strand
gauugaacgaccagagcca

SEQ ID NO: 2477128 - RNA, 19 nt, Homo sapiens
  misc_RNA (1)...(19): siRNA sense strand
agaugaagaaugaagcuga

SEQ ID NO: 2477129 - RNA, 19 nt, Homo sapiens
  misc_RNA (1)...(19): siRNA sense strand
guauaugauugaacgacca

SEQ ID NO: 2477130 - RNA, 19 nt, Homo sapiens
  misc_RNA (1)...(19): siRNA sense strand
aaggauauagcuagugcaa

SEQ ID NO: 2477131 - RNA, 19 nt, Homo sapiens
  misc_RNA (1)...(19): siRNA sense strand
uuaaugagcuagaacgagu

SEQ ID NO: 2477132 - RNA, 19 nt, Homo sapiens
  misc_RNA (1)...(19): siRNA sense strand
acuucuugauacagugaau

SEQ ID NO: 2477133 - RNA, 19 nt, Homo sapiens
  misc_RNA (1)...(19): siRNA sense strand
ccgcuuucaucaaggcuga

SEQ ID NO: 2477134 - RNA, 19 nt, Homo sapiens
  misc_RNA (1)...(19): siRNA sense strand
uuuaaagauggcaaggcaa

SEQ ID NO: 2477135 - RNA, 19 nt, Homo sapiens
  misc_RNA (1)...(19): siRNA sense strand
cgaaaaggcacgagcacuu

SEQ ID NO: 2477136 - RNA, 19 nt, Homo sapiens
  misc_RNA (1)...(19): siRNA sense strand
acuuaauacuucagaccuu

SEQ ID NO: 2477137 - RNA, 19 nt, Homo sapiens
  misc_RNA (1)...(19): siRNA sense strand
ugaugauguagaagaguau

SEQ ID NO: 2477138 - RNA, 19 nt, Homo sapiens
  misc_RNA (1)...(19): siRNA sense strand
guuuaaugagcuagaacga

SEQ ID NO: 2477139 - RNA, 19 nt, Homo sapiens
  misc_RNA (1)...(19): siRNA sense strand
gauugaacgaccagagcca

SEQ ID NO: 2477140 - RNA, 19 nt, Homo sapiens
  misc_RNA (1)...(19): siRNA sense strand
agaugaagaaugaagcuga

SEQ ID NO: 2477141 - RNA, 19 nt, Homo sapiens
  misc_RNA (1)...(19): siRNA sense strand
guauaugauugaacgacca

SEQ ID NO: 2477142 - RNA, 19 nt, Homo sapiens
  misc_RNA (1)...(19): siRNA sense strand
aaggauauagcuagugcaa

SEQ ID NO: 2477143 - RNA, 19 nt, Homo sapiens
  misc_RNA (1)...(19): siRNA sense strand
uuaaugagcuagaacgagu

SEQ ID NO: 2477144 - RNA, 19 nt, Homo sapiens
  misc_RNA (1)...(19): siRNA sense strand
acuucuugauacagugaau

SEQ ID NO: 2477145 - RNA, 19 nt, Homo sapiens
  misc_RNA (1)...(19): siRNA sense strand
ccgcuuucaucaaggcuga

SEQ ID NO: 2477146 - RNA, 19 nt, Homo sapiens
  misc_RNA (1)...(19): siRNA sense strand
uuuaaagauggcaaggcaa

SEQ ID NO: 2477147 - RNA, 19 nt, Homo sapiens
  misc_RNA (1)...(19): siRNA sense strand
gggacaaagugcuuggugu

SEQ ID NO: 2477148 - RNA, 19 nt, Homo sapiens
  misc_RNA (1)...(19): siRNA sense strand
aggaaaccauccaggccaa

SEQ ID NO: 2477149 - RNA, 19 nt, Homo sapiens
  misc_RNA (1)...(19): siRNA sense strand
cagaagaauucgucccacu

SEQ ID NO: 2477150 - RNA, 19 nt, Homo sapiens
  misc_RNA (1)...(19): siRNA sense strand
ugacaaagcagguagagac

SEQ ID NO: 2477151 - RNA, 19 nt, Homo sapiens
  misc_RNA (1)...(19): siRNA sense strand
aggcuguccuggagaacaa

SEQ ID NO: 2477152 - RNA, 19 nt, Homo sapiens
  misc_RNA (1)...(19): siRNA sense strand
cccuaaauuuguauggcaa

SEQ ID NO: 2477153 - RNA, 19 nt, Homo sapiens
  misc_RNA (1)...(19): siRNA sense strand
uguggaugcuucugggaau

SEQ ID NO: 2477154 - RNA, 19 nt, Homo sapiens
  misc_RNA (1)...(19): siRNA sense strand
auaaagugcaguucagcaa

SEQ ID NO: 2477155 - RNA, 19 nt, Homo sapiens
  misc_RNA (1)...(19): siRNA sense strand
ggagaacaaucuaggagcu

SEQ ID NO: 2477156 - RNA, 19 nt, Homo sapiens
  misc_RNA (1)...(19): siRNA sense strand
acauugugcagcagagaga

SEQ ID NO: 2477157 - RNA, 19 nt, Homo sapiens
  misc_RNA (1)...(19): siRNA sense strand
gcuucuuggcagagcugua

SEQ ID NO: 2477158 - RNA, 19 nt, Homo sapiens
  misc_RNA (1)...(19): siRNA sense strand
ugacaagagauggagacaa

SEQ ID NO: 2477159 - RNA, 19 nt, Homo sapiens
  misc_RNA (1)...(19): siRNA sense strand
ucgaauuggaaucaaagaa

SEQ ID NO: 2477160 - RNA, 19 nt, Homo sapiens
  misc_RNA (1)...(19): siRNA sense strand
gcuucugggaauuuagcaa

SEQ ID NO: 2477161 - RNA, 19 nt, Homo sapiens
  misc_RNA (1)...(19): siRNA sense strand
uaugaaauggcaugugcaa

SEQ ID NO: 2477162 - RNA, 19 nt, Homo sapiens
  misc_RNA (1)...(19): siRNA sense strand
gagaagagaaugcuggauc

SEQ ID NO: 2477163 - RNA, 19 nt, Homo sapiens
  misc_RNA (1)...(19): siRNA sense strand
aauuggagaccuugggcau

SEQ ID NO: 2477164 - RNA, 19 nt, Homo sapiens
  misc_RNA (1)...(19): siRNA sense strand
gauccaucaauuaagggaa

SEQ ID NO: 2477165 - RNA, 19 nt, Homo sapiens
  misc_RNA (1)...(19): siRNA sense strand
cagcagaauaauuggcaug

SEQ ID NO: 2477166 - RNA, 19 nt, Homo sapiens
  misc_RNA (1)...(19): siRNA sense strand
aggcuguccuggagaacaa

SEQ ID NO: 2477167 - RNA, 19 nt, Homo sapiens
  misc_RNA (1)...(19): siRNA sense strand
cccuaaauuuguauggcaa

SEQ ID NO: 2477168 - RNA, 19 nt, Homo sapiens
  misc_RNA (1)...(19): siRNA sense strand
uguggaugcuucugggaau

SEQ ID NO: 2477169 - RNA, 19 nt, Homo sapiens
  misc_RNA (1)...(19): siRNA sense strand
auaaagugcaguucagcaa

SEQ ID NO: 2477170 - RNA, 19 nt, Homo sapiens
  misc_RNA (1)...(19): siRNA sense strand
ggagaacaaucuaggagcu

SEQ ID NO: 2477171 - RNA, 19 nt, Homo sapiens
  misc_RNA (1)...(19): siRNA sense strand
acauugugcagcagagaga

SEQ ID NO: 2477172 - RNA, 19 nt, Homo sapiens
  misc_RNA (1)...(19): siRNA sense strand
gcuucuuggcagagcugua

SEQ ID NO: 2477173 - RNA, 19 nt, Homo sapiens
  misc_RNA (1)...(19): siRNA sense strand
ugacaagagauggagacaa

SEQ ID NO: 2477174 - RNA, 19 nt, Homo sapiens
  misc_RNA (1)...(19): siRNA sense strand
ucgaauuggaaucaaagaa

SEQ ID NO: 2477175 - RNA, 19 nt, Homo sapiens
  misc_RNA (1)...(19): siRNA sense strand
gcuucugggaauuuagcaa

SEQ ID NO: 2477176 - RNA, 19 nt, Homo sapiens
  misc_RNA (1)...(19): siRNA sense strand
uaugaaauggcaugugcaa

SEQ ID NO: 2477177 - RNA, 19 nt, Homo sapiens
  misc_RNA (1)...(19): siRNA sense strand
gagaagagaaugcuggauc

SEQ ID NO: 2477178 - RNA, 19 nt, Homo sapiens
  misc_RNA (1)...(19): siRNA sense strand
aauuggagaccuugggcau

SEQ ID NO: 2477179 - RNA, 19 nt, Homo sapiens
  misc_RNA (1)...(19): siRNA sense strand
gauccaucaauuaagggaa

SEQ ID NO: 2477180 - RNA, 19 nt, Homo sapiens
  misc_RNA (1)...(19): siRNA sense strand
cagcagaauaauuggcaug

SEQ ID NO: 2477181 - RNA, 19 nt, Homo sapiens
  misc_RNA (1)...(19): siRNA sense strand
cagugaaguuugaggggaa

SEQ ID NO: 2477182 - RNA, 19 nt, Homo sapiens
  misc_RNA (1)...(19): siRNA sense strand
cuguggauuucaagaccua

SEQ ID NO: 2477183 - RNA, 19 nt, Homo sapiens
  misc_RNA (1)...(19): siRNA sense strand
guuccaaaucagcguggua

SEQ ID NO: 2477184 - RNA, 19 nt, Homo sapiens
  misc_RNA (1)...(19): siRNA sense strand
gggaacaaacaacgggacu

SEQ ID NO: 2477185 - RNA, 19 nt, Homo sapiens
  misc_RNA (1)...(19): siRNA sense strand
aggaagaagugaucgacca

SEQ ID NO: 2477186 - RNA, 19 nt, Homo sapiens
  misc_RNA (1)...(19): siRNA sense strand
gcuacgugccugaggacau

SEQ ID NO: 2477187 - RNA, 19 nt, Homo sapiens
  misc_RNA (1)...(19): siRNA sense strand
ugaaugaggugaagcggca

SEQ ID NO: 2477188 - RNA, 19 nt, Homo sapiens
  misc_RNA (1)...(19): siRNA sense strand
gagaacggcaagaggagga

SEQ ID NO: 2477189 - RNA, 19 nt, Homo sapiens
  misc_RNA (1)...(19): siRNA sense strand
cagcggaggugaagacgca

SEQ ID NO: 2477190 - RNA, 19 nt, Homo sapiens
  misc_RNA (1)...(19): siRNA sense strand
ccgacaggaccaaagagaa

SEQ ID NO: 2477191 - RNA, 19 nt, Homo sapiens
  misc_RNA (1)...(19): siRNA sense strand
gcggaaagccagugagacg

SEQ ID NO: 2477192 - RNA, 19 nt, Homo sapiens
  misc_RNA (1)...(19): siRNA sense strand
gggacugggagaagcauca

SEQ ID NO: 2477193 - RNA, 19 nt, Homo sapiens
  misc_RNA (1)...(19): siRNA sense strand
gggcagaagaguggaagca

SEQ ID NO: 2477194 - RNA, 19 nt, Homo sapiens
  misc_RNA (1)...(19): siRNA sense strand
cagcaucgggacugggaga

SEQ ID NO: 2477195 - RNA, 19 nt, Homo sapiens
  misc_RNA (1)...(19): siRNA sense strand
aguggaagcaccucaacaa

SEQ ID NO: 2477196 - RNA, 19 nt, Homo sapiens
  misc_RNA (1)...(19): siRNA sense strand
ccucagagcugcuacugga

SEQ ID NO: 2477197 - RNA, 19 nt, Homo sapiens
  misc_RNA (1)...(19): siRNA sense strand
aggccgugaaugaggugaa

SEQ ID NO: 2477198 - RNA, 19 nt, Homo sapiens
  misc_RNA (1)...(19): siRNA sense strand
cgacauugacgaucgagga

SEQ ID NO: 2477199 - RNA, 19 nt, Homo sapiens
  misc_RNA (1)...(19): siRNA sense strand
aggaagaagugaucgacca

SEQ ID NO: 2477200 - RNA, 19 nt, Homo sapiens
  misc_RNA (1)...(19): siRNA sense strand
gcuacgugccugaggacau

SEQ ID NO: 2477201 - RNA, 19 nt, Homo sapiens
  misc_RNA (1)...(19): siRNA sense strand
ugaaugaggugaagcggca

SEQ ID NO: 2477202 - RNA, 19 nt, Homo sapiens
  misc_RNA (1)...(19): siRNA sense strand
gagaacggcaagaggagga

SEQ ID NO: 2477203 - RNA, 19 nt, Homo sapiens
  misc_RNA (1)...(19): siRNA sense strand
cagcggaggugaagacgca

SEQ ID NO: 2477204 - RNA, 19 nt, Homo sapiens
  misc_RNA (1)...(19): siRNA sense strand
ccgacaggaccaaagagaa

SEQ ID NO: 2477205 - RNA, 19 nt, Homo sapiens
  misc_RNA (1)...(19): siRNA sense strand
gcggaaagccagugagacg

SEQ ID NO: 2477206 - RNA, 19 nt, Homo sapiens
  misc_RNA (1)...(19): siRNA sense strand
gggacugggagaagcauca

SEQ ID NO: 2477207 - RNA, 19 nt, Homo sapiens
  misc_RNA (1)...(19): siRNA sense strand
gggcagaagaguggaagca

SEQ ID NO: 2477208 - RNA, 19 nt, Homo sapiens
  misc_RNA (1)...(19): siRNA sense strand
cagcaucgggacugggaga

SEQ ID NO: 2477209 - RNA, 19 nt, Homo sapiens
  misc_RNA (1)...(19): siRNA sense strand
aguggaagcaccucaacaa

SEQ ID NO: 2477210 - RNA, 19 nt, Homo sapiens
  misc_RNA (1)...(19): siRNA sense strand
ccucagagcugcuacugga

SEQ ID NO: 2477211 - RNA, 19 nt, Homo sapiens
  misc_RNA (1)...(19): siRNA sense strand
aggccgugaaugaggugaa

SEQ ID NO: 2477212 - RNA, 19 nt, Homo sapiens
  misc_RNA (1)...(19): siRNA sense strand
cgacauugacgaucgagga

SEQ ID NO: 2477213 - RNA, 19 nt, Homo sapiens
  misc_RNA (1)...(19): siRNA sense strand
gcaaagggaacuacgggaa

SEQ ID NO: 2477214 - RNA, 19 nt, Homo sapiens
  misc_RNA (1)...(19): siRNA sense strand
agugaagguacuacagaaa

SEQ ID NO: 2477215 - RNA, 19 nt, Homo sapiens
  misc_RNA (1)...(19): siRNA sense strand
ggaagguccuacuggccaa

SEQ ID NO: 2477216 - RNA, 19 nt, Homo sapiens
  misc_RNA (1)...(19): siRNA sense strand
caaggaagguguagagccu

SEQ ID NO: 2477217 - RNA, 19 nt, Homo sapiens
  misc_RNA (1)...(19): siRNA sense strand
aggaagguguagagccuga

SEQ ID NO: 2477218 - RNA, 19 nt, Homo sapiens
  misc_RNA (1)...(19): siRNA sense strand
cgccagaggaugaugacau

SEQ ID NO: 2477219 - RNA, 19 nt, Homo sapiens
  misc_RNA (1)...(19): siRNA sense strand
ccuccagggccaaugggaa

SEQ ID NO: 2477220 - RNA, 19 nt, Homo sapiens
  misc_RNA (1)...(19): siRNA sense strand
gggccaaugggaacaucaa

SEQ ID NO: 2477221 - RNA, 19 nt, Homo sapiens
  misc_RNA (1)...(19): siRNA sense strand
cuguaccacaagaggcuaa

SEQ ID NO: 2477222 - RNA, 19 nt, Homo sapiens
  misc_RNA (1)...(19): siRNA sense strand
ggaaagagccuuaugaucg

SEQ ID NO: 2477223 - RNA, 19 nt, Homo sapiens
  misc_RNA (1)...(19): siRNA sense strand
gcaaagggaacuacgggaa

SEQ ID NO: 2477224 - RNA, 19 nt, Homo sapiens
  misc_RNA (1)...(19): siRNA sense strand
agugaagguacuacagaaa

SEQ ID NO: 2477225 - RNA, 19 nt, Homo sapiens
  misc_RNA (1)...(19): siRNA sense strand
ggaagguccuacuggccaa

SEQ ID NO: 2477226 - RNA, 19 nt, Homo sapiens
  misc_RNA (1)...(19): siRNA sense strand
caaggaagguguagagccu

SEQ ID NO: 2477227 - RNA, 19 nt, Homo sapiens
  misc_RNA (1)...(19): siRNA sense strand
aggaagguguagagccuga

SEQ ID NO: 2477228 - RNA, 19 nt, Homo sapiens
  misc_RNA (1)...(19): siRNA sense strand
cgccagaggaugaugacau

SEQ ID NO: 2477229 - RNA, 19 nt, Homo sapiens
  misc_RNA (1)...(19): siRNA sense strand
ccuccagggccaaugggaa

SEQ ID NO: 2477230 - RNA, 19 nt, Homo sapiens
  misc_RNA (1)...(19): siRNA sense strand
gggccaaugggaacaucaa

SEQ ID NO: 2477231 - RNA, 19 nt, Homo sapiens
  misc_RNA (1)...(19): siRNA sense strand
cuguaccacaagaggcuaa

SEQ ID NO: 2477232 - RNA, 19 nt, Homo sapiens
  misc_RNA (1)...(19): siRNA sense strand
ggaaagagccuuaugaucg

SEQ ID NO: 2477233 - RNA, 19 nt, Homo sapiens
  misc_RNA (1)...(19): siRNA sense strand
gggaagaagaggaggacga

SEQ ID NO: 2477234 - RNA, 19 nt, Homo sapiens
  misc_RNA (1)...(19): siRNA sense strand
gcguggagguagaaggcua

SEQ ID NO: 2477235 - RNA, 19 nt, Homo sapiens
  misc_RNA (1)...(19): siRNA sense strand
gcaagaagaucgaugcuga

SEQ ID NO: 2477236 - RNA, 19 nt, Homo sapiens
  misc_RNA (1)...(19): siRNA sense strand
gcaagaaacugaagagccu

SEQ ID NO: 2477237 - RNA, 19 nt, Homo sapiens
  misc_RNA (1)...(19): siRNA sense strand
aggaggacgaggaggaaga

SEQ ID NO: 2477238 - RNA, 19 nt, Homo sapiens
  misc_RNA (1)...(19): siRNA sense strand
agccaaauaccgagugcua

SEQ ID NO: 2477239 - RNA, 19 nt, Homo sapiens
  misc_RNA (1)...(19): siRNA sense strand
aagaagaggaggacgagga

SEQ ID NO: 2477240 - RNA, 19 nt, Homo sapiens
  misc_RNA (1)...(19): siRNA sense strand
aagaggaggacgaggagga

SEQ ID NO: 2477241 - RNA, 19 nt, Homo sapiens
  misc_RNA (1)...(19): siRNA sense strand
agcugaauccagagaguau

SEQ ID NO: 2477242 - RNA, 19 nt, Homo sapiens
  misc_RNA (1)...(19): siRNA sense strand
acgaggaggaagagcuaga

SEQ ID NO: 2477243 - RNA, 19 nt, Homo sapiens
  misc_RNA (1)...(19): siRNA sense strand
gcacacaaauggaccgaag

SEQ ID NO: 2477244 - RNA, 19 nt, Homo sapiens
  misc_RNA (1)...(19): siRNA sense strand
aggaagagcuagaagaagg

SEQ ID NO: 2477245 - RNA, 19 nt, Homo sapiens
  misc_RNA (1)...(19): siRNA sense strand
gcuaagaaccucaugcagu

SEQ ID NO: 2477246 - RNA, 19 nt, Homo sapiens
  misc_RNA (1)...(19): siRNA sense strand
aggaggaagagcuagaaga

SEQ ID NO: 2477247 - RNA, 19 nt, Homo sapiens
  misc_RNA (1)...(19): siRNA sense strand
gcagcuuugaugugcgcaa

SEQ ID NO: 2477248 - RNA, 19 nt, Homo sapiens
  misc_RNA (1)...(19): siRNA sense strand
gccgcaaagcagaggcuga

SEQ ID NO: 2477249 - RNA, 19 nt, Homo sapiens
  misc_RNA (1)...(19): siRNA sense strand
gggaagaagaggaggacga

SEQ ID NO: 2477250 - RNA, 19 nt, Homo sapiens
  misc_RNA (1)...(19): siRNA sense strand
gcguggagguagaaggcua

SEQ ID NO: 2477251 - RNA, 19 nt, Homo sapiens
  misc_RNA (1)...(19): siRNA sense strand
gcaagaagaucgaugcuga

SEQ ID NO: 2477252 - RNA, 19 nt, Homo sapiens
  misc_RNA (1)...(19): siRNA sense strand
gcaagaaacugaagagccu

SEQ ID NO: 2477253 - RNA, 19 nt, Homo sapiens
  misc_RNA (1)...(19): siRNA sense strand
aggaggacgaggaggaaga

SEQ ID NO: 2477254 - RNA, 19 nt, Homo sapiens
  misc_RNA (1)...(19): siRNA sense strand
agccaaauaccgagugcua

SEQ ID NO: 2477255 - RNA, 19 nt, Homo sapiens
  misc_RNA (1)...(19): siRNA sense strand
aagaagaggaggacgagga

SEQ ID NO: 2477256 - RNA, 19 nt, Homo sapiens
  misc_RNA (1)...(19): siRNA sense strand
aagaggaggacgaggagga

SEQ ID NO: 2477257 - RNA, 19 nt, Homo sapiens
  misc_RNA (1)...(19): siRNA sense strand
agcugaauccagagaguau

SEQ ID NO: 2477258 - RNA, 19 nt, Homo sapiens
  misc_RNA (1)...(19): siRNA sense strand
acgaggaggaagagcuaga

SEQ ID NO: 2477259 - RNA, 19 nt, Homo sapiens
  misc_RNA (1)...(19): siRNA sense strand
gcacacaaauggaccgaag

SEQ ID NO: 2477260 - RNA, 19 nt, Homo sapiens
  misc_RNA (1)...(19): siRNA sense strand
aggaagagcuagaagaagg

SEQ ID NO: 2477261 - RNA, 19 nt, Homo sapiens
  misc_RNA (1)...(19): siRNA sense strand
gcuaagaaccucaugcagu

SEQ ID NO: 2477262 - RNA, 19 nt, Homo sapiens
  misc_RNA (1)...(19): siRNA sense strand
aggaggaagagcuagaaga

SEQ ID NO: 2477263 - RNA, 19 nt, Homo sapiens
  misc_RNA (1)...(19): siRNA sense strand
gccgcaaagcagaggcuga

SEQ ID NO: 2477264 - RNA, 19 nt, Homo sapiens
  misc_RNA (1)...(19): siRNA sense strand
gggaagaagaggaggacga

SEQ ID NO: 2477265 - RNA, 19 nt, Homo sapiens
  misc_RNA (1)...(19): siRNA sense strand
gcguggagguagaaggcua

SEQ ID NO: 2477266 - RNA, 19 nt, Homo sapiens
  misc_RNA (1)...(19): siRNA sense strand
gcaagaagaucgaugcuga

SEQ ID NO: 2477267 - RNA, 19 nt, Homo sapiens
  misc_RNA (1)...(19): siRNA sense strand
gcaagaaacugaagagccu

SEQ ID NO: 2477268 - RNA, 19 nt, Homo sapiens
  misc_RNA (1)...(19): siRNA sense strand
aggaggacgaggaggaaga

SEQ ID NO: 2477269 - RNA, 19 nt, Homo sapiens
  misc_RNA (1)...(19): siRNA sense strand
agccaaauaccgagugcua

SEQ ID NO: 2477270 - RNA, 19 nt, Homo sapiens
  misc_RNA (1)...(19): siRNA sense strand
aagaagaggaggacgagga

SEQ ID NO: 2477271 - RNA, 19 nt, Homo sapiens
  misc_RNA (1)...(19): siRNA sense strand
aagaggaggacgaggagga

SEQ ID NO: 2477272 - RNA, 19 nt, Homo sapiens
  misc_RNA (1)...(19): siRNA sense strand
agcugaauccagagaguau

SEQ ID NO: 2477273 - RNA, 19 nt, Homo sapiens
  misc_RNA (1)...(19): siRNA sense strand
acgaggaggaagagcuaga

SEQ ID NO: 2477274 - RNA, 19 nt, Homo sapiens
  misc_RNA (1)...(19): siRNA sense strand
gcacacaaauggaccgaag

SEQ ID NO: 2477275 - RNA, 19 nt, Homo sapiens
  misc_RNA (1)...(19): siRNA sense strand
aggaagagcuagaagaagg

SEQ ID NO: 2477276 - RNA, 19 nt, Homo sapiens
  misc_RNA (1)...(19): siRNA sense strand
gcuaagaaccucaugcagu

SEQ ID NO: 2477277 - RNA, 19 nt, Homo sapiens
  misc_RNA (1)...(19): siRNA sense strand
aggaggaagagcuagaaga

SEQ ID NO: 2477278 - RNA, 19 nt, Homo sapiens
  misc_RNA (1)...(19): siRNA sense strand
gcagcuuugaugugcgcaa

SEQ ID NO: 2477279 - RNA, 19 nt, Homo sapiens
  misc_RNA (1)...(19): siRNA sense strand
gccgcaaagcagaggcuga

SEQ ID NO: 2477280 - RNA, 19 nt, Homo sapiens
  misc_RNA (1)...(19): siRNA sense strand
ggguggaagcgguaacaaa

SEQ ID NO: 2477281 - RNA, 19 nt, Homo sapiens
  misc_RNA (1)...(19): siRNA sense strand
acccaagagaagagagauu

SEQ ID NO: 2477282 - RNA, 19 nt, Homo sapiens
  misc_RNA (1)...(19): siRNA sense strand
ucaacaacaauguggagaa

SEQ ID NO: 2477283 - RNA, 19 nt, Homo sapiens
  misc_RNA (1)...(19): siRNA sense strand
cgguaacaaaggagauaga

SEQ ID NO: 2477284 - RNA, 19 nt, Homo sapiens
  misc_RNA (1)...(19): siRNA sense strand
auggauaaguacaggcuga

SEQ ID NO: 2477285 - RNA, 19 nt, Homo sapiens
  misc_RNA (1)...(19): siRNA sense strand
ugaaauugaaugaggagca

SEQ ID NO: 2477286 - RNA, 19 nt, Homo sapiens
  misc_RNA (1)...(19): siRNA sense strand
gcuccuucaaagaggcaaa

SEQ ID NO: 2477287 - RNA, 19 nt, Homo sapiens
  misc_RNA (1)...(19): siRNA sense strand
ccuguaugcugaugcgcaa

SEQ ID NO: 2477288 - RNA, 19 nt, Homo sapiens
  misc_RNA (1)...(19): siRNA sense strand
gaguacagcaaguggaagu

SEQ ID NO: 2477289 - RNA, 19 nt, Homo sapiens
  misc_RNA (1)...(19): siRNA sense strand
cuacaaaguccgacaucca

SEQ ID NO: 2477290 - RNA, 19 nt, Homo sapiens
  misc_RNA (1)...(19): siRNA sense strand
aguacaugcagaaugaaua

SEQ ID NO: 2477291 - RNA, 19 nt, Homo sapiens
  misc_RNA (1)...(19): siRNA sense strand
cccuggcaauggagagaaa

SEQ ID NO: 2477292 - RNA, 19 nt, Homo sapiens
  misc_RNA (1)...(19): siRNA sense strand
aggaggagaugcuggagau

SEQ ID NO: 2477293 - RNA, 19 nt, Homo sapiens
  misc_RNA (1)...(19): siRNA sense strand
gaggaagugggcaggagaa

SEQ ID NO: 2477294 - RNA, 19 nt, Homo sapiens
  misc_RNA (1)...(19): siRNA sense strand
uggaggugcuagaggaguu

SEQ ID NO: 2477295 - RNA, 19 nt, Homo sapiens
  misc_RNA (1)...(19): siRNA sense strand
cuggcaagcccaaggucua

SEQ ID NO: 2477296 - RNA, 19 nt, Homo sapiens
  misc_RNA (1)...(19): siRNA sense strand
cugcagaauccuucaugaa

SEQ ID NO: 2477297 - RNA, 19 nt, Homo sapiens
  misc_RNA (1)...(19): siRNA sense strand
auggagagaaacugaagaa

SEQ ID NO: 2477298 - RNA, 19 nt, Homo sapiens
  misc_RNA (1)...(19): siRNA sense strand
cugaaagagcucaacaaca

SEQ ID NO: 2477299 - RNA, 19 nt, Homo sapiens
  misc_RNA (1)...(19): siRNA sense strand
agacccaagagaagagaga

SEQ ID NO: 2477300 - RNA, 19 nt, Homo sapiens
  misc_RNA (1)...(19): siRNA sense strand
ggagaaugggccuggaaac

SEQ ID NO: 2477301 - RNA, 19 nt, Homo sapiens
  misc_RNA (1)...(19): siRNA sense strand
ccuaccaacugacgggaga

SEQ ID NO: 2477302 - RNA, 19 nt, Homo sapiens
  misc_RNA (1)...(19): siRNA sense strand
ccacauuccuggaggugcu

SEQ ID NO: 2477303 - RNA, 19 nt, Homo sapiens
  misc_RNA (1)...(19): siRNA sense strand
ggaggaagugggcaggaga

SEQ ID NO: 2477304 - RNA, 19 nt, Homo sapiens
  misc_RNA (1)...(19): siRNA sense strand
cagaguacagcaaguggaa

SEQ ID NO: 2477305 - RNA, 19 nt, Homo sapiens
  misc_RNA (1)...(19): siRNA sense strand
gggaggauccaguggucca

SEQ ID NO: 2477306 - RNA, 19 nt, Homo sapiens
  misc_RNA (1)...(19): siRNA sense strand
cggcaugugaggaucaaaa

SEQ ID NO: 2477307 - RNA, 19 nt, Homo sapiens
  misc_RNA (1)...(19): siRNA sense strand
cuuggaaauuucuguucaa

SEQ ID NO: 2477308 - RNA, 19 nt, Homo sapiens
  misc_RNA (1)...(19): siRNA sense strand
ggagauagaaacaacagga

SEQ ID NO: 2477309 - RNA, 19 nt, Homo sapiens
  misc_RNA (1)...(19): siRNA sense strand
aacaaaggagauagaaaca

SEQ ID NO: 2477310 - RNA, 19 nt, Homo sapiens
  misc_RNA (1)...(19): siRNA sense strand
ucaccuacuuccuggacau

SEQ ID NO: 2477311 - RNA, 19 nt, Homo sapiens
  misc_RNA (1)...(19): siRNA sense strand
ucaagagccagaagcgcua

SEQ ID NO: 2477312 - RNA, 19 nt, Homo sapiens
  misc_RNA (1)...(19): siRNA sense strand
accucaagcuaucgaauuu

SEQ ID NO: 2477313 - RNA, 19 nt, Homo sapiens
  misc_RNA (1)...(19): siRNA sense strand
ucugcagacacgugcguua

SEQ ID NO: 2477314 - RNA, 19 nt, Homo sapiens
  misc_RNA (1)...(19): siRNA sense strand
acaacaauguggagaaagc

SEQ ID NO: 2477315 - RNA, 19 nt, Homo sapiens
  misc_RNA (1)...(19): siRNA sense strand
cacagaagagccugagaga

SEQ ID NO: 2477316 - RNA, 19 nt, Homo sapiens
  misc_RNA (1)...(19): siRNA sense strand
cuuacgaggcgaagaagga

SEQ ID NO: 2477317 - RNA, 19 nt, Homo sapiens
  misc_RNA (1)...(19): siRNA sense strand
aggagaaugggccuggaaa

SEQ ID NO: 2477318 - RNA, 19 nt, Homo sapiens
  misc_RNA (1)...(19): siRNA sense strand
ccagaggacccagggacaa

SEQ ID NO: 2477319 - RNA, 19 nt, Homo sapiens
  misc_RNA (1)...(19): siRNA sense strand
acuacaggcucgugcagga

SEQ ID NO: 2477320 - RNA, 19 nt, Homo sapiens
  misc_RNA (1)...(19): siRNA sense strand
uucgggaacuggagcuaaa

SEQ ID NO: 2477321 - RNA, 19 nt, Homo sapiens
  misc_RNA (1)...(19): siRNA sense strand
ucaacaacaaauucaggua

SEQ ID NO: 2477322 - RNA, 19 nt, Homo sapiens
  misc_RNA (1)...(19): siRNA sense strand
ggguggaagcgguaacaaa

SEQ ID NO: 2477323 - RNA, 19 nt, Homo sapiens
  misc_RNA (1)...(19): siRNA sense strand
acccaagagaagagagauu

SEQ ID NO: 2477324 - RNA, 19 nt, Homo sapiens
  misc_RNA (1)...(19): siRNA sense strand
ucaacaacaauguggagaa

SEQ ID NO: 2477325 - RNA, 19 nt, Homo sapiens
  misc_RNA (1)...(19): siRNA sense strand
cgguaacaaaggagauaga

SEQ ID NO: 2477326 - RNA, 19 nt, Homo sapiens
  misc_RNA (1)...(19): siRNA sense strand
auggauaaguacaggcuga

SEQ ID NO: 2477327 - RNA, 19 nt, Homo sapiens
  misc_RNA (1)...(19): siRNA sense strand
ugaaauugaaugaggagca

SEQ ID NO: 2477328 - RNA, 19 nt, Homo sapiens
  misc_RNA (1)...(19): siRNA sense strand
gcuccuucaaagaggcaaa

SEQ ID NO: 2477329 - RNA, 19 nt, Homo sapiens
  misc_RNA (1)...(19): siRNA sense strand
ccuguaugcugaugcgcaa

SEQ ID NO: 2477330 - RNA, 19 nt, Homo sapiens
  misc_RNA (1)...(19): siRNA sense strand
gaguacagcaaguggaagu

SEQ ID NO: 2477331 - RNA, 19 nt, Homo sapiens
  misc_RNA (1)...(19): siRNA sense strand
cuacaaaguccgacaucca

SEQ ID NO: 2477332 - RNA, 19 nt, Homo sapiens
  misc_RNA (1)...(19): siRNA sense strand
aguacaugcagaaugaaua

SEQ ID NO: 2477333 - RNA, 19 nt, Homo sapiens
  misc_RNA (1)...(19): siRNA sense strand
cccuggcaauggagagaaa

SEQ ID NO: 2477334 - RNA, 19 nt, Homo sapiens
  misc_RNA (1)...(19): siRNA sense strand
aggaggagaugcuggagau

SEQ ID NO: 2477335 - RNA, 19 nt, Homo sapiens
  misc_RNA (1)...(19): siRNA sense strand
gaggaagugggcaggagaa

SEQ ID NO: 2477336 - RNA, 19 nt, Homo sapiens
  misc_RNA (1)...(19): siRNA sense strand
uggaggugcuagaggaguu

SEQ ID NO: 2477337 - RNA, 19 nt, Homo sapiens
  misc_RNA (1)...(19): siRNA sense strand
cuggcaagcccaaggucua

SEQ ID NO: 2477338 - RNA, 19 nt, Homo sapiens
  misc_RNA (1)...(19): siRNA sense strand
cugcagaauccuucaugaa

SEQ ID NO: 2477339 - RNA, 19 nt, Homo sapiens
  misc_RNA (1)...(19): siRNA sense strand
auggagagaaacugaagaa

SEQ ID NO: 2477340 - RNA, 19 nt, Homo sapiens
  misc_RNA (1)...(19): siRNA sense strand
cugaaagagcucaacaaca

SEQ ID NO: 2477341 - RNA, 19 nt, Homo sapiens
  misc_RNA (1)...(19): siRNA sense strand
agacccaagagaagagaga

SEQ ID NO: 2477342 - RNA, 19 nt, Homo sapiens
  misc_RNA (1)...(19): siRNA sense strand
ggagaaugggccuggaaac

SEQ ID NO: 2477343 - RNA, 19 nt, Homo sapiens
  misc_RNA (1)...(19): siRNA sense strand
ccuaccaacugacgggaga

SEQ ID NO: 2477344 - RNA, 19 nt, Homo sapiens
  misc_RNA (1)...(19): siRNA sense strand
ccacauuccuggaggugcu

SEQ ID NO: 2477345 - RNA, 19 nt, Homo sapiens
  misc_RNA (1)...(19): siRNA sense strand
ggaggaagugggcaggaga

SEQ ID NO: 2477346 - RNA, 19 nt, Homo sapiens
  misc_RNA (1)...(19): siRNA sense strand
cagaguacagcaaguggaa

SEQ ID NO: 2477347 - RNA, 19 nt, Homo sapiens
  misc_RNA (1)...(19): siRNA sense strand
gggaggauccaguggucca

SEQ ID NO: 2477348 - RNA, 19 nt, Homo sapiens
  misc_RNA (1)...(19): siRNA sense strand
cggcaugugaggaucaaaa

SEQ ID NO: 2477349 - RNA, 19 nt, Homo sapiens
  misc_RNA (1)...(19): siRNA sense strand
ggagauagaaacaacagga

SEQ ID NO: 2477350 - RNA, 19 nt, Homo sapiens
  misc_RNA (1)...(19): siRNA sense strand
cuuggaaauuucuguucaa

SEQ ID NO: 2477351 - RNA, 19 nt, Homo sapiens
  misc_RNA (1)...(19): siRNA sense strand
aacaaaggagauagaaaca

SEQ ID NO: 2477352 - RNA, 19 nt, Homo sapiens
  misc_RNA (1)...(19): siRNA sense strand
ucaccuacuuccuggacau

SEQ ID NO: 2477353 - RNA, 19 nt, Homo sapiens
  misc_RNA (1)...(19): siRNA sense strand
ucaagagccagaagcgcua

SEQ ID NO: 2477354 - RNA, 19 nt, Homo sapiens
  misc_RNA (1)...(19): siRNA sense strand
accucaagcuaucgaauuu

SEQ ID NO: 2477355 - RNA, 19 nt, Homo sapiens
  misc_RNA (1)...(19): siRNA sense strand
acaacaauguggagaaagc

SEQ ID NO: 2477356 - RNA, 19 nt, Homo sapiens
  misc_RNA (1)...(19): siRNA sense strand
ucugcagacacgugcguua

SEQ ID NO: 2477357 - RNA, 19 nt, Homo sapiens
  misc_RNA (1)...(19): siRNA sense strand
aagcggagacccaagagaa

SEQ ID NO: 2477358 - RNA, 19 nt, Homo sapiens
  misc_RNA (1)...(19): siRNA sense strand
cacagaagagccugagaga

SEQ ID NO: 2477359 - RNA, 19 nt, Homo sapiens
  misc_RNA (1)...(19): siRNA sense strand
cuuacgaggcgaagaagga

SEQ ID NO: 2477360 - RNA, 19 nt, Homo sapiens
  misc_RNA (1)...(19): siRNA sense strand
ucugugacguccagcgcua

SEQ ID NO: 2477361 - RNA, 19 nt, Homo sapiens
  misc_RNA (1)...(19): siRNA sense strand
ugaaugaggagcaggucga

SEQ ID NO: 2477362 - RNA, 19 nt, Homo sapiens
  misc_RNA (1)...(19): siRNA sense strand
aggagaaugggccuggaaa

SEQ ID NO: 2477363 - RNA, 19 nt, Homo sapiens
  misc_RNA (1)...(19): siRNA sense strand
ccagaggacccagggacaa

SEQ ID NO: 2477364 - RNA, 19 nt, Homo sapiens
  misc_RNA (1)...(19): siRNA sense strand
acuacaggcucgugcagga

SEQ ID NO: 2477365 - RNA, 19 nt, Homo sapiens
  misc_RNA (1)...(19): siRNA sense strand
uucgggaacuggagcuaaa

SEQ ID NO: 2477366 - RNA, 19 nt, Homo sapiens
  misc_RNA (1)...(19): siRNA sense strand
gacgagaagcggagaccca

SEQ ID NO: 2477367 - RNA, 19 nt, Homo sapiens
  misc_RNA (1)...(19): siRNA sense strand
ucaacaacaaauucaggua

SEQ ID NO: 2477368 - RNA, 19 nt, Homo sapiens
  misc_RNA (1)...(19): siRNA sense strand
gacauuagauggaggccaa

SEQ ID NO: 2477369 - RNA, 19 nt, Homo sapiens
  misc_RNA (1)...(19): siRNA sense strand
gacaggaggacgagggcaa

SEQ ID NO: 2477370 - RNA, 19 nt, Homo sapiens
  misc_RNA (1)...(19): siRNA sense strand
ccacugacucccagggcaa

SEQ ID NO: 2477371 - RNA, 19 nt, Homo sapiens
  misc_RNA (1)...(19): siRNA sense strand
ccuuaaggacggagucaau

SEQ ID NO: 2477372 - RNA, 19 nt, Homo sapiens
  misc_RNA (1)...(19): siRNA sense strand
ccgugcagcuugaggacau

SEQ ID NO: 2477373 - RNA, 19 nt, Homo sapiens
  misc_RNA (1)...(19): siRNA sense strand
ccagaagggccaagggacu

SEQ ID NO: 2477374 - RNA, 19 nt, Homo sapiens
  misc_RNA (1)...(19): siRNA sense strand
agauggaggccaagaagau

SEQ ID NO: 2477375 - RNA, 19 nt, Homo sapiens
  misc_RNA (1)...(19): siRNA sense strand
agucacaguuccagggcga

SEQ ID NO: 2477376 - RNA, 19 nt, Homo sapiens
  misc_RNA (1)...(19): siRNA sense strand
cggaauacacagagggcuc

SEQ ID NO: 2477377 - RNA, 19 nt, Homo sapiens
  misc_RNA (1)...(19): siRNA sense strand
cgaaaugggaucugcucau

SEQ ID NO: 2477378 - RNA, 19 nt, Homo sapiens
  misc_RNA (1)...(19): siRNA sense strand
gagaauggcuauugguggu

SEQ ID NO: 2477379 - RNA, 19 nt, Homo sapiens
  misc_RNA (1)...(19): siRNA sense strand
gugugaagcuccuggugga

SEQ ID NO: 2477380 - RNA, 19 nt, Homo sapiens
  misc_RNA (1)...(19): siRNA sense strand
ggcuauugguggugcagga

SEQ ID NO: 2477381 - RNA, 19 nt, Homo sapiens
  misc_RNA (1)...(19): siRNA sense strand
uagugaugaucucggacaa

SEQ ID NO: 2477382 - RNA, 19 nt, Homo sapiens
  misc_RNA (1)...(19): siRNA sense strand
gcuucaggguggaggaggu

SEQ ID NO: 2477383 - RNA, 19 nt, Homo sapiens
  misc_RNA (1)...(19): siRNA sense strand
agggcaagaucgagauuuu

SEQ ID NO: 2477384 - RNA, 19 nt, Homo sapiens
  misc_RNA (1)...(19): siRNA sense strand
uauugguggugcaggaaga

SEQ ID NO: 2477385 - RNA, 19 nt, Homo sapiens
  misc_RNA (1)...(19): siRNA sense strand
ccuacauccugcugcucaa

SEQ ID NO: 2477386 - RNA, 19 nt, Homo sapiens
  misc_RNA (1)...(19): siRNA sense strand
uggagauggagaauggcua

SEQ ID NO: 2477387 - RNA, 19 nt, Homo sapiens
  misc_RNA (1)...(19): siRNA sense strand
ccauggagggacaggagga

SEQ ID NO: 2477388 - RNA, 19 nt, Homo sapiens
  misc_RNA (1)...(19): siRNA sense strand
uuccagaguaccugagcaa

SEQ ID NO: 2477389 - RNA, 19 nt, Homo sapiens
  misc_RNA (1)...(19): siRNA sense strand
uggacagcugugaggagaa

SEQ ID NO: 2477390 - RNA, 19 nt, Homo sapiens
  misc_RNA (1)...(19): siRNA sense strand
ggucguaaucugaaggagu

SEQ ID NO: 2477391 - RNA, 19 nt, Homo sapiens
  misc_RNA (1)...(19): siRNA sense strand
ccucaggagccuauugcaa

SEQ ID NO: 2477392 - RNA, 19 nt, Homo sapiens
  misc_RNA (1)...(19): siRNA sense strand
gaagaaaaguggacccuga

SEQ ID NO: 2477393 - RNA, 19 nt, Homo sapiens
  misc_RNA (1)...(19): siRNA sense strand
aaucuagugaagugggaau

SEQ ID NO: 2477394 - RNA, 19 nt, Homo sapiens
  misc_RNA (1)...(19): siRNA sense strand
uauugcaagaggagagcua

SEQ ID NO: 2477395 - RNA, 19 nt, Homo sapiens
  misc_RNA (1)...(19): siRNA sense strand
uggaucugguggacguaaa

SEQ ID NO: 2477396 - RNA, 19 nt, Homo sapiens
  misc_RNA (1)...(19): siRNA sense strand
ggccagaaguguucccaga

SEQ ID NO: 2477397 - RNA, 19 nt, Homo sapiens
  misc_RNA (1)...(19): siRNA sense strand
uguauguggcuguggugaa

SEQ ID NO: 2477398 - RNA, 19 nt, Homo sapiens
  misc_RNA (1)...(19): siRNA sense strand
gucgagaggaagaagaaaa

SEQ ID NO: 2477399 - RNA, 19 nt, Homo sapiens
  misc_RNA (1)...(19): siRNA sense strand
ccggauagaccuugggcca

SEQ ID NO: 2477400 - RNA, 19 nt, Homo sapiens
  misc_RNA (1)...(19): siRNA sense strand
uggcaaagugaaagaagca

SEQ ID NO: 2477401 - RNA, 19 nt, Homo sapiens
  misc_RNA (1)...(19): siRNA sense strand
ugauaaagguaaugccauc

SEQ ID NO: 2477402 - RNA, 19 nt, Homo sapiens
  misc_RNA (1)...(19): siRNA sense strand
gcaaagugaaagaagcagu

SEQ ID NO: 2477403 - RNA, 19 nt, Homo sapiens
  misc_RNA (1)...(19): siRNA sense strand
agagaagauccaagagaag

SEQ ID NO: 2477404 - RNA, 19 nt, Homo sapiens
  misc_RNA (1)...(19): siRNA sense strand
cccaaagaugauaaaggua

SEQ ID NO: 2477405 - RNA, 19 nt, Homo sapiens
  misc_RNA (1)...(19): siRNA sense strand
gaucccaagauuaaggaga

SEQ ID NO: 2477406 - RNA, 19 nt, Homo sapiens
  misc_RNA (1)...(19): siRNA sense strand
aacagaaacuggagggccu

SEQ ID NO: 2477407 - RNA, 19 nt, Homo sapiens
  misc_RNA (1)...(19): siRNA sense strand
ugugaagagagaagacaua

SEQ ID NO: 2477408 - RNA, 19 nt, Homo sapiens
  misc_RNA (1)...(19): siRNA sense strand
ggguugugguccuggccaa

SEQ ID NO: 2477409 - RNA, 19 nt, Homo sapiens
  misc_RNA (1)...(19): siRNA sense strand
aggccauggagaaguguaa

SEQ ID NO: 2477410 - RNA, 19 nt, Homo sapiens
  misc_RNA (1)...(19): siRNA sense strand
gcuacaaugagcagcgcau

SEQ ID NO: 2477411 - RNA, 19 nt, Homo sapiens
  misc_RNA (1)...(19): siRNA sense strand
gugugaagagagaagacau

SEQ ID NO: 2477412 - RNA, 19 nt, Homo sapiens
  misc_RNA (1)...(19): siRNA sense strand
aguguaaggaugcaggauu

SEQ ID NO: 2477413 - RNA, 19 nt, Homo sapiens
  misc_RNA (1)...(19): siRNA sense strand
ccguauuucaaccggagua

SEQ ID NO: 2477414 - RNA, 19 nt, Homo sapiens
  misc_RNA (1)...(19): siRNA sense strand
gaggaauggagaugggcaa

SEQ ID NO: 2477415 - RNA, 19 nt, Homo sapiens
  misc_RNA (1)...(19): siRNA sense strand
agaaguuaauagagagcau

SEQ ID NO: 2477416 - RNA, 19 nt, Homo sapiens
  misc_RNA (1)...(19): siRNA sense strand
cugcauaaaaguaaaggaa

SEQ ID NO: 2477417 - RNA, 19 nt, Homo sapiens
  misc_RNA (1)...(19): siRNA sense strand
acgccuggcuugugagagu

SEQ ID NO: 2477418 - RNA, 19 nt, Homo sapiens
  misc_RNA (1)...(19): siRNA sense strand
uggaaugaugacaggugua

SEQ ID NO: 2477419 - RNA, 19 nt, Homo sapiens
  misc_RNA (1)...(19): siRNA sense strand
agguguaacaugaagcaca

SEQ ID NO: 2477420 - RNA, 19 nt, Homo sapiens
  misc_RNA (1)...(19): siRNA sense strand
uguuacugaagcagguaua

SEQ ID NO: 2477421 - RNA, 19 nt, Homo sapiens
  misc_RNA (1)...(19): siRNA sense strand
aagaguaccagaaaagaaa

SEQ ID NO: 2477422 - RNA, 19 nt, Homo sapiens
  misc_RNA (1)...(19): siRNA sense strand
aggaauggagaugggcaaa

SEQ ID NO: 2477423 - RNA, 19 nt, Homo sapiens
  misc_RNA (1)...(19): siRNA sense strand
uggauagggcuuuggagga

SEQ ID NO: 2477424 - RNA, 19 nt, Homo sapiens
  misc_RNA (1)...(19): siRNA sense strand
uggcaagauacuacauaau

SEQ ID NO: 2477425 - RNA, 19 nt, Homo sapiens
  misc_RNA (1)...(19): siRNA sense strand
acauugaggaacuguacaa

SEQ ID NO: 2477426 - RNA, 19 nt, Homo sapiens
  misc_RNA (1)...(19): siRNA sense strand
gugaagaggccacacgcuu

SEQ ID NO: 2477427 - RNA, 19 nt, Homo sapiens
  misc_RNA (1)...(19): siRNA sense strand
uggcaagauacuacauaau

SEQ ID NO: 2477428 - RNA, 19 nt, Homo sapiens
  misc_RNA (1)...(19): siRNA sense strand
acauugaggaacuguacaa

SEQ ID NO: 2477429 - RNA, 19 nt, Homo sapiens
  misc_RNA (1)...(19): siRNA sense strand
gugaagaggccacacgcuu

SEQ ID NO: 2477430 - RNA, 19 nt, Homo sapiens
  misc_RNA (1)...(19): siRNA sense strand
aaacaugauuacagggaca

SEQ ID NO: 2477431 - RNA, 19 nt, Homo sapiens
  misc_RNA (1)...(19): siRNA sense strand
agaagagauaugaggaaau

SEQ ID NO: 2477432 - RNA, 19 nt, Homo sapiens
  misc_RNA (1)...(19): siRNA sense strand
ucaucaaagcaguggacaa

SEQ ID NO: 2477433 - RNA, 19 nt, Homo sapiens
  misc_RNA (1)...(19): siRNA sense strand
cagaaagcucagaaggcua

SEQ ID NO: 2477434 - RNA, 19 nt, Homo sapiens
  misc_RNA (1)...(19): siRNA sense strand
aggaaauuguuaaggaagu

SEQ ID NO: 2477435 - RNA, 19 nt, Homo sapiens
  misc_RNA (1)...(19): siRNA sense strand
gcuucaaugucaagaaugu

SEQ ID NO: 2477436 - RNA, 19 nt, Homo sapiens
  misc_RNA (1)...(19): siRNA sense strand
uggauaaacugaaagcuga

SEQ ID NO: 2477437 - RNA, 19 nt, Homo sapiens
  misc_RNA (1)...(19): siRNA sense strand
gaaccauccaggccaaaua

SEQ ID NO: 2477438 - RNA, 19 nt, Homo sapiens
  misc_RNA (1)...(19): siRNA sense strand
caguagcauuugugccaau

SEQ ID NO: 2477439 - RNA, 19 nt, Homo sapiens
  misc_RNA (1)...(19): siRNA sense strand
aggaaaagacucauaucaa

SEQ ID NO: 2477440 - RNA, 19 nt, Homo sapiens
  misc_RNA (1)...(19): siRNA sense strand
agacaguugcggugggugu

SEQ ID NO: 2477441 - RNA, 19 nt, Homo sapiens
  misc_RNA (1)...(19): siRNA sense strand
guucgugauaugagacaga

SEQ ID NO: 2477442 - RNA, 19 nt, Homo sapiens
  misc_RNA (1)...(19): siRNA sense strand
caagaaggcugcuggagcu

SEQ ID NO: 2477443 - RNA, 19 nt, Homo sapiens
  misc_RNA (1)...(19): siRNA sense strand
gggcuucaaugucaagaau

SEQ ID NO: 2477444 - RNA, 19 nt, Homo sapiens
  misc_RNA (1)...(19): siRNA sense strand
accaugaagcuuugaguga

SEQ ID NO: 2477445 - RNA, 19 nt, Homo sapiens
  misc_RNA (1)...(19): siRNA sense strand
ggauguucgucguggcaac

SEQ ID NO: 2477446 - RNA, 19 nt, Homo sapiens
  misc_RNA (1)...(19): siRNA sense strand
aacugaaagcugagcguga

SEQ ID NO: 2477447 - RNA, 19 nt, Homo sapiens
  misc_RNA (1)...(19): siRNA sense strand
ugggcagacccgagagcau

SEQ ID NO: 2477448 - RNA, 19 nt, Homo sapiens
  misc_RNA (1)...(19): siRNA sense strand
gugaauuugaagcugguau

SEQ ID NO: 2477449 - RNA, 19 nt, Homo sapiens
  misc_RNA (1)...(19): siRNA sense strand
guaaccaacuggaagccaa

SEQ ID NO: 2477450 - RNA, 19 nt, Homo sapiens
  misc_RNA (1)...(19): siRNA sense strand
agaugaucgaggagaugua

SEQ ID NO: 2477451 - RNA, 19 nt, Homo sapiens
  misc_RNA (1)...(19): siRNA sense strand
ccuucuacuaugagagcuu

SEQ ID NO: 2477452 - RNA, 19 nt, Homo sapiens
  misc_RNA (1)...(19): siRNA sense strand
cagaagggcugguggaagc

SEQ ID NO: 2477453 - RNA, 19 nt, Homo sapiens
  misc_RNA (1)...(19): siRNA sense strand
ccgaaagcuacuucacaau

SEQ ID NO: 2477454 - RNA, 19 nt, Homo sapiens
  misc_RNA (1)...(19): siRNA sense strand
acacagaagggcuggugga

SEQ ID NO: 2477455 - RNA, 19 nt, Homo sapiens
  misc_RNA (1)...(19): siRNA sense strand
cggcgaugguacugugaac

SEQ ID NO: 2477456 - RNA, 19 nt, Homo sapiens
  misc_RNA (1)...(19): siRNA sense strand
augagagcguugaggccaa

SEQ ID NO: 2477457 - RNA, 19 nt, Homo sapiens
  misc_RNA (1)...(19): siRNA sense strand
cagaaggaccugagcagca

SEQ ID NO: 2477458 - RNA, 19 nt, Homo sapiens
  misc_RNA (1)...(19): siRNA sense strand
acaaccaaacaguggauau

SEQ ID NO: 2477459 - RNA, 19 nt, Homo sapiens
  misc_RNA (1)...(19): siRNA sense strand
aggaugagccagaggccga

SEQ ID NO: 2477460 - RNA, 19 nt, Homo sapiens
  misc_RNA (1)...(19): siRNA sense strand
ugaacaagaccguguggga

SEQ ID NO: 2477461 - RNA, 19 nt, Homo sapiens
  misc_RNA (1)...(19): siRNA sense strand
ccauagaccuccuuggaag

SEQ ID NO: 2477462 - RNA, 19 nt, Homo sapiens
  misc_RNA (1)...(19): siRNA sense strand
acgaggagaugaccggcua

SEQ ID NO: 2477463 - RNA, 19 nt, Homo sapiens
  misc_RNA (1)...(19): siRNA sense strand
gaaggaugcuggugcugga

SEQ ID NO: 2477464 - RNA, 19 nt, Homo sapiens
  misc_RNA (1)...(19): siRNA sense strand
ucauggaaguggugggcac

SEQ ID NO: 2477465 - RNA, 19 nt, Homo sapiens
  misc_RNA (1)...(19): siRNA sense strand
augagagcguugaggccaa

SEQ ID NO: 2477466 - RNA, 19 nt, Homo sapiens
  misc_RNA (1)...(19): siRNA sense strand
cagaaggaccugagcagca

SEQ ID NO: 2477467 - RNA, 19 nt, Homo sapiens
  misc_RNA (1)...(19): siRNA sense strand
acaaccaaacaguggauau

SEQ ID NO: 2477468 - RNA, 19 nt, Homo sapiens
  misc_RNA (1)...(19): siRNA sense strand
aggaugagccagaggccga

SEQ ID NO: 2477469 - RNA, 19 nt, Homo sapiens
  misc_RNA (1)...(19): siRNA sense strand
ugaacaagaccguguggga

SEQ ID NO: 2477470 - RNA, 19 nt, Homo sapiens
  misc_RNA (1)...(19): siRNA sense strand
ccauagaccuccuuggaag

SEQ ID NO: 2477471 - RNA, 19 nt, Homo sapiens
  misc_RNA (1)...(19): siRNA sense strand
acgaggagaugaccggcua

SEQ ID NO: 2477472 - RNA, 19 nt, Homo sapiens
  misc_RNA (1)...(19): siRNA sense strand
gaaggaugcuggugcugga

SEQ ID NO: 2477473 - RNA, 19 nt, Homo sapiens
  misc_RNA (1)...(19): siRNA sense strand
ucauggaaguggugggcac

SEQ ID NO: 2477474 - RNA, 19 nt, Homo sapiens
  misc_RNA (1)...(19): siRNA sense strand
ucauggugguggauggcaa

SEQ ID NO: 2477475 - RNA, 19 nt, Homo sapiens
  misc_RNA (1)...(19): siRNA sense strand
gaggcaagcgcgaggucau

SEQ ID NO: 2477476 - RNA, 19 nt, Homo sapiens
  misc_RNA (1)...(19): siRNA sense strand
acgccuacaugcuggacau

SEQ ID NO: 2477477 - RNA, 19 nt, Homo sapiens
  misc_RNA (1)...(19): siRNA sense strand
caguucauccacacggaaa

SEQ ID NO: 2477478 - RNA, 19 nt, Homo sapiens
  misc_RNA (1)...(19): siRNA sense strand
ucauggugguggauggcaa

SEQ ID NO: 2477479 - RNA, 19 nt, Homo sapiens
  misc_RNA (1)...(19): siRNA sense strand
gaggcaagcgcgaggucau

SEQ ID NO: 2477480 - RNA, 19 nt, Homo sapiens
  misc_RNA (1)...(19): siRNA sense strand
acgccuacaugcuggacau

SEQ ID NO: 2477481 - RNA, 19 nt, Homo sapiens
  misc_RNA (1)...(19): siRNA sense strand
caguucauccacacggaaa

SEQ ID NO: 2477482 - RNA, 19 nt, Homo sapiens
  misc_RNA (1)...(19): siRNA sense strand
augaauaccaagaggaaca

SEQ ID NO: 2477483 - RNA, 19 nt, Homo sapiens
  misc_RNA (1)...(19): siRNA sense strand
gguacaaggcagcuggcaa

SEQ ID NO: 2477484 - RNA, 19 nt, Homo sapiens
  misc_RNA (1)...(19): siRNA sense strand
caggaauaacauugccaaa

SEQ ID NO: 2477485 - RNA, 19 nt, Homo sapiens
  misc_RNA (1)...(19): siRNA sense strand
ggugaaaggccgaggaagg

SEQ ID NO: 2477486 - RNA, 19 nt, Homo sapiens
  misc_RNA (1)...(19): siRNA sense strand
ccgccagggacuuuauaaa

SEQ ID NO: 2477487 - RNA, 19 nt, Homo sapiens
  misc_RNA (1)...(19): siRNA sense strand
ccaaaaucacugacaggaa

SEQ ID NO: 2477488 - RNA, 19 nt, Homo sapiens
  misc_RNA (1)...(19): siRNA sense strand
uucaagacacagaggagaa

SEQ ID NO: 2477489 - RNA, 19 nt, Homo sapiens
  misc_RNA (1)...(19): siRNA sense strand
guucuuauuuggaaggcca

SEQ ID NO: 2477490 - RNA, 19 nt, Homo sapiens
  misc_RNA (1)...(19): siRNA sense strand
guacaaggcagcuggcaac

SEQ ID NO: 2477491 - RNA, 19 nt, Homo sapiens
  misc_RNA (1)...(19): siRNA sense strand
ccacauagcagaaggccca

SEQ ID NO: 2477492 - RNA, 19 nt, Homo sapiens
  misc_RNA (1)...(19): siRNA sense strand
cugugaacuggcugggaua

SEQ ID NO: 2477493 - RNA, 19 nt, Homo sapiens
  misc_RNA (1)...(19): siRNA sense strand
ccuucuugguguuggauga

SEQ ID NO: 2477494 - RNA, 19 nt, Homo sapiens
  misc_RNA (1)...(19): siRNA sense strand
gcaucgugacagagcagaa

SEQ ID NO: 2477495 - RNA, 19 nt, Homo sapiens
  misc_RNA (1)...(19): siRNA sense strand
ugacagagcagaaaggacu

SEQ ID NO: 2477496 - RNA, 19 nt, Homo sapiens
  misc_RNA (1)...(19): siRNA sense strand
ggacuagcauccucgguga

SEQ ID NO: 2477497 - RNA, 19 nt, Homo sapiens
  misc_RNA (1)...(19): siRNA sense strand
gagcagauaagguggccga

SEQ ID NO: 2477498 - RNA, 19 nt, Homo sapiens
  misc_RNA (1)...(19): siRNA sense strand
ccacauuucccgaaggugu

SEQ ID NO: 2477499 - RNA, 19 nt, Homo sapiens
  misc_RNA (1)...(19): siRNA sense strand
uguaauagcuccagcacug

SEQ ID NO: 2477500 - RNA, 19 nt, Homo sapiens
  misc_RNA (1)...(19): siRNA sense strand
gcagaaaccggcaguggca

SEQ ID NO: 2477501 - RNA, 19 nt, Homo sapiens
  misc_RNA (1)...(19): siRNA sense strand
gauauauucuggaugacca

SEQ ID NO: 2477502 - RNA, 19 nt, Homo sapiens
  misc_RNA (1)...(19): siRNA sense strand
agacauacuucucugcaca

SEQ ID NO: 2477503 - RNA, 19 nt, Homo sapiens
  misc_RNA (1)...(19): siRNA sense strand
ccuugaugaggguaggaau

SEQ ID NO: 2477504 - RNA, 19 nt, Homo sapiens
  misc_RNA (1)...(19): siRNA sense strand
ugguguuggaugaggcaga

SEQ ID NO: 2477505 - RNA, 19 nt, Homo sapiens
  misc_RNA (1)...(19): siRNA sense strand
agauaaaggucaauggcau

SEQ ID NO: 2477506 - RNA, 19 nt, Homo sapiens
  misc_RNA (1)...(19): siRNA sense strand
ggauauggauguuggagga

SEQ ID NO: 2477507 - RNA, 19 nt, Homo sapiens
  misc_RNA (1)...(19): siRNA sense strand
gaguaugagauaaagguca

SEQ ID NO: 2477508 - RNA, 19 nt, Homo sapiens
  misc_RNA (1)...(19): siRNA sense strand
cuucuuuacccgugccaua

SEQ ID NO: 2477509 - RNA, 19 nt, Homo sapiens
  misc_RNA (1)...(19): siRNA sense strand
caacagacuacgugcccuu

SEQ ID NO: 2477510 - RNA, 19 nt, Homo sapiens
  misc_RNA (1)...(19): siRNA sense strand
caggcgugaguuugggaua

SEQ ID NO: 2477511 - RNA, 19 nt, Homo sapiens
  misc_RNA (1)...(19): siRNA sense strand
auggaugaggauucagaua

SEQ ID NO: 2477512 - RNA, 19 nt, Homo sapiens
  misc_RNA (1)...(19): siRNA sense strand
uggugcaagugucgagaga

SEQ ID NO: 2477513 - RNA, 19 nt, Homo sapiens
  misc_RNA (1)...(19): siRNA sense strand
uugugaagauggugcaagu

SEQ ID NO: 2477514 - RNA, 19 nt, Homo sapiens
  misc_RNA (1)...(19): siRNA sense strand
ugaauaaggaacagcaaau

SEQ ID NO: 2477515 - RNA, 19 nt, Homo sapiens
  misc_RNA (1)...(19): siRNA sense strand
cagaaaugcaggaagccaa

SEQ ID NO: 2477516 - RNA, 19 nt, Homo sapiens
  misc_RNA (1)...(19): siRNA sense strand
cuguguagaugaagugcua

SEQ ID NO: 2477517 - RNA, 19 nt, Homo sapiens
  misc_RNA (1)...(19): siRNA sense strand
ugagaaagucugugaaacu

SEQ ID NO: 2477518 - RNA, 19 nt, Homo sapiens
  misc_RNA (1)...(19): siRNA sense strand
ucugaaagaaagagaagau

SEQ ID NO: 2477519 - RNA, 19 nt, Homo sapiens
  misc_RNA (1)...(19): siRNA sense strand
cgugauuguuucaggagau

SEQ ID NO: 2477520 - RNA, 19 nt, Homo sapiens
  misc_RNA (1)...(19): siRNA sense strand
ugaaagaagcauugcaacu

SEQ ID NO: 2477521 - RNA, 19 nt, Homo sapiens
  misc_RNA (1)...(19): siRNA sense strand
gggugagaaaggugacauu

SEQ ID NO: 2477522 - RNA, 19 nt, Homo sapiens
  misc_RNA (1)...(19): siRNA sense strand
gggaugaggaagagguuuu

SEQ ID NO: 2477523 - RNA, 19 nt, Homo sapiens
  misc_RNA (1)...(19): siRNA sense strand
aaagaagaaagguguacaa

SEQ ID NO: 2477524 - RNA, 19 nt, Homo sapiens
  misc_RNA (1)...(19): siRNA sense strand
agauguuauucgagcugaa

SEQ ID NO: 2477525 - RNA, 19 nt, Homo sapiens
  misc_RNA (1)...(19): siRNA sense strand
uggaaagaagaaaggugua

SEQ ID NO: 2477526 - RNA, 19 nt, Homo sapiens
  misc_RNA (1)...(19): siRNA sense strand
ggagcaacucagucagauu

SEQ ID NO: 2477527 - RNA, 19 nt, Homo sapiens
  misc_RNA (1)...(19): siRNA sense strand
caugaaagaagcauugcaa

SEQ ID NO: 2477528 - RNA, 19 nt, Homo sapiens
  misc_RNA (1)...(19): siRNA sense strand
cuuucuggccugugaacaa

SEQ ID NO: 2477529 - RNA, 19 nt, Homo sapiens
  misc_RNA (1)...(19): siRNA sense strand
gugaguacuguguggaaaa

SEQ ID NO: 2477530 - RNA, 19 nt, Homo sapiens
  misc_RNA (1)...(19): siRNA sense strand
cccugaaacugaacagaga

SEQ ID NO: 2477531 - RNA, 19 nt, Homo sapiens
  misc_RNA (1)...(19): siRNA sense strand
augauaugcugcaaagaga

SEQ ID NO: 2477532 - RNA, 19 nt, Homo sapiens
  misc_RNA (1)...(19): siRNA sense strand
gugaacaagauauugagaa

SEQ ID NO: 2477533 - RNA, 19 nt, Homo sapiens
  misc_RNA (1)...(19): siRNA sense strand
ccacugaagccagcagaaa

SEQ ID NO: 2477534 - RNA, 19 nt, Homo sapiens
  misc_RNA (1)...(19): siRNA sense strand
auugagaaagucugugaaa

SEQ ID NO: 2477535 - RNA, 19 nt, Homo sapiens
  misc_RNA (1)...(19): siRNA sense strand
cagcagaaaugcaggaagc

SEQ ID NO: 2477536 - RNA, 19 nt, Homo sapiens
  misc_RNA (1)...(19): siRNA sense strand
acuggauaaugauggaaau

SEQ ID NO: 2477537 - RNA, 19 nt, Homo sapiens
  misc_RNA (1)...(19): siRNA sense strand
ggagaugcuaaauguggua

SEQ ID NO: 2477538 - RNA, 19 nt, Homo sapiens
  misc_RNA (1)...(19): siRNA sense strand
cgauguggguguggaaaga

SEQ ID NO: 2477539 - RNA, 19 nt, Homo sapiens
  misc_RNA (1)...(19): siRNA sense strand
ccagagccaggcagagaua

SEQ ID NO: 2477540 - RNA, 19 nt, Homo sapiens
  misc_RNA (1)...(19): siRNA sense strand
augaauaaggaacagcaaa

SEQ ID NO: 2477541 - RNA, 19 nt, Homo sapiens
  misc_RNA (1)...(19): siRNA sense strand
cugugaaacugucuaucaa

SEQ ID NO: 2477542 - RNA, 19 nt, Homo sapiens
  misc_RNA (1)...(19): siRNA sense strand
cugaagaauuugccuccaa

SEQ ID NO: 2477543 - RNA, 19 nt, Homo sapiens
  misc_RNA (1)...(19): siRNA sense strand
aggaacagcaaauguguga

SEQ ID NO: 2477544 - RNA, 19 nt, Homo sapiens
  misc_RNA (1)...(19): siRNA sense strand
ugaaagaaagagaagaucu

SEQ ID NO: 2477545 - RNA, 19 nt, Homo sapiens
  misc_RNA (1)...(19): siRNA sense strand
uagcaagaccagaacugaa

SEQ ID NO: 2477546 - RNA, 19 nt, Homo sapiens
  misc_RNA (1)...(19): siRNA sense strand
gcgauggggaugaggaaga

SEQ ID NO: 2477547 - RNA, 19 nt, Homo sapiens
  misc_RNA (1)...(19): siRNA sense strand
cgagcugaacucuuagaaa

SEQ ID NO: 2477548 - RNA, 19 nt, Homo sapiens
  misc_RNA (1)...(19): siRNA sense strand
gccuugacuuguuggaaga

SEQ ID NO: 2477549 - RNA, 19 nt, Homo sapiens
  misc_RNA (1)...(19): siRNA sense strand
ucagaauggcagauguuau

SEQ ID NO: 2477550 - RNA, 19 nt, Homo sapiens
  misc_RNA (1)...(19): siRNA sense strand
gguaacuacuuaaugcuga

SEQ ID NO: 2477551 - RNA, 19 nt, Homo sapiens
  misc_RNA (1)...(19): siRNA sense strand
acucaaucaccaagaagau

SEQ ID NO: 2477552 - RNA, 19 nt, Homo sapiens
  misc_RNA (1)...(19): siRNA sense strand
gaucuaaccuaaacccaga

SEQ ID NO: 2477553 - RNA, 19 nt, Homo sapiens
  misc_RNA (1)...(19): siRNA sense strand
guggaaagaagaaaggugu

SEQ ID NO: 2477554 - RNA, 19 nt, Homo sapiens
  misc_RNA (1)...(19): siRNA sense strand
gcucaucuucuucaggaaa

SEQ ID NO: 2477555 - RNA, 19 nt, Homo sapiens
  misc_RNA (1)...(19): siRNA sense strand
acgccuuaucuuugaaauu

SEQ ID NO: 2477556 - RNA, 19 nt, Homo sapiens
  misc_RNA (1)...(19): siRNA sense strand
augccaaguuuaucaaaga

SEQ ID NO: 2477557 - RNA, 19 nt, Homo sapiens
  misc_RNA (1)...(19): siRNA sense strand
uaugaagaggauagacauu

SEQ ID NO: 2477558 - RNA, 19 nt, Homo sapiens
  misc_RNA (1)...(19): siRNA sense strand
agcugaacucuuagaaauu

SEQ ID NO: 2477559 - RNA, 19 nt, Homo sapiens
  misc_RNA (1)...(19): siRNA sense strand
gagaacaacuacaucagga

SEQ ID NO: 2477560 - RNA, 19 nt, Homo sapiens
  misc_RNA (1)...(19): siRNA sense strand
gaaacugaacagagaugca

SEQ ID NO: 2477561 - RNA, 19 nt, Homo sapiens
  misc_RNA (1)...(19): siRNA sense strand
uuggagaacuggugguugu

SEQ ID NO: 2477562 - RNA, 19 nt, Homo sapiens
  misc_RNA (1)...(19): siRNA sense strand
gcagagauacgcaagcaga

SEQ ID NO: 2477563 - RNA, 19 nt, Homo sapiens
  misc_RNA (1)...(19): siRNA sense strand
cuaucaaggaucuaaccua

SEQ ID NO: 2477564 - RNA, 19 nt, Homo sapiens
  misc_RNA (1)...(19): siRNA sense strand
acauggagcugaagaggcu

SEQ ID NO: 2477565 - RNA, 19 nt, Homo sapiens
  misc_RNA (1)...(19): siRNA sense strand
agugaguacuguguggaaa

SEQ ID NO: 2477566 - RNA, 19 nt, Homo sapiens
  misc_RNA (1)...(19): siRNA sense strand
ccuagugaaaguaaggaca

SEQ ID NO: 2477567 - RNA, 19 nt, Homo sapiens
  misc_RNA (1)...(19): siRNA sense strand
cugugucaacaaugaauaa

SEQ ID NO: 2477568 - RNA, 19 nt, Homo sapiens
  misc_RNA (1)...(19): siRNA sense strand
cuuagaaauuaucaagcga

SEQ ID NO: 2477569 - RNA, 19 nt, Homo sapiens
  misc_RNA (1)...(19): siRNA sense strand
ggaucagguaacuacuuaa

SEQ ID NO: 2477570 - RNA, 19 nt, Homo sapiens
  misc_RNA (1)...(19): siRNA sense strand
cgaaacaauccugagguau

SEQ ID NO: 2477571 - RNA, 19 nt, Homo sapiens
  misc_RNA (1)...(19): siRNA sense strand
cagcaaacucaauucuuau

SEQ ID NO: 2477572 - RNA, 19 nt, Homo sapiens
  misc_RNA (1)...(19): siRNA sense strand
guucauuguucaagccacu

SEQ ID NO: 2477573 - RNA, 19 nt, Homo sapiens
  misc_RNA (1)...(19): siRNA sense strand
agucagguguucaaggaaa

SEQ ID NO: 2477574 - RNA, 19 nt, Homo sapiens
  misc_RNA (1)...(19): siRNA sense strand
ucuguaaggccaagauaaa

SEQ ID NO: 2477575 - RNA, 19 nt, Homo sapiens
  misc_RNA (1)...(19): siRNA sense strand
ugguuugucugguggguua

SEQ ID NO: 2477576 - RNA, 19 nt, Homo sapiens
  misc_RNA (1)...(19): siRNA sense strand
cccuuuaccuggauggaaa

SEQ ID NO: 2477577 - RNA, 19 nt, Homo sapiens
  misc_RNA (1)...(19): siRNA sense strand
ccacugucccugagagauu

SEQ ID NO: 2477578 - RNA, 19 nt, Homo sapiens
  misc_RNA (1)...(19): siRNA sense strand
cuggaagacccaagagaga

SEQ ID NO: 2477579 - RNA, 19 nt, Homo sapiens
  misc_RNA (1)...(19): siRNA sense strand
aaaccagcuacuagagaua

SEQ ID NO: 2477580 - RNA, 19 nt, Homo sapiens
  misc_RNA (1)...(19): siRNA sense strand
cagacaagcauuugacaga

SEQ ID NO: 2477581 - RNA, 19 nt, Homo sapiens
  misc_RNA (1)...(19): siRNA sense strand
gguuuaagaacaucaacaa

SEQ ID NO: 2477582 - RNA, 19 nt, Homo sapiens
  misc_RNA (1)...(19): siRNA sense strand
cugcagaaacugaugauga

SEQ ID NO: 2477583 - RNA, 19 nt, Homo sapiens
  misc_RNA (1)...(19): siRNA sense strand
cagaaaauguccucaacaa

SEQ ID NO: 2477584 - RNA, 19 nt, Homo sapiens
  misc_RNA (1)...(19): siRNA sense strand
cuggauauaagcaguaaua

SEQ ID NO: 2477585 - RNA, 19 nt, Homo sapiens
  misc_RNA (1)...(19): siRNA sense strand
cagacaaucauguggccua

SEQ ID NO: 2477586 - RNA, 19 nt, Homo sapiens
  misc_RNA (1)...(19): siRNA sense strand
cuuuagcagagcugagaua

SEQ ID NO: 2477587 - RNA, 19 nt, Homo sapiens
  misc_RNA (1)...(19): siRNA sense strand
aggccaagauaaaggggua

SEQ ID NO: 2477588 - RNA, 19 nt, Homo sapiens
  misc_RNA (1)...(19): siRNA sense strand
caacaaacccgcaagcuca

SEQ ID NO: 2477589 - RNA, 19 nt, Homo sapiens
  misc_RNA (1)...(19): siRNA sense strand
acugaaagucauagaucuu

SEQ ID NO: 2477590 - RNA, 19 nt, Homo sapiens
  misc_RNA (1)...(19): siRNA sense strand
agaccuuggaucuaaguaa

SEQ ID NO: 2477591 - RNA, 19 nt, Homo sapiens
  misc_RNA (1)...(19): siRNA sense strand
ugucuaaagaaccuggaaa

SEQ ID NO: 2477592 - RNA, 19 nt, Homo sapiens
  misc_RNA (1)...(19): siRNA sense strand
gauaaguaugcaaggaguu

SEQ ID NO: 2477593 - RNA, 19 nt, Homo sapiens
  misc_RNA (1)...(19): siRNA sense strand
caauagagaaagaugccuu

SEQ ID NO: 2477594 - RNA, 19 nt, Homo sapiens
  misc_RNA (1)...(19): siRNA sense strand
ggaucucagcucaaauaaa

SEQ ID NO: 2477595 - RNA, 19 nt, Homo sapiens
  misc_RNA (1)...(19): siRNA sense strand
ucuugaaguucuugaucuu

SEQ ID NO: 2477596 - RNA, 19 nt, Homo sapiens
  misc_RNA (1)...(19): siRNA sense strand
auucagaggaaaucacuua

SEQ ID NO: 2477597 - RNA, 19 nt, Homo sapiens
  misc_RNA (1)...(19): siRNA sense strand
caggaaaucucauuagcca

SEQ ID NO: 2477598 - RNA, 19 nt, Homo sapiens
  misc_RNA (1)...(19): siRNA sense strand
agaaacugaugaugaacga

SEQ ID NO: 2477599 - RNA, 19 nt, Homo sapiens
  misc_RNA (1)...(19): siRNA sense strand
ugguaugccuccaaaucua

SEQ ID NO: 2477600 - RNA, 19 nt, Homo sapiens
  misc_RNA (1)...(19): siRNA sense strand
cuccaaaucuaaagaaucu

SEQ ID NO: 2477601 - RNA, 19 nt, Homo sapiens
  misc_RNA (1)...(19): siRNA sense strand
aucaagaggcugcagauua

SEQ ID NO: 2477602 - RNA, 19 nt, Homo sapiens
  misc_RNA (1)...(19): siRNA sense strand
acuggaaguucuggauaua

SEQ ID NO: 2477603 - RNA, 19 nt, Homo sapiens
  misc_RNA (1)...(19): siRNA sense strand
aggaaaucacuuagauguu

SEQ ID NO: 2477604 - RNA, 19 nt, Homo sapiens
  misc_RNA (1)...(19): siRNA sense strand
gcugugaccgaguggguuu

SEQ ID NO: 2477605 - RNA, 19 nt, Homo sapiens
  misc_RNA (1)...(19): siRNA sense strand
aaguaugcaaagacugaaa

SEQ ID NO: 2477606 - RNA, 19 nt, Homo sapiens
  misc_RNA (1)...(19): siRNA sense strand
agacaaguaugcaaagacu

SEQ ID NO: 2477607 - RNA, 19 nt, Homo sapiens
  misc_RNA (1)...(19): siRNA sense strand
acaaguaugcaaagacuga

SEQ ID NO: 2477608 - RNA, 19 nt, Homo sapiens
  misc_RNA (1)...(19): siRNA sense strand
cggaaaaggcucuguggga

SEQ ID NO: 2477609 - RNA, 19 nt, Homo sapiens
  misc_RNA (1)...(19): siRNA sense strand
agaaauuggggaugcuaaa

SEQ ID NO: 2477610 - RNA, 19 nt, Homo sapiens
  misc_RNA (1)...(19): siRNA sense strand
gagcugagauauuuggacu

SEQ ID NO: 2477611 - RNA, 19 nt, Homo sapiens
  misc_RNA (1)...(19): siRNA sense strand
caacaacaugauugcaaaa

SEQ ID NO: 2477612 - RNA, 19 nt, Homo sapiens
  misc_RNA (1)...(19): siRNA sense strand
aggugauaacagauacuua

SEQ ID NO: 2477613 - RNA, 19 nt, Homo sapiens
  misc_RNA (1)...(19): siRNA sense strand
gugcucucccugaaagaua

SEQ ID NO: 2477614 - RNA, 19 nt, Homo sapiens
  misc_RNA (1)...(19): siRNA sense strand
aggaaaucucauuagccaa

SEQ ID NO: 2477615 - RNA, 19 nt, Homo sapiens
  misc_RNA (1)...(19): siRNA sense strand
acucuuaauggcagugaau

SEQ ID NO: 2477616 - RNA, 19 nt, Homo sapiens
  misc_RNA (1)...(19): siRNA sense strand
ggauauaagcaguaauagc

SEQ ID NO: 2477617 - RNA, 19 nt, Homo sapiens
  misc_RNA (1)...(19): siRNA sense strand
acagaaauuccuggaggua

SEQ ID NO: 2477618 - RNA, 19 nt, Homo sapiens
  misc_RNA (1)...(19): siRNA sense strand
ucuuaauggcagugaauuc

SEQ ID NO: 2477619 - RNA, 19 nt, Homo sapiens
  misc_RNA (1)...(19): siRNA sense strand
gaaagauaacaaugucaca

SEQ ID NO: 2477620 - RNA, 19 nt, Homo sapiens
  misc_RNA (1)...(19): siRNA sense strand
cugaaaagccugaaaauuc

SEQ ID NO: 2477621 - RNA, 19 nt, Homo sapiens
  misc_RNA (1)...(19): siRNA sense strand
ugauaaguaugcaaggagu

SEQ ID NO: 2477622 - RNA, 19 nt, Homo sapiens
  misc_RNA (1)...(19): siRNA sense strand
ccuauagucagguguucaa

SEQ ID NO: 2477623 - RNA, 19 nt, Homo sapiens
  misc_RNA (1)...(19): siRNA sense strand
guuaaugaaagcugcuaca

SEQ ID NO: 2477624 - RNA, 19 nt, Homo sapiens
  misc_RNA (1)...(19): siRNA sense strand
auuuaugucucgaggaaag

SEQ ID NO: 2477625 - RNA, 19 nt, Homo sapiens
  misc_RNA (1)...(19): siRNA sense strand
cggcagacacacaagguca

SEQ ID NO: 2477626 - RNA, 19 nt, Homo sapiens
  misc_RNA (1)...(19): siRNA sense strand
gugauggagcgcugggaga

SEQ ID NO: 2477627 - RNA, 19 nt, Homo sapiens
  misc_RNA (1)...(19): siRNA sense strand
cgucaaaggugcaggaggc

SEQ ID NO: 2477628 - RNA, 19 nt, Homo sapiens
  misc_RNA (1)...(19): siRNA sense strand
cggcagacacacaagguca

SEQ ID NO: 2477629 - RNA, 19 nt, Homo sapiens
  misc_RNA (1)...(19): siRNA sense strand
gugauggagcgcugggaga

SEQ ID NO: 2477630 - RNA, 19 nt, Homo sapiens
  misc_RNA (1)...(19): siRNA sense strand
cgucaaaggugcaggaggc

SEQ ID NO: 2477631 - RNA, 19 nt, Homo sapiens
  misc_RNA (1)...(19): siRNA sense strand
uaaaggagcaggagggcga

SEQ ID NO: 2477632 - RNA, 19 nt, Homo sapiens
  misc_RNA (1)...(19): siRNA sense strand
ggagaaaacagcuggucca

SEQ ID NO: 2477633 - RNA, 19 nt, Homo sapiens
  misc_RNA (1)...(19): siRNA sense strand
ggagaaaggaacucgggaa

SEQ ID NO: 2477634 - RNA, 19 nt, Homo sapiens
  misc_RNA (1)...(19): siRNA sense strand
ugguuaaagcaaagaagua

SEQ ID NO: 2477635 - RNA, 19 nt, Homo sapiens
  misc_RNA (1)...(19): siRNA sense strand
ggaaauaaggauuggugca

SEQ ID NO: 2477636 - RNA, 19 nt, Homo sapiens
  misc_RNA (1)...(19): siRNA sense strand
agaucgaagccaugagcaa

SEQ ID NO: 2477637 - RNA, 19 nt, Homo sapiens
  misc_RNA (1)...(19): siRNA sense strand
cggaaauacagcuguguca

SEQ ID NO: 2477638 - RNA, 19 nt, Homo sapiens
  misc_RNA (1)...(19): siRNA sense strand
ggauuggugcaaagagaau

SEQ ID NO: 2477639 - RNA, 19 nt, Homo sapiens
  misc_RNA (1)...(19): siRNA sense strand
cgggcaugguuaaagcaaa

SEQ ID NO: 2477640 - RNA, 19 nt, Homo sapiens
  misc_RNA (1)...(19): siRNA sense strand
acagaagaggagaaaggaa

SEQ ID NO: 2477641 - RNA, 19 nt, Homo sapiens
  misc_RNA (1)...(19): siRNA sense strand
ccugaguacuuuaggagga

SEQ ID NO: 2477642 - RNA, 19 nt, Homo sapiens
  misc_RNA (1)...(19): siRNA sense strand
cagaagaggagaaaggaac

SEQ ID NO: 2477643 - RNA, 19 nt, Homo sapiens
  misc_RNA (1)...(19): siRNA sense strand
uuaaagaugucaaugccaa

SEQ ID NO: 2477644 - RNA, 19 nt, Homo sapiens
  misc_RNA (1)...(19): siRNA sense strand
ucagaagacaccaggauca

SEQ ID NO: 2477645 - RNA, 19 nt, Homo sapiens
  misc_RNA (1)...(19): siRNA sense strand
gaguuugagaaguuugaua

SEQ ID NO: 2477646 - RNA, 19 nt, Homo sapiens
  misc_RNA (1)...(19): siRNA sense strand
uugggaagcugguuggcua

SEQ ID NO: 2477647 - RNA, 19 nt, Homo sapiens
  misc_RNA (1)...(19): siRNA sense strand
cccaaagggcuaucgcaaa

SEQ ID NO: 2477648 - RNA, 19 nt, Homo sapiens
  misc_RNA (1)...(19): siRNA sense strand
aggaggagaucgaagccau

SEQ ID NO: 2477649 - RNA, 19 nt, Homo sapiens
  misc_RNA (1)...(19): siRNA sense strand
aagaaagauggcagcauuu

SEQ ID NO: 2477650 - RNA, 19 nt, Homo sapiens
  misc_RNA (1)...(19): siRNA sense strand
ugagaagagaacugaacuu

SEQ ID NO: 2477651 - RNA, 19 nt, Homo sapiens
  misc_RNA (1)...(19): siRNA sense strand
cugcacagaagaggagaaa

SEQ ID NO: 2477652 - RNA, 19 nt, Homo sapiens
  misc_RNA (1)...(19): siRNA sense strand
agcaagacgugccgagaca

SEQ ID NO: 2477653 - RNA, 19 nt, Homo sapiens
  misc_RNA (1)...(19): siRNA sense strand
cggaggacgaguuugagaa

SEQ ID NO: 2477654 - RNA, 19 nt, Homo sapiens
  misc_RNA (1)...(19): siRNA sense strand
gcugcacagaagaggagaa

SEQ ID NO: 2477655 - RNA, 19 nt, Homo sapiens
  misc_RNA (1)...(19): siRNA sense strand
ggaagaaagauggcagcau

SEQ ID NO: 2477656 - RNA, 19 nt, Homo sapiens
  misc_RNA (1)...(19): siRNA sense strand
uagcaaugaaagucccaaa

SEQ ID NO: 2477657 - RNA, 19 nt, Homo sapiens
  misc_RNA (1)...(19): siRNA sense strand
ggaaacuggcucugggaag

SEQ ID NO: 2477658 - RNA, 19 nt, Homo sapiens
  misc_RNA (1)...(19): siRNA sense strand
acuccaaugggaagaaaga

SEQ ID NO: 2477659 - RNA, 19 nt, Homo sapiens
  misc_RNA (1)...(19): siRNA sense strand
gcucuuuggaguggugaaa

SEQ ID NO: 2477660 - RNA, 19 nt, Homo sapiens
  misc_RNA (1)...(19): siRNA sense strand
gcaaagaaguauaacccug

SEQ ID NO: 2477661 - RNA, 19 nt, Homo sapiens
  misc_RNA (1)...(19): siRNA sense strand
cagaagacaccaggaucaa

SEQ ID NO: 2477662 - RNA, 19 nt, Homo sapiens
  misc_RNA (1)...(19): siRNA sense strand
cgcaagaaguucauaucca

SEQ ID NO: 2477663 - RNA, 19 nt, Homo sapiens
  misc_RNA (1)...(19): siRNA sense strand
agagcacagcugagggaca

SEQ ID NO: 2477664 - RNA, 19 nt, Homo sapiens
  misc_RNA (1)...(19): siRNA sense strand
ucacugggcaggaggagau

SEQ ID NO: 2477665 - RNA, 19 nt, Homo sapiens
  misc_RNA (1)...(19): siRNA sense strand
aauaaggauuggugcaaag

SEQ ID NO: 2477666 - RNA, 19 nt, Homo sapiens
  misc_RNA (1)...(19): siRNA sense strand
cugaguacuuuaggaggaa

SEQ ID NO: 2477667 - RNA, 19 nt, Homo sapiens
  misc_RNA (1)...(19): siRNA sense strand
ccucagaagacaccaggau

SEQ ID NO: 2477668 - RNA, 19 nt, Homo sapiens
  misc_RNA (1)...(19): siRNA sense strand
gugauugugaugucagcua

SEQ ID NO: 2477669 - RNA, 19 nt, Homo sapiens
  misc_RNA (1)...(19): siRNA sense strand
ugacaguggucuugaggug

SEQ ID NO: 2477670 - RNA, 19 nt, Homo sapiens
  misc_RNA (1)...(19): siRNA sense strand
gagaaguuugauaagauga

SEQ ID NO: 2477671 - RNA, 19 nt, Homo sapiens
  misc_RNA (1)...(19): siRNA sense strand
gggaaacaauggugggaca

SEQ ID NO: 2477672 - RNA, 19 nt, Homo sapiens
  misc_RNA (1)...(19): siRNA sense strand
gcuaaagagaggagcagaa

SEQ ID NO: 2477673 - RNA, 19 nt, Homo sapiens
  misc_RNA (1)...(19): siRNA sense strand
aaaucaaaguggaggaaaa

SEQ ID NO: 2477674 - RNA, 19 nt, Homo sapiens
  misc_RNA (1)...(19): siRNA sense strand
aggaagaggagguggaaga

SEQ ID NO: 2477675 - RNA, 19 nt, Homo sapiens
  misc_RNA (1)...(19): siRNA sense strand
gaagaaacaaggaaggcaa

SEQ ID NO: 2477676 - RNA, 19 nt, Homo sapiens
  misc_RNA (1)...(19): siRNA sense strand
gcucaagugaagaggaaga

SEQ ID NO: 2477677 - RNA, 19 nt, Homo sapiens
  misc_RNA (1)...(19): siRNA sense strand
ccaauaugaucaaggccua

SEQ ID NO: 2477678 - RNA, 19 nt, Homo sapiens
  misc_RNA (1)...(19): siRNA sense strand
ugggaaaggaaaaggaaaa

SEQ ID NO: 2477679 - RNA, 19 nt, Homo sapiens
  misc_RNA (1)...(19): siRNA sense strand
uggaaagauugaaggcaga

SEQ ID NO: 2477680 - RNA, 19 nt, Homo sapiens
  misc_RNA (1)...(19): siRNA sense strand
gggacuuggaguauggaua

SEQ ID NO: 2477681 - RNA, 19 nt, Homo sapiens
  misc_RNA (1)...(19): siRNA sense strand
gcuugagaccaaagaggaa

SEQ ID NO: 2477682 - RNA, 19 nt, Homo sapiens
  misc_RNA (1)...(19): siRNA sense strand
gggacuaccugaucggcaa

SEQ ID NO: 2477683 - RNA, 19 nt, Homo sapiens
  misc_RNA (1)...(19): siRNA sense strand
gauugaaggcagaguuaga

SEQ ID NO: 2477684 - RNA, 19 nt, Homo sapiens
  misc_RNA (1)...(19): siRNA sense strand
caauauuacccuuugggaa

SEQ ID NO: 2477685 - RNA, 19 nt, Homo sapiens
  misc_RNA (1)...(19): siRNA sense strand
gaugaagaggaauuggaaa

SEQ ID NO: 2477686 - RNA, 19 nt, Homo sapiens
  misc_RNA (1)...(19): siRNA sense strand
ggaagauggagaagaaaau

SEQ ID NO: 2477687 - RNA, 19 nt, Homo sapiens
  misc_RNA (1)...(19): siRNA sense strand
cugaaacagcagacaacaa

SEQ ID NO: 2477688 - RNA, 19 nt, Homo sapiens
  misc_RNA (1)...(19): siRNA sense strand
gugaagaggaagaggaggu

SEQ ID NO: 2477689 - RNA, 19 nt, Homo sapiens
  misc_RNA (1)...(19): siRNA sense strand
ggauuaugugcauuggaua

SEQ ID NO: 2477690 - RNA, 19 nt, Homo sapiens
  misc_RNA (1)...(19): siRNA sense strand
acaacaagauugaagagga

SEQ ID NO: 2477691 - RNA, 19 nt, Homo sapiens
  misc_RNA (1)...(19): siRNA sense strand
acaagauugaagaggagaa

SEQ ID NO: 2477692 - RNA, 19 nt, Homo sapiens
  misc_RNA (1)...(19): siRNA sense strand
ccaaagaggaaacggacca

SEQ ID NO: 2477693 - RNA, 19 nt, Homo sapiens
  misc_RNA (1)...(19): siRNA sense strand
cgaggaccuugcugggaaa

SEQ ID NO: 2477694 - RNA, 19 nt, Homo sapiens
  misc_RNA (1)...(19): siRNA sense strand
uugcugaauuagaagacua

SEQ ID NO: 2477695 - RNA, 19 nt, Homo sapiens
  misc_RNA (1)...(19): siRNA sense strand
ggaccagagauguuaucaa

SEQ ID NO: 2477696 - RNA, 19 nt, Homo sapiens
  misc_RNA (1)...(19): siRNA sense strand
aagauugaaggcagaguua

SEQ ID NO: 2477697 - RNA, 19 nt, Homo sapiens
  misc_RNA (1)...(19): siRNA sense strand
agagaggagcagaagaaga

SEQ ID NO: 2477698 - RNA, 19 nt, Homo sapiens
  misc_RNA (1)...(19): siRNA sense strand
agcagaagaagaagaaauu

SEQ ID NO: 2477699 - RNA, 19 nt, Homo sapiens
  misc_RNA (1)...(19): siRNA sense strand
uggaagauggagaagaaaa

SEQ ID NO: 2477700 - RNA, 19 nt, Homo sapiens
  misc_RNA (1)...(19): siRNA sense strand
caacaagauugaagaggag

SEQ ID NO: 2477701 - RNA, 19 nt, Homo sapiens
  misc_RNA (1)...(19): siRNA sense strand
ggcagaguuagaugagaaa

SEQ ID NO: 2477702 - RNA, 19 nt, Homo sapiens
  misc_RNA (1)...(19): siRNA sense strand
gggcaaaauuccuccguga

SEQ ID NO: 2477703 - RNA, 19 nt, Homo sapiens
  misc_RNA (1)...(19): siRNA sense strand
cagcccaaguagaagaaaa

SEQ ID NO: 2477704 - RNA, 19 nt, Homo sapiens
  misc_RNA (1)...(19): siRNA sense strand
cuucaaugguuuggcacaa

SEQ ID NO: 2477705 - RNA, 19 nt, Homo sapiens
  misc_RNA (1)...(19): siRNA sense strand
cgaacaauuggauggauga

SEQ ID NO: 2477706 - RNA, 19 nt, Homo sapiens
  misc_RNA (1)...(19): siRNA sense strand
ggaagcuaucacagaagaa

SEQ ID NO: 2477707 - RNA, 19 nt, Homo sapiens
  misc_RNA (1)...(19): siRNA sense strand
gcgaagaucuugagacagc

SEQ ID NO: 2477708 - RNA, 19 nt, Homo sapiens
  misc_RNA (1)...(19): siRNA sense strand
acaaugaacuuuaaggaag

SEQ ID NO: 2477709 - RNA, 19 nt, Homo sapiens
  misc_RNA (1)...(19): siRNA sense strand
ucuaacacuuggagggagu

SEQ ID NO: 2477710 - RNA, 19 nt, Homo sapiens
  misc_RNA (1)...(19): siRNA sense strand
gggcauguuuugugagguu

SEQ ID NO: 2477711 - RNA, 19 nt, Homo sapiens
  misc_RNA (1)...(19): siRNA sense strand
ccucaaagcaaugaccaaa

SEQ ID NO: 2477712 - RNA, 19 nt, Homo sapiens
  misc_RNA (1)...(19): siRNA sense strand
gaggaggaggcuaaagaga

SEQ ID NO: 2477713 - RNA, 19 nt, Homo sapiens
  misc_RNA (1)...(19): siRNA sense strand
uuaagaugaugauggccaa

SEQ ID NO: 2477714 - RNA, 19 nt, Homo sapiens
  misc_RNA (1)...(19): siRNA sense strand
gggccagaaggcagcgaau

SEQ ID NO: 2477715 - RNA, 19 nt, Homo sapiens
  misc_RNA (1)...(19): siRNA sense strand
aggagcagaagaagaagaa

SEQ ID NO: 2477716 - RNA, 19 nt, Homo sapiens
  misc_RNA (1)...(19): siRNA sense strand
ccucgaagagagagcuuga

SEQ ID NO: 2477717 - RNA, 19 nt, Homo sapiens
  misc_RNA (1)...(19): siRNA sense strand
agauguaccucgaggaccu

SEQ ID NO: 2477718 - RNA, 19 nt, Homo sapiens
  misc_RNA (1)...(19): siRNA sense strand
ggugcugggacuuggagua

SEQ ID NO: 2477719 - RNA, 19 nt, Homo sapiens
  misc_RNA (1)...(19): siRNA sense strand
agaagcuaguaaaggccaa

SEQ ID NO: 2477720 - RNA, 19 nt, Homo sapiens
  misc_RNA (1)...(19): siRNA sense strand
uguuugaagucauuggaga

SEQ ID NO: 2477721 - RNA, 19 nt, Homo sapiens
  misc_RNA (1)...(19): siRNA sense strand
aaaugcaagcuuuggagaa

SEQ ID NO: 2477722 - RNA, 19 nt, Homo sapiens
  misc_RNA (1)...(19): siRNA sense strand
aagaggagaagcuaguaaa

SEQ ID NO: 2477723 - RNA, 19 nt, Homo sapiens
  misc_RNA (1)...(19): siRNA sense strand
gggaagccaauaugaucaa

SEQ ID NO: 2477724 - RNA, 19 nt, Homo sapiens
  misc_RNA (1)...(19): siRNA sense strand
augaagaggaauuggaaag

SEQ ID NO: 2477725 - RNA, 19 nt, Homo sapiens
  misc_RNA (1)...(19): siRNA sense strand
agaugaugauggccaagaa

SEQ ID NO: 2477726 - RNA, 19 nt, Homo sapiens
  misc_RNA (1)...(19): siRNA sense strand
uggcaguuuaccuaggaaa

SEQ ID NO: 2477727 - RNA, 19 nt, Homo sapiens
  misc_RNA (1)...(19): siRNA sense strand
cacaaugaacuuuaaggaa

SEQ ID NO: 2477728 - RNA, 19 nt, Homo sapiens
  misc_RNA (1)...(19): siRNA sense strand
ggaugaagaaacaaggaag

SEQ ID NO: 2477729 - RNA, 19 nt, Homo sapiens
  misc_RNA (1)...(19): siRNA sense strand
gaugaugauggccaagaaa

SEQ ID NO: 2477730 - RNA, 19 nt, Homo sapiens
  misc_RNA (1)...(19): siRNA sense strand
ugaugauggagguggagau

SEQ ID NO: 2477731 - RNA, 19 nt, Homo sapiens
  misc_RNA (1)...(19): siRNA sense strand
aaccugaaccagaggauga

SEQ ID NO: 2477732 - RNA, 19 nt, Homo sapiens
  misc_RNA (1)...(19): siRNA sense strand
accagaggaugaagaaaca

SEQ ID NO: 2477733 - RNA, 19 nt, Homo sapiens
  misc_RNA (1)...(19): siRNA sense strand
cggcaauccugaaacagca

SEQ ID NO: 2477734 - RNA, 19 nt, Homo sapiens
  misc_RNA (1)...(19): siRNA sense strand
caaaaugcgaaacaagaaa

SEQ ID NO: 2477735 - RNA, 19 nt, Homo sapiens
  misc_RNA (1)...(19): siRNA sense strand
cgacagagaaggaagccau

SEQ ID NO: 2477736 - RNA, 19 nt, Homo sapiens
  misc_RNA (1)...(19): siRNA sense strand
gggaagacacgcugagggu

SEQ ID NO: 2477737 - RNA, 19 nt, Homo sapiens
  misc_RNA (1)...(19): siRNA sense strand
aggaggaggcagaagucau

SEQ ID NO: 2477738 - RNA, 19 nt, Homo sapiens
  misc_RNA (1)...(19): siRNA sense strand
aggcaugcugggagcguca

SEQ ID NO: 2477739 - RNA, 19 nt, Homo sapiens
  misc_RNA (1)...(19): siRNA sense strand
ccgcaaguugaguggagga

SEQ ID NO: 2477740 - RNA, 19 nt, Homo sapiens
  misc_RNA (1)...(19): siRNA sense strand
cgacagagaaggaagccau

SEQ ID NO: 2477741 - RNA, 19 nt, Homo sapiens
  misc_RNA (1)...(19): siRNA sense strand
gaugacagcucucgcccaa

SEQ ID NO: 2477742 - RNA, 19 nt, Homo sapiens
  misc_RNA (1)...(19): siRNA sense strand
gggaagacacgcugagggu

SEQ ID NO: 2477743 - RNA, 19 nt, Homo sapiens
  misc_RNA (1)...(19): siRNA sense strand
aggaggaggcagaagucau

SEQ ID NO: 2477744 - RNA, 19 nt, Homo sapiens
  misc_RNA (1)...(19): siRNA sense strand
aggcaugcugggagcguca

SEQ ID NO: 2477745 - RNA, 19 nt, Homo sapiens
  misc_RNA (1)...(19): siRNA sense strand
ccgcaaguugaguggagga

SEQ ID NO: 2477746 - RNA, 19 nt, Homo sapiens
  misc_RNA (1)...(19): siRNA sense strand
uggaaagccuggaagguga

SEQ ID NO: 2477747 - RNA, 19 nt, Homo sapiens
  misc_RNA (1)...(19): siRNA sense strand
cgguggugguaguggauga

SEQ ID NO: 2477748 - RNA, 19 nt, Homo sapiens
  misc_RNA (1)...(19): siRNA sense strand
caaucaaguuuguaggagu

SEQ ID NO: 2477749 - RNA, 19 nt, Homo sapiens
  misc_RNA (1)...(19): siRNA sense strand
gcaguagacaucagggaca

SEQ ID NO: 2477750 - RNA, 19 nt, Homo sapiens
  misc_RNA (1)...(19): siRNA sense strand
aggcaguggcguucaacaa

SEQ ID NO: 2477751 - RNA, 19 nt, Homo sapiens
  misc_RNA (1)...(19): siRNA sense strand
aggaagggacagagcuaga

SEQ ID NO: 2477752 - RNA, 19 nt, Homo sapiens
  misc_RNA (1)...(19): siRNA sense strand
gcauggaggcaguggcguu

SEQ ID NO: 2477753 - RNA, 19 nt, Homo sapiens
  misc_RNA (1)...(19): siRNA sense strand
gaccagaugacgaugggaa

SEQ ID NO: 2477754 - RNA, 19 nt, Homo sapiens
  misc_RNA (1)...(19): siRNA sense strand
cggauguggagaauggcaa

SEQ ID NO: 2477755 - RNA, 19 nt, Homo sapiens
  misc_RNA (1)...(19): siRNA sense strand
caucggagccggaaagcca

SEQ ID NO: 2477756 - RNA, 19 nt, Homo sapiens
  misc_RNA (1)...(19): siRNA sense strand
uggaugacggaguggaaca

SEQ ID NO: 2477757 - RNA, 19 nt, Homo sapiens
  misc_RNA (1)...(19): siRNA sense strand
gggugacgguggugguagu

SEQ ID NO: 2477758 - RNA, 19 nt, Homo sapiens
  misc_RNA (1)...(19): siRNA sense strand
caggagagaucgcggcugu

SEQ ID NO: 2477759 - RNA, 19 nt, Homo sapiens
  misc_RNA (1)...(19): siRNA sense strand
aguggaugacggaguggaa

SEQ ID NO: 2477760 - RNA, 19 nt, Homo sapiens
  misc_RNA (1)...(19): siRNA sense strand
acgggaaggaggagcagau

SEQ ID NO: 2477761 - RNA, 19 nt, Homo sapiens
  misc_RNA (1)...(19): siRNA sense strand
agccaaggaggaagggaca

SEQ ID NO: 2477762 - RNA, 19 nt, Homo sapiens
  misc_RNA (1)...(19): siRNA sense strand
ccaaggaggaagggacaga

SEQ ID NO: 2477763 - RNA, 19 nt, Homo sapiens
  misc_RNA (1)...(19): siRNA sense strand
agggacagagcuagaauca

SEQ ID NO: 2477764 - RNA, 19 nt, Homo sapiens
  misc_RNA (1)...(19): siRNA sense strand
cagacagcauggaggcagu

SEQ ID NO: 2477765 - RNA, 19 nt, Homo sapiens
  misc_RNA (1)...(19): siRNA sense strand
acgucagucccguguuaaa

SEQ ID NO: 2477766 - RNA, 19 nt, Homo sapiens
  misc_RNA (1)...(19): siRNA sense strand
ggugaagauguccaggaaa

SEQ ID NO: 2477767 - RNA, 19 nt, Homo sapiens
  misc_RNA (1)...(19): siRNA sense strand
cugccaacucugaaagaua

SEQ ID NO: 2477768 - RNA, 19 nt, Homo sapiens
  misc_RNA (1)...(19): siRNA sense strand
uguugauggaguugaaaua

SEQ ID NO: 2477769 - RNA, 19 nt, Homo sapiens
  misc_RNA (1)...(19): siRNA sense strand
caagaaauguauucagcca

SEQ ID NO: 2477770 - RNA, 19 nt, Homo sapiens
  misc_RNA (1)...(19): siRNA sense strand
acaucgacgucuauggaau

SEQ ID NO: 2477771 - RNA, 19 nt, Homo sapiens
  misc_RNA (1)...(19): siRNA sense strand
aaguggagugugaggagaa

SEQ ID NO: 2477772 - RNA, 19 nt, Homo sapiens
  misc_RNA (1)...(19): siRNA sense strand
ccgugaacccagaacagua

SEQ ID NO: 2477773 - RNA, 19 nt, Homo sapiens
  misc_RNA (1)...(19): siRNA sense strand
gcgggagagguuuggaauu

SEQ ID NO: 2477774 - RNA, 19 nt, Homo sapiens
  misc_RNA (1)...(19): siRNA sense strand
agguguacuucauggcaau

SEQ ID NO: 2477775 - RNA, 19 nt, Homo sapiens
  misc_RNA (1)...(19): siRNA sense strand
cagaugacuucaaagccua

SEQ ID NO: 2477776 - RNA, 19 nt, Homo sapiens
  misc_RNA (1)...(19): siRNA sense strand
gagguguacuucauggcaa

SEQ ID NO: 2477777 - RNA, 19 nt, Homo sapiens
  misc_RNA (1)...(19): siRNA sense strand
agaccaagaagaagcacuu

SEQ ID NO: 2477778 - RNA, 19 nt, Homo sapiens
  misc_RNA (1)...(19): siRNA sense strand
acagucugcuggugggaau

SEQ ID NO: 2477779 - RNA, 19 nt, Homo sapiens
  misc_RNA (1)...(19): siRNA sense strand
acuucaaagccuauucaaa

SEQ ID NO: 2477780 - RNA, 19 nt, Homo sapiens
  misc_RNA (1)...(19): siRNA sense strand
gugacaaagaaaaggccaa

SEQ ID NO: 2477781 - RNA, 19 nt, Homo sapiens
  misc_RNA (1)...(19): siRNA sense strand
cgaucaaugaacugagcca

SEQ ID NO: 2477782 - RNA, 19 nt, Homo sapiens
  misc_RNA (1)...(19): siRNA sense strand
gcgcagaaagugaagcugu

SEQ ID NO: 2477783 - RNA, 19 nt, Homo sapiens
  misc_RNA (1)...(19): siRNA sense strand
ggcuuaauguugauggagu

SEQ ID NO: 2477784 - RNA, 19 nt, Homo sapiens
  misc_RNA (1)...(19): siRNA sense strand
cgccuaggaaggaggugua

SEQ ID NO: 2477785 - RNA, 19 nt, Homo sapiens
  misc_RNA (1)...(19): siRNA sense strand
uugucuguguauaggaaau

SEQ ID NO: 2477786 - RNA, 19 nt, Homo sapiens
  misc_RNA (1)...(19): siRNA sense strand
ccgaacaggaggaagugga

SEQ ID NO: 2477787 - RNA, 19 nt, Homo sapiens
  misc_RNA (1)...(19): siRNA sense strand
ccauccaggccgagaagaa

SEQ ID NO: 2477788 - RNA, 19 nt, Homo sapiens
  misc_RNA (1)...(19): siRNA sense strand
ccaagaagucaguggccuu

SEQ ID NO: 2477789 - RNA, 19 nt, Homo sapiens
  misc_RNA (1)...(19): siRNA sense strand
agaaguauaucaagagcca

SEQ ID NO: 2477790 - RNA, 19 nt, Homo sapiens
  misc_RNA (1)...(19): siRNA sense strand
agucaguggccuucaagaa

SEQ ID NO: 2477791 - RNA, 19 nt, Homo sapiens
  misc_RNA (1)...(19): siRNA sense strand
cuacaaggugggugagaac

SEQ ID NO: 2477792 - RNA, 19 nt, Homo sapiens
  misc_RNA (1)...(19): siRNA sense strand
cggucaagaaggccaagaa

SEQ ID NO: 2477793 - RNA, 19 nt, Homo sapiens
  misc_RNA (1)...(19): siRNA sense strand
aaagcaaaguccagugcca

SEQ ID NO: 2477794 - RNA, 19 nt, Homo sapiens
  misc_RNA (1)...(19): siRNA sense strand
acgcugacucgcagaucaa

SEQ ID NO: 2477795 - RNA, 19 nt, Homo sapiens
  misc_RNA (1)...(19): siRNA sense strand
agaagaccaagaaggaaau

SEQ ID NO: 2477796 - RNA, 19 nt, Homo sapiens
  misc_RNA (1)...(19): siRNA sense strand
agaagguagccacgccaaa

SEQ ID NO: 2477797 - RNA, 19 nt, Homo sapiens
  misc_RNA (1)...(19): siRNA sense strand
ccaagacugucaaagccaa

SEQ ID NO: 2477798 - RNA, 19 nt, Homo sapiens
  misc_RNA (1)...(19): siRNA sense strand
ccaagagcgacgaacccaa

SEQ ID NO: 2477799 - RNA, 19 nt, Homo sapiens
  misc_RNA (1)...(19): siRNA sense strand
gcaugacaacugugggcua

SEQ ID NO: 2477800 - RNA, 19 nt, Homo sapiens
  misc_RNA (1)...(19): siRNA sense strand
cggucaccuuggcgggaaa

SEQ ID NO: 2477801 - RNA, 19 nt, Homo sapiens
  misc_RNA (1)...(19): siRNA sense strand
uugagaaagagcuggagaa

SEQ ID NO: 2477802 - RNA, 19 nt, Homo sapiens
  misc_RNA (1)...(19): siRNA sense strand
ggaccagugcagugaggau

SEQ ID NO: 2477803 - RNA, 19 nt, Homo sapiens
  misc_RNA (1)...(19): siRNA sense strand
auauugagaacaugggcaa

SEQ ID NO: 2477804 - RNA, 19 nt, Homo sapiens
  misc_RNA (1)...(19): siRNA sense strand
uugaagacaaugaggacau

SEQ ID NO: 2477805 - RNA, 19 nt, Homo sapiens
  misc_RNA (1)...(19): siRNA sense strand
aggaaaaccacgagaagga

SEQ ID NO: 2477806 - RNA, 19 nt, Homo sapiens
  misc_RNA (1)...(19): siRNA sense strand
aggauggagaaguggauga

SEQ ID NO: 2477807 - RNA, 19 nt, Homo sapiens
  misc_RNA (1)...(19): siRNA sense strand
aaguacuaccagaagcaaa

SEQ ID NO: 2477808 - RNA, 19 nt, Homo sapiens
  misc_RNA (1)...(19): siRNA sense strand
cuguagacaccaaggagga

SEQ ID NO: 2477809 - RNA, 19 nt, Homo sapiens
  misc_RNA (1)...(19): siRNA sense strand
aggaacgcaaggaggaaaa

SEQ ID NO: 2477810 - RNA, 19 nt, Homo sapiens
  misc_RNA (1)...(19): siRNA sense strand
auauauaugcacagcggau

SEQ ID NO: 2477811 - RNA, 19 nt, Homo sapiens
  misc_RNA (1)...(19): siRNA sense strand
aguacuaccagaagcaaaa

SEQ ID NO: 2477812 - RNA, 19 nt, Homo sapiens
  misc_RNA (1)...(19): siRNA sense strand
auggaggagcugugcguau

SEQ ID NO: 2477813 - RNA, 19 nt, Homo sapiens
  misc_RNA (1)...(19): siRNA sense strand
cuggacaagacgaggaacu

SEQ ID NO: 2477814 - RNA, 19 nt, Homo sapiens
  misc_RNA (1)...(19): siRNA sense strand
gcguacugccuguccgcua

SEQ ID NO: 2477815 - RNA, 19 nt, Homo sapiens
  misc_RNA (1)...(19): siRNA sense strand
cuaccaugaaguugggcuu

SEQ ID NO: 2477816 - RNA, 19 nt, Homo sapiens
  misc_RNA (1)...(19): siRNA sense strand
aagaagaugaacagagaaa

SEQ ID NO: 2477817 - RNA, 19 nt, Homo sapiens
  misc_RNA (1)...(19): siRNA sense strand
agaaagacaaagagcagaa

SEQ ID NO: 2477818 - RNA, 19 nt, Homo sapiens
  misc_RNA (1)...(19): siRNA sense strand
agaugaacagagaaagaaa

SEQ ID NO: 2477819 - RNA, 19 nt, Homo sapiens
  misc_RNA (1)...(19): siRNA sense strand
gguggaauuaggaggagaa

SEQ ID NO: 2477820 - RNA, 19 nt, Homo sapiens
  misc_RNA (1)...(19): siRNA sense strand
ggaaaggaucaguugccaa

SEQ ID NO: 2477821 - RNA, 19 nt, Homo sapiens
  misc_RNA (1)...(19): siRNA sense strand
gcuugaagaaagacaaaga

SEQ ID NO: 2477822 - RNA, 19 nt, Homo sapiens
  misc_RNA (1)...(19): siRNA sense strand
aaggaaauucagugggaga

SEQ ID NO: 2477823 - RNA, 19 nt, Homo sapiens
  misc_RNA (1)...(19): siRNA sense strand
aagaagaaagugaggaagu

SEQ ID NO: 2477824 - RNA, 19 nt, Homo sapiens
  misc_RNA (1)...(19): siRNA sense strand
cucaaagagacaacaaaua

SEQ ID NO: 2477825 - RNA, 19 nt, Homo sapiens
  misc_RNA (1)...(19): siRNA sense strand
guguaacauuuguggcuga

SEQ ID NO: 2477826 - RNA, 19 nt, Homo sapiens
  misc_RNA (1)...(19): siRNA sense strand
gaagaaagacaaagagcag

SEQ ID NO: 2477827 - RNA, 19 nt, Homo sapiens
  misc_RNA (1)...(19): siRNA sense strand
agacauugaugcagcaacu

SEQ ID NO: 2477828 - RNA, 19 nt, Homo sapiens
  misc_RNA (1)...(19): siRNA sense strand
caucagacuccuacaccaa

SEQ ID NO: 2477829 - RNA, 19 nt, Homo sapiens
  misc_RNA (1)...(19): siRNA sense strand
agaaggaaauucaguggga

SEQ ID NO: 2477830 - RNA, 19 nt, Homo sapiens
  misc_RNA (1)...(19): siRNA sense strand
cguagaugcaauauaucaa

SEQ ID NO: 2477831 - RNA, 19 nt, Homo sapiens
  misc_RNA (1)...(19): siRNA sense strand
aggcuugaagaaagacaaa

SEQ ID NO: 2477832 - RNA, 19 nt, Homo sapiens
  misc_RNA (1)...(19): siRNA sense strand
aaaugauacugaagagaac

SEQ ID NO: 2477833 - RNA, 19 nt, Homo sapiens
  misc_RNA (1)...(19): siRNA sense strand
aaaacaggcuauagugcaa

SEQ ID NO: 2477834 - RNA, 19 nt, Homo sapiens
  misc_RNA (1)...(19): siRNA sense strand
acaaagagcagaagcccga

SEQ ID NO: 2477835 - RNA, 19 nt, Homo sapiens
  misc_RNA (1)...(19): siRNA sense strand
ugccuauaaucaagaagaa

SEQ ID NO: 2477836 - RNA, 19 nt, Homo sapiens
  misc_RNA (1)...(19): siRNA sense strand
ggaaauucagugggagaca

SEQ ID NO: 2477837 - RNA, 19 nt, Homo sapiens
  misc_RNA (1)...(19): siRNA sense strand
aggcagggucuguggagga

SEQ ID NO: 2477838 - RNA, 19 nt, Homo sapiens
  misc_RNA (1)...(19): siRNA sense strand
gccuauaaucaagaagaaa

SEQ ID NO: 2477839 - RNA, 19 nt, Homo sapiens
  misc_RNA (1)...(19): siRNA sense strand
acacacagcagcucgggaa

SEQ ID NO: 2477840 - RNA, 19 nt, Homo sapiens
  misc_RNA (1)...(19): siRNA sense strand
cggaccuguuugugagcau

SEQ ID NO: 2477841 - RNA, 19 nt, Homo sapiens
  misc_RNA (1)...(19): siRNA sense strand
ggguggaauuaggaggaga

SEQ ID NO: 2477842 - RNA, 19 nt, Homo sapiens
  misc_RNA (1)...(19): siRNA sense strand
ggaagaucagaacgaguau

SEQ ID NO: 2477843 - RNA, 19 nt, Homo sapiens
  misc_RNA (1)...(19): siRNA sense strand
cccgagaaaggaaggagaa

SEQ ID NO: 2477844 - RNA, 19 nt, Homo sapiens
  misc_RNA (1)...(19): siRNA sense strand
gggaaggaaaggaucaguu

SEQ ID NO: 2477845 - RNA, 19 nt, Homo sapiens
  misc_RNA (1)...(19): siRNA sense strand
gcaaagaagaugaacagag

SEQ ID NO: 2477846 - RNA, 19 nt, Homo sapiens
  misc_RNA (1)...(19): siRNA sense strand
gcaaauaucaucuuccaca

SEQ ID NO: 2477847 - RNA, 19 nt, Homo sapiens
  misc_RNA (1)...(19): siRNA sense strand
ugaagaaagacaaagagca

SEQ ID NO: 2477848 - RNA, 19 nt, Homo sapiens
  misc_RNA (1)...(19): siRNA sense strand
agaaguugccuauaaucaa

SEQ ID NO: 2477849 - RNA, 19 nt, Homo sapiens
  misc_RNA (1)...(19): siRNA sense strand
gaugaacagagaaagaaaa

SEQ ID NO: 2477850 - RNA, 19 nt, Homo sapiens
  misc_RNA (1)...(19): siRNA sense strand
aaaauaugcaacaggggaa

SEQ ID NO: 2477851 - RNA, 19 nt, Homo sapiens
  misc_RNA (1)...(19): siRNA sense strand
gcaugguagaaucaauuaa

SEQ ID NO: 2477852 - RNA, 19 nt, Homo sapiens
  misc_RNA (1)...(19): siRNA sense strand
cagaagcccgagaaaggaa

SEQ ID NO: 2477853 - RNA, 19 nt, Homo sapiens
  misc_RNA (1)...(19): siRNA sense strand
aagugaggaaguuggaaga

SEQ ID NO: 2477854 - RNA, 19 nt, Homo sapiens
  misc_RNA (1)...(19): siRNA sense strand
aguuggaagaucagaacga

SEQ ID NO: 2477855 - RNA, 19 nt, Homo sapiens
  misc_RNA (1)...(19): siRNA sense strand
augcagcaacugaagcaaa

SEQ ID NO: 2477856 - RNA, 19 nt, Homo sapiens
  misc_RNA (1)...(19): siRNA sense strand
acaugaugacagagaugau

SEQ ID NO: 2477857 - RNA, 19 nt, Homo sapiens
  misc_RNA (1)...(19): siRNA sense strand
agauacaauucaaugcuca

SEQ ID NO: 2477858 - RNA, 19 nt, Homo sapiens
  misc_RNA (1)...(19): siRNA sense strand
gcauuguguugcugcagau

SEQ ID NO: 2477859 - RNA, 19 nt, Homo sapiens
  misc_RNA (1)...(19): siRNA sense strand
agagcagaagcccgagaaa

SEQ ID NO: 2477860 - RNA, 19 nt, Homo sapiens
  misc_RNA (1)...(19): siRNA sense strand
cagugggagacaagguuau

SEQ ID NO: 2477861 - RNA, 19 nt, Homo sapiens
  misc_RNA (1)...(19): siRNA sense strand
cugcaaagaagaugaacag

SEQ ID NO: 2477862 - RNA, 19 nt, Homo sapiens
  misc_RNA (1)...(19): siRNA sense strand
gcauuagugaccagaagga

SEQ ID NO: 2477863 - RNA, 19 nt, Homo sapiens
  misc_RNA (1)...(19): siRNA sense strand
aauuaggaggagaaugcaa

SEQ ID NO: 2477864 - RNA, 19 nt, Homo sapiens
  misc_RNA (1)...(19): siRNA sense strand
agaaagacaaagagcagaa

SEQ ID NO: 2477865 - RNA, 19 nt, Homo sapiens
  misc_RNA (1)...(19): siRNA sense strand
gguggaauuaggaggagaa

SEQ ID NO: 2477866 - RNA, 19 nt, Homo sapiens
  misc_RNA (1)...(19): siRNA sense strand
ggaaaggaucaguugccaa

SEQ ID NO: 2477867 - RNA, 19 nt, Homo sapiens
  misc_RNA (1)...(19): siRNA sense strand
gcuugaagaaagacaaaga

SEQ ID NO: 2477868 - RNA, 19 nt, Homo sapiens
  misc_RNA (1)...(19): siRNA sense strand
aaggaaauucagugggaga

SEQ ID NO: 2477869 - RNA, 19 nt, Homo sapiens
  misc_RNA (1)...(19): siRNA sense strand
aagaagaaagugaggaagu

SEQ ID NO: 2477870 - RNA, 19 nt, Homo sapiens
  misc_RNA (1)...(19): siRNA sense strand
guguaacauuuguggcuga

SEQ ID NO: 2477871 - RNA, 19 nt, Homo sapiens
  misc_RNA (1)...(19): siRNA sense strand
gaagaaagacaaagagcag

SEQ ID NO: 2477872 - RNA, 19 nt, Homo sapiens
  misc_RNA (1)...(19): siRNA sense strand
agacauugaugcagcaacu

SEQ ID NO: 2477873 - RNA, 19 nt, Homo sapiens
  misc_RNA (1)...(19): siRNA sense strand
caucagacuccuacaccaa

SEQ ID NO: 2477874 - RNA, 19 nt, Homo sapiens
  misc_RNA (1)...(19): siRNA sense strand
agaaggaaauucaguggga

SEQ ID NO: 2477875 - RNA, 19 nt, Homo sapiens
  misc_RNA (1)...(19): siRNA sense strand
cguagaugcaauauaucaa

SEQ ID NO: 2477876 - RNA, 19 nt, Homo sapiens
  misc_RNA (1)...(19): siRNA sense strand
aggcuugaagaaagacaaa

SEQ ID NO: 2477877 - RNA, 19 nt, Homo sapiens
  misc_RNA (1)...(19): siRNA sense strand
aaaugauacugaagagaac

SEQ ID NO: 2477878 - RNA, 19 nt, Homo sapiens
  misc_RNA (1)...(19): siRNA sense strand
aaaacaggcuauagugcaa

SEQ ID NO: 2477879 - RNA, 19 nt, Homo sapiens
  misc_RNA (1)...(19): siRNA sense strand
acaaagagcagaagcccga

SEQ ID NO: 2477880 - RNA, 19 nt, Homo sapiens
  misc_RNA (1)...(19): siRNA sense strand
ugccuauaaucaagaagaa

SEQ ID NO: 2477881 - RNA, 19 nt, Homo sapiens
  misc_RNA (1)...(19): siRNA sense strand
ggaaauucagugggagaca

SEQ ID NO: 2477882 - RNA, 19 nt, Homo sapiens
  misc_RNA (1)...(19): siRNA sense strand
aggcagggucuguggagga

SEQ ID NO: 2477883 - RNA, 19 nt, Homo sapiens
  misc_RNA (1)...(19): siRNA sense strand
gccuauaaucaagaagaaa

SEQ ID NO: 2477884 - RNA, 19 nt, Homo sapiens
  misc_RNA (1)...(19): siRNA sense strand
acacacagcagcucgggaa

SEQ ID NO: 2477885 - RNA, 19 nt, Homo sapiens
  misc_RNA (1)...(19): siRNA sense strand
cggaccuguuugugagcau

SEQ ID NO: 2477886 - RNA, 19 nt, Homo sapiens
  misc_RNA (1)...(19): siRNA sense strand
ggguggaauuaggaggaga

SEQ ID NO: 2477887 - RNA, 19 nt, Homo sapiens
  misc_RNA (1)...(19): siRNA sense strand
ggaagaucagaacgaguau

SEQ ID NO: 2477888 - RNA, 19 nt, Homo sapiens
  misc_RNA (1)...(19): siRNA sense strand
cccgagaaaggaaggagaa

SEQ ID NO: 2477889 - RNA, 19 nt, Homo sapiens
  misc_RNA (1)...(19): siRNA sense strand
gggaaggaaaggaucaguu

SEQ ID NO: 2477890 - RNA, 19 nt, Homo sapiens
  misc_RNA (1)...(19): siRNA sense strand
gcaaauaucaucuuccaca

SEQ ID NO: 2477891 - RNA, 19 nt, Homo sapiens
  misc_RNA (1)...(19): siRNA sense strand
ugaagaaagacaaagagca

SEQ ID NO: 2477892 - RNA, 19 nt, Homo sapiens
  misc_RNA (1)...(19): siRNA sense strand
agaaguugccuauaaucaa

SEQ ID NO: 2477893 - RNA, 19 nt, Homo sapiens
  misc_RNA (1)...(19): siRNA sense strand
aaaauaugcaacaggggaa

SEQ ID NO: 2477894 - RNA, 19 nt, Homo sapiens
  misc_RNA (1)...(19): siRNA sense strand
cagaagcccgagaaaggaa

SEQ ID NO: 2477895 - RNA, 19 nt, Homo sapiens
  misc_RNA (1)...(19): siRNA sense strand
aagugaggaaguuggaaga

SEQ ID NO: 2477896 - RNA, 19 nt, Homo sapiens
  misc_RNA (1)...(19): siRNA sense strand
aguuggaagaucagaacga

SEQ ID NO: 2477897 - RNA, 19 nt, Homo sapiens
  misc_RNA (1)...(19): siRNA sense strand
augcagcaacugaagcaaa

SEQ ID NO: 2477898 - RNA, 19 nt, Homo sapiens
  misc_RNA (1)...(19): siRNA sense strand
acaugaugacagagaugau

SEQ ID NO: 2477899 - RNA, 19 nt, Homo sapiens
  misc_RNA (1)...(19): siRNA sense strand
agauacaauucaaugcuca

SEQ ID NO: 2477900 - RNA, 19 nt, Homo sapiens
  misc_RNA (1)...(19): siRNA sense strand
gcauuguguugcugcagau

SEQ ID NO: 2477901 - RNA, 19 nt, Homo sapiens
  misc_RNA (1)...(19): siRNA sense strand
agagcagaagcccgagaaa

SEQ ID NO: 2477902 - RNA, 19 nt, Homo sapiens
  misc_RNA (1)...(19): siRNA sense strand
cagugggagacaagguuau

SEQ ID NO: 2477903 - RNA, 19 nt, Homo sapiens
  misc_RNA (1)...(19): siRNA sense strand
gcauuagugaccagaagga

SEQ ID NO: 2477904 - RNA, 19 nt, Homo sapiens
  misc_RNA (1)...(19): siRNA sense strand
aauuaggaggagaaugcaa

SEQ ID NO: 2477905 - RNA, 19 nt, Homo sapiens
  misc_RNA (1)...(19): siRNA sense strand
agaaagacaaagagcagaa

SEQ ID NO: 2477906 - RNA, 19 nt, Homo sapiens
  misc_RNA (1)...(19): siRNA sense strand
gguggaauuaggaggagaa

SEQ ID NO: 2477907 - RNA, 19 nt, Homo sapiens
  misc_RNA (1)...(19): siRNA sense strand
ggaaaggaucaguugccaa

SEQ ID NO: 2477908 - RNA, 19 nt, Homo sapiens
  misc_RNA (1)...(19): siRNA sense strand
gcuugaagaaagacaaaga

SEQ ID NO: 2477909 - RNA, 19 nt, Homo sapiens
  misc_RNA (1)...(19): siRNA sense strand
aaggaaauucagugggaga

SEQ ID NO: 2477910 - RNA, 19 nt, Homo sapiens
  misc_RNA (1)...(19): siRNA sense strand
aagaagaaagugaggaagu

SEQ ID NO: 2477911 - RNA, 19 nt, Homo sapiens
  misc_RNA (1)...(19): siRNA sense strand
guguaacauuuguggcuga

SEQ ID NO: 2477912 - RNA, 19 nt, Homo sapiens
  misc_RNA (1)...(19): siRNA sense strand
gaagaaagacaaagagcag

SEQ ID NO: 2477913 - RNA, 19 nt, Homo sapiens
  misc_RNA (1)...(19): siRNA sense strand
agacauugaugcagcaacu

SEQ ID NO: 2477914 - RNA, 19 nt, Homo sapiens
  misc_RNA (1)...(19): siRNA sense strand
caucagacuccuacaccaa

SEQ ID NO: 2477915 - RNA, 19 nt, Homo sapiens
  misc_RNA (1)...(19): siRNA sense strand
agaaggaaauucaguggga

SEQ ID NO: 2477916 - RNA, 19 nt, Homo sapiens
  misc_RNA (1)...(19): siRNA sense strand
cguagaugcaauauaucaa

SEQ ID NO: 2477917 - RNA, 19 nt, Homo sapiens
  misc_RNA (1)...(19): siRNA sense strand
aggcuugaagaaagacaaa

SEQ ID NO: 2477918 - RNA, 19 nt, Homo sapiens
  misc_RNA (1)...(19): siRNA sense strand
aaaugauacugaagagaac

SEQ ID NO: 2477919 - RNA, 19 nt, Homo sapiens
  misc_RNA (1)...(19): siRNA sense strand
aaaacaggcuauagugcaa

SEQ ID NO: 2477920 - RNA, 19 nt, Homo sapiens
  misc_RNA (1)...(19): siRNA sense strand
acaaagagcagaagcccga

SEQ ID NO: 2477921 - RNA, 19 nt, Homo sapiens
  misc_RNA (1)...(19): siRNA sense strand
ugccuauaaucaagaagaa

SEQ ID NO: 2477922 - RNA, 19 nt, Homo sapiens
  misc_RNA (1)...(19): siRNA sense strand
ggaaauucagugggagaca

SEQ ID NO: 2477923 - RNA, 19 nt, Homo sapiens
  misc_RNA (1)...(19): siRNA sense strand
aggcagggucuguggagga

SEQ ID NO: 2477924 - RNA, 19 nt, Homo sapiens
  misc_RNA (1)...(19): siRNA sense strand
gccuauaaucaagaagaaa

SEQ ID NO: 2477925 - RNA, 19 nt, Homo sapiens
  misc_RNA (1)...(19): siRNA sense strand
acacacagcagcucgggaa

SEQ ID NO: 2477926 - RNA, 19 nt, Homo sapiens
  misc_RNA (1)...(19): siRNA sense strand
cggaccuguuugugagcau

SEQ ID NO: 2477927 - RNA, 19 nt, Homo sapiens
  misc_RNA (1)...(19): siRNA sense strand
ggguggaauuaggaggaga

SEQ ID NO: 2477928 - RNA, 19 nt, Homo sapiens
  misc_RNA (1)...(19): siRNA sense strand
ggaagaucagaacgaguau

SEQ ID NO: 2477929 - RNA, 19 nt, Homo sapiens
  misc_RNA (1)...(19): siRNA sense strand
cccgagaaaggaaggagaa

SEQ ID NO: 2477930 - RNA, 19 nt, Homo sapiens
  misc_RNA (1)...(19): siRNA sense strand
gggaaggaaaggaucaguu

SEQ ID NO: 2477931 - RNA, 19 nt, Homo sapiens
  misc_RNA (1)...(19): siRNA sense strand
gcaaauaucaucuuccaca

SEQ ID NO: 2477932 - RNA, 19 nt, Homo sapiens
  misc_RNA (1)...(19): siRNA sense strand
ugaagaaagacaaagagca

SEQ ID NO: 2477933 - RNA, 19 nt, Homo sapiens
  misc_RNA (1)...(19): siRNA sense strand
agaaguugccuauaaucaa

SEQ ID NO: 2477934 - RNA, 19 nt, Homo sapiens
  misc_RNA (1)...(19): siRNA sense strand
aaaauaugcaacaggggaa

SEQ ID NO: 2477935 - RNA, 19 nt, Homo sapiens
  misc_RNA (1)...(19): siRNA sense strand
cagaagcccgagaaaggaa

SEQ ID NO: 2477936 - RNA, 19 nt, Homo sapiens
  misc_RNA (1)...(19): siRNA sense strand
aagugaggaaguuggaaga

SEQ ID NO: 2477937 - RNA, 19 nt, Homo sapiens
  misc_RNA (1)...(19): siRNA sense strand
aguuggaagaucagaacga

SEQ ID NO: 2477938 - RNA, 19 nt, Homo sapiens
  misc_RNA (1)...(19): siRNA sense strand
augcagcaacugaagcaaa

SEQ ID NO: 2477939 - RNA, 19 nt, Homo sapiens
  misc_RNA (1)...(19): siRNA sense strand
acaugaugacagagaugau

SEQ ID NO: 2477940 - RNA, 19 nt, Homo sapiens
  misc_RNA (1)...(19): siRNA sense strand
agauacaauucaaugcuca

SEQ ID NO: 2477941 - RNA, 19 nt, Homo sapiens
  misc_RNA (1)...(19): siRNA sense strand
gcauuguguugcugcagau

SEQ ID NO: 2477942 - RNA, 19 nt, Homo sapiens
  misc_RNA (1)...(19): siRNA sense strand
agagcagaagcccgagaaa

SEQ ID NO: 2477943 - RNA, 19 nt, Homo sapiens
  misc_RNA (1)...(19): siRNA sense strand
cagugggagacaagguuau

SEQ ID NO: 2477944 - RNA, 19 nt, Homo sapiens
  misc_RNA (1)...(19): siRNA sense strand
gcauuagugaccagaagga

SEQ ID NO: 2477945 - RNA, 19 nt, Homo sapiens
  misc_RNA (1)...(19): siRNA sense strand
aauuaggaggagaaugcaa

SEQ ID NO: 2477946 - RNA, 19 nt, Homo sapiens
  misc_RNA (1)...(19): siRNA sense strand
agaaagacaaagagcagaa

SEQ ID NO: 2477947 - RNA, 19 nt, Homo sapiens
  misc_RNA (1)...(19): siRNA sense strand
gguggaauuaggaggagaa

SEQ ID NO: 2477948 - RNA, 19 nt, Homo sapiens
  misc_RNA (1)...(19): siRNA sense strand
ggaaaggaucaguugccaa

SEQ ID NO: 2477949 - RNA, 19 nt, Homo sapiens
  misc_RNA (1)...(19): siRNA sense strand
gcuugaagaaagacaaaga

SEQ ID NO: 2477950 - RNA, 19 nt, Homo sapiens
  misc_RNA (1)...(19): siRNA sense strand
aaggaaauucagugggaga

SEQ ID NO: 2477951 - RNA, 19 nt, Homo sapiens
  misc_RNA (1)...(19): siRNA sense strand
aagaagaaagugaggaagu

SEQ ID NO: 2477952 - RNA, 19 nt, Homo sapiens
  misc_RNA (1)...(19): siRNA sense strand
guguaacauuuguggcuga

SEQ ID NO: 2477953 - RNA, 19 nt, Homo sapiens
  misc_RNA (1)...(19): siRNA sense strand
gaagaaagacaaagagcag

SEQ ID NO: 2477954 - RNA, 19 nt, Homo sapiens
  misc_RNA (1)...(19): siRNA sense strand
agacauugaugcagcaacu

SEQ ID NO: 2477955 - RNA, 19 nt, Homo sapiens
  misc_RNA (1)...(19): siRNA sense strand
caucagacuccuacaccaa

SEQ ID NO: 2477956 - RNA, 19 nt, Homo sapiens
  misc_RNA (1)...(19): siRNA sense strand
agaaggaaauucaguggga

SEQ ID NO: 2477957 - RNA, 19 nt, Homo sapiens
  misc_RNA (1)...(19): siRNA sense strand
cguagaugcaauauaucaa

SEQ ID NO: 2477958 - RNA, 19 nt, Homo sapiens
  misc_RNA (1)...(19): siRNA sense strand
aggcuugaagaaagacaaa

SEQ ID NO: 2477959 - RNA, 19 nt, Homo sapiens
  misc_RNA (1)...(19): siRNA sense strand
aaaugauacugaagagaac

SEQ ID NO: 2477960 - RNA, 19 nt, Homo sapiens
  misc_RNA (1)...(19): siRNA sense strand
aaaacaggcuauagugcaa

SEQ ID NO: 2477961 - RNA, 19 nt, Homo sapiens
  misc_RNA (1)...(19): siRNA sense strand
acaaagagcagaagcccga

SEQ ID NO: 2477962 - RNA, 19 nt, Homo sapiens
  misc_RNA (1)...(19): siRNA sense strand
ugccuauaaucaagaagaa

SEQ ID NO: 2477963 - RNA, 19 nt, Homo sapiens
  misc_RNA (1)...(19): siRNA sense strand
ggaaauucagugggagaca

SEQ ID NO: 2477964 - RNA, 19 nt, Homo sapiens
  misc_RNA (1)...(19): siRNA sense strand
aggcagggucuguggagga

SEQ ID NO: 2477965 - RNA, 19 nt, Homo sapiens
  misc_RNA (1)...(19): siRNA sense strand
gccuauaaucaagaagaaa

SEQ ID NO: 2477966 - RNA, 19 nt, Homo sapiens
  misc_RNA (1)...(19): siRNA sense strand
acacacagcagcucgggaa

SEQ ID NO: 2477967 - RNA, 19 nt, Homo sapiens
  misc_RNA (1)...(19): siRNA sense strand
cggaccuguuugugagcau

SEQ ID NO: 2477968 - RNA, 19 nt, Homo sapiens
  misc_RNA (1)...(19): siRNA sense strand
ggguggaauuaggaggaga

SEQ ID NO: 2477969 - RNA, 19 nt, Homo sapiens
  misc_RNA (1)...(19): siRNA sense strand
ggaagaucagaacgaguau

SEQ ID NO: 2477970 - RNA, 19 nt, Homo sapiens
  misc_RNA (1)...(19): siRNA sense strand
cccgagaaaggaaggagaa

SEQ ID NO: 2477971 - RNA, 19 nt, Homo sapiens
  misc_RNA (1)...(19): siRNA sense strand
gggaaggaaaggaucaguu

SEQ ID NO: 2477972 - RNA, 19 nt, Homo sapiens
  misc_RNA (1)...(19): siRNA sense strand
gcaaauaucaucuuccaca

SEQ ID NO: 2477973 - RNA, 19 nt, Homo sapiens
  misc_RNA (1)...(19): siRNA sense strand
ugaagaaagacaaagagca

SEQ ID NO: 2477974 - RNA, 19 nt, Homo sapiens
  misc_RNA (1)...(19): siRNA sense strand
agaaguugccuauaaucaa

SEQ ID NO: 2477975 - RNA, 19 nt, Homo sapiens
  misc_RNA (1)...(19): siRNA sense strand
aaaauaugcaacaggggaa

SEQ ID NO: 2477976 - RNA, 19 nt, Homo sapiens
  misc_RNA (1)...(19): siRNA sense strand
cagaagcccgagaaaggaa

SEQ ID NO: 2477977 - RNA, 19 nt, Homo sapiens
  misc_RNA (1)...(19): siRNA sense strand
aagugaggaaguuggaaga

SEQ ID NO: 2477978 - RNA, 19 nt, Homo sapiens
  misc_RNA (1)...(19): siRNA sense strand
aguuggaagaucagaacga

SEQ ID NO: 2477979 - RNA, 19 nt, Homo sapiens
  misc_RNA (1)...(19): siRNA sense strand
augcagcaacugaagcaaa

SEQ ID NO: 2477980 - RNA, 19 nt, Homo sapiens
  misc_RNA (1)...(19): siRNA sense strand
acaugaugacagagaugau

SEQ ID NO: 2477981 - RNA, 19 nt, Homo sapiens
  misc_RNA (1)...(19): siRNA sense strand
agauacaauucaaugcuca

SEQ ID NO: 2477982 - RNA, 19 nt, Homo sapiens
  misc_RNA (1)...(19): siRNA sense strand
gcauuguguugcugcagau

SEQ ID NO: 2477983 - RNA, 19 nt, Homo sapiens
  misc_RNA (1)...(19): siRNA sense strand
agagcagaagcccgagaaa

SEQ ID NO: 2477984 - RNA, 19 nt, Homo sapiens
  misc_RNA (1)...(19): siRNA sense strand
cagugggagacaagguuau

SEQ ID NO: 2477985 - RNA, 19 nt, Homo sapiens
  misc_RNA (1)...(19): siRNA sense strand
gcauuagugaccagaagga

SEQ ID NO: 2477986 - RNA, 19 nt, Homo sapiens
  misc_RNA (1)...(19): siRNA sense strand
aauuaggaggagaaugcaa

SEQ ID NO: 2477987 - RNA, 19 nt, Homo sapiens
  misc_RNA (1)...(19): siRNA sense strand
aagaagaugaacagagaaa

SEQ ID NO: 2477988 - RNA, 19 nt, Homo sapiens
  misc_RNA (1)...(19): siRNA sense strand
agaaagacaaagagcagaa

SEQ ID NO: 2477989 - RNA, 19 nt, Homo sapiens
  misc_RNA (1)...(19): siRNA sense strand
agaugaacagagaaagaaa

SEQ ID NO: 2477990 - RNA, 19 nt, Homo sapiens
  misc_RNA (1)...(19): siRNA sense strand
gguggaauuaggaggagaa

SEQ ID NO: 2477991 - RNA, 19 nt, Homo sapiens
  misc_RNA (1)...(19): siRNA sense strand
ggaaaggaucaguugccaa

SEQ ID NO: 2477992 - RNA, 19 nt, Homo sapiens
  misc_RNA (1)...(19): siRNA sense strand
gcuugaagaaagacaaaga

SEQ ID NO: 2477993 - RNA, 19 nt, Homo sapiens
  misc_RNA (1)...(19): siRNA sense strand
aaggaaauucagugggaga

SEQ ID NO: 2477994 - RNA, 19 nt, Homo sapiens
  misc_RNA (1)...(19): siRNA sense strand
aagaagaaagugaggaagu

SEQ ID NO: 2477995 - RNA, 19 nt, Homo sapiens
  misc_RNA (1)...(19): siRNA sense strand
cucaaagagacaacaaaua

SEQ ID NO: 2477996 - RNA, 19 nt, Homo sapiens
  misc_RNA (1)...(19): siRNA sense strand
guguaacauuuguggcuga

SEQ ID NO: 2477997 - RNA, 19 nt, Homo sapiens
  misc_RNA (1)...(19): siRNA sense strand
gaagaaagacaaagagcag

SEQ ID NO: 2477998 - RNA, 19 nt, Homo sapiens
  misc_RNA (1)...(19): siRNA sense strand
agacauugaugcagcaacu

SEQ ID NO: 2477999 - RNA, 19 nt, Homo sapiens
  misc_RNA (1)...(19): siRNA sense strand
caucagacuccuacaccaa

SEQ ID NO: 2478000 - RNA, 19 nt, Homo sapiens
  misc_RNA (1)...(19): siRNA sense strand
agaaggaaauucaguggga

SEQ ID NO: 2478001 - RNA, 19 nt, Homo sapiens
  misc_RNA (1)...(19): siRNA sense strand
cguagaugcaauauaucaa

SEQ ID NO: 2478002 - RNA, 19 nt, Homo sapiens
  misc_RNA (1)...(19): siRNA sense strand
aggcuugaagaaagacaaa

SEQ ID NO: 2478003 - RNA, 19 nt, Homo sapiens
  misc_RNA (1)...(19): siRNA sense strand
aaaugauacugaagagaac

SEQ ID NO: 2478004 - RNA, 19 nt, Homo sapiens
  misc_RNA (1)...(19): siRNA sense strand
aaaacaggcuauagugcaa

SEQ ID NO: 2478005 - RNA, 19 nt, Homo sapiens
  misc_RNA (1)...(19): siRNA sense strand
acaaagagcagaagcccga

SEQ ID NO: 2478006 - RNA, 19 nt, Homo sapiens
  misc_RNA (1)...(19): siRNA sense strand
ugccuauaaucaagaagaa

SEQ ID NO: 2478007 - RNA, 19 nt, Homo sapiens
  misc_RNA (1)...(19): siRNA sense strand
ggaaauucagugggagaca

SEQ ID NO: 2478008 - RNA, 19 nt, Homo sapiens
  misc_RNA (1)...(19): siRNA sense strand
aggcagggucuguggagga

SEQ ID NO: 2478009 - RNA, 19 nt, Homo sapiens
  misc_RNA (1)...(19): siRNA sense strand
gccuauaaucaagaagaaa

SEQ ID NO: 2478010 - RNA, 19 nt, Homo sapiens
  misc_RNA (1)...(19): siRNA sense strand
acacacagcagcucgggaa

SEQ ID NO: 2478011 - RNA, 19 nt, Homo sapiens
  misc_RNA (1)...(19): siRNA sense strand
cggaccuguuugugagcau

SEQ ID NO: 2478012 - RNA, 19 nt, Homo sapiens
  misc_RNA (1)...(19): siRNA sense strand
ggguggaauuaggaggaga

SEQ ID NO: 2478013 - RNA, 19 nt, Homo sapiens
  misc_RNA (1)...(19): siRNA sense strand
ggaagaucagaacgaguau

SEQ ID NO: 2478014 - RNA, 19 nt, Homo sapiens
  misc_RNA (1)...(19): siRNA sense strand
cccgagaaaggaaggagaa

SEQ ID NO: 2478015 - RNA, 19 nt, Homo sapiens
  misc_RNA (1)...(19): siRNA sense strand
gggaaggaaaggaucaguu

SEQ ID NO: 2478016 - RNA, 19 nt, Homo sapiens
  misc_RNA (1)...(19): siRNA sense strand
gcaaagaagaugaacagag

SEQ ID NO: 2478017 - RNA, 19 nt, Homo sapiens
  misc_RNA (1)...(19): siRNA sense strand
gcaaauaucaucuuccaca

SEQ ID NO: 2478018 - RNA, 19 nt, Homo sapiens
  misc_RNA (1)...(19): siRNA sense strand
ugaagaaagacaaagagca

SEQ ID NO: 2478019 - RNA, 19 nt, Homo sapiens
  misc_RNA (1)...(19): siRNA sense strand
agaaguugccuauaaucaa

SEQ ID NO: 2478020 - RNA, 19 nt, Homo sapiens
  misc_RNA (1)...(19): siRNA sense strand
gaugaacagagaaagaaaa

SEQ ID NO: 2478021 - RNA, 19 nt, Homo sapiens
  misc_RNA (1)...(19): siRNA sense strand
aaaauaugcaacaggggaa

SEQ ID NO: 2478022 - RNA, 19 nt, Homo sapiens
  misc_RNA (1)...(19): siRNA sense strand
gcaugguagaaucaauuaa

SEQ ID NO: 2478023 - RNA, 19 nt, Homo sapiens
  misc_RNA (1)...(19): siRNA sense strand
cagaagcccgagaaaggaa

SEQ ID NO: 2478024 - RNA, 19 nt, Homo sapiens
  misc_RNA (1)...(19): siRNA sense strand
aagugaggaaguuggaaga

SEQ ID NO: 2478025 - RNA, 19 nt, Homo sapiens
  misc_RNA (1)...(19): siRNA sense strand
aguuggaagaucagaacga

SEQ ID NO: 2478026 - RNA, 19 nt, Homo sapiens
  misc_RNA (1)...(19): siRNA sense strand
augcagcaacugaagcaaa

SEQ ID NO: 2478027 - RNA, 19 nt, Homo sapiens
  misc_RNA (1)...(19): siRNA sense strand
acaugaugacagagaugau

SEQ ID NO: 2478028 - RNA, 19 nt, Homo sapiens
  misc_RNA (1)...(19): siRNA sense strand
agauacaauucaaugcuca

SEQ ID NO: 2478029 - RNA, 19 nt, Homo sapiens
  misc_RNA (1)...(19): siRNA sense strand
gcauuguguugcugcagau

SEQ ID NO: 2478030 - RNA, 19 nt, Homo sapiens
  misc_RNA (1)...(19): siRNA sense strand
agagcagaagcccgagaaa

SEQ ID NO: 2478031 - RNA, 19 nt, Homo sapiens
  misc_RNA (1)...(19): siRNA sense strand
cagugggagacaagguuau

SEQ ID NO: 2478032 - RNA, 19 nt, Homo sapiens
  misc_RNA (1)...(19): siRNA sense strand
cugcaaagaagaugaacag

SEQ ID NO: 2478033 - RNA, 19 nt, Homo sapiens
  misc_RNA (1)...(19): siRNA sense strand
gcauuagugaccagaagga

SEQ ID NO: 2478034 - RNA, 19 nt, Homo sapiens
  misc_RNA (1)...(19): siRNA sense strand
aauuaggaggagaaugcaa

SEQ ID NO: 2478035 - RNA, 19 nt, Homo sapiens
  misc_RNA (1)...(19): siRNA sense strand
aagaagaugaacagagaaa

SEQ ID NO: 2478036 - RNA, 19 nt, Homo sapiens
  misc_RNA (1)...(19): siRNA sense strand
agaaagacaaagagcagaa

SEQ ID NO: 2478037 - RNA, 19 nt, Homo sapiens
  misc_RNA (1)...(19): siRNA sense strand
agaugaacagagaaagaaa

SEQ ID NO: 2478038 - RNA, 19 nt, Homo sapiens
  misc_RNA (1)...(19): siRNA sense strand
gguggaauuaggaggagaa

SEQ ID NO: 2478039 - RNA, 19 nt, Homo sapiens
  misc_RNA (1)...(19): siRNA sense strand
ggaaaggaucaguugccaa

SEQ ID NO: 2478040 - RNA, 19 nt, Homo sapiens
  misc_RNA (1)...(19): siRNA sense strand
gcuugaagaaagacaaaga

SEQ ID NO: 2478041 - RNA, 19 nt, Homo sapiens
  misc_RNA (1)...(19): siRNA sense strand
aaggaaauucagugggaga

SEQ ID NO: 2478042 - RNA, 19 nt, Homo sapiens
  misc_RNA (1)...(19): siRNA sense strand
aagaagaaagugaggaagu

SEQ ID NO: 2478043 - RNA, 19 nt, Homo sapiens
  misc_RNA (1)...(19): siRNA sense strand
cucaaagagacaacaaaua

SEQ ID NO: 2478044 - RNA, 19 nt, Homo sapiens
  misc_RNA (1)...(19): siRNA sense strand
guguaacauuuguggcuga

SEQ ID NO: 2478045 - RNA, 19 nt, Homo sapiens
  misc_RNA (1)...(19): siRNA sense strand
gaagaaagacaaagagcag

SEQ ID NO: 2478046 - RNA, 19 nt, Homo sapiens
  misc_RNA (1)...(19): siRNA sense strand
agacauugaugcagcaacu

SEQ ID NO: 2478047 - RNA, 19 nt, Homo sapiens
  misc_RNA (1)...(19): siRNA sense strand
caucagacuccuacaccaa

SEQ ID NO: 2478048 - RNA, 19 nt, Homo sapiens
  misc_RNA (1)...(19): siRNA sense strand
agaaggaaauucaguggga

SEQ ID NO: 2478049 - RNA, 19 nt, Homo sapiens
  misc_RNA (1)...(19): siRNA sense strand
cguagaugcaauauaucaa

SEQ ID NO: 2478050 - RNA, 19 nt, Homo sapiens
  misc_RNA (1)...(19): siRNA sense strand
aggcuugaagaaagacaaa

SEQ ID NO: 2478051 - RNA, 19 nt, Homo sapiens
  misc_RNA (1)...(19): siRNA sense strand
aaaugauacugaagagaac

SEQ ID NO: 2478052 - RNA, 19 nt, Homo sapiens
  misc_RNA (1)...(19): siRNA sense strand
aaaacaggcuauagugcaa

SEQ ID NO: 2478053 - RNA, 19 nt, Homo sapiens
  misc_RNA (1)...(19): siRNA sense strand
acaaagagcagaagcccga

SEQ ID NO: 2478054 - RNA, 19 nt, Homo sapiens
  misc_RNA (1)...(19): siRNA sense strand
ugccuauaaucaagaagaa

SEQ ID NO: 2478055 - RNA, 19 nt, Homo sapiens
  misc_RNA (1)...(19): siRNA sense strand
ggaaauucagugggagaca

SEQ ID NO: 2478056 - RNA, 19 nt, Homo sapiens
  misc_RNA (1)...(19): siRNA sense strand
aggcagggucuguggagga

SEQ ID NO: 2478057 - RNA, 19 nt, Homo sapiens
  misc_RNA (1)...(19): siRNA sense strand
gccuauaaucaagaagaaa

SEQ ID NO: 2478058 - RNA, 19 nt, Homo sapiens
  misc_RNA (1)...(19): siRNA sense strand
acacacagcagcucgggaa

SEQ ID NO: 2478059 - RNA, 19 nt, Homo sapiens
  misc_RNA (1)...(19): siRNA sense strand
cggaccuguuugugagcau

SEQ ID NO: 2478060 - RNA, 19 nt, Homo sapiens
  misc_RNA (1)...(19): siRNA sense strand
ggguggaauuaggaggaga

SEQ ID NO: 2478061 - RNA, 19 nt, Homo sapiens
  misc_RNA (1)...(19): siRNA sense strand
ggaagaucagaacgaguau

SEQ ID NO: 2478062 - RNA, 19 nt, Homo sapiens
  misc_RNA (1)...(19): siRNA sense strand
cccgagaaaggaaggagaa

SEQ ID NO: 2478063 - RNA, 19 nt, Homo sapiens
  misc_RNA (1)...(19): siRNA sense strand
gggaaggaaaggaucaguu

SEQ ID NO: 2478064 - RNA, 19 nt, Homo sapiens
  misc_RNA (1)...(19): siRNA sense strand
gcaaagaagaugaacagag

SEQ ID NO: 2478065 - RNA, 19 nt, Homo sapiens
  misc_RNA (1)...(19): siRNA sense strand
gcaaauaucaucuuccaca

SEQ ID NO: 2478066 - RNA, 19 nt, Homo sapiens
  misc_RNA (1)...(19): siRNA sense strand
ugaagaaagacaaagagca

SEQ ID NO: 2478067 - RNA, 19 nt, Homo sapiens
  misc_RNA (1)...(19): siRNA sense strand
agaaguugccuauaaucaa

SEQ ID NO: 2478068 - RNA, 19 nt, Homo sapiens
  misc_RNA (1)...(19): siRNA sense strand
gaugaacagagaaagaaaa

SEQ ID NO: 2478069 - RNA, 19 nt, Homo sapiens
  misc_RNA (1)...(19): siRNA sense strand
aaaauaugcaacaggggaa

SEQ ID NO: 2478070 - RNA, 19 nt, Homo sapiens
  misc_RNA (1)...(19): siRNA sense strand
gcaugguagaaucaauuaa

SEQ ID NO: 2478071 - RNA, 19 nt, Homo sapiens
  misc_RNA (1)...(19): siRNA sense strand
cagaagcccgagaaaggaa

SEQ ID NO: 2478072 - RNA, 19 nt, Homo sapiens
  misc_RNA (1)...(19): siRNA sense strand
aagugaggaaguuggaaga

SEQ ID NO: 2478073 - RNA, 19 nt, Homo sapiens
  misc_RNA (1)...(19): siRNA sense strand
aguuggaagaucagaacga

SEQ ID NO: 2478074 - RNA, 19 nt, Homo sapiens
  misc_RNA (1)...(19): siRNA sense strand
augcagcaacugaagcaaa

SEQ ID NO: 2478075 - RNA, 19 nt, Homo sapiens
  misc_RNA (1)...(19): siRNA sense strand
acaugaugacagagaugau

SEQ ID NO: 2478076 - RNA, 19 nt, Homo sapiens
  misc_RNA (1)...(19): siRNA sense strand
agauacaauucaaugcuca

SEQ ID NO: 2478077 - RNA, 19 nt, Homo sapiens
  misc_RNA (1)...(19): siRNA sense strand
gcauuguguugcugcagau

SEQ ID NO: 2478078 - RNA, 19 nt, Homo sapiens
  misc_RNA (1)...(19): siRNA sense strand
agagcagaagcccgagaaa

SEQ ID NO: 2478079 - RNA, 19 nt, Homo sapiens
  misc_RNA (1)...(19): siRNA sense strand
cagugggagacaagguuau

SEQ ID NO: 2478080 - RNA, 19 nt, Homo sapiens
  misc_RNA (1)...(19): siRNA sense strand
cugcaaagaagaugaacag

SEQ ID NO: 2478081 - RNA, 19 nt, Homo sapiens
  misc_RNA (1)...(19): siRNA sense strand
gcauuagugaccagaagga

SEQ ID NO: 2478082 - RNA, 19 nt, Homo sapiens
  misc_RNA (1)...(19): siRNA sense strand
aauuaggaggagaaugcaa

SEQ ID NO: 2478083 - RNA, 19 nt, Homo sapiens
  misc_RNA (1)...(19): siRNA sense strand
aagaagaugaacagagaaa

SEQ ID NO: 2478084 - RNA, 19 nt, Homo sapiens
  misc_RNA (1)...(19): siRNA sense strand
agaaagacaaagagcagaa

SEQ ID NO: 2478085 - RNA, 19 nt, Homo sapiens
  misc_RNA (1)...(19): siRNA sense strand
agaugaacagagaaagaaa

SEQ ID NO: 2478086 - RNA, 19 nt, Homo sapiens
  misc_RNA (1)...(19): siRNA sense strand
gguggaauuaggaggagaa

SEQ ID NO: 2478087 - RNA, 19 nt, Homo sapiens
  misc_RNA (1)...(19): siRNA sense strand
ggaaaggaucaguugccaa

SEQ ID NO: 2478088 - RNA, 19 nt, Homo sapiens
  misc_RNA (1)...(19): siRNA sense strand
gcuugaagaaagacaaaga

SEQ ID NO: 2478089 - RNA, 19 nt, Homo sapiens
  misc_RNA (1)...(19): siRNA sense strand
aaggaaauucagugggaga

SEQ ID NO: 2478090 - RNA, 19 nt, Homo sapiens
  misc_RNA (1)...(19): siRNA sense strand
aagaagaaagugaggaagu

SEQ ID NO: 2478091 - RNA, 19 nt, Homo sapiens
  misc_RNA (1)...(19): siRNA sense strand
cucaaagagacaacaaaua

SEQ ID NO: 2478092 - RNA, 19 nt, Homo sapiens
  misc_RNA (1)...(19): siRNA sense strand
guguaacauuuguggcuga

SEQ ID NO: 2478093 - RNA, 19 nt, Homo sapiens
  misc_RNA (1)...(19): siRNA sense strand
gaagaaagacaaagagcag

SEQ ID NO: 2478094 - RNA, 19 nt, Homo sapiens
  misc_RNA (1)...(19): siRNA sense strand
agacauugaugcagcaacu

SEQ ID NO: 2478095 - RNA, 19 nt, Homo sapiens
  misc_RNA (1)...(19): siRNA sense strand
caucagacuccuacaccaa

SEQ ID NO: 2478096 - RNA, 19 nt, Homo sapiens
  misc_RNA (1)...(19): siRNA sense strand
agaaggaaauucaguggga

SEQ ID NO: 2478097 - RNA, 19 nt, Homo sapiens
  misc_RNA (1)...(19): siRNA sense strand
cguagaugcaauauaucaa

SEQ ID NO: 2478098 - RNA, 19 nt, Homo sapiens
  misc_RNA (1)...(19): siRNA sense strand
aggcuugaagaaagacaaa

SEQ ID NO: 2478099 - RNA, 19 nt, Homo sapiens
  misc_RNA (1)...(19): siRNA sense strand
aaaugauacugaagagaac

SEQ ID NO: 2478100 - RNA, 19 nt, Homo sapiens
  misc_RNA (1)...(19): siRNA sense strand
aaaacaggcuauagugcaa

SEQ ID NO: 2478101 - RNA, 19 nt, Homo sapiens
  misc_RNA (1)...(19): siRNA sense strand
acaaagagcagaagcccga

SEQ ID NO: 2478102 - RNA, 19 nt, Homo sapiens
  misc_RNA (1)...(19): siRNA sense strand
ugccuauaaucaagaagaa

SEQ ID NO: 2478103 - RNA, 19 nt, Homo sapiens
  misc_RNA (1)...(19): siRNA sense strand
ggaaauucagugggagaca

SEQ ID NO: 2478104 - RNA, 19 nt, Homo sapiens
  misc_RNA (1)...(19): siRNA sense strand
aggcagggucuguggagga

SEQ ID NO: 2478105 - RNA, 19 nt, Homo sapiens
  misc_RNA (1)...(19): siRNA sense strand
gccuauaaucaagaagaaa

SEQ ID NO: 2478106 - RNA, 19 nt, Homo sapiens
  misc_RNA (1)...(19): siRNA sense strand
acacacagcagcucgggaa

SEQ ID NO: 2478107 - RNA, 19 nt, Homo sapiens
  misc_RNA (1)...(19): siRNA sense strand
cggaccuguuugugagcau

SEQ ID NO: 2478108 - RNA, 19 nt, Homo sapiens
  misc_RNA (1)...(19): siRNA sense strand
ggguggaauuaggaggaga

SEQ ID NO: 2478109 - RNA, 19 nt, Homo sapiens
  misc_RNA (1)...(19): siRNA sense strand
ggaagaucagaacgaguau

SEQ ID NO: 2478110 - RNA, 19 nt, Homo sapiens
  misc_RNA (1)...(19): siRNA sense strand
cccgagaaaggaaggagaa

SEQ ID NO: 2478111 - RNA, 19 nt, Homo sapiens
  misc_RNA (1)...(19): siRNA sense strand
gggaaggaaaggaucaguu

SEQ ID NO: 2478112 - RNA, 19 nt, Homo sapiens
  misc_RNA (1)...(19): siRNA sense strand
gcaaagaagaugaacagag

SEQ ID NO: 2478113 - RNA, 19 nt, Homo sapiens
  misc_RNA (1)...(19): siRNA sense strand
gcaaauaucaucuuccaca

SEQ ID NO: 2478114 - RNA, 19 nt, Homo sapiens
  misc_RNA (1)...(19): siRNA sense strand
ugaagaaagacaaagagca

SEQ ID NO: 2478115 - RNA, 19 nt, Homo sapiens
  misc_RNA (1)...(19): siRNA sense strand
agaaguugccuauaaucaa

SEQ ID NO: 2478116 - RNA, 19 nt, Homo sapiens
  misc_RNA (1)...(19): siRNA sense strand
gaugaacagagaaagaaaa

SEQ ID NO: 2478117 - RNA, 19 nt, Homo sapiens
  misc_RNA (1)...(19): siRNA sense strand
aaaauaugcaacaggggaa

SEQ ID NO: 2478118 - RNA, 19 nt, Homo sapiens
  misc_RNA (1)...(19): siRNA sense strand
gcaugguagaaucaauuaa

SEQ ID NO: 2478119 - RNA, 19 nt, Homo sapiens
  misc_RNA (1)...(19): siRNA sense strand
cagaagcccgagaaaggaa

SEQ ID NO: 2478120 - RNA, 19 nt, Homo sapiens
  misc_RNA (1)...(19): siRNA sense strand
aagugaggaaguuggaaga

SEQ ID NO: 2478121 - RNA, 19 nt, Homo sapiens
  misc_RNA (1)...(19): siRNA sense strand
aguuggaagaucagaacga

SEQ ID NO: 2478122 - RNA, 19 nt, Homo sapiens
  misc_RNA (1)...(19): siRNA sense strand
augcagcaacugaagcaaa

SEQ ID NO: 2478123 - RNA, 19 nt, Homo sapiens
  misc_RNA (1)...(19): siRNA sense strand
acaugaugacagagaugau

SEQ ID NO: 2478124 - RNA, 19 nt, Homo sapiens
  misc_RNA (1)...(19): siRNA sense strand
agauacaauucaaugcuca

SEQ ID NO: 2478125 - RNA, 19 nt, Homo sapiens
  misc_RNA (1)...(19): siRNA sense strand
gcauuguguugcugcagau

SEQ ID NO: 2478126 - RNA, 19 nt, Homo sapiens
  misc_RNA (1)...(19): siRNA sense strand
agagcagaagcccgagaaa

SEQ ID NO: 2478127 - RNA, 19 nt, Homo sapiens
  misc_RNA (1)...(19): siRNA sense strand
cagugggagacaagguuau

SEQ ID NO: 2478128 - RNA, 19 nt, Homo sapiens
  misc_RNA (1)...(19): siRNA sense strand
cugcaaagaagaugaacag

SEQ ID NO: 2478129 - RNA, 19 nt, Homo sapiens
  misc_RNA (1)...(19): siRNA sense strand
gcauuagugaccagaagga

SEQ ID NO: 2478130 - RNA, 19 nt, Homo sapiens
  misc_RNA (1)...(19): siRNA sense strand
aauuaggaggagaaugcaa

SEQ ID NO: 2478131 - RNA, 19 nt, Homo sapiens
  misc_RNA (1)...(19): siRNA sense strand
gaagaaggaacuugugcaa

SEQ ID NO: 2478132 - RNA, 19 nt, Homo sapiens
  misc_RNA (1)...(19): siRNA sense strand
aaaucauagcugagagaca

SEQ ID NO: 2478133 - RNA, 19 nt, Homo sapiens
  misc_RNA (1)...(19): siRNA sense strand
agaaggaacuugugcaaac

SEQ ID NO: 2478134 - RNA, 19 nt, Homo sapiens
  misc_RNA (1)...(19): siRNA sense strand
cuggaaaauuguuagacua

SEQ ID NO: 2478135 - RNA, 19 nt, Homo sapiens
  misc_RNA (1)...(19): siRNA sense strand
uagacuacuuacaggaaaa

SEQ ID NO: 2478136 - RNA, 19 nt, Homo sapiens
  misc_RNA (1)...(19): siRNA sense strand
guuagaagaagaaggaacu

SEQ ID NO: 2478137 - RNA, 19 nt, Homo sapiens
  misc_RNA (1)...(19): siRNA sense strand
aguuagaagaagaaggaac

SEQ ID NO: 2478138 - RNA, 19 nt, Homo sapiens
  misc_RNA (1)...(19): siRNA sense strand
cguguauaccugugugaga

SEQ ID NO: 2478139 - RNA, 19 nt, Homo sapiens
  misc_RNA (1)...(19): siRNA sense strand
uuacagaugaagugcugaa

SEQ ID NO: 2478140 - RNA, 19 nt, Homo sapiens
  misc_RNA (1)...(19): siRNA sense strand
uguauaccugugugagaaa

SEQ ID NO: 2478141 - RNA, 19 nt, Homo sapiens
  misc_RNA (1)...(19): siRNA sense strand
agaacaucugaaaggacua

SEQ ID NO: 2478142 - RNA, 19 nt, Homo sapiens
  misc_RNA (1)...(19): siRNA sense strand
gaaggagaauccagcacga

SEQ ID NO: 2478143 - RNA, 19 nt, Homo sapiens
  misc_RNA (1)...(19): siRNA sense strand
uguucuagaaguaggcaga

SEQ ID NO: 2478144 - RNA, 19 nt, Homo sapiens
  misc_RNA (1)...(19): siRNA sense strand
cugagaaggcgauggcuga

SEQ ID NO: 2478145 - RNA, 19 nt, Homo sapiens
  misc_RNA (1)...(19): siRNA sense strand
ggcgauggcugaaggacca

SEQ ID NO: 2478146 - RNA, 19 nt, Homo sapiens
  misc_RNA (1)...(19): siRNA sense strand
ggugauacaauucuggaga

SEQ ID NO: 2478147 - RNA, 19 nt, Homo sapiens
  misc_RNA (1)...(19): siRNA sense strand
cugagaaggcgauggcuga

SEQ ID NO: 2478148 - RNA, 19 nt, Homo sapiens
  misc_RNA (1)...(19): siRNA sense strand
ggcgauggcugaaggacca

SEQ ID NO: 2478149 - RNA, 19 nt, Homo sapiens
  misc_RNA (1)...(19): siRNA sense strand
ggugauacaauucuggaga

SEQ ID NO: 2478150 - RNA, 19 nt, Homo sapiens
  misc_RNA (1)...(19): siRNA sense strand
agauaugacuccaggacca

SEQ ID NO: 2478151 - RNA, 19 nt, Homo sapiens
  misc_RNA (1)...(19): siRNA sense strand
agacuauaaagaaggagaa

SEQ ID NO: 2478152 - RNA, 19 nt, Homo sapiens
  misc_RNA (1)...(19): siRNA sense strand
aacacuaacaagagagaau

SEQ ID NO: 2478153 - RNA, 19 nt, Homo sapiens
  misc_RNA (1)...(19): siRNA sense strand
ccuugugagcaguugguua

SEQ ID NO: 2478154 - RNA, 19 nt, Homo sapiens
  misc_RNA (1)...(19): siRNA sense strand
aagaagaagccaaagcuga

SEQ ID NO: 2478155 - RNA, 19 nt, Homo sapiens
  misc_RNA (1)...(19): siRNA sense strand
ggccacaugcauuggaaau

SEQ ID NO: 2478156 - RNA, 19 nt, Homo sapiens
  misc_RNA (1)...(19): siRNA sense strand
aaguggagcaguugaucaa

SEQ ID NO: 2478157 - RNA, 19 nt, Homo sapiens
  misc_RNA (1)...(19): siRNA sense strand
gacuauaaagaaggagaaa

SEQ ID NO: 2478158 - RNA, 19 nt, Homo sapiens
  misc_RNA (1)...(19): siRNA sense strand
gccaauaccuugugagcag

SEQ ID NO: 2478159 - RNA, 19 nt, Homo sapiens
  misc_RNA (1)...(19): siRNA sense strand
ccauggaagcuauuggaca

SEQ ID NO: 2478160 - RNA, 19 nt, Homo sapiens
  misc_RNA (1)...(19): siRNA sense strand
cuguacauuggcugggaua

SEQ ID NO: 2478161 - RNA, 19 nt, Homo sapiens
  misc_RNA (1)...(19): siRNA sense strand
cuaaauaagaccauggaug

SEQ ID NO: 2478162 - RNA, 19 nt, Homo sapiens
  misc_RNA (1)...(19): siRNA sense strand
uacacaauuuggaggaaaa

SEQ ID NO: 2478163 - RNA, 19 nt, Homo sapiens
  misc_RNA (1)...(19): siRNA sense strand
uugcaguguggcaggcaua

SEQ ID NO: 2478164 - RNA, 19 nt, Homo sapiens
  misc_RNA (1)...(19): siRNA sense strand
uaguaaacucucugcugaa

SEQ ID NO: 2478165 - RNA, 19 nt, Homo sapiens
  misc_RNA (1)...(19): siRNA sense strand
aagacuauaaagaaggaga

SEQ ID NO: 2478166 - RNA, 19 nt, Homo sapiens
  misc_RNA (1)...(19): siRNA sense strand
ggaugugguaguacagaaa

SEQ ID NO: 2478167 - RNA, 19 nt, Homo sapiens
  misc_RNA (1)...(19): siRNA sense strand
aagagaaggaggaagacaa

SEQ ID NO: 2478168 - RNA, 19 nt, Homo sapiens
  misc_RNA (1)...(19): siRNA sense strand
gggacaaggacaaagaaca

SEQ ID NO: 2478169 - RNA, 19 nt, Homo sapiens
  misc_RNA (1)...(19): siRNA sense strand
acaaagacaagaaggaaaa

SEQ ID NO: 2478170 - RNA, 19 nt, Homo sapiens
  misc_RNA (1)...(19): siRNA sense strand
uggcaggagaaguggcuaa

SEQ ID NO: 2478171 - RNA, 19 nt, Homo sapiens
  misc_RNA (1)...(19): siRNA sense strand
guacagaaacagauggcau

SEQ ID NO: 2478172 - RNA, 19 nt, Homo sapiens
  misc_RNA (1)...(19): siRNA sense strand
agagaaggaggaagacaaa

SEQ ID NO: 2478173 - RNA, 19 nt, Homo sapiens
  misc_RNA (1)...(19): siRNA sense strand
auggcaaacugaaggaaau

SEQ ID NO: 2478174 - RNA, 19 nt, Homo sapiens
  misc_RNA (1)...(19): siRNA sense strand
agaacaaggaccacggaau

SEQ ID NO: 2478175 - RNA, 19 nt, Homo sapiens
  misc_RNA (1)...(19): siRNA sense strand
aggaagacaaagacaagaa

SEQ ID NO: 2478176 - RNA, 19 nt, Homo sapiens
  misc_RNA (1)...(19): siRNA sense strand
agaaggaggaagacaaaga

SEQ ID NO: 2478177 - RNA, 19 nt, Homo sapiens
  misc_RNA (1)...(19): siRNA sense strand
aaaagaaagacaaggacaa

SEQ ID NO: 2478178 - RNA, 19 nt, Homo sapiens
  misc_RNA (1)...(19): siRNA sense strand
cuggauacccuaagcaaau

SEQ ID NO: 2478179 - RNA, 19 nt, Homo sapiens
  misc_RNA (1)...(19): siRNA sense strand
cgacuaggggagaaggaua

SEQ ID NO: 2478180 - RNA, 19 nt, Homo sapiens
  misc_RNA (1)...(19): siRNA sense strand
aggaggaagacaaagacaa

SEQ ID NO: 2478181 - RNA, 19 nt, Homo sapiens
  misc_RNA (1)...(19): siRNA sense strand
uggacaugcuggagaagga

SEQ ID NO: 2478182 - RNA, 19 nt, Homo sapiens
  misc_RNA (1)...(19): siRNA sense strand
agacaagaaggaaaagaaa

SEQ ID NO: 2478183 - RNA, 19 nt, Homo sapiens
  misc_RNA (1)...(19): siRNA sense strand
gaaacauuauucuaggcaa

SEQ ID NO: 2478184 - RNA, 19 nt, Homo sapiens
  misc_RNA (1)...(19): siRNA sense strand
auguacagcucaacagcaa

SEQ ID NO: 2478185 - RNA, 19 nt, Homo sapiens
  misc_RNA (1)...(19): siRNA sense strand
ggaaugugcugaaggugca

SEQ ID NO: 2478186 - RNA, 19 nt, Homo sapiens
  misc_RNA (1)...(19): siRNA sense strand
gcgaccugcuuauggaaau

SEQ ID NO: 2478187 - RNA, 19 nt, Homo sapiens
  misc_RNA (1)...(19): siRNA sense strand
acaagaaggaaaagaaaga

SEQ ID NO: 2478188 - RNA, 19 nt, Homo sapiens
  misc_RNA (1)...(19): siRNA sense strand
aaauugagcagguggacau

SEQ ID NO: 2478189 - RNA, 19 nt, Homo sapiens
  misc_RNA (1)...(19): siRNA sense strand
agguggacaugcuggagaa

SEQ ID NO: 2478190 - RNA, 19 nt, Homo sapiens
  misc_RNA (1)...(19): siRNA sense strand
ggacaaggacaaagaacag

SEQ ID NO: 2478191 - RNA, 19 nt, Homo sapiens
  misc_RNA (1)...(19): siRNA sense strand
agacaaagacaagaaggaa

SEQ ID NO: 2478192 - RNA, 19 nt, Homo sapiens
  misc_RNA (1)...(19): siRNA sense strand
caguggauguggugggcca

SEQ ID NO: 2478193 - RNA, 19 nt, Homo sapiens
  misc_RNA (1)...(19): siRNA sense strand
ccacuauccuucagaccau

SEQ ID NO: 2478194 - RNA, 19 nt, Homo sapiens
  misc_RNA (1)...(19): siRNA sense strand
uggaguugguagaagacau

SEQ ID NO: 2478195 - RNA, 19 nt, Homo sapiens
  misc_RNA (1)...(19): siRNA sense strand
uguccaauguacagcucaa

SEQ ID NO: 2478196 - RNA, 19 nt, Homo sapiens
  misc_RNA (1)...(19): siRNA sense strand
aagacaaagacaagaagga

SEQ ID NO: 2478197 - RNA, 19 nt, Homo sapiens
  misc_RNA (1)...(19): siRNA sense strand
aagacaaggacaagaagga

SEQ ID NO: 2478198 - RNA, 19 nt, Homo sapiens
  misc_RNA (1)...(19): siRNA sense strand
ccuggauacccuaagcaaa

SEQ ID NO: 2478199 - RNA, 19 nt, Homo sapiens
  misc_RNA (1)...(19): siRNA sense strand
aggaugugguaguacagaa

SEQ ID NO: 2478200 - RNA, 19 nt, Homo sapiens
  misc_RNA (1)...(19): siRNA sense strand
gcauggagguggcaggugu

SEQ ID NO: 2478201 - RNA, 19 nt, Homo sapiens
  misc_RNA (1)...(19): siRNA sense strand
gaaaagaaagacaaggaca

SEQ ID NO: 2478202 - RNA, 19 nt, Homo sapiens
  misc_RNA (1)...(19): siRNA sense strand
gcuaacagaugauggcaac

SEQ ID NO: 2478203 - RNA, 19 nt, Homo sapiens
  misc_RNA (1)...(19): siRNA sense strand
aguaugaggaccugacaga

SEQ ID NO: 2478204 - RNA, 19 nt, Homo sapiens
  misc_RNA (1)...(19): siRNA sense strand
cuggcaagccgaagacuau

SEQ ID NO: 2478205 - RNA, 19 nt, Homo sapiens
  misc_RNA (1)...(19): siRNA sense strand
ugucugaagaggauaaaca

SEQ ID NO: 2478206 - RNA, 19 nt, Homo sapiens
  misc_RNA (1)...(19): siRNA sense strand
ggccaagacaagcugcuaa

SEQ ID NO: 2478207 - RNA, 19 nt, Homo sapiens
  misc_RNA (1)...(19): siRNA sense strand
uggcucaaaucgugaagau

SEQ ID NO: 2478208 - RNA, 19 nt, Homo sapiens
  misc_RNA (1)...(19): siRNA sense strand
ggguguguuccgaaaguuu

SEQ ID NO: 2478209 - RNA, 19 nt, Homo sapiens
  misc_RNA (1)...(19): siRNA sense strand
gcuggcaagccgaagacua

SEQ ID NO: 2478210 - RNA, 19 nt, Homo sapiens
  misc_RNA (1)...(19): siRNA sense strand
uggagaaggacauugauga

SEQ ID NO: 2478211 - RNA, 19 nt, Homo sapiens
  misc_RNA (1)...(19): siRNA sense strand
uggacaucauggagcccaa

SEQ ID NO: 2478212 - RNA, 19 nt, Homo sapiens
  misc_RNA (1)...(19): siRNA sense strand
ccaaggugccugaugacau

SEQ ID NO: 2478213 - RNA, 19 nt, Homo sapiens
  misc_RNA (1)...(19): siRNA sense strand
augugguaguacagaaaca

SEQ ID NO: 2478214 - RNA, 19 nt, Homo sapiens
  misc_RNA (1)...(19): siRNA sense strand
aagaugaacuggagaugcu

SEQ ID NO: 2478215 - RNA, 19 nt, Homo sapiens
  misc_RNA (1)...(19): siRNA sense strand
gcguccacacuauggcaaa

SEQ ID NO: 2478216 - RNA, 19 nt, Homo sapiens
  misc_RNA (1)...(19): siRNA sense strand
ggagaaguggcuaaggagu

SEQ ID NO: 2478217 - RNA, 19 nt, Homo sapiens
  misc_RNA (1)...(19): siRNA sense strand
cauuaagucaggagcucuu

SEQ ID NO: 2478218 - RNA, 19 nt, Homo sapiens
  misc_RNA (1)...(19): siRNA sense strand
gugaggccaucgaggcaau

SEQ ID NO: 2478219 - RNA, 19 nt, Homo sapiens
  misc_RNA (1)...(19): siRNA sense strand
gguggaugugugugcauau

SEQ ID NO: 2478220 - RNA, 19 nt, Homo sapiens
  misc_RNA (1)...(19): siRNA sense strand
aggauaaacagcuucaaga

SEQ ID NO: 2478221 - RNA, 19 nt, Homo sapiens
  misc_RNA (1)...(19): siRNA sense strand
uauggcaaacugaaggaaa

SEQ ID NO: 2478222 - RNA, 19 nt, Homo sapiens
  misc_RNA (1)...(19): siRNA sense strand
ggaugauucugcuguggga

SEQ ID NO: 2478223 - RNA, 19 nt, Homo sapiens
  misc_RNA (1)...(19): siRNA sense strand
cuguggaaugauagcagua

SEQ ID NO: 2478224 - RNA, 19 nt, Homo sapiens
  misc_RNA (1)...(19): siRNA sense strand
gcucugggaaugugcugaa

SEQ ID NO: 2478225 - RNA, 19 nt, Homo sapiens
  misc_RNA (1)...(19): siRNA sense strand
aggaaaagaaagacaagga

SEQ ID NO: 2478226 - RNA, 19 nt, Homo sapiens
  misc_RNA (1)...(19): siRNA sense strand
gcauggagagagagcggaa

SEQ ID NO: 2478227 - RNA, 19 nt, Homo sapiens
  misc_RNA (1)...(19): siRNA sense strand
aggauuagcgagaagaaaa

SEQ ID NO: 2478228 - RNA, 19 nt, Homo sapiens
  misc_RNA (1)...(19): siRNA sense strand
acuuggagucucugggcua

SEQ ID NO: 2478229 - RNA, 19 nt, Homo sapiens
  misc_RNA (1)...(19): siRNA sense strand
ggauuagcgagaagaaaau

SEQ ID NO: 2478230 - RNA, 19 nt, Homo sapiens
  misc_RNA (1)...(19): siRNA sense strand
uacgaaaggauuagcgaga

SEQ ID NO: 2478231 - RNA, 19 nt, Homo sapiens
  misc_RNA (1)...(19): siRNA sense strand
acuacaacgucauggugau

SEQ ID NO: 2478232 - RNA, 19 nt, Homo sapiens
  misc_RNA (1)...(19): siRNA sense strand
gccaagaaguaccgggaug

SEQ ID NO: 2478233 - RNA, 19 nt, Homo sapiens
  misc_RNA (1)...(19): siRNA sense strand
agggcaaccugguguacau

SEQ ID NO: 2478234 - RNA, 19 nt, Homo sapiens
  misc_RNA (1)...(19): siRNA sense strand
augugaagccagacaacuu

SEQ ID NO: 2478235 - RNA, 19 nt, Homo sapiens
  misc_RNA (1)...(19): siRNA sense strand
gcauggagagagagcggaa

SEQ ID NO: 2478236 - RNA, 19 nt, Homo sapiens
  misc_RNA (1)...(19): siRNA sense strand
aggauuagcgagaagaaaa

SEQ ID NO: 2478237 - RNA, 19 nt, Homo sapiens
  misc_RNA (1)...(19): siRNA sense strand
acuuggagucucugggcua

SEQ ID NO: 2478238 - RNA, 19 nt, Homo sapiens
  misc_RNA (1)...(19): siRNA sense strand
ggauuagcgagaagaaaau

SEQ ID NO: 2478239 - RNA, 19 nt, Homo sapiens
  misc_RNA (1)...(19): siRNA sense strand
uacgaaaggauuagcgaga

SEQ ID NO: 2478240 - RNA, 19 nt, Homo sapiens
  misc_RNA (1)...(19): siRNA sense strand
acuacaacgucauggugau

SEQ ID NO: 2478241 - RNA, 19 nt, Homo sapiens
  misc_RNA (1)...(19): siRNA sense strand
gccaagaaguaccgggaug

SEQ ID NO: 2478242 - RNA, 19 nt, Homo sapiens
  misc_RNA (1)...(19): siRNA sense strand
agggcaaccugguguacau

SEQ ID NO: 2478243 - RNA, 19 nt, Homo sapiens
  misc_RNA (1)...(19): siRNA sense strand
augugaagccagacaacuu

SEQ ID NO: 2478244 - RNA, 19 nt, Homo sapiens
  misc_RNA (1)...(19): siRNA sense strand
gugucaaaguggagaggca

SEQ ID NO: 2478245 - RNA, 19 nt, Homo sapiens
  misc_RNA (1)...(19): siRNA sense strand
gggaagacccucugccuga

SEQ ID NO: 2478246 - RNA, 19 nt, Homo sapiens
  misc_RNA (1)...(19): siRNA sense strand
acugaagcugggaggcaaa

SEQ ID NO: 2478247 - RNA, 19 nt, Homo sapiens
  misc_RNA (1)...(19): siRNA sense strand
acugcaaacugcuggacau

SEQ ID NO: 2478248 - RNA, 19 nt, Homo sapiens
  misc_RNA (1)...(19): siRNA sense strand
acaacaacagggugggcuu

SEQ ID NO: 2478249 - RNA, 19 nt, Homo sapiens
  misc_RNA (1)...(19): siRNA sense strand
acauggacgcccaguacua

SEQ ID NO: 2478250 - RNA, 19 nt, Homo sapiens
  misc_RNA (1)...(19): siRNA sense strand
ggacaucgcuugcuggauc

SEQ ID NO: 2478251 - RNA, 19 nt, Homo sapiens
  misc_RNA (1)...(19): siRNA sense strand
ccagaggacuacacgcuca

SEQ ID NO: 2478252 - RNA, 19 nt, Homo sapiens
  misc_RNA (1)...(19): siRNA sense strand
cagcagauccaaugggaga

SEQ ID NO: 2478253 - RNA, 19 nt, Homo sapiens
  misc_RNA (1)...(19): siRNA sense strand
agaagauguccauguacaa

SEQ ID NO: 2478254 - RNA, 19 nt, Homo sapiens
  misc_RNA (1)...(19): siRNA sense strand
ggcagaugucagagauuau

SEQ ID NO: 2478255 - RNA, 19 nt, Homo sapiens
  misc_RNA (1)...(19): siRNA sense strand
cugcacacacacagggauu

SEQ ID NO: 2478256 - RNA, 19 nt, Homo sapiens
  misc_RNA (1)...(19): siRNA sense strand
ccuaaaggucaguguaaac

SEQ ID NO: 2478257 - RNA, 19 nt, Homo sapiens
  misc_RNA (1)...(19): siRNA sense strand
agauccaaugggagaacaa

SEQ ID NO: 2478258 - RNA, 19 nt, Homo sapiens
  misc_RNA (1)...(19): siRNA sense strand
gggagaaguuccugcgcuc

SEQ ID NO: 2478259 - RNA, 19 nt, Homo sapiens
  misc_RNA (1)...(19): siRNA sense strand
gggauugaguccuggcugu

SEQ ID NO: 2478260 - RNA, 19 nt, Homo sapiens
  misc_RNA (1)...(19): siRNA sense strand
cuggaaacuauauccuaaa

SEQ ID NO: 2478261 - RNA, 19 nt, Homo sapiens
  misc_RNA (1)...(19): siRNA sense strand
auccuaaaggucaguguaa

SEQ ID NO: 2478262 - RNA, 19 nt, Homo sapiens
  misc_RNA (1)...(19): siRNA sense strand
gggcaauaagagugaucua

SEQ ID NO: 2478263 - RNA, 19 nt, Homo sapiens
  misc_RNA (1)...(19): siRNA sense strand
uuaucaugcuugugggcaa

SEQ ID NO: 2478264 - RNA, 19 nt, Homo sapiens
  misc_RNA (1)...(19): siRNA sense strand
cugaaagaacugagagauc

SEQ ID NO: 2478265 - RNA, 19 nt, Homo sapiens
  misc_RNA (1)...(19): siRNA sense strand
cuggaaagcaagagcacca

SEQ ID NO: 2478266 - RNA, 19 nt, Homo sapiens
  misc_RNA (1)...(19): siRNA sense strand
uaacagagauuuaccgcau

SEQ ID NO: 2478267 - RNA, 19 nt, Homo sapiens
  misc_RNA (1)...(19): siRNA sense strand
ggcugaaagaacugagaga

SEQ ID NO: 2478268 - RNA, 19 nt, Homo sapiens
  misc_RNA (1)...(19): siRNA sense strand
agcuauaacaucagcauau

SEQ ID NO: 2478269 - RNA, 19 nt, Homo sapiens
  misc_RNA (1)...(19): siRNA sense strand
auauuaucguggagcugua

SEQ ID NO: 2478270 - RNA, 19 nt, Homo sapiens
  misc_RNA (1)...(19): siRNA sense strand
gagcgauggcugaaagaac

SEQ ID NO: 2478271 - RNA, 19 nt, Homo sapiens
  misc_RNA (1)...(19): siRNA sense strand
auaugaaaauguagagcga

SEQ ID NO: 2478272 - RNA, 19 nt, Homo sapiens
  misc_RNA (1)...(19): siRNA sense strand
uggaguagaguuugcaaca

SEQ ID NO: 2478273 - RNA, 19 nt, Homo sapiens
  misc_RNA (1)...(19): siRNA sense strand
gcugauagccagaggagga

SEQ ID NO: 2478274 - RNA, 19 nt, Homo sapiens
  misc_RNA (1)...(19): siRNA sense strand
cagccagaucagcgguuua

SEQ ID NO: 2478275 - RNA, 19 nt, Homo sapiens
  misc_RNA (1)...(19): siRNA sense strand
cagccgacuaugagaacuu

SEQ ID NO: 2478276 - RNA, 19 nt, Homo sapiens
  misc_RNA (1)...(19): siRNA sense strand
uuaaugugacugaggugaa

SEQ ID NO: 2478277 - RNA, 19 nt, Homo sapiens
  misc_RNA (1)...(19): siRNA sense strand
gggaccugacucugggcua

SEQ ID NO: 2478278 - RNA, 19 nt, Homo sapiens
  misc_RNA (1)...(19): siRNA sense strand
cagcuggacuggaggaggu

SEQ ID NO: 2478279 - RNA, 19 nt, Homo sapiens
  misc_RNA (1)...(19): siRNA sense strand
gugcuggcgucuuugggaa

SEQ ID NO: 2478280 - RNA, 19 nt, Homo sapiens
  misc_RNA (1)...(19): siRNA sense strand
gcugauagccagaggagga

SEQ ID NO: 2478281 - RNA, 19 nt, Homo sapiens
  misc_RNA (1)...(19): siRNA sense strand
cagccagaucagcgguuua

SEQ ID NO: 2478282 - RNA, 19 nt, Homo sapiens
  misc_RNA (1)...(19): siRNA sense strand
cagccgacuaugagaacuu

SEQ ID NO: 2478283 - RNA, 19 nt, Homo sapiens
  misc_RNA (1)...(19): siRNA sense strand
uuaaugugacugaggugaa

SEQ ID NO: 2478284 - RNA, 19 nt, Homo sapiens
  misc_RNA (1)...(19): siRNA sense strand
gggaccugacucugggcua

SEQ ID NO: 2478285 - RNA, 19 nt, Homo sapiens
  misc_RNA (1)...(19): siRNA sense strand
cagcuggacuggaggaggu

SEQ ID NO: 2478286 - RNA, 19 nt, Homo sapiens
  misc_RNA (1)...(19): siRNA sense strand
gugcuggcgucuuugggaa

SEQ ID NO: 2478287 - RNA, 19 nt, Homo sapiens
  misc_RNA (1)...(19): siRNA sense strand
ugaaggaguuugagcggga

SEQ ID NO: 2478288 - RNA, 19 nt, Homo sapiens
  misc_RNA (1)...(19): siRNA sense strand
gcgacuaugugaugcgcau

SEQ ID NO: 2478289 - RNA, 19 nt, Homo sapiens
  misc_RNA (1)...(19): siRNA sense strand
gcuacagcgacgugaagaa

SEQ ID NO: 2478290 - RNA, 19 nt, Homo sapiens
  misc_RNA (1)...(19): siRNA sense strand
gcgcagggucuacgaagaa

SEQ ID NO: 2478291 - RNA, 19 nt, Homo sapiens
  misc_RNA (1)...(19): siRNA sense strand
acgugaagaagcuggaaau

SEQ ID NO: 2478292 - RNA, 19 nt, Homo sapiens
  misc_RNA (1)...(19): siRNA sense strand
gcagggucuacgaagaaua

SEQ ID NO: 2478293 - RNA, 19 nt, Homo sapiens
  misc_RNA (1)...(19): siRNA sense strand
agcuggaaaugaagccaaa

SEQ ID NO: 2478294 - RNA, 19 nt, Homo sapiens
  misc_RNA (1)...(19): siRNA sense strand
acuccgaagaagagcgcua

SEQ ID NO: 2478295 - RNA, 19 nt, Homo sapiens
  misc_RNA (1)...(19): siRNA sense strand
ccggcuaugauguggagaa

SEQ ID NO: 2478296 - RNA, 19 nt, Homo sapiens
  misc_RNA (1)...(19): siRNA sense strand
ccaaagaaggccaagguug

SEQ ID NO: 2478297 - RNA, 19 nt, Homo sapiens
  misc_RNA (1)...(19): siRNA sense strand
ggauaaagaucauacgaca

SEQ ID NO: 2478298 - RNA, 19 nt, Homo sapiens
  misc_RNA (1)...(19): siRNA sense strand
gguugaugcaagugaagaa

SEQ ID NO: 2478299 - RNA, 19 nt, Homo sapiens
  misc_RNA (1)...(19): siRNA sense strand
ggcugagagcacagacaaa

SEQ ID NO: 2478300 - RNA, 19 nt, Homo sapiens
  misc_RNA (1)...(19): siRNA sense strand
aaauugaagaccuggaaaa

SEQ ID NO: 2478301 - RNA, 19 nt, Homo sapiens
  misc_RNA (1)...(19): siRNA sense strand
uggaaaacucagagaggau

SEQ ID NO: 2478302 - RNA, 19 nt, Homo sapiens
  misc_RNA (1)...(19): siRNA sense strand
cuugggauuuagaggaaaa

SEQ ID NO: 2478303 - RNA, 19 nt, Homo sapiens
  misc_RNA (1)...(19): siRNA sense strand
gaguaaagucaauugggca

SEQ ID NO: 2478304 - RNA, 19 nt, Homo sapiens
  misc_RNA (1)...(19): siRNA sense strand
cugcuugauauuagaaaga

SEQ ID NO: 2478305 - RNA, 19 nt, Homo sapiens
  misc_RNA (1)...(19): siRNA sense strand
gaaaacucagagaggauaa

SEQ ID NO: 2478306 - RNA, 19 nt, Homo sapiens
  misc_RNA (1)...(19): siRNA sense strand
uagaaagaagagauugcaa

SEQ ID NO: 2478307 - RNA, 19 nt, Homo sapiens
  misc_RNA (1)...(19): siRNA sense strand
cugaaaagaacaaacagaa

SEQ ID NO: 2478308 - RNA, 19 nt, Homo sapiens
  misc_RNA (1)...(19): siRNA sense strand
gcuugauauuagaaagaag

SEQ ID NO: 2478309 - RNA, 19 nt, Homo sapiens
  misc_RNA (1)...(19): siRNA sense strand
cagaagauugauuuggaca

SEQ ID NO: 2478310 - RNA, 19 nt, Homo sapiens
  misc_RNA (1)...(19): siRNA sense strand
agucaauugggcagaggau

SEQ ID NO: 2478311 - RNA, 19 nt, Homo sapiens
  misc_RNA (1)...(19): siRNA sense strand
aaauaauugucaugggacu

SEQ ID NO: 2478312 - RNA, 19 nt, Homo sapiens
  misc_RNA (1)...(19): siRNA sense strand
acaaugauguguauggcau

SEQ ID NO: 2478313 - RNA, 19 nt, Homo sapiens
  misc_RNA (1)...(19): siRNA sense strand
aaggauugcaagagaaguu

SEQ ID NO: 2478314 - RNA, 19 nt, Homo sapiens
  misc_RNA (1)...(19): siRNA sense strand
gagccuuagcaugggaaua

SEQ ID NO: 2478315 - RNA, 19 nt, Homo sapiens
  misc_RNA (1)...(19): siRNA sense strand
ugucaauugcagcaggaau

SEQ ID NO: 2478316 - RNA, 19 nt, Homo sapiens
  misc_RNA (1)...(19): siRNA sense strand
ucaaauaauugucauggga

SEQ ID NO: 2478317 - RNA, 19 nt, Homo sapiens
  misc_RNA (1)...(19): siRNA sense strand
cuugaagggagaacccaaa

SEQ ID NO: 2478318 - RNA, 19 nt, Homo sapiens
  misc_RNA (1)...(19): siRNA sense strand
aaauaauugucaugggacu

SEQ ID NO: 2478319 - RNA, 19 nt, Homo sapiens
  misc_RNA (1)...(19): siRNA sense strand
acaaugauguguauggcau

SEQ ID NO: 2478320 - RNA, 19 nt, Homo sapiens
  misc_RNA (1)...(19): siRNA sense strand
aaggauugcaagagaaguu

SEQ ID NO: 2478321 - RNA, 19 nt, Homo sapiens
  misc_RNA (1)...(19): siRNA sense strand
gagccuuagcaugggaaua

SEQ ID NO: 2478322 - RNA, 19 nt, Homo sapiens
  misc_RNA (1)...(19): siRNA sense strand
ugucaauugcagcaggaau

SEQ ID NO: 2478323 - RNA, 19 nt, Homo sapiens
  misc_RNA (1)...(19): siRNA sense strand
ucaaauaauugucauggga

SEQ ID NO: 2478324 - RNA, 19 nt, Homo sapiens
  misc_RNA (1)...(19): siRNA sense strand
cuugaagggagaacccaaa

SEQ ID NO: 2478325 - RNA, 19 nt, Homo sapiens
  misc_RNA (1)...(19): siRNA sense strand
caacaaucccggaaggaca

SEQ ID NO: 2478326 - RNA, 19 nt, Homo sapiens
  misc_RNA (1)...(19): siRNA sense strand
acaacuuccaggagagcaa

SEQ ID NO: 2478327 - RNA, 19 nt, Homo sapiens
  misc_RNA (1)...(19): siRNA sense strand
cgacaggcaacuauggcaa

SEQ ID NO: 2478328 - RNA, 19 nt, Homo sapiens
  misc_RNA (1)...(19): siRNA sense strand
guacacaacuuccaggaga

SEQ ID NO: 2478329 - RNA, 19 nt, Homo sapiens
  misc_RNA (1)...(19): siRNA sense strand
cggaguuggcugagcagau

SEQ ID NO: 2478330 - RNA, 19 nt, Homo sapiens
  misc_RNA (1)...(19): siRNA sense strand
ccucaaaugccgagccugu

SEQ ID NO: 2478331 - RNA, 19 nt, Homo sapiens
  misc_RNA (1)...(19): siRNA sense strand
gggccaagaugaagcagcu

SEQ ID NO: 2478332 - RNA, 19 nt, Homo sapiens
  misc_RNA (1)...(19): siRNA sense strand
agguacagacgguggagga

SEQ ID NO: 2478333 - RNA, 19 nt, Homo sapiens
  misc_RNA (1)...(19): siRNA sense strand
gcacccuggaccuggacaa

SEQ ID NO: 2478334 - RNA, 19 nt, Homo sapiens
  misc_RNA (1)...(19): siRNA sense strand
ugcuagaccaagaagggaa

SEQ ID NO: 2478335 - RNA, 19 nt, Homo sapiens
  misc_RNA (1)...(19): siRNA sense strand
ucgagaagaugguggaguc

SEQ ID NO: 2478336 - RNA, 19 nt, Homo sapiens
  misc_RNA (1)...(19): siRNA sense strand
caacaaucccggaaggaca

SEQ ID NO: 2478337 - RNA, 19 nt, Homo sapiens
  misc_RNA (1)...(19): siRNA sense strand
acaacuuccaggagagcaa

SEQ ID NO: 2478338 - RNA, 19 nt, Homo sapiens
  misc_RNA (1)...(19): siRNA sense strand
cgacaggcaacuauggcaa

SEQ ID NO: 2478339 - RNA, 19 nt, Homo sapiens
  misc_RNA (1)...(19): siRNA sense strand
guacacaacuuccaggaga

SEQ ID NO: 2478340 - RNA, 19 nt, Homo sapiens
  misc_RNA (1)...(19): siRNA sense strand
cggaguuggcugagcagau

SEQ ID NO: 2478341 - RNA, 19 nt, Homo sapiens
  misc_RNA (1)...(19): siRNA sense strand
ccucaaaugccgagccugu

SEQ ID NO: 2478342 - RNA, 19 nt, Homo sapiens
  misc_RNA (1)...(19): siRNA sense strand
gggccaagaugaagcagcu

SEQ ID NO: 2478343 - RNA, 19 nt, Homo sapiens
  misc_RNA (1)...(19): siRNA sense strand
agguacagacgguggagga

SEQ ID NO: 2478344 - RNA, 19 nt, Homo sapiens
  misc_RNA (1)...(19): siRNA sense strand
gcacccuggaccuggacaa

SEQ ID NO: 2478345 - RNA, 19 nt, Homo sapiens
  misc_RNA (1)...(19): siRNA sense strand
ugcuagaccaagaagggaa

SEQ ID NO: 2478346 - RNA, 19 nt, Homo sapiens
  misc_RNA (1)...(19): siRNA sense strand
ucgagaagaugguggaguc

SEQ ID NO: 2478347 - RNA, 19 nt, Homo sapiens
  misc_RNA (1)...(19): siRNA sense strand
ugugaagagagaagacaua

SEQ ID NO: 2478348 - RNA, 19 nt, Homo sapiens
  misc_RNA (1)...(19): siRNA sense strand
ggguugugguccuggccaa

SEQ ID NO: 2478349 - RNA, 19 nt, Homo sapiens
  misc_RNA (1)...(19): siRNA sense strand
guggagaaguguaaagaug

SEQ ID NO: 2478350 - RNA, 19 nt, Homo sapiens
  misc_RNA (1)...(19): siRNA sense strand
cuuacuucaaccagagaaa

SEQ ID NO: 2478351 - RNA, 19 nt, Homo sapiens
  misc_RNA (1)...(19): siRNA sense strand
gcaggcagcuggagaugau

SEQ ID NO: 2478352 - RNA, 19 nt, Homo sapiens
  misc_RNA (1)...(19): siRNA sense strand
aggccguggagaaguguaa

SEQ ID NO: 2478353 - RNA, 19 nt, Homo sapiens
  misc_RNA (1)...(19): siRNA sense strand
gcuacaaugagcagcgcau

SEQ ID NO: 2478354 - RNA, 19 nt, Homo sapiens
  misc_RNA (1)...(19): siRNA sense strand
gugugaagagagaagacau

SEQ ID NO: 2478355 - RNA, 19 nt, Homo sapiens
  misc_RNA (1)...(19): siRNA sense strand
cagaggagaugaaagccau

SEQ ID NO: 2478356 - RNA, 19 nt, Homo sapiens
  misc_RNA (1)...(19): siRNA sense strand
aguguaaagaugcaggauu

SEQ ID NO: 2478357 - RNA, 19 nt, Homo sapiens
  misc_RNA (1)...(19): siRNA sense strand
cuuggaaaggucacugaaa

SEQ ID NO: 2478358 - RNA, 19 nt, Homo sapiens
  misc_RNA (1)...(19): siRNA sense strand
cuggauuucugcaagucaa

SEQ ID NO: 2478359 - RNA, 19 nt, Homo sapiens
  misc_RNA (1)...(19): siRNA sense strand
acaagaaggcgcugcggaa

SEQ ID NO: 2478360 - RNA, 19 nt, Homo sapiens
  misc_RNA (1)...(19): siRNA sense strand
agaacaaaaccaaggagaa

SEQ ID NO: 2478361 - RNA, 19 nt, Homo sapiens
  misc_RNA (1)...(19): siRNA sense strand
gcaacaagggugaccgcga

SEQ ID NO: 2478362 - RNA, 19 nt, Homo sapiens
  misc_RNA (1)...(19): siRNA sense strand
aagaaggcgcugcggaaca

SEQ ID NO: 2478363 - RNA, 19 nt, Homo sapiens
  misc_RNA (1)...(19): siRNA sense strand
agaucucggccaagaagaa

SEQ ID NO: 2478364 - RNA, 19 nt, Homo sapiens
  misc_RNA (1)...(19): siRNA sense strand
gcucguccaaggugggcaa

SEQ ID NO: 2478365 - RNA, 19 nt, Homo sapiens
  misc_RNA (1)...(19): siRNA sense strand
agugcaaguucuagcgcua

SEQ ID NO: 2478366 - RNA, 19 nt, Homo sapiens
  misc_RNA (1)...(19): siRNA sense strand
gguaaaugggagugaucca

SEQ ID NO: 2478367 - RNA, 19 nt, Homo sapiens
  misc_RNA (1)...(19): siRNA sense strand
ggacagaauugccaccaca

SEQ ID NO: 2478368 - RNA, 19 nt, Homo sapiens
  misc_RNA (1)...(19): siRNA sense strand
cuucaaucccaaagugaga

SEQ ID NO: 2478369 - RNA, 19 nt, Homo sapiens
  misc_RNA (1)...(19): siRNA sense strand
aggaaaacuaccuggagua

SEQ ID NO: 2478370 - RNA, 19 nt, Homo sapiens
  misc_RNA (1)...(19): siRNA sense strand
augaaggagccgaucacaa

SEQ ID NO: 2478371 - RNA, 19 nt, Homo sapiens
  misc_RNA (1)...(19): siRNA sense strand
ggccaagguaaaugggagu

SEQ ID NO: 2478372 - RNA, 19 nt, Homo sapiens
  misc_RNA (1)...(19): siRNA sense strand
aguucuagcgcuacaggua

SEQ ID NO: 2478373 - RNA, 19 nt, Homo sapiens
  misc_RNA (1)...(19): siRNA sense strand
gcugaugaugagacaccaa

SEQ ID NO: 2478374 - RNA, 19 nt, Homo sapiens
  misc_RNA (1)...(19): siRNA sense strand
caaaaggaggagaguccaa

SEQ ID NO: 2478375 - RNA, 19 nt, Homo sapiens
  misc_RNA (1)...(19): siRNA sense strand
aggcagaaauacuggagag

SEQ ID NO: 2478376 - RNA, 19 nt, Homo sapiens
  misc_RNA (1)...(19): siRNA sense strand
gaagagagagcccaggaca

SEQ ID NO: 2478377 - RNA, 19 nt, Homo sapiens
  misc_RNA (1)...(19): siRNA sense strand
ccaaaagaggcaagaaagu

SEQ ID NO: 2478378 - RNA, 19 nt, Homo sapiens
  misc_RNA (1)...(19): siRNA sense strand
cugaaaacuccgaaacaau

SEQ ID NO: 2478379 - RNA, 19 nt, Homo sapiens
  misc_RNA (1)...(19): siRNA sense strand
caagaaagucuguacccau

SEQ ID NO: 2478380 - RNA, 19 nt, Homo sapiens
  misc_RNA (1)...(19): siRNA sense strand
ccagcaauauucagucuaa

SEQ ID NO: 2478381 - RNA, 19 nt, Homo sapiens
  misc_RNA (1)...(19): siRNA sense strand
cuauaaaacugguggugga

SEQ ID NO: 2478382 - RNA, 19 nt, Homo sapiens
  misc_RNA (1)...(19): siRNA sense strand
gaguuauaaaggaagugaa

SEQ ID NO: 2478383 - RNA, 19 nt, Homo sapiens
  misc_RNA (1)...(19): siRNA sense strand
agucucuucugcugggaaa

SEQ ID NO: 2478384 - RNA, 19 nt, Homo sapiens
  misc_RNA (1)...(19): siRNA sense strand
gaugguuguaagaguggaa

SEQ ID NO: 2478385 - RNA, 19 nt, Homo sapiens
  misc_RNA (1)...(19): siRNA sense strand
cagcaauauucagucuaaa

SEQ ID NO: 2478386 - RNA, 19 nt, Homo sapiens
  misc_RNA (1)...(19): siRNA sense strand
gcuccaaacuauaggcuga

SEQ ID NO: 2478387 - RNA, 19 nt, Homo sapiens
  misc_RNA (1)...(19): siRNA sense strand
augaagaugaugaugacaa

SEQ ID NO: 2478388 - RNA, 19 nt, Homo sapiens
  misc_RNA (1)...(19): siRNA sense strand
augcagaugaugugagacu

SEQ ID NO: 2478389 - RNA, 19 nt, Homo sapiens
  misc_RNA (1)...(19): siRNA sense strand
gggaccuaaccaagggaga

SEQ ID NO: 2478390 - RNA, 19 nt, Homo sapiens
  misc_RNA (1)...(19): siRNA sense strand
accaaggguuauaaaucaa

SEQ ID NO: 2478391 - RNA, 19 nt, Homo sapiens
  misc_RNA (1)...(19): siRNA sense strand
cuggauaucgcaaggcaga

SEQ ID NO: 2478392 - RNA, 19 nt, Homo sapiens
  misc_RNA (1)...(19): siRNA sense strand
uaugggaaucacagaguau

SEQ ID NO: 2478393 - RNA, 19 nt, Homo sapiens
  misc_RNA (1)...(19): siRNA sense strand
gugaagaucauuaaggcau

SEQ ID NO: 2478394 - RNA, 19 nt, Homo sapiens
  misc_RNA (1)...(19): siRNA sense strand
uggugaaucgcgugggaau

SEQ ID NO: 2478395 - RNA, 19 nt, Homo sapiens
  misc_RNA (1)...(19): siRNA sense strand
cccaguggcuugacggcaa

SEQ ID NO: 2478396 - RNA, 19 nt, Homo sapiens
  misc_RNA (1)...(19): siRNA sense strand
gugcaucuaucuauggcaa

SEQ ID NO: 2478397 - RNA, 19 nt, Homo sapiens
  misc_RNA (1)...(19): siRNA sense strand
cgugggaaugguagaaaca

SEQ ID NO: 2478398 - RNA, 19 nt, Homo sapiens
  misc_RNA (1)...(19): siRNA sense strand
uggacgacgugaagaucau

SEQ ID NO: 2478399 - RNA, 19 nt, Homo sapiens
  misc_RNA (1)...(19): siRNA sense strand
aggucgagguggugcaucu

SEQ ID NO: 2478400 - RNA, 19 nt, Homo sapiens
  misc_RNA (1)...(19): siRNA sense strand
gggcagaaggacaggugga

SEQ ID NO: 2478401 - RNA, 19 nt, Homo sapiens
  misc_RNA (1)...(19): siRNA sense strand
cagacaaggaagcuggcaa

SEQ ID NO: 2478402 - RNA, 19 nt, Homo sapiens
  misc_RNA (1)...(19): siRNA sense strand
ugaggaagcuggcuggaga

SEQ ID NO: 2478403 - RNA, 19 nt, Homo sapiens
  misc_RNA (1)...(19): siRNA sense strand
aaggacagguggagggaag

SEQ ID NO: 2478404 - RNA, 19 nt, Homo sapiens
  misc_RNA (1)...(19): siRNA sense strand
aggcugugagcgugaggaa

SEQ ID NO: 2478405 - RNA, 19 nt, Homo sapiens
  misc_RNA (1)...(19): siRNA sense strand
gggcagaaggacaggugga

SEQ ID NO: 2478406 - RNA, 19 nt, Homo sapiens
  misc_RNA (1)...(19): siRNA sense strand
cagacaaggaagcuggcaa

SEQ ID NO: 2478407 - RNA, 19 nt, Homo sapiens
  misc_RNA (1)...(19): siRNA sense strand
ugaggaagcuggcuggaga

SEQ ID NO: 2478408 - RNA, 19 nt, Homo sapiens
  misc_RNA (1)...(19): siRNA sense strand
aaggacagguggagggaag

SEQ ID NO: 2478409 - RNA, 19 nt, Homo sapiens
  misc_RNA (1)...(19): siRNA sense strand
aggcugugagcgugaggaa

SEQ ID NO: 2478410 - RNA, 19 nt, Homo sapiens
  misc_RNA (1)...(19): siRNA sense strand
gggcagaaggacaggugga

SEQ ID NO: 2478411 - RNA, 19 nt, Homo sapiens
  misc_RNA (1)...(19): siRNA sense strand
cagacaaggaagcuggcaa

SEQ ID NO: 2478412 - RNA, 19 nt, Homo sapiens
  misc_RNA (1)...(19): siRNA sense strand
ugaggaagcuggcuggaga

SEQ ID NO: 2478413 - RNA, 19 nt, Homo sapiens
  misc_RNA (1)...(19): siRNA sense strand
aaggacagguggagggaag

SEQ ID NO: 2478414 - RNA, 19 nt, Homo sapiens
  misc_RNA (1)...(19): siRNA sense strand
aggcugugagcgugaggaa

SEQ ID NO: 2478415 - RNA, 19 nt, Homo sapiens
  misc_RNA (1)...(19): siRNA sense strand
gugacaaggcccugagcuu

SEQ ID NO: 2478416 - RNA, 19 nt, Homo sapiens
  misc_RNA (1)...(19): siRNA sense strand
aguucuuggugguggauga

SEQ ID NO: 2478417 - RNA, 19 nt, Homo sapiens
  misc_RNA (1)...(19): siRNA sense strand
gaaaguucuugguggugga

SEQ ID NO: 2478418 - RNA, 19 nt, Homo sapiens
  misc_RNA (1)...(19): siRNA sense strand
gugacaaggcccugagcuu

SEQ ID NO: 2478419 - RNA, 19 nt, Homo sapiens
  misc_RNA (1)...(19): siRNA sense strand
aguucuuggugguggauga

SEQ ID NO: 2478420 - RNA, 19 nt, Homo sapiens
  misc_RNA (1)...(19): siRNA sense strand
gaaaguucuugguggugga

SEQ ID NO: 2478421 - RNA, 19 nt, Homo sapiens
  misc_RNA (1)...(19): siRNA sense strand
gugacaaggcccugagcuu

SEQ ID NO: 2478422 - RNA, 19 nt, Homo sapiens
  misc_RNA (1)...(19): siRNA sense strand
aguucuuggugguggauga

SEQ ID NO: 2478423 - RNA, 19 nt, Homo sapiens
  misc_RNA (1)...(19): siRNA sense strand
gaaaguucuugguggugga

SEQ ID NO: 2478424 - RNA, 19 nt, Homo sapiens
  misc_RNA (1)...(19): siRNA sense strand
gugacaaggcccugagcuu

SEQ ID NO: 2478425 - RNA, 19 nt, Homo sapiens
  misc_RNA (1)...(19): siRNA sense strand
aguucuuggugguggauga

SEQ ID NO: 2478426 - RNA, 19 nt, Homo sapiens
  misc_RNA (1)...(19): siRNA sense strand
gaaaguucuugguggugga

SEQ ID NO: 2478427 - RNA, 19 nt, Homo sapiens
  misc_RNA (1)...(19): siRNA sense strand
gugacaaggcccugagcuu

SEQ ID NO: 2478428 - RNA, 19 nt, Homo sapiens
  misc_RNA (1)...(19): siRNA sense strand
aguucuuggugguggauga

SEQ ID NO: 2478429 - RNA, 19 nt, Homo sapiens
  misc_RNA (1)...(19): siRNA sense strand
gaaaguucuugguggugga

SEQ ID NO: 2478430 - RNA, 19 nt, Homo sapiens
  misc_RNA (1)...(19): siRNA sense strand
aggugaaggccauggacuu

SEQ ID NO: 2478431 - RNA, 19 nt, Homo sapiens
  misc_RNA (1)...(19): siRNA sense strand
ggccauaguugcagcagca

SEQ ID NO: 2478432 - RNA, 19 nt, Homo sapiens
  misc_RNA (1)...(19): siRNA sense strand
gauguggacaagaggguca

SEQ ID NO: 2478433 - RNA, 19 nt, Homo sapiens
  misc_RNA (1)...(19): siRNA sense strand
gacaagagggucauggaga

SEQ ID NO: 2478434 - RNA, 19 nt, Homo sapiens
  misc_RNA (1)...(19): siRNA sense strand
ccgagauggaacaguauga

SEQ ID NO: 2478435 - RNA, 19 nt, Homo sapiens
  misc_RNA (1)...(19): siRNA sense strand
ucagcagcauccagggcaa

SEQ ID NO: 2478436 - RNA, 19 nt, Homo sapiens
  misc_RNA (1)...(19): siRNA sense strand
agaagaagaaagaugugau

SEQ ID NO: 2478437 - RNA, 19 nt, Homo sapiens
  misc_RNA (1)...(19): siRNA sense strand
agaagaaagaugugauccu

SEQ ID NO: 2478438 - RNA, 19 nt, Homo sapiens
  misc_RNA (1)...(19): siRNA sense strand
gggccagaaaagagcggaa

SEQ ID NO: 2478439 - RNA, 19 nt, Homo sapiens
  misc_RNA (1)...(19): siRNA sense strand
ugccgaaggugaaggccau

SEQ ID NO: 2478440 - RNA, 19 nt, Homo sapiens
  misc_RNA (1)...(19): siRNA sense strand
agguauggaguuauggaca

SEQ ID NO: 2478441 - RNA, 19 nt, Homo sapiens
  misc_RNA (1)...(19): siRNA sense strand
agaaagaaauugagcgcca

SEQ ID NO: 2478442 - RNA, 19 nt, Homo sapiens
  misc_RNA (1)...(19): siRNA sense strand
aggcugaagaggaacgaua

SEQ ID NO: 2478443 - RNA, 19 nt, Homo sapiens
  misc_RNA (1)...(19): siRNA sense strand
agcacagaguagagaacaa

SEQ ID NO: 2478444 - RNA, 19 nt, Homo sapiens
  misc_RNA (1)...(19): siRNA sense strand
cgccauaagcagaagauca

SEQ ID NO: 2478445 - RNA, 19 nt, Homo sapiens
  misc_RNA (1)...(19): siRNA sense strand
agaaggagauugagcgucu

SEQ ID NO: 2478446 - RNA, 19 nt, Homo sapiens
  misc_RNA (1)...(19): siRNA sense strand
gaaagagagagcaggcuga

SEQ ID NO: 2478447 - RNA, 19 nt, Homo sapiens
  misc_RNA (1)...(19): siRNA sense strand
guucaucauaagaaggaga

SEQ ID NO: 2478448 - RNA, 19 nt, Homo sapiens
  misc_RNA (1)...(19): siRNA sense strand
gggccuucggaaagagaga

SEQ ID NO: 2478449 - RNA, 19 nt, Homo sapiens
  misc_RNA (1)...(19): siRNA sense strand
agaagaaaucguucaucau

SEQ ID NO: 2478450 - RNA, 19 nt, Homo sapiens
  misc_RNA (1)...(19): siRNA sense strand
aggcugaagaggaacgaua

SEQ ID NO: 2478451 - RNA, 19 nt, Homo sapiens
  misc_RNA (1)...(19): siRNA sense strand
gaaagagagagcaggcuga

SEQ ID NO: 2478452 - RNA, 19 nt, Homo sapiens
  misc_RNA (1)...(19): siRNA sense strand
gggccuucggaaagagaga

SEQ ID NO: 2478453 - RNA, 19 nt, Homo sapiens
  misc_RNA (1)...(19): siRNA sense strand
aggcugaagaggaacgaua

SEQ ID NO: 2478454 - RNA, 19 nt, Homo sapiens
  misc_RNA (1)...(19): siRNA sense strand
gaaagagagagcaggcuga

SEQ ID NO: 2478455 - RNA, 19 nt, Homo sapiens
  misc_RNA (1)...(19): siRNA sense strand
gggccuucggaaagagaga

SEQ ID NO: 2478456 - RNA, 19 nt, Homo sapiens
  misc_RNA (1)...(19): siRNA sense strand
gugcagaaauucagggcaa

SEQ ID NO: 2478457 - RNA, 19 nt, Homo sapiens
  misc_RNA (1)...(19): siRNA sense strand
gugacaaggaaaaggguaa

SEQ ID NO: 2478458 - RNA, 19 nt, Homo sapiens
  misc_RNA (1)...(19): siRNA sense strand
accugggaaucaagggaaa

SEQ ID NO: 2478459 - RNA, 19 nt, Homo sapiens
  misc_RNA (1)...(19): siRNA sense strand
gugcagaaauucagggcaa

SEQ ID NO: 2478460 - RNA, 19 nt, Homo sapiens
  misc_RNA (1)...(19): siRNA sense strand
gugacaaggaaaaggguaa

SEQ ID NO: 2478461 - RNA, 19 nt, Homo sapiens
  misc_RNA (1)...(19): siRNA sense strand
accugggaaucaagggaaa

SEQ ID NO: 2478462 - RNA, 19 nt, Homo sapiens
  misc_RNA (1)...(19): siRNA sense strand
acgcagaagcagcuggaaa

SEQ ID NO: 2478463 - RNA, 19 nt, Homo sapiens
  misc_RNA (1)...(19): siRNA sense strand
cggcagaaguccagcagga

SEQ ID NO: 2478464 - RNA, 19 nt, Homo sapiens
  misc_RNA (1)...(19): siRNA sense strand
ccacaguguccgagaucau

SEQ ID NO: 2478465 - RNA, 19 nt, Homo sapiens
  misc_RNA (1)...(19): siRNA sense strand
ggguaugggagaagaucau

SEQ ID NO: 2478466 - RNA, 19 nt, Homo sapiens
  misc_RNA (1)...(19): siRNA sense strand
accugaacauggaggacaa

SEQ ID NO: 2478467 - RNA, 19 nt, Homo sapiens
  misc_RNA (1)...(19): siRNA sense strand
aggaggugguagucagcua

SEQ ID NO: 2478468 - RNA, 19 nt, Homo sapiens
  misc_RNA (1)...(19): siRNA sense strand
gcuuaugacugcugcgcca

SEQ ID NO: 2478469 - RNA, 19 nt, Homo sapiens
  misc_RNA (1)...(19): siRNA sense strand
uggagaaguacaaagguau

SEQ ID NO: 2478470 - RNA, 19 nt, Homo sapiens
  misc_RNA (1)...(19): siRNA sense strand
agaagaucauggagcgcau

SEQ ID NO: 2478471 - RNA, 19 nt, Homo sapiens
  misc_RNA (1)...(19): siRNA sense strand
cgcagaagcagcuggaaaa

SEQ ID NO: 2478472 - RNA, 19 nt, Homo sapiens
  misc_RNA (1)...(19): siRNA sense strand
uggcagagacacagcacuu

SEQ ID NO: 2478473 - RNA, 19 nt, Homo sapiens
  misc_RNA (1)...(19): siRNA sense strand
ugauaaucugacugaacaa

SEQ ID NO: 2478474 - RNA, 19 nt, Homo sapiens
  misc_RNA (1)...(19): siRNA sense strand
cggugaccuuggagcagaa

SEQ ID NO: 2478475 - RNA, 19 nt, Homo sapiens
  misc_RNA (1)...(19): siRNA sense strand
agaagaaggaugaggccgu

SEQ ID NO: 2478476 - RNA, 19 nt, Homo sapiens
  misc_RNA (1)...(19): siRNA sense strand
ggaaugaagugccugagga

SEQ ID NO: 2478477 - RNA, 19 nt, Homo sapiens
  misc_RNA (1)...(19): siRNA sense strand
gaggaaggcuggcugcaca

SEQ ID NO: 2478478 - RNA, 19 nt, Homo sapiens
  misc_RNA (1)...(19): siRNA sense strand
ccuccaaacaagauggcca

SEQ ID NO: 2478479 - RNA, 19 nt, Homo sapiens
  misc_RNA (1)...(19): siRNA sense strand
acgcaauucuggagcugga

SEQ ID NO: 2478480 - RNA, 19 nt, Homo sapiens
  misc_RNA (1)...(19): siRNA sense strand
gggccaugucggugaccuu

SEQ ID NO: 2478481 - RNA, 19 nt, Homo sapiens
  misc_RNA (1)...(19): siRNA sense strand
aggaugaggccguguacca

SEQ ID NO: 2478482 - RNA, 19 nt, Homo sapiens
  misc_RNA (1)...(19): siRNA sense strand
cuccaaacaagauggccaa

SEQ ID NO: 2478483 - RNA, 19 nt, Homo sapiens
  misc_RNA (1)...(19): siRNA sense strand
cgaugaaacugaaacggcu

SEQ ID NO: 2478484 - RNA, 19 nt, Homo sapiens
  misc_RNA (1)...(19): siRNA sense strand
augaagaugaggaggaaga

SEQ ID NO: 2478485 - RNA, 19 nt, Homo sapiens
  misc_RNA (1)...(19): siRNA sense strand
cagugauaauagagugaca

SEQ ID NO: 2478486 - RNA, 19 nt, Homo sapiens
  misc_RNA (1)...(19): siRNA sense strand
cgaacaaagagcuggcuga

SEQ ID NO: 2478487 - RNA, 19 nt, Homo sapiens
  misc_RNA (1)...(19): siRNA sense strand
gugcagaaauuuaaccaca

SEQ ID NO: 2478488 - RNA, 19 nt, Homo sapiens
  misc_RNA (1)...(19): siRNA sense strand
agaugaggaggaagaggaa

SEQ ID NO: 2478489 - RNA, 19 nt, Homo sapiens
  misc_RNA (1)...(19): siRNA sense strand
aagaugaagaugaggagga

SEQ ID NO: 2478490 - RNA, 19 nt, Homo sapiens
  misc_RNA (1)...(19): siRNA sense strand
guggauucagccuggauaa

SEQ ID NO: 2478491 - RNA, 19 nt, Homo sapiens
  misc_RNA (1)...(19): siRNA sense strand
aggaggaagaggaaggcca

SEQ ID NO: 2478492 - RNA, 19 nt, Homo sapiens
  misc_RNA (1)...(19): siRNA sense strand
gaugagagccagacccuga

SEQ ID NO: 2478493 - RNA, 19 nt, Homo sapiens
  misc_RNA (1)...(19): siRNA sense strand
ggagagaccaguaaaccga

SEQ ID NO: 2478494 - RNA, 19 nt, Homo sapiens
  misc_RNA (1)...(19): siRNA sense strand
aggcagaaaaugaagccaa

SEQ ID NO: 2478495 - RNA, 19 nt, Homo sapiens
  misc_RNA (1)...(19): siRNA sense strand
acuuggauauggaggacca

SEQ ID NO: 2478496 - RNA, 19 nt, Homo sapiens
  misc_RNA (1)...(19): siRNA sense strand
aaauuuaaccacagccaca

SEQ ID NO: 2478497 - RNA, 19 nt, Homo sapiens
  misc_RNA (1)...(19): siRNA sense strand
augaagaugaggaggaaga

SEQ ID NO: 2478498 - RNA, 19 nt, Homo sapiens
  misc_RNA (1)...(19): siRNA sense strand
cagugauaauagagugaca

SEQ ID NO: 2478499 - RNA, 19 nt, Homo sapiens
  misc_RNA (1)...(19): siRNA sense strand
cgaacaaagagcuggcuga

SEQ ID NO: 2478500 - RNA, 19 nt, Homo sapiens
  misc_RNA (1)...(19): siRNA sense strand
gugcagaaauuuaaccaca

SEQ ID NO: 2478501 - RNA, 19 nt, Homo sapiens
  misc_RNA (1)...(19): siRNA sense strand
agaugaggaggaagaggaa

SEQ ID NO: 2478502 - RNA, 19 nt, Homo sapiens
  misc_RNA (1)...(19): siRNA sense strand
aagaugaagaugaggagga

SEQ ID NO: 2478503 - RNA, 19 nt, Homo sapiens
  misc_RNA (1)...(19): siRNA sense strand
guggauucagccuggauaa

SEQ ID NO: 2478504 - RNA, 19 nt, Homo sapiens
  misc_RNA (1)...(19): siRNA sense strand
aggaggaagaggaaggcca

SEQ ID NO: 2478505 - RNA, 19 nt, Homo sapiens
  misc_RNA (1)...(19): siRNA sense strand
gaugagagccagacccuga

SEQ ID NO: 2478506 - RNA, 19 nt, Homo sapiens
  misc_RNA (1)...(19): siRNA sense strand
ggagagaccaguaaaccga

SEQ ID NO: 2478507 - RNA, 19 nt, Homo sapiens
  misc_RNA (1)...(19): siRNA sense strand
aggcagaaaaugaagccaa

SEQ ID NO: 2478508 - RNA, 19 nt, Homo sapiens
  misc_RNA (1)...(19): siRNA sense strand
acuuggauauggaggacca

SEQ ID NO: 2478509 - RNA, 19 nt, Homo sapiens
  misc_RNA (1)...(19): siRNA sense strand
aaauuuaaccacagccaca

SEQ ID NO: 2478510 - RNA, 19 nt, Homo sapiens
  misc_RNA (1)...(19): siRNA sense strand
augaagaugaggaggaaga

SEQ ID NO: 2478511 - RNA, 19 nt, Homo sapiens
  misc_RNA (1)...(19): siRNA sense strand
cgaacaaagagcuggcuga

SEQ ID NO: 2478512 - RNA, 19 nt, Homo sapiens
  misc_RNA (1)...(19): siRNA sense strand
gugcagaaauuuaaccaca

SEQ ID NO: 2478513 - RNA, 19 nt, Homo sapiens
  misc_RNA (1)...(19): siRNA sense strand
agaugaggaggaagaggaa

SEQ ID NO: 2478514 - RNA, 19 nt, Homo sapiens
  misc_RNA (1)...(19): siRNA sense strand
aagaugaagaugaggagga

SEQ ID NO: 2478515 - RNA, 19 nt, Homo sapiens
  misc_RNA (1)...(19): siRNA sense strand
guggauucagccuggauaa

SEQ ID NO: 2478516 - RNA, 19 nt, Homo sapiens
  misc_RNA (1)...(19): siRNA sense strand
aggaggaagaggaaggcca

SEQ ID NO: 2478517 - RNA, 19 nt, Homo sapiens
  misc_RNA (1)...(19): siRNA sense strand
gaugagagccagacccuga

SEQ ID NO: 2478518 - RNA, 19 nt, Homo sapiens
  misc_RNA (1)...(19): siRNA sense strand
ggagagaccaguaaaccga

SEQ ID NO: 2478519 - RNA, 19 nt, Homo sapiens
  misc_RNA (1)...(19): siRNA sense strand
aggcagaaaaugaagccaa

SEQ ID NO: 2478520 - RNA, 19 nt, Homo sapiens
  misc_RNA (1)...(19): siRNA sense strand
acuuggauauggaggacca

SEQ ID NO: 2478521 - RNA, 19 nt, Homo sapiens
  misc_RNA (1)...(19): siRNA sense strand
aaauuuaaccacagccaca

SEQ ID NO: 2478522 - RNA, 19 nt, Homo sapiens
  misc_RNA (1)...(19): siRNA sense strand
uguuuaacuuggaggaaga

SEQ ID NO: 2478523 - RNA, 19 nt, Homo sapiens
  misc_RNA (1)...(19): siRNA sense strand
gcgacaagcuggugagccu

SEQ ID NO: 2478524 - RNA, 19 nt, Homo sapiens
  misc_RNA (1)...(19): siRNA sense strand
ugaccaagaauguggaaaa

SEQ ID NO: 2478525 - RNA, 19 nt, Homo sapiens
  misc_RNA (1)...(19): siRNA sense strand
agguuuggcaagaagguaa

SEQ ID NO: 2478526 - RNA, 19 nt, Homo sapiens
  misc_RNA (1)...(19): siRNA sense strand
agucgggauuccaggacaa

SEQ ID NO: 2478527 - RNA, 19 nt, Homo sapiens
  misc_RNA (1)...(19): siRNA sense strand
ucaagaggcuccagggcca

SEQ ID NO: 2478528 - RNA, 19 nt, Homo sapiens
  misc_RNA (1)...(19): siRNA sense strand
acaacaaccucauggagca

SEQ ID NO: 2478529 - RNA, 19 nt, Homo sapiens
  misc_RNA (1)...(19): siRNA sense strand
uguacgacuuugaugggaa

SEQ ID NO: 2478530 - RNA, 19 nt, Homo sapiens
  misc_RNA (1)...(19): siRNA sense strand
guugaagaugugcgggauu

SEQ ID NO: 2478531 - RNA, 19 nt, Homo sapiens
  misc_RNA (1)...(19): siRNA sense strand
cugagaagcucgugggagg

SEQ ID NO: 2478532 - RNA, 19 nt, Homo sapiens
  misc_RNA (1)...(19): siRNA sense strand
guuugaggugucaguguua

SEQ ID NO: 2478533 - RNA, 19 nt, Homo sapiens
  misc_RNA (1)...(19): siRNA sense strand
aagaaggagauugaagaaa

SEQ ID NO: 2478534 - RNA, 19 nt, Homo sapiens
  misc_RNA (1)...(19): siRNA sense strand
ugagaaauuucaagaggcu

SEQ ID NO: 2478535 - RNA, 19 nt, Homo sapiens
  misc_RNA (1)...(19): siRNA sense strand
gggaggacgaggagcuguu

SEQ ID NO: 2478536 - RNA, 19 nt, Homo sapiens
  misc_RNA (1)...(19): siRNA sense strand
cugaagauguggaugcacu

SEQ ID NO: 2478537 - RNA, 19 nt, Homo sapiens
  misc_RNA (1)...(19): siRNA sense strand
cgauuugaugggugguaca

SEQ ID NO: 2478538 - RNA, 19 nt, Homo sapiens
  misc_RNA (1)...(19): siRNA sense strand
uuucagaccuggugagcgu

SEQ ID NO: 2478539 - RNA, 19 nt, Homo sapiens
  misc_RNA (1)...(19): siRNA sense strand
gcuacugguuugagaacac

SEQ ID NO: 2478540 - RNA, 19 nt, Homo sapiens
  misc_RNA (1)...(19): siRNA sense strand
gugacagaugugccagaua

SEQ ID NO: 2478541 - RNA, 19 nt, Homo sapiens
  misc_RNA (1)...(19): siRNA sense strand
gcacagauggggcagcaaa

SEQ ID NO: 2478542 - RNA, 19 nt, Homo sapiens
  misc_RNA (1)...(19): siRNA sense strand
uguaccagcccuugggaga

SEQ ID NO: 2478543 - RNA, 19 nt, Homo sapiens
  misc_RNA (1)...(19): siRNA sense strand
caccaucguccuugaacaa

SEQ ID NO: 2478544 - RNA, 19 nt, Homo sapiens
  misc_RNA (1)...(19): siRNA sense strand
cgggcagauccguguggua

SEQ ID NO: 2478545 - RNA, 19 nt, Homo sapiens
  misc_RNA (1)...(19): siRNA sense strand
uggcugacaaggauggcaa

SEQ ID NO: 2478546 - RNA, 19 nt, Homo sapiens
  misc_RNA (1)...(19): siRNA sense strand
ggaggaacugacaugggaa

SEQ ID NO: 2478547 - RNA, 19 nt, Homo sapiens
  misc_RNA (1)...(19): siRNA sense strand
cggaagaagguggagauca

SEQ ID NO: 2478548 - RNA, 19 nt, Homo sapiens
  misc_RNA (1)...(19): siRNA sense strand
agaacaucgcuguguauga

SEQ ID NO: 2478549 - RNA, 19 nt, Homo sapiens
  misc_RNA (1)...(19): siRNA sense strand
cggaugagaaauuucaaga

SEQ ID NO: 2478550 - RNA, 19 nt, Homo sapiens
  misc_RNA (1)...(19): siRNA sense strand
ccgccgaguuccucaacau

SEQ ID NO: 2478551 - RNA, 19 nt, Homo sapiens
  misc_RNA (1)...(19): siRNA sense strand
gguuugagaacaccaggaa

SEQ ID NO: 2478552 - RNA, 19 nt, Homo sapiens
  misc_RNA (1)...(19): siRNA sense strand
cggcuccggaugagaaauu

SEQ ID NO: 2478553 - RNA, 19 nt, Homo sapiens
  misc_RNA (1)...(19): siRNA sense strand
uguuuaacuuggaggaaga

SEQ ID NO: 2478554 - RNA, 19 nt, Homo sapiens
  misc_RNA (1)...(19): siRNA sense strand
gcgacaagcuggugagccu

SEQ ID NO: 2478555 - RNA, 19 nt, Homo sapiens
  misc_RNA (1)...(19): siRNA sense strand
ugaccaagaauguggaaaa

SEQ ID NO: 2478556 - RNA, 19 nt, Homo sapiens
  misc_RNA (1)...(19): siRNA sense strand
agguuuggcaagaagguaa

SEQ ID NO: 2478557 - RNA, 19 nt, Homo sapiens
  misc_RNA (1)...(19): siRNA sense strand
agucgggauuccaggacaa

SEQ ID NO: 2478558 - RNA, 19 nt, Homo sapiens
  misc_RNA (1)...(19): siRNA sense strand
ucaagaggcuccagggcca

SEQ ID NO: 2478559 - RNA, 19 nt, Homo sapiens
  misc_RNA (1)...(19): siRNA sense strand
acaacaaccucauggagca

SEQ ID NO: 2478560 - RNA, 19 nt, Homo sapiens
  misc_RNA (1)...(19): siRNA sense strand
uguacgacuuugaugggaa

SEQ ID NO: 2478561 - RNA, 19 nt, Homo sapiens
  misc_RNA (1)...(19): siRNA sense strand
guugaagaugugcgggauu

SEQ ID NO: 2478562 - RNA, 19 nt, Homo sapiens
  misc_RNA (1)...(19): siRNA sense strand
cugagaagcucgugggagg

SEQ ID NO: 2478563 - RNA, 19 nt, Homo sapiens
  misc_RNA (1)...(19): siRNA sense strand
guuugaggugucaguguua

SEQ ID NO: 2478564 - RNA, 19 nt, Homo sapiens
  misc_RNA (1)...(19): siRNA sense strand
aagaaggagauugaagaaa

SEQ ID NO: 2478565 - RNA, 19 nt, Homo sapiens
  misc_RNA (1)...(19): siRNA sense strand
ugagaaauuucaagaggcu

SEQ ID NO: 2478566 - RNA, 19 nt, Homo sapiens
  misc_RNA (1)...(19): siRNA sense strand
gggaggacgaggagcuguu

SEQ ID NO: 2478567 - RNA, 19 nt, Homo sapiens
  misc_RNA (1)...(19): siRNA sense strand
cugaagauguggaugcacu

SEQ ID NO: 2478568 - RNA, 19 nt, Homo sapiens
  misc_RNA (1)...(19): siRNA sense strand
cgauuugaugggugguaca

SEQ ID NO: 2478569 - RNA, 19 nt, Homo sapiens
  misc_RNA (1)...(19): siRNA sense strand
uuucagaccuggugagcgu

SEQ ID NO: 2478570 - RNA, 19 nt, Homo sapiens
  misc_RNA (1)...(19): siRNA sense strand
gcuacugguuugagaacac

SEQ ID NO: 2478571 - RNA, 19 nt, Homo sapiens
  misc_RNA (1)...(19): siRNA sense strand
gugacagaugugccagaua

SEQ ID NO: 2478572 - RNA, 19 nt, Homo sapiens
  misc_RNA (1)...(19): siRNA sense strand
gcacagauggggcagcaaa

SEQ ID NO: 2478573 - RNA, 19 nt, Homo sapiens
  misc_RNA (1)...(19): siRNA sense strand
uguaccagcccuugggaga

SEQ ID NO: 2478574 - RNA, 19 nt, Homo sapiens
  misc_RNA (1)...(19): siRNA sense strand
caccaucguccuugaacaa

SEQ ID NO: 2478575 - RNA, 19 nt, Homo sapiens
  misc_RNA (1)...(19): siRNA sense strand
cgggcagauccguguggua

SEQ ID NO: 2478576 - RNA, 19 nt, Homo sapiens
  misc_RNA (1)...(19): siRNA sense strand
uggcugacaaggauggcaa

SEQ ID NO: 2478577 - RNA, 19 nt, Homo sapiens
  misc_RNA (1)...(19): siRNA sense strand
ggaggaacugacaugggaa

SEQ ID NO: 2478578 - RNA, 19 nt, Homo sapiens
  misc_RNA (1)...(19): siRNA sense strand
cggaagaagguggagauca

SEQ ID NO: 2478579 - RNA, 19 nt, Homo sapiens
  misc_RNA (1)...(19): siRNA sense strand
agaacaucgcuguguauga

SEQ ID NO: 2478580 - RNA, 19 nt, Homo sapiens
  misc_RNA (1)...(19): siRNA sense strand
cggaugagaaauuucaaga

SEQ ID NO: 2478581 - RNA, 19 nt, Homo sapiens
  misc_RNA (1)...(19): siRNA sense strand
ccgccgaguuccucaacau

SEQ ID NO: 2478582 - RNA, 19 nt, Homo sapiens
  misc_RNA (1)...(19): siRNA sense strand
gguuugagaacaccaggaa

SEQ ID NO: 2478583 - RNA, 19 nt, Homo sapiens
  misc_RNA (1)...(19): siRNA sense strand
cggcuccggaugagaaauu

SEQ ID NO: 2478584 - RNA, 19 nt, Homo sapiens
  misc_RNA (1)...(19): siRNA sense strand
cuaaaggguuugaagccaa

SEQ ID NO: 2478585 - RNA, 19 nt, Homo sapiens
  misc_RNA (1)...(19): siRNA sense strand
agucauugccacagggaca

SEQ ID NO: 2478586 - RNA, 19 nt, Homo sapiens
  misc_RNA (1)...(19): siRNA sense strand
ccugaauaaacacgguaaa

SEQ ID NO: 2478587 - RNA, 19 nt, Homo sapiens
  misc_RNA (1)...(19): siRNA sense strand
ccgccauggaugacaguga

SEQ ID NO: 2478588 - RNA, 19 nt, Homo sapiens
  misc_RNA (1)...(19): siRNA sense strand
gugagagaucugagcuuca

SEQ ID NO: 2478589 - RNA, 19 nt, Homo sapiens
  misc_RNA (1)...(19): siRNA sense strand
cguuaauucggaagcuaga

SEQ ID NO: 2478590 - RNA, 19 nt, Homo sapiens
  misc_RNA (1)...(19): siRNA sense strand
ggaucugggcccuggaacu

SEQ ID NO: 2478591 - RNA, 19 nt, Homo sapiens
  misc_RNA (1)...(19): siRNA sense strand
ccuaaaggguuugaagcca

SEQ ID NO: 2478592 - RNA, 19 nt, Homo sapiens
  misc_RNA (1)...(19): siRNA sense strand
ccaaugugauuauguggga

SEQ ID NO: 2478593 - RNA, 19 nt, Homo sapiens
  misc_RNA (1)...(19): siRNA sense strand
ucacagacuuccugagcca

SEQ ID NO: 2478594 - RNA, 19 nt, Homo sapiens
  misc_RNA (1)...(19): siRNA sense strand
gagaagagcccugaggaga

SEQ ID NO: 2478595 - RNA, 19 nt, Homo sapiens
  misc_RNA (1)...(19): siRNA sense strand
ccgccuucaucaagaccua

SEQ ID NO: 2478596 - RNA, 19 nt, Homo sapiens
  misc_RNA (1)...(19): siRNA sense strand
agaccuacgaggacaucaa

SEQ ID NO: 2478597 - RNA, 19 nt, Homo sapiens
  misc_RNA (1)...(19): siRNA sense strand
aggagaagaaaguggaccu

SEQ ID NO: 2478598 - RNA, 19 nt, Homo sapiens
  misc_RNA (1)...(19): siRNA sense strand
acgaagauuaccugcagaa

SEQ ID NO: 2478599 - RNA, 19 nt, Homo sapiens
  misc_RNA (1)...(19): siRNA sense strand
gaucauauccaacagguca

SEQ ID NO: 2478600 - RNA, 19 nt, Homo sapiens
  misc_RNA (1)...(19): siRNA sense strand
ccacuuugaugucugggua

SEQ ID NO: 2478601 - RNA, 19 nt, Homo sapiens
  misc_RNA (1)...(19): siRNA sense strand
ucuucacggucuuggauau

SEQ ID NO: 2478602 - RNA, 19 nt, Homo sapiens
  misc_RNA (1)...(19): siRNA sense strand
caagauaauugguggccau

SEQ ID NO: 2478603 - RNA, 19 nt, Homo sapiens
  misc_RNA (1)...(19): siRNA sense strand
gaggaaacgaugcgggaca

SEQ ID NO: 2478604 - RNA, 19 nt, Homo sapiens
  misc_RNA (1)...(19): siRNA sense strand
cuuucaggccaguggguca

SEQ ID NO: 2478605 - RNA, 19 nt, Homo sapiens
  misc_RNA (1)...(19): siRNA sense strand
aggaaacgaugcgggacaa

SEQ ID NO: 2478606 - RNA, 19 nt, Homo sapiens
  misc_RNA (1)...(19): siRNA sense strand
cugcaaugcgugaacauca

SEQ ID NO: 2478607 - RNA, 19 nt, Homo sapiens
  misc_RNA (1)...(19): siRNA sense strand
cagaagcuggauugaggaa

SEQ ID NO: 2478608 - RNA, 19 nt, Homo sapiens
  misc_RNA (1)...(19): siRNA sense strand
ccucccuguaagagagaaa

SEQ ID NO: 2478609 - RNA, 19 nt, Homo sapiens
  misc_RNA (1)...(19): siRNA sense strand
agagagaaaaucagaagaa

SEQ ID NO: 2478610 - RNA, 19 nt, Homo sapiens
  misc_RNA (1)...(19): siRNA sense strand
cggucaaggcggaagccau

SEQ ID NO: 2478611 - RNA, 19 nt, Homo sapiens
  misc_RNA (1)...(19): siRNA sense strand
aagccgaggacaagagcau

SEQ ID NO: 2478612 - RNA, 19 nt, Homo sapiens
  misc_RNA (1)...(19): siRNA sense strand
ugacauuuguggugggcgu

SEQ ID NO: 2478613 - RNA, 19 nt, Homo sapiens
  misc_RNA (1)...(19): siRNA sense strand
ggaaagaugagauugguuc

SEQ ID NO: 2478614 - RNA, 19 nt, Homo sapiens
  misc_RNA (1)...(19): siRNA sense strand
aagccaugaagaagcgcaa

SEQ ID NO: 2478615 - RNA, 19 nt, Homo sapiens
  misc_RNA (1)...(19): siRNA sense strand
cgucaagauuacugagaua

SEQ ID NO: 2478616 - RNA, 19 nt, Homo sapiens
  misc_RNA (1)...(19): siRNA sense strand
caggaaagauuuaggaaaa

SEQ ID NO: 2478617 - RNA, 19 nt, Homo sapiens
  misc_RNA (1)...(19): siRNA sense strand
ugaaagaagucaagggcca

SEQ ID NO: 2478618 - RNA, 19 nt, Homo sapiens
  misc_RNA (1)...(19): siRNA sense strand
aggcagagauggaguguga

SEQ ID NO: 2478619 - RNA, 19 nt, Homo sapiens
  misc_RNA (1)...(19): siRNA sense strand
ccaggaugcuaaagauaaa

SEQ ID NO: 2478620 - RNA, 19 nt, Homo sapiens
  misc_RNA (1)...(19): siRNA sense strand
gccugaagguggacaguaa

SEQ ID NO: 2478621 - RNA, 19 nt, Homo sapiens
  misc_RNA (1)...(19): siRNA sense strand
ggcaauucauggaaggaaa

SEQ ID NO: 2478622 - RNA, 19 nt, Homo sapiens
  misc_RNA (1)...(19): siRNA sense strand
auaaauaggcagaugggaa

SEQ ID NO: 2478623 - RNA, 19 nt, Homo sapiens
  misc_RNA (1)...(19): siRNA sense strand
cuucaaacuuaguggcauu

SEQ ID NO: 2478624 - RNA, 19 nt, Homo sapiens
  misc_RNA (1)...(19): siRNA sense strand
gcguggagauagagaacau

SEQ ID NO: 2478625 - RNA, 19 nt, Homo sapiens
  misc_RNA (1)...(19): siRNA sense strand
ccaggaaagauuuaggaaa

SEQ ID NO: 2478626 - RNA, 19 nt, Homo sapiens
  misc_RNA (1)...(19): siRNA sense strand
ugauauugccucaggaaau

SEQ ID NO: 2478627 - RNA, 19 nt, Homo sapiens
  misc_RNA (1)...(19): siRNA sense strand
acauaggagucauugguua

SEQ ID NO: 2478628 - RNA, 19 nt, Homo sapiens
  misc_RNA (1)...(19): siRNA sense strand
agucaaugguccacaagaa

SEQ ID NO: 2478629 - RNA, 19 nt, Homo sapiens
  misc_RNA (1)...(19): siRNA sense strand
gguauaugaugguggaguu

SEQ ID NO: 2478630 - RNA, 19 nt, Homo sapiens
  misc_RNA (1)...(19): siRNA sense strand
ucaaagugaaccagguaaa

SEQ ID NO: 2478631 - RNA, 19 nt, Homo sapiens
  misc_RNA (1)...(19): siRNA sense strand
guuuauucaugcagagauu

SEQ ID NO: 2478632 - RNA, 19 nt, Homo sapiens
  misc_RNA (1)...(19): siRNA sense strand
ucaggaaaugagagaauua

SEQ ID NO: 2478633 - RNA, 19 nt, Homo sapiens
  misc_RNA (1)...(19): siRNA sense strand
gaaccaaggacuaagguga

SEQ ID NO: 2478634 - RNA, 19 nt, Homo sapiens
  misc_RNA (1)...(19): siRNA sense strand
gagcagaaacauaagcaau

SEQ ID NO: 2478635 - RNA, 19 nt, Homo sapiens
  misc_RNA (1)...(19): siRNA sense strand
gaacaaaacgaguugcaaa

SEQ ID NO: 2478636 - RNA, 19 nt, Homo sapiens
  misc_RNA (1)...(19): siRNA sense strand
cugaugaacuauacggauu

SEQ ID NO: 2478637 - RNA, 19 nt, Homo sapiens
  misc_RNA (1)...(19): siRNA sense strand
ccucagcaucucaggaaua

SEQ ID NO: 2478638 - RNA, 19 nt, Homo sapiens
  misc_RNA (1)...(19): siRNA sense strand
cgucagaagcagaugggau

SEQ ID NO: 2478639 - RNA, 19 nt, Homo sapiens
  misc_RNA (1)...(19): siRNA sense strand
uggcgaggcugaugaacua

SEQ ID NO: 2478640 - RNA, 19 nt, Homo sapiens
  misc_RNA (1)...(19): siRNA sense strand
caaggagacaaauggguua

SEQ ID NO: 2478641 - RNA, 19 nt, Homo sapiens
  misc_RNA (1)...(19): siRNA sense strand
aaaccuuacuggagugaau

SEQ ID NO: 2478642 - RNA, 19 nt, Homo sapiens
  misc_RNA (1)...(19): siRNA sense strand
cgaugguauuuguggauga

SEQ ID NO: 2478643 - RNA, 19 nt, Homo sapiens
  misc_RNA (1)...(19): siRNA sense strand
aaauagagguagauggacu

SEQ ID NO: 2478644 - RNA, 19 nt, Homo sapiens
  misc_RNA (1)...(19): siRNA sense strand
gugccaaaccgauggaaga

SEQ ID NO: 2478645 - RNA, 19 nt, Homo sapiens
  misc_RNA (1)...(19): siRNA sense strand
cagcaggaguauuaccaua

SEQ ID NO: 2478646 - RNA, 19 nt, Homo sapiens
  misc_RNA (1)...(19): siRNA sense strand
ggaauugacgucuuggaaa

SEQ ID NO: 2478647 - RNA, 19 nt, Homo sapiens
  misc_RNA (1)...(19): siRNA sense strand
ucguaugucuauugguuua

SEQ ID NO: 2478648 - RNA, 19 nt, Homo sapiens
  misc_RNA (1)...(19): siRNA sense strand
cuucaucucuauaaggaaa

SEQ ID NO: 2478649 - RNA, 19 nt, Homo sapiens
  misc_RNA (1)...(19): siRNA sense strand
agaacagcguggagauaga

SEQ ID NO: 2478650 - RNA, 19 nt, Homo sapiens
  misc_RNA (1)...(19): siRNA sense strand
ucugaugaguauugaagua

SEQ ID NO: 2478651 - RNA, 19 nt, Homo sapiens
  misc_RNA (1)...(19): siRNA sense strand
cagcagugacggagaacuu

SEQ ID NO: 2478652 - RNA, 19 nt, Homo sapiens
  misc_RNA (1)...(19): siRNA sense strand
agcagaaacauaagcaaua

SEQ ID NO: 2478653 - RNA, 19 nt, Homo sapiens
  misc_RNA (1)...(19): siRNA sense strand
ccaaggacaagguggauuu

SEQ ID NO: 2478654 - RNA, 19 nt, Homo sapiens
  misc_RNA (1)...(19): siRNA sense strand
gucuauugguuuagcgaau

SEQ ID NO: 2478655 - RNA, 19 nt, Homo sapiens
  misc_RNA (1)...(19): siRNA sense strand
gcauauuggaaguguacau

SEQ ID NO: 2478656 - RNA, 19 nt, Homo sapiens
  misc_RNA (1)...(19): siRNA sense strand
agguuagccuggaggguga

SEQ ID NO: 2478657 - RNA, 19 nt, Homo sapiens
  misc_RNA (1)...(19): siRNA sense strand
ccauggaaacugaggcaga

SEQ ID NO: 2478658 - RNA, 19 nt, Homo sapiens
  misc_RNA (1)...(19): siRNA sense strand
acaaaggccacaugaacaa

SEQ ID NO: 2478659 - RNA, 19 nt, Homo sapiens
  misc_RNA (1)...(19): siRNA sense strand
ggggaaagauggacgcauu

SEQ ID NO: 2478660 - RNA, 19 nt, Homo sapiens
  misc_RNA (1)...(19): siRNA sense strand
gcugaugagccgaugguau

SEQ ID NO: 2478661 - RNA, 19 nt, Homo sapiens
  misc_RNA (1)...(19): siRNA sense strand
auggcaagguguugaagaa

SEQ ID NO: 2478662 - RNA, 19 nt, Homo sapiens
  misc_RNA (1)...(19): siRNA sense strand
ucacaacuuuacagagaau

SEQ ID NO: 2478663 - RNA, 19 nt, Homo sapiens
  misc_RNA (1)...(19): siRNA sense strand
acauauugaaccugaagaa

SEQ ID NO: 2478664 - RNA, 19 nt, Homo sapiens
  misc_RNA (1)...(19): siRNA sense strand
cuuggaaagugaugcaaau

SEQ ID NO: 2478665 - RNA, 19 nt, Homo sapiens
  misc_RNA (1)...(19): siRNA sense strand
gaucagugcuaaacaggau

SEQ ID NO: 2478666 - RNA, 19 nt, Homo sapiens
  misc_RNA (1)...(19): siRNA sense strand
cagaaguacaggugcugaa

SEQ ID NO: 2478667 - RNA, 19 nt, Homo sapiens
  misc_RNA (1)...(19): siRNA sense strand
ccagaagggcuaucggcua

SEQ ID NO: 2478668 - RNA, 19 nt, Homo sapiens
  misc_RNA (1)...(19): siRNA sense strand
gcagaugggauuugcuaau

SEQ ID NO: 2478669 - RNA, 19 nt, Homo sapiens
  misc_RNA (1)...(19): siRNA sense strand
augcagagauuuuggaauu

SEQ ID NO: 2478670 - RNA, 19 nt, Homo sapiens
  misc_RNA (1)...(19): siRNA sense strand
gcuuaggaauucagucauu

SEQ ID NO: 2478671 - RNA, 19 nt, Homo sapiens
  misc_RNA (1)...(19): siRNA sense strand
gagaggaccaggaugcuaa

SEQ ID NO: 2478672 - RNA, 19 nt, Homo sapiens
  misc_RNA (1)...(19): siRNA sense strand
gcagagauggagugugaga

SEQ ID NO: 2478673 - RNA, 19 nt, Homo sapiens
  misc_RNA (1)...(19): siRNA sense strand
gaugcaaauacuucaguua

SEQ ID NO: 2478674 - RNA, 19 nt, Homo sapiens
  misc_RNA (1)...(19): siRNA sense strand
ccuaagaacuccuggacac

SEQ ID NO: 2478675 - RNA, 19 nt, Homo sapiens
  misc_RNA (1)...(19): siRNA sense strand
aguagaagaugcaguggau

SEQ ID NO: 2478676 - RNA, 19 nt, Homo sapiens
  misc_RNA (1)...(19): siRNA sense strand
acaucaaccuccauggcaa

SEQ ID NO: 2478677 - RNA, 19 nt, Homo sapiens
  misc_RNA (1)...(19): siRNA sense strand
aggcauuccaugugauauu

SEQ ID NO: 2478678 - RNA, 19 nt, Homo sapiens
  misc_RNA (1)...(19): siRNA sense strand
guggaaacugugcaggaua

SEQ ID NO: 2478679 - RNA, 19 nt, Homo sapiens
  misc_RNA (1)...(19): siRNA sense strand
aggccaaguucaagucauu

SEQ ID NO: 2478680 - RNA, 19 nt, Homo sapiens
  misc_RNA (1)...(19): siRNA sense strand
cagauugugcuuaggaauu

SEQ ID NO: 2478681 - RNA, 19 nt, Homo sapiens
  misc_RNA (1)...(19): siRNA sense strand
gccagaacacucagggcaa

SEQ ID NO: 2478682 - RNA, 19 nt, Homo sapiens
  misc_RNA (1)...(19): siRNA sense strand
augacugacagcagaaaua

SEQ ID NO: 2478683 - RNA, 19 nt, Homo sapiens
  misc_RNA (1)...(19): siRNA sense strand
ucauauugacccaggaaca

SEQ ID NO: 2478684 - RNA, 19 nt, Homo sapiens
  misc_RNA (1)...(19): siRNA sense strand
ggacuguugacccgaaaua

SEQ ID NO: 2478685 - RNA, 19 nt, Homo sapiens
  misc_RNA (1)...(19): siRNA sense strand
ggaagcucaaggagacaaa

SEQ ID NO: 2478686 - RNA, 19 nt, Homo sapiens
  misc_RNA (1)...(19): siRNA sense strand
cuuuguggcuccagagaca

SEQ ID NO: 2478687 - RNA, 19 nt, Homo sapiens
  misc_RNA (1)...(19): siRNA sense strand
cugugaaggaggaucuaua

SEQ ID NO: 2478688 - RNA, 19 nt, Homo sapiens
  misc_RNA (1)...(19): siRNA sense strand
gucagaagcagaugggauu

SEQ ID NO: 2478689 - RNA, 19 nt, Homo sapiens
  misc_RNA (1)...(19): siRNA sense strand
ggaagaacaaacaucacaa

SEQ ID NO: 2478690 - RNA, 19 nt, Homo sapiens
  misc_RNA (1)...(19): siRNA sense strand
caagcagaauucagugcaa

SEQ ID NO: 2478691 - RNA, 19 nt, Homo sapiens
  misc_RNA (1)...(19): siRNA sense strand
cugaugagccgaugguauu

SEQ ID NO: 2478692 - RNA, 19 nt, Homo sapiens
  misc_RNA (1)...(19): siRNA sense strand
gguagauggacuuugguau

SEQ ID NO: 2478693 - RNA, 19 nt, Homo sapiens
  misc_RNA (1)...(19): siRNA sense strand
cauaggagucauugguuau

SEQ ID NO: 2478694 - RNA, 19 nt, Homo sapiens
  misc_RNA (1)...(19): siRNA sense strand
cgucaagauuacugagaua

SEQ ID NO: 2478695 - RNA, 19 nt, Homo sapiens
  misc_RNA (1)...(19): siRNA sense strand
caggaaagauuuaggaaaa

SEQ ID NO: 2478696 - RNA, 19 nt, Homo sapiens
  misc_RNA (1)...(19): siRNA sense strand
ugaaagaagucaagggcca

SEQ ID NO: 2478697 - RNA, 19 nt, Homo sapiens
  misc_RNA (1)...(19): siRNA sense strand
aggcagagauggaguguga

SEQ ID NO: 2478698 - RNA, 19 nt, Homo sapiens
  misc_RNA (1)...(19): siRNA sense strand
ccaggaugcuaaagauaaa

SEQ ID NO: 2478699 - RNA, 19 nt, Homo sapiens
  misc_RNA (1)...(19): siRNA sense strand
gccugaagguggacaguaa

SEQ ID NO: 2478700 - RNA, 19 nt, Homo sapiens
  misc_RNA (1)...(19): siRNA sense strand
ggcaauucauggaaggaaa

SEQ ID NO: 2478701 - RNA, 19 nt, Homo sapiens
  misc_RNA (1)...(19): siRNA sense strand
auaaauaggcagaugggaa

SEQ ID NO: 2478702 - RNA, 19 nt, Homo sapiens
  misc_RNA (1)...(19): siRNA sense strand
cuucaaacuuaguggcauu

SEQ ID NO: 2478703 - RNA, 19 nt, Homo sapiens
  misc_RNA (1)...(19): siRNA sense strand
gcguggagauagagaacau

SEQ ID NO: 2478704 - RNA, 19 nt, Homo sapiens
  misc_RNA (1)...(19): siRNA sense strand
ccaggaaagauuuaggaaa

SEQ ID NO: 2478705 - RNA, 19 nt, Homo sapiens
  misc_RNA (1)...(19): siRNA sense strand
ugauauugccucaggaaau

SEQ ID NO: 2478706 - RNA, 19 nt, Homo sapiens
  misc_RNA (1)...(19): siRNA sense strand
acauaggagucauugguua

SEQ ID NO: 2478707 - RNA, 19 nt, Homo sapiens
  misc_RNA (1)...(19): siRNA sense strand
agucaaugguccacaagaa

SEQ ID NO: 2478708 - RNA, 19 nt, Homo sapiens
  misc_RNA (1)...(19): siRNA sense strand
gguauaugaugguggaguu

SEQ ID NO: 2478709 - RNA, 19 nt, Homo sapiens
  misc_RNA (1)...(19): siRNA sense strand
ucaaagugaaccagguaaa

SEQ ID NO: 2478710 - RNA, 19 nt, Homo sapiens
  misc_RNA (1)...(19): siRNA sense strand
guuuauucaugcagagauu

SEQ ID NO: 2478711 - RNA, 19 nt, Homo sapiens
  misc_RNA (1)...(19): siRNA sense strand
ucaggaaaugagagaauua

SEQ ID NO: 2478712 - RNA, 19 nt, Homo sapiens
  misc_RNA (1)...(19): siRNA sense strand
gaaccaaggacuaagguga

SEQ ID NO: 2478713 - RNA, 19 nt, Homo sapiens
  misc_RNA (1)...(19): siRNA sense strand
gagcagaaacauaagcaau

SEQ ID NO: 2478714 - RNA, 19 nt, Homo sapiens
  misc_RNA (1)...(19): siRNA sense strand
gaacaaaacgaguugcaaa

SEQ ID NO: 2478715 - RNA, 19 nt, Homo sapiens
  misc_RNA (1)...(19): siRNA sense strand
cugaugaacuauacggauu

SEQ ID NO: 2478716 - RNA, 19 nt, Homo sapiens
  misc_RNA (1)...(19): siRNA sense strand
ccucagcaucucaggaaua

SEQ ID NO: 2478717 - RNA, 19 nt, Homo sapiens
  misc_RNA (1)...(19): siRNA sense strand
cgucagaagcagaugggau

SEQ ID NO: 2478718 - RNA, 19 nt, Homo sapiens
  misc_RNA (1)...(19): siRNA sense strand
uggcgaggcugaugaacua

SEQ ID NO: 2478719 - RNA, 19 nt, Homo sapiens
  misc_RNA (1)...(19): siRNA sense strand
caaggagacaaauggguua

SEQ ID NO: 2478720 - RNA, 19 nt, Homo sapiens
  misc_RNA (1)...(19): siRNA sense strand
aaaccuuacuggagugaau

SEQ ID NO: 2478721 - RNA, 19 nt, Homo sapiens
  misc_RNA (1)...(19): siRNA sense strand
cgaugguauuuguggauga

SEQ ID NO: 2478722 - RNA, 19 nt, Homo sapiens
  misc_RNA (1)...(19): siRNA sense strand
aaauagagguagauggacu

SEQ ID NO: 2478723 - RNA, 19 nt, Homo sapiens
  misc_RNA (1)...(19): siRNA sense strand
gugccaaaccgauggaaga

SEQ ID NO: 2478724 - RNA, 19 nt, Homo sapiens
  misc_RNA (1)...(19): siRNA sense strand
cagcaggaguauuaccaua

SEQ ID NO: 2478725 - RNA, 19 nt, Homo sapiens
  misc_RNA (1)...(19): siRNA sense strand
ggaauugacgucuuggaaa

SEQ ID NO: 2478726 - RNA, 19 nt, Homo sapiens
  misc_RNA (1)...(19): siRNA sense strand
ucguaugucuauugguuua

SEQ ID NO: 2478727 - RNA, 19 nt, Homo sapiens
  misc_RNA (1)...(19): siRNA sense strand
cuucaucucuauaaggaaa

SEQ ID NO: 2478728 - RNA, 19 nt, Homo sapiens
  misc_RNA (1)...(19): siRNA sense strand
agaacagcguggagauaga

SEQ ID NO: 2478729 - RNA, 19 nt, Homo sapiens
  misc_RNA (1)...(19): siRNA sense strand
ucugaugaguauugaagua

SEQ ID NO: 2478730 - RNA, 19 nt, Homo sapiens
  misc_RNA (1)...(19): siRNA sense strand
cagcagugacggagaacuu

SEQ ID NO: 2478731 - RNA, 19 nt, Homo sapiens
  misc_RNA (1)...(19): siRNA sense strand
agcagaaacauaagcaaua

SEQ ID NO: 2478732 - RNA, 19 nt, Homo sapiens
  misc_RNA (1)...(19): siRNA sense strand
ccaaggacaagguggauuu

SEQ ID NO: 2478733 - RNA, 19 nt, Homo sapiens
  misc_RNA (1)...(19): siRNA sense strand
gucuauugguuuagcgaau

SEQ ID NO: 2478734 - RNA, 19 nt, Homo sapiens
  misc_RNA (1)...(19): siRNA sense strand
gcauauuggaaguguacau

SEQ ID NO: 2478735 - RNA, 19 nt, Homo sapiens
  misc_RNA (1)...(19): siRNA sense strand
agguuagccuggaggguga

SEQ ID NO: 2478736 - RNA, 19 nt, Homo sapiens
  misc_RNA (1)...(19): siRNA sense strand
ccauggaaacugaggcaga

SEQ ID NO: 2478737 - RNA, 19 nt, Homo sapiens
  misc_RNA (1)...(19): siRNA sense strand
acaaaggccacaugaacaa

SEQ ID NO: 2478738 - RNA, 19 nt, Homo sapiens
  misc_RNA (1)...(19): siRNA sense strand
ggggaaagauggacgcauu

SEQ ID NO: 2478739 - RNA, 19 nt, Homo sapiens
  misc_RNA (1)...(19): siRNA sense strand
gcugaugagccgaugguau

SEQ ID NO: 2478740 - RNA, 19 nt, Homo sapiens
  misc_RNA (1)...(19): siRNA sense strand
auggcaagguguugaagaa

SEQ ID NO: 2478741 - RNA, 19 nt, Homo sapiens
  misc_RNA (1)...(19): siRNA sense strand
ucacaacuuuacagagaau

SEQ ID NO: 2478742 - RNA, 19 nt, Homo sapiens
  misc_RNA (1)...(19): siRNA sense strand
acauauugaaccugaagaa

SEQ ID NO: 2478743 - RNA, 19 nt, Homo sapiens
  misc_RNA (1)...(19): siRNA sense strand
cuuggaaagugaugcaaau

SEQ ID NO: 2478744 - RNA, 19 nt, Homo sapiens
  misc_RNA (1)...(19): siRNA sense strand
gaucagugcuaaacaggau

SEQ ID NO: 2478745 - RNA, 19 nt, Homo sapiens
  misc_RNA (1)...(19): siRNA sense strand
cagaaguacaggugcugaa

SEQ ID NO: 2478746 - RNA, 19 nt, Homo sapiens
  misc_RNA (1)...(19): siRNA sense strand
ccagaagggcuaucggcua

SEQ ID NO: 2478747 - RNA, 19 nt, Homo sapiens
  misc_RNA (1)...(19): siRNA sense strand
gcagaugggauuugcuaau

SEQ ID NO: 2478748 - RNA, 19 nt, Homo sapiens
  misc_RNA (1)...(19): siRNA sense strand
augcagagauuuuggaauu

SEQ ID NO: 2478749 - RNA, 19 nt, Homo sapiens
  misc_RNA (1)...(19): siRNA sense strand
gcuuaggaauucagucauu

SEQ ID NO: 2478750 - RNA, 19 nt, Homo sapiens
  misc_RNA (1)...(19): siRNA sense strand
gagaggaccaggaugcuaa

SEQ ID NO: 2478751 - RNA, 19 nt, Homo sapiens
  misc_RNA (1)...(19): siRNA sense strand
gcagagauggagugugaga

SEQ ID NO: 2478752 - RNA, 19 nt, Homo sapiens
  misc_RNA (1)...(19): siRNA sense strand
gaugcaaauacuucaguua

SEQ ID NO: 2478753 - RNA, 19 nt, Homo sapiens
  misc_RNA (1)...(19): siRNA sense strand
ccuaagaacuccuggacac

SEQ ID NO: 2478754 - RNA, 19 nt, Homo sapiens
  misc_RNA (1)...(19): siRNA sense strand
aguagaagaugcaguggau

SEQ ID NO: 2478755 - RNA, 19 nt, Homo sapiens
  misc_RNA (1)...(19): siRNA sense strand
acaucaaccuccauggcaa

SEQ ID NO: 2478756 - RNA, 19 nt, Homo sapiens
  misc_RNA (1)...(19): siRNA sense strand
aggcauuccaugugauauu

SEQ ID NO: 2478757 - RNA, 19 nt, Homo sapiens
  misc_RNA (1)...(19): siRNA sense strand
guggaaacugugcaggaua

SEQ ID NO: 2478758 - RNA, 19 nt, Homo sapiens
  misc_RNA (1)...(19): siRNA sense strand
aggccaaguucaagucauu

SEQ ID NO: 2478759 - RNA, 19 nt, Homo sapiens
  misc_RNA (1)...(19): siRNA sense strand
cagauugugcuuaggaauu

SEQ ID NO: 2478760 - RNA, 19 nt, Homo sapiens
  misc_RNA (1)...(19): siRNA sense strand
gccagaacacucagggcaa

SEQ ID NO: 2478761 - RNA, 19 nt, Homo sapiens
  misc_RNA (1)...(19): siRNA sense strand
augacugacagcagaaaua

SEQ ID NO: 2478762 - RNA, 19 nt, Homo sapiens
  misc_RNA (1)...(19): siRNA sense strand
ucauauugacccaggaaca

SEQ ID NO: 2478763 - RNA, 19 nt, Homo sapiens
  misc_RNA (1)...(19): siRNA sense strand
ggacuguugacccgaaaua

SEQ ID NO: 2478764 - RNA, 19 nt, Homo sapiens
  misc_RNA (1)...(19): siRNA sense strand
ggaagcucaaggagacaaa

SEQ ID NO: 2478765 - RNA, 19 nt, Homo sapiens
  misc_RNA (1)...(19): siRNA sense strand
cuuuguggcuccagagaca

SEQ ID NO: 2478766 - RNA, 19 nt, Homo sapiens
  misc_RNA (1)...(19): siRNA sense strand
cugugaaggaggaucuaua

SEQ ID NO: 2478767 - RNA, 19 nt, Homo sapiens
  misc_RNA (1)...(19): siRNA sense strand
gucagaagcagaugggauu

SEQ ID NO: 2478768 - RNA, 19 nt, Homo sapiens
  misc_RNA (1)...(19): siRNA sense strand
ggaagaacaaacaucacaa

SEQ ID NO: 2478769 - RNA, 19 nt, Homo sapiens
  misc_RNA (1)...(19): siRNA sense strand
caagcagaauucagugcaa

SEQ ID NO: 2478770 - RNA, 19 nt, Homo sapiens
  misc_RNA (1)...(19): siRNA sense strand
cugaugagccgaugguauu

SEQ ID NO: 2478771 - RNA, 19 nt, Homo sapiens
  misc_RNA (1)...(19): siRNA sense strand
gguagauggacuuugguau

SEQ ID NO: 2478772 - RNA, 19 nt, Homo sapiens
  misc_RNA (1)...(19): siRNA sense strand
cauaggagucauugguuau

SEQ ID NO: 2478773 - RNA, 19 nt, Homo sapiens
  misc_RNA (1)...(19): siRNA sense strand
acuaaaagcacaagggaaa

SEQ ID NO: 2478774 - RNA, 19 nt, Homo sapiens
  misc_RNA (1)...(19): siRNA sense strand
uaaccuaaauacugggcaa

SEQ ID NO: 2478775 - RNA, 19 nt, Homo sapiens
  misc_RNA (1)...(19): siRNA sense strand
acuacauggcugagagaga

SEQ ID NO: 2478776 - RNA, 19 nt, Homo sapiens
  misc_RNA (1)...(19): siRNA sense strand
caucaagaagaaugagaga

SEQ ID NO: 2478777 - RNA, 19 nt, Homo sapiens
  misc_RNA (1)...(19): siRNA sense strand
ugguggaaaugcaggaaga

SEQ ID NO: 2478778 - RNA, 19 nt, Homo sapiens
  misc_RNA (1)...(19): siRNA sense strand
uggaaaugcaggaagauca

SEQ ID NO: 2478779 - RNA, 19 nt, Homo sapiens
  misc_RNA (1)...(19): siRNA sense strand
aggcauuggaaaagugaaa

SEQ ID NO: 2478780 - RNA, 19 nt, Homo sapiens
  misc_RNA (1)...(19): siRNA sense strand
aggugaucgucauggagaa

SEQ ID NO: 2478781 - RNA, 19 nt, Homo sapiens
  misc_RNA (1)...(19): siRNA sense strand
aaaugaaagaggacaugaa

SEQ ID NO: 2478782 - RNA, 19 nt, Homo sapiens
  misc_RNA (1)...(19): siRNA sense strand
gggacaaaggugaucguca

SEQ ID NO: 2478783 - RNA, 19 nt, Homo sapiens
  misc_RNA (1)...(19): siRNA sense strand
ccuucuaacuauguggaaa

SEQ ID NO: 2478784 - RNA, 19 nt, Homo sapiens
  misc_RNA (1)...(19): siRNA sense strand
aagaacaagaguuggacau

SEQ ID NO: 2478785 - RNA, 19 nt, Homo sapiens
  misc_RNA (1)...(19): siRNA sense strand
uggcugagagagaggauga

SEQ ID NO: 2478786 - RNA, 19 nt, Homo sapiens
  misc_RNA (1)...(19): siRNA sense strand
cagcguaaauucagcacca

SEQ ID NO: 2478787 - RNA, 19 nt, Homo sapiens
  misc_RNA (1)...(19): siRNA sense strand
cugagagagaggaugaauu

SEQ ID NO: 2478788 - RNA, 19 nt, Homo sapiens
  misc_RNA (1)...(19): siRNA sense strand
ggugaucgucauggagaaa

SEQ ID NO: 2478789 - RNA, 19 nt, Homo sapiens
  misc_RNA (1)...(19): siRNA sense strand
gauagugaaucuucgccaa

SEQ ID NO: 2478790 - RNA, 19 nt, Homo sapiens
  misc_RNA (1)...(19): siRNA sense strand
ucgagaaaggagauguaau

SEQ ID NO: 2478791 - RNA, 19 nt, Homo sapiens
  misc_RNA (1)...(19): siRNA sense strand
aagaaaaccuagugugcca

SEQ ID NO: 2478792 - RNA, 19 nt, Homo sapiens
  misc_RNA (1)...(19): siRNA sense strand
gaaugagagauuauggcuu

SEQ ID NO: 2478793 - RNA, 19 nt, Homo sapiens
  misc_RNA (1)...(19): siRNA sense strand
gugacaguccuuuggguga

SEQ ID NO: 2478794 - RNA, 19 nt, Homo sapiens
  misc_RNA (1)...(19): siRNA sense strand
acaagugaacaaggagaaa

SEQ ID NO: 2478795 - RNA, 19 nt, Homo sapiens
  misc_RNA (1)...(19): siRNA sense strand
cgucaauaaccuaaauacu

SEQ ID NO: 2478796 - RNA, 19 nt, Homo sapiens
  misc_RNA (1)...(19): siRNA sense strand
ggaaaagugaaaagaaaac

SEQ ID NO: 2478797 - RNA, 19 nt, Homo sapiens
  misc_RNA (1)...(19): siRNA sense strand
uggacaaguuggaugguuc

SEQ ID NO: 2478798 - RNA, 19 nt, Homo sapiens
  misc_RNA (1)...(19): siRNA sense strand
uggcaaagucaccaggcau

SEQ ID NO: 2478799 - RNA, 19 nt, Homo sapiens
  misc_RNA (1)...(19): siRNA sense strand
cuacaauggacaaguugga

SEQ ID NO: 2478800 - RNA, 19 nt, Homo sapiens
  misc_RNA (1)...(19): siRNA sense strand
acacagauaucauggacga

SEQ ID NO: 2478801 - RNA, 19 nt, Homo sapiens
  misc_RNA (1)...(19): siRNA sense strand
agggaagaagagagagaca

SEQ ID NO: 2478802 - RNA, 19 nt, Homo sapiens
  misc_RNA (1)...(19): siRNA sense strand
ucagggaagaagagagaga

SEQ ID NO: 2478803 - RNA, 19 nt, Homo sapiens
  misc_RNA (1)...(19): siRNA sense strand
cuacagugauggagaccca

SEQ ID NO: 2478804 - RNA, 19 nt, Homo sapiens
  misc_RNA (1)...(19): siRNA sense strand
gagcaaaggaagagcagag

SEQ ID NO: 2478805 - RNA, 19 nt, Homo sapiens
  misc_RNA (1)...(19): siRNA sense strand
agaugagguagguggaaaa

SEQ ID NO: 2478806 - RNA, 19 nt, Homo sapiens
  misc_RNA (1)...(19): siRNA sense strand
aaguaugaccaaauggcua

SEQ ID NO: 2478807 - RNA, 19 nt, Homo sapiens
  misc_RNA (1)...(19): siRNA sense strand
aaggaagagcagagaaauc

SEQ ID NO: 2478808 - RNA, 19 nt, Homo sapiens
  misc_RNA (1)...(19): siRNA sense strand
augaggaggagcaaaggaa

SEQ ID NO: 2478809 - RNA, 19 nt, Homo sapiens
  misc_RNA (1)...(19): siRNA sense strand
aagaagagagagacagacu

SEQ ID NO: 2478810 - RNA, 19 nt, Homo sapiens
  misc_RNA (1)...(19): siRNA sense strand
cagacuacagugauggaga

SEQ ID NO: 2478811 - RNA, 19 nt, Homo sapiens
  misc_RNA (1)...(19): siRNA sense strand
acacagauaucauggacga

SEQ ID NO: 2478812 - RNA, 19 nt, Homo sapiens
  misc_RNA (1)...(19): siRNA sense strand
agggaagaagagagagaca

SEQ ID NO: 2478813 - RNA, 19 nt, Homo sapiens
  misc_RNA (1)...(19): siRNA sense strand
ucagggaagaagagagaga

SEQ ID NO: 2478814 - RNA, 19 nt, Homo sapiens
  misc_RNA (1)...(19): siRNA sense strand
cuacagugauggagaccca

SEQ ID NO: 2478815 - RNA, 19 nt, Homo sapiens
  misc_RNA (1)...(19): siRNA sense strand
gagcaaaggaagagcagag

SEQ ID NO: 2478816 - RNA, 19 nt, Homo sapiens
  misc_RNA (1)...(19): siRNA sense strand
agaugagguagguggaaaa

SEQ ID NO: 2478817 - RNA, 19 nt, Homo sapiens
  misc_RNA (1)...(19): siRNA sense strand
aaguaugaccaaauggcua

SEQ ID NO: 2478818 - RNA, 19 nt, Homo sapiens
  misc_RNA (1)...(19): siRNA sense strand
aaggaagagcagagaaauc

SEQ ID NO: 2478819 - RNA, 19 nt, Homo sapiens
  misc_RNA (1)...(19): siRNA sense strand
augaggaggagcaaaggaa

SEQ ID NO: 2478820 - RNA, 19 nt, Homo sapiens
  misc_RNA (1)...(19): siRNA sense strand
aagaagagagagacagacu

SEQ ID NO: 2478821 - RNA, 19 nt, Homo sapiens
  misc_RNA (1)...(19): siRNA sense strand
cagacuacagugauggaga

SEQ ID NO: 2478822 - RNA, 19 nt, Homo sapiens
  misc_RNA (1)...(19): siRNA sense strand
acacagauaucauggacga

SEQ ID NO: 2478823 - RNA, 19 nt, Homo sapiens
  misc_RNA (1)...(19): siRNA sense strand
agggaagaagagagagaca

SEQ ID NO: 2478824 - RNA, 19 nt, Homo sapiens
  misc_RNA (1)...(19): siRNA sense strand
ucagggaagaagagagaga

SEQ ID NO: 2478825 - RNA, 19 nt, Homo sapiens
  misc_RNA (1)...(19): siRNA sense strand
cuacagugauggagaccca

SEQ ID NO: 2478826 - RNA, 19 nt, Homo sapiens
  misc_RNA (1)...(19): siRNA sense strand
gagcaaaggaagagcagag

SEQ ID NO: 2478827 - RNA, 19 nt, Homo sapiens
  misc_RNA (1)...(19): siRNA sense strand
agaugagguagguggaaaa

SEQ ID NO: 2478828 - RNA, 19 nt, Homo sapiens
  misc_RNA (1)...(19): siRNA sense strand
aaguaugaccaaauggcua

SEQ ID NO: 2478829 - RNA, 19 nt, Homo sapiens
  misc_RNA (1)...(19): siRNA sense strand
aaggaagagcagagaaauc

SEQ ID NO: 2478830 - RNA, 19 nt, Homo sapiens
  misc_RNA (1)...(19): siRNA sense strand
augaggaggagcaaaggaa

SEQ ID NO: 2478831 - RNA, 19 nt, Homo sapiens
  misc_RNA (1)...(19): siRNA sense strand
aagaagagagagacagacu

SEQ ID NO: 2478832 - RNA, 19 nt, Homo sapiens
  misc_RNA (1)...(19): siRNA sense strand
cagacuacagugauggaga

SEQ ID NO: 2478833 - RNA, 19 nt, Homo sapiens
  misc_RNA (1)...(19): siRNA sense strand
acacagauaucauggacga

SEQ ID NO: 2478834 - RNA, 19 nt, Homo sapiens
  misc_RNA (1)...(19): siRNA sense strand
agggaagaagagagagaca

SEQ ID NO: 2478835 - RNA, 19 nt, Homo sapiens
  misc_RNA (1)...(19): siRNA sense strand
ucagggaagaagagagaga

SEQ ID NO: 2478836 - RNA, 19 nt, Homo sapiens
  misc_RNA (1)...(19): siRNA sense strand
cuacagugauggagaccca

SEQ ID NO: 2478837 - RNA, 19 nt, Homo sapiens
  misc_RNA (1)...(19): siRNA sense strand
gagcaaaggaagagcagag

SEQ ID NO: 2478838 - RNA, 19 nt, Homo sapiens
  misc_RNA (1)...(19): siRNA sense strand
agaugagguagguggaaaa

SEQ ID NO: 2478839 - RNA, 19 nt, Homo sapiens
  misc_RNA (1)...(19): siRNA sense strand
aaguaugaccaaauggcua

SEQ ID NO: 2478840 - RNA, 19 nt, Homo sapiens
  misc_RNA (1)...(19): siRNA sense strand
aaggaagagcagagaaauc

SEQ ID NO: 2478841 - RNA, 19 nt, Homo sapiens
  misc_RNA (1)...(19): siRNA sense strand
augaggaggagcaaaggaa

SEQ ID NO: 2478842 - RNA, 19 nt, Homo sapiens
  misc_RNA (1)...(19): siRNA sense strand
aagaagagagagacagacu

SEQ ID NO: 2478843 - RNA, 19 nt, Homo sapiens
  misc_RNA (1)...(19): siRNA sense strand
cagacuacagugauggaga

SEQ ID NO: 2478844 - RNA, 19 nt, Homo sapiens
  misc_RNA (1)...(19): siRNA sense strand
aggacuugccagagaacua

SEQ ID NO: 2478845 - RNA, 19 nt, Homo sapiens
  misc_RNA (1)...(19): siRNA sense strand
agaacuacaacgaggccaa

SEQ ID NO: 2478846 - RNA, 19 nt, Homo sapiens
  misc_RNA (1)...(19): siRNA sense strand
gcuucaaugagcauggcua

SEQ ID NO: 2478847 - RNA, 19 nt, Homo sapiens
  misc_RNA (1)...(19): siRNA sense strand
cugccuaagugcuacguga

SEQ ID NO: 2478848 - RNA, 19 nt, Homo sapiens
  misc_RNA (1)...(19): siRNA sense strand
gcuucaaugagcauggcua

SEQ ID NO: 2478849 - RNA, 19 nt, Homo sapiens
  misc_RNA (1)...(19): siRNA sense strand
aggacuugccagagaacua

SEQ ID NO: 2478850 - RNA, 19 nt, Homo sapiens
  misc_RNA (1)...(19): siRNA sense strand
agaacuacaacgaggccaa

SEQ ID NO: 2478851 - RNA, 19 nt, Homo sapiens
  misc_RNA (1)...(19): siRNA sense strand
gcuucaaugagcauggcua

SEQ ID NO: 2478852 - RNA, 19 nt, Homo sapiens
  misc_RNA (1)...(19): siRNA sense strand
cugccuaagugcuacguga

SEQ ID NO: 2478853 - RNA, 19 nt, Homo sapiens
  misc_RNA (1)...(19): siRNA sense strand
aggacuugccagagaacua

SEQ ID NO: 2478854 - RNA, 19 nt, Homo sapiens
  misc_RNA (1)...(19): siRNA sense strand
agaacuacaacgaggccaa

SEQ ID NO: 2478855 - RNA, 19 nt, Homo sapiens
  misc_RNA (1)...(19): siRNA sense strand
gcuucaaugagcauggcua

SEQ ID NO: 2478856 - RNA, 19 nt, Homo sapiens
  misc_RNA (1)...(19): siRNA sense strand
ggauacagcuacuuggcau

SEQ ID NO: 2478857 - RNA, 19 nt, Homo sapiens
  misc_RNA (1)...(19): siRNA sense strand
acacauuagaccucaccua

SEQ ID NO: 2478858 - RNA, 19 nt, Homo sapiens
  misc_RNA (1)...(19): siRNA sense strand
ugauugaugaccagggcau

SEQ ID NO: 2478859 - RNA, 19 nt, Homo sapiens
  misc_RNA (1)...(19): siRNA sense strand
aucaagaaguauaaggacu

SEQ ID NO: 2478860 - RNA, 19 nt, Homo sapiens
  misc_RNA (1)...(19): siRNA sense strand
ugaaagauauggaagacag

SEQ ID NO: 2478861 - RNA, 19 nt, Homo sapiens
  misc_RNA (1)...(19): siRNA sense strand
ggauacagcuacuuggcau

SEQ ID NO: 2478862 - RNA, 19 nt, Homo sapiens
  misc_RNA (1)...(19): siRNA sense strand
acacauuagaccucaccua

SEQ ID NO: 2478863 - RNA, 19 nt, Homo sapiens
  misc_RNA (1)...(19): siRNA sense strand
ugauugaugaccagggcau

SEQ ID NO: 2478864 - RNA, 19 nt, Homo sapiens
  misc_RNA (1)...(19): siRNA sense strand
aucaagaaguauaaggacu

SEQ ID NO: 2478865 - RNA, 19 nt, Homo sapiens
  misc_RNA (1)...(19): siRNA sense strand
auuaaagaccagaagaaga

SEQ ID NO: 2478866 - RNA, 19 nt, Homo sapiens
  misc_RNA (1)...(19): siRNA sense strand
cugaggacuuugugcgaca

SEQ ID NO: 2478867 - RNA, 19 nt, Homo sapiens
  misc_RNA (1)...(19): siRNA sense strand
ccgcgaaccaaccuggaaa

SEQ ID NO: 2478868 - RNA, 19 nt, Homo sapiens
  misc_RNA (1)...(19): siRNA sense strand
ugguggaacuugaacccaa

SEQ ID NO: 2478869 - RNA, 19 nt, Homo sapiens
  misc_RNA (1)...(19): siRNA sense strand
gacuggagccauagcggaa

SEQ ID NO: 2478870 - RNA, 19 nt, Homo sapiens
  misc_RNA (1)...(19): siRNA sense strand
gaugaggagaacagggcca

SEQ ID NO: 2478871 - RNA, 19 nt, Homo sapiens
  misc_RNA (1)...(19): siRNA sense strand
cgagaugaggggugaccaa

SEQ ID NO: 2478872 - RNA, 19 nt, Homo sapiens
  misc_RNA (1)...(19): siRNA sense strand
uucuuaaguuuguggccaa

SEQ ID NO: 2478873 - RNA, 19 nt, Homo sapiens
  misc_RNA (1)...(19): siRNA sense strand
ugggagaagaaguggguga

SEQ ID NO: 2478874 - RNA, 19 nt, Homo sapiens
  misc_RNA (1)...(19): siRNA sense strand
ccaucgagaaagugcggaa

SEQ ID NO: 2478875 - RNA, 19 nt, Homo sapiens
  misc_RNA (1)...(19): siRNA sense strand
cggaaaugggagaagaagu

SEQ ID NO: 2478876 - RNA, 19 nt, Homo sapiens
  misc_RNA (1)...(19): siRNA sense strand
cagacagcaaggagaaaga

SEQ ID NO: 2478877 - RNA, 19 nt, Homo sapiens
  misc_RNA (1)...(19): siRNA sense strand
aggagaaagaaaagucaaa

SEQ ID NO: 2478878 - RNA, 19 nt, Homo sapiens
  misc_RNA (1)...(19): siRNA sense strand
gugacagacagcaaggaga

SEQ ID NO: 2478879 - RNA, 19 nt, Homo sapiens
  misc_RNA (1)...(19): siRNA sense strand
acagcaaggagaaagaaaa

SEQ ID NO: 2478880 - RNA, 19 nt, Homo sapiens
  misc_RNA (1)...(19): siRNA sense strand
ugggagaagaaguggguga

SEQ ID NO: 2478881 - RNA, 19 nt, Homo sapiens
  misc_RNA (1)...(19): siRNA sense strand
ccaucgagaaagugcggaa

SEQ ID NO: 2478882 - RNA, 19 nt, Homo sapiens
  misc_RNA (1)...(19): siRNA sense strand
cggaaaugggagaagaagu

SEQ ID NO: 2478883 - RNA, 19 nt, Homo sapiens
  misc_RNA (1)...(19): siRNA sense strand
cagacagcaaggagaaaga

SEQ ID NO: 2478884 - RNA, 19 nt, Homo sapiens
  misc_RNA (1)...(19): siRNA sense strand
aggagaaagaaaagucaaa

SEQ ID NO: 2478885 - RNA, 19 nt, Homo sapiens
  misc_RNA (1)...(19): siRNA sense strand
gugacagacagcaaggaga

SEQ ID NO: 2478886 - RNA, 19 nt, Homo sapiens
  misc_RNA (1)...(19): siRNA sense strand
acagcaaggagaaagaaaa

SEQ ID NO: 2478887 - RNA, 19 nt, Homo sapiens
  misc_RNA (1)...(19): siRNA sense strand
gauaaagaucagacagcaa

SEQ ID NO: 2478888 - RNA, 19 nt, Homo sapiens
  misc_RNA (1)...(19): siRNA sense strand
ccgagggaacggaggauaa

SEQ ID NO: 2478889 - RNA, 19 nt, Homo sapiens
  misc_RNA (1)...(19): siRNA sense strand
ggaagaucagcaagacuua

SEQ ID NO: 2478890 - RNA, 19 nt, Homo sapiens
  misc_RNA (1)...(19): siRNA sense strand
gggaagaucagcaagacuu

SEQ ID NO: 2478891 - RNA, 19 nt, Homo sapiens
  misc_RNA (1)...(19): siRNA sense strand
gaacggaggauaaagauca

SEQ ID NO: 2478892 - RNA, 19 nt, Homo sapiens
  misc_RNA (1)...(19): siRNA sense strand
ggugacagcuuuaggcaac

SEQ ID NO: 2478893 - RNA, 19 nt, Homo sapiens
  misc_RNA (1)...(19): siRNA sense strand
agaucagacagcaacgaua

SEQ ID NO: 2478894 - RNA, 19 nt, Homo sapiens
  misc_RNA (1)...(19): siRNA sense strand
caagggaagaucagcaaga

SEQ ID NO: 2478895 - RNA, 19 nt, Homo sapiens
  misc_RNA (1)...(19): siRNA sense strand
cagacuaccacaugaacau

SEQ ID NO: 2478896 - RNA, 19 nt, Homo sapiens
  misc_RNA (1)...(19): siRNA sense strand
aguccaaucgaaaggaaga

SEQ ID NO: 2478897 - RNA, 19 nt, Homo sapiens
  misc_RNA (1)...(19): siRNA sense strand
ggccaagaucugaccguga

SEQ ID NO: 2478898 - RNA, 19 nt, Homo sapiens
  misc_RNA (1)...(19): siRNA sense strand
cagcaagacuuaugugcac

SEQ ID NO: 2478899 - RNA, 19 nt, Homo sapiens
  misc_RNA (1)...(19): siRNA sense strand
ggauaaagaucagacagca

SEQ ID NO: 2478900 - RNA, 19 nt, Homo sapiens
  misc_RNA (1)...(19): siRNA sense strand
cagcaacgauacccaguuu

SEQ ID NO: 2478901 - RNA, 19 nt, Homo sapiens
  misc_RNA (1)...(19): siRNA sense strand
cuaucaaguuggccaagau

SEQ ID NO: 2478902 - RNA, 19 nt, Homo sapiens
  misc_RNA (1)...(19): siRNA sense strand
agggaacggaggauaaaga

SEQ ID NO: 2478903 - RNA, 19 nt, Homo sapiens
  misc_RNA (1)...(19): siRNA sense strand
gauaaagaucagacagcaa

SEQ ID NO: 2478904 - RNA, 19 nt, Homo sapiens
  misc_RNA (1)...(19): siRNA sense strand
ccgagggaacggaggauaa

SEQ ID NO: 2478905 - RNA, 19 nt, Homo sapiens
  misc_RNA (1)...(19): siRNA sense strand
ggaagaucagcaagacuua

SEQ ID NO: 2478906 - RNA, 19 nt, Homo sapiens
  misc_RNA (1)...(19): siRNA sense strand
gggaagaucagcaagacuu

SEQ ID NO: 2478907 - RNA, 19 nt, Homo sapiens
  misc_RNA (1)...(19): siRNA sense strand
gaacggaggauaaagauca

SEQ ID NO: 2478908 - RNA, 19 nt, Homo sapiens
  misc_RNA (1)...(19): siRNA sense strand
ggugacagcuuuaggcaac

SEQ ID NO: 2478909 - RNA, 19 nt, Homo sapiens
  misc_RNA (1)...(19): siRNA sense strand
agaucagacagcaacgaua

SEQ ID NO: 2478910 - RNA, 19 nt, Homo sapiens
  misc_RNA (1)...(19): siRNA sense strand
caagggaagaucagcaaga

SEQ ID NO: 2478911 - RNA, 19 nt, Homo sapiens
  misc_RNA (1)...(19): siRNA sense strand
cagacuaccacaugaacau

SEQ ID NO: 2478912 - RNA, 19 nt, Homo sapiens
  misc_RNA (1)...(19): siRNA sense strand
aguccaaucgaaaggaaga

SEQ ID NO: 2478913 - RNA, 19 nt, Homo sapiens
  misc_RNA (1)...(19): siRNA sense strand
ggccaagaucugaccguga

SEQ ID NO: 2478914 - RNA, 19 nt, Homo sapiens
  misc_RNA (1)...(19): siRNA sense strand
cagcaagacuuaugugcac

SEQ ID NO: 2478915 - RNA, 19 nt, Homo sapiens
  misc_RNA (1)...(19): siRNA sense strand
ggauaaagaucagacagca

SEQ ID NO: 2478916 - RNA, 19 nt, Homo sapiens
  misc_RNA (1)...(19): siRNA sense strand
cagcaacgauacccaguuu

SEQ ID NO: 2478917 - RNA, 19 nt, Homo sapiens
  misc_RNA (1)...(19): siRNA sense strand
cuaucaaguuggccaagau

SEQ ID NO: 2478918 - RNA, 19 nt, Homo sapiens
  misc_RNA (1)...(19): siRNA sense strand
agggaacggaggauaaaga

SEQ ID NO: 2478919 - RNA, 19 nt, Homo sapiens
  misc_RNA (1)...(19): siRNA sense strand
agaauagaauugagggaaa

SEQ ID NO: 2478920 - RNA, 19 nt, Homo sapiens
  misc_RNA (1)...(19): siRNA sense strand
aagaagaagaagagggaua

SEQ ID NO: 2478921 - RNA, 19 nt, Homo sapiens
  misc_RNA (1)...(19): siRNA sense strand
cgaucaaggaggaggauua

SEQ ID NO: 2478922 - RNA, 19 nt, Homo sapiens
  misc_RNA (1)...(19): siRNA sense strand
agauaaagagcaugaguaa

SEQ ID NO: 2478923 - RNA, 19 nt, Homo sapiens
  misc_RNA (1)...(19): siRNA sense strand
gcaaagaaaauaaggguua

SEQ ID NO: 2478924 - RNA, 19 nt, Homo sapiens
  misc_RNA (1)...(19): siRNA sense strand
aggaagaagaggaggaaaa

SEQ ID NO: 2478925 - RNA, 19 nt, Homo sapiens
  misc_RNA (1)...(19): siRNA sense strand
uggaaaaggcagaaagaaa

SEQ ID NO: 2478926 - RNA, 19 nt, Homo sapiens
  misc_RNA (1)...(19): siRNA sense strand
auuaaggaguucaggaaua

SEQ ID NO: 2478927 - RNA, 19 nt, Homo sapiens
  misc_RNA (1)...(19): siRNA sense strand
ccaaagaagacuaguucaa

SEQ ID NO: 2478928 - RNA, 19 nt, Homo sapiens
  misc_RNA (1)...(19): siRNA sense strand
ccacaauaauggaugaaaa

SEQ ID NO: 2478929 - RNA, 19 nt, Homo sapiens
  misc_RNA (1)...(19): siRNA sense strand
gggagguggugaaggaaau

SEQ ID NO: 2478930 - RNA, 19 nt, Homo sapiens
  misc_RNA (1)...(19): siRNA sense strand
ugacugaagaagaaagaaa

SEQ ID NO: 2478931 - RNA, 19 nt, Homo sapiens
  misc_RNA (1)...(19): siRNA sense strand
ugacagugcuauagauaau

SEQ ID NO: 2478932 - RNA, 19 nt, Homo sapiens
  misc_RNA (1)...(19): siRNA sense strand
ggaaaaggcagaaagaaaa

SEQ ID NO: 2478933 - RNA, 19 nt, Homo sapiens
  misc_RNA (1)...(19): siRNA sense strand
guauagaaaucuugcucaa

SEQ ID NO: 2478934 - RNA, 19 nt, Homo sapiens
  misc_RNA (1)...(19): siRNA sense strand
ccucauuaaucaaggaaga

SEQ ID NO: 2478935 - RNA, 19 nt, Homo sapiens
  misc_RNA (1)...(19): siRNA sense strand
agugaaagcaaguugaaua

SEQ ID NO: 2478936 - RNA, 19 nt, Homo sapiens
  misc_RNA (1)...(19): siRNA sense strand
aagccaagauacagacaua

SEQ ID NO: 2478937 - RNA, 19 nt, Homo sapiens
  misc_RNA (1)...(19): siRNA sense strand
aguaugaagcagagaagaa

SEQ ID NO: 2478938 - RNA, 19 nt, Homo sapiens
  misc_RNA (1)...(19): siRNA sense strand
aagcagaguuggaagaaaa

SEQ ID NO: 2478939 - RNA, 19 nt, Homo sapiens
  misc_RNA (1)...(19): siRNA sense strand
ccauggaagauaagauuua

SEQ ID NO: 2478940 - RNA, 19 nt, Homo sapiens
  misc_RNA (1)...(19): siRNA sense strand
ggaaauacaaaguggcuca

SEQ ID NO: 2478941 - RNA, 19 nt, Homo sapiens
  misc_RNA (1)...(19): siRNA sense strand
ggaugaaacaggaaacaau

SEQ ID NO: 2478942 - RNA, 19 nt, Homo sapiens
  misc_RNA (1)...(19): siRNA sense strand
gugcagguucauagaaaua

SEQ ID NO: 2478943 - RNA, 19 nt, Homo sapiens
  misc_RNA (1)...(19): siRNA sense strand
ugaauuagcaacugugaaa

SEQ ID NO: 2478944 - RNA, 19 nt, Homo sapiens
  misc_RNA (1)...(19): siRNA sense strand
gggaaagaugauaaaggaa

SEQ ID NO: 2478945 - RNA, 19 nt, Homo sapiens
  misc_RNA (1)...(19): siRNA sense strand
ccuaagaagcagcaagcaa

SEQ ID NO: 2478946 - RNA, 19 nt, Homo sapiens
  misc_RNA (1)...(19): siRNA sense strand
uggaacaacugauggagaa

SEQ ID NO: 2478947 - RNA, 19 nt, Homo sapiens
  misc_RNA (1)...(19): siRNA sense strand
aggaaaguucugaagauaa

SEQ ID NO: 2478948 - RNA, 19 nt, Homo sapiens
  misc_RNA (1)...(19): siRNA sense strand
agauaaaaguugacaguga

SEQ ID NO: 2478949 - RNA, 19 nt, Homo sapiens
  misc_RNA (1)...(19): siRNA sense strand
acaaauugacugugaguga

SEQ ID NO: 2478950 - RNA, 19 nt, Homo sapiens
  misc_RNA (1)...(19): siRNA sense strand
cugaugaugcugaaagaaa

SEQ ID NO: 2478951 - RNA, 19 nt, Homo sapiens
  misc_RNA (1)...(19): siRNA sense strand
agucaaaggcagaaacaga

SEQ ID NO: 2478952 - RNA, 19 nt, Homo sapiens
  misc_RNA (1)...(19): siRNA sense strand
ugagaagucaacagggaaa

SEQ ID NO: 2478953 - RNA, 19 nt, Homo sapiens
  misc_RNA (1)...(19): siRNA sense strand
gaauugagggaaagaagaa

SEQ ID NO: 2478954 - RNA, 19 nt, Homo sapiens
  misc_RNA (1)...(19): siRNA sense strand
caagaguaauucugaggaa

SEQ ID NO: 2478955 - RNA, 19 nt, Homo sapiens
  misc_RNA (1)...(19): siRNA sense strand
aggaagaggaggaggagga

SEQ ID NO: 2478956 - RNA, 19 nt, Homo sapiens
  misc_RNA (1)...(19): siRNA sense strand
agaaguggcaagagggauu

SEQ ID NO: 2478957 - RNA, 19 nt, Homo sapiens
  misc_RNA (1)...(19): siRNA sense strand
gagggaaagaagaaauuua

SEQ ID NO: 2478958 - RNA, 19 nt, Homo sapiens
  misc_RNA (1)...(19): siRNA sense strand
aggaggaggaggaggaaga

SEQ ID NO: 2478959 - RNA, 19 nt, Homo sapiens
  misc_RNA (1)...(19): siRNA sense strand
agucggaaacuuaaagaaa

SEQ ID NO: 2478960 - RNA, 19 nt, Homo sapiens
  misc_RNA (1)...(19): siRNA sense strand
uaucaguuccagugagaaa

SEQ ID NO: 2478961 - RNA, 19 nt, Homo sapiens
  misc_RNA (1)...(19): siRNA sense strand
aagaagaagcaaagaacuu

SEQ ID NO: 2478962 - RNA, 19 nt, Homo sapiens
  misc_RNA (1)...(19): siRNA sense strand
gcaacagauaauucagaaa

SEQ ID NO: 2478963 - RNA, 19 nt, Homo sapiens
  misc_RNA (1)...(19): siRNA sense strand
augaaacaguuaaggagaa

SEQ ID NO: 2478964 - RNA, 19 nt, Homo sapiens
  misc_RNA (1)...(19): siRNA sense strand
uuucaaagucagaagcuaa

SEQ ID NO: 2478965 - RNA, 19 nt, Homo sapiens
  misc_RNA (1)...(19): siRNA sense strand
ugaaacaguuaaggagaaa

SEQ ID NO: 2478966 - RNA, 19 nt, Homo sapiens
  misc_RNA (1)...(19): siRNA sense strand
ugaugaaacuaaugugaga

SEQ ID NO: 2478967 - RNA, 19 nt, Homo sapiens
  misc_RNA (1)...(19): siRNA sense strand
cagauugauaugagaggaa

SEQ ID NO: 2478968 - RNA, 19 nt, Homo sapiens
  misc_RNA (1)...(19): siRNA sense strand
agacaacagaggagguauu

SEQ ID NO: 2478969 - RNA, 19 nt, Homo sapiens
  misc_RNA (1)...(19): siRNA sense strand
aaucagagacuguggauca

SEQ ID NO: 2478970 - RNA, 19 nt, Homo sapiens
  misc_RNA (1)...(19): siRNA sense strand
ggugauagaaauugaagau

SEQ ID NO: 2478971 - RNA, 19 nt, Homo sapiens
  misc_RNA (1)...(19): siRNA sense strand
gggcaauaauagugaaggu

SEQ ID NO: 2478972 - RNA, 19 nt, Homo sapiens
  misc_RNA (1)...(19): siRNA sense strand
caauaauagugaaggugga

SEQ ID NO: 2478973 - RNA, 19 nt, Homo sapiens
  misc_RNA (1)...(19): siRNA sense strand
aaagaaaacaagagagaga

SEQ ID NO: 2478974 - RNA, 19 nt, Homo sapiens
  misc_RNA (1)...(19): siRNA sense strand
ccuaagaacaagcacuaaa

SEQ ID NO: 2478975 - RNA, 19 nt, Homo sapiens
  misc_RNA (1)...(19): siRNA sense strand
ucuaagaagccaagauaca

SEQ ID NO: 2478976 - RNA, 19 nt, Homo sapiens
  misc_RNA (1)...(19): siRNA sense strand
ccauuaaggaguucaggaa

SEQ ID NO: 2478977 - RNA, 19 nt, Homo sapiens
  misc_RNA (1)...(19): siRNA sense strand
aggaaagauuauacagcau

SEQ ID NO: 2478978 - RNA, 19 nt, Homo sapiens
  misc_RNA (1)...(19): siRNA sense strand
caaugauguugaagugauu

SEQ ID NO: 2478979 - RNA, 19 nt, Homo sapiens
  misc_RNA (1)...(19): siRNA sense strand
agaauagaauugagggaaa

SEQ ID NO: 2478980 - RNA, 19 nt, Homo sapiens
  misc_RNA (1)...(19): siRNA sense strand
aagaagaagaagagggaua

SEQ ID NO: 2478981 - RNA, 19 nt, Homo sapiens
  misc_RNA (1)...(19): siRNA sense strand
cgaucaaggaggaggauua

SEQ ID NO: 2478982 - RNA, 19 nt, Homo sapiens
  misc_RNA (1)...(19): siRNA sense strand
agauaaagagcaugaguaa

SEQ ID NO: 2478983 - RNA, 19 nt, Homo sapiens
  misc_RNA (1)...(19): siRNA sense strand
gcaaagaaaauaaggguua

SEQ ID NO: 2478984 - RNA, 19 nt, Homo sapiens
  misc_RNA (1)...(19): siRNA sense strand
aggaagaagaggaggaaaa

SEQ ID NO: 2478985 - RNA, 19 nt, Homo sapiens
  misc_RNA (1)...(19): siRNA sense strand
uggaaaaggcagaaagaaa

SEQ ID NO: 2478986 - RNA, 19 nt, Homo sapiens
  misc_RNA (1)...(19): siRNA sense strand
auuaaggaguucaggaaua

SEQ ID NO: 2478987 - RNA, 19 nt, Homo sapiens
  misc_RNA (1)...(19): siRNA sense strand
ccaaagaagacuaguucaa

SEQ ID NO: 2478988 - RNA, 19 nt, Homo sapiens
  misc_RNA (1)...(19): siRNA sense strand
ccacaauaauggaugaaaa

SEQ ID NO: 2478989 - RNA, 19 nt, Homo sapiens
  misc_RNA (1)...(19): siRNA sense strand
gggagguggugaaggaaau

SEQ ID NO: 2478990 - RNA, 19 nt, Homo sapiens
  misc_RNA (1)...(19): siRNA sense strand
ugacugaagaagaaagaaa

SEQ ID NO: 2478991 - RNA, 19 nt, Homo sapiens
  misc_RNA (1)...(19): siRNA sense strand
ugacagugcuauagauaau

SEQ ID NO: 2478992 - RNA, 19 nt, Homo sapiens
  misc_RNA (1)...(19): siRNA sense strand
ggaaaaggcagaaagaaaa

SEQ ID NO: 2478993 - RNA, 19 nt, Homo sapiens
  misc_RNA (1)...(19): siRNA sense strand
guauagaaaucuugcucaa

SEQ ID NO: 2478994 - RNA, 19 nt, Homo sapiens
  misc_RNA (1)...(19): siRNA sense strand
ccucauuaaucaaggaaga

SEQ ID NO: 2478995 - RNA, 19 nt, Homo sapiens
  misc_RNA (1)...(19): siRNA sense strand
agugaaagcaaguugaaua

SEQ ID NO: 2478996 - RNA, 19 nt, Homo sapiens
  misc_RNA (1)...(19): siRNA sense strand
aagccaagauacagacaua

SEQ ID NO: 2478997 - RNA, 19 nt, Homo sapiens
  misc_RNA (1)...(19): siRNA sense strand
aguaugaagcagagaagaa

SEQ ID NO: 2478998 - RNA, 19 nt, Homo sapiens
  misc_RNA (1)...(19): siRNA sense strand
aagcagaguuggaagaaaa

SEQ ID NO: 2478999 - RNA, 19 nt, Homo sapiens
  misc_RNA (1)...(19): siRNA sense strand
ccauggaagauaagauuua

SEQ ID NO: 2479000 - RNA, 19 nt, Homo sapiens
  misc_RNA (1)...(19): siRNA sense strand
ggaaauacaaaguggcuca

SEQ ID NO: 2479001 - RNA, 19 nt, Homo sapiens
  misc_RNA (1)...(19): siRNA sense strand
ggaugaaacaggaaacaau

SEQ ID NO: 2479002 - RNA, 19 nt, Homo sapiens
  misc_RNA (1)...(19): siRNA sense strand
gugcagguucauagaaaua

SEQ ID NO: 2479003 - RNA, 19 nt, Homo sapiens
  misc_RNA (1)...(19): siRNA sense strand
ugaauuagcaacugugaaa

SEQ ID NO: 2479004 - RNA, 19 nt, Homo sapiens
  misc_RNA (1)...(19): siRNA sense strand
gggaaagaugauaaaggaa

SEQ ID NO: 2479005 - RNA, 19 nt, Homo sapiens
  misc_RNA (1)...(19): siRNA sense strand
ccuaagaagcagcaagcaa

SEQ ID NO: 2479006 - RNA, 19 nt, Homo sapiens
  misc_RNA (1)...(19): siRNA sense strand
uggaacaacugauggagaa

SEQ ID NO: 2479007 - RNA, 19 nt, Homo sapiens
  misc_RNA (1)...(19): siRNA sense strand
aggaaaguucugaagauaa

SEQ ID NO: 2479008 - RNA, 19 nt, Homo sapiens
  misc_RNA (1)...(19): siRNA sense strand
agauaaaaguugacaguga

SEQ ID NO: 2479009 - RNA, 19 nt, Homo sapiens
  misc_RNA (1)...(19): siRNA sense strand
acaaauugacugugaguga

SEQ ID NO: 2479010 - RNA, 19 nt, Homo sapiens
  misc_RNA (1)...(19): siRNA sense strand
cugaugaugcugaaagaaa

SEQ ID NO: 2479011 - RNA, 19 nt, Homo sapiens
  misc_RNA (1)...(19): siRNA sense strand
agucaaaggcagaaacaga

SEQ ID NO: 2479012 - RNA, 19 nt, Homo sapiens
  misc_RNA (1)...(19): siRNA sense strand
ugagaagucaacagggaaa

SEQ ID NO: 2479013 - RNA, 19 nt, Homo sapiens
  misc_RNA (1)...(19): siRNA sense strand
gaauugagggaaagaagaa

SEQ ID NO: 2479014 - RNA, 19 nt, Homo sapiens
  misc_RNA (1)...(19): siRNA sense strand
caagaguaauucugaggaa

SEQ ID NO: 2479015 - RNA, 19 nt, Homo sapiens
  misc_RNA (1)...(19): siRNA sense strand
aggaagaggaggaggagga

SEQ ID NO: 2479016 - RNA, 19 nt, Homo sapiens
  misc_RNA (1)...(19): siRNA sense strand
agaaguggcaagagggauu

SEQ ID NO: 2479017 - RNA, 19 nt, Homo sapiens
  misc_RNA (1)...(19): siRNA sense strand
gagggaaagaagaaauuua

SEQ ID NO: 2479018 - RNA, 19 nt, Homo sapiens
  misc_RNA (1)...(19): siRNA sense strand
aggaggaggaggaggaaga

SEQ ID NO: 2479019 - RNA, 19 nt, Homo sapiens
  misc_RNA (1)...(19): siRNA sense strand
agucggaaacuuaaagaaa

SEQ ID NO: 2479020 - RNA, 19 nt, Homo sapiens
  misc_RNA (1)...(19): siRNA sense strand
uaucaguuccagugagaaa

SEQ ID NO: 2479021 - RNA, 19 nt, Homo sapiens
  misc_RNA (1)...(19): siRNA sense strand
aagaagaagcaaagaacuu

SEQ ID NO: 2479022 - RNA, 19 nt, Homo sapiens
  misc_RNA (1)...(19): siRNA sense strand
gcaacagauaauucagaaa

SEQ ID NO: 2479023 - RNA, 19 nt, Homo sapiens
  misc_RNA (1)...(19): siRNA sense strand
augaaacaguuaaggagaa

SEQ ID NO: 2479024 - RNA, 19 nt, Homo sapiens
  misc_RNA (1)...(19): siRNA sense strand
uuucaaagucagaagcuaa

SEQ ID NO: 2479025 - RNA, 19 nt, Homo sapiens
  misc_RNA (1)...(19): siRNA sense strand
ugaaacaguuaaggagaaa

SEQ ID NO: 2479026 - RNA, 19 nt, Homo sapiens
  misc_RNA (1)...(19): siRNA sense strand
ugaugaaacuaaugugaga

SEQ ID NO: 2479027 - RNA, 19 nt, Homo sapiens
  misc_RNA (1)...(19): siRNA sense strand
cagauugauaugagaggaa

SEQ ID NO: 2479028 - RNA, 19 nt, Homo sapiens
  misc_RNA (1)...(19): siRNA sense strand
agacaacagaggagguauu

SEQ ID NO: 2479029 - RNA, 19 nt, Homo sapiens
  misc_RNA (1)...(19): siRNA sense strand
aaucagagacuguggauca

SEQ ID NO: 2479030 - RNA, 19 nt, Homo sapiens
  misc_RNA (1)...(19): siRNA sense strand
ggugauagaaauugaagau

SEQ ID NO: 2479031 - RNA, 19 nt, Homo sapiens
  misc_RNA (1)...(19): siRNA sense strand
gggcaauaauagugaaggu

SEQ ID NO: 2479032 - RNA, 19 nt, Homo sapiens
  misc_RNA (1)...(19): siRNA sense strand
caauaauagugaaggugga

SEQ ID NO: 2479033 - RNA, 19 nt, Homo sapiens
  misc_RNA (1)...(19): siRNA sense strand
aaagaaaacaagagagaga

SEQ ID NO: 2479034 - RNA, 19 nt, Homo sapiens
  misc_RNA (1)...(19): siRNA sense strand
ccuaagaacaagcacuaaa

SEQ ID NO: 2479035 - RNA, 19 nt, Homo sapiens
  misc_RNA (1)...(19): siRNA sense strand
ucuaagaagccaagauaca

SEQ ID NO: 2479036 - RNA, 19 nt, Homo sapiens
  misc_RNA (1)...(19): siRNA sense strand
ccauuaaggaguucaggaa

SEQ ID NO: 2479037 - RNA, 19 nt, Homo sapiens
  misc_RNA (1)...(19): siRNA sense strand
aggaaagauuauacagcau

SEQ ID NO: 2479038 - RNA, 19 nt, Homo sapiens
  misc_RNA (1)...(19): siRNA sense strand
caaugauguugaagugauu

SEQ ID NO: 2479039 - RNA, 19 nt, Homo sapiens
  misc_RNA (1)...(19): siRNA sense strand
agaauagaauugagggaaa

SEQ ID NO: 2479040 - RNA, 19 nt, Homo sapiens
  misc_RNA (1)...(19): siRNA sense strand
aagaagaagaagagggaua

SEQ ID NO: 2479041 - RNA, 19 nt, Homo sapiens
  misc_RNA (1)...(19): siRNA sense strand
cgaucaaggaggaggauua

SEQ ID NO: 2479042 - RNA, 19 nt, Homo sapiens
  misc_RNA (1)...(19): siRNA sense strand
agauaaagagcaugaguaa

SEQ ID NO: 2479043 - RNA, 19 nt, Homo sapiens
  misc_RNA (1)...(19): siRNA sense strand
gcaaagaaaauaaggguua

SEQ ID NO: 2479044 - RNA, 19 nt, Homo sapiens
  misc_RNA (1)...(19): siRNA sense strand
aggaagaagaggaggaaaa

SEQ ID NO: 2479045 - RNA, 19 nt, Homo sapiens
  misc_RNA (1)...(19): siRNA sense strand
uggaaaaggcagaaagaaa

SEQ ID NO: 2479046 - RNA, 19 nt, Homo sapiens
  misc_RNA (1)...(19): siRNA sense strand
auuaaggaguucaggaaua

SEQ ID NO: 2479047 - RNA, 19 nt, Homo sapiens
  misc_RNA (1)...(19): siRNA sense strand
ccaaagaagacuaguucaa

SEQ ID NO: 2479048 - RNA, 19 nt, Homo sapiens
  misc_RNA (1)...(19): siRNA sense strand
ccacaauaauggaugaaaa

SEQ ID NO: 2479049 - RNA, 19 nt, Homo sapiens
  misc_RNA (1)...(19): siRNA sense strand
gggagguggugaaggaaau

SEQ ID NO: 2479050 - RNA, 19 nt, Homo sapiens
  misc_RNA (1)...(19): siRNA sense strand
ugacugaagaagaaagaaa

SEQ ID NO: 2479051 - RNA, 19 nt, Homo sapiens
  misc_RNA (1)...(19): siRNA sense strand
ugacagugcuauagauaau

SEQ ID NO: 2479052 - RNA, 19 nt, Homo sapiens
  misc_RNA (1)...(19): siRNA sense strand
ggaaaaggcagaaagaaaa

SEQ ID NO: 2479053 - RNA, 19 nt, Homo sapiens
  misc_RNA (1)...(19): siRNA sense strand
guauagaaaucuugcucaa

SEQ ID NO: 2479054 - RNA, 19 nt, Homo sapiens
  misc_RNA (1)...(19): siRNA sense strand
ccucauuaaucaaggaaga

SEQ ID NO: 2479055 - RNA, 19 nt, Homo sapiens
  misc_RNA (1)...(19): siRNA sense strand
aagccaagauacagacaua

SEQ ID NO: 2479056 - RNA, 19 nt, Homo sapiens
  misc_RNA (1)...(19): siRNA sense strand
aguaugaagcagagaagaa

SEQ ID NO: 2479057 - RNA, 19 nt, Homo sapiens
  misc_RNA (1)...(19): siRNA sense strand
aagcagaguuggaagaaaa

SEQ ID NO: 2479058 - RNA, 19 nt, Homo sapiens
  misc_RNA (1)...(19): siRNA sense strand
ccauggaagauaagauuua

SEQ ID NO: 2479059 - RNA, 19 nt, Homo sapiens
  misc_RNA (1)...(19): siRNA sense strand
ggaaauacaaaguggcuca

SEQ ID NO: 2479060 - RNA, 19 nt, Homo sapiens
  misc_RNA (1)...(19): siRNA sense strand
ggaugaaacaggaaacaau

SEQ ID NO: 2479061 - RNA, 19 nt, Homo sapiens
  misc_RNA (1)...(19): siRNA sense strand
gugcagguucauagaaaua

SEQ ID NO: 2479062 - RNA, 19 nt, Homo sapiens
  misc_RNA (1)...(19): siRNA sense strand
ugaauuagcaacugugaaa

SEQ ID NO: 2479063 - RNA, 19 nt, Homo sapiens
  misc_RNA (1)...(19): siRNA sense strand
gggaaagaugauaaaggaa

SEQ ID NO: 2479064 - RNA, 19 nt, Homo sapiens
  misc_RNA (1)...(19): siRNA sense strand
ccuaagaagcagcaagcaa

SEQ ID NO: 2479065 - RNA, 19 nt, Homo sapiens
  misc_RNA (1)...(19): siRNA sense strand
uggaacaacugauggagaa

SEQ ID NO: 2479066 - RNA, 19 nt, Homo sapiens
  misc_RNA (1)...(19): siRNA sense strand
aggaaaguucugaagauaa

SEQ ID NO: 2479067 - RNA, 19 nt, Homo sapiens
  misc_RNA (1)...(19): siRNA sense strand
agauaaaaguugacaguga

SEQ ID NO: 2479068 - RNA, 19 nt, Homo sapiens
  misc_RNA (1)...(19): siRNA sense strand
acaaauugacugugaguga

SEQ ID NO: 2479069 - RNA, 19 nt, Homo sapiens
  misc_RNA (1)...(19): siRNA sense strand
cugaugaugcugaaagaaa

SEQ ID NO: 2479070 - RNA, 19 nt, Homo sapiens
  misc_RNA (1)...(19): siRNA sense strand
agucaaaggcagaaacaga

SEQ ID NO: 2479071 - RNA, 19 nt, Homo sapiens
  misc_RNA (1)...(19): siRNA sense strand
ugagaagucaacagggaaa

SEQ ID NO: 2479072 - RNA, 19 nt, Homo sapiens
  misc_RNA (1)...(19): siRNA sense strand
gaauugagggaaagaagaa

SEQ ID NO: 2479073 - RNA, 19 nt, Homo sapiens
  misc_RNA (1)...(19): siRNA sense strand
caagaguaauucugaggaa

SEQ ID NO: 2479074 - RNA, 19 nt, Homo sapiens
  misc_RNA (1)...(19): siRNA sense strand
aggaagaggaggaggagga

SEQ ID NO: 2479075 - RNA, 19 nt, Homo sapiens
  misc_RNA (1)...(19): siRNA sense strand
agaaguggcaagagggauu

SEQ ID NO: 2479076 - RNA, 19 nt, Homo sapiens
  misc_RNA (1)...(19): siRNA sense strand
gagggaaagaagaaauuua

SEQ ID NO: 2479077 - RNA, 19 nt, Homo sapiens
  misc_RNA (1)...(19): siRNA sense strand
aggaggaggaggaggaaga

SEQ ID NO: 2479078 - RNA, 19 nt, Homo sapiens
  misc_RNA (1)...(19): siRNA sense strand
agucggaaacuuaaagaaa

SEQ ID NO: 2479079 - RNA, 19 nt, Homo sapiens
  misc_RNA (1)...(19): siRNA sense strand
uaucaguuccagugagaaa

SEQ ID NO: 2479080 - RNA, 19 nt, Homo sapiens
  misc_RNA (1)...(19): siRNA sense strand
aagaagaagcaaagaacuu

SEQ ID NO: 2479081 - RNA, 19 nt, Homo sapiens
  misc_RNA (1)...(19): siRNA sense strand
gcaacagauaauucagaaa

SEQ ID NO: 2479082 - RNA, 19 nt, Homo sapiens
  misc_RNA (1)...(19): siRNA sense strand
augaaacaguuaaggagaa

SEQ ID NO: 2479083 - RNA, 19 nt, Homo sapiens
  misc_RNA (1)...(19): siRNA sense strand
uuucaaagucagaagcuaa

SEQ ID NO: 2479084 - RNA, 19 nt, Homo sapiens
  misc_RNA (1)...(19): siRNA sense strand
ugaaacaguuaaggagaaa

SEQ ID NO: 2479085 - RNA, 19 nt, Homo sapiens
  misc_RNA (1)...(19): siRNA sense strand
ugaugaaacuaaugugaga

SEQ ID NO: 2479086 - RNA, 19 nt, Homo sapiens
  misc_RNA (1)...(19): siRNA sense strand
cagauugauaugagaggaa

SEQ ID NO: 2479087 - RNA, 19 nt, Homo sapiens
  misc_RNA (1)...(19): siRNA sense strand
agacaacagaggagguauu

SEQ ID NO: 2479088 - RNA, 19 nt, Homo sapiens
  misc_RNA (1)...(19): siRNA sense strand
aaucagagacuguggauca

SEQ ID NO: 2479089 - RNA, 19 nt, Homo sapiens
  misc_RNA (1)...(19): siRNA sense strand
ggugauagaaauugaagau

SEQ ID NO: 2479090 - RNA, 19 nt, Homo sapiens
  misc_RNA (1)...(19): siRNA sense strand
gggcaauaauagugaaggu

SEQ ID NO: 2479091 - RNA, 19 nt, Homo sapiens
  misc_RNA (1)...(19): siRNA sense strand
caauaauagugaaggugga

SEQ ID NO: 2479092 - RNA, 19 nt, Homo sapiens
  misc_RNA (1)...(19): siRNA sense strand
aaagaaaacaagagagaga

SEQ ID NO: 2479093 - RNA, 19 nt, Homo sapiens
  misc_RNA (1)...(19): siRNA sense strand
ccuaagaacaagcacuaaa

SEQ ID NO: 2479094 - RNA, 19 nt, Homo sapiens
  misc_RNA (1)...(19): siRNA sense strand
ucuaagaagccaagauaca

SEQ ID NO: 2479095 - RNA, 19 nt, Homo sapiens
  misc_RNA (1)...(19): siRNA sense strand
ccauuaaggaguucaggaa

SEQ ID NO: 2479096 - RNA, 19 nt, Homo sapiens
  misc_RNA (1)...(19): siRNA sense strand
aggaaagauuauacagcau

SEQ ID NO: 2479097 - RNA, 19 nt, Homo sapiens
  misc_RNA (1)...(19): siRNA sense strand
caaugauguugaagugauu

SEQ ID NO: 2479098 - RNA, 19 nt, Homo sapiens
  misc_RNA (1)...(19): siRNA sense strand
acaaagaagaagaagaguu

SEQ ID NO: 2479099 - RNA, 19 nt, Homo sapiens
  misc_RNA (1)...(19): siRNA sense strand
gauaaacugagaacagaaa

SEQ ID NO: 2479100 - RNA, 19 nt, Homo sapiens
  misc_RNA (1)...(19): siRNA sense strand
gagagaggugauagaaauu

SEQ ID NO: 2479101 - RNA, 19 nt, Homo sapiens
  misc_RNA (1)...(19): siRNA sense strand
ugggagaagcgauggguga

SEQ ID NO: 2479102 - RNA, 19 nt, Homo sapiens
  misc_RNA (1)...(19): siRNA sense strand
cagaacugcuggaagcuga

SEQ ID NO: 2479103 - RNA, 19 nt, Homo sapiens
  misc_RNA (1)...(19): siRNA sense strand
ggagaugggagaagcgaug

SEQ ID NO: 2479104 - RNA, 19 nt, Homo sapiens
  misc_RNA (1)...(19): siRNA sense strand
gcaaggaggaagaggcaga

SEQ ID NO: 2479105 - RNA, 19 nt, Homo sapiens
  misc_RNA (1)...(19): siRNA sense strand
aggagaggcuggaggcaga

SEQ ID NO: 2479106 - RNA, 19 nt, Homo sapiens
  misc_RNA (1)...(19): siRNA sense strand
aagaugaggacgaggacau

SEQ ID NO: 2479107 - RNA, 19 nt, Homo sapiens
  misc_RNA (1)...(19): siRNA sense strand
acacagugaaguugggaga

SEQ ID NO: 2479108 - RNA, 19 nt, Homo sapiens
  misc_RNA (1)...(19): siRNA sense strand
augaaacccaagaaagaaa

SEQ ID NO: 2479109 - RNA, 19 nt, Homo sapiens
  misc_RNA (1)...(19): siRNA sense strand
accaaggagcagagaggaa

SEQ ID NO: 2479110 - RNA, 19 nt, Homo sapiens
  misc_RNA (1)...(19): siRNA sense strand
gagccagaagagaggaaga

SEQ ID NO: 2479111 - RNA, 19 nt, Homo sapiens
  misc_RNA (1)...(19): siRNA sense strand
ccaaagaugaggacgagga

SEQ ID NO: 2479112 - RNA, 19 nt, Homo sapiens
  misc_RNA (1)...(19): siRNA sense strand
uggaggaugaggaggaaca

SEQ ID NO: 2479113 - RNA, 19 nt, Homo sapiens
  misc_RNA (1)...(19): siRNA sense strand
aaggagaacuugaggcucu

SEQ ID NO: 2479114 - RNA, 19 nt, Homo sapiens
  misc_RNA (1)...(19): siRNA sense strand
acgaggacauccagagcau

SEQ ID NO: 2479115 - RNA, 19 nt, Homo sapiens
  misc_RNA (1)...(19): siRNA sense strand
aggaggaacaggagcgcga

SEQ ID NO: 2479116 - RNA, 19 nt, Homo sapiens
  misc_RNA (1)...(19): siRNA sense strand
cagcaaggaggaagaggca

SEQ ID NO: 2479117 - RNA, 19 nt, Homo sapiens
  misc_RNA (1)...(19): siRNA sense strand
ccacacggccauacggaga

SEQ ID NO: 2479118 - RNA, 19 nt, Homo sapiens
  misc_RNA (1)...(19): siRNA sense strand
gggagccagaagagaggaa

SEQ ID NO: 2479119 - RNA, 19 nt, Homo sapiens
  misc_RNA (1)...(19): siRNA sense strand
agaagauagcagugucaga

SEQ ID NO: 2479120 - RNA, 19 nt, Homo sapiens
  misc_RNA (1)...(19): siRNA sense strand
ggaaggagaacuugaggcu

SEQ ID NO: 2479121 - RNA, 19 nt, Homo sapiens
  misc_RNA (1)...(19): siRNA sense strand
gcagaggaggggaggaaca

SEQ ID NO: 2479122 - RNA, 19 nt, Homo sapiens
  misc_RNA (1)...(19): siRNA sense strand
aggcucaaccuguggauca

SEQ ID NO: 2479123 - RNA, 19 nt, Homo sapiens
  misc_RNA (1)...(19): siRNA sense strand
agagaagauagcaguguca

SEQ ID NO: 2479124 - RNA, 19 nt, Homo sapiens
  misc_RNA (1)...(19): siRNA sense strand
ccagaagagaggaagaaag

SEQ ID NO: 2479125 - RNA, 19 nt, Homo sapiens
  misc_RNA (1)...(19): siRNA sense strand
aggaggaagaggcagauau

SEQ ID NO: 2479126 - RNA, 19 nt, Homo sapiens
  misc_RNA (1)...(19): siRNA sense strand
aagaaagaaaacucggaaa

SEQ ID NO: 2479127 - RNA, 19 nt, Homo sapiens
  misc_RNA (1)...(19): siRNA sense strand
cccuggaggaggagagcuu

SEQ ID NO: 2479128 - RNA, 19 nt, Homo sapiens
  misc_RNA (1)...(19): siRNA sense strand
gcagauauguccucaccca

SEQ ID NO: 2479129 - RNA, 19 nt, Homo sapiens
  misc_RNA (1)...(19): siRNA sense strand
ucuaagaaagagugggaaa

SEQ ID NO: 2479130 - RNA, 19 nt, Homo sapiens
  misc_RNA (1)...(19): siRNA sense strand
agaugaaauccucggagaa

SEQ ID NO: 2479131 - RNA, 19 nt, Homo sapiens
  misc_RNA (1)...(19): siRNA sense strand
gcaaggagacccagggaug

SEQ ID NO: 2479132 - RNA, 19 nt, Homo sapiens
  misc_RNA (1)...(19): siRNA sense strand
aagaugaaauccucggaga

SEQ ID NO: 2479133 - RNA, 19 nt, Homo sapiens
  misc_RNA (1)...(19): siRNA sense strand
cuaagaaagagugggaaaa

SEQ ID NO: 2479134 - RNA, 19 nt, Homo sapiens
  misc_RNA (1)...(19): siRNA sense strand
cucaaauaucagagaaguu

SEQ ID NO: 2479135 - RNA, 19 nt, Homo sapiens
  misc_RNA (1)...(19): siRNA sense strand
cgaucgaaaccacaggaau

SEQ ID NO: 2479136 - RNA, 19 nt, Homo sapiens
  misc_RNA (1)...(19): siRNA sense strand
ucggcagccuccagagaau

SEQ ID NO: 2479137 - RNA, 19 nt, Homo sapiens
  misc_RNA (1)...(19): siRNA sense strand
aaacaugccuggacccaca

SEQ ID NO: 2479138 - RNA, 19 nt, Homo sapiens
  misc_RNA (1)...(19): siRNA sense strand
ugaaauccucggagaaaau

SEQ ID NO: 2479139 - RNA, 19 nt, Homo sapiens
  misc_RNA (1)...(19): siRNA sense strand
ucuaagaaagagugggaaa

SEQ ID NO: 2479140 - RNA, 19 nt, Homo sapiens
  misc_RNA (1)...(19): siRNA sense strand
agaugaaauccucggagaa

SEQ ID NO: 2479141 - RNA, 19 nt, Homo sapiens
  misc_RNA (1)...(19): siRNA sense strand
gcaaggagacccagggaug

SEQ ID NO: 2479142 - RNA, 19 nt, Homo sapiens
  misc_RNA (1)...(19): siRNA sense strand
aggaagaugacgaguaacu

SEQ ID NO: 2479143 - RNA, 19 nt, Homo sapiens
  misc_RNA (1)...(19): siRNA sense strand
ggauaugacacaugcccau

SEQ ID NO: 2479144 - RNA, 19 nt, Homo sapiens
  misc_RNA (1)...(19): siRNA sense strand
aagaugaaauccucggaga

SEQ ID NO: 2479145 - RNA, 19 nt, Homo sapiens
  misc_RNA (1)...(19): siRNA sense strand
cuaagaaagagugggaaaa

SEQ ID NO: 2479146 - RNA, 19 nt, Homo sapiens
  misc_RNA (1)...(19): siRNA sense strand
cucaaauaucagagaaguu

SEQ ID NO: 2479147 - RNA, 19 nt, Homo sapiens
  misc_RNA (1)...(19): siRNA sense strand
cgaucgaaaccacaggaau

SEQ ID NO: 2479148 - RNA, 19 nt, Homo sapiens
  misc_RNA (1)...(19): siRNA sense strand
ucggcagccuccagagaau

SEQ ID NO: 2479149 - RNA, 19 nt, Homo sapiens
  misc_RNA (1)...(19): siRNA sense strand
aaacaugccuggacccaca

SEQ ID NO: 2479150 - RNA, 19 nt, Homo sapiens
  misc_RNA (1)...(19): siRNA sense strand
ugaaauccucggagaaaau

SEQ ID NO: 2479151 - RNA, 19 nt, Homo sapiens
  misc_RNA (1)...(19): siRNA sense strand
gggaacaggugcaaggguu

SEQ ID NO: 2479152 - RNA, 19 nt, Homo sapiens
  misc_RNA (1)...(19): siRNA sense strand
ggucuaaccucuaucggau

SEQ ID NO: 2479153 - RNA, 19 nt, Homo sapiens
  misc_RNA (1)...(19): siRNA sense strand
gggaacaggugcaaggguu

SEQ ID NO: 2479154 - RNA, 19 nt, Homo sapiens
  misc_RNA (1)...(19): siRNA sense strand
ggucuaaccucuaucggau

SEQ ID NO: 2479155 - RNA, 19 nt, Homo sapiens
  misc_RNA (1)...(19): siRNA sense strand
gggaacaggugcaaggguu

SEQ ID NO: 2479156 - RNA, 19 nt, Homo sapiens
  misc_RNA (1)...(19): siRNA sense strand
ggucuaaccucuaucggau

SEQ ID NO: 2479157 - RNA, 19 nt, Homo sapiens
  misc_RNA (1)...(19): siRNA sense strand
ucaaagagaaggagggaga

SEQ ID NO: 2479158 - RNA, 19 nt, Homo sapiens
  misc_RNA (1)...(19): siRNA sense strand
ccuccugaucccagagaaa

SEQ ID NO: 2479159 - RNA, 19 nt, Homo sapiens
  misc_RNA (1)...(19): siRNA sense strand
ccuucugcucugugaguua

SEQ ID NO: 2479160 - RNA, 19 nt, Homo sapiens
  misc_RNA (1)...(19): siRNA sense strand
cagaggaagggaaaggcua

SEQ ID NO: 2479161 - RNA, 19 nt, Homo sapiens
  misc_RNA (1)...(19): siRNA sense strand
gggaaaggcuaccgcgaag

SEQ ID NO: 2479162 - RNA, 19 nt, Homo sapiens
  misc_RNA (1)...(19): siRNA sense strand
gagucacauuugagguuca

SEQ ID NO: 2479163 - RNA, 19 nt, Homo sapiens
  misc_RNA (1)...(19): siRNA sense strand
aauacuagucaaagaggau

SEQ ID NO: 2479164 - RNA, 19 nt, Homo sapiens
  misc_RNA (1)...(19): siRNA sense strand
agguuugacuccaggacga

SEQ ID NO: 2479165 - RNA, 19 nt, Homo sapiens
  misc_RNA (1)...(19): siRNA sense strand
gaauacuagucaaagagga

SEQ ID NO: 2479166 - RNA, 19 nt, Homo sapiens
  misc_RNA (1)...(19): siRNA sense strand
cgaaacucaaagagaagga

SEQ ID NO: 2479167 - RNA, 19 nt, Homo sapiens
  misc_RNA (1)...(19): siRNA sense strand
gucuugaccgugaaggaaa

SEQ ID NO: 2479168 - RNA, 19 nt, Homo sapiens
  misc_RNA (1)...(19): siRNA sense strand
ucaaagagaaggagggaga

SEQ ID NO: 2479169 - RNA, 19 nt, Homo sapiens
  misc_RNA (1)...(19): siRNA sense strand
ccuccugaucccagagaaa

SEQ ID NO: 2479170 - RNA, 19 nt, Homo sapiens
  misc_RNA (1)...(19): siRNA sense strand
ccuucugcucugugaguua

SEQ ID NO: 2479171 - RNA, 19 nt, Homo sapiens
  misc_RNA (1)...(19): siRNA sense strand
cagaggaagggaaaggcua

SEQ ID NO: 2479172 - RNA, 19 nt, Homo sapiens
  misc_RNA (1)...(19): siRNA sense strand
gggaaaggcuaccgcgaag

SEQ ID NO: 2479173 - RNA, 19 nt, Homo sapiens
  misc_RNA (1)...(19): siRNA sense strand
gagucacauuugagguuca

SEQ ID NO: 2479174 - RNA, 19 nt, Homo sapiens
  misc_RNA (1)...(19): siRNA sense strand
aauacuagucaaagaggau

SEQ ID NO: 2479175 - RNA, 19 nt, Homo sapiens
  misc_RNA (1)...(19): siRNA sense strand
agguuugacuccaggacga

SEQ ID NO: 2479176 - RNA, 19 nt, Homo sapiens
  misc_RNA (1)...(19): siRNA sense strand
gaauacuagucaaagagga

SEQ ID NO: 2479177 - RNA, 19 nt, Homo sapiens
  misc_RNA (1)...(19): siRNA sense strand
cgaaacucaaagagaagga

SEQ ID NO: 2479178 - RNA, 19 nt, Homo sapiens
  misc_RNA (1)...(19): siRNA sense strand
gucuugaccgugaaggaaa

SEQ ID NO: 2479179 - RNA, 19 nt, Homo sapiens
  misc_RNA (1)...(19): siRNA sense strand
ucaaagagaaggagggaga

SEQ ID NO: 2479180 - RNA, 19 nt, Homo sapiens
  misc_RNA (1)...(19): siRNA sense strand
ggaaauuaccugagaccca

SEQ ID NO: 2479181 - RNA, 19 nt, Homo sapiens
  misc_RNA (1)...(19): siRNA sense strand
ccuccugaucccagagaaa

SEQ ID NO: 2479182 - RNA, 19 nt, Homo sapiens
  misc_RNA (1)...(19): siRNA sense strand
ccuucugcucugugaguua

SEQ ID NO: 2479183 - RNA, 19 nt, Homo sapiens
  misc_RNA (1)...(19): siRNA sense strand
cagaggaagggaaaggcua

SEQ ID NO: 2479184 - RNA, 19 nt, Homo sapiens
  misc_RNA (1)...(19): siRNA sense strand
gggaaaggcuaccgcgaag

SEQ ID NO: 2479185 - RNA, 19 nt, Homo sapiens
  misc_RNA (1)...(19): siRNA sense strand
gagucacauuugagguuca

SEQ ID NO: 2479186 - RNA, 19 nt, Homo sapiens
  misc_RNA (1)...(19): siRNA sense strand
aauacuagucaaagaggau

SEQ ID NO: 2479187 - RNA, 19 nt, Homo sapiens
  misc_RNA (1)...(19): siRNA sense strand
agguuugacuccaggacga

SEQ ID NO: 2479188 - RNA, 19 nt, Homo sapiens
  misc_RNA (1)...(19): siRNA sense strand
gaauacuagucaaagagga

SEQ ID NO: 2479189 - RNA, 19 nt, Homo sapiens
  misc_RNA (1)...(19): siRNA sense strand
cgaaacucaaagagaagga

SEQ ID NO: 2479190 - RNA, 19 nt, Homo sapiens
  misc_RNA (1)...(19): siRNA sense strand
gucuugaccgugaaggaaa

SEQ ID NO: 2479191 - RNA, 19 nt, Homo sapiens
  misc_RNA (1)...(19): siRNA sense strand
ucaaagagaaggagggaga

SEQ ID NO: 2479192 - RNA, 19 nt, Homo sapiens
  misc_RNA (1)...(19): siRNA sense strand
ccuccugaucccagagaaa

SEQ ID NO: 2479193 - RNA, 19 nt, Homo sapiens
  misc_RNA (1)...(19): siRNA sense strand
ccuucugcucugugaguua

SEQ ID NO: 2479194 - RNA, 19 nt, Homo sapiens
  misc_RNA (1)...(19): siRNA sense strand
gagucacauuugagguuca

SEQ ID NO: 2479195 - RNA, 19 nt, Homo sapiens
  misc_RNA (1)...(19): siRNA sense strand
aauacuagucaaagaggau

SEQ ID NO: 2479196 - RNA, 19 nt, Homo sapiens
  misc_RNA (1)...(19): siRNA sense strand
agguuugacuccaggacga

SEQ ID NO: 2479197 - RNA, 19 nt, Homo sapiens
  misc_RNA (1)...(19): siRNA sense strand
gaauacuagucaaagagga

SEQ ID NO: 2479198 - RNA, 19 nt, Homo sapiens
  misc_RNA (1)...(19): siRNA sense strand
cgaaacucaaagagaagga

SEQ ID NO: 2479199 - RNA, 19 nt, Homo sapiens
  misc_RNA (1)...(19): siRNA sense strand
ucaaagagaaggagggaga

SEQ ID NO: 2479200 - RNA, 19 nt, Homo sapiens
  misc_RNA (1)...(19): siRNA sense strand
ccuccugaucccagagaaa

SEQ ID NO: 2479201 - RNA, 19 nt, Homo sapiens
  misc_RNA (1)...(19): siRNA sense strand
ccuucugcucugugaguua

SEQ ID NO: 2479202 - RNA, 19 nt, Homo sapiens
  misc_RNA (1)...(19): siRNA sense strand
gagucacauuugagguuca

SEQ ID NO: 2479203 - RNA, 19 nt, Homo sapiens
  misc_RNA (1)...(19): siRNA sense strand
aauacuagucaaagaggau

SEQ ID NO: 2479204 - RNA, 19 nt, Homo sapiens
  misc_RNA (1)...(19): siRNA sense strand
agguuugacuccaggacga

SEQ ID NO: 2479205 - RNA, 19 nt, Homo sapiens
  misc_RNA (1)...(19): siRNA sense strand
gaauacuagucaaagagga

SEQ ID NO: 2479206 - RNA, 19 nt, Homo sapiens
  misc_RNA (1)...(19): siRNA sense strand
cgaaacucaaagagaagga

SEQ ID NO: 2479207 - RNA, 19 nt, Homo sapiens
  misc_RNA (1)...(19): siRNA sense strand
ucaaagagaaggagggaga

SEQ ID NO: 2479208 - RNA, 19 nt, Homo sapiens
  misc_RNA (1)...(19): siRNA sense strand
ccuccugaucccagagaaa

SEQ ID NO: 2479209 - RNA, 19 nt, Homo sapiens
  misc_RNA (1)...(19): siRNA sense strand
ccuucugcucugugaguua

SEQ ID NO: 2479210 - RNA, 19 nt, Homo sapiens
  misc_RNA (1)...(19): siRNA sense strand
gagucacauuugagguuca

SEQ ID NO: 2479211 - RNA, 19 nt, Homo sapiens
  misc_RNA (1)...(19): siRNA sense strand
aauacuagucaaagaggau

SEQ ID NO: 2479212 - RNA, 19 nt, Homo sapiens
  misc_RNA (1)...(19): siRNA sense strand
agguuugacuccaggacga

SEQ ID NO: 2479213 - RNA, 19 nt, Homo sapiens
  misc_RNA (1)...(19): siRNA sense strand
gaauacuagucaaagagga

SEQ ID NO: 2479214 - RNA, 19 nt, Homo sapiens
  misc_RNA (1)...(19): siRNA sense strand
cgaaacucaaagagaagga

SEQ ID NO: 2479215 - RNA, 19 nt, Homo sapiens
  misc_RNA (1)...(19): siRNA sense strand
gaggaaauggacugggcaa

SEQ ID NO: 2479216 - RNA, 19 nt, Homo sapiens
  misc_RNA (1)...(19): siRNA sense strand
gggacuuggaugagacaau

SEQ ID NO: 2479217 - RNA, 19 nt, Homo sapiens
  misc_RNA (1)...(19): siRNA sense strand
acgcagaccuggaggcacu

SEQ ID NO: 2479218 - RNA, 19 nt, Homo sapiens
  misc_RNA (1)...(19): siRNA sense strand
guucuaucaaggaggaaau

SEQ ID NO: 2479219 - RNA, 19 nt, Homo sapiens
  misc_RNA (1)...(19): siRNA sense strand
agaggagcaaggagcgaaa

SEQ ID NO: 2479220 - RNA, 19 nt, Homo sapiens
  misc_RNA (1)...(19): siRNA sense strand
uggccaagauuuaagcaca

SEQ ID NO: 2479221 - RNA, 19 nt, Homo sapiens
  misc_RNA (1)...(19): siRNA sense strand
gcguggacuggaugaggaa

SEQ ID NO: 2479222 - RNA, 19 nt, Homo sapiens
  misc_RNA (1)...(19): siRNA sense strand
aaggagagcugcuucgaga

SEQ ID NO: 2479223 - RNA, 19 nt, Homo sapiens
  misc_RNA (1)...(19): siRNA sense strand
gguucuaucaaggaggaaa

SEQ ID NO: 2479224 - RNA, 19 nt, Homo sapiens
  misc_RNA (1)...(19): siRNA sense strand
ggugaauacaacacacaca

SEQ ID NO: 2479225 - RNA, 19 nt, Homo sapiens
  misc_RNA (1)...(19): siRNA sense strand
ggacagagcccauacaccu

SEQ ID NO: 2479226 - RNA, 19 nt, Homo sapiens
  misc_RNA (1)...(19): siRNA sense strand
acaauaccuacaagaacaa

SEQ ID NO: 2479227 - RNA, 19 nt, Homo sapiens
  misc_RNA (1)...(19): siRNA sense strand
agagcugcuucgagaggau

SEQ ID NO: 2479228 - RNA, 19 nt, Homo sapiens
  misc_RNA (1)...(19): siRNA sense strand
gaggaaauggacugggcaa

SEQ ID NO: 2479229 - RNA, 19 nt, Homo sapiens
  misc_RNA (1)...(19): siRNA sense strand
gggacuuggaugagacaau

SEQ ID NO: 2479230 - RNA, 19 nt, Homo sapiens
  misc_RNA (1)...(19): siRNA sense strand
acgcagaccuggaggcacu

SEQ ID NO: 2479231 - RNA, 19 nt, Homo sapiens
  misc_RNA (1)...(19): siRNA sense strand
guucuaucaaggaggaaau

SEQ ID NO: 2479232 - RNA, 19 nt, Homo sapiens
  misc_RNA (1)...(19): siRNA sense strand
agaggagcaaggagcgaaa

SEQ ID NO: 2479233 - RNA, 19 nt, Homo sapiens
  misc_RNA (1)...(19): siRNA sense strand
uggccaagauuuaagcaca

SEQ ID NO: 2479234 - RNA, 19 nt, Homo sapiens
  misc_RNA (1)...(19): siRNA sense strand
gcguggacuggaugaggaa

SEQ ID NO: 2479235 - RNA, 19 nt, Homo sapiens
  misc_RNA (1)...(19): siRNA sense strand
aaggagagcugcuucgaga

SEQ ID NO: 2479236 - RNA, 19 nt, Homo sapiens
  misc_RNA (1)...(19): siRNA sense strand
gguucuaucaaggaggaaa

SEQ ID NO: 2479237 - RNA, 19 nt, Homo sapiens
  misc_RNA (1)...(19): siRNA sense strand
ggugaauacaacacacaca

SEQ ID NO: 2479238 - RNA, 19 nt, Homo sapiens
  misc_RNA (1)...(19): siRNA sense strand
ggacagagcccauacaccu

SEQ ID NO: 2479239 - RNA, 19 nt, Homo sapiens
  misc_RNA (1)...(19): siRNA sense strand
agcgaaagagggagacaca

SEQ ID NO: 2479240 - RNA, 19 nt, Homo sapiens
  misc_RNA (1)...(19): siRNA sense strand
acaauaccuacaagaacaa

SEQ ID NO: 2479241 - RNA, 19 nt, Homo sapiens
  misc_RNA (1)...(19): siRNA sense strand
agagcugcuucgagaggau

SEQ ID NO: 2479242 - RNA, 19 nt, Homo sapiens
  misc_RNA (1)...(19): siRNA sense strand
gaggaaauggacugggcaa

SEQ ID NO: 2479243 - RNA, 19 nt, Homo sapiens
  misc_RNA (1)...(19): siRNA sense strand
gggacuuggaugagacaau

SEQ ID NO: 2479244 - RNA, 19 nt, Homo sapiens
  misc_RNA (1)...(19): siRNA sense strand
acgcagaccuggaggcacu

SEQ ID NO: 2479245 - RNA, 19 nt, Homo sapiens
  misc_RNA (1)...(19): siRNA sense strand
guucuaucaaggaggaaau

SEQ ID NO: 2479246 - RNA, 19 nt, Homo sapiens
  misc_RNA (1)...(19): siRNA sense strand
agaggagcaaggagcgaaa

SEQ ID NO: 2479247 - RNA, 19 nt, Homo sapiens
  misc_RNA (1)...(19): siRNA sense strand
uggccaagauuuaagcaca

SEQ ID NO: 2479248 - RNA, 19 nt, Homo sapiens
  misc_RNA (1)...(19): siRNA sense strand
gcguggacuggaugaggaa

SEQ ID NO: 2479249 - RNA, 19 nt, Homo sapiens
  misc_RNA (1)...(19): siRNA sense strand
aaggagagcugcuucgaga

SEQ ID NO: 2479250 - RNA, 19 nt, Homo sapiens
  misc_RNA (1)...(19): siRNA sense strand
gguucuaucaaggaggaaa

SEQ ID NO: 2479251 - RNA, 19 nt, Homo sapiens
  misc_RNA (1)...(19): siRNA sense strand
ggugaauacaacacacaca

SEQ ID NO: 2479252 - RNA, 19 nt, Homo sapiens
  misc_RNA (1)...(19): siRNA sense strand
ggacagagcccauacaccu

SEQ ID NO: 2479253 - RNA, 19 nt, Homo sapiens
  misc_RNA (1)...(19): siRNA sense strand
acaauaccuacaagaacaa

SEQ ID NO: 2479254 - RNA, 19 nt, Homo sapiens
  misc_RNA (1)...(19): siRNA sense strand
agagcugcuucgagaggau

SEQ ID NO: 2479255 - RNA, 19 nt, Homo sapiens
  misc_RNA (1)...(19): siRNA sense strand
gaggaaauggacugggcaa

SEQ ID NO: 2479256 - RNA, 19 nt, Homo sapiens
  misc_RNA (1)...(19): siRNA sense strand
gggacuuggaugagacaau

SEQ ID NO: 2479257 - RNA, 19 nt, Homo sapiens
  misc_RNA (1)...(19): siRNA sense strand
acgcagaccuggaggcacu

SEQ ID NO: 2479258 - RNA, 19 nt, Homo sapiens
  misc_RNA (1)...(19): siRNA sense strand
guucuaucaaggaggaaau

SEQ ID NO: 2479259 - RNA, 19 nt, Homo sapiens
  misc_RNA (1)...(19): siRNA sense strand
agaggagcaaggagcgaaa

SEQ ID NO: 2479260 - RNA, 19 nt, Homo sapiens
  misc_RNA (1)...(19): siRNA sense strand
uggccaagauuuaagcaca

SEQ ID NO: 2479261 - RNA, 19 nt, Homo sapiens
  misc_RNA (1)...(19): siRNA sense strand
gcguggacuggaugaggaa

SEQ ID NO: 2479262 - RNA, 19 nt, Homo sapiens
  misc_RNA (1)...(19): siRNA sense strand
aaggagagcugcuucgaga

SEQ ID NO: 2479263 - RNA, 19 nt, Homo sapiens
  misc_RNA (1)...(19): siRNA sense strand
gguucuaucaaggaggaaa

SEQ ID NO: 2479264 - RNA, 19 nt, Homo sapiens
  misc_RNA (1)...(19): siRNA sense strand
ggugaauacaacacacaca

SEQ ID NO: 2479265 - RNA, 19 nt, Homo sapiens
  misc_RNA (1)...(19): siRNA sense strand
ggacagagcccauacaccu

SEQ ID NO: 2479266 - RNA, 19 nt, Homo sapiens
  misc_RNA (1)...(19): siRNA sense strand
acaauaccuacaagaacaa

SEQ ID NO: 2479267 - RNA, 19 nt, Homo sapiens
  misc_RNA (1)...(19): siRNA sense strand
agagcugcuucgagaggau

SEQ ID NO: 2479268 - RNA, 19 nt, Homo sapiens
  misc_RNA (1)...(19): siRNA sense strand
gaggaaauggacugggcaa

SEQ ID NO: 2479269 - RNA, 19 nt, Homo sapiens
  misc_RNA (1)...(19): siRNA sense strand
gggacuuggaugagacaau

SEQ ID NO: 2479270 - RNA, 19 nt, Homo sapiens
  misc_RNA (1)...(19): siRNA sense strand
acgcagaccuggaggcacu

SEQ ID NO: 2479271 - RNA, 19 nt, Homo sapiens
  misc_RNA (1)...(19): siRNA sense strand
guucuaucaaggaggaaau

SEQ ID NO: 2479272 - RNA, 19 nt, Homo sapiens
  misc_RNA (1)...(19): siRNA sense strand
agaggagcaaggagcgaaa

SEQ ID NO: 2479273 - RNA, 19 nt, Homo sapiens
  misc_RNA (1)...(19): siRNA sense strand
aggaaaugguagaacuagu

SEQ ID NO: 2479274 - RNA, 19 nt, Homo sapiens
  misc_RNA (1)...(19): siRNA sense strand
uggccaagauuuaagcaca

SEQ ID NO: 2479275 - RNA, 19 nt, Homo sapiens
  misc_RNA (1)...(19): siRNA sense strand
gcguggacuggaugaggaa

SEQ ID NO: 2479276 - RNA, 19 nt, Homo sapiens
  misc_RNA (1)...(19): siRNA sense strand
ugguagaacuagugaucuc

SEQ ID NO: 2479277 - RNA, 19 nt, Homo sapiens
  misc_RNA (1)...(19): siRNA sense strand
aaggagagcugcuucgaga

SEQ ID NO: 2479278 - RNA, 19 nt, Homo sapiens
  misc_RNA (1)...(19): siRNA sense strand
gguucuaucaaggaggaaa

SEQ ID NO: 2479279 - RNA, 19 nt, Homo sapiens
  misc_RNA (1)...(19): siRNA sense strand
ggugaauacaacacacaca

SEQ ID NO: 2479280 - RNA, 19 nt, Homo sapiens
  misc_RNA (1)...(19): siRNA sense strand
ggacagagcccauacaccu

SEQ ID NO: 2479281 - RNA, 19 nt, Homo sapiens
  misc_RNA (1)...(19): siRNA sense strand
acaauaccuacaagaacaa

SEQ ID NO: 2479282 - RNA, 19 nt, Homo sapiens
  misc_RNA (1)...(19): siRNA sense strand
agagcugcuucgagaggau

SEQ ID NO: 2479283 - RNA, 19 nt, Homo sapiens
  misc_RNA (1)...(19): siRNA sense strand
aggaaucaagagaggcaaa

SEQ ID NO: 2479284 - RNA, 19 nt, Homo sapiens
  misc_RNA (1)...(19): siRNA sense strand
cuauaagagaccuuuggaa

SEQ ID NO: 2479285 - RNA, 19 nt, Homo sapiens
  misc_RNA (1)...(19): siRNA sense strand
cucuaugcauuguggaaca

SEQ ID NO: 2479286 - RNA, 19 nt, Homo sapiens
  misc_RNA (1)...(19): siRNA sense strand
aggaaucaagagaggcaaa

SEQ ID NO: 2479287 - RNA, 19 nt, Homo sapiens
  misc_RNA (1)...(19): siRNA sense strand
cuauaagagaccuuuggaa

SEQ ID NO: 2479288 - RNA, 19 nt, Homo sapiens
  misc_RNA (1)...(19): siRNA sense strand
cucuaugcauuguggaaca

SEQ ID NO: 2479289 - RNA, 19 nt, Homo sapiens
  misc_RNA (1)...(19): siRNA sense strand
aggaaucaagagaggcaaa

SEQ ID NO: 2479290 - RNA, 19 nt, Homo sapiens
  misc_RNA (1)...(19): siRNA sense strand
cuauaagagaccuuuggaa

SEQ ID NO: 2479291 - RNA, 19 nt, Homo sapiens
  misc_RNA (1)...(19): siRNA sense strand
cucuaugcauuguggaaca

SEQ ID NO: 2479292 - RNA, 19 nt, Homo sapiens
  misc_RNA (1)...(19): siRNA sense strand
aggaaucaagagaggcaaa

SEQ ID NO: 2479293 - RNA, 19 nt, Homo sapiens
  misc_RNA (1)...(19): siRNA sense strand
cuauaagagaccuuuggaa

SEQ ID NO: 2479294 - RNA, 19 nt, Homo sapiens
  misc_RNA (1)...(19): siRNA sense strand
cucuaugcauuguggaaca

SEQ ID NO: 2479295 - RNA, 19 nt, Homo sapiens
  misc_RNA (1)...(19): siRNA sense strand
ccuucgaggaacagagaaa

SEQ ID NO: 2479296 - RNA, 19 nt, Homo sapiens
  misc_RNA (1)...(19): siRNA sense strand
acucaaggcaggagaaaca

SEQ ID NO: 2479297 - RNA, 19 nt, Homo sapiens
  misc_RNA (1)...(19): siRNA sense strand
gcagaauauaggagauaca

SEQ ID NO: 2479298 - RNA, 19 nt, Homo sapiens
  misc_RNA (1)...(19): siRNA sense strand
aggaagaauaagagaagca

SEQ ID NO: 2479299 - RNA, 19 nt, Homo sapiens
  misc_RNA (1)...(19): siRNA sense strand
cagaagaggauuaagcaca

SEQ ID NO: 2479300 - RNA, 19 nt, Homo sapiens
  misc_RNA (1)...(19): siRNA sense strand
aggauuaagcacagcagaa

SEQ ID NO: 2479301 - RNA, 19 nt, Homo sapiens
  misc_RNA (1)...(19): siRNA sense strand
gcagaaggcuuggagggaa

SEQ ID NO: 2479302 - RNA, 19 nt, Homo sapiens
  misc_RNA (1)...(19): siRNA sense strand
uggcaaugugugcaagaaa

SEQ ID NO: 2479303 - RNA, 19 nt, Homo sapiens
  misc_RNA (1)...(19): siRNA sense strand
gaaacaauuuauaggcagu

SEQ ID NO: 2479304 - RNA, 19 nt, Homo sapiens
  misc_RNA (1)...(19): siRNA sense strand
ccuuugaggcugugugaga

SEQ ID NO: 2479305 - RNA, 19 nt, Homo sapiens
  misc_RNA (1)...(19): siRNA sense strand
aggcuuggagggaaagaaa

SEQ ID NO: 2479306 - RNA, 19 nt, Homo sapiens
  misc_RNA (1)...(19): siRNA sense strand
gcaaguaucuguaagccau

SEQ ID NO: 2479307 - RNA, 19 nt, Homo sapiens
  misc_RNA (1)...(19): siRNA sense strand
aggagauacacuuggguga

SEQ ID NO: 2479308 - RNA, 19 nt, Homo sapiens
  misc_RNA (1)...(19): siRNA sense strand
gagaaacaauuuauaggca

SEQ ID NO: 2479309 - RNA, 19 nt, Homo sapiens
  misc_RNA (1)...(19): siRNA sense strand
ggcaaugugugcaagaaaa

SEQ ID NO: 2479310 - RNA, 19 nt, Homo sapiens
  misc_RNA (1)...(19): siRNA sense strand
gggugaagccgcagcuguu

SEQ ID NO: 2479311 - RNA, 19 nt, Homo sapiens
  misc_RNA (1)...(19): siRNA sense strand
ggugacugguaaagagcca

SEQ ID NO: 2479312 - RNA, 19 nt, Homo sapiens
  misc_RNA (1)...(19): siRNA sense strand
gauuaagcacagcagaaau

SEQ ID NO: 2479313 - RNA, 19 nt, Homo sapiens
  misc_RNA (1)...(19): siRNA sense strand
aaugaaaccagcagacaga

SEQ ID NO: 2479314 - RNA, 19 nt, Homo sapiens
  misc_RNA (1)...(19): siRNA sense strand
aggaagaagcaacaacuau

SEQ ID NO: 2479315 - RNA, 19 nt, Homo sapiens
  misc_RNA (1)...(19): siRNA sense strand
aggcaguccuagcaaaaua

SEQ ID NO: 2479316 - RNA, 19 nt, Homo sapiens
  misc_RNA (1)...(19): siRNA sense strand
caacuauuguagaugcuga

SEQ ID NO: 2479317 - RNA, 19 nt, Homo sapiens
  misc_RNA (1)...(19): siRNA sense strand
auuaagcacagcagaaauu

SEQ ID NO: 2479318 - RNA, 19 nt, Homo sapiens
  misc_RNA (1)...(19): siRNA sense strand
ggaaagaaauccuccagcu

SEQ ID NO: 2479319 - RNA, 19 nt, Homo sapiens
  misc_RNA (1)...(19): siRNA sense strand
aagaaauccuccagcucga

SEQ ID NO: 2479320 - RNA, 19 nt, Homo sapiens
  misc_RNA (1)...(19): siRNA sense strand
aggcaggagaaacaauuua

SEQ ID NO: 2479321 - RNA, 19 nt, Homo sapiens
  misc_RNA (1)...(19): siRNA sense strand
ugaaaccagcagacagaau

SEQ ID NO: 2479322 - RNA, 19 nt, Homo sapiens
  misc_RNA (1)...(19): siRNA sense strand
gcaaugugugcaagaaaau

SEQ ID NO: 2479323 - RNA, 19 nt, Homo sapiens
  misc_RNA (1)...(19): siRNA sense strand
cguggaagcaauucauaga

SEQ ID NO: 2479324 - RNA, 19 nt, Homo sapiens
  misc_RNA (1)...(19): siRNA sense strand
ccuucgaggaacagagaaa

SEQ ID NO: 2479325 - RNA, 19 nt, Homo sapiens
  misc_RNA (1)...(19): siRNA sense strand
acucaaggcaggagaaaca

SEQ ID NO: 2479326 - RNA, 19 nt, Homo sapiens
  misc_RNA (1)...(19): siRNA sense strand
gcagaauauaggagauaca

SEQ ID NO: 2479327 - RNA, 19 nt, Homo sapiens
  misc_RNA (1)...(19): siRNA sense strand
aggaagaauaagagaagca

SEQ ID NO: 2479328 - RNA, 19 nt, Homo sapiens
  misc_RNA (1)...(19): siRNA sense strand
cagaagaggauuaagcaca

SEQ ID NO: 2479329 - RNA, 19 nt, Homo sapiens
  misc_RNA (1)...(19): siRNA sense strand
aggauuaagcacagcagaa

SEQ ID NO: 2479330 - RNA, 19 nt, Homo sapiens
  misc_RNA (1)...(19): siRNA sense strand
gcagaaggcuuggagggaa

SEQ ID NO: 2479331 - RNA, 19 nt, Homo sapiens
  misc_RNA (1)...(19): siRNA sense strand
uggcaaugugugcaagaaa

SEQ ID NO: 2479332 - RNA, 19 nt, Homo sapiens
  misc_RNA (1)...(19): siRNA sense strand
gaaacaauuuauaggcagu

SEQ ID NO: 2479333 - RNA, 19 nt, Homo sapiens
  misc_RNA (1)...(19): siRNA sense strand
ccuuugaggcugugugaga

SEQ ID NO: 2479334 - RNA, 19 nt, Homo sapiens
  misc_RNA (1)...(19): siRNA sense strand
aggcuuggagggaaagaaa

SEQ ID NO: 2479335 - RNA, 19 nt, Homo sapiens
  misc_RNA (1)...(19): siRNA sense strand
gcaaguaucuguaagccau

SEQ ID NO: 2479336 - RNA, 19 nt, Homo sapiens
  misc_RNA (1)...(19): siRNA sense strand
aggagauacacuuggguga

SEQ ID NO: 2479337 - RNA, 19 nt, Homo sapiens
  misc_RNA (1)...(19): siRNA sense strand
gagaaacaauuuauaggca

SEQ ID NO: 2479338 - RNA, 19 nt, Homo sapiens
  misc_RNA (1)...(19): siRNA sense strand
ggcaaugugugcaagaaaa

SEQ ID NO: 2479339 - RNA, 19 nt, Homo sapiens
  misc_RNA (1)...(19): siRNA sense strand
gggugaagccgcagcuguu

SEQ ID NO: 2479340 - RNA, 19 nt, Homo sapiens
  misc_RNA (1)...(19): siRNA sense strand
ggugacugguaaagagcca

SEQ ID NO: 2479341 - RNA, 19 nt, Homo sapiens
  misc_RNA (1)...(19): siRNA sense strand
gauuaagcacagcagaaau

SEQ ID NO: 2479342 - RNA, 19 nt, Homo sapiens
  misc_RNA (1)...(19): siRNA sense strand
aaugaaaccagcagacaga

SEQ ID NO: 2479343 - RNA, 19 nt, Homo sapiens
  misc_RNA (1)...(19): siRNA sense strand
aggaagaagcaacaacuau

SEQ ID NO: 2479344 - RNA, 19 nt, Homo sapiens
  misc_RNA (1)...(19): siRNA sense strand
aggcaguccuagcaaaaua

SEQ ID NO: 2479345 - RNA, 19 nt, Homo sapiens
  misc_RNA (1)...(19): siRNA sense strand
caacuauuguagaugcuga

SEQ ID NO: 2479346 - RNA, 19 nt, Homo sapiens
  misc_RNA (1)...(19): siRNA sense strand
auuaagcacagcagaaauu

SEQ ID NO: 2479347 - RNA, 19 nt, Homo sapiens
  misc_RNA (1)...(19): siRNA sense strand
ggaaagaaauccuccagcu

SEQ ID NO: 2479348 - RNA, 19 nt, Homo sapiens
  misc_RNA (1)...(19): siRNA sense strand
aagaaauccuccagcucga

SEQ ID NO: 2479349 - RNA, 19 nt, Homo sapiens
  misc_RNA (1)...(19): siRNA sense strand
aggcaggagaaacaauuua

SEQ ID NO: 2479350 - RNA, 19 nt, Homo sapiens
  misc_RNA (1)...(19): siRNA sense strand
ugaaaccagcagacagaau

SEQ ID NO: 2479351 - RNA, 19 nt, Homo sapiens
  misc_RNA (1)...(19): siRNA sense strand
gcaaugugugcaagaaaau

SEQ ID NO: 2479352 - RNA, 19 nt, Homo sapiens
  misc_RNA (1)...(19): siRNA sense strand
cguggaagcaauucauaga

SEQ ID NO: 2479353 - RNA, 19 nt, Homo sapiens
  misc_RNA (1)...(19): siRNA sense strand
ccuucgaggaacagagaaa

SEQ ID NO: 2479354 - RNA, 19 nt, Homo sapiens
  misc_RNA (1)...(19): siRNA sense strand
acucaaggcaggagaaaca

SEQ ID NO: 2479355 - RNA, 19 nt, Homo sapiens
  misc_RNA (1)...(19): siRNA sense strand
gcagaauauaggagauaca

SEQ ID NO: 2479356 - RNA, 19 nt, Homo sapiens
  misc_RNA (1)...(19): siRNA sense strand
aggaagaauaagagaagca

SEQ ID NO: 2479357 - RNA, 19 nt, Homo sapiens
  misc_RNA (1)...(19): siRNA sense strand
cagaagaggauuaagcaca

SEQ ID NO: 2479358 - RNA, 19 nt, Homo sapiens
  misc_RNA (1)...(19): siRNA sense strand
aggauuaagcacagcagaa

SEQ ID NO: 2479359 - RNA, 19 nt, Homo sapiens
  misc_RNA (1)...(19): siRNA sense strand
gcagaaggcuuggagggaa

SEQ ID NO: 2479360 - RNA, 19 nt, Homo sapiens
  misc_RNA (1)...(19): siRNA sense strand
uggcaaugugugcaagaaa

SEQ ID NO: 2479361 - RNA, 19 nt, Homo sapiens
  misc_RNA (1)...(19): siRNA sense strand
gaaacaauuuauaggcagu

SEQ ID NO: 2479362 - RNA, 19 nt, Homo sapiens
  misc_RNA (1)...(19): siRNA sense strand
ccuuugaggcugugugaga

SEQ ID NO: 2479363 - RNA, 19 nt, Homo sapiens
  misc_RNA (1)...(19): siRNA sense strand
aggcuuggagggaaagaaa

SEQ ID NO: 2479364 - RNA, 19 nt, Homo sapiens
  misc_RNA (1)...(19): siRNA sense strand
gcaaguaucuguaagccau

SEQ ID NO: 2479365 - RNA, 19 nt, Homo sapiens
  misc_RNA (1)...(19): siRNA sense strand
aggagauacacuuggguga

SEQ ID NO: 2479366 - RNA, 19 nt, Homo sapiens
  misc_RNA (1)...(19): siRNA sense strand
gagaaacaauuuauaggca

SEQ ID NO: 2479367 - RNA, 19 nt, Homo sapiens
  misc_RNA (1)...(19): siRNA sense strand
ggcaaugugugcaagaaaa

SEQ ID NO: 2479368 - RNA, 19 nt, Homo sapiens
  misc_RNA (1)...(19): siRNA sense strand
gggugaagccgcagcuguu

SEQ ID NO: 2479369 - RNA, 19 nt, Homo sapiens
  misc_RNA (1)...(19): siRNA sense strand
ggugacugguaaagagcca

SEQ ID NO: 2479370 - RNA, 19 nt, Homo sapiens
  misc_RNA (1)...(19): siRNA sense strand
gauuaagcacagcagaaau

SEQ ID NO: 2479371 - RNA, 19 nt, Homo sapiens
  misc_RNA (1)...(19): siRNA sense strand
aaugaaaccagcagacaga

SEQ ID NO: 2479372 - RNA, 19 nt, Homo sapiens
  misc_RNA (1)...(19): siRNA sense strand
aggaagaagcaacaacuau

SEQ ID NO: 2479373 - RNA, 19 nt, Homo sapiens
  misc_RNA (1)...(19): siRNA sense strand
aggcaguccuagcaaaaua

SEQ ID NO: 2479374 - RNA, 19 nt, Homo sapiens
  misc_RNA (1)...(19): siRNA sense strand
caacuauuguagaugcuga

SEQ ID NO: 2479375 - RNA, 19 nt, Homo sapiens
  misc_RNA (1)...(19): siRNA sense strand
auuaagcacagcagaaauu

SEQ ID NO: 2479376 - RNA, 19 nt, Homo sapiens
  misc_RNA (1)...(19): siRNA sense strand
ggaaagaaauccuccagcu

SEQ ID NO: 2479377 - RNA, 19 nt, Homo sapiens
  misc_RNA (1)...(19): siRNA sense strand
aagaaauccuccagcucga

SEQ ID NO: 2479378 - RNA, 19 nt, Homo sapiens
  misc_RNA (1)...(19): siRNA sense strand
aggcaggagaaacaauuua

SEQ ID NO: 2479379 - RNA, 19 nt, Homo sapiens
  misc_RNA (1)...(19): siRNA sense strand
ugaaaccagcagacagaau

SEQ ID NO: 2479380 - RNA, 19 nt, Homo sapiens
  misc_RNA (1)...(19): siRNA sense strand
gcaaugugugcaagaaaau

SEQ ID NO: 2479381 - RNA, 19 nt, Homo sapiens
  misc_RNA (1)...(19): siRNA sense strand
cguggaagcaauucauaga

SEQ ID NO: 2479382 - RNA, 19 nt, Homo sapiens
  misc_RNA (1)...(19): siRNA sense strand
ccuucgaggaacagagaaa

SEQ ID NO: 2479383 - RNA, 19 nt, Homo sapiens
  misc_RNA (1)...(19): siRNA sense strand
acucaaggcaggagaaaca

SEQ ID NO: 2479384 - RNA, 19 nt, Homo sapiens
  misc_RNA (1)...(19): siRNA sense strand
gcagaauauaggagauaca

SEQ ID NO: 2479385 - RNA, 19 nt, Homo sapiens
  misc_RNA (1)...(19): siRNA sense strand
aggaagaauaagagaagca

SEQ ID NO: 2479386 - RNA, 19 nt, Homo sapiens
  misc_RNA (1)...(19): siRNA sense strand
cagaagaggauuaagcaca

SEQ ID NO: 2479387 - RNA, 19 nt, Homo sapiens
  misc_RNA (1)...(19): siRNA sense strand
aggauuaagcacagcagaa

SEQ ID NO: 2479388 - RNA, 19 nt, Homo sapiens
  misc_RNA (1)...(19): siRNA sense strand
gcagaaggcuuggagggaa

SEQ ID NO: 2479389 - RNA, 19 nt, Homo sapiens
  misc_RNA (1)...(19): siRNA sense strand
uggcaaugugugcaagaaa

SEQ ID NO: 2479390 - RNA, 19 nt, Homo sapiens
  misc_RNA (1)...(19): siRNA sense strand
gaaacaauuuauaggcagu

SEQ ID NO: 2479391 - RNA, 19 nt, Homo sapiens
  misc_RNA (1)...(19): siRNA sense strand
ccuuugaggcugugugaga

SEQ ID NO: 2479392 - RNA, 19 nt, Homo sapiens
  misc_RNA (1)...(19): siRNA sense strand
aggcuuggagggaaagaaa

SEQ ID NO: 2479393 - RNA, 19 nt, Homo sapiens
  misc_RNA (1)...(19): siRNA sense strand
gcaaguaucuguaagccau

SEQ ID NO: 2479394 - RNA, 19 nt, Homo sapiens
  misc_RNA (1)...(19): siRNA sense strand
aggagauacacuuggguga

SEQ ID NO: 2479395 - RNA, 19 nt, Homo sapiens
  misc_RNA (1)...(19): siRNA sense strand
gagaaacaauuuauaggca

SEQ ID NO: 2479396 - RNA, 19 nt, Homo sapiens
  misc_RNA (1)...(19): siRNA sense strand
ggcaaugugugcaagaaaa

SEQ ID NO: 2479397 - RNA, 19 nt, Homo sapiens
  misc_RNA (1)...(19): siRNA sense strand
gggugaagccgcagcuguu

SEQ ID NO: 2479398 - RNA, 19 nt, Homo sapiens
  misc_RNA (1)...(19): siRNA sense strand
ggugacugguaaagagcca

SEQ ID NO: 2479399 - RNA, 19 nt, Homo sapiens
  misc_RNA (1)...(19): siRNA sense strand
gauuaagcacagcagaaau

SEQ ID NO: 2479400 - RNA, 19 nt, Homo sapiens
  misc_RNA (1)...(19): siRNA sense strand
aaugaaaccagcagacaga

SEQ ID NO: 2479401 - RNA, 19 nt, Homo sapiens
  misc_RNA (1)...(19): siRNA sense strand
aggaagaagcaacaacuau

SEQ ID NO: 2479402 - RNA, 19 nt, Homo sapiens
  misc_RNA (1)...(19): siRNA sense strand
aggcaguccuagcaaaaua

SEQ ID NO: 2479403 - RNA, 19 nt, Homo sapiens
  misc_RNA (1)...(19): siRNA sense strand
caacuauuguagaugcuga

SEQ ID NO: 2479404 - RNA, 19 nt, Homo sapiens
  misc_RNA (1)...(19): siRNA sense strand
auuaagcacagcagaaauu

SEQ ID NO: 2479405 - RNA, 19 nt, Homo sapiens
  misc_RNA (1)...(19): siRNA sense strand
ggaaagaaauccuccagcu

SEQ ID NO: 2479406 - RNA, 19 nt, Homo sapiens
  misc_RNA (1)...(19): siRNA sense strand
aagaaauccuccagcucga

SEQ ID NO: 2479407 - RNA, 19 nt, Homo sapiens
  misc_RNA (1)...(19): siRNA sense strand
aggcaggagaaacaauuua

SEQ ID NO: 2479408 - RNA, 19 nt, Homo sapiens
  misc_RNA (1)...(19): siRNA sense strand
ugaaaccagcagacagaau

SEQ ID NO: 2479409 - RNA, 19 nt, Homo sapiens
  misc_RNA (1)...(19): siRNA sense strand
gcaaugugugcaagaaaau

SEQ ID NO: 2479410 - RNA, 19 nt, Homo sapiens
  misc_RNA (1)...(19): siRNA sense strand
cguggaagcaauucauaga

SEQ ID NO: 2479411 - RNA, 19 nt, Homo sapiens
  misc_RNA (1)...(19): siRNA sense strand
ccuucgaggaacagagaaa

SEQ ID NO: 2479412 - RNA, 19 nt, Homo sapiens
  misc_RNA (1)...(19): siRNA sense strand
acucaaggcaggagaaaca

SEQ ID NO: 2479413 - RNA, 19 nt, Homo sapiens
  misc_RNA (1)...(19): siRNA sense strand
gcagaauauaggagauaca

SEQ ID NO: 2479414 - RNA, 19 nt, Homo sapiens
  misc_RNA (1)...(19): siRNA sense strand
aggaagaauaagagaagca

SEQ ID NO: 2479415 - RNA, 19 nt, Homo sapiens
  misc_RNA (1)...(19): siRNA sense strand
cagaagaggauuaagcaca

SEQ ID NO: 2479416 - RNA, 19 nt, Homo sapiens
  misc_RNA (1)...(19): siRNA sense strand
aggauuaagcacagcagaa

SEQ ID NO: 2479417 - RNA, 19 nt, Homo sapiens
  misc_RNA (1)...(19): siRNA sense strand
gcagaaggcuuggagggaa

SEQ ID NO: 2479418 - RNA, 19 nt, Homo sapiens
  misc_RNA (1)...(19): siRNA sense strand
uggcaaugugugcaagaaa

SEQ ID NO: 2479419 - RNA, 19 nt, Homo sapiens
  misc_RNA (1)...(19): siRNA sense strand
gaaacaauuuauaggcagu

SEQ ID NO: 2479420 - RNA, 19 nt, Homo sapiens
  misc_RNA (1)...(19): siRNA sense strand
ccuuugaggcugugugaga

SEQ ID NO: 2479421 - RNA, 19 nt, Homo sapiens
  misc_RNA (1)...(19): siRNA sense strand
aggcuuggagggaaagaaa

SEQ ID NO: 2479422 - RNA, 19 nt, Homo sapiens
  misc_RNA (1)...(19): siRNA sense strand
gcaaguaucuguaagccau

SEQ ID NO: 2479423 - RNA, 19 nt, Homo sapiens
  misc_RNA (1)...(19): siRNA sense strand
aggagauacacuuggguga

SEQ ID NO: 2479424 - RNA, 19 nt, Homo sapiens
  misc_RNA (1)...(19): siRNA sense strand
gagaaacaauuuauaggca

SEQ ID NO: 2479425 - RNA, 19 nt, Homo sapiens
  misc_RNA (1)...(19): siRNA sense strand
ggcaaugugugcaagaaaa

SEQ ID NO: 2479426 - RNA, 19 nt, Homo sapiens
  misc_RNA (1)...(19): siRNA sense strand
gggugaagccgcagcuguu

SEQ ID NO: 2479427 - RNA, 19 nt, Homo sapiens
  misc_RNA (1)...(19): siRNA sense strand
ggugacugguaaagagcca

SEQ ID NO: 2479428 - RNA, 19 nt, Homo sapiens
  misc_RNA (1)...(19): siRNA sense strand
gauuaagcacagcagaaau

SEQ ID NO: 2479429 - RNA, 19 nt, Homo sapiens
  misc_RNA (1)...(19): siRNA sense strand
aaugaaaccagcagacaga

SEQ ID NO: 2479430 - RNA, 19 nt, Homo sapiens
  misc_RNA (1)...(19): siRNA sense strand
aggaagaagcaacaacuau

SEQ ID NO: 2479431 - RNA, 19 nt, Homo sapiens
  misc_RNA (1)...(19): siRNA sense strand
aggcaguccuagcaaaaua

SEQ ID NO: 2479432 - RNA, 19 nt, Homo sapiens
  misc_RNA (1)...(19): siRNA sense strand
caacuauuguagaugcuga

SEQ ID NO: 2479433 - RNA, 19 nt, Homo sapiens
  misc_RNA (1)...(19): siRNA sense strand
auuaagcacagcagaaauu

SEQ ID NO: 2479434 - RNA, 19 nt, Homo sapiens
  misc_RNA (1)...(19): siRNA sense strand
ggaaagaaauccuccagcu

SEQ ID NO: 2479435 - RNA, 19 nt, Homo sapiens
  misc_RNA (1)...(19): siRNA sense strand
aagaaauccuccagcucga

SEQ ID NO: 2479436 - RNA, 19 nt, Homo sapiens
  misc_RNA (1)...(19): siRNA sense strand
aggcaggagaaacaauuua

SEQ ID NO: 2479437 - RNA, 19 nt, Homo sapiens
  misc_RNA (1)...(19): siRNA sense strand
ugaaaccagcagacagaau

SEQ ID NO: 2479438 - RNA, 19 nt, Homo sapiens
  misc_RNA (1)...(19): siRNA sense strand
gcaaugugugcaagaaaau

SEQ ID NO: 2479439 - RNA, 19 nt, Homo sapiens
  misc_RNA (1)...(19): siRNA sense strand
cguggaagcaauucauaga

SEQ ID NO: 2479440 - RNA, 19 nt, Homo sapiens
  misc_RNA (1)...(19): siRNA sense strand
ccuucgaggaacagagaaa

SEQ ID NO: 2479441 - RNA, 19 nt, Homo sapiens
  misc_RNA (1)...(19): siRNA sense strand
acucaaggcaggagaaaca

SEQ ID NO: 2479442 - RNA, 19 nt, Homo sapiens
  misc_RNA (1)...(19): siRNA sense strand
gcagaauauaggagauaca

SEQ ID NO: 2479443 - RNA, 19 nt, Homo sapiens
  misc_RNA (1)...(19): siRNA sense strand
aggaagaauaagagaagca

SEQ ID NO: 2479444 - RNA, 19 nt, Homo sapiens
  misc_RNA (1)...(19): siRNA sense strand
cagaagaggauuaagcaca

SEQ ID NO: 2479445 - RNA, 19 nt, Homo sapiens
  misc_RNA (1)...(19): siRNA sense strand
aggauuaagcacagcagaa

SEQ ID NO: 2479446 - RNA, 19 nt, Homo sapiens
  misc_RNA (1)...(19): siRNA sense strand
gcagaaggcuuggagggaa

SEQ ID NO: 2479447 - RNA, 19 nt, Homo sapiens
  misc_RNA (1)...(19): siRNA sense strand
uggcaaugugugcaagaaa

SEQ ID NO: 2479448 - RNA, 19 nt, Homo sapiens
  misc_RNA (1)...(19): siRNA sense strand
gaaacaauuuauaggcagu

SEQ ID NO: 2479449 - RNA, 19 nt, Homo sapiens
  misc_RNA (1)...(19): siRNA sense strand
ccuuugaggcugugugaga

SEQ ID NO: 2479450 - RNA, 19 nt, Homo sapiens
  misc_RNA (1)...(19): siRNA sense strand
aggcuuggagggaaagaaa

SEQ ID NO: 2479451 - RNA, 19 nt, Homo sapiens
  misc_RNA (1)...(19): siRNA sense strand
gcaaguaucuguaagccau

SEQ ID NO: 2479452 - RNA, 19 nt, Homo sapiens
  misc_RNA (1)...(19): siRNA sense strand
aggagauacacuuggguga

SEQ ID NO: 2479453 - RNA, 19 nt, Homo sapiens
  misc_RNA (1)...(19): siRNA sense strand
gagaaacaauuuauaggca

SEQ ID NO: 2479454 - RNA, 19 nt, Homo sapiens
  misc_RNA (1)...(19): siRNA sense strand
ggcaaugugugcaagaaaa

SEQ ID NO: 2479455 - RNA, 19 nt, Homo sapiens
  misc_RNA (1)...(19): siRNA sense strand
gggugaagccgcagcuguu

SEQ ID NO: 2479456 - RNA, 19 nt, Homo sapiens
  misc_RNA (1)...(19): siRNA sense strand
ggugacugguaaagagcca

SEQ ID NO: 2479457 - RNA, 19 nt, Homo sapiens
  misc_RNA (1)...(19): siRNA sense strand
gauuaagcacagcagaaau

SEQ ID NO: 2479458 - RNA, 19 nt, Homo sapiens
  misc_RNA (1)...(19): siRNA sense strand
aaugaaaccagcagacaga

SEQ ID NO: 2479459 - RNA, 19 nt, Homo sapiens
  misc_RNA (1)...(19): siRNA sense strand
aggaagaagcaacaacuau

SEQ ID NO: 2479460 - RNA, 19 nt, Homo sapiens
  misc_RNA (1)...(19): siRNA sense strand
aggcaguccuagcaaaaua

SEQ ID NO: 2479461 - RNA, 19 nt, Homo sapiens
  misc_RNA (1)...(19): siRNA sense strand
caacuauuguagaugcuga

SEQ ID NO: 2479462 - RNA, 19 nt, Homo sapiens
  misc_RNA (1)...(19): siRNA sense strand
auuaagcacagcagaaauu

SEQ ID NO: 2479463 - RNA, 19 nt, Homo sapiens
  misc_RNA (1)...(19): siRNA sense strand
ggaaagaaauccuccagcu

SEQ ID NO: 2479464 - RNA, 19 nt, Homo sapiens
  misc_RNA (1)...(19): siRNA sense strand
aagaaauccuccagcucga

SEQ ID NO: 2479465 - RNA, 19 nt, Homo sapiens
  misc_RNA (1)...(19): siRNA sense strand
aggcaggagaaacaauuua

SEQ ID NO: 2479466 - RNA, 19 nt, Homo sapiens
  misc_RNA (1)...(19): siRNA sense strand
ugaaaccagcagacagaau

SEQ ID NO: 2479467 - RNA, 19 nt, Homo sapiens
  misc_RNA (1)...(19): siRNA sense strand
gcaaugugugcaagaaaau

SEQ ID NO: 2479468 - RNA, 19 nt, Homo sapiens
  misc_RNA (1)...(19): siRNA sense strand
cguggaagcaauucauaga

SEQ ID NO: 2479469 - RNA, 19 nt, Homo sapiens
  misc_RNA (1)...(19): siRNA sense strand
ccgagagccucaagggcaa

SEQ ID NO: 2479470 - RNA, 19 nt, Homo sapiens
  misc_RNA (1)...(19): siRNA sense strand
gauaagaggaggaucguga

SEQ ID NO: 2479471 - RNA, 19 nt, Homo sapiens
  misc_RNA (1)...(19): siRNA sense strand
agggcaagcuggaggagga

SEQ ID NO: 2479472 - RNA, 19 nt, Homo sapiens
  misc_RNA (1)...(19): siRNA sense strand
ccucaaaggccacgggaac

SEQ ID NO: 2479473 - RNA, 19 nt, Homo sapiens
  misc_RNA (1)...(19): siRNA sense strand
ggaaggugaucguguggga

SEQ ID NO: 2479474 - RNA, 19 nt, Homo sapiens
  misc_RNA (1)...(19): siRNA sense strand
cgugcaggccuuugaaaca

SEQ ID NO: 2479475 - RNA, 19 nt, Homo sapiens
  misc_RNA (1)...(19): siRNA sense strand
ggaugugacaagaaagcca

SEQ ID NO: 2479476 - RNA, 19 nt, Homo sapiens
  misc_RNA (1)...(19): siRNA sense strand
gcuuguggugguuuggaua

SEQ ID NO: 2479477 - RNA, 19 nt, Homo sapiens
  misc_RNA (1)...(19): siRNA sense strand
gcucgucacaggaugggaa

SEQ ID NO: 2479478 - RNA, 19 nt, Homo sapiens
  misc_RNA (1)...(19): siRNA sense strand
ccgagagccucaagggcaa

SEQ ID NO: 2479479 - RNA, 19 nt, Homo sapiens
  misc_RNA (1)...(19): siRNA sense strand
gauaagaggaggaucguga

SEQ ID NO: 2479480 - RNA, 19 nt, Homo sapiens
  misc_RNA (1)...(19): siRNA sense strand
agggcaagcuggaggagga

SEQ ID NO: 2479481 - RNA, 19 nt, Homo sapiens
  misc_RNA (1)...(19): siRNA sense strand
ccucaaaggccacgggaac

SEQ ID NO: 2479482 - RNA, 19 nt, Homo sapiens
  misc_RNA (1)...(19): siRNA sense strand
ggaaggugaucguguggga

SEQ ID NO: 2479483 - RNA, 19 nt, Homo sapiens
  misc_RNA (1)...(19): siRNA sense strand
cgugcaggccuuugaaaca

SEQ ID NO: 2479484 - RNA, 19 nt, Homo sapiens
  misc_RNA (1)...(19): siRNA sense strand
ggaugugacaagaaagcca

SEQ ID NO: 2479485 - RNA, 19 nt, Homo sapiens
  misc_RNA (1)...(19): siRNA sense strand
gcuuguggugguuuggaua

SEQ ID NO: 2479486 - RNA, 19 nt, Homo sapiens
  misc_RNA (1)...(19): siRNA sense strand
gcucgucacaggaugggaa

SEQ ID NO: 2479487 - RNA, 19 nt, Homo sapiens
  misc_RNA (1)...(19): siRNA sense strand
acgacauguucuuguucaa

SEQ ID NO: 2479488 - RNA, 19 nt, Homo sapiens
  misc_RNA (1)...(19): siRNA sense strand
aauaaagaccaaugaccca

SEQ ID NO: 2479489 - RNA, 19 nt, Homo sapiens
  misc_RNA (1)...(19): siRNA sense strand
acagaaacucacagccaaa

SEQ ID NO: 2479490 - RNA, 19 nt, Homo sapiens
  misc_RNA (1)...(19): siRNA sense strand
gcaucagcuuccagcgcua

SEQ ID NO: 2479491 - RNA, 19 nt, Homo sapiens
  misc_RNA (1)...(19): siRNA sense strand
gcacuguauuggaggccuu

SEQ ID NO: 2479492 - RNA, 19 nt, Homo sapiens
  misc_RNA (1)...(19): siRNA sense strand
acaugagcuccuacagaaa

SEQ ID NO: 2479493 - RNA, 19 nt, Homo sapiens
  misc_RNA (1)...(19): siRNA sense strand
ggaaugggacaauggcaca

SEQ ID NO: 2479494 - RNA, 19 nt, Homo sapiens
  misc_RNA (1)...(19): siRNA sense strand
cuacagaaacucacagcca

SEQ ID NO: 2479495 - RNA, 19 nt, Homo sapiens
  misc_RNA (1)...(19): siRNA sense strand
gugucuaccgcgagaacuu

SEQ ID NO: 2479496 - RNA, 19 nt, Homo sapiens
  misc_RNA (1)...(19): siRNA sense strand
ccgcgagaacuucaagcaa

SEQ ID NO: 2479497 - RNA, 19 nt, Homo sapiens
  misc_RNA (1)...(19): siRNA sense strand
acaacuaugcccaagguga

SEQ ID NO: 2479498 - RNA, 19 nt, Homo sapiens
  misc_RNA (1)...(19): siRNA sense strand
acagaaacucacagccaaa

SEQ ID NO: 2479499 - RNA, 19 nt, Homo sapiens
  misc_RNA (1)...(19): siRNA sense strand
gcaucagcuuccagcgcua

SEQ ID NO: 2479500 - RNA, 19 nt, Homo sapiens
  misc_RNA (1)...(19): siRNA sense strand
gcacuguauuggaggccuu

SEQ ID NO: 2479501 - RNA, 19 nt, Homo sapiens
  misc_RNA (1)...(19): siRNA sense strand
acaugagcuccuacagaaa

SEQ ID NO: 2479502 - RNA, 19 nt, Homo sapiens
  misc_RNA (1)...(19): siRNA sense strand
ggaaugggacaauggcaca

SEQ ID NO: 2479503 - RNA, 19 nt, Homo sapiens
  misc_RNA (1)...(19): siRNA sense strand
cuacagaaacucacagcca

SEQ ID NO: 2479504 - RNA, 19 nt, Homo sapiens
  misc_RNA (1)...(19): siRNA sense strand
gugucuaccgcgagaacuu

SEQ ID NO: 2479505 - RNA, 19 nt, Homo sapiens
  misc_RNA (1)...(19): siRNA sense strand
ccgcgagaacuucaagcaa

SEQ ID NO: 2479506 - RNA, 19 nt, Homo sapiens
  misc_RNA (1)...(19): siRNA sense strand
acaacuaugcccaagguga

SEQ ID NO: 2479507 - RNA, 19 nt, Homo sapiens
  misc_RNA (1)...(19): siRNA sense strand
acagaaacucacagccaaa

SEQ ID NO: 2479508 - RNA, 19 nt, Homo sapiens
  misc_RNA (1)...(19): siRNA sense strand
gcaucagcuuccagcgcua

SEQ ID NO: 2479509 - RNA, 19 nt, Homo sapiens
  misc_RNA (1)...(19): siRNA sense strand
gcacuguauuggaggccuu

SEQ ID NO: 2479510 - RNA, 19 nt, Homo sapiens
  misc_RNA (1)...(19): siRNA sense strand
acaugagcuccuacagaaa

SEQ ID NO: 2479511 - RNA, 19 nt, Homo sapiens
  misc_RNA (1)...(19): siRNA sense strand
ggaaugggacaauggcaca

SEQ ID NO: 2479512 - RNA, 19 nt, Homo sapiens
  misc_RNA (1)...(19): siRNA sense strand
cuacagaaacucacagcca

SEQ ID NO: 2479513 - RNA, 19 nt, Homo sapiens
  misc_RNA (1)...(19): siRNA sense strand
gugucuaccgcgagaacuu

SEQ ID NO: 2479514 - RNA, 19 nt, Homo sapiens
  misc_RNA (1)...(19): siRNA sense strand
ccgcgagaacuucaagcaa

SEQ ID NO: 2479515 - RNA, 19 nt, Homo sapiens
  misc_RNA (1)...(19): siRNA sense strand
acaacuaugcccaagguga

SEQ ID NO: 2479516 - RNA, 19 nt, Homo sapiens
  misc_RNA (1)...(19): siRNA sense strand
acagaaacucacagccaaa

SEQ ID NO: 2479517 - RNA, 19 nt, Homo sapiens
  misc_RNA (1)...(19): siRNA sense strand
gcaucagcuuccagcgcua

SEQ ID NO: 2479518 - RNA, 19 nt, Homo sapiens
  misc_RNA (1)...(19): siRNA sense strand
gcacuguauuggaggccuu

SEQ ID NO: 2479519 - RNA, 19 nt, Homo sapiens
  misc_RNA (1)...(19): siRNA sense strand
acaugagcuccuacagaaa

SEQ ID NO: 2479520 - RNA, 19 nt, Homo sapiens
  misc_RNA (1)...(19): siRNA sense strand
ggaaugggacaauggcaca

SEQ ID NO: 2479521 - RNA, 19 nt, Homo sapiens
  misc_RNA (1)...(19): siRNA sense strand
cuacagaaacucacagcca

SEQ ID NO: 2479522 - RNA, 19 nt, Homo sapiens
  misc_RNA (1)...(19): siRNA sense strand
gugucuaccgcgagaacuu

SEQ ID NO: 2479523 - RNA, 19 nt, Homo sapiens
  misc_RNA (1)...(19): siRNA sense strand
ccgcgagaacuucaagcaa

SEQ ID NO: 2479524 - RNA, 19 nt, Homo sapiens
  misc_RNA (1)...(19): siRNA sense strand
acaacuaugcccaagguga

SEQ ID NO: 2479525 - RNA, 19 nt, Homo sapiens
  misc_RNA (1)...(19): siRNA sense strand
agguacucaucuugaacua

SEQ ID NO: 2479526 - RNA, 19 nt, Homo sapiens
  misc_RNA (1)...(19): siRNA sense strand
ucauggaccugcagggcuu

SEQ ID NO: 2479527 - RNA, 19 nt, Homo sapiens
  misc_RNA (1)...(19): siRNA sense strand
agguacucaucuugaacua

SEQ ID NO: 2479528 - RNA, 19 nt, Homo sapiens
  misc_RNA (1)...(19): siRNA sense strand
ucauggaccugcagggcuu

SEQ ID NO: 2479529 - RNA, 19 nt, Homo sapiens
  misc_RNA (1)...(19): siRNA sense strand
agguacucaucuugaacua

SEQ ID NO: 2479530 - RNA, 19 nt, Homo sapiens
  misc_RNA (1)...(19): siRNA sense strand
ucauggaccugcagggcuu

SEQ ID NO: 2479531 - RNA, 19 nt, Homo sapiens
  misc_RNA (1)...(19): siRNA sense strand
agguacucaucuugaacua

SEQ ID NO: 2479532 - RNA, 19 nt, Homo sapiens
  misc_RNA (1)...(19): siRNA sense strand
ucauggaccugcagggcuu

SEQ ID NO: 2479533 - RNA, 19 nt, Homo sapiens
  misc_RNA (1)...(19): siRNA sense strand
agguacucaucuugaacua

SEQ ID NO: 2479534 - RNA, 19 nt, Homo sapiens
  misc_RNA (1)...(19): siRNA sense strand
ucauggaccugcagggcuu

SEQ ID NO: 2479535 - RNA, 19 nt, Homo sapiens
  misc_RNA (1)...(19): siRNA sense strand
cgguauuauuacagcauca

SEQ ID NO: 2479536 - RNA, 19 nt, Homo sapiens
  misc_RNA (1)...(19): siRNA sense strand
ccgucacaguggagagaca

SEQ ID NO: 2479537 - RNA, 19 nt, Homo sapiens
  misc_RNA (1)...(19): siRNA sense strand
aggccaugcuccaggaaca

SEQ ID NO: 2479538 - RNA, 19 nt, Homo sapiens
  misc_RNA (1)...(19): siRNA sense strand
cgacauaggaacuggccca

SEQ ID NO: 2479539 - RNA, 19 nt, Homo sapiens
  misc_RNA (1)...(19): siRNA sense strand
uggaguacaacgaggucaa

SEQ ID NO: 2479540 - RNA, 19 nt, Homo sapiens
  misc_RNA (1)...(19): siRNA sense strand
gcaucauccuggacgucaa

SEQ ID NO: 2479541 - RNA, 19 nt, Homo sapiens
  misc_RNA (1)...(19): siRNA sense strand
agguggacgcgcagagcaa

SEQ ID NO: 2479542 - RNA, 19 nt, Homo sapiens
  misc_RNA (1)...(19): siRNA sense strand
ggguguaucagcuggguga

SEQ ID NO: 2479543 - RNA, 19 nt, Homo sapiens
  misc_RNA (1)...(19): siRNA sense strand
gggacugucuggagcgguu

SEQ ID NO: 2479544 - RNA, 19 nt, Homo sapiens
  misc_RNA (1)...(19): siRNA sense strand
ccguggaaguccucaucaa

SEQ ID NO: 2479545 - RNA, 19 nt, Homo sapiens
  misc_RNA (1)...(19): siRNA sense strand
cugcaugcggcuagggaca

SEQ ID NO: 2479546 - RNA, 19 nt, Homo sapiens
  misc_RNA (1)...(19): siRNA sense strand
gcaucaaggauaucagcau

SEQ ID NO: 2479547 - RNA, 19 nt, Homo sapiens
  misc_RNA (1)...(19): siRNA sense strand
auguggugcugcagggcaa

SEQ ID NO: 2479548 - RNA, 19 nt, Homo sapiens
  misc_RNA (1)...(19): siRNA sense strand
acacagacgagacaagcaa

SEQ ID NO: 2479549 - RNA, 19 nt, Homo sapiens
  misc_RNA (1)...(19): siRNA sense strand
ccaagaaggaccagcugga

SEQ ID NO: 2479550 - RNA, 19 nt, Homo sapiens
  misc_RNA (1)...(19): siRNA sense strand
aggcugugcccgaggcuuu

SEQ ID NO: 2479551 - RNA, 19 nt, Homo sapiens
  misc_RNA (1)...(19): siRNA sense strand
auuacagcaucaaggauau

SEQ ID NO: 2479552 - RNA, 19 nt, Homo sapiens
  misc_RNA (1)...(19): siRNA sense strand
ccaacuugcucuucagcga

SEQ ID NO: 2479553 - RNA, 19 nt, Homo sapiens
  misc_RNA (1)...(19): siRNA sense strand
gggcacacuggguggaguu

SEQ ID NO: 2479554 - RNA, 19 nt, Homo sapiens
  misc_RNA (1)...(19): siRNA sense strand
cuggagcagcagagcacaa

SEQ ID NO: 2479555 - RNA, 19 nt, Homo sapiens
  misc_RNA (1)...(19): siRNA sense strand
aggcuaaggaggagcugga

SEQ ID NO: 2479556 - RNA, 19 nt, Homo sapiens
  misc_RNA (1)...(19): siRNA sense strand
ucgcugaccugcagagcca

SEQ ID NO: 2479557 - RNA, 19 nt, Homo sapiens
  misc_RNA (1)...(19): siRNA sense strand
gggaggagaaccaggcacu

SEQ ID NO: 2479558 - RNA, 19 nt, Homo sapiens
  misc_RNA (1)...(19): siRNA sense strand
ggccaacagcacugcacua

SEQ ID NO: 2479559 - RNA, 19 nt, Homo sapiens
  misc_RNA (1)...(19): siRNA sense strand
cugccacaccugaggguca

SEQ ID NO: 2479560 - RNA, 19 nt, Homo sapiens
  misc_RNA (1)...(19): siRNA sense strand
aggccaugcaggagaaugu

SEQ ID NO: 2479561 - RNA, 19 nt, Homo sapiens
  misc_RNA (1)...(19): siRNA sense strand
ggugaugaaaagcgggaau

SEQ ID NO: 2479562 - RNA, 19 nt, Homo sapiens
  misc_RNA (1)...(19): siRNA sense strand
uggccagcgucuucagauu

SEQ ID NO: 2479563 - RNA, 19 nt, Homo sapiens
  misc_RNA (1)...(19): siRNA sense strand
gauggaaggccucgggacu

SEQ ID NO: 2479564 - RNA, 19 nt, Homo sapiens
  misc_RNA (1)...(19): siRNA sense strand
ugaaagaagcuguggccaa

SEQ ID NO: 2479565 - RNA, 19 nt, Homo sapiens
  misc_RNA (1)...(19): siRNA sense strand
ggauauauucggauggcaa

SEQ ID NO: 2479566 - RNA, 19 nt, Homo sapiens
  misc_RNA (1)...(19): siRNA sense strand
uggcaagaaauaaaggaaa

SEQ ID NO: 2479567 - RNA, 19 nt, Homo sapiens
  misc_RNA (1)...(19): siRNA sense strand
acauauaagucaaacccua

SEQ ID NO: 2479568 - RNA, 19 nt, Homo sapiens
  misc_RNA (1)...(19): siRNA sense strand
gcaugaaccaccugggaga

SEQ ID NO: 2479569 - RNA, 19 nt, Homo sapiens
  misc_RNA (1)...(19): siRNA sense strand
ccuacaaagccauggauca

SEQ ID NO: 2479570 - RNA, 19 nt, Homo sapiens
  misc_RNA (1)...(19): siRNA sense strand
uggugaucuuaaugggaaa

SEQ ID NO: 2479571 - RNA, 19 nt, Homo sapiens
  misc_RNA (1)...(19): siRNA sense strand
ggaagaaaaccuauggcaa

SEQ ID NO: 2479572 - RNA, 19 nt, Homo sapiens
  misc_RNA (1)...(19): siRNA sense strand
guguuacugaagugaaaua

SEQ ID NO: 2479573 - RNA, 19 nt, Homo sapiens
  misc_RNA (1)...(19): siRNA sense strand
acucauacgaucugggcau

SEQ ID NO: 2479574 - RNA, 19 nt, Homo sapiens
  misc_RNA (1)...(19): siRNA sense strand
gggaaagaauacuggcuug

SEQ ID NO: 2479575 - RNA, 19 nt, Homo sapiens
  misc_RNA (1)...(19): siRNA sense strand
gucaaacccuaaucggaua

SEQ ID NO: 2479576 - RNA, 19 nt, Homo sapiens
  misc_RNA (1)...(19): siRNA sense strand
uggugaagaaggauauauu

SEQ ID NO: 2479577 - RNA, 19 nt, Homo sapiens
  misc_RNA (1)...(19): siRNA sense strand
agagaaaggguguguuacu

SEQ ID NO: 2479578 - RNA, 19 nt, Homo sapiens
  misc_RNA (1)...(19): siRNA sense strand
gggccacaacuuuggugaa

SEQ ID NO: 2479579 - RNA, 19 nt, Homo sapiens
  misc_RNA (1)...(19): siRNA sense strand
acuuuggugaagaaggaua

SEQ ID NO: 2479580 - RNA, 19 nt, Homo sapiens
  misc_RNA (1)...(19): siRNA sense strand
agucaaacccuaaucggau

SEQ ID NO: 2479581 - RNA, 19 nt, Homo sapiens
  misc_RNA (1)...(19): siRNA sense strand
guguacuugugguuggcua

SEQ ID NO: 2479582 - RNA, 19 nt, Homo sapiens
  misc_RNA (1)...(19): siRNA sense strand
cggugaagauggaagggca

SEQ ID NO: 2479583 - RNA, 19 nt, Homo sapiens
  misc_RNA (1)...(19): siRNA sense strand
aaauggaccucaaggccua

SEQ ID NO: 2479584 - RNA, 19 nt, Homo sapiens
  misc_RNA (1)...(19): siRNA sense strand
gcuacuccuccgugagcaa

SEQ ID NO: 2479585 - RNA, 19 nt, Homo sapiens
  misc_RNA (1)...(19): siRNA sense strand
ccuacgaacaggugaugca

SEQ ID NO: 2479586 - RNA, 19 nt, Homo sapiens
  misc_RNA (1)...(19): siRNA sense strand
cggugaagauggaagggca

SEQ ID NO: 2479587 - RNA, 19 nt, Homo sapiens
  misc_RNA (1)...(19): siRNA sense strand
aaauggaccucaaggccua

SEQ ID NO: 2479588 - RNA, 19 nt, Homo sapiens
  misc_RNA (1)...(19): siRNA sense strand
gcuacuccuccgugagcaa

SEQ ID NO: 2479589 - RNA, 19 nt, Homo sapiens
  misc_RNA (1)...(19): siRNA sense strand
ccuacgaacaggugaugca

SEQ ID NO: 2479590 - RNA, 19 nt, Homo sapiens
  misc_RNA (1)...(19): siRNA sense strand
gcaacaggcucuugggaca

SEQ ID NO: 2479591 - RNA, 19 nt, Homo sapiens
  misc_RNA (1)...(19): siRNA sense strand
cuuaaagaccagagaggga

SEQ ID NO: 2479592 - RNA, 19 nt, Homo sapiens
  misc_RNA (1)...(19): siRNA sense strand
uguuacaaguucaggagau

SEQ ID NO: 2479593 - RNA, 19 nt, Homo sapiens
  misc_RNA (1)...(19): siRNA sense strand
ugaccuucgugcagaucaa

SEQ ID NO: 2479594 - RNA, 19 nt, Homo sapiens
  misc_RNA (1)...(19): siRNA sense strand
gcuuuaugggacaucgaaa

SEQ ID NO: 2479595 - RNA, 19 nt, Homo sapiens
  misc_RNA (1)...(19): siRNA sense strand
cagagagggaaaugugaga

SEQ ID NO: 2479596 - RNA, 19 nt, Homo sapiens
  misc_RNA (1)...(19): siRNA sense strand
ggcaagaagcagaacaacu

SEQ ID NO: 2479597 - RNA, 19 nt, Homo sapiens
  misc_RNA (1)...(19): siRNA sense strand
cuuccaaauuaugggauau

SEQ ID NO: 2479598 - RNA, 19 nt, Homo sapiens
  misc_RNA (1)...(19): siRNA sense strand
ggucgaauacaaaugcgaa

SEQ ID NO: 2479599 - RNA, 19 nt, Homo sapiens
  misc_RNA (1)...(19): siRNA sense strand
gugcuucucaagauggaaa

SEQ ID NO: 2479600 - RNA, 19 nt, Homo sapiens
  misc_RNA (1)...(19): siRNA sense strand
auguaugggacacgcuaaa

SEQ ID NO: 2479601 - RNA, 19 nt, Homo sapiens
  misc_RNA (1)...(19): siRNA sense strand
gaucauaauaacaugggaa

SEQ ID NO: 2479602 - RNA, 19 nt, Homo sapiens
  misc_RNA (1)...(19): siRNA sense strand
uguacugaugagagaauaa

SEQ ID NO: 2479603 - RNA, 19 nt, Homo sapiens
  misc_RNA (1)...(19): siRNA sense strand
aagaaacaaaugagaccaa

SEQ ID NO: 2479604 - RNA, 19 nt, Homo sapiens
  misc_RNA (1)...(19): siRNA sense strand
gagcaauggcacagugacu

SEQ ID NO: 2479605 - RNA, 19 nt, Homo sapiens
  misc_RNA (1)...(19): siRNA sense strand
gggaaauaauccugagagg

SEQ ID NO: 2479606 - RNA, 19 nt, Homo sapiens
  misc_RNA (1)...(19): siRNA sense strand
caggaauagaacugcagua

SEQ ID NO: 2479607 - RNA, 19 nt, Homo sapiens
  misc_RNA (1)...(19): siRNA sense strand
aagcaagaauacuggagca

SEQ ID NO: 2479608 - RNA, 19 nt, Homo sapiens
  misc_RNA (1)...(19): siRNA sense strand
ugguaacaccugaugggaa

SEQ ID NO: 2479609 - RNA, 19 nt, Homo sapiens
  misc_RNA (1)...(19): siRNA sense strand
cgauugugccacuaagcaa

SEQ ID NO: 2479610 - RNA, 19 nt, Homo sapiens
  misc_RNA (1)...(19): siRNA sense strand
gcauaaugguaacaccuga

SEQ ID NO: 2479611 - RNA, 19 nt, Homo sapiens
  misc_RNA (1)...(19): siRNA sense strand
acucgaaaguacucgcaga

SEQ ID NO: 2479612 - RNA, 19 nt, Homo sapiens
  misc_RNA (1)...(19): siRNA sense strand
gaaagaaacaaaugagacc

SEQ ID NO: 2479613 - RNA, 19 nt, Homo sapiens
  misc_RNA (1)...(19): siRNA sense strand
aggaauagaacugcaguau

SEQ ID NO: 2479614 - RNA, 19 nt, Homo sapiens
  misc_RNA (1)...(19): siRNA sense strand
gcgcauaucuccuggaucc

SEQ ID NO: 2479615 - RNA, 19 nt, Homo sapiens
  misc_RNA (1)...(19): siRNA sense strand
gagagaauaaccugggucu

SEQ ID NO: 2479616 - RNA, 19 nt, Homo sapiens
  misc_RNA (1)...(19): siRNA sense strand
gaucauaauaacaugggaa

SEQ ID NO: 2479617 - RNA, 19 nt, Homo sapiens
  misc_RNA (1)...(19): siRNA sense strand
uguacugaugagagaauaa

SEQ ID NO: 2479618 - RNA, 19 nt, Homo sapiens
  misc_RNA (1)...(19): siRNA sense strand
aagaaacaaaugagaccaa

SEQ ID NO: 2479619 - RNA, 19 nt, Homo sapiens
  misc_RNA (1)...(19): siRNA sense strand
gggaaauaauccugagagg

SEQ ID NO: 2479620 - RNA, 19 nt, Homo sapiens
  misc_RNA (1)...(19): siRNA sense strand
ugguaacaccugaugggaa

SEQ ID NO: 2479621 - RNA, 19 nt, Homo sapiens
  misc_RNA (1)...(19): siRNA sense strand
gcauaaugguaacaccuga

SEQ ID NO: 2479622 - RNA, 19 nt, Homo sapiens
  misc_RNA (1)...(19): siRNA sense strand
acucgaaaguacucgcaga

SEQ ID NO: 2479623 - RNA, 19 nt, Homo sapiens
  misc_RNA (1)...(19): siRNA sense strand
gaaagaaacaaaugagacc

SEQ ID NO: 2479624 - RNA, 19 nt, Homo sapiens
  misc_RNA (1)...(19): siRNA sense strand
gagagaauaaccugggucu

SEQ ID NO: 2479625 - RNA, 19 nt, Homo sapiens
  misc_RNA (1)...(19): siRNA sense strand
gaucauaauaacaugggaa

SEQ ID NO: 2479626 - RNA, 19 nt, Homo sapiens
  misc_RNA (1)...(19): siRNA sense strand
uguacugaugagagaauaa

SEQ ID NO: 2479627 - RNA, 19 nt, Homo sapiens
  misc_RNA (1)...(19): siRNA sense strand
aagaaacaaaugagaccaa

SEQ ID NO: 2479628 - RNA, 19 nt, Homo sapiens
  misc_RNA (1)...(19): siRNA sense strand
gggaaauaauccugagagg

SEQ ID NO: 2479629 - RNA, 19 nt, Homo sapiens
  misc_RNA (1)...(19): siRNA sense strand
ugguaacaccugaugggaa

SEQ ID NO: 2479630 - RNA, 19 nt, Homo sapiens
  misc_RNA (1)...(19): siRNA sense strand
gcauaaugguaacaccuga

SEQ ID NO: 2479631 - RNA, 19 nt, Homo sapiens
  misc_RNA (1)...(19): siRNA sense strand
acucgaaaguacucgcaga

SEQ ID NO: 2479632 - RNA, 19 nt, Homo sapiens
  misc_RNA (1)...(19): siRNA sense strand
gaaagaaacaaaugagacc

SEQ ID NO: 2479633 - RNA, 19 nt, Homo sapiens
  misc_RNA (1)...(19): siRNA sense strand
gagagaauaaccugggucu

SEQ ID NO: 2479634 - RNA, 19 nt, Homo sapiens
  misc_RNA (1)...(19): siRNA sense strand
gaucauaauaacaugggaa

SEQ ID NO: 2479635 - RNA, 19 nt, Homo sapiens
  misc_RNA (1)...(19): siRNA sense strand
uguacugaugagagaauaa

SEQ ID NO: 2479636 - RNA, 19 nt, Homo sapiens
  misc_RNA (1)...(19): siRNA sense strand
aagaaacaaaugagaccaa

SEQ ID NO: 2479637 - RNA, 19 nt, Homo sapiens
  misc_RNA (1)...(19): siRNA sense strand
gagcaauggcacagugacu

SEQ ID NO: 2479638 - RNA, 19 nt, Homo sapiens
  misc_RNA (1)...(19): siRNA sense strand
gggaaauaauccugagagg

SEQ ID NO: 2479639 - RNA, 19 nt, Homo sapiens
  misc_RNA (1)...(19): siRNA sense strand
caggaauagaacugcagua

SEQ ID NO: 2479640 - RNA, 19 nt, Homo sapiens
  misc_RNA (1)...(19): siRNA sense strand
aagcaagaauacuggagca

SEQ ID NO: 2479641 - RNA, 19 nt, Homo sapiens
  misc_RNA (1)...(19): siRNA sense strand
ugguaacaccugaugggaa

SEQ ID NO: 2479642 - RNA, 19 nt, Homo sapiens
  misc_RNA (1)...(19): siRNA sense strand
cgauugugccacuaagcaa

SEQ ID NO: 2479643 - RNA, 19 nt, Homo sapiens
  misc_RNA (1)...(19): siRNA sense strand
gcauaaugguaacaccuga

SEQ ID NO: 2479644 - RNA, 19 nt, Homo sapiens
  misc_RNA (1)...(19): siRNA sense strand
acucgaaaguacucgcaga

SEQ ID NO: 2479645 - RNA, 19 nt, Homo sapiens
  misc_RNA (1)...(19): siRNA sense strand
gaaagaaacaaaugagacc

SEQ ID NO: 2479646 - RNA, 19 nt, Homo sapiens
  misc_RNA (1)...(19): siRNA sense strand
aggaauagaacugcaguau

SEQ ID NO: 2479647 - RNA, 19 nt, Homo sapiens
  misc_RNA (1)...(19): siRNA sense strand
gcgcauaucuccuggaucc

SEQ ID NO: 2479648 - RNA, 19 nt, Homo sapiens
  misc_RNA (1)...(19): siRNA sense strand
gagagaauaaccugggucu

SEQ ID NO: 2479649 - RNA, 19 nt, Homo sapiens
  misc_RNA (1)...(19): siRNA sense strand
guaaggagcugaaggagga

SEQ ID NO: 2479650 - RNA, 19 nt, Homo sapiens
  misc_RNA (1)...(19): siRNA sense strand
aggacgaggaggacagaau

SEQ ID NO: 2479651 - RNA, 19 nt, Homo sapiens
  misc_RNA (1)...(19): siRNA sense strand
cccagaaggaccugaacaa

SEQ ID NO: 2479652 - RNA, 19 nt, Homo sapiens
  misc_RNA (1)...(19): siRNA sense strand
gagaaugaccagagccugu

SEQ ID NO: 2479653 - RNA, 19 nt, Homo sapiens
  misc_RNA (1)...(19): siRNA sense strand
uggcaucaugugagaguga

SEQ ID NO: 2479654 - RNA, 19 nt, Homo sapiens
  misc_RNA (1)...(19): siRNA sense strand
cgagaaagcccguaaggag

SEQ ID NO: 2479655 - RNA, 19 nt, Homo sapiens
  misc_RNA (1)...(19): siRNA sense strand
gugagagugaagacaguau

SEQ ID NO: 2479656 - RNA, 19 nt, Homo sapiens
  misc_RNA (1)...(19): siRNA sense strand
cgguggaucuggagaggcu

SEQ ID NO: 2479657 - RNA, 19 nt, Homo sapiens
  misc_RNA (1)...(19): siRNA sense strand
cgccaauaauauggagaca

SEQ ID NO: 2479658 - RNA, 19 nt, Homo sapiens
  misc_RNA (1)...(19): siRNA sense strand
guaaggagcugaaggagga

SEQ ID NO: 2479659 - RNA, 19 nt, Homo sapiens
  misc_RNA (1)...(19): siRNA sense strand
aggacgaggaggacagaau

SEQ ID NO: 2479660 - RNA, 19 nt, Homo sapiens
  misc_RNA (1)...(19): siRNA sense strand
cccagaaggaccugaacaa

SEQ ID NO: 2479661 - RNA, 19 nt, Homo sapiens
  misc_RNA (1)...(19): siRNA sense strand
gagaaugaccagagccugu

SEQ ID NO: 2479662 - RNA, 19 nt, Homo sapiens
  misc_RNA (1)...(19): siRNA sense strand
uggcaucaugugagaguga

SEQ ID NO: 2479663 - RNA, 19 nt, Homo sapiens
  misc_RNA (1)...(19): siRNA sense strand
cgagaaagcccguaaggag

SEQ ID NO: 2479664 - RNA, 19 nt, Homo sapiens
  misc_RNA (1)...(19): siRNA sense strand
gugagagugaagacaguau

SEQ ID NO: 2479665 - RNA, 19 nt, Homo sapiens
  misc_RNA (1)...(19): siRNA sense strand
cgguggaucuggagaggcu

SEQ ID NO: 2479666 - RNA, 19 nt, Homo sapiens
  misc_RNA (1)...(19): siRNA sense strand
cgccaauaauauggagaca

SEQ ID NO: 2479667 - RNA, 19 nt, Homo sapiens
  misc_RNA (1)...(19): siRNA sense strand
aggacgaggaggacagaau

SEQ ID NO: 2479668 - RNA, 19 nt, Homo sapiens
  misc_RNA (1)...(19): siRNA sense strand
cccagaaggaccugaacaa

SEQ ID NO: 2479669 - RNA, 19 nt, Homo sapiens
  misc_RNA (1)...(19): siRNA sense strand
gagaaugaccagagccugu

SEQ ID NO: 2479670 - RNA, 19 nt, Homo sapiens
  misc_RNA (1)...(19): siRNA sense strand
uaucuaacuaccagaccaa

SEQ ID NO: 2479671 - RNA, 19 nt, Homo sapiens
  misc_RNA (1)...(19): siRNA sense strand
ggacagagaucgagggcac

SEQ ID NO: 2479672 - RNA, 19 nt, Homo sapiens
  misc_RNA (1)...(19): siRNA sense strand
ccauggagcaagagaggaa

SEQ ID NO: 2479673 - RNA, 19 nt, Homo sapiens
  misc_RNA (1)...(19): siRNA sense strand
acauugaggacgaggacua

SEQ ID NO: 2479674 - RNA, 19 nt, Homo sapiens
  misc_RNA (1)...(19): siRNA sense strand
cagagaaggaggucggcua

SEQ ID NO: 2479675 - RNA, 19 nt, Homo sapiens
  misc_RNA (1)...(19): siRNA sense strand
aggagaaguucaugagcga

SEQ ID NO: 2479676 - RNA, 19 nt, Homo sapiens
  misc_RNA (1)...(19): siRNA sense strand
gcuacguggugguggugaa

SEQ ID NO: 2479677 - RNA, 19 nt, Homo sapiens
  misc_RNA (1)...(19): siRNA sense strand
agcagaugguggaggacua

SEQ ID NO: 2479678 - RNA, 19 nt, Homo sapiens
  misc_RNA (1)...(19): siRNA sense strand
uggccuaccuggagagcau

SEQ ID NO: 2479679 - RNA, 19 nt, Homo sapiens
  misc_RNA (1)...(19): siRNA sense strand
gccacuaccuggagcggaa

SEQ ID NO: 2479680 - RNA, 19 nt, Homo sapiens
  misc_RNA (1)...(19): siRNA sense strand
acguggugguggugaagaa

SEQ ID NO: 2479681 - RNA, 19 nt, Homo sapiens
  misc_RNA (1)...(19): siRNA sense strand
gggcugaggcugaagcaca

SEQ ID NO: 2479682 - RNA, 19 nt, Homo sapiens
  misc_RNA (1)...(19): siRNA sense strand
aggagaacuuaaagcccaa

SEQ ID NO: 2479683 - RNA, 19 nt, Homo sapiens
  misc_RNA (1)...(19): siRNA sense strand
gaggagugcaagaggcaga

SEQ ID NO: 2479684 - RNA, 19 nt, Homo sapiens
  misc_RNA (1)...(19): siRNA sense strand
acgacuacaugcagcgcua

SEQ ID NO: 2479685 - RNA, 19 nt, Homo sapiens
  misc_RNA (1)...(19): siRNA sense strand
ggcucaggcaggaggagaa

SEQ ID NO: 2479686 - RNA, 19 nt, Homo sapiens
  misc_RNA (1)...(19): siRNA sense strand
agucagacaucuacgcaga

SEQ ID NO: 2479687 - RNA, 19 nt, Homo sapiens
  misc_RNA (1)...(19): siRNA sense strand
aggcagaugcugacggcuu

SEQ ID NO: 2479688 - RNA, 19 nt, Homo sapiens
  misc_RNA (1)...(19): siRNA sense strand
ucaacaaagaccuggcaga

SEQ ID NO: 2479689 - RNA, 19 nt, Homo sapiens
  misc_RNA (1)...(19): siRNA sense strand
agaagcagaugguggagga

SEQ ID NO: 2479690 - RNA, 19 nt, Homo sapiens
  misc_RNA (1)...(19): siRNA sense strand
acaucgaccaggagaccua

SEQ ID NO: 2479691 - RNA, 19 nt, Homo sapiens
  misc_RNA (1)...(19): siRNA sense strand
uggacaacaaggagaaguu

SEQ ID NO: 2479692 - RNA, 19 nt, Homo sapiens
  misc_RNA (1)...(19): siRNA sense strand
gagaagaggcccagcagcu

SEQ ID NO: 2479693 - RNA, 19 nt, Homo sapiens
  misc_RNA (1)...(19): siRNA sense strand
cccuaagugaggagugcaa

SEQ ID NO: 2479694 - RNA, 19 nt, Homo sapiens
  misc_RNA (1)...(19): siRNA sense strand
ccuggaucaucauggaauu

SEQ ID NO: 2479695 - RNA, 19 nt, Homo sapiens
  misc_RNA (1)...(19): siRNA sense strand
acguuuaucagauggagaa

SEQ ID NO: 2479696 - RNA, 19 nt, Homo sapiens
  misc_RNA (1)...(19): siRNA sense strand
acaugaaguccgaugagau

SEQ ID NO: 2479697 - RNA, 19 nt, Homo sapiens
  misc_RNA (1)...(19): siRNA sense strand
caggagaacuuaaagccca

SEQ ID NO: 2479698 - RNA, 19 nt, Homo sapiens
  misc_RNA (1)...(19): siRNA sense strand
gcggcaaauccuggacaaa

SEQ ID NO: 2479699 - RNA, 19 nt, Homo sapiens
  misc_RNA (1)...(19): siRNA sense strand
uggacaaacagcagaagca

SEQ ID NO: 2479700 - RNA, 19 nt, Homo sapiens
  misc_RNA (1)...(19): siRNA sense strand
gcuacuugccagaagacuu

SEQ ID NO: 2479701 - RNA, 19 nt, Homo sapiens
  misc_RNA (1)...(19): siRNA sense strand
gcaaggucagcgagggcau

SEQ ID NO: 2479702 - RNA, 19 nt, Homo sapiens
  misc_RNA (1)...(19): siRNA sense strand
gagcugcagcauagaguca

SEQ ID NO: 2479703 - RNA, 19 nt, Homo sapiens
  misc_RNA (1)...(19): siRNA sense strand
uaucagauggagaaggaca

SEQ ID NO: 2479704 - RNA, 19 nt, Homo sapiens
  misc_RNA (1)...(19): siRNA sense strand
ccaaagcagaugcaggaga

SEQ ID NO: 2479705 - RNA, 19 nt, Homo sapiens
  misc_RNA (1)...(19): siRNA sense strand
ucgugaagcugaucggcau

SEQ ID NO: 2479706 - RNA, 19 nt, Homo sapiens
  misc_RNA (1)...(19): siRNA sense strand
acaacaaggagaaguucau

SEQ ID NO: 2479707 - RNA, 19 nt, Homo sapiens
  misc_RNA (1)...(19): siRNA sense strand
ggauguucgccgugugcau

SEQ ID NO: 2479708 - RNA, 19 nt, Homo sapiens
  misc_RNA (1)...(19): siRNA sense strand
cuaagugaggagugcaaga

SEQ ID NO: 2479709 - RNA, 19 nt, Homo sapiens
  misc_RNA (1)...(19): siRNA sense strand
acuucgagcuccuagaaaa

SEQ ID NO: 2479710 - RNA, 19 nt, Homo sapiens
  misc_RNA (1)...(19): siRNA sense strand
aggacgaggacuauuacaa

SEQ ID NO: 2479711 - RNA, 19 nt, Homo sapiens
  misc_RNA (1)...(19): siRNA sense strand
uggccgaguucaagcagau

SEQ ID NO: 2479712 - RNA, 19 nt, Homo sapiens
  misc_RNA (1)...(19): siRNA sense strand
ggcugaggcugaagcacau

SEQ ID NO: 2479713 - RNA, 19 nt, Homo sapiens
  misc_RNA (1)...(19): siRNA sense strand
uggagagccugaaggagga

SEQ ID NO: 2479714 - RNA, 19 nt, Homo sapiens
  misc_RNA (1)...(19): siRNA sense strand
aaaaggaggacgugcguau

SEQ ID NO: 2479715 - RNA, 19 nt, Homo sapiens
  misc_RNA (1)...(19): siRNA sense strand
gguaccaguagauguggaa

SEQ ID NO: 2479716 - RNA, 19 nt, Homo sapiens
  misc_RNA (1)...(19): siRNA sense strand
caguagauguggaaaagga

SEQ ID NO: 2479717 - RNA, 19 nt, Homo sapiens
  misc_RNA (1)...(19): siRNA sense strand
ggacagagaucgagggcac

SEQ ID NO: 2479718 - RNA, 19 nt, Homo sapiens
  misc_RNA (1)...(19): siRNA sense strand
ccauggagcaagagaggaa

SEQ ID NO: 2479719 - RNA, 19 nt, Homo sapiens
  misc_RNA (1)...(19): siRNA sense strand
acauugaggacgaggacua

SEQ ID NO: 2479720 - RNA, 19 nt, Homo sapiens
  misc_RNA (1)...(19): siRNA sense strand
cagagaaggaggucggcua

SEQ ID NO: 2479721 - RNA, 19 nt, Homo sapiens
  misc_RNA (1)...(19): siRNA sense strand
aggagaaguucaugagcga

SEQ ID NO: 2479722 - RNA, 19 nt, Homo sapiens
  misc_RNA (1)...(19): siRNA sense strand
gcuacguggugguggugaa

SEQ ID NO: 2479723 - RNA, 19 nt, Homo sapiens
  misc_RNA (1)...(19): siRNA sense strand
agcagaugguggaggacua

SEQ ID NO: 2479724 - RNA, 19 nt, Homo sapiens
  misc_RNA (1)...(19): siRNA sense strand
uggccuaccuggagagcau

SEQ ID NO: 2479725 - RNA, 19 nt, Homo sapiens
  misc_RNA (1)...(19): siRNA sense strand
gccacuaccuggagcggaa

SEQ ID NO: 2479726 - RNA, 19 nt, Homo sapiens
  misc_RNA (1)...(19): siRNA sense strand
acguggugguggugaagaa

SEQ ID NO: 2479727 - RNA, 19 nt, Homo sapiens
  misc_RNA (1)...(19): siRNA sense strand
gggcugaggcugaagcaca

SEQ ID NO: 2479728 - RNA, 19 nt, Homo sapiens
  misc_RNA (1)...(19): siRNA sense strand
aggagaacuuaaagcccaa

SEQ ID NO: 2479729 - RNA, 19 nt, Homo sapiens
  misc_RNA (1)...(19): siRNA sense strand
gaggagugcaagaggcaga

SEQ ID NO: 2479730 - RNA, 19 nt, Homo sapiens
  misc_RNA (1)...(19): siRNA sense strand
acgacuacaugcagcgcua

SEQ ID NO: 2479731 - RNA, 19 nt, Homo sapiens
  misc_RNA (1)...(19): siRNA sense strand
ggcucaggcaggaggagaa

SEQ ID NO: 2479732 - RNA, 19 nt, Homo sapiens
  misc_RNA (1)...(19): siRNA sense strand
agucagacaucuacgcaga

SEQ ID NO: 2479733 - RNA, 19 nt, Homo sapiens
  misc_RNA (1)...(19): siRNA sense strand
aggcagaugcugacggcuu

SEQ ID NO: 2479734 - RNA, 19 nt, Homo sapiens
  misc_RNA (1)...(19): siRNA sense strand
ucaacaaagaccuggcaga

SEQ ID NO: 2479735 - RNA, 19 nt, Homo sapiens
  misc_RNA (1)...(19): siRNA sense strand
agaagcagaugguggagga

SEQ ID NO: 2479736 - RNA, 19 nt, Homo sapiens
  misc_RNA (1)...(19): siRNA sense strand
acaucgaccaggagaccua

SEQ ID NO: 2479737 - RNA, 19 nt, Homo sapiens
  misc_RNA (1)...(19): siRNA sense strand
uggacaacaaggagaaguu

SEQ ID NO: 2479738 - RNA, 19 nt, Homo sapiens
  misc_RNA (1)...(19): siRNA sense strand
gagaagaggcccagcagcu

SEQ ID NO: 2479739 - RNA, 19 nt, Homo sapiens
  misc_RNA (1)...(19): siRNA sense strand
cccuaagugaggagugcaa

SEQ ID NO: 2479740 - RNA, 19 nt, Homo sapiens
  misc_RNA (1)...(19): siRNA sense strand
ccuggaucaucauggaauu

SEQ ID NO: 2479741 - RNA, 19 nt, Homo sapiens
  misc_RNA (1)...(19): siRNA sense strand
acguuuaucagauggagaa

SEQ ID NO: 2479742 - RNA, 19 nt, Homo sapiens
  misc_RNA (1)...(19): siRNA sense strand
acaugaaguccgaugagau

SEQ ID NO: 2479743 - RNA, 19 nt, Homo sapiens
  misc_RNA (1)...(19): siRNA sense strand
caggagaacuuaaagccca

SEQ ID NO: 2479744 - RNA, 19 nt, Homo sapiens
  misc_RNA (1)...(19): siRNA sense strand
gcggcaaauccuggacaaa

SEQ ID NO: 2479745 - RNA, 19 nt, Homo sapiens
  misc_RNA (1)...(19): siRNA sense strand
uggacaaacagcagaagca

SEQ ID NO: 2479746 - RNA, 19 nt, Homo sapiens
  misc_RNA (1)...(19): siRNA sense strand
gcuacuugccagaagacuu

SEQ ID NO: 2479747 - RNA, 19 nt, Homo sapiens
  misc_RNA (1)...(19): siRNA sense strand
gcaaggucagcgagggcau

SEQ ID NO: 2479748 - RNA, 19 nt, Homo sapiens
  misc_RNA (1)...(19): siRNA sense strand
gagcugcagcauagaguca

SEQ ID NO: 2479749 - RNA, 19 nt, Homo sapiens
  misc_RNA (1)...(19): siRNA sense strand
uaucagauggagaaggaca

SEQ ID NO: 2479750 - RNA, 19 nt, Homo sapiens
  misc_RNA (1)...(19): siRNA sense strand
ccaaagcagaugcaggaga

SEQ ID NO: 2479751 - RNA, 19 nt, Homo sapiens
  misc_RNA (1)...(19): siRNA sense strand
ucgugaagcugaucggcau

SEQ ID NO: 2479752 - RNA, 19 nt, Homo sapiens
  misc_RNA (1)...(19): siRNA sense strand
acaacaaggagaaguucau

SEQ ID NO: 2479753 - RNA, 19 nt, Homo sapiens
  misc_RNA (1)...(19): siRNA sense strand
ggauguucgccgugugcau

SEQ ID NO: 2479754 - RNA, 19 nt, Homo sapiens
  misc_RNA (1)...(19): siRNA sense strand
cuaagugaggagugcaaga

SEQ ID NO: 2479755 - RNA, 19 nt, Homo sapiens
  misc_RNA (1)...(19): siRNA sense strand
acuucgagcuccuagaaaa

SEQ ID NO: 2479756 - RNA, 19 nt, Homo sapiens
  misc_RNA (1)...(19): siRNA sense strand
aggacgaggacuauuacaa

SEQ ID NO: 2479757 - RNA, 19 nt, Homo sapiens
  misc_RNA (1)...(19): siRNA sense strand
uggccgaguucaagcagau

SEQ ID NO: 2479758 - RNA, 19 nt, Homo sapiens
  misc_RNA (1)...(19): siRNA sense strand
ggcugaggcugaagcacau

SEQ ID NO: 2479759 - RNA, 19 nt, Homo sapiens
  misc_RNA (1)...(19): siRNA sense strand
uggagagccugaaggagga

SEQ ID NO: 2479760 - RNA, 19 nt, Homo sapiens
  misc_RNA (1)...(19): siRNA sense strand
aaaaggaggacgugcguau

SEQ ID NO: 2479761 - RNA, 19 nt, Homo sapiens
  misc_RNA (1)...(19): siRNA sense strand
gguaccaguagauguggaa

SEQ ID NO: 2479762 - RNA, 19 nt, Homo sapiens
  misc_RNA (1)...(19): siRNA sense strand
caguagauguggaaaagga

SEQ ID NO: 2479763 - RNA, 19 nt, Homo sapiens
  misc_RNA (1)...(19): siRNA sense strand
ggacagagaucgagggcac

SEQ ID NO: 2479764 - RNA, 19 nt, Homo sapiens
  misc_RNA (1)...(19): siRNA sense strand
ccauggagcaagagaggaa

SEQ ID NO: 2479765 - RNA, 19 nt, Homo sapiens
  misc_RNA (1)...(19): siRNA sense strand
acauugaggacgaggacua

SEQ ID NO: 2479766 - RNA, 19 nt, Homo sapiens
  misc_RNA (1)...(19): siRNA sense strand
cagagaaggaggucggcua

SEQ ID NO: 2479767 - RNA, 19 nt, Homo sapiens
  misc_RNA (1)...(19): siRNA sense strand
aggagaaguucaugagcga

SEQ ID NO: 2479768 - RNA, 19 nt, Homo sapiens
  misc_RNA (1)...(19): siRNA sense strand
gcuacguggugguggugaa

SEQ ID NO: 2479769 - RNA, 19 nt, Homo sapiens
  misc_RNA (1)...(19): siRNA sense strand
agcagaugguggaggacua

SEQ ID NO: 2479770 - RNA, 19 nt, Homo sapiens
  misc_RNA (1)...(19): siRNA sense strand
uggccuaccuggagagcau

SEQ ID NO: 2479771 - RNA, 19 nt, Homo sapiens
  misc_RNA (1)...(19): siRNA sense strand
gccacuaccuggagcggaa

SEQ ID NO: 2479772 - RNA, 19 nt, Homo sapiens
  misc_RNA (1)...(19): siRNA sense strand
acguggugguggugaagaa

SEQ ID NO: 2479773 - RNA, 19 nt, Homo sapiens
  misc_RNA (1)...(19): siRNA sense strand
gggcugaggcugaagcaca

SEQ ID NO: 2479774 - RNA, 19 nt, Homo sapiens
  misc_RNA (1)...(19): siRNA sense strand
aggagaacuuaaagcccaa

SEQ ID NO: 2479775 - RNA, 19 nt, Homo sapiens
  misc_RNA (1)...(19): siRNA sense strand
gaggagugcaagaggcaga

SEQ ID NO: 2479776 - RNA, 19 nt, Homo sapiens
  misc_RNA (1)...(19): siRNA sense strand
acgacuacaugcagcgcua

SEQ ID NO: 2479777 - RNA, 19 nt, Homo sapiens
  misc_RNA (1)...(19): siRNA sense strand
ggcucaggcaggaggagaa

SEQ ID NO: 2479778 - RNA, 19 nt, Homo sapiens
  misc_RNA (1)...(19): siRNA sense strand
agucagacaucuacgcaga

SEQ ID NO: 2479779 - RNA, 19 nt, Homo sapiens
  misc_RNA (1)...(19): siRNA sense strand
aggcagaugcugacggcuu

SEQ ID NO: 2479780 - RNA, 19 nt, Homo sapiens
  misc_RNA (1)...(19): siRNA sense strand
ucaacaaagaccuggcaga

SEQ ID NO: 2479781 - RNA, 19 nt, Homo sapiens
  misc_RNA (1)...(19): siRNA sense strand
agaagcagaugguggagga

SEQ ID NO: 2479782 - RNA, 19 nt, Homo sapiens
  misc_RNA (1)...(19): siRNA sense strand
acaucgaccaggagaccua

SEQ ID NO: 2479783 - RNA, 19 nt, Homo sapiens
  misc_RNA (1)...(19): siRNA sense strand
uggacaacaaggagaaguu

SEQ ID NO: 2479784 - RNA, 19 nt, Homo sapiens
  misc_RNA (1)...(19): siRNA sense strand
gagaagaggcccagcagcu

SEQ ID NO: 2479785 - RNA, 19 nt, Homo sapiens
  misc_RNA (1)...(19): siRNA sense strand
cccuaagugaggagugcaa

SEQ ID NO: 2479786 - RNA, 19 nt, Homo sapiens
  misc_RNA (1)...(19): siRNA sense strand
ccuggaucaucauggaauu

SEQ ID NO: 2479787 - RNA, 19 nt, Homo sapiens
  misc_RNA (1)...(19): siRNA sense strand
acguuuaucagauggagaa

SEQ ID NO: 2479788 - RNA, 19 nt, Homo sapiens
  misc_RNA (1)...(19): siRNA sense strand
acaugaaguccgaugagau

SEQ ID NO: 2479789 - RNA, 19 nt, Homo sapiens
  misc_RNA (1)...(19): siRNA sense strand
caggagaacuuaaagccca

SEQ ID NO: 2479790 - RNA, 19 nt, Homo sapiens
  misc_RNA (1)...(19): siRNA sense strand
gcggcaaauccuggacaaa

SEQ ID NO: 2479791 - RNA, 19 nt, Homo sapiens
  misc_RNA (1)...(19): siRNA sense strand
uggacaaacagcagaagca

SEQ ID NO: 2479792 - RNA, 19 nt, Homo sapiens
  misc_RNA (1)...(19): siRNA sense strand
gcuacuugccagaagacuu

SEQ ID NO: 2479793 - RNA, 19 nt, Homo sapiens
  misc_RNA (1)...(19): siRNA sense strand
gcaaggucagcgagggcau

SEQ ID NO: 2479794 - RNA, 19 nt, Homo sapiens
  misc_RNA (1)...(19): siRNA sense strand
gagcugcagcauagaguca

SEQ ID NO: 2479795 - RNA, 19 nt, Homo sapiens
  misc_RNA (1)...(19): siRNA sense strand
uaucagauggagaaggaca

SEQ ID NO: 2479796 - RNA, 19 nt, Homo sapiens
  misc_RNA (1)...(19): siRNA sense strand
ccaaagcagaugcaggaga

SEQ ID NO: 2479797 - RNA, 19 nt, Homo sapiens
  misc_RNA (1)...(19): siRNA sense strand
ucgugaagcugaucggcau

SEQ ID NO: 2479798 - RNA, 19 nt, Homo sapiens
  misc_RNA (1)...(19): siRNA sense strand
acaacaaggagaaguucau

SEQ ID NO: 2479799 - RNA, 19 nt, Homo sapiens
  misc_RNA (1)...(19): siRNA sense strand
ggauguucgccgugugcau

SEQ ID NO: 2479800 - RNA, 19 nt, Homo sapiens
  misc_RNA (1)...(19): siRNA sense strand
cuaagugaggagugcaaga

SEQ ID NO: 2479801 - RNA, 19 nt, Homo sapiens
  misc_RNA (1)...(19): siRNA sense strand
acuucgagcuccuagaaaa

SEQ ID NO: 2479802 - RNA, 19 nt, Homo sapiens
  misc_RNA (1)...(19): siRNA sense strand
aggacgaggacuauuacaa

SEQ ID NO: 2479803 - RNA, 19 nt, Homo sapiens
  misc_RNA (1)...(19): siRNA sense strand
uggccgaguucaagcagau

SEQ ID NO: 2479804 - RNA, 19 nt, Homo sapiens
  misc_RNA (1)...(19): siRNA sense strand
ggcugaggcugaagcacau

SEQ ID NO: 2479805 - RNA, 19 nt, Homo sapiens
  misc_RNA (1)...(19): siRNA sense strand
uggagagccugaaggagga

SEQ ID NO: 2479806 - RNA, 19 nt, Homo sapiens
  misc_RNA (1)...(19): siRNA sense strand
aaaaggaggacgugcguau

SEQ ID NO: 2479807 - RNA, 19 nt, Homo sapiens
  misc_RNA (1)...(19): siRNA sense strand
gguaccaguagauguggaa

SEQ ID NO: 2479808 - RNA, 19 nt, Homo sapiens
  misc_RNA (1)...(19): siRNA sense strand
caguagauguggaaaagga

SEQ ID NO: 2479809 - RNA, 19 nt, Homo sapiens
  misc_RNA (1)...(19): siRNA sense strand
ggacagagaucgagggcac

SEQ ID NO: 2479810 - RNA, 19 nt, Homo sapiens
  misc_RNA (1)...(19): siRNA sense strand
ccauggagcaagagaggaa

SEQ ID NO: 2479811 - RNA, 19 nt, Homo sapiens
  misc_RNA (1)...(19): siRNA sense strand
acauugaggacgaggacua

SEQ ID NO: 2479812 - RNA, 19 nt, Homo sapiens
  misc_RNA (1)...(19): siRNA sense strand
cagagaaggaggucggcua

SEQ ID NO: 2479813 - RNA, 19 nt, Homo sapiens
  misc_RNA (1)...(19): siRNA sense strand
aggagaaguucaugagcga

SEQ ID NO: 2479814 - RNA, 19 nt, Homo sapiens
  misc_RNA (1)...(19): siRNA sense strand
gcuacguggugguggugaa

SEQ ID NO: 2479815 - RNA, 19 nt, Homo sapiens
  misc_RNA (1)...(19): siRNA sense strand
agcagaugguggaggacua

SEQ ID NO: 2479816 - RNA, 19 nt, Homo sapiens
  misc_RNA (1)...(19): siRNA sense strand
uggccuaccuggagagcau

SEQ ID NO: 2479817 - RNA, 19 nt, Homo sapiens
  misc_RNA (1)...(19): siRNA sense strand
gccacuaccuggagcggaa

SEQ ID NO: 2479818 - RNA, 19 nt, Homo sapiens
  misc_RNA (1)...(19): siRNA sense strand
acguggugguggugaagaa

SEQ ID NO: 2479819 - RNA, 19 nt, Homo sapiens
  misc_RNA (1)...(19): siRNA sense strand
gggcugaggcugaagcaca

SEQ ID NO: 2479820 - RNA, 19 nt, Homo sapiens
  misc_RNA (1)...(19): siRNA sense strand
aggagaacuuaaagcccaa

SEQ ID NO: 2479821 - RNA, 19 nt, Homo sapiens
  misc_RNA (1)...(19): siRNA sense strand
gaggagugcaagaggcaga

SEQ ID NO: 2479822 - RNA, 19 nt, Homo sapiens
  misc_RNA (1)...(19): siRNA sense strand
acgacuacaugcagcgcua

SEQ ID NO: 2479823 - RNA, 19 nt, Homo sapiens
  misc_RNA (1)...(19): siRNA sense strand
ggcucaggcaggaggagaa

SEQ ID NO: 2479824 - RNA, 19 nt, Homo sapiens
  misc_RNA (1)...(19): siRNA sense strand
agucagacaucuacgcaga

SEQ ID NO: 2479825 - RNA, 19 nt, Homo sapiens
  misc_RNA (1)...(19): siRNA sense strand
aggcagaugcugacggcuu

SEQ ID NO: 2479826 - RNA, 19 nt, Homo sapiens
  misc_RNA (1)...(19): siRNA sense strand
ucaacaaagaccuggcaga

SEQ ID NO: 2479827 - RNA, 19 nt, Homo sapiens
  misc_RNA (1)...(19): siRNA sense strand
agaagcagaugguggagga

SEQ ID NO: 2479828 - RNA, 19 nt, Homo sapiens
  misc_RNA (1)...(19): siRNA sense strand
acaucgaccaggagaccua

SEQ ID NO: 2479829 - RNA, 19 nt, Homo sapiens
  misc_RNA (1)...(19): siRNA sense strand
uggacaacaaggagaaguu

SEQ ID NO: 2479830 - RNA, 19 nt, Homo sapiens
  misc_RNA (1)...(19): siRNA sense strand
gagaagaggcccagcagcu

SEQ ID NO: 2479831 - RNA, 19 nt, Homo sapiens
  misc_RNA (1)...(19): siRNA sense strand
cccuaagugaggagugcaa

SEQ ID NO: 2479832 - RNA, 19 nt, Homo sapiens
  misc_RNA (1)...(19): siRNA sense strand
ccuggaucaucauggaauu

SEQ ID NO: 2479833 - RNA, 19 nt, Homo sapiens
  misc_RNA (1)...(19): siRNA sense strand
acguuuaucagauggagaa

SEQ ID NO: 2479834 - RNA, 19 nt, Homo sapiens
  misc_RNA (1)...(19): siRNA sense strand
acaugaaguccgaugagau

SEQ ID NO: 2479835 - RNA, 19 nt, Homo sapiens
  misc_RNA (1)...(19): siRNA sense strand
caggagaacuuaaagccca

SEQ ID NO: 2479836 - RNA, 19 nt, Homo sapiens
  misc_RNA (1)...(19): siRNA sense strand
gcggcaaauccuggacaaa

SEQ ID NO: 2479837 - RNA, 19 nt, Homo sapiens
  misc_RNA (1)...(19): siRNA sense strand
uggacaaacagcagaagca

SEQ ID NO: 2479838 - RNA, 19 nt, Homo sapiens
  misc_RNA (1)...(19): siRNA sense strand
gcuacuugccagaagacuu

SEQ ID NO: 2479839 - RNA, 19 nt, Homo sapiens
  misc_RNA (1)...(19): siRNA sense strand
gcaaggucagcgagggcau

SEQ ID NO: 2479840 - RNA, 19 nt, Homo sapiens
  misc_RNA (1)...(19): siRNA sense strand
gagcugcagcauagaguca

SEQ ID NO: 2479841 - RNA, 19 nt, Homo sapiens
  misc_RNA (1)...(19): siRNA sense strand
uaucagauggagaaggaca

SEQ ID NO: 2479842 - RNA, 19 nt, Homo sapiens
  misc_RNA (1)...(19): siRNA sense strand
ccaaagcagaugcaggaga

SEQ ID NO: 2479843 - RNA, 19 nt, Homo sapiens
  misc_RNA (1)...(19): siRNA sense strand
ucgugaagcugaucggcau

SEQ ID NO: 2479844 - RNA, 19 nt, Homo sapiens
  misc_RNA (1)...(19): siRNA sense strand
acaacaaggagaaguucau

SEQ ID NO: 2479845 - RNA, 19 nt, Homo sapiens
  misc_RNA (1)...(19): siRNA sense strand
ggauguucgccgugugcau

SEQ ID NO: 2479846 - RNA, 19 nt, Homo sapiens
  misc_RNA (1)...(19): siRNA sense strand
cuaagugaggagugcaaga

SEQ ID NO: 2479847 - RNA, 19 nt, Homo sapiens
  misc_RNA (1)...(19): siRNA sense strand
acuucgagcuccuagaaaa

SEQ ID NO: 2479848 - RNA, 19 nt, Homo sapiens
  misc_RNA (1)...(19): siRNA sense strand
aggacgaggacuauuacaa

SEQ ID NO: 2479849 - RNA, 19 nt, Homo sapiens
  misc_RNA (1)...(19): siRNA sense strand
uggccgaguucaagcagau

SEQ ID NO: 2479850 - RNA, 19 nt, Homo sapiens
  misc_RNA (1)...(19): siRNA sense strand
ggcugaggcugaagcacau

SEQ ID NO: 2479851 - RNA, 19 nt, Homo sapiens
  misc_RNA (1)...(19): siRNA sense strand
uggagagccugaaggagga

SEQ ID NO: 2479852 - RNA, 19 nt, Homo sapiens
  misc_RNA (1)...(19): siRNA sense strand
aaaaggaggacgugcguau

SEQ ID NO: 2479853 - RNA, 19 nt, Homo sapiens
  misc_RNA (1)...(19): siRNA sense strand
gguaccaguagauguggaa

SEQ ID NO: 2479854 - RNA, 19 nt, Homo sapiens
  misc_RNA (1)...(19): siRNA sense strand
caguagauguggaaaagga

SEQ ID NO: 2479855 - RNA, 19 nt, Homo sapiens
  misc_RNA (1)...(19): siRNA sense strand
cuuuauucacagagggaua

SEQ ID NO: 2479856 - RNA, 19 nt, Homo sapiens
  misc_RNA (1)...(19): siRNA sense strand
acaaauacucugaggggua

SEQ ID NO: 2479857 - RNA, 19 nt, Homo sapiens
  misc_RNA (1)...(19): siRNA sense strand
cugcagauccagagcgaca

SEQ ID NO: 2479858 - RNA, 19 nt, Homo sapiens
  misc_RNA (1)...(19): siRNA sense strand
gggucaacguccagcccua

SEQ ID NO: 2479859 - RNA, 19 nt, Homo sapiens
  misc_RNA (1)...(19): siRNA sense strand
ccuauaagcuggacccaca

SEQ ID NO: 2479860 - RNA, 19 nt, Homo sapiens
  misc_RNA (1)...(19): siRNA sense strand
gguucaugacagacaagaa

SEQ ID NO: 2479861 - RNA, 19 nt, Homo sapiens
  misc_RNA (1)...(19): siRNA sense strand
ccuacaaggugaacccaga

SEQ ID NO: 2479862 - RNA, 19 nt, Homo sapiens
  misc_RNA (1)...(19): siRNA sense strand
augacaagaugcuggcaca

SEQ ID NO: 2479863 - RNA, 19 nt, Homo sapiens
  misc_RNA (1)...(19): siRNA sense strand
gggcguaucucauggcgga

SEQ ID NO: 2479864 - RNA, 19 nt, Homo sapiens
  misc_RNA (1)...(19): siRNA sense strand
ggguuggauuggagcugau

SEQ ID NO: 2479865 - RNA, 19 nt, Homo sapiens
  misc_RNA (1)...(19): siRNA sense strand
guggaagggcugagaaggu

SEQ ID NO: 2479866 - RNA, 19 nt, Homo sapiens
  misc_RNA (1)...(19): siRNA sense strand
ucaugacagacaagaagaa

SEQ ID NO: 2479867 - RNA, 19 nt, Homo sapiens
  misc_RNA (1)...(19): siRNA sense strand
cuuuauucacagagggaua

SEQ ID NO: 2479868 - RNA, 19 nt, Homo sapiens
  misc_RNA (1)...(19): siRNA sense strand
acaaauacucugaggggua

SEQ ID NO: 2479869 - RNA, 19 nt, Homo sapiens
  misc_RNA (1)...(19): siRNA sense strand
cugcagauccagagcgaca

SEQ ID NO: 2479870 - RNA, 19 nt, Homo sapiens
  misc_RNA (1)...(19): siRNA sense strand
gggucaacguccagcccua

SEQ ID NO: 2479871 - RNA, 19 nt, Homo sapiens
  misc_RNA (1)...(19): siRNA sense strand
ccuauaagcuggacccaca

SEQ ID NO: 2479872 - RNA, 19 nt, Homo sapiens
  misc_RNA (1)...(19): siRNA sense strand
gguucaugacagacaagaa

SEQ ID NO: 2479873 - RNA, 19 nt, Homo sapiens
  misc_RNA (1)...(19): siRNA sense strand
ccuacaaggugaacccaga

SEQ ID NO: 2479874 - RNA, 19 nt, Homo sapiens
  misc_RNA (1)...(19): siRNA sense strand
augacaagaugcuggcaca

SEQ ID NO: 2479875 - RNA, 19 nt, Homo sapiens
  misc_RNA (1)...(19): siRNA sense strand
gggcguaucucauggcgga

SEQ ID NO: 2479876 - RNA, 19 nt, Homo sapiens
  misc_RNA (1)...(19): siRNA sense strand
ggguuggauuggagcugau

SEQ ID NO: 2479877 - RNA, 19 nt, Homo sapiens
  misc_RNA (1)...(19): siRNA sense strand
guggaagggcugagaaggu

SEQ ID NO: 2479878 - RNA, 19 nt, Homo sapiens
  misc_RNA (1)...(19): siRNA sense strand
ucaugacagacaagaagaa

SEQ ID NO: 2479879 - RNA, 19 nt, Homo sapiens
  misc_RNA (1)...(19): siRNA sense strand
ccaacaagguccacgccau

SEQ ID NO: 2479880 - RNA, 19 nt, Homo sapiens
  misc_RNA (1)...(19): siRNA sense strand
gggagaauccagaugagga

SEQ ID NO: 2479881 - RNA, 19 nt, Homo sapiens
  misc_RNA (1)...(19): siRNA sense strand
acaucaaugcaguggcuuu

SEQ ID NO: 2479882 - RNA, 19 nt, Homo sapiens
  misc_RNA (1)...(19): siRNA sense strand
gguaaugaccugugccuac

SEQ ID NO: 2479883 - RNA, 19 nt, Homo sapiens
  misc_RNA (1)...(19): siRNA sense strand
cugcgcuccuccuggguaa

SEQ ID NO: 2479884 - RNA, 19 nt, Homo sapiens
  misc_RNA (1)...(19): siRNA sense strand
ucaagacccgcgagggcaa

SEQ ID NO: 2479885 - RNA, 19 nt, Homo sapiens
  misc_RNA (1)...(19): siRNA sense strand
gccaugaauccgacaucaa

SEQ ID NO: 2479886 - RNA, 19 nt, Homo sapiens
  misc_RNA (1)...(19): siRNA sense strand
ccgaaaagcauguggggac

SEQ ID NO: 2479887 - RNA, 19 nt, Homo sapiens
  misc_RNA (1)...(19): siRNA sense strand
ccaacaagguccacgccau

SEQ ID NO: 2479888 - RNA, 19 nt, Homo sapiens
  misc_RNA (1)...(19): siRNA sense strand
uugugaugcuucagccaaa

SEQ ID NO: 2479889 - RNA, 19 nt, Homo sapiens
  misc_RNA (1)...(19): siRNA sense strand
aaacuuaucaucugggaca

SEQ ID NO: 2479890 - RNA, 19 nt, Homo sapiens
  misc_RNA (1)...(19): siRNA sense strand
gggaugugcgagaaggcau

SEQ ID NO: 2479891 - RNA, 19 nt, Homo sapiens
  misc_RNA (1)...(19): siRNA sense strand
uggcauggcuguggcgaca

SEQ ID NO: 2479892 - RNA, 19 nt, Homo sapiens
  misc_RNA (1)...(19): siRNA sense strand
ccaccagccaggaagacaa

SEQ ID NO: 2479893 - RNA, 19 nt, Homo sapiens
  misc_RNA (1)...(19): siRNA sense strand
auggagaagagaacaggaa

SEQ ID NO: 2479894 - RNA, 19 nt, Homo sapiens
  misc_RNA (1)...(19): siRNA sense strand
cuuugaauggagaagagaa

SEQ ID NO: 2479895 - RNA, 19 nt, Homo sapiens
  misc_RNA (1)...(19): siRNA sense strand
acgacaagaauuagagcaa

SEQ ID NO: 2479896 - RNA, 19 nt, Homo sapiens
  misc_RNA (1)...(19): siRNA sense strand
ccacuaaacaaaagaggaa

SEQ ID NO: 2479897 - RNA, 19 nt, Homo sapiens
  misc_RNA (1)...(19): siRNA sense strand
ggugauugaacuggacaaa

SEQ ID NO: 2479898 - RNA, 19 nt, Homo sapiens
  misc_RNA (1)...(19): siRNA sense strand
cagacuaucaugaggaaac

SEQ ID NO: 2479899 - RNA, 19 nt, Homo sapiens
  misc_RNA (1)...(19): siRNA sense strand
agaagauggcugacaaaau

SEQ ID NO: 2479900 - RNA, 19 nt, Homo sapiens
  misc_RNA (1)...(19): siRNA sense strand
cauugauguugaaguggau

SEQ ID NO: 2479901 - RNA, 19 nt, Homo sapiens
  misc_RNA (1)...(19): siRNA sense strand
uagagcaagcccugggaau

SEQ ID NO: 2479902 - RNA, 19 nt, Homo sapiens
  misc_RNA (1)...(19): siRNA sense strand
uaucaugaggaaacggcua

SEQ ID NO: 2479903 - RNA, 19 nt, Homo sapiens
  misc_RNA (1)...(19): siRNA sense strand
acgacaagaauuagagcaa

SEQ ID NO: 2479904 - RNA, 19 nt, Homo sapiens
  misc_RNA (1)...(19): siRNA sense strand
ccacuaaacaaaagaggaa

SEQ ID NO: 2479905 - RNA, 19 nt, Homo sapiens
  misc_RNA (1)...(19): siRNA sense strand
ggugauugaacuggacaaa

SEQ ID NO: 2479906 - RNA, 19 nt, Homo sapiens
  misc_RNA (1)...(19): siRNA sense strand
cagacuaucaugaggaaac

SEQ ID NO: 2479907 - RNA, 19 nt, Homo sapiens
  misc_RNA (1)...(19): siRNA sense strand
agaagauggcugacaaaau

SEQ ID NO: 2479908 - RNA, 19 nt, Homo sapiens
  misc_RNA (1)...(19): siRNA sense strand
cauugauguugaaguggau

SEQ ID NO: 2479909 - RNA, 19 nt, Homo sapiens
  misc_RNA (1)...(19): siRNA sense strand
uagagcaagcccugggaau

SEQ ID NO: 2479910 - RNA, 19 nt, Homo sapiens
  misc_RNA (1)...(19): siRNA sense strand
uaucaugaggaaacggcua

SEQ ID NO: 2479911 - RNA, 19 nt, Homo sapiens
  misc_RNA (1)...(19): siRNA sense strand
ucuaaggaagagugggaaa

SEQ ID NO: 2479912 - RNA, 19 nt, Homo sapiens
  misc_RNA (1)...(19): siRNA sense strand
agaugaaagccucggagaa

SEQ ID NO: 2479913 - RNA, 19 nt, Homo sapiens
  misc_RNA (1)...(19): siRNA sense strand
guguauaugaagagaaagu

SEQ ID NO: 2479914 - RNA, 19 nt, Homo sapiens
  misc_RNA (1)...(19): siRNA sense strand
gaacaugccuggacccaca

SEQ ID NO: 2479915 - RNA, 19 nt, Homo sapiens
  misc_RNA (1)...(19): siRNA sense strand
cucaaauaccagagaagau

SEQ ID NO: 2479916 - RNA, 19 nt, Homo sapiens
  misc_RNA (1)...(19): siRNA sense strand
ucggcaggcuccagggaau

SEQ ID NO: 2479917 - RNA, 19 nt, Homo sapiens
  misc_RNA (1)...(19): siRNA sense strand
aagagaaaguaugaggcua

SEQ ID NO: 2479918 - RNA, 19 nt, Homo sapiens
  misc_RNA (1)...(19): siRNA sense strand
ccaagaagccagcagagga

SEQ ID NO: 2479919 - RNA, 19 nt, Homo sapiens
  misc_RNA (1)...(19): siRNA sense strand
agccagcagaggaaggaaa

SEQ ID NO: 2479920 - RNA, 19 nt, Homo sapiens
  misc_RNA (1)...(19): siRNA sense strand
aaguaugaggcuaugacua

SEQ ID NO: 2479921 - RNA, 19 nt, Homo sapiens
  misc_RNA (1)...(19): siRNA sense strand
aggggaaugauuuggauaa

SEQ ID NO: 2479922 - RNA, 19 nt, Homo sapiens
  misc_RNA (1)...(19): siRNA sense strand
ggaaaugauucggaggaag

SEQ ID NO: 2479923 - RNA, 19 nt, Homo sapiens
  misc_RNA (1)...(19): siRNA sense strand
agaagauucacgagagauc

SEQ ID NO: 2479924 - RNA, 19 nt, Homo sapiens
  misc_RNA (1)...(19): siRNA sense strand
ucuaaggaagagugggaaa

SEQ ID NO: 2479925 - RNA, 19 nt, Homo sapiens
  misc_RNA (1)...(19): siRNA sense strand
agaugaaagccucggagaa

SEQ ID NO: 2479926 - RNA, 19 nt, Homo sapiens
  misc_RNA (1)...(19): siRNA sense strand
guguauaugaagagaaagu

SEQ ID NO: 2479927 - RNA, 19 nt, Homo sapiens
  misc_RNA (1)...(19): siRNA sense strand
gaacaugccuggacccaca

SEQ ID NO: 2479928 - RNA, 19 nt, Homo sapiens
  misc_RNA (1)...(19): siRNA sense strand
cucaaauaccagagaagau

SEQ ID NO: 2479929 - RNA, 19 nt, Homo sapiens
  misc_RNA (1)...(19): siRNA sense strand
ucggcaggcuccagggaau

SEQ ID NO: 2479930 - RNA, 19 nt, Homo sapiens
  misc_RNA (1)...(19): siRNA sense strand
aagagaaaguaugaggcua

SEQ ID NO: 2479931 - RNA, 19 nt, Homo sapiens
  misc_RNA (1)...(19): siRNA sense strand
ccaagaagccagcagagga

SEQ ID NO: 2479932 - RNA, 19 nt, Homo sapiens
  misc_RNA (1)...(19): siRNA sense strand
agccagcagaggaaggaaa

SEQ ID NO: 2479933 - RNA, 19 nt, Homo sapiens
  misc_RNA (1)...(19): siRNA sense strand
aaguaugaggcuaugacua

SEQ ID NO: 2479934 - RNA, 19 nt, Homo sapiens
  misc_RNA (1)...(19): siRNA sense strand
aggggaaugauuuggauaa

SEQ ID NO: 2479935 - RNA, 19 nt, Homo sapiens
  misc_RNA (1)...(19): siRNA sense strand
ggaaaugauucggaggaag

SEQ ID NO: 2479936 - RNA, 19 nt, Homo sapiens
  misc_RNA (1)...(19): siRNA sense strand
agaagauucacgagagauc

SEQ ID NO: 2479937 - RNA, 19 nt, Homo sapiens
  misc_RNA (1)...(19): siRNA sense strand
cagccaagaagaagaagca

SEQ ID NO: 2479938 - RNA, 19 nt, Homo sapiens
  misc_RNA (1)...(19): siRNA sense strand
ccuuagaacacgagaaacu

SEQ ID NO: 2479939 - RNA, 19 nt, Homo sapiens
  misc_RNA (1)...(19): siRNA sense strand
gugcagaagcugaacgaca

SEQ ID NO: 2479940 - RNA, 19 nt, Homo sapiens
  misc_RNA (1)...(19): siRNA sense strand
ggaaagauuaccuggacca

SEQ ID NO: 2479941 - RNA, 19 nt, Homo sapiens
  misc_RNA (1)...(19): siRNA sense strand
agagaugcugacagggaaa

SEQ ID NO: 2479942 - RNA, 19 nt, Homo sapiens
  misc_RNA (1)...(19): siRNA sense strand
aggaagagacggaggccca

SEQ ID NO: 2479943 - RNA, 19 nt, Homo sapiens
  misc_RNA (1)...(19): siRNA sense strand
cagcacaucuacaaggaga

SEQ ID NO: 2479944 - RNA, 19 nt, Homo sapiens
  misc_RNA (1)...(19): siRNA sense strand
cgagaaacucacaguggau

SEQ ID NO: 2479945 - RNA, 19 nt, Homo sapiens
  misc_RNA (1)...(19): siRNA sense strand
cagagaugcugacagggaa

SEQ ID NO: 2479946 - RNA, 19 nt, Homo sapiens
  misc_RNA (1)...(19): siRNA sense strand
gcagagaugcugacaggga

SEQ ID NO: 2479947 - RNA, 19 nt, Homo sapiens
  misc_RNA (1)...(19): siRNA sense strand
cggaccugcuggagaagau

SEQ ID NO: 2479948 - RNA, 19 nt, Homo sapiens
  misc_RNA (1)...(19): siRNA sense strand
ucuacaagcaggacgucaa

SEQ ID NO: 2479949 - RNA, 19 nt, Homo sapiens
  misc_RNA (1)...(19): siRNA sense strand
agaaacucacaguggauga

SEQ ID NO: 2479950 - RNA, 19 nt, Homo sapiens
  misc_RNA (1)...(19): siRNA sense strand
aguccgagaucuucgccaa

SEQ ID NO: 2479951 - RNA, 19 nt, Homo sapiens
  misc_RNA (1)...(19): siRNA sense strand
uggaguucagugaggagaa

SEQ ID NO: 2479952 - RNA, 19 nt, Homo sapiens
  misc_RNA (1)...(19): siRNA sense strand
gagcuuaacuacaaggugu

SEQ ID NO: 2479953 - RNA, 19 nt, Homo sapiens
  misc_RNA (1)...(19): siRNA sense strand
gaaagaaauguauggagca

SEQ ID NO: 2479954 - RNA, 19 nt, Homo sapiens
  misc_RNA (1)...(19): siRNA sense strand
cuggagguggagaaagaaa

SEQ ID NO: 2479955 - RNA, 19 nt, Homo sapiens
  misc_RNA (1)...(19): siRNA sense strand
agauguacacccagaugaa

SEQ ID NO: 2479956 - RNA, 19 nt, Homo sapiens
  misc_RNA (1)...(19): siRNA sense strand
aggaggagugccuggagaa

SEQ ID NO: 2479957 - RNA, 19 nt, Homo sapiens
  misc_RNA (1)...(19): siRNA sense strand
gcggacaagcagaucgaga

SEQ ID NO: 2479958 - RNA, 19 nt, Homo sapiens
  misc_RNA (1)...(19): siRNA sense strand
agaacauccuggaggugga

SEQ ID NO: 2479959 - RNA, 19 nt, Homo sapiens
  misc_RNA (1)...(19): siRNA sense strand
aaaucaaagcuguguacga

SEQ ID NO: 2479960 - RNA, 19 nt, Homo sapiens
  misc_RNA (1)...(19): siRNA sense strand
agaaagaaauguauggagc

SEQ ID NO: 2479961 - RNA, 19 nt, Homo sapiens
  misc_RNA (1)...(19): siRNA sense strand
agguggagaaagaaaugua

SEQ ID NO: 2479962 - RNA, 19 nt, Homo sapiens
  misc_RNA (1)...(19): siRNA sense strand
gaggaggagugccuggaga

SEQ ID NO: 2479963 - RNA, 19 nt, Homo sapiens
  misc_RNA (1)...(19): siRNA sense strand
aggucuuccuccagagcau

SEQ ID NO: 2479964 - RNA, 19 nt, Homo sapiens
  misc_RNA (1)...(19): siRNA sense strand
gugaccaggaagagggaga

SEQ ID NO: 2479965 - RNA, 19 nt, Homo sapiens
  misc_RNA (1)...(19): siRNA sense strand
caguggaagagguggucau

SEQ ID NO: 2479966 - RNA, 19 nt, Homo sapiens
  misc_RNA (1)...(19): siRNA sense strand
acauguuguuauuuggcaa

SEQ ID NO: 2479967 - RNA, 19 nt, Homo sapiens
  misc_RNA (1)...(19): siRNA sense strand
ucuuuaugcagcugcguua

SEQ ID NO: 2479968 - RNA, 19 nt, Homo sapiens
  misc_RNA (1)...(19): siRNA sense strand
gaccaggaagagggagaaa

SEQ ID NO: 2479969 - RNA, 19 nt, Homo sapiens
  misc_RNA (1)...(19): siRNA sense strand
uggaggagacgcuggacuu

SEQ ID NO: 2479970 - RNA, 19 nt, Homo sapiens
  misc_RNA (1)...(19): siRNA sense strand
acagcaucucaaagacaaa

SEQ ID NO: 2479971 - RNA, 19 nt, Homo sapiens
  misc_RNA (1)...(19): siRNA sense strand
ccagcaacucccagcucaa

SEQ ID NO: 2479972 - RNA, 19 nt, Homo sapiens
  misc_RNA (1)...(19): siRNA sense strand
caguggaagagguggucau

SEQ ID NO: 2479973 - RNA, 19 nt, Homo sapiens
  misc_RNA (1)...(19): siRNA sense strand
acauguuguuauuuggcaa

SEQ ID NO: 2479974 - RNA, 19 nt, Homo sapiens
  misc_RNA (1)...(19): siRNA sense strand
ucuuuaugcagcugcguua

SEQ ID NO: 2479975 - RNA, 19 nt, Homo sapiens
  misc_RNA (1)...(19): siRNA sense strand
acagcaucucaaagacaaa

SEQ ID NO: 2479976 - RNA, 19 nt, Homo sapiens
  misc_RNA (1)...(19): siRNA sense strand
caguaguggaagauguaaa

SEQ ID NO: 2479977 - RNA, 19 nt, Homo sapiens
  misc_RNA (1)...(19): siRNA sense strand
guaagaaagcucagccgaa

SEQ ID NO: 2479978 - RNA, 19 nt, Homo sapiens
  misc_RNA (1)...(19): siRNA sense strand
aauauuuguaggcggguua

SEQ ID NO: 2479979 - RNA, 19 nt, Homo sapiens
  misc_RNA (1)...(19): siRNA sense strand
agaaagucugugagauuca

SEQ ID NO: 2479980 - RNA, 19 nt, Homo sapiens
  misc_RNA (1)...(19): siRNA sense strand
gcgcaacccaagaugguca

SEQ ID NO: 2479981 - RNA, 19 nt, Homo sapiens
  misc_RNA (1)...(19): siRNA sense strand
agauaaaguauuaggucag

SEQ ID NO: 2479982 - RNA, 19 nt, Homo sapiens
  misc_RNA (1)...(19): siRNA sense strand
gaguuagauuccaagacga

SEQ ID NO: 2479983 - RNA, 19 nt, Homo sapiens
  misc_RNA (1)...(19): siRNA sense strand
ggacugagcuggcagaccu

SEQ ID NO: 2479984 - RNA, 19 nt, Homo sapiens
  misc_RNA (1)...(19): siRNA sense strand
gaaugaagauguuguggag

SEQ ID NO: 2479985 - RNA, 19 nt, Homo sapiens
  misc_RNA (1)...(19): siRNA sense strand
acgaaacgcuccagaggcu

SEQ ID NO: 2479986 - RNA, 19 nt, Homo sapiens
  misc_RNA (1)...(19): siRNA sense strand
caguaguggaagauguaaa

SEQ ID NO: 2479987 - RNA, 19 nt, Homo sapiens
  misc_RNA (1)...(19): siRNA sense strand
guaagaaagcucagccgaa

SEQ ID NO: 2479988 - RNA, 19 nt, Homo sapiens
  misc_RNA (1)...(19): siRNA sense strand
aauauuuguaggcggguua

SEQ ID NO: 2479989 - RNA, 19 nt, Homo sapiens
  misc_RNA (1)...(19): siRNA sense strand
agaaagucugugagauuca

SEQ ID NO: 2479990 - RNA, 19 nt, Homo sapiens
  misc_RNA (1)...(19): siRNA sense strand
gcgcaacccaagaugguca

SEQ ID NO: 2479991 - RNA, 19 nt, Homo sapiens
  misc_RNA (1)...(19): siRNA sense strand
agauaaaguauuaggucag

SEQ ID NO: 2479992 - RNA, 19 nt, Homo sapiens
  misc_RNA (1)...(19): siRNA sense strand
gaguuagauuccaagacga

SEQ ID NO: 2479993 - RNA, 19 nt, Homo sapiens
  misc_RNA (1)...(19): siRNA sense strand
ggacugagcuggcagaccu

SEQ ID NO: 2479994 - RNA, 19 nt, Homo sapiens
  misc_RNA (1)...(19): siRNA sense strand
gaaugaagauguuguggag

SEQ ID NO: 2479995 - RNA, 19 nt, Homo sapiens
  misc_RNA (1)...(19): siRNA sense strand
acgaaacgcuccagaggcu

SEQ ID NO: 2479996 - RNA, 19 nt, Homo sapiens
  misc_RNA (1)...(19): siRNA sense strand
accaagaaaggaacagaaa

SEQ ID NO: 2479997 - RNA, 19 nt, Homo sapiens
  misc_RNA (1)...(19): siRNA sense strand
caguguggaacuuggacaa

SEQ ID NO: 2479998 - RNA, 19 nt, Homo sapiens
  misc_RNA (1)...(19): siRNA sense strand
ccaagaaaggaacagaaaa

SEQ ID NO: 2479999 - RNA, 19 nt, Homo sapiens
  misc_RNA (1)...(19): siRNA sense strand
gagcuggaaucuaugggau

SEQ ID NO: 2480000 - RNA, 19 nt, Homo sapiens
  misc_RNA (1)...(19): siRNA sense strand
gacaaaacaugcagaggga

SEQ ID NO: 2480001 - RNA, 19 nt, Homo sapiens
  misc_RNA (1)...(19): siRNA sense strand
caagaaaggaacagaaaag

SEQ ID NO: 2480002 - RNA, 19 nt, Homo sapiens
  misc_RNA (1)...(19): siRNA sense strand
ccgucuugggagugcaaau

SEQ ID NO: 2480003 - RNA, 19 nt, Homo sapiens
  misc_RNA (1)...(19): siRNA sense strand
accaagaaaggaacagaaa

SEQ ID NO: 2480004 - RNA, 19 nt, Homo sapiens
  misc_RNA (1)...(19): siRNA sense strand
caguguggaacuuggacaa

SEQ ID NO: 2480005 - RNA, 19 nt, Homo sapiens
  misc_RNA (1)...(19): siRNA sense strand
ccaagaaaggaacagaaaa

SEQ ID NO: 2480006 - RNA, 19 nt, Homo sapiens
  misc_RNA (1)...(19): siRNA sense strand
gagcuggaaucuaugggau

SEQ ID NO: 2480007 - RNA, 19 nt, Homo sapiens
  misc_RNA (1)...(19): siRNA sense strand
gacaaaacaugcagaggga

SEQ ID NO: 2480008 - RNA, 19 nt, Homo sapiens
  misc_RNA (1)...(19): siRNA sense strand
caagaaaggaacagaaaag

SEQ ID NO: 2480009 - RNA, 19 nt, Homo sapiens
  misc_RNA (1)...(19): siRNA sense strand
ccgucuugggagugcaaau

SEQ ID NO: 2480010 - RNA, 19 nt, Homo sapiens
  misc_RNA (1)...(19): siRNA sense strand
accaagaaaggaacagaaa

SEQ ID NO: 2480011 - RNA, 19 nt, Homo sapiens
  misc_RNA (1)...(19): siRNA sense strand
caguguggaacuuggacaa

SEQ ID NO: 2480012 - RNA, 19 nt, Homo sapiens
  misc_RNA (1)...(19): siRNA sense strand
ccaagaaaggaacagaaaa

SEQ ID NO: 2480013 - RNA, 19 nt, Homo sapiens
  misc_RNA (1)...(19): siRNA sense strand
gagcuggaaucuaugggau

SEQ ID NO: 2480014 - RNA, 19 nt, Homo sapiens
  misc_RNA (1)...(19): siRNA sense strand
gacaaaacaugcagaggga

SEQ ID NO: 2480015 - RNA, 19 nt, Homo sapiens
  misc_RNA (1)...(19): siRNA sense strand
caagaaaggaacagaaaag

SEQ ID NO: 2480016 - RNA, 19 nt, Homo sapiens
  misc_RNA (1)...(19): siRNA sense strand
ccgucuugggagugcaaau

SEQ ID NO: 2480017 - RNA, 19 nt, Homo sapiens
  misc_RNA (1)...(19): siRNA sense strand
ggcuauuaaccgaagcaaa

SEQ ID NO: 2480018 - RNA, 19 nt, Homo sapiens
  misc_RNA (1)...(19): siRNA sense strand
cagaaggauccuagagcca

SEQ ID NO: 2480019 - RNA, 19 nt, Homo sapiens
  misc_RNA (1)...(19): siRNA sense strand
gauccuugguguuuggcua

SEQ ID NO: 2480020 - RNA, 19 nt, Homo sapiens
  misc_RNA (1)...(19): siRNA sense strand
cuuggugggucaugagcaa

SEQ ID NO: 2480021 - RNA, 19 nt, Homo sapiens
  misc_RNA (1)...(19): siRNA sense strand
cagacgaagcccugaaaau

SEQ ID NO: 2480022 - RNA, 19 nt, Homo sapiens
  misc_RNA (1)...(19): siRNA sense strand
agcaaugagauuucggaau

SEQ ID NO: 2480023 - RNA, 19 nt, Homo sapiens
  misc_RNA (1)...(19): siRNA sense strand
gugaaugggacgaaggaga

SEQ ID NO: 2480024 - RNA, 19 nt, Homo sapiens
  misc_RNA (1)...(19): siRNA sense strand
ggacaagaucauugcagga

SEQ ID NO: 2480025 - RNA, 19 nt, Homo sapiens
  misc_RNA (1)...(19): siRNA sense strand
agaagaagaagaaggagga

SEQ ID NO: 2480026 - RNA, 19 nt, Homo sapiens
  misc_RNA (1)...(19): siRNA sense strand
ccgauuuccagaagaagaa

SEQ ID NO: 2480027 - RNA, 19 nt, Homo sapiens
  misc_RNA (1)...(19): siRNA sense strand
auuuaugagaccaguacaa

SEQ ID NO: 2480028 - RNA, 19 nt, Homo sapiens
  misc_RNA (1)...(19): siRNA sense strand
ugguacauucugugauaau

SEQ ID NO: 2480029 - RNA, 19 nt, Homo sapiens
  misc_RNA (1)...(19): siRNA sense strand
uaaacggggcagaaagaaa

SEQ ID NO: 2480030 - RNA, 19 nt, Homo sapiens
  misc_RNA (1)...(19): siRNA sense strand
agacuguugcuuugggaca

SEQ ID NO: 2480031 - RNA, 19 nt, Homo sapiens
  misc_RNA (1)...(19): siRNA sense strand
ggaaggagguugagcugcu

SEQ ID NO: 2480032 - RNA, 19 nt, Homo sapiens
  misc_RNA (1)...(19): siRNA sense strand
gggaggaguacgucagcau

SEQ ID NO: 2480033 - RNA, 19 nt, Homo sapiens
  misc_RNA (1)...(19): siRNA sense strand
ggagagagccguuuccaga

SEQ ID NO: 2480034 - RNA, 19 nt, Homo sapiens
  misc_RNA (1)...(19): siRNA sense strand
gcgaggaaguggcuggagu

SEQ ID NO: 2480035 - RNA, 19 nt, Homo sapiens
  misc_RNA (1)...(19): siRNA sense strand
ggaaguggcuggaguggag

SEQ ID NO: 2480036 - RNA, 19 nt, Homo sapiens
  misc_RNA (1)...(19): siRNA sense strand
ggaaggagguugagcugcu

SEQ ID NO: 2480037 - RNA, 19 nt, Homo sapiens
  misc_RNA (1)...(19): siRNA sense strand
gggaggaguacgucagcau

SEQ ID NO: 2480038 - RNA, 19 nt, Homo sapiens
  misc_RNA (1)...(19): siRNA sense strand
ggagagagccguuuccaga

SEQ ID NO: 2480039 - RNA, 19 nt, Homo sapiens
  misc_RNA (1)...(19): siRNA sense strand
gcgaggaaguggcuggagu

SEQ ID NO: 2480040 - RNA, 19 nt, Homo sapiens
  misc_RNA (1)...(19): siRNA sense strand
ggaaguggcuggaguggag

SEQ ID NO: 2480041 - RNA, 19 nt, Homo sapiens
  misc_RNA (1)...(19): siRNA sense strand
gaauggaauacuuggccua

SEQ ID NO: 2480042 - RNA, 19 nt, Homo sapiens
  misc_RNA (1)...(19): siRNA sense strand
gcagagaguauaacgcaga

SEQ ID NO: 2480043 - RNA, 19 nt, Homo sapiens
  misc_RNA (1)...(19): siRNA sense strand
caaggaagcuggacgggcu

SEQ ID NO: 2480044 - RNA, 19 nt, Homo sapiens
  misc_RNA (1)...(19): siRNA sense strand
gaauggaauacuuggccua

SEQ ID NO: 2480045 - RNA, 19 nt, Homo sapiens
  misc_RNA (1)...(19): siRNA sense strand
gcagagaguauaacgcaga

SEQ ID NO: 2480046 - RNA, 19 nt, Homo sapiens
  misc_RNA (1)...(19): siRNA sense strand
caaggaagcuggacgggcu

SEQ ID NO: 2480047 - RNA, 19 nt, Homo sapiens
  misc_RNA (1)...(19): siRNA sense strand
gaauggaauacuuggccua

SEQ ID NO: 2480048 - RNA, 19 nt, Homo sapiens
  misc_RNA (1)...(19): siRNA sense strand
gcagagaguauaacgcaga

SEQ ID NO: 2480049 - RNA, 19 nt, Homo sapiens
  misc_RNA (1)...(19): siRNA sense strand
caaggaagcuggacgggcu

SEQ ID NO: 2480050 - RNA, 19 nt, Homo sapiens
  misc_RNA (1)...(19): siRNA sense strand
cuagauaagcagagaccau

SEQ ID NO: 2480051 - RNA, 19 nt, Homo sapiens
  misc_RNA (1)...(19): siRNA sense strand
ggucaauggagcugcugau

SEQ ID NO: 2480052 - RNA, 19 nt, Homo sapiens
  misc_RNA (1)...(19): siRNA sense strand
uggcaguuauugagauacu

SEQ ID NO: 2480053 - RNA, 19 nt, Homo sapiens
  misc_RNA (1)...(19): siRNA sense strand
cagaaaucuaccuggccaa

SEQ ID NO: 2480054 - RNA, 19 nt, Homo sapiens
  misc_RNA (1)...(19): siRNA sense strand
ccacauuccugcugcgauc

SEQ ID NO: 2480055 - RNA, 19 nt, Homo sapiens
  misc_RNA (1)...(19): siRNA sense strand
gcagaaaucuaccuggcca

SEQ ID NO: 2480056 - RNA, 19 nt, Homo sapiens
  misc_RNA (1)...(19): siRNA sense strand
ugaacguggcagaaaucua

SEQ ID NO: 2480057 - RNA, 19 nt, Homo sapiens
  misc_RNA (1)...(19): siRNA sense strand
gccaaguggucaaggcaga

SEQ ID NO: 2480058 - RNA, 19 nt, Homo sapiens
  misc_RNA (1)...(19): siRNA sense strand
cugacugguucgaggugua

SEQ ID NO: 2480059 - RNA, 19 nt, Homo sapiens
  misc_RNA (1)...(19): siRNA sense strand
gugccaucaaggagaacaa

SEQ ID NO: 2480060 - RNA, 19 nt, Homo sapiens
  misc_RNA (1)...(19): siRNA sense strand
uggucaaggcagacaccua

SEQ ID NO: 2480061 - RNA, 19 nt, Homo sapiens
  misc_RNA (1)...(19): siRNA sense strand
aggagaaccugcuggcugu

SEQ ID NO: 2480062 - RNA, 19 nt, Homo sapiens
  misc_RNA (1)...(19): siRNA sense strand
cggacaugguugaagcaaa

SEQ ID NO: 2480063 - RNA, 19 nt, Homo sapiens
  misc_RNA (1)...(19): siRNA sense strand
ugcagaaagcggaaagaaa

SEQ ID NO: 2480064 - RNA, 19 nt, Homo sapiens
  misc_RNA (1)...(19): siRNA sense strand
cugugaagauggacgguau

SEQ ID NO: 2480065 - RNA, 19 nt, Homo sapiens
  misc_RNA (1)...(19): siRNA sense strand
augcaagcaacgagaacaa

SEQ ID NO: 2480066 - RNA, 19 nt, Homo sapiens
  misc_RNA (1)...(19): siRNA sense strand
gguuaagccugcagggauc

SEQ ID NO: 2480067 - RNA, 19 nt, Homo sapiens
  misc_RNA (1)...(19): siRNA sense strand
cgacuauggcacagaggau

SEQ ID NO: 2480068 - RNA, 19 nt, Homo sapiens
  misc_RNA (1)...(19): siRNA sense strand
agaauguagggauggguua

SEQ ID NO: 2480069 - RNA, 19 nt, Homo sapiens
  misc_RNA (1)...(19): siRNA sense strand
gagaaagagcugcugguga

SEQ ID NO: 2480070 - RNA, 19 nt, Homo sapiens
  misc_RNA (1)...(19): siRNA sense strand
ggaaaugguggaaggagca

SEQ ID NO: 2480071 - RNA, 19 nt, Homo sapiens
  misc_RNA (1)...(19): siRNA sense strand
ggaugacggaauugagaga

SEQ ID NO: 2480072 - RNA, 19 nt, Homo sapiens
  misc_RNA (1)...(19): siRNA sense strand
acuauggcacagaggauua

SEQ ID NO: 2480073 - RNA, 19 nt, Homo sapiens
  misc_RNA (1)...(19): siRNA sense strand
ccgcuauagccgaguugaa

SEQ ID NO: 2480074 - RNA, 19 nt, Homo sapiens
  misc_RNA (1)...(19): siRNA sense strand
aagcggacaaagagggauu

SEQ ID NO: 2480075 - RNA, 19 nt, Homo sapiens
  misc_RNA (1)...(19): siRNA sense strand
uccaacagcaagugguaaa

SEQ ID NO: 2480076 - RNA, 19 nt, Homo sapiens
  misc_RNA (1)...(19): siRNA sense strand
aagagaggcuacacgggaa

SEQ ID NO: 2480077 - RNA, 19 nt, Homo sapiens
  misc_RNA (1)...(19): siRNA sense strand
ggguuaagccugcagggau

SEQ ID NO: 2480078 - RNA, 19 nt, Homo sapiens
  misc_RNA (1)...(19): siRNA sense strand
ggaaagaacauugugguca

SEQ ID NO: 2480079 - RNA, 19 nt, Homo sapiens
  misc_RNA (1)...(19): siRNA sense strand
gcuaaugacuggaaaacca

SEQ ID NO: 2480080 - RNA, 19 nt, Homo sapiens
  misc_RNA (1)...(19): siRNA sense strand
acgcagaagccauggugau

SEQ ID NO: 2480081 - RNA, 19 nt, Homo sapiens
  misc_RNA (1)...(19): siRNA sense strand
uggcccagcaugugguaua

SEQ ID NO: 2480082 - RNA, 19 nt, Homo sapiens
  misc_RNA (1)...(19): siRNA sense strand
ccuugaaguuuaugauacu

SEQ ID NO: 2480083 - RNA, 19 nt, Homo sapiens
  misc_RNA (1)...(19): siRNA sense strand
gugcaauggcccaggauuc

SEQ ID NO: 2480084 - RNA, 19 nt, Homo sapiens
  misc_RNA (1)...(19): siRNA sense strand
ggauucaagaacuguacaa

SEQ ID NO: 2480085 - RNA, 19 nt, Homo sapiens
  misc_RNA (1)...(19): siRNA sense strand
agagaggcuacacgggaaa

SEQ ID NO: 2480086 - RNA, 19 nt, Homo sapiens
  misc_RNA (1)...(19): siRNA sense strand
cuucauggaggaugggaga

SEQ ID NO: 2480087 - RNA, 19 nt, Homo sapiens
  misc_RNA (1)...(19): siRNA sense strand
gaaagaacauuguggucac

SEQ ID NO: 2480088 - RNA, 19 nt, Homo sapiens
  misc_RNA (1)...(19): siRNA sense strand
agaaagagcugcuggugac

SEQ ID NO: 2480089 - RNA, 19 nt, Homo sapiens
  misc_RNA (1)...(19): siRNA sense strand
acuuuaagacuccagguaa

SEQ ID NO: 2480090 - RNA, 19 nt, Homo sapiens
  misc_RNA (1)...(19): siRNA sense strand
cuacaaagcuucaggcugc

SEQ ID NO: 2480091 - RNA, 19 nt, Homo sapiens
  misc_RNA (1)...(19): siRNA sense strand
auucauugcuggggagaaa

SEQ ID NO: 2480092 - RNA, 19 nt, Homo sapiens
  misc_RNA (1)...(19): siRNA sense strand
ggaaagaaaccuugguacc

SEQ ID NO: 2480093 - RNA, 19 nt, Homo sapiens
  misc_RNA (1)...(19): siRNA sense strand
cugcaagacauguacugaa

SEQ ID NO: 2480094 - RNA, 19 nt, Homo sapiens
  misc_RNA (1)...(19): siRNA sense strand
cugcaaaacauguacauuu

SEQ ID NO: 2480095 - RNA, 19 nt, Homo sapiens
  misc_RNA (1)...(19): siRNA sense strand
ggaugaugauggcaagacu

SEQ ID NO: 2480096 - RNA, 19 nt, Homo sapiens
  misc_RNA (1)...(19): siRNA sense strand
ggagaggagaccuggccau

SEQ ID NO: 2480097 - RNA, 19 nt, Homo sapiens
  misc_RNA (1)...(19): siRNA sense strand
ggucucagcuuuuggccaa

SEQ ID NO: 2480098 - RNA, 19 nt, Homo sapiens
  misc_RNA (1)...(19): siRNA sense strand
gcuaaggaacuuuaagacu

SEQ ID NO: 2480099 - RNA, 19 nt, Homo sapiens
  misc_RNA (1)...(19): siRNA sense strand
acgauuaaaaggucaguua

SEQ ID NO: 2480100 - RNA, 19 nt, Homo sapiens
  misc_RNA (1)...(19): siRNA sense strand
ugcgaaugcuggacggaga

SEQ ID NO: 2480101 - RNA, 19 nt, Homo sapiens
  misc_RNA (1)...(19): siRNA sense strand
agugaaaacugcaagacau

SEQ ID NO: 2480102 - RNA, 19 nt, Homo sapiens
  misc_RNA (1)...(19): siRNA sense strand
caauggaaccaaaggugga

SEQ ID NO: 2480103 - RNA, 19 nt, Homo sapiens
  misc_RNA (1)...(19): siRNA sense strand
cuggagagacguacagcau

SEQ ID NO: 2480104 - RNA, 19 nt, Homo sapiens
  misc_RNA (1)...(19): siRNA sense strand
cuucaggcugcucggauaa

SEQ ID NO: 2480105 - RNA, 19 nt, Homo sapiens
  misc_RNA (1)...(19): siRNA sense strand
uuaacugcacagagggcua

SEQ ID NO: 2480106 - RNA, 19 nt, Homo sapiens
  misc_RNA (1)...(19): siRNA sense strand
uggaaaugguggaaggagc

SEQ ID NO: 2480107 - RNA, 19 nt, Homo sapiens
  misc_RNA (1)...(19): siRNA sense strand
gcgggacauuugaacgcua

SEQ ID NO: 2480108 - RNA, 19 nt, Homo sapiens
  misc_RNA (1)...(19): siRNA sense strand
ggagaugcgugcagagcug

SEQ ID NO: 2480109 - RNA, 19 nt, Homo sapiens
  misc_RNA (1)...(19): siRNA sense strand
cuucuguaugcuugugaaa

SEQ ID NO: 2480110 - RNA, 19 nt, Homo sapiens
  misc_RNA (1)...(19): siRNA sense strand
agaacauuguggucacuau

SEQ ID NO: 2480111 - RNA, 19 nt, Homo sapiens
  misc_RNA (1)...(19): siRNA sense strand
ggaagaguccugggcggaa

SEQ ID NO: 2480112 - RNA, 19 nt, Homo sapiens
  misc_RNA (1)...(19): siRNA sense strand
gacuuaggaaugugucaaa

SEQ ID NO: 2480113 - RNA, 19 nt, Homo sapiens
  misc_RNA (1)...(19): siRNA sense strand
aggcagaggcagaggcaga

SEQ ID NO: 2480114 - RNA, 19 nt, Homo sapiens
  misc_RNA (1)...(19): siRNA sense strand
ccaucaacccugaggacga

SEQ ID NO: 2480115 - RNA, 19 nt, Homo sapiens
  misc_RNA (1)...(19): siRNA sense strand
aggaggacacagagcgcua

SEQ ID NO: 2480116 - RNA, 19 nt, Homo sapiens
  misc_RNA (1)...(19): siRNA sense strand
gaacgagaccugugugcca

SEQ ID NO: 2480117 - RNA, 19 nt, Homo sapiens
  misc_RNA (1)...(19): siRNA sense strand
acacagacccgcuggacca

SEQ ID NO: 2480118 - RNA, 19 nt, Homo sapiens
  misc_RNA (1)...(19): siRNA sense strand
gcuggcagagcgagagaau

SEQ ID NO: 2480119 - RNA, 19 nt, Homo sapiens
  misc_RNA (1)...(19): siRNA sense strand
ugacagagccugagggugc

SEQ ID NO: 2480120 - RNA, 19 nt, Homo sapiens
  misc_RNA (1)...(19): siRNA sense strand
cgacacggauccuggccau

SEQ ID NO: 2480121 - RNA, 19 nt, Homo sapiens
  misc_RNA (1)...(19): siRNA sense strand
gcgagaagacccagcugga

SEQ ID NO: 2480122 - RNA, 19 nt, Homo sapiens
  misc_RNA (1)...(19): siRNA sense strand
gagaagacccagcuggagu

SEQ ID NO: 2480123 - RNA, 19 nt, Homo sapiens
  misc_RNA (1)...(19): siRNA sense strand
uuccagaggcagaggcaga

SEQ ID NO: 2480124 - RNA, 19 nt, Homo sapiens
  misc_RNA (1)...(19): siRNA sense strand
gcuaugucguggcugggaa

SEQ ID NO: 2480125 - RNA, 19 nt, Homo sapiens
  misc_RNA (1)...(19): siRNA sense strand
aggcagaggcagaggcaga

SEQ ID NO: 2480126 - RNA, 19 nt, Homo sapiens
  misc_RNA (1)...(19): siRNA sense strand
ccaucaacccugaggacga

SEQ ID NO: 2480127 - RNA, 19 nt, Homo sapiens
  misc_RNA (1)...(19): siRNA sense strand
aggaggacacagagcgcua

SEQ ID NO: 2480128 - RNA, 19 nt, Homo sapiens
  misc_RNA (1)...(19): siRNA sense strand
gaacgagaccugugugcca

SEQ ID NO: 2480129 - RNA, 19 nt, Homo sapiens
  misc_RNA (1)...(19): siRNA sense strand
acacagacccgcuggacca

SEQ ID NO: 2480130 - RNA, 19 nt, Homo sapiens
  misc_RNA (1)...(19): siRNA sense strand
gcuggcagagcgagagaau

SEQ ID NO: 2480131 - RNA, 19 nt, Homo sapiens
  misc_RNA (1)...(19): siRNA sense strand
ugacagagccugagggugc

SEQ ID NO: 2480132 - RNA, 19 nt, Homo sapiens
  misc_RNA (1)...(19): siRNA sense strand
cgacacggauccuggccau

SEQ ID NO: 2480133 - RNA, 19 nt, Homo sapiens
  misc_RNA (1)...(19): siRNA sense strand
gcgagaagacccagcugga

SEQ ID NO: 2480134 - RNA, 19 nt, Homo sapiens
  misc_RNA (1)...(19): siRNA sense strand
gagaagacccagcuggagu

SEQ ID NO: 2480135 - RNA, 19 nt, Homo sapiens
  misc_RNA (1)...(19): siRNA sense strand
uuccagaggcagaggcaga

SEQ ID NO: 2480136 - RNA, 19 nt, Homo sapiens
  misc_RNA (1)...(19): siRNA sense strand
gcuaugucguggcugggaa

SEQ ID NO: 2480137 - RNA, 19 nt, Homo sapiens
  misc_RNA (1)...(19): siRNA sense strand
aggcagaggcagaggcaga

SEQ ID NO: 2480138 - RNA, 19 nt, Homo sapiens
  misc_RNA (1)...(19): siRNA sense strand
ccaucaacccugaggacga

SEQ ID NO: 2480139 - RNA, 19 nt, Homo sapiens
  misc_RNA (1)...(19): siRNA sense strand
aggaggacacagagcgcua

SEQ ID NO: 2480140 - RNA, 19 nt, Homo sapiens
  misc_RNA (1)...(19): siRNA sense strand
gaacgagaccugugugcca

SEQ ID NO: 2480141 - RNA, 19 nt, Homo sapiens
  misc_RNA (1)...(19): siRNA sense strand
acacagacccgcuggacca

SEQ ID NO: 2480142 - RNA, 19 nt, Homo sapiens
  misc_RNA (1)...(19): siRNA sense strand
gcuggcagagcgagagaau

SEQ ID NO: 2480143 - RNA, 19 nt, Homo sapiens
  misc_RNA (1)...(19): siRNA sense strand
ugacagagccugagggugc

SEQ ID NO: 2480144 - RNA, 19 nt, Homo sapiens
  misc_RNA (1)...(19): siRNA sense strand
cgacacggauccuggccau

SEQ ID NO: 2480145 - RNA, 19 nt, Homo sapiens
  misc_RNA (1)...(19): siRNA sense strand
gcgagaagacccagcugga

SEQ ID NO: 2480146 - RNA, 19 nt, Homo sapiens
  misc_RNA (1)...(19): siRNA sense strand
gagaagacccagcuggagu

SEQ ID NO: 2480147 - RNA, 19 nt, Homo sapiens
  misc_RNA (1)...(19): siRNA sense strand
uuccagaggcagaggcaga

SEQ ID NO: 2480148 - RNA, 19 nt, Homo sapiens
  misc_RNA (1)...(19): siRNA sense strand
gcuaugucguggcugggaa

SEQ ID NO: 2480149 - RNA, 19 nt, Homo sapiens
  misc_RNA (1)...(19): siRNA sense strand
aggcagaggcagaggcaga

SEQ ID NO: 2480150 - RNA, 19 nt, Homo sapiens
  misc_RNA (1)...(19): siRNA sense strand
ccaucaacccugaggacga

SEQ ID NO: 2480151 - RNA, 19 nt, Homo sapiens
  misc_RNA (1)...(19): siRNA sense strand
aggaggacacagagcgcua

SEQ ID NO: 2480152 - RNA, 19 nt, Homo sapiens
  misc_RNA (1)...(19): siRNA sense strand
ugacagagccugagggugc

SEQ ID NO: 2480153 - RNA, 19 nt, Homo sapiens
  misc_RNA (1)...(19): siRNA sense strand
cgacacggauccuggccau

SEQ ID NO: 2480154 - RNA, 19 nt, Homo sapiens
  misc_RNA (1)...(19): siRNA sense strand
uuccagaggcagaggcaga

SEQ ID NO: 2480155 - RNA, 19 nt, Homo sapiens
  misc_RNA (1)...(19): siRNA sense strand
cacuggaacacgugcgcua

SEQ ID NO: 2480156 - RNA, 19 nt, Homo sapiens
  misc_RNA (1)...(19): siRNA sense strand
agccaaggagcgggagaaa

SEQ ID NO: 2480157 - RNA, 19 nt, Homo sapiens
  misc_RNA (1)...(19): siRNA sense strand
accuauuggugaaugagaa

SEQ ID NO: 2480158 - RNA, 19 nt, Homo sapiens
  misc_RNA (1)...(19): siRNA sense strand
cacuggaacacgugcgcua

SEQ ID NO: 2480159 - RNA, 19 nt, Homo sapiens
  misc_RNA (1)...(19): siRNA sense strand
agccaaggagcgggagaaa

SEQ ID NO: 2480160 - RNA, 19 nt, Homo sapiens
  misc_RNA (1)...(19): siRNA sense strand
accuauuggugaaugagaa

SEQ ID NO: 2480161 - RNA, 19 nt, Homo sapiens
  misc_RNA (1)...(19): siRNA sense strand
cacuggaacacgugcgcua

SEQ ID NO: 2480162 - RNA, 19 nt, Homo sapiens
  misc_RNA (1)...(19): siRNA sense strand
agccaaggagcgggagaaa

SEQ ID NO: 2480163 - RNA, 19 nt, Homo sapiens
  misc_RNA (1)...(19): siRNA sense strand
accuauuggugaaugagaa

SEQ ID NO: 2480164 - RNA, 19 nt, Homo sapiens
  misc_RNA (1)...(19): siRNA sense strand
cacuggaacacgugcgcua

SEQ ID NO: 2480165 - RNA, 19 nt, Homo sapiens
  misc_RNA (1)...(19): siRNA sense strand
agccaaggagcgggagaaa

SEQ ID NO: 2480166 - RNA, 19 nt, Homo sapiens
  misc_RNA (1)...(19): siRNA sense strand
accuauuggugaaugagaa

SEQ ID NO: 2480167 - RNA, 19 nt, Homo sapiens
  misc_RNA (1)...(19): siRNA sense strand
ccagaaaugugguggcuug

SEQ ID NO: 2480168 - RNA, 19 nt, Homo sapiens
  misc_RNA (1)...(19): siRNA sense strand
gaguauaggacgagugcug

SEQ ID NO: 2480169 - RNA, 19 nt, Homo sapiens
  misc_RNA (1)...(19): siRNA sense strand
gcuuagaggcgggaaucaa

SEQ ID NO: 2480170 - RNA, 19 nt, Homo sapiens
  misc_RNA (1)...(19): siRNA sense strand
aaguggacccuguggaaaa

SEQ ID NO: 2480171 - RNA, 19 nt, Homo sapiens
  misc_RNA (1)...(19): siRNA sense strand
cuuuauaguaccagaaaug

SEQ ID NO: 2480172 - RNA, 19 nt, Homo sapiens
  misc_RNA (1)...(19): siRNA sense strand
cagcgaaaccugaagugga

SEQ ID NO: 2480173 - RNA, 19 nt, Homo sapiens
  misc_RNA (1)...(19): siRNA sense strand
ccuuuauaguaccagaaau

SEQ ID NO: 2480174 - RNA, 19 nt, Homo sapiens
  misc_RNA (1)...(19): siRNA sense strand
ggaaucaacuucauggucu

SEQ ID NO: 2480175 - RNA, 19 nt, Homo sapiens
  misc_RNA (1)...(19): siRNA sense strand
uggugugguucuacgggaa

SEQ ID NO: 2480176 - RNA, 19 nt, Homo sapiens
  misc_RNA (1)...(19): siRNA sense strand
uagaagcacuuguggagca

SEQ ID NO: 2480177 - RNA, 19 nt, Homo sapiens
  misc_RNA (1)...(19): siRNA sense strand
cagaauucaccaaccggaa

SEQ ID NO: 2480178 - RNA, 19 nt, Homo sapiens
  misc_RNA (1)...(19): siRNA sense strand
aguuauaaggacucagcau

SEQ ID NO: 2480179 - RNA, 19 nt, Homo sapiens
  misc_RNA (1)...(19): siRNA sense strand
gaugcuuagaggcgggaau

SEQ ID NO: 2480180 - RNA, 19 nt, Homo sapiens
  misc_RNA (1)...(19): siRNA sense strand
uugugagaguauaggacga

SEQ ID NO: 2480181 - RNA, 19 nt, Homo sapiens
  misc_RNA (1)...(19): siRNA sense strand
cgggaaacgcugaaagcca

SEQ ID NO: 2480182 - RNA, 19 nt, Homo sapiens
  misc_RNA (1)...(19): siRNA sense strand
ucaugaugcuggugggcuu

SEQ ID NO: 2480183 - RNA, 19 nt, Homo sapiens
  misc_RNA (1)...(19): siRNA sense strand
gggaaacgcugaaagccau

SEQ ID NO: 2480184 - RNA, 19 nt, Homo sapiens
  misc_RNA (1)...(19): siRNA sense strand
gauucgacucucagaccaa

SEQ ID NO: 2480185 - RNA, 19 nt, Homo sapiens
  misc_RNA (1)...(19): siRNA sense strand
ugauauucgccauugaaau

SEQ ID NO: 2480186 - RNA, 19 nt, Homo sapiens
  misc_RNA (1)...(19): siRNA sense strand
cccacaaggaugaggugau

SEQ ID NO: 2480187 - RNA, 19 nt, Homo sapiens
  misc_RNA (1)...(19): siRNA sense strand
ccaagaaggacguacucga

SEQ ID NO: 2480188 - RNA, 19 nt, Homo sapiens
  misc_RNA (1)...(19): siRNA sense strand
gugaagaagaggaggagaa

SEQ ID NO: 2480189 - RNA, 19 nt, Homo sapiens
  misc_RNA (1)...(19): siRNA sense strand
caaaagaagauguggaaaa

SEQ ID NO: 2480190 - RNA, 19 nt, Homo sapiens
  misc_RNA (1)...(19): siRNA sense strand
cugaagaugaggaggguua

SEQ ID NO: 2480191 - RNA, 19 nt, Homo sapiens
  misc_RNA (1)...(19): siRNA sense strand
agaagaaggcugaggagaa

SEQ ID NO: 2480192 - RNA, 19 nt, Homo sapiens
  misc_RNA (1)...(19): siRNA sense strand
agucagaguccgaggcaaa

SEQ ID NO: 2480193 - RNA, 19 nt, Homo sapiens
  misc_RNA (1)...(19): siRNA sense strand
aggaagaggaugaggaaga

SEQ ID NO: 2480194 - RNA, 19 nt, Homo sapiens
  misc_RNA (1)...(19): siRNA sense strand
cggagaggguggagaaaca

SEQ ID NO: 2480195 - RNA, 19 nt, Homo sapiens
  misc_RNA (1)...(19): siRNA sense strand
gagaagaagaagaggagga

SEQ ID NO: 2480196 - RNA, 19 nt, Homo sapiens
  misc_RNA (1)...(19): siRNA sense strand
agauugagcaggagaggaa

SEQ ID NO: 2480197 - RNA, 19 nt, Homo sapiens
  misc_RNA (1)...(19): siRNA sense strand
cuauuaugcaguugagaaa

SEQ ID NO: 2480198 - RNA, 19 nt, Homo sapiens
  misc_RNA (1)...(19): siRNA sense strand
cugaaagagagcagaagaa

SEQ ID NO: 2480199 - RNA, 19 nt, Homo sapiens
  misc_RNA (1)...(19): siRNA sense strand
cagccaaagagaagaagaa

SEQ ID NO: 2480200 - RNA, 19 nt, Homo sapiens
  misc_RNA (1)...(19): siRNA sense strand
guuuaauggaggaggauga

SEQ ID NO: 2480201 - RNA, 19 nt, Homo sapiens
  misc_RNA (1)...(19): siRNA sense strand
acggagaagcaguggcuaa

SEQ ID NO: 2480202 - RNA, 19 nt, Homo sapiens
  misc_RNA (1)...(19): siRNA sense strand
gucagaaacaccaggaaua

SEQ ID NO: 2480203 - RNA, 19 nt, Homo sapiens
  misc_RNA (1)...(19): siRNA sense strand
acgaagaaauguggauaaa

SEQ ID NO: 2480204 - RNA, 19 nt, Homo sapiens
  misc_RNA (1)...(19): siRNA sense strand
ggaggaaauggaagaggaa

SEQ ID NO: 2480205 - RNA, 19 nt, Homo sapiens
  misc_RNA (1)...(19): siRNA sense strand
gaaaauugccaaagaggaa

SEQ ID NO: 2480206 - RNA, 19 nt, Homo sapiens
  misc_RNA (1)...(19): siRNA sense strand
aggaagaggaagaugaaga

SEQ ID NO: 2480207 - RNA, 19 nt, Homo sapiens
  misc_RNA (1)...(19): siRNA sense strand
gggacaaagggaaaggcaa

SEQ ID NO: 2480208 - RNA, 19 nt, Homo sapiens
  misc_RNA (1)...(19): siRNA sense strand
ggauacaagaacuggaaaa

SEQ ID NO: 2480209 - RNA, 19 nt, Homo sapiens
  misc_RNA (1)...(19): siRNA sense strand
aagaagaggaggagaaaau

SEQ ID NO: 2480210 - RNA, 19 nt, Homo sapiens
  misc_RNA (1)...(19): siRNA sense strand
ggaagaugaagaagaguca

SEQ ID NO: 2480211 - RNA, 19 nt, Homo sapiens
  misc_RNA (1)...(19): siRNA sense strand
ggauugaaaaggagagaau

SEQ ID NO: 2480212 - RNA, 19 nt, Homo sapiens
  misc_RNA (1)...(19): siRNA sense strand
aggaaauggaagaggaagu

SEQ ID NO: 2480213 - RNA, 19 nt, Homo sapiens
  misc_RNA (1)...(19): siRNA sense strand
gagacagagcggauugaaa

SEQ ID NO: 2480214 - RNA, 19 nt, Homo sapiens
  misc_RNA (1)...(19): siRNA sense strand
aagaagaagaggaggagga

SEQ ID NO: 2480215 - RNA, 19 nt, Homo sapiens
  misc_RNA (1)...(19): siRNA sense strand
aagaagaggaggaggagga

SEQ ID NO: 2480216 - RNA, 19 nt, Homo sapiens
  misc_RNA (1)...(19): siRNA sense strand
ugaacagcguggaggaaaa

SEQ ID NO: 2480217 - RNA, 19 nt, Homo sapiens
  misc_RNA (1)...(19): siRNA sense strand
gacgaagaaauguggauaa

SEQ ID NO: 2480218 - RNA, 19 nt, Homo sapiens
  misc_RNA (1)...(19): siRNA sense strand
aagaggaggaagaggaaga

SEQ ID NO: 2480219 - RNA, 19 nt, Homo sapiens
  misc_RNA (1)...(19): siRNA sense strand
gauuuaagaaccaaagcaa

SEQ ID NO: 2480220 - RNA, 19 nt, Homo sapiens
  misc_RNA (1)...(19): siRNA sense strand
aauaacaacuugaacggaa

SEQ ID NO: 2480221 - RNA, 19 nt, Homo sapiens
  misc_RNA (1)...(19): siRNA sense strand
ggacaaagggaaaggcaag

SEQ ID NO: 2480222 - RNA, 19 nt, Homo sapiens
  misc_RNA (1)...(19): siRNA sense strand
acuaaaagcacuucgguua

SEQ ID NO: 2480223 - RNA, 19 nt, Homo sapiens
  misc_RNA (1)...(19): siRNA sense strand
ggauccaaauagcgaagaa

SEQ ID NO: 2480224 - RNA, 19 nt, Homo sapiens
  misc_RNA (1)...(19): siRNA sense strand
gggcauuccugcaggccau

SEQ ID NO: 2480225 - RNA, 19 nt, Homo sapiens
  misc_RNA (1)...(19): siRNA sense strand
cguucaaccuggagggauc

SEQ ID NO: 2480226 - RNA, 19 nt, Homo sapiens
  misc_RNA (1)...(19): siRNA sense strand
ggaaauacaugauagugga

SEQ ID NO: 2480227 - RNA, 19 nt, Homo sapiens
  misc_RNA (1)...(19): siRNA sense strand
aggaaagaauuaccagaau

SEQ ID NO: 2480228 - RNA, 19 nt, Homo sapiens
  misc_RNA (1)...(19): siRNA sense strand
agagugaggaugaaagcaa

SEQ ID NO: 2480229 - RNA, 19 nt, Homo sapiens
  misc_RNA (1)...(19): siRNA sense strand
gccaaagagaagaagaaga

SEQ ID NO: 2480230 - RNA, 19 nt, Homo sapiens
  misc_RNA (1)...(19): siRNA sense strand
uuuaagagcugcagcacau

SEQ ID NO: 2480231 - RNA, 19 nt, Homo sapiens
  misc_RNA (1)...(19): siRNA sense strand
cgucagaaacaccaggaau

SEQ ID NO: 2480232 - RNA, 19 nt, Homo sapiens
  misc_RNA (1)...(19): siRNA sense strand
aggaggaggaggaagaaga

SEQ ID NO: 2480233 - RNA, 19 nt, Homo sapiens
  misc_RNA (1)...(19): siRNA sense strand
ggaggaagaagaaggcuga

SEQ ID NO: 2480234 - RNA, 19 nt, Homo sapiens
  misc_RNA (1)...(19): siRNA sense strand
agaaagaaguugaauccca

SEQ ID NO: 2480235 - RNA, 19 nt, Homo sapiens
  misc_RNA (1)...(19): siRNA sense strand
gcagcagaccgaugaguau

SEQ ID NO: 2480236 - RNA, 19 nt, Homo sapiens
  misc_RNA (1)...(19): siRNA sense strand
uggagaagcagcagaagau

SEQ ID NO: 2480237 - RNA, 19 nt, Homo sapiens
  misc_RNA (1)...(19): siRNA sense strand
ccggaaagauccagaagcu

SEQ ID NO: 2480238 - RNA, 19 nt, Homo sapiens
  misc_RNA (1)...(19): siRNA sense strand
augaggaggguuauagaaa

SEQ ID NO: 2480239 - RNA, 19 nt, Homo sapiens
  misc_RNA (1)...(19): siRNA sense strand
auuaugaggaagaggauga

SEQ ID NO: 2480240 - RNA, 19 nt, Homo sapiens
  misc_RNA (1)...(19): siRNA sense strand
gaaucuuagccgaugaaau

SEQ ID NO: 2480241 - RNA, 19 nt, Homo sapiens
  misc_RNA (1)...(19): siRNA sense strand
cagucaaggugaaaauuaa

SEQ ID NO: 2480242 - RNA, 19 nt, Homo sapiens
  misc_RNA (1)...(19): siRNA sense strand
ccguggaaauucugcaaga

SEQ ID NO: 2480243 - RNA, 19 nt, Homo sapiens
  misc_RNA (1)...(19): siRNA sense strand
ccaccagauuuaagaacca

SEQ ID NO: 2480244 - RNA, 19 nt, Homo sapiens
  misc_RNA (1)...(19): siRNA sense strand
aagcaaccguggaacuaaa

SEQ ID NO: 2480245 - RNA, 19 nt, Homo sapiens
  misc_RNA (1)...(19): siRNA sense strand
ccagcuacggaguggcaaa

SEQ ID NO: 2480246 - RNA, 19 nt, Homo sapiens
  misc_RNA (1)...(19): siRNA sense strand
ugaagaagaggaggagaaa

SEQ ID NO: 2480247 - RNA, 19 nt, Homo sapiens
  misc_RNA (1)...(19): siRNA sense strand
gcugagaaacugucaccaa

SEQ ID NO: 2480248 - RNA, 19 nt, Homo sapiens
  misc_RNA (1)...(19): siRNA sense strand
caaagggaaaggcaagaaa

SEQ ID NO: 2480249 - RNA, 19 nt, Homo sapiens
  misc_RNA (1)...(19): siRNA sense strand
agaaggagacagagcggau

SEQ ID NO: 2480250 - RNA, 19 nt, Homo sapiens
  misc_RNA (1)...(19): siRNA sense strand
ucaucgauacugugauaaa

SEQ ID NO: 2480251 - RNA, 19 nt, Homo sapiens
  misc_RNA (1)...(19): siRNA sense strand
ugaagaggaggaagaggaa

SEQ ID NO: 2480252 - RNA, 19 nt, Homo sapiens
  misc_RNA (1)...(19): siRNA sense strand
caaaaucagucaaggugaa

SEQ ID NO: 2480253 - RNA, 19 nt, Homo sapiens
  misc_RNA (1)...(19): siRNA sense strand
acacugaaagagagcagaa

SEQ ID NO: 2480254 - RNA, 19 nt, Homo sapiens
  misc_RNA (1)...(19): siRNA sense strand
ccagaagcacccaaagcaa

SEQ ID NO: 2480255 - RNA, 19 nt, Homo sapiens
  misc_RNA (1)...(19): siRNA sense strand
agaaagauaagaaggggaa

SEQ ID NO: 2480256 - RNA, 19 nt, Homo sapiens
  misc_RNA (1)...(19): siRNA sense strand
gugaagaagaggaggagaa

SEQ ID NO: 2480257 - RNA, 19 nt, Homo sapiens
  misc_RNA (1)...(19): siRNA sense strand
caaaagaagauguggaaaa

SEQ ID NO: 2480258 - RNA, 19 nt, Homo sapiens
  misc_RNA (1)...(19): siRNA sense strand
cugaagaugaggaggguua

SEQ ID NO: 2480259 - RNA, 19 nt, Homo sapiens
  misc_RNA (1)...(19): siRNA sense strand
agaagaaggcugaggagaa

SEQ ID NO: 2480260 - RNA, 19 nt, Homo sapiens
  misc_RNA (1)...(19): siRNA sense strand
agucagaguccgaggcaaa

SEQ ID NO: 2480261 - RNA, 19 nt, Homo sapiens
  misc_RNA (1)...(19): siRNA sense strand
aggaagaggaugaggaaga

SEQ ID NO: 2480262 - RNA, 19 nt, Homo sapiens
  misc_RNA (1)...(19): siRNA sense strand
cggagaggguggagaaaca

SEQ ID NO: 2480263 - RNA, 19 nt, Homo sapiens
  misc_RNA (1)...(19): siRNA sense strand
gagaagaagaagaggagga

SEQ ID NO: 2480264 - RNA, 19 nt, Homo sapiens
  misc_RNA (1)...(19): siRNA sense strand
agauugagcaggagaggaa

SEQ ID NO: 2480265 - RNA, 19 nt, Homo sapiens
  misc_RNA (1)...(19): siRNA sense strand
cuauuaugcaguugagaaa

SEQ ID NO: 2480266 - RNA, 19 nt, Homo sapiens
  misc_RNA (1)...(19): siRNA sense strand
cugaaagagagcagaagaa

SEQ ID NO: 2480267 - RNA, 19 nt, Homo sapiens
  misc_RNA (1)...(19): siRNA sense strand
cagccaaagagaagaagaa

SEQ ID NO: 2480268 - RNA, 19 nt, Homo sapiens
  misc_RNA (1)...(19): siRNA sense strand
guuuaauggaggaggauga

SEQ ID NO: 2480269 - RNA, 19 nt, Homo sapiens
  misc_RNA (1)...(19): siRNA sense strand
acggagaagcaguggcuaa

SEQ ID NO: 2480270 - RNA, 19 nt, Homo sapiens
  misc_RNA (1)...(19): siRNA sense strand
gucagaaacaccaggaaua

SEQ ID NO: 2480271 - RNA, 19 nt, Homo sapiens
  misc_RNA (1)...(19): siRNA sense strand
acgaagaaauguggauaaa

SEQ ID NO: 2480272 - RNA, 19 nt, Homo sapiens
  misc_RNA (1)...(19): siRNA sense strand
ggaggaaauggaagaggaa

SEQ ID NO: 2480273 - RNA, 19 nt, Homo sapiens
  misc_RNA (1)...(19): siRNA sense strand
gaaaauugccaaagaggaa

SEQ ID NO: 2480274 - RNA, 19 nt, Homo sapiens
  misc_RNA (1)...(19): siRNA sense strand
aggaagaggaagaugaaga

SEQ ID NO: 2480275 - RNA, 19 nt, Homo sapiens
  misc_RNA (1)...(19): siRNA sense strand
gggacaaagggaaaggcaa

SEQ ID NO: 2480276 - RNA, 19 nt, Homo sapiens
  misc_RNA (1)...(19): siRNA sense strand
ggauacaagaacuggaaaa

SEQ ID NO: 2480277 - RNA, 19 nt, Homo sapiens
  misc_RNA (1)...(19): siRNA sense strand
aagaagaggaggagaaaau

SEQ ID NO: 2480278 - RNA, 19 nt, Homo sapiens
  misc_RNA (1)...(19): siRNA sense strand
ggaagaugaagaagaguca

SEQ ID NO: 2480279 - RNA, 19 nt, Homo sapiens
  misc_RNA (1)...(19): siRNA sense strand
ggauugaaaaggagagaau

SEQ ID NO: 2480280 - RNA, 19 nt, Homo sapiens
  misc_RNA (1)...(19): siRNA sense strand
aggaaauggaagaggaagu

SEQ ID NO: 2480281 - RNA, 19 nt, Homo sapiens
  misc_RNA (1)...(19): siRNA sense strand
gagacagagcggauugaaa

SEQ ID NO: 2480282 - RNA, 19 nt, Homo sapiens
  misc_RNA (1)...(19): siRNA sense strand
aagaagaagaggaggagga

SEQ ID NO: 2480283 - RNA, 19 nt, Homo sapiens
  misc_RNA (1)...(19): siRNA sense strand
aagaagaggaggaggagga

SEQ ID NO: 2480284 - RNA, 19 nt, Homo sapiens
  misc_RNA (1)...(19): siRNA sense strand
ugaacagcguggaggaaaa

SEQ ID NO: 2480285 - RNA, 19 nt, Homo sapiens
  misc_RNA (1)...(19): siRNA sense strand
gacgaagaaauguggauaa

SEQ ID NO: 2480286 - RNA, 19 nt, Homo sapiens
  misc_RNA (1)...(19): siRNA sense strand
aagaggaggaagaggaaga

SEQ ID NO: 2480287 - RNA, 19 nt, Homo sapiens
  misc_RNA (1)...(19): siRNA sense strand
gauuuaagaaccaaagcaa

SEQ ID NO: 2480288 - RNA, 19 nt, Homo sapiens
  misc_RNA (1)...(19): siRNA sense strand
aauaacaacuugaacggaa

SEQ ID NO: 2480289 - RNA, 19 nt, Homo sapiens
  misc_RNA (1)...(19): siRNA sense strand
ggacaaagggaaaggcaag

SEQ ID NO: 2480290 - RNA, 19 nt, Homo sapiens
  misc_RNA (1)...(19): siRNA sense strand
acuaaaagcacuucgguua

SEQ ID NO: 2480291 - RNA, 19 nt, Homo sapiens
  misc_RNA (1)...(19): siRNA sense strand
ggauccaaauagcgaagaa

SEQ ID NO: 2480292 - RNA, 19 nt, Homo sapiens
  misc_RNA (1)...(19): siRNA sense strand
gggcauuccugcaggccau

SEQ ID NO: 2480293 - RNA, 19 nt, Homo sapiens
  misc_RNA (1)...(19): siRNA sense strand
cguucaaccuggagggauc

SEQ ID NO: 2480294 - RNA, 19 nt, Homo sapiens
  misc_RNA (1)...(19): siRNA sense strand
ggaaauacaugauagugga

SEQ ID NO: 2480295 - RNA, 19 nt, Homo sapiens
  misc_RNA (1)...(19): siRNA sense strand
aggaaagaauuaccagaau

SEQ ID NO: 2480296 - RNA, 19 nt, Homo sapiens
  misc_RNA (1)...(19): siRNA sense strand
agagugaggaugaaagcaa

SEQ ID NO: 2480297 - RNA, 19 nt, Homo sapiens
  misc_RNA (1)...(19): siRNA sense strand
gccaaagagaagaagaaga

SEQ ID NO: 2480298 - RNA, 19 nt, Homo sapiens
  misc_RNA (1)...(19): siRNA sense strand
uuuaagagcugcagcacau

SEQ ID NO: 2480299 - RNA, 19 nt, Homo sapiens
  misc_RNA (1)...(19): siRNA sense strand
cgucagaaacaccaggaau

SEQ ID NO: 2480300 - RNA, 19 nt, Homo sapiens
  misc_RNA (1)...(19): siRNA sense strand
aggaggaggaggaagaaga

SEQ ID NO: 2480301 - RNA, 19 nt, Homo sapiens
  misc_RNA (1)...(19): siRNA sense strand
ggaggaagaagaaggcuga

SEQ ID NO: 2480302 - RNA, 19 nt, Homo sapiens
  misc_RNA (1)...(19): siRNA sense strand
agaaagaaguugaauccca

SEQ ID NO: 2480303 - RNA, 19 nt, Homo sapiens
  misc_RNA (1)...(19): siRNA sense strand
gcagcagaccgaugaguau

SEQ ID NO: 2480304 - RNA, 19 nt, Homo sapiens
  misc_RNA (1)...(19): siRNA sense strand
uggagaagcagcagaagau

SEQ ID NO: 2480305 - RNA, 19 nt, Homo sapiens
  misc_RNA (1)...(19): siRNA sense strand
ccggaaagauccagaagcu

SEQ ID NO: 2480306 - RNA, 19 nt, Homo sapiens
  misc_RNA (1)...(19): siRNA sense strand
augaggaggguuauagaaa

SEQ ID NO: 2480307 - RNA, 19 nt, Homo sapiens
  misc_RNA (1)...(19): siRNA sense strand
auuaugaggaagaggauga

SEQ ID NO: 2480308 - RNA, 19 nt, Homo sapiens
  misc_RNA (1)...(19): siRNA sense strand
gaaucuuagccgaugaaau

SEQ ID NO: 2480309 - RNA, 19 nt, Homo sapiens
  misc_RNA (1)...(19): siRNA sense strand
cagucaaggugaaaauuaa

SEQ ID NO: 2480310 - RNA, 19 nt, Homo sapiens
  misc_RNA (1)...(19): siRNA sense strand
ccguggaaauucugcaaga

SEQ ID NO: 2480311 - RNA, 19 nt, Homo sapiens
  misc_RNA (1)...(19): siRNA sense strand
ccaccagauuuaagaacca

SEQ ID NO: 2480312 - RNA, 19 nt, Homo sapiens
  misc_RNA (1)...(19): siRNA sense strand
aagcaaccguggaacuaaa

SEQ ID NO: 2480313 - RNA, 19 nt, Homo sapiens
  misc_RNA (1)...(19): siRNA sense strand
ccagcuacggaguggcaaa

SEQ ID NO: 2480314 - RNA, 19 nt, Homo sapiens
  misc_RNA (1)...(19): siRNA sense strand
ugaagaagaggaggagaaa

SEQ ID NO: 2480315 - RNA, 19 nt, Homo sapiens
  misc_RNA (1)...(19): siRNA sense strand
gcugagaaacugucaccaa

SEQ ID NO: 2480316 - RNA, 19 nt, Homo sapiens
  misc_RNA (1)...(19): siRNA sense strand
caaagggaaaggcaagaaa

SEQ ID NO: 2480317 - RNA, 19 nt, Homo sapiens
  misc_RNA (1)...(19): siRNA sense strand
agaaggagacagagcggau

SEQ ID NO: 2480318 - RNA, 19 nt, Homo sapiens
  misc_RNA (1)...(19): siRNA sense strand
ucaucgauacugugauaaa

SEQ ID NO: 2480319 - RNA, 19 nt, Homo sapiens
  misc_RNA (1)...(19): siRNA sense strand
ugaagaggaggaagaggaa

SEQ ID NO: 2480320 - RNA, 19 nt, Homo sapiens
  misc_RNA (1)...(19): siRNA sense strand
caaaaucagucaaggugaa

SEQ ID NO: 2480321 - RNA, 19 nt, Homo sapiens
  misc_RNA (1)...(19): siRNA sense strand
acacugaaagagagcagaa

SEQ ID NO: 2480322 - RNA, 19 nt, Homo sapiens
  misc_RNA (1)...(19): siRNA sense strand
ccagaagcacccaaagcaa

SEQ ID NO: 2480323 - RNA, 19 nt, Homo sapiens
  misc_RNA (1)...(19): siRNA sense strand
agaaagauaagaaggggaa

SEQ ID NO: 2480324 - RNA, 19 nt, Homo sapiens
  misc_RNA (1)...(19): siRNA sense strand
gcagaaaggcugaaggcaa

SEQ ID NO: 2480325 - RNA, 19 nt, Homo sapiens
  misc_RNA (1)...(19): siRNA sense strand
cggcaaggccagugcguaa

SEQ ID NO: 2480326 - RNA, 19 nt, Homo sapiens
  misc_RNA (1)...(19): siRNA sense strand
aggagaagauccagcggua

SEQ ID NO: 2480327 - RNA, 19 nt, Homo sapiens
  misc_RNA (1)...(19): siRNA sense strand
gugcagaauauaacagcaa

SEQ ID NO: 2480328 - RNA, 19 nt, Homo sapiens
  misc_RNA (1)...(19): siRNA sense strand
cagaagaucagcuggaaaa

SEQ ID NO: 2480329 - RNA, 19 nt, Homo sapiens
  misc_RNA (1)...(19): siRNA sense strand
gacuauuggaagugacaua

SEQ ID NO: 2480330 - RNA, 19 nt, Homo sapiens
  misc_RNA (1)...(19): siRNA sense strand
caguauaaauauccggaca

SEQ ID NO: 2480331 - RNA, 19 nt, Homo sapiens
  misc_RNA (1)...(19): siRNA sense strand
caaaaguggaagaggaaga

SEQ ID NO: 2480332 - RNA, 19 nt, Homo sapiens
  misc_RNA (1)...(19): siRNA sense strand
ggaacaagaaccuggagga

SEQ ID NO: 2480333 - RNA, 19 nt, Homo sapiens
  misc_RNA (1)...(19): siRNA sense strand
ucacgauggagaagggaau

SEQ ID NO: 2480334 - RNA, 19 nt, Homo sapiens
  misc_RNA (1)...(19): siRNA sense strand
cggacaaacuaccaggaca

SEQ ID NO: 2480335 - RNA, 19 nt, Homo sapiens
  misc_RNA (1)...(19): siRNA sense strand
cggcaaagugaaagaugga

SEQ ID NO: 2480336 - RNA, 19 nt, Homo sapiens
  misc_RNA (1)...(19): siRNA sense strand
ggacacaggacuuggccuu

SEQ ID NO: 2480337 - RNA, 19 nt, Homo sapiens
  misc_RNA (1)...(19): siRNA sense strand
cagcagaggagaagaucca

SEQ ID NO: 2480338 - RNA, 19 nt, Homo sapiens
  misc_RNA (1)...(19): siRNA sense strand
uggucgaaguggucagaau

SEQ ID NO: 2480339 - RNA, 19 nt, Homo sapiens
  misc_RNA (1)...(19): siRNA sense strand
cuggaggauuauugaucaa

SEQ ID NO: 2480340 - RNA, 19 nt, Homo sapiens
  misc_RNA (1)...(19): siRNA sense strand
aguggaaacccuauacaaa

SEQ ID NO: 2480341 - RNA, 19 nt, Homo sapiens
  misc_RNA (1)...(19): siRNA sense strand
aguauaaauauccggacaa

SEQ ID NO: 2480342 - RNA, 19 nt, Homo sapiens
  misc_RNA (1)...(19): siRNA sense strand
uggaaaagauggugcuuca

SEQ ID NO: 2480343 - RNA, 19 nt, Homo sapiens
  misc_RNA (1)...(19): siRNA sense strand
gagucgagagacagaguau

SEQ ID NO: 2480344 - RNA, 19 nt, Homo sapiens
  misc_RNA (1)...(19): siRNA sense strand
guggacgacgcaagaaaua

SEQ ID NO: 2480345 - RNA, 19 nt, Homo sapiens
  misc_RNA (1)...(19): siRNA sense strand
ccuaauucuucuggaacaa

SEQ ID NO: 2480346 - RNA, 19 nt, Homo sapiens
  misc_RNA (1)...(19): siRNA sense strand
auuuaucagcugugcaaua

SEQ ID NO: 2480347 - RNA, 19 nt, Homo sapiens
  misc_RNA (1)...(19): siRNA sense strand
gccuaauucuucuggaaca

SEQ ID NO: 2480348 - RNA, 19 nt, Homo sapiens
  misc_RNA (1)...(19): siRNA sense strand
ccgccaguaucucaagaaa

SEQ ID NO: 2480349 - RNA, 19 nt, Homo sapiens
  misc_RNA (1)...(19): siRNA sense strand
ggacaaacuaccaggacag

SEQ ID NO: 2480350 - RNA, 19 nt, Homo sapiens
  misc_RNA (1)...(19): siRNA sense strand
auacaaaaguggaagagga

SEQ ID NO: 2480351 - RNA, 19 nt, Homo sapiens
  misc_RNA (1)...(19): siRNA sense strand
caucuuacuaacaggauuu

SEQ ID NO: 2480352 - RNA, 19 nt, Homo sapiens
  misc_RNA (1)...(19): siRNA sense strand
acugcaaggcugagaacuu

SEQ ID NO: 2480353 - RNA, 19 nt, Homo sapiens
  misc_RNA (1)...(19): siRNA sense strand
agaaaaugguggaaaagca

SEQ ID NO: 2480354 - RNA, 19 nt, Homo sapiens
  misc_RNA (1)...(19): siRNA sense strand
gauuuaugaugcugacaca

SEQ ID NO: 2480355 - RNA, 19 nt, Homo sapiens
  misc_RNA (1)...(19): siRNA sense strand
cuaucuaagguuugaugaa

SEQ ID NO: 2480356 - RNA, 19 nt, Homo sapiens
  misc_RNA (1)...(19): siRNA sense strand
guuuaugcccgcagcagaa

SEQ ID NO: 2480357 - RNA, 19 nt, Homo sapiens
  misc_RNA (1)...(19): siRNA sense strand
gaguauguggugucggcaa

SEQ ID NO: 2480358 - RNA, 19 nt, Homo sapiens
  misc_RNA (1)...(19): siRNA sense strand
ucaaguuccaggagagaca

SEQ ID NO: 2480359 - RNA, 19 nt, Homo sapiens
  misc_RNA (1)...(19): siRNA sense strand
guauuuaucagcugugcaa

SEQ ID NO: 2480360 - RNA, 19 nt, Homo sapiens
  misc_RNA (1)...(19): siRNA sense strand
gcaaagugaaagauggaac

SEQ ID NO: 2480361 - RNA, 19 nt, Homo sapiens
  misc_RNA (1)...(19): siRNA sense strand
ccagaagcucccugcacua

SEQ ID NO: 2480362 - RNA, 19 nt, Homo sapiens
  misc_RNA (1)...(19): siRNA sense strand
gguuuaauaaggacacgaa

SEQ ID NO: 2480363 - RNA, 19 nt, Homo sapiens
  misc_RNA (1)...(19): siRNA sense strand
acauacauucucacaguaa

SEQ ID NO: 2480364 - RNA, 19 nt, Homo sapiens
  misc_RNA (1)...(19): siRNA sense strand
uggcaagagacaugaucau

SEQ ID NO: 2480365 - RNA, 19 nt, Homo sapiens
  misc_RNA (1)...(19): siRNA sense strand
aagaaugaaccaugugaca

SEQ ID NO: 2480366 - RNA, 19 nt, Homo sapiens
  misc_RNA (1)...(19): siRNA sense strand
gaaugaaccaugugacacu

SEQ ID NO: 2480367 - RNA, 19 nt, Homo sapiens
  misc_RNA (1)...(19): siRNA sense strand
augugacacucuaggguuu

SEQ ID NO: 2480368 - RNA, 19 nt, Homo sapiens
  misc_RNA (1)...(19): siRNA sense strand
ccaggugaauggaguacau

SEQ ID NO: 2480369 - RNA, 19 nt, Homo sapiens
  misc_RNA (1)...(19): siRNA sense strand
caaugaggacacaggacuu

SEQ ID NO: 2480370 - RNA, 19 nt, Homo sapiens
  misc_RNA (1)...(19): siRNA sense strand
gaacuuaagcccucggcga

SEQ ID NO: 2480371 - RNA, 19 nt, Homo sapiens
  misc_RNA (1)...(19): siRNA sense strand
agauggugcuucagagacu

SEQ ID NO: 2480372 - RNA, 19 nt, Homo sapiens
  misc_RNA (1)...(19): siRNA sense strand
auaaauauccggacaaacu

SEQ ID NO: 2480373 - RNA, 19 nt, Homo sapiens
  misc_RNA (1)...(19): siRNA sense strand
agaugggacuauuggaagu

SEQ ID NO: 2480374 - RNA, 19 nt, Homo sapiens
  misc_RNA (1)...(19): siRNA sense strand
gcucaugagucagggcaca

SEQ ID NO: 2480375 - RNA, 19 nt, Homo sapiens
  misc_RNA (1)...(19): siRNA sense strand
gcaggagggcugugugcuu

SEQ ID NO: 2480376 - RNA, 19 nt, Homo sapiens
  misc_RNA (1)...(19): siRNA sense strand
aaaggacagcagaggagaa

SEQ ID NO: 2480377 - RNA, 19 nt, Homo sapiens
  misc_RNA (1)...(19): siRNA sense strand
ccggacaugugguggagga

SEQ ID NO: 2480378 - RNA, 19 nt, Homo sapiens
  misc_RNA (1)...(19): siRNA sense strand
ugacgggguuugugaacua

SEQ ID NO: 2480379 - RNA, 19 nt, Homo sapiens
  misc_RNA (1)...(19): siRNA sense strand
gcucuaaagcaguuucaga

SEQ ID NO: 2480380 - RNA, 19 nt, Homo sapiens
  misc_RNA (1)...(19): siRNA sense strand
gcaagaaauaugcucccaa

SEQ ID NO: 2480381 - RNA, 19 nt, Homo sapiens
  misc_RNA (1)...(19): siRNA sense strand
ccaucuuacuaacaggauu

SEQ ID NO: 2480382 - RNA, 19 nt, Homo sapiens
  misc_RNA (1)...(19): siRNA sense strand
ggucauauauuucacacga

SEQ ID NO: 2480383 - RNA, 19 nt, Homo sapiens
  misc_RNA (1)...(19): siRNA sense strand
guggaaacccuauacaaaa

SEQ ID NO: 2480384 - RNA, 19 nt, Homo sapiens
  misc_RNA (1)...(19): siRNA sense strand
ggcugagaacuuugaauuu

SEQ ID NO: 2480385 - RNA, 19 nt, Homo sapiens
  misc_RNA (1)...(19): siRNA sense strand
guuuaauaaggacacgaaa

SEQ ID NO: 2480386 - RNA, 19 nt, Homo sapiens
  misc_RNA (1)...(19): siRNA sense strand
gggacuauuggaagugaca

SEQ ID NO: 2480387 - RNA, 19 nt, Homo sapiens
  misc_RNA (1)...(19): siRNA sense strand
gcagaaaggcugaaggcaa

SEQ ID NO: 2480388 - RNA, 19 nt, Homo sapiens
  misc_RNA (1)...(19): siRNA sense strand
cggcaaggccagugcguaa

SEQ ID NO: 2480389 - RNA, 19 nt, Homo sapiens
  misc_RNA (1)...(19): siRNA sense strand
aggagaagauccagcggua

SEQ ID NO: 2480390 - RNA, 19 nt, Homo sapiens
  misc_RNA (1)...(19): siRNA sense strand
gugcagaauauaacagcaa

SEQ ID NO: 2480391 - RNA, 19 nt, Homo sapiens
  misc_RNA (1)...(19): siRNA sense strand
cagaagaucagcuggaaaa

SEQ ID NO: 2480392 - RNA, 19 nt, Homo sapiens
  misc_RNA (1)...(19): siRNA sense strand
gacuauuggaagugacaua

SEQ ID NO: 2480393 - RNA, 19 nt, Homo sapiens
  misc_RNA (1)...(19): siRNA sense strand
caguauaaauauccggaca

SEQ ID NO: 2480394 - RNA, 19 nt, Homo sapiens
  misc_RNA (1)...(19): siRNA sense strand
caaaaguggaagaggaaga

SEQ ID NO: 2480395 - RNA, 19 nt, Homo sapiens
  misc_RNA (1)...(19): siRNA sense strand
ggaacaagaaccuggagga

SEQ ID NO: 2480396 - RNA, 19 nt, Homo sapiens
  misc_RNA (1)...(19): siRNA sense strand
ucacgauggagaagggaau

SEQ ID NO: 2480397 - RNA, 19 nt, Homo sapiens
  misc_RNA (1)...(19): siRNA sense strand
cggacaaacuaccaggaca

SEQ ID NO: 2480398 - RNA, 19 nt, Homo sapiens
  misc_RNA (1)...(19): siRNA sense strand
cggcaaagugaaagaugga

SEQ ID NO: 2480399 - RNA, 19 nt, Homo sapiens
  misc_RNA (1)...(19): siRNA sense strand
ggacacaggacuuggccuu

SEQ ID NO: 2480400 - RNA, 19 nt, Homo sapiens
  misc_RNA (1)...(19): siRNA sense strand
cagcagaggagaagaucca

SEQ ID NO: 2480401 - RNA, 19 nt, Homo sapiens
  misc_RNA (1)...(19): siRNA sense strand
uggucgaaguggucagaau

SEQ ID NO: 2480402 - RNA, 19 nt, Homo sapiens
  misc_RNA (1)...(19): siRNA sense strand
cuggaggauuauugaucaa

SEQ ID NO: 2480403 - RNA, 19 nt, Homo sapiens
  misc_RNA (1)...(19): siRNA sense strand
aguggaaacccuauacaaa

SEQ ID NO: 2480404 - RNA, 19 nt, Homo sapiens
  misc_RNA (1)...(19): siRNA sense strand
aguauaaauauccggacaa

SEQ ID NO: 2480405 - RNA, 19 nt, Homo sapiens
  misc_RNA (1)...(19): siRNA sense strand
uggaaaagauggugcuuca

SEQ ID NO: 2480406 - RNA, 19 nt, Homo sapiens
  misc_RNA (1)...(19): siRNA sense strand
gagucgagagacagaguau

SEQ ID NO: 2480407 - RNA, 19 nt, Homo sapiens
  misc_RNA (1)...(19): siRNA sense strand
guggacgacgcaagaaaua

SEQ ID NO: 2480408 - RNA, 19 nt, Homo sapiens
  misc_RNA (1)...(19): siRNA sense strand
ccuaauucuucuggaacaa

SEQ ID NO: 2480409 - RNA, 19 nt, Homo sapiens
  misc_RNA (1)...(19): siRNA sense strand
auuuaucagcugugcaaua

SEQ ID NO: 2480410 - RNA, 19 nt, Homo sapiens
  misc_RNA (1)...(19): siRNA sense strand
gccuaauucuucuggaaca

SEQ ID NO: 2480411 - RNA, 19 nt, Homo sapiens
  misc_RNA (1)...(19): siRNA sense strand
ccgccaguaucucaagaaa

SEQ ID NO: 2480412 - RNA, 19 nt, Homo sapiens
  misc_RNA (1)...(19): siRNA sense strand
ggacaaacuaccaggacag

SEQ ID NO: 2480413 - RNA, 19 nt, Homo sapiens
  misc_RNA (1)...(19): siRNA sense strand
auacaaaaguggaagagga

SEQ ID NO: 2480414 - RNA, 19 nt, Homo sapiens
  misc_RNA (1)...(19): siRNA sense strand
caucuuacuaacaggauuu

SEQ ID NO: 2480415 - RNA, 19 nt, Homo sapiens
  misc_RNA (1)...(19): siRNA sense strand
acugcaaggcugagaacuu

SEQ ID NO: 2480416 - RNA, 19 nt, Homo sapiens
  misc_RNA (1)...(19): siRNA sense strand
agaaaaugguggaaaagca

SEQ ID NO: 2480417 - RNA, 19 nt, Homo sapiens
  misc_RNA (1)...(19): siRNA sense strand
gauuuaugaugcugacaca

SEQ ID NO: 2480418 - RNA, 19 nt, Homo sapiens
  misc_RNA (1)...(19): siRNA sense strand
cuaucuaagguuugaugaa

SEQ ID NO: 2480419 - RNA, 19 nt, Homo sapiens
  misc_RNA (1)...(19): siRNA sense strand
guuuaugcccgcagcagaa

SEQ ID NO: 2480420 - RNA, 19 nt, Homo sapiens
  misc_RNA (1)...(19): siRNA sense strand
gaguauguggugucggcaa

SEQ ID NO: 2480421 - RNA, 19 nt, Homo sapiens
  misc_RNA (1)...(19): siRNA sense strand
ucaaguuccaggagagaca

SEQ ID NO: 2480422 - RNA, 19 nt, Homo sapiens
  misc_RNA (1)...(19): siRNA sense strand
guauuuaucagcugugcaa

SEQ ID NO: 2480423 - RNA, 19 nt, Homo sapiens
  misc_RNA (1)...(19): siRNA sense strand
gcaaagugaaagauggaac

SEQ ID NO: 2480424 - RNA, 19 nt, Homo sapiens
  misc_RNA (1)...(19): siRNA sense strand
ccagaagcucccugcacua

SEQ ID NO: 2480425 - RNA, 19 nt, Homo sapiens
  misc_RNA (1)...(19): siRNA sense strand
gguuuaauaaggacacgaa

SEQ ID NO: 2480426 - RNA, 19 nt, Homo sapiens
  misc_RNA (1)...(19): siRNA sense strand
acauacauucucacaguaa

SEQ ID NO: 2480427 - RNA, 19 nt, Homo sapiens
  misc_RNA (1)...(19): siRNA sense strand
uggcaagagacaugaucau

SEQ ID NO: 2480428 - RNA, 19 nt, Homo sapiens
  misc_RNA (1)...(19): siRNA sense strand
aagaaugaaccaugugaca

SEQ ID NO: 2480429 - RNA, 19 nt, Homo sapiens
  misc_RNA (1)...(19): siRNA sense strand
gaaugaaccaugugacacu

SEQ ID NO: 2480430 - RNA, 19 nt, Homo sapiens
  misc_RNA (1)...(19): siRNA sense strand
augugacacucuaggguuu

SEQ ID NO: 2480431 - RNA, 19 nt, Homo sapiens
  misc_RNA (1)...(19): siRNA sense strand
ccaggugaauggaguacau

SEQ ID NO: 2480432 - RNA, 19 nt, Homo sapiens
  misc_RNA (1)...(19): siRNA sense strand
caaugaggacacaggacuu

SEQ ID NO: 2480433 - RNA, 19 nt, Homo sapiens
  misc_RNA (1)...(19): siRNA sense strand
gaacuuaagcccucggcga

SEQ ID NO: 2480434 - RNA, 19 nt, Homo sapiens
  misc_RNA (1)...(19): siRNA sense strand
agauggugcuucagagacu

SEQ ID NO: 2480435 - RNA, 19 nt, Homo sapiens
  misc_RNA (1)...(19): siRNA sense strand
auaaauauccggacaaacu

SEQ ID NO: 2480436 - RNA, 19 nt, Homo sapiens
  misc_RNA (1)...(19): siRNA sense strand
agaugggacuauuggaagu

SEQ ID NO: 2480437 - RNA, 19 nt, Homo sapiens
  misc_RNA (1)...(19): siRNA sense strand
gcucaugagucagggcaca

SEQ ID NO: 2480438 - RNA, 19 nt, Homo sapiens
  misc_RNA (1)...(19): siRNA sense strand
gcaggagggcugugugcuu

SEQ ID NO: 2480439 - RNA, 19 nt, Homo sapiens
  misc_RNA (1)...(19): siRNA sense strand
aaaggacagcagaggagaa

SEQ ID NO: 2480440 - RNA, 19 nt, Homo sapiens
  misc_RNA (1)...(19): siRNA sense strand
ccggacaugugguggagga

SEQ ID NO: 2480441 - RNA, 19 nt, Homo sapiens
  misc_RNA (1)...(19): siRNA sense strand
ugacgggguuugugaacua

SEQ ID NO: 2480442 - RNA, 19 nt, Homo sapiens
  misc_RNA (1)...(19): siRNA sense strand
gcucuaaagcaguuucaga

SEQ ID NO: 2480443 - RNA, 19 nt, Homo sapiens
  misc_RNA (1)...(19): siRNA sense strand
gcaagaaauaugcucccaa

SEQ ID NO: 2480444 - RNA, 19 nt, Homo sapiens
  misc_RNA (1)...(19): siRNA sense strand
ccaucuuacuaacaggauu

SEQ ID NO: 2480445 - RNA, 19 nt, Homo sapiens
  misc_RNA (1)...(19): siRNA sense strand
ggucauauauuucacacga

SEQ ID NO: 2480446 - RNA, 19 nt, Homo sapiens
  misc_RNA (1)...(19): siRNA sense strand
guggaaacccuauacaaaa

SEQ ID NO: 2480447 - RNA, 19 nt, Homo sapiens
  misc_RNA (1)...(19): siRNA sense strand
ggcugagaacuuugaauuu

SEQ ID NO: 2480448 - RNA, 19 nt, Homo sapiens
  misc_RNA (1)...(19): siRNA sense strand
guuuaauaaggacacgaaa

SEQ ID NO: 2480449 - RNA, 19 nt, Homo sapiens
  misc_RNA (1)...(19): siRNA sense strand
gggacuauuggaagugaca

SEQ ID NO: 2480450 - RNA, 19 nt, Homo sapiens
  misc_RNA (1)...(19): siRNA sense strand
gugaggagguguuugggaa

SEQ ID NO: 2480451 - RNA, 19 nt, Homo sapiens
  misc_RNA (1)...(19): siRNA sense strand
agggagugagggugaaaua

SEQ ID NO: 2480452 - RNA, 19 nt, Homo sapiens
  misc_RNA (1)...(19): siRNA sense strand
ggacagauggugugccaga

SEQ ID NO: 2480453 - RNA, 19 nt, Homo sapiens
  misc_RNA (1)...(19): siRNA sense strand
cggacgagucaauggucaa

SEQ ID NO: 2480454 - RNA, 19 nt, Homo sapiens
  misc_RNA (1)...(19): siRNA sense strand
cagcauuucaggaggacuu

SEQ ID NO: 2480455 - RNA, 19 nt, Homo sapiens
  misc_RNA (1)...(19): siRNA sense strand
gcaaguacugcgagggagu

SEQ ID NO: 2480456 - RNA, 19 nt, Homo sapiens
  misc_RNA (1)...(19): siRNA sense strand
gcaagaaggugacuggacu

SEQ ID NO: 2480457 - RNA, 19 nt, Homo sapiens
  misc_RNA (1)...(19): siRNA sense strand
agucaauggucaaguucca

SEQ ID NO: 2480458 - RNA, 19 nt, Homo sapiens
  misc_RNA (1)...(19): siRNA sense strand
cugaacaaagugagugaca

SEQ ID NO: 2480459 - RNA, 19 nt, Homo sapiens
  misc_RNA (1)...(19): siRNA sense strand
gggcaaguacugcgaggga

SEQ ID NO: 2480460 - RNA, 19 nt, Homo sapiens
  misc_RNA (1)...(19): siRNA sense strand
gcucugucauugaggacga

SEQ ID NO: 2480461 - RNA, 19 nt, Homo sapiens
  misc_RNA (1)...(19): siRNA sense strand
gggcauggcugaugugggu

SEQ ID NO: 2480462 - RNA, 19 nt, Homo sapiens
  misc_RNA (1)...(19): siRNA sense strand
ugaagaacagccaaggcaa

SEQ ID NO: 2480463 - RNA, 19 nt, Homo sapiens
  misc_RNA (1)...(19): siRNA sense strand
guggaugguuccugggcca

SEQ ID NO: 2480464 - RNA, 19 nt, Homo sapiens
  misc_RNA (1)...(19): siRNA sense strand
uggcagaagaagcugaaca

SEQ ID NO: 2480465 - RNA, 19 nt, Homo sapiens
  misc_RNA (1)...(19): siRNA sense strand
gggacaagugcaagcucau

SEQ ID NO: 2480466 - RNA, 19 nt, Homo sapiens
  misc_RNA (1)...(19): siRNA sense strand
ccgucuguguccaaggcaa

SEQ ID NO: 2480467 - RNA, 19 nt, Homo sapiens
  misc_RNA (1)...(19): siRNA sense strand
acaauuucgugguggccau

SEQ ID NO: 2480468 - RNA, 19 nt, Homo sapiens
  misc_RNA (1)...(19): siRNA sense strand
gggccaaaugggaucccua

SEQ ID NO: 2480469 - RNA, 19 nt, Homo sapiens
  misc_RNA (1)...(19): siRNA sense strand
guccaaggcaagugcauca

SEQ ID NO: 2480470 - RNA, 19 nt, Homo sapiens
  misc_RNA (1)...(19): siRNA sense strand
cgggacaagugcaagcuca

SEQ ID NO: 2480471 - RNA, 19 nt, Homo sapiens
  misc_RNA (1)...(19): siRNA sense strand
gcggacgagucaaugguca

SEQ ID NO: 2480472 - RNA, 19 nt, Homo sapiens
  misc_RNA (1)...(19): siRNA sense strand
cgagggagugagggugaaa

SEQ ID NO: 2480473 - RNA, 19 nt, Homo sapiens
  misc_RNA (1)...(19): siRNA sense strand
ccaucguauuggaaggaaa

SEQ ID NO: 2480474 - RNA, 19 nt, Homo sapiens
  misc_RNA (1)...(19): siRNA sense strand
ggacaugggagcuggcaca

SEQ ID NO: 2480475 - RNA, 19 nt, Homo sapiens
  misc_RNA (1)...(19): siRNA sense strand
gagaguuggaugugacaau

SEQ ID NO: 2480476 - RNA, 19 nt, Homo sapiens
  misc_RNA (1)...(19): siRNA sense strand
guggcaguucggagagaaa

SEQ ID NO: 2480477 - RNA, 19 nt, Homo sapiens
  misc_RNA (1)...(19): siRNA sense strand
cuguggaagacgcaagaaa

SEQ ID NO: 2480478 - RNA, 19 nt, Homo sapiens
  misc_RNA (1)...(19): siRNA sense strand
ugagaaauugccaggagaa

SEQ ID NO: 2480479 - RNA, 19 nt, Homo sapiens
  misc_RNA (1)...(19): siRNA sense strand
agccaaagccugugaagga

SEQ ID NO: 2480480 - RNA, 19 nt, Homo sapiens
  misc_RNA (1)...(19): siRNA sense strand
cugugaaggaauacaagua

SEQ ID NO: 2480481 - RNA, 19 nt, Homo sapiens
  misc_RNA (1)...(19): siRNA sense strand
ccagaugaguauaagucuu

SEQ ID NO: 2480482 - RNA, 19 nt, Homo sapiens
  misc_RNA (1)...(19): siRNA sense strand
gagaaauugccaggagaau

SEQ ID NO: 2480483 - RNA, 19 nt, Homo sapiens
  misc_RNA (1)...(19): siRNA sense strand
gggaguaucucauaggagu

SEQ ID NO: 2480484 - RNA, 19 nt, Homo sapiens
  misc_RNA (1)...(19): siRNA sense strand
aggcaugauacgaacagaa

SEQ ID NO: 2480485 - RNA, 19 nt, Homo sapiens
  misc_RNA (1)...(19): siRNA sense strand
ccuuggugguggucgacaa

SEQ ID NO: 2480486 - RNA, 19 nt, Homo sapiens
  misc_RNA (1)...(19): siRNA sense strand
ccgccaguaucuacacaaa

SEQ ID NO: 2480487 - RNA, 19 nt, Homo sapiens
  misc_RNA (1)...(19): siRNA sense strand
ccguaauguuuguauagau

SEQ ID NO: 2480488 - RNA, 19 nt, Homo sapiens
  misc_RNA (1)...(19): siRNA sense strand
ccaagaagcugcaguggcu

SEQ ID NO: 2480489 - RNA, 19 nt, Homo sapiens
  misc_RNA (1)...(19): siRNA sense strand
gauacgaacagaagaggca

SEQ ID NO: 2480490 - RNA, 19 nt, Homo sapiens
  misc_RNA (1)...(19): siRNA sense strand
gcaaguggcaguucggaga

SEQ ID NO: 2480491 - RNA, 19 nt, Homo sapiens
  misc_RNA (1)...(19): siRNA sense strand
gacagaugaccgugagaga

SEQ ID NO: 2480492 - RNA, 19 nt, Homo sapiens
  misc_RNA (1)...(19): siRNA sense strand
aagaaugagcccugugaca

SEQ ID NO: 2480493 - RNA, 19 nt, Homo sapiens
  misc_RNA (1)...(19): siRNA sense strand
cugagaaauugccaggaga

SEQ ID NO: 2480494 - RNA, 19 nt, Homo sapiens
  misc_RNA (1)...(19): siRNA sense strand
caucguauuggaaggaaau

SEQ ID NO: 2480495 - RNA, 19 nt, Homo sapiens
  misc_RNA (1)...(19): siRNA sense strand
aggaaaugugagacuaaau

SEQ ID NO: 2480496 - RNA, 19 nt, Homo sapiens
  misc_RNA (1)...(19): siRNA sense strand
agauggaacaauaggagga

SEQ ID NO: 2480497 - RNA, 19 nt, Homo sapiens
  misc_RNA (1)...(19): siRNA sense strand
cuguaucgcagaaggauuu

SEQ ID NO: 2480498 - RNA, 19 nt, Homo sapiens
  misc_RNA (1)...(19): siRNA sense strand
uguuuguauagaugggaua

SEQ ID NO: 2480499 - RNA, 19 nt, Homo sapiens
  misc_RNA (1)...(19): siRNA sense strand
agaugggauaugugagaga

SEQ ID NO: 2480500 - RNA, 19 nt, Homo sapiens
  misc_RNA (1)...(19): siRNA sense strand
uggaaggaaaugugagacu

SEQ ID NO: 2480501 - RNA, 19 nt, Homo sapiens
  misc_RNA (1)...(19): siRNA sense strand
acuacaaguggaagccuua

SEQ ID NO: 2480502 - RNA, 19 nt, Homo sapiens
  misc_RNA (1)...(19): siRNA sense strand
agaucaggacuuaugcaaa

SEQ ID NO: 2480503 - RNA, 19 nt, Homo sapiens
  misc_RNA (1)...(19): siRNA sense strand
ccugugacacuuugggauu

SEQ ID NO: 2480504 - RNA, 19 nt, Homo sapiens
  misc_RNA (1)...(19): siRNA sense strand
ucgcagaaggauuugauuu

SEQ ID NO: 2480505 - RNA, 19 nt, Homo sapiens
  misc_RNA (1)...(19): siRNA sense strand
uugugcagacguugggaaa

SEQ ID NO: 2480506 - RNA, 19 nt, Homo sapiens
  misc_RNA (1)...(19): siRNA sense strand
caauaggaggaaacaucaa

SEQ ID NO: 2480507 - RNA, 19 nt, Homo sapiens
  misc_RNA (1)...(19): siRNA sense strand
ggagaagagcaguggccgu

SEQ ID NO: 2480508 - RNA, 19 nt, Homo sapiens
  misc_RNA (1)...(19): siRNA sense strand
cuggugaccucaaggacau

SEQ ID NO: 2480509 - RNA, 19 nt, Homo sapiens
  misc_RNA (1)...(19): siRNA sense strand
gcagcauuucuguggaaga

SEQ ID NO: 2480510 - RNA, 19 nt, Homo sapiens
  misc_RNA (1)...(19): siRNA sense strand
aagucuugcuuacggcaua

SEQ ID NO: 2480511 - RNA, 19 nt, Homo sapiens
  misc_RNA (1)...(19): siRNA sense strand
uggaacaauaggaggaaac

SEQ ID NO: 2480512 - RNA, 19 nt, Homo sapiens
  misc_RNA (1)...(19): siRNA sense strand
ccaaagccugugaaggaau

SEQ ID NO: 2480513 - RNA, 19 nt, Homo sapiens
  misc_RNA (1)...(19): siRNA sense strand
gcuacagagaccugaaguu

SEQ ID NO: 2480514 - RNA, 19 nt, Homo sapiens
  misc_RNA (1)...(19): siRNA sense strand
aaguggaauguguaguaaa

SEQ ID NO: 2480515 - RNA, 19 nt, Homo sapiens
  misc_RNA (1)...(19): siRNA sense strand
gggauaugugagagaguug

SEQ ID NO: 2480516 - RNA, 19 nt, Homo sapiens
  misc_RNA (1)...(19): siRNA sense strand
ucuagaagaugaacagcca

SEQ ID NO: 2480517 - RNA, 19 nt, Homo sapiens
  misc_RNA (1)...(19): siRNA sense strand
aagcagcauuucuguggaa

SEQ ID NO: 2480518 - RNA, 19 nt, Homo sapiens
  misc_RNA (1)...(19): siRNA sense strand
uguggaagacgcaagaaau

SEQ ID NO: 2480519 - RNA, 19 nt, Homo sapiens
  misc_RNA (1)...(19): siRNA sense strand
augaagaacugaacgugga

SEQ ID NO: 2480520 - RNA, 19 nt, Homo sapiens
  misc_RNA (1)...(19): siRNA sense strand
caguauuaucacaugguca

SEQ ID NO: 2480521 - RNA, 19 nt, Homo sapiens
  misc_RNA (1)...(19): siRNA sense strand
cacgauuaaugaagauaca

SEQ ID NO: 2480522 - RNA, 19 nt, Homo sapiens
  misc_RNA (1)...(19): siRNA sense strand
acacagugcaaguggcagu

SEQ ID NO: 2480523 - RNA, 19 nt, Homo sapiens
  misc_RNA (1)...(19): siRNA sense strand
uggaaaagggcgaauauga

SEQ ID NO: 2480524 - RNA, 19 nt, Homo sapiens
  misc_RNA (1)...(19): siRNA sense strand
acucugaagcucugcaaca

SEQ ID NO: 2480525 - RNA, 19 nt, Homo sapiens
  misc_RNA (1)...(19): siRNA sense strand
acccauaaguggaaugugu

SEQ ID NO: 2480526 - RNA, 19 nt, Homo sapiens
  misc_RNA (1)...(19): siRNA sense strand
agauacaggucuuggacug

SEQ ID NO: 2480527 - RNA, 19 nt, Homo sapiens
  misc_RNA (1)...(19): siRNA sense strand
ggguguguaacgggaauaa

SEQ ID NO: 2480528 - RNA, 19 nt, Homo sapiens
  misc_RNA (1)...(19): siRNA sense strand
agaagaugaagcuaggaaa

SEQ ID NO: 2480529 - RNA, 19 nt, Homo sapiens
  misc_RNA (1)...(19): siRNA sense strand
cacucaaauccguggacua

SEQ ID NO: 2480530 - RNA, 19 nt, Homo sapiens
  misc_RNA (1)...(19): siRNA sense strand
ucggaagagugcagggugu

SEQ ID NO: 2480531 - RNA, 19 nt, Homo sapiens
  misc_RNA (1)...(19): siRNA sense strand
gugaagaauaccagcaaag

SEQ ID NO: 2480532 - RNA, 19 nt, Homo sapiens
  misc_RNA (1)...(19): siRNA sense strand
gagcaagguuggaagcccu

SEQ ID NO: 2480533 - RNA, 19 nt, Homo sapiens
  misc_RNA (1)...(19): siRNA sense strand
cuucagaauguauacagaa

SEQ ID NO: 2480534 - RNA, 19 nt, Homo sapiens
  misc_RNA (1)...(19): siRNA sense strand
aagaauaccagcaaaggca

SEQ ID NO: 2480535 - RNA, 19 nt, Homo sapiens
  misc_RNA (1)...(19): siRNA sense strand
gugaaaggccggaacccaa

SEQ ID NO: 2480536 - RNA, 19 nt, Homo sapiens
  misc_RNA (1)...(19): siRNA sense strand
aggcagaggaaaugugaca

SEQ ID NO: 2480537 - RNA, 19 nt, Homo sapiens
  misc_RNA (1)...(19): siRNA sense strand
gcaccaacucacaagggaa

SEQ ID NO: 2480538 - RNA, 19 nt, Homo sapiens
  misc_RNA (1)...(19): siRNA sense strand
auucaguggacgagaacau

SEQ ID NO: 2480539 - RNA, 19 nt, Homo sapiens
  misc_RNA (1)...(19): siRNA sense strand
cggagcauguggacggaga

SEQ ID NO: 2480540 - RNA, 19 nt, Homo sapiens
  misc_RNA (1)...(19): siRNA sense strand
gaacaugcggucugcgaga

SEQ ID NO: 2480541 - RNA, 19 nt, Homo sapiens
  misc_RNA (1)...(19): siRNA sense strand
ggaguauggaggagcgcga

SEQ ID NO: 2480542 - RNA, 19 nt, Homo sapiens
  misc_RNA (1)...(19): siRNA sense strand
ccugguagaaggagacaca

SEQ ID NO: 2480543 - RNA, 19 nt, Homo sapiens
  misc_RNA (1)...(19): siRNA sense strand
cgcuucaggcagaggaaau

SEQ ID NO: 2480544 - RNA, 19 nt, Homo sapiens
  misc_RNA (1)...(19): siRNA sense strand
cucucaaagacucggguaa

SEQ ID NO: 2480545 - RNA, 19 nt, Homo sapiens
  misc_RNA (1)...(19): siRNA sense strand
guuccagauugcaggcaca

SEQ ID NO: 2480546 - RNA, 19 nt, Homo sapiens
  misc_RNA (1)...(19): siRNA sense strand
aguauggaggagcgcgaua

SEQ ID NO: 2480547 - RNA, 19 nt, Homo sapiens
  misc_RNA (1)...(19): siRNA sense strand
acuugaugguguuguuauu

SEQ ID NO: 2480548 - RNA, 19 nt, Homo sapiens
  misc_RNA (1)...(19): siRNA sense strand
acaauauguuucagcacca

SEQ ID NO: 2480549 - RNA, 19 nt, Homo sapiens
  misc_RNA (1)...(19): siRNA sense strand
aaaucaaagcgaaccagaa

SEQ ID NO: 2480550 - RNA, 19 nt, Homo sapiens
  misc_RNA (1)...(19): siRNA sense strand
gguaaagggguguggaaac

SEQ ID NO: 2480551 - RNA, 19 nt, Homo sapiens
  misc_RNA (1)...(19): siRNA sense strand
cgauaagccaugugaacuc

SEQ ID NO: 2480552 - RNA, 19 nt, Homo sapiens
  misc_RNA (1)...(19): siRNA sense strand
gccacuuggugaagggcga

SEQ ID NO: 2480553 - RNA, 19 nt, Homo sapiens
  misc_RNA (1)...(19): siRNA sense strand
ugccagaccugcagggacu

SEQ ID NO: 2480554 - RNA, 19 nt, Homo sapiens
  misc_RNA (1)...(19): siRNA sense strand
cugcagaaacauggagcau

SEQ ID NO: 2480555 - RNA, 19 nt, Homo sapiens
  misc_RNA (1)...(19): siRNA sense strand
aagugaagaagaagcuaaa

SEQ ID NO: 2480556 - RNA, 19 nt, Homo sapiens
  misc_RNA (1)...(19): siRNA sense strand
uggagcaacaagugaagaa

SEQ ID NO: 2480557 - RNA, 19 nt, Homo sapiens
  misc_RNA (1)...(19): siRNA sense strand
caauagaccucaugccagu

SEQ ID NO: 2480558 - RNA, 19 nt, Homo sapiens
  misc_RNA (1)...(19): siRNA sense strand
aggaaguaucacaguaaca

SEQ ID NO: 2480559 - RNA, 19 nt, Homo sapiens
  misc_RNA (1)...(19): siRNA sense strand
uggaaggagcaaauguaau

SEQ ID NO: 2480560 - RNA, 19 nt, Homo sapiens
  misc_RNA (1)...(19): siRNA sense strand
agcuaaauuuggugccaga

SEQ ID NO: 2480561 - RNA, 19 nt, Homo sapiens
  misc_RNA (1)...(19): siRNA sense strand
auaaacgugauguuggaaa

SEQ ID NO: 2480562 - RNA, 19 nt, Homo sapiens
  misc_RNA (1)...(19): siRNA sense strand
gcuuagaaaaccuagaauu

SEQ ID NO: 2480563 - RNA, 19 nt, Homo sapiens
  misc_RNA (1)...(19): siRNA sense strand
uuguaaacguucuggcagu

SEQ ID NO: 2480564 - RNA, 19 nt, Homo sapiens
  misc_RNA (1)...(19): siRNA sense strand
acaaagaacaauagaccuc

SEQ ID NO: 2480565 - RNA, 19 nt, Homo sapiens
  misc_RNA (1)...(19): siRNA sense strand
augauggcauagagagaaa

SEQ ID NO: 2480566 - RNA, 19 nt, Homo sapiens
  misc_RNA (1)...(19): siRNA sense strand
aggcaaagucgcugggcau

SEQ ID NO: 2480567 - RNA, 19 nt, Homo sapiens
  misc_RNA (1)...(19): siRNA sense strand
gcuacgacgugaacggcaa

SEQ ID NO: 2480568 - RNA, 19 nt, Homo sapiens
  misc_RNA (1)...(19): siRNA sense strand
ugaugauggcauagagaga

SEQ ID NO: 2480569 - RNA, 19 nt, Homo sapiens
  misc_RNA (1)...(19): siRNA sense strand
gaagugaaacgaaggguga

SEQ ID NO: 2480570 - RNA, 19 nt, Homo sapiens
  misc_RNA (1)...(19): siRNA sense strand
cggcaaugauuaugaccca

SEQ ID NO: 2480571 - RNA, 19 nt, Homo sapiens
  misc_RNA (1)...(19): siRNA sense strand
cgucugggcaucugggaau

SEQ ID NO: 2480572 - RNA, 19 nt, Homo sapiens
  misc_RNA (1)...(19): siRNA sense strand
ggaaaugaauguccaggca

SEQ ID NO: 2480573 - RNA, 19 nt, Homo sapiens
  misc_RNA (1)...(19): siRNA sense strand
ccuacugcaucgugggcau

SEQ ID NO: 2480574 - RNA, 19 nt, Homo sapiens
  misc_RNA (1)...(19): siRNA sense strand
acgugaacggcaaugauua

SEQ ID NO: 2480575 - RNA, 19 nt, Homo sapiens
  misc_RNA (1)...(19): siRNA sense strand
gggccuuuuaugagcgaaa

SEQ ID NO: 2480576 - RNA, 19 nt, Homo sapiens
  misc_RNA (1)...(19): siRNA sense strand
ggucggaaaugaaugucca

SEQ ID NO: 2480577 - RNA, 19 nt, Homo sapiens
  misc_RNA (1)...(19): siRNA sense strand
caguuaaccuggagggacg

SEQ ID NO: 2480578 - RNA, 19 nt, Homo sapiens
  misc_RNA (1)...(19): siRNA sense strand
augauggcauagagagaaa

SEQ ID NO: 2480579 - RNA, 19 nt, Homo sapiens
  misc_RNA (1)...(19): siRNA sense strand
aggcaaagucgcugggcau

SEQ ID NO: 2480580 - RNA, 19 nt, Homo sapiens
  misc_RNA (1)...(19): siRNA sense strand
gcuacgacgugaacggcaa

SEQ ID NO: 2480581 - RNA, 19 nt, Homo sapiens
  misc_RNA (1)...(19): siRNA sense strand
ugaugauggcauagagaga

SEQ ID NO: 2480582 - RNA, 19 nt, Homo sapiens
  misc_RNA (1)...(19): siRNA sense strand
gaagugaaacgaaggguga

SEQ ID NO: 2480583 - RNA, 19 nt, Homo sapiens
  misc_RNA (1)...(19): siRNA sense strand
cggcaaugauuaugaccca

SEQ ID NO: 2480584 - RNA, 19 nt, Homo sapiens
  misc_RNA (1)...(19): siRNA sense strand
cgucugggcaucugggaau

SEQ ID NO: 2480585 - RNA, 19 nt, Homo sapiens
  misc_RNA (1)...(19): siRNA sense strand
ggaaaugaauguccaggca

SEQ ID NO: 2480586 - RNA, 19 nt, Homo sapiens
  misc_RNA (1)...(19): siRNA sense strand
ccuacugcaucgugggcau

SEQ ID NO: 2480587 - RNA, 19 nt, Homo sapiens
  misc_RNA (1)...(19): siRNA sense strand
acgugaacggcaaugauua

SEQ ID NO: 2480588 - RNA, 19 nt, Homo sapiens
  misc_RNA (1)...(19): siRNA sense strand
gggccuuuuaugagcgaaa

SEQ ID NO: 2480589 - RNA, 19 nt, Homo sapiens
  misc_RNA (1)...(19): siRNA sense strand
ggucggaaaugaaugucca

SEQ ID NO: 2480590 - RNA, 19 nt, Homo sapiens
  misc_RNA (1)...(19): siRNA sense strand
caguuaaccuggagggacg

SEQ ID NO: 2480591 - RNA, 19 nt, Homo sapiens
  misc_RNA (1)...(19): siRNA sense strand
augauggcauagagagaaa

SEQ ID NO: 2480592 - RNA, 19 nt, Homo sapiens
  misc_RNA (1)...(19): siRNA sense strand
aggcaaagucgcugggcau

SEQ ID NO: 2480593 - RNA, 19 nt, Homo sapiens
  misc_RNA (1)...(19): siRNA sense strand
gcuacgacgugaacggcaa

SEQ ID NO: 2480594 - RNA, 19 nt, Homo sapiens
  misc_RNA (1)...(19): siRNA sense strand
ugaugauggcauagagaga

SEQ ID NO: 2480595 - RNA, 19 nt, Homo sapiens
  misc_RNA (1)...(19): siRNA sense strand
gaagugaaacgaaggguga

SEQ ID NO: 2480596 - RNA, 19 nt, Homo sapiens
  misc_RNA (1)...(19): siRNA sense strand
cggcaaugauuaugaccca

SEQ ID NO: 2480597 - RNA, 19 nt, Homo sapiens
  misc_RNA (1)...(19): siRNA sense strand
cgucugggcaucugggaau

SEQ ID NO: 2480598 - RNA, 19 nt, Homo sapiens
  misc_RNA (1)...(19): siRNA sense strand
ggaaaugaauguccaggca

SEQ ID NO: 2480599 - RNA, 19 nt, Homo sapiens
  misc_RNA (1)...(19): siRNA sense strand
ccuacugcaucgugggcau

SEQ ID NO: 2480600 - RNA, 19 nt, Homo sapiens
  misc_RNA (1)...(19): siRNA sense strand
acgugaacggcaaugauua

SEQ ID NO: 2480601 - RNA, 19 nt, Homo sapiens
  misc_RNA (1)...(19): siRNA sense strand
gggccuuuuaugagcgaaa

SEQ ID NO: 2480602 - RNA, 19 nt, Homo sapiens
  misc_RNA (1)...(19): siRNA sense strand
ggucggaaaugaaugucca

SEQ ID NO: 2480603 - RNA, 19 nt, Homo sapiens
  misc_RNA (1)...(19): siRNA sense strand
caguuaaccuggagggacg

SEQ ID NO: 2480604 - RNA, 19 nt, Homo sapiens
  misc_RNA (1)...(19): siRNA sense strand
augauggcauagagagaaa

SEQ ID NO: 2480605 - RNA, 19 nt, Homo sapiens
  misc_RNA (1)...(19): siRNA sense strand
aggcaaagucgcugggcau

SEQ ID NO: 2480606 - RNA, 19 nt, Homo sapiens
  misc_RNA (1)...(19): siRNA sense strand
gcuacgacgugaacggcaa

SEQ ID NO: 2480607 - RNA, 19 nt, Homo sapiens
  misc_RNA (1)...(19): siRNA sense strand
ugaugauggcauagagaga

SEQ ID NO: 2480608 - RNA, 19 nt, Homo sapiens
  misc_RNA (1)...(19): siRNA sense strand
gaagugaaacgaaggguga

SEQ ID NO: 2480609 - RNA, 19 nt, Homo sapiens
  misc_RNA (1)...(19): siRNA sense strand
cggcaaugauuaugaccca

SEQ ID NO: 2480610 - RNA, 19 nt, Homo sapiens
  misc_RNA (1)...(19): siRNA sense strand
cgucugggcaucugggaau

SEQ ID NO: 2480611 - RNA, 19 nt, Homo sapiens
  misc_RNA (1)...(19): siRNA sense strand
ggaaaugaauguccaggca

SEQ ID NO: 2480612 - RNA, 19 nt, Homo sapiens
  misc_RNA (1)...(19): siRNA sense strand
ccuacugcaucgugggcau

SEQ ID NO: 2480613 - RNA, 19 nt, Homo sapiens
  misc_RNA (1)...(19): siRNA sense strand
acgugaacggcaaugauua

SEQ ID NO: 2480614 - RNA, 19 nt, Homo sapiens
  misc_RNA (1)...(19): siRNA sense strand
gggccuuuuaugagcgaaa

SEQ ID NO: 2480615 - RNA, 19 nt, Homo sapiens
  misc_RNA (1)...(19): siRNA sense strand
ggucggaaaugaaugucca

SEQ ID NO: 2480616 - RNA, 19 nt, Homo sapiens
  misc_RNA (1)...(19): siRNA sense strand
caguuaaccuggagggacg

SEQ ID NO: 2480617 - RNA, 19 nt, Homo sapiens
  misc_RNA (1)...(19): siRNA sense strand
augauggcauagagagaaa

SEQ ID NO: 2480618 - RNA, 19 nt, Homo sapiens
  misc_RNA (1)...(19): siRNA sense strand
aggcaaagucgcugggcau

SEQ ID NO: 2480619 - RNA, 19 nt, Homo sapiens
  misc_RNA (1)...(19): siRNA sense strand
gcuacgacgugaacggcaa

SEQ ID NO: 2480620 - RNA, 19 nt, Homo sapiens
  misc_RNA (1)...(19): siRNA sense strand
ugaugauggcauagagaga

SEQ ID NO: 2480621 - RNA, 19 nt, Homo sapiens
  misc_RNA (1)...(19): siRNA sense strand
gaagugaaacgaaggguga

SEQ ID NO: 2480622 - RNA, 19 nt, Homo sapiens
  misc_RNA (1)...(19): siRNA sense strand
cggcaaugauuaugaccca

SEQ ID NO: 2480623 - RNA, 19 nt, Homo sapiens
  misc_RNA (1)...(19): siRNA sense strand
cgucugggcaucugggaau

SEQ ID NO: 2480624 - RNA, 19 nt, Homo sapiens
  misc_RNA (1)...(19): siRNA sense strand
ggaaaugaauguccaggca

SEQ ID NO: 2480625 - RNA, 19 nt, Homo sapiens
  misc_RNA (1)...(19): siRNA sense strand
ccuacugcaucgugggcau

SEQ ID NO: 2480626 - RNA, 19 nt, Homo sapiens
  misc_RNA (1)...(19): siRNA sense strand
acgugaacggcaaugauua

SEQ ID NO: 2480627 - RNA, 19 nt, Homo sapiens
  misc_RNA (1)...(19): siRNA sense strand
gggccuuuuaugagcgaaa

SEQ ID NO: 2480628 - RNA, 19 nt, Homo sapiens
  misc_RNA (1)...(19): siRNA sense strand
ggucggaaaugaaugucca

SEQ ID NO: 2480629 - RNA, 19 nt, Homo sapiens
  misc_RNA (1)...(19): siRNA sense strand
caguuaaccuggagggacg

SEQ ID NO: 2480630 - RNA, 19 nt, Homo sapiens
  misc_RNA (1)...(19): siRNA sense strand
augauggcauagagagaaa

SEQ ID NO: 2480631 - RNA, 19 nt, Homo sapiens
  misc_RNA (1)...(19): siRNA sense strand
aggcaaagucgcugggcau

SEQ ID NO: 2480632 - RNA, 19 nt, Homo sapiens
  misc_RNA (1)...(19): siRNA sense strand
gcuacgacgugaacggcaa

SEQ ID NO: 2480633 - RNA, 19 nt, Homo sapiens
  misc_RNA (1)...(19): siRNA sense strand
ugaugauggcauagagaga

SEQ ID NO: 2480634 - RNA, 19 nt, Homo sapiens
  misc_RNA (1)...(19): siRNA sense strand
gaagugaaacgaaggguga

SEQ ID NO: 2480635 - RNA, 19 nt, Homo sapiens
  misc_RNA (1)...(19): siRNA sense strand
cggcaaugauuaugaccca

SEQ ID NO: 2480636 - RNA, 19 nt, Homo sapiens
  misc_RNA (1)...(19): siRNA sense strand
cgucugggcaucugggaau

SEQ ID NO: 2480637 - RNA, 19 nt, Homo sapiens
  misc_RNA (1)...(19): siRNA sense strand
ggaaaugaauguccaggca

SEQ ID NO: 2480638 - RNA, 19 nt, Homo sapiens
  misc_RNA (1)...(19): siRNA sense strand
ccuacugcaucgugggcau

SEQ ID NO: 2480639 - RNA, 19 nt, Homo sapiens
  misc_RNA (1)...(19): siRNA sense strand
acgugaacggcaaugauua

SEQ ID NO: 2480640 - RNA, 19 nt, Homo sapiens
  misc_RNA (1)...(19): siRNA sense strand
gggccuuuuaugagcgaaa

SEQ ID NO: 2480641 - RNA, 19 nt, Homo sapiens
  misc_RNA (1)...(19): siRNA sense strand
ggucggaaaugaaugucca

SEQ ID NO: 2480642 - RNA, 19 nt, Homo sapiens
  misc_RNA (1)...(19): siRNA sense strand
caguuaaccuggagggacg

SEQ ID NO: 2480643 - RNA, 19 nt, Homo sapiens
  misc_RNA (1)...(19): siRNA sense strand
augauggcauagagagaaa

SEQ ID NO: 2480644 - RNA, 19 nt, Homo sapiens
  misc_RNA (1)...(19): siRNA sense strand
aggcaaagucgcugggcau

SEQ ID NO: 2480645 - RNA, 19 nt, Homo sapiens
  misc_RNA (1)...(19): siRNA sense strand
gcuacgacgugaacggcaa

SEQ ID NO: 2480646 - RNA, 19 nt, Homo sapiens
  misc_RNA (1)...(19): siRNA sense strand
ugaugauggcauagagaga

SEQ ID NO: 2480647 - RNA, 19 nt, Homo sapiens
  misc_RNA (1)...(19): siRNA sense strand
gaagugaaacgaaggguga

SEQ ID NO: 2480648 - RNA, 19 nt, Homo sapiens
  misc_RNA (1)...(19): siRNA sense strand
cggcaaugauuaugaccca

SEQ ID NO: 2480649 - RNA, 19 nt, Homo sapiens
  misc_RNA (1)...(19): siRNA sense strand
cgucugggcaucugggaau

SEQ ID NO: 2480650 - RNA, 19 nt, Homo sapiens
  misc_RNA (1)...(19): siRNA sense strand
ggaaaugaauguccaggca

SEQ ID NO: 2480651 - RNA, 19 nt, Homo sapiens
  misc_RNA (1)...(19): siRNA sense strand
ccuacugcaucgugggcau

SEQ ID NO: 2480652 - RNA, 19 nt, Homo sapiens
  misc_RNA (1)...(19): siRNA sense strand
acgugaacggcaaugauua

SEQ ID NO: 2480653 - RNA, 19 nt, Homo sapiens
  misc_RNA (1)...(19): siRNA sense strand
gggccuuuuaugagcgaaa

SEQ ID NO: 2480654 - RNA, 19 nt, Homo sapiens
  misc_RNA (1)...(19): siRNA sense strand
ggucggaaaugaaugucca

SEQ ID NO: 2480655 - RNA, 19 nt, Homo sapiens
  misc_RNA (1)...(19): siRNA sense strand
caguuaaccuggagggacg

SEQ ID NO: 2480656 - RNA, 19 nt, Homo sapiens
  misc_RNA (1)...(19): siRNA sense strand
augauggcauagagagaaa

SEQ ID NO: 2480657 - RNA, 19 nt, Homo sapiens
  misc_RNA (1)...(19): siRNA sense strand
aggcaaagucgcugggcau

SEQ ID NO: 2480658 - RNA, 19 nt, Homo sapiens
  misc_RNA (1)...(19): siRNA sense strand
gcuacgacgugaacggcaa

SEQ ID NO: 2480659 - RNA, 19 nt, Homo sapiens
  misc_RNA (1)...(19): siRNA sense strand
ugaugauggcauagagaga

SEQ ID NO: 2480660 - RNA, 19 nt, Homo sapiens
  misc_RNA (1)...(19): siRNA sense strand
gaagugaaacgaaggguga

SEQ ID NO: 2480661 - RNA, 19 nt, Homo sapiens
  misc_RNA (1)...(19): siRNA sense strand
cggcaaugauuaugaccca

SEQ ID NO: 2480662 - RNA, 19 nt, Homo sapiens
  misc_RNA (1)...(19): siRNA sense strand
cgucugggcaucugggaau

SEQ ID NO: 2480663 - RNA, 19 nt, Homo sapiens
  misc_RNA (1)...(19): siRNA sense strand
ggaaaugaauguccaggca

SEQ ID NO: 2480664 - RNA, 19 nt, Homo sapiens
  misc_RNA (1)...(19): siRNA sense strand
ccuacugcaucgugggcau

SEQ ID NO: 2480665 - RNA, 19 nt, Homo sapiens
  misc_RNA (1)...(19): siRNA sense strand
acgugaacggcaaugauua

SEQ ID NO: 2480666 - RNA, 19 nt, Homo sapiens
  misc_RNA (1)...(19): siRNA sense strand
gggccuuuuaugagcgaaa

SEQ ID NO: 2480667 - RNA, 19 nt, Homo sapiens
  misc_RNA (1)...(19): siRNA sense strand
ggucggaaaugaaugucca

SEQ ID NO: 2480668 - RNA, 19 nt, Homo sapiens
  misc_RNA (1)...(19): siRNA sense strand
caguuaaccuggagggacg

SEQ ID NO: 2480669 - RNA, 19 nt, Homo sapiens
  misc_RNA (1)...(19): siRNA sense strand
gcucagagucauuggaaaa

SEQ ID NO: 2480670 - RNA, 19 nt, Homo sapiens
  misc_RNA (1)...(19): siRNA sense strand
cuaaauuacuugggcaaaa

SEQ ID NO: 2480671 - RNA, 19 nt, Homo sapiens
  misc_RNA (1)...(19): siRNA sense strand
aggacuuauuguugugcua

SEQ ID NO: 2480672 - RNA, 19 nt, Homo sapiens
  misc_RNA (1)...(19): siRNA sense strand
gucuaaauucuguggauga

SEQ ID NO: 2480673 - RNA, 19 nt, Homo sapiens
  misc_RNA (1)...(19): siRNA sense strand
cuucaagcaauuugugcaa

SEQ ID NO: 2480674 - RNA, 19 nt, Homo sapiens
  misc_RNA (1)...(19): siRNA sense strand
aggcuaaauccaucagaga

SEQ ID NO: 2480675 - RNA, 19 nt, Homo sapiens
  misc_RNA (1)...(19): siRNA sense strand
gggaacaagcaaggaguca

SEQ ID NO: 2480676 - RNA, 19 nt, Homo sapiens
  misc_RNA (1)...(19): siRNA sense strand
ggacagauuucacuggacu

SEQ ID NO: 2480677 - RNA, 19 nt, Homo sapiens
  misc_RNA (1)...(19): siRNA sense strand
gugucuaaauucuguggau

SEQ ID NO: 2480678 - RNA, 19 nt, Homo sapiens
  misc_RNA (1)...(19): siRNA sense strand
uauuaaaacugcagaugga

SEQ ID NO: 2480679 - RNA, 19 nt, Homo sapiens
  misc_RNA (1)...(19): siRNA sense strand
uucuaaauuacuugggcaa

SEQ ID NO: 2480680 - RNA, 19 nt, Homo sapiens
  misc_RNA (1)...(19): siRNA sense strand
ccacuuacauggaucgugu

SEQ ID NO: 2480681 - RNA, 19 nt, Homo sapiens
  misc_RNA (1)...(19): siRNA sense strand
cggaagacgcugagggcaa

SEQ ID NO: 2480682 - RNA, 19 nt, Homo sapiens
  misc_RNA (1)...(19): siRNA sense strand
acgaagaagaugaggacga

SEQ ID NO: 2480683 - RNA, 19 nt, Homo sapiens
  misc_RNA (1)...(19): siRNA sense strand
cggaggagcccgugcaaaa

SEQ ID NO: 2480684 - RNA, 19 nt, Homo sapiens
  misc_RNA (1)...(19): siRNA sense strand
cgggcaaggaggugugcua

SEQ ID NO: 2480685 - RNA, 19 nt, Homo sapiens
  misc_RNA (1)...(19): siRNA sense strand
aggaacugcuggaggacga

SEQ ID NO: 2480686 - RNA, 19 nt, Homo sapiens
  misc_RNA (1)...(19): siRNA sense strand
aggaggagcugcuggagga

SEQ ID NO: 2480687 - RNA, 19 nt, Homo sapiens
  misc_RNA (1)...(19): siRNA sense strand
aggaggagcugcuggagga

SEQ ID NO: 2480688 - RNA, 19 nt, Homo sapiens
  misc_RNA (1)...(19): siRNA sense strand
aggacgaggaagaggaacu

SEQ ID NO: 2480689 - RNA, 19 nt, Homo sapiens
  misc_RNA (1)...(19): siRNA sense strand
aagaggaacugcuggagga

SEQ ID NO: 2480690 - RNA, 19 nt, Homo sapiens
  misc_RNA (1)...(19): siRNA sense strand
ggacgaagaagaugaggac

SEQ ID NO: 2480691 - RNA, 19 nt, Homo sapiens
  misc_RNA (1)...(19): siRNA sense strand
agaagaugaggacgaggaa

SEQ ID NO: 2480692 - RNA, 19 nt, Homo sapiens
  misc_RNA (1)...(19): siRNA sense strand
uggaggacgaagaagauga

SEQ ID NO: 2480693 - RNA, 19 nt, Homo sapiens
  misc_RNA (1)...(19): siRNA sense strand
gcaaucaguaccaggagga

SEQ ID NO: 2480694 - RNA, 19 nt, Homo sapiens
  misc_RNA (1)...(19): siRNA sense strand
uggaggacgacgaggagga

SEQ ID NO: 2480695 - RNA, 19 nt, Homo sapiens
  misc_RNA (1)...(19): siRNA sense strand
aggagcugcuggaggacga

SEQ ID NO: 2480696 - RNA, 19 nt, Homo sapiens
  misc_RNA (1)...(19): siRNA sense strand
aggagcugcuggaggacga

SEQ ID NO: 2480697 - RNA, 19 nt, Homo sapiens
  misc_RNA (1)...(19): siRNA sense strand
agacaaagguggagcggga

SEQ ID NO: 2480698 - RNA, 19 nt, Homo sapiens
  misc_RNA (1)...(19): siRNA sense strand
gcccaaacuacuagggaaa

SEQ ID NO: 2480699 - RNA, 19 nt, Homo sapiens
  misc_RNA (1)...(19): siRNA sense strand
cuauagaggaggaagcaaa

SEQ ID NO: 2480700 - RNA, 19 nt, Homo sapiens
  misc_RNA (1)...(19): siRNA sense strand
ggaugaggagaaagggaaa

SEQ ID NO: 2480701 - RNA, 19 nt, Homo sapiens
  misc_RNA (1)...(19): siRNA sense strand
ggaggaagcaaaagagaaa

SEQ ID NO: 2480702 - RNA, 19 nt, Homo sapiens
  misc_RNA (1)...(19): siRNA sense strand
aguccuuggugcagaauaa

SEQ ID NO: 2480703 - RNA, 19 nt, Homo sapiens
  misc_RNA (1)...(19): siRNA sense strand
aggaagacuaugaaguaaa

SEQ ID NO: 2480704 - RNA, 19 nt, Homo sapiens
  misc_RNA (1)...(19): siRNA sense strand
agaaggagaaggagccaaa

SEQ ID NO: 2480705 - RNA, 19 nt, Homo sapiens
  misc_RNA (1)...(19): siRNA sense strand
gcccagaaauugagcccaa

SEQ ID NO: 2480706 - RNA, 19 nt, Homo sapiens
  misc_RNA (1)...(19): siRNA sense strand
cgggcaaggaugaggauga

SEQ ID NO: 2480707 - RNA, 19 nt, Homo sapiens
  misc_RNA (1)...(19): siRNA sense strand
acagagaagaggagcaaga

SEQ ID NO: 2480708 - RNA, 19 nt, Homo sapiens
  misc_RNA (1)...(19): siRNA sense strand
gggacauuggcgagggcaa

SEQ ID NO: 2480709 - RNA, 19 nt, Homo sapiens
  misc_RNA (1)...(19): siRNA sense strand
aggaagugcugaaggaagu

SEQ ID NO: 2480710 - RNA, 19 nt, Homo sapiens
  misc_RNA (1)...(19): siRNA sense strand
ccagucaugaagagggaua

SEQ ID NO: 2480711 - RNA, 19 nt, Homo sapiens
  misc_RNA (1)...(19): siRNA sense strand
cagccaaaguaacaggcaa

SEQ ID NO: 2480712 - RNA, 19 nt, Homo sapiens
  misc_RNA (1)...(19): siRNA sense strand
aggaagugguggagucuga

SEQ ID NO: 2480713 - RNA, 19 nt, Homo sapiens
  misc_RNA (1)...(19): siRNA sense strand
ccacagagaagaggagcaa

SEQ ID NO: 2480714 - RNA, 19 nt, Homo sapiens
  misc_RNA (1)...(19): siRNA sense strand
gcauggagacgacgggcaa

SEQ ID NO: 2480715 - RNA, 19 nt, Homo sapiens
  misc_RNA (1)...(19): siRNA sense strand
gccgaaaccuagcggguga

SEQ ID NO: 2480716 - RNA, 19 nt, Homo sapiens
  misc_RNA (1)...(19): siRNA sense strand
ccgagaagagugauggaga

SEQ ID NO: 2480717 - RNA, 19 nt, Homo sapiens
  misc_RNA (1)...(19): siRNA sense strand
aggaagggcaggaggaagu

SEQ ID NO: 2480718 - RNA, 19 nt, Homo sapiens
  misc_RNA (1)...(19): siRNA sense strand
uggaaauguuuaugaccau

SEQ ID NO: 2480719 - RNA, 19 nt, Homo sapiens
  misc_RNA (1)...(19): siRNA sense strand
gaagagugauggagaccca

SEQ ID NO: 2480720 - RNA, 19 nt, Homo sapiens
  misc_RNA (1)...(19): siRNA sense strand
aggaugaggagaaagggaa

SEQ ID NO: 2480721 - RNA, 19 nt, Homo sapiens
  misc_RNA (1)...(19): siRNA sense strand
cagucaacacaaagaaaga

SEQ ID NO: 2480722 - RNA, 19 nt, Homo sapiens
  misc_RNA (1)...(19): siRNA sense strand
aggaggaagugcugaagga

SEQ ID NO: 2480723 - RNA, 19 nt, Homo sapiens
  misc_RNA (1)...(19): siRNA sense strand
aggacauuaucaagagaca

SEQ ID NO: 2480724 - RNA, 19 nt, Homo sapiens
  misc_RNA (1)...(19): siRNA sense strand
agaagaagaggaaugggua

SEQ ID NO: 2480725 - RNA, 19 nt, Homo sapiens
  misc_RNA (1)...(19): siRNA sense strand
cugaugagccugagcggau

SEQ ID NO: 2480726 - RNA, 19 nt, Homo sapiens
  misc_RNA (1)...(19): siRNA sense strand
guacaaagaugacuggaac

SEQ ID NO: 2480727 - RNA, 19 nt, Homo sapiens
  misc_RNA (1)...(19): siRNA sense strand
ggaacaaaguguccgagca

SEQ ID NO: 2480728 - RNA, 19 nt, Homo sapiens
  misc_RNA (1)...(19): siRNA sense strand
caaaaugaaggaagaggua

SEQ ID NO: 2480729 - RNA, 19 nt, Homo sapiens
  misc_RNA (1)...(19): siRNA sense strand
guggaaauguuuaugacca

SEQ ID NO: 2480730 - RNA, 19 nt, Homo sapiens
  misc_RNA (1)...(19): siRNA sense strand
uggaugaacaggaagauga

SEQ ID NO: 2480731 - RNA, 19 nt, Homo sapiens
  misc_RNA (1)...(19): siRNA sense strand
acaaagaugacuggaacaa

SEQ ID NO: 2480732 - RNA, 19 nt, Homo sapiens
  misc_RNA (1)...(19): siRNA sense strand
ccagaagcaaagaagaaaa

SEQ ID NO: 2480733 - RNA, 19 nt, Homo sapiens
  misc_RNA (1)...(19): siRNA sense strand
cugacaaaggcaaagagaa

SEQ ID NO: 2480734 - RNA, 19 nt, Homo sapiens
  misc_RNA (1)...(19): siRNA sense strand
guggagacccagaugaaaa

SEQ ID NO: 2480735 - RNA, 19 nt, Homo sapiens
  misc_RNA (1)...(19): siRNA sense strand
uagggaaauuaaaggacau

SEQ ID NO: 2480736 - RNA, 19 nt, Homo sapiens
  misc_RNA (1)...(19): siRNA sense strand
guauauacaagcugaacca

SEQ ID NO: 2480737 - RNA, 19 nt, Homo sapiens
  misc_RNA (1)...(19): siRNA sense strand
ggcaagaacaaguccaaga

SEQ ID NO: 2480738 - RNA, 19 nt, Homo sapiens
  misc_RNA (1)...(19): siRNA sense strand
uggaaauguacaaagauga

SEQ ID NO: 2480739 - RNA, 19 nt, Homo sapiens
  misc_RNA (1)...(19): siRNA sense strand
augagaagaaggagcccaa

SEQ ID NO: 2480740 - RNA, 19 nt, Homo sapiens
  misc_RNA (1)...(19): siRNA sense strand
cgagugaaauugaggcauc

SEQ ID NO: 2480741 - RNA, 19 nt, Homo sapiens
  misc_RNA (1)...(19): siRNA sense strand
cagccaagacacugacaga

SEQ ID NO: 2480742 - RNA, 19 nt, Homo sapiens
  misc_RNA (1)...(19): siRNA sense strand
ggacagaacaggaaacccu

SEQ ID NO: 2480743 - RNA, 19 nt, Homo sapiens
  misc_RNA (1)...(19): siRNA sense strand
aguggaagaagcagccaaa

SEQ ID NO: 2480744 - RNA, 19 nt, Homo sapiens
  misc_RNA (1)...(19): siRNA sense strand
aggccacagaugagaagaa

SEQ ID NO: 2480745 - RNA, 19 nt, Homo sapiens
  misc_RNA (1)...(19): siRNA sense strand
cuagggaaauuaaaggaca

SEQ ID NO: 2480746 - RNA, 19 nt, Homo sapiens
  misc_RNA (1)...(19): siRNA sense strand
uguacaaagaugacuggaa

SEQ ID NO: 2480747 - RNA, 19 nt, Homo sapiens
  misc_RNA (1)...(19): siRNA sense strand
agaaagggaaagaaggcga

SEQ ID NO: 2480748 - RNA, 19 nt, Homo sapiens
  misc_RNA (1)...(19): siRNA sense strand
gaagaugaaagcauggaga

SEQ ID NO: 2480749 - RNA, 19 nt, Homo sapiens
  misc_RNA (1)...(19): siRNA sense strand
gugagaaggaguccgagaa

SEQ ID NO: 2480750 - RNA, 19 nt, Homo sapiens
  misc_RNA (1)...(19): siRNA sense strand
ccccagaagcaaagaagaa

SEQ ID NO: 2480751 - RNA, 19 nt, Homo sapiens
  misc_RNA (1)...(19): siRNA sense strand
agacaaagguggagcggga

SEQ ID NO: 2480752 - RNA, 19 nt, Homo sapiens
  misc_RNA (1)...(19): siRNA sense strand
gcccaaacuacuagggaaa

SEQ ID NO: 2480753 - RNA, 19 nt, Homo sapiens
  misc_RNA (1)...(19): siRNA sense strand
cuauagaggaggaagcaaa

SEQ ID NO: 2480754 - RNA, 19 nt, Homo sapiens
  misc_RNA (1)...(19): siRNA sense strand
ggaugaggagaaagggaaa

SEQ ID NO: 2480755 - RNA, 19 nt, Homo sapiens
  misc_RNA (1)...(19): siRNA sense strand
ggaggaagcaaaagagaaa

SEQ ID NO: 2480756 - RNA, 19 nt, Homo sapiens
  misc_RNA (1)...(19): siRNA sense strand
aguccuuggugcagaauaa

SEQ ID NO: 2480757 - RNA, 19 nt, Homo sapiens
  misc_RNA (1)...(19): siRNA sense strand
aggaagacuaugaaguaaa

SEQ ID NO: 2480758 - RNA, 19 nt, Homo sapiens
  misc_RNA (1)...(19): siRNA sense strand
agaaggagaaggagccaaa

SEQ ID NO: 2480759 - RNA, 19 nt, Homo sapiens
  misc_RNA (1)...(19): siRNA sense strand
gcccagaaauugagcccaa

SEQ ID NO: 2480760 - RNA, 19 nt, Homo sapiens
  misc_RNA (1)...(19): siRNA sense strand
cgggcaaggaugaggauga

SEQ ID NO: 2480761 - RNA, 19 nt, Homo sapiens
  misc_RNA (1)...(19): siRNA sense strand
acagagaagaggagcaaga

SEQ ID NO: 2480762 - RNA, 19 nt, Homo sapiens
  misc_RNA (1)...(19): siRNA sense strand
gggacauuggcgagggcaa

SEQ ID NO: 2480763 - RNA, 19 nt, Homo sapiens
  misc_RNA (1)...(19): siRNA sense strand
aggaagugcugaaggaagu

SEQ ID NO: 2480764 - RNA, 19 nt, Homo sapiens
  misc_RNA (1)...(19): siRNA sense strand
ccagucaugaagagggaua

SEQ ID NO: 2480765 - RNA, 19 nt, Homo sapiens
  misc_RNA (1)...(19): siRNA sense strand
cagccaaaguaacaggcaa

SEQ ID NO: 2480766 - RNA, 19 nt, Homo sapiens
  misc_RNA (1)...(19): siRNA sense strand
aggaagugguggagucuga

SEQ ID NO: 2480767 - RNA, 19 nt, Homo sapiens
  misc_RNA (1)...(19): siRNA sense strand
ccacagagaagaggagcaa

SEQ ID NO: 2480768 - RNA, 19 nt, Homo sapiens
  misc_RNA (1)...(19): siRNA sense strand
gcauggagacgacgggcaa

SEQ ID NO: 2480769 - RNA, 19 nt, Homo sapiens
  misc_RNA (1)...(19): siRNA sense strand
gccgaaaccuagcggguga

SEQ ID NO: 2480770 - RNA, 19 nt, Homo sapiens
  misc_RNA (1)...(19): siRNA sense strand
ccgagaagagugauggaga

SEQ ID NO: 2480771 - RNA, 19 nt, Homo sapiens
  misc_RNA (1)...(19): siRNA sense strand
aggaagggcaggaggaagu

SEQ ID NO: 2480772 - RNA, 19 nt, Homo sapiens
  misc_RNA (1)...(19): siRNA sense strand
uggaaauguuuaugaccau

SEQ ID NO: 2480773 - RNA, 19 nt, Homo sapiens
  misc_RNA (1)...(19): siRNA sense strand
gaagagugauggagaccca

SEQ ID NO: 2480774 - RNA, 19 nt, Homo sapiens
  misc_RNA (1)...(19): siRNA sense strand
aggaugaggagaaagggaa

SEQ ID NO: 2480775 - RNA, 19 nt, Homo sapiens
  misc_RNA (1)...(19): siRNA sense strand
cagucaacacaaagaaaga

SEQ ID NO: 2480776 - RNA, 19 nt, Homo sapiens
  misc_RNA (1)...(19): siRNA sense strand
aggaggaagugcugaagga

SEQ ID NO: 2480777 - RNA, 19 nt, Homo sapiens
  misc_RNA (1)...(19): siRNA sense strand
aggacauuaucaagagaca

SEQ ID NO: 2480778 - RNA, 19 nt, Homo sapiens
  misc_RNA (1)...(19): siRNA sense strand
agaagaagaggaaugggua

SEQ ID NO: 2480779 - RNA, 19 nt, Homo sapiens
  misc_RNA (1)...(19): siRNA sense strand
cugaugagccugagcggau

SEQ ID NO: 2480780 - RNA, 19 nt, Homo sapiens
  misc_RNA (1)...(19): siRNA sense strand
guacaaagaugacuggaac

SEQ ID NO: 2480781 - RNA, 19 nt, Homo sapiens
  misc_RNA (1)...(19): siRNA sense strand
ggaacaaaguguccgagca

SEQ ID NO: 2480782 - RNA, 19 nt, Homo sapiens
  misc_RNA (1)...(19): siRNA sense strand
caaaaugaaggaagaggua

SEQ ID NO: 2480783 - RNA, 19 nt, Homo sapiens
  misc_RNA (1)...(19): siRNA sense strand
guggaaauguuuaugacca

SEQ ID NO: 2480784 - RNA, 19 nt, Homo sapiens
  misc_RNA (1)...(19): siRNA sense strand
uggaugaacaggaagauga

SEQ ID NO: 2480785 - RNA, 19 nt, Homo sapiens
  misc_RNA (1)...(19): siRNA sense strand
acaaagaugacuggaacaa

SEQ ID NO: 2480786 - RNA, 19 nt, Homo sapiens
  misc_RNA (1)...(19): siRNA sense strand
ccagaagcaaagaagaaaa

SEQ ID NO: 2480787 - RNA, 19 nt, Homo sapiens
  misc_RNA (1)...(19): siRNA sense strand
cugacaaaggcaaagagaa

SEQ ID NO: 2480788 - RNA, 19 nt, Homo sapiens
  misc_RNA (1)...(19): siRNA sense strand
guggagacccagaugaaaa

SEQ ID NO: 2480789 - RNA, 19 nt, Homo sapiens
  misc_RNA (1)...(19): siRNA sense strand
uagggaaauuaaaggacau

SEQ ID NO: 2480790 - RNA, 19 nt, Homo sapiens
  misc_RNA (1)...(19): siRNA sense strand
guauauacaagcugaacca

SEQ ID NO: 2480791 - RNA, 19 nt, Homo sapiens
  misc_RNA (1)...(19): siRNA sense strand
ggcaagaacaaguccaaga

SEQ ID NO: 2480792 - RNA, 19 nt, Homo sapiens
  misc_RNA (1)...(19): siRNA sense strand
uggaaauguacaaagauga

SEQ ID NO: 2480793 - RNA, 19 nt, Homo sapiens
  misc_RNA (1)...(19): siRNA sense strand
augagaagaaggagcccaa

SEQ ID NO: 2480794 - RNA, 19 nt, Homo sapiens
  misc_RNA (1)...(19): siRNA sense strand
cgagugaaauugaggcauc

SEQ ID NO: 2480795 - RNA, 19 nt, Homo sapiens
  misc_RNA (1)...(19): siRNA sense strand
cagccaagacacugacaga

SEQ ID NO: 2480796 - RNA, 19 nt, Homo sapiens
  misc_RNA (1)...(19): siRNA sense strand
ggacagaacaggaaacccu

SEQ ID NO: 2480797 - RNA, 19 nt, Homo sapiens
  misc_RNA (1)...(19): siRNA sense strand
aguggaagaagcagccaaa

SEQ ID NO: 2480798 - RNA, 19 nt, Homo sapiens
  misc_RNA (1)...(19): siRNA sense strand
aggccacagaugagaagaa

SEQ ID NO: 2480799 - RNA, 19 nt, Homo sapiens
  misc_RNA (1)...(19): siRNA sense strand
cuagggaaauuaaaggaca

SEQ ID NO: 2480800 - RNA, 19 nt, Homo sapiens
  misc_RNA (1)...(19): siRNA sense strand
uguacaaagaugacuggaa

SEQ ID NO: 2480801 - RNA, 19 nt, Homo sapiens
  misc_RNA (1)...(19): siRNA sense strand
agaaagggaaagaaggcga

SEQ ID NO: 2480802 - RNA, 19 nt, Homo sapiens
  misc_RNA (1)...(19): siRNA sense strand
gaagaugaaagcauggaga

SEQ ID NO: 2480803 - RNA, 19 nt, Homo sapiens
  misc_RNA (1)...(19): siRNA sense strand
gugagaaggaguccgagaa

SEQ ID NO: 2480804 - RNA, 19 nt, Homo sapiens
  misc_RNA (1)...(19): siRNA sense strand
ccccagaagcaaagaagaa

SEQ ID NO: 2480805 - RNA, 19 nt, Homo sapiens
  misc_RNA (1)...(19): siRNA sense strand
agaacaugcaauugaagaa

SEQ ID NO: 2480806 - RNA, 19 nt, Homo sapiens
  misc_RNA (1)...(19): siRNA sense strand
cagccaacugugaggaauu

SEQ ID NO: 2480807 - RNA, 19 nt, Homo sapiens
  misc_RNA (1)...(19): siRNA sense strand
cauagagauuugaagccua

SEQ ID NO: 2480808 - RNA, 19 nt, Homo sapiens
  misc_RNA (1)...(19): siRNA sense strand
aagaauggaaagagcuaau

SEQ ID NO: 2480809 - RNA, 19 nt, Homo sapiens
  misc_RNA (1)...(19): siRNA sense strand
guuggaagaaagagaacau

SEQ ID NO: 2480810 - RNA, 19 nt, Homo sapiens
  misc_RNA (1)...(19): siRNA sense strand
ccugaagauccuugacuuu

SEQ ID NO: 2480811 - RNA, 19 nt, Homo sapiens
  misc_RNA (1)...(19): siRNA sense strand
cgacaguaaaugugacagu

SEQ ID NO: 2480812 - RNA, 19 nt, Homo sapiens
  misc_RNA (1)...(19): siRNA sense strand
acucaugcaaagagagcuu

SEQ ID NO: 2480813 - RNA, 19 nt, Homo sapiens
  misc_RNA (1)...(19): siRNA sense strand
agaaucugagcgagacaaa

SEQ ID NO: 2480814 - RNA, 19 nt, Homo sapiens
  misc_RNA (1)...(19): siRNA sense strand
ugcaauugaagaauggaaa

SEQ ID NO: 2480815 - RNA, 19 nt, Homo sapiens
  misc_RNA (1)...(19): siRNA sense strand
aagaaagagaacaugcaau

SEQ ID NO: 2480816 - RNA, 19 nt, Homo sapiens
  misc_RNA (1)...(19): siRNA sense strand
caaagagagcuuaucguga

SEQ ID NO: 2480817 - RNA, 19 nt, Homo sapiens
  misc_RNA (1)...(19): siRNA sense strand
cgaaaacagaccaaaguau

SEQ ID NO: 2480818 - RNA, 19 nt, Homo sapiens
  misc_RNA (1)...(19): siRNA sense strand
gcuuugugguauuaaacau

SEQ ID NO: 2480819 - RNA, 19 nt, Homo sapiens
  misc_RNA (1)...(19): siRNA sense strand
ugggaagaaagaagcaaga

SEQ ID NO: 2480820 - RNA, 19 nt, Homo sapiens
  misc_RNA (1)...(19): siRNA sense strand
guguauuugguuauggaau

SEQ ID NO: 2480821 - RNA, 19 nt, Homo sapiens
  misc_RNA (1)...(19): siRNA sense strand
gugaggaauuaugucgaaa

SEQ ID NO: 2480822 - RNA, 19 nt, Homo sapiens
  misc_RNA (1)...(19): siRNA sense strand
gguuauggaauuaauggau

SEQ ID NO: 2480823 - RNA, 19 nt, Homo sapiens
  misc_RNA (1)...(19): siRNA sense strand
ccaaaguauccuggaauca

SEQ ID NO: 2480824 - RNA, 19 nt, Homo sapiens
  misc_RNA (1)...(19): siRNA sense strand
caauugaagaauggaaaga

SEQ ID NO: 2480825 - RNA, 19 nt, Homo sapiens
  misc_RNA (1)...(19): siRNA sense strand
gcugaaaccaauuggcucu

SEQ ID NO: 2480826 - RNA, 19 nt, Homo sapiens
  misc_RNA (1)...(19): siRNA sense strand
gaacguugauaucugguca

SEQ ID NO: 2480827 - RNA, 19 nt, Homo sapiens
  misc_RNA (1)...(19): siRNA sense strand
agaacaugcaauugaagaa

SEQ ID NO: 2480828 - RNA, 19 nt, Homo sapiens
  misc_RNA (1)...(19): siRNA sense strand
cagccaacugugaggaauu

SEQ ID NO: 2480829 - RNA, 19 nt, Homo sapiens
  misc_RNA (1)...(19): siRNA sense strand
cauagagauuugaagccua

SEQ ID NO: 2480830 - RNA, 19 nt, Homo sapiens
  misc_RNA (1)...(19): siRNA sense strand
aagaauggaaagagcuaau

SEQ ID NO: 2480831 - RNA, 19 nt, Homo sapiens
  misc_RNA (1)...(19): siRNA sense strand
guuggaagaaagagaacau

SEQ ID NO: 2480832 - RNA, 19 nt, Homo sapiens
  misc_RNA (1)...(19): siRNA sense strand
ccugaagauccuugacuuu

SEQ ID NO: 2480833 - RNA, 19 nt, Homo sapiens
  misc_RNA (1)...(19): siRNA sense strand
cgacaguaaaugugacagu

SEQ ID NO: 2480834 - RNA, 19 nt, Homo sapiens
  misc_RNA (1)...(19): siRNA sense strand
acucaugcaaagagagcuu

SEQ ID NO: 2480835 - RNA, 19 nt, Homo sapiens
  misc_RNA (1)...(19): siRNA sense strand
agaaucugagcgagacaaa

SEQ ID NO: 2480836 - RNA, 19 nt, Homo sapiens
  misc_RNA (1)...(19): siRNA sense strand
ugcaauugaagaauggaaa

SEQ ID NO: 2480837 - RNA, 19 nt, Homo sapiens
  misc_RNA (1)...(19): siRNA sense strand
aagaaagagaacaugcaau

SEQ ID NO: 2480838 - RNA, 19 nt, Homo sapiens
  misc_RNA (1)...(19): siRNA sense strand
caaagagagcuuaucguga

SEQ ID NO: 2480839 - RNA, 19 nt, Homo sapiens
  misc_RNA (1)...(19): siRNA sense strand
cgaaaacagaccaaaguau

SEQ ID NO: 2480840 - RNA, 19 nt, Homo sapiens
  misc_RNA (1)...(19): siRNA sense strand
gcuuugugguauuaaacau

SEQ ID NO: 2480841 - RNA, 19 nt, Homo sapiens
  misc_RNA (1)...(19): siRNA sense strand
ugggaagaaagaagcaaga

SEQ ID NO: 2480842 - RNA, 19 nt, Homo sapiens
  misc_RNA (1)...(19): siRNA sense strand
guguauuugguuauggaau

SEQ ID NO: 2480843 - RNA, 19 nt, Homo sapiens
  misc_RNA (1)...(19): siRNA sense strand
gugaggaauuaugucgaaa

SEQ ID NO: 2480844 - RNA, 19 nt, Homo sapiens
  misc_RNA (1)...(19): siRNA sense strand
gguuauggaauuaauggau

SEQ ID NO: 2480845 - RNA, 19 nt, Homo sapiens
  misc_RNA (1)...(19): siRNA sense strand
ccaaaguauccuggaauca

SEQ ID NO: 2480846 - RNA, 19 nt, Homo sapiens
  misc_RNA (1)...(19): siRNA sense strand
caauugaagaauggaaaga

SEQ ID NO: 2480847 - RNA, 19 nt, Homo sapiens
  misc_RNA (1)...(19): siRNA sense strand
gcugaaaccaauuggcucu

SEQ ID NO: 2480848 - RNA, 19 nt, Homo sapiens
  misc_RNA (1)...(19): siRNA sense strand
gaacguugauaucugguca

SEQ ID NO: 2480849 - RNA, 19 nt, Homo sapiens
  misc_RNA (1)...(19): siRNA sense strand
agaacaugcaauugaagaa

SEQ ID NO: 2480850 - RNA, 19 nt, Homo sapiens
  misc_RNA (1)...(19): siRNA sense strand
cagccaacugugaggaauu

SEQ ID NO: 2480851 - RNA, 19 nt, Homo sapiens
  misc_RNA (1)...(19): siRNA sense strand
cauagagauuugaagccua

SEQ ID NO: 2480852 - RNA, 19 nt, Homo sapiens
  misc_RNA (1)...(19): siRNA sense strand
aagaauggaaagagcuaau

SEQ ID NO: 2480853 - RNA, 19 nt, Homo sapiens
  misc_RNA (1)...(19): siRNA sense strand
guuggaagaaagagaacau

SEQ ID NO: 2480854 - RNA, 19 nt, Homo sapiens
  misc_RNA (1)...(19): siRNA sense strand
ccugaagauccuugacuuu

SEQ ID NO: 2480855 - RNA, 19 nt, Homo sapiens
  misc_RNA (1)...(19): siRNA sense strand
cgacaguaaaugugacagu

SEQ ID NO: 2480856 - RNA, 19 nt, Homo sapiens
  misc_RNA (1)...(19): siRNA sense strand
acucaugcaaagagagcuu

SEQ ID NO: 2480857 - RNA, 19 nt, Homo sapiens
  misc_RNA (1)...(19): siRNA sense strand
agaaucugagcgagacaaa

SEQ ID NO: 2480858 - RNA, 19 nt, Homo sapiens
  misc_RNA (1)...(19): siRNA sense strand
ugcaauugaagaauggaaa

SEQ ID NO: 2480859 - RNA, 19 nt, Homo sapiens
  misc_RNA (1)...(19): siRNA sense strand
aagaaagagaacaugcaau

SEQ ID NO: 2480860 - RNA, 19 nt, Homo sapiens
  misc_RNA (1)...(19): siRNA sense strand
caaagagagcuuaucguga

SEQ ID NO: 2480861 - RNA, 19 nt, Homo sapiens
  misc_RNA (1)...(19): siRNA sense strand
cgaaaacagaccaaaguau

SEQ ID NO: 2480862 - RNA, 19 nt, Homo sapiens
  misc_RNA (1)...(19): siRNA sense strand
gcuuugugguauuaaacau

SEQ ID NO: 2480863 - RNA, 19 nt, Homo sapiens
  misc_RNA (1)...(19): siRNA sense strand
ugggaagaaagaagcaaga

SEQ ID NO: 2480864 - RNA, 19 nt, Homo sapiens
  misc_RNA (1)...(19): siRNA sense strand
guguauuugguuauggaau

SEQ ID NO: 2480865 - RNA, 19 nt, Homo sapiens
  misc_RNA (1)...(19): siRNA sense strand
gugaggaauuaugucgaaa

SEQ ID NO: 2480866 - RNA, 19 nt, Homo sapiens
  misc_RNA (1)...(19): siRNA sense strand
gguuauggaauuaauggau

SEQ ID NO: 2480867 - RNA, 19 nt, Homo sapiens
  misc_RNA (1)...(19): siRNA sense strand
ccaaaguauccuggaauca

SEQ ID NO: 2480868 - RNA, 19 nt, Homo sapiens
  misc_RNA (1)...(19): siRNA sense strand
caauugaagaauggaaaga

SEQ ID NO: 2480869 - RNA, 19 nt, Homo sapiens
  misc_RNA (1)...(19): siRNA sense strand
gcugaaaccaauuggcucu

SEQ ID NO: 2480870 - RNA, 19 nt, Homo sapiens
  misc_RNA (1)...(19): siRNA sense strand
gaacguugauaucugguca

SEQ ID NO: 2480871 - RNA, 19 nt, Homo sapiens
  misc_RNA (1)...(19): siRNA sense strand
agaacaugcaauugaagaa

SEQ ID NO: 2480872 - RNA, 19 nt, Homo sapiens
  misc_RNA (1)...(19): siRNA sense strand
cagccaacugugaggaauu

SEQ ID NO: 2480873 - RNA, 19 nt, Homo sapiens
  misc_RNA (1)...(19): siRNA sense strand
cauagagauuugaagccua

SEQ ID NO: 2480874 - RNA, 19 nt, Homo sapiens
  misc_RNA (1)...(19): siRNA sense strand
aagaauggaaagagcuaau

SEQ ID NO: 2480875 - RNA, 19 nt, Homo sapiens
  misc_RNA (1)...(19): siRNA sense strand
guuggaagaaagagaacau

SEQ ID NO: 2480876 - RNA, 19 nt, Homo sapiens
  misc_RNA (1)...(19): siRNA sense strand
ccugaagauccuugacuuu

SEQ ID NO: 2480877 - RNA, 19 nt, Homo sapiens
  misc_RNA (1)...(19): siRNA sense strand
cgacaguaaaugugacagu

SEQ ID NO: 2480878 - RNA, 19 nt, Homo sapiens
  misc_RNA (1)...(19): siRNA sense strand
acucaugcaaagagagcuu

SEQ ID NO: 2480879 - RNA, 19 nt, Homo sapiens
  misc_RNA (1)...(19): siRNA sense strand
agaaucugagcgagacaaa

SEQ ID NO: 2480880 - RNA, 19 nt, Homo sapiens
  misc_RNA (1)...(19): siRNA sense strand
ugcaauugaagaauggaaa

SEQ ID NO: 2480881 - RNA, 19 nt, Homo sapiens
  misc_RNA (1)...(19): siRNA sense strand
aagaaagagaacaugcaau

SEQ ID NO: 2480882 - RNA, 19 nt, Homo sapiens
  misc_RNA (1)...(19): siRNA sense strand
caaagagagcuuaucguga

SEQ ID NO: 2480883 - RNA, 19 nt, Homo sapiens
  misc_RNA (1)...(19): siRNA sense strand
cgaaaacagaccaaaguau

SEQ ID NO: 2480884 - RNA, 19 nt, Homo sapiens
  misc_RNA (1)...(19): siRNA sense strand
gcuuugugguauuaaacau

SEQ ID NO: 2480885 - RNA, 19 nt, Homo sapiens
  misc_RNA (1)...(19): siRNA sense strand
ugggaagaaagaagcaaga

SEQ ID NO: 2480886 - RNA, 19 nt, Homo sapiens
  misc_RNA (1)...(19): siRNA sense strand
guguauuugguuauggaau

SEQ ID NO: 2480887 - RNA, 19 nt, Homo sapiens
  misc_RNA (1)...(19): siRNA sense strand
gugaggaauuaugucgaaa

SEQ ID NO: 2480888 - RNA, 19 nt, Homo sapiens
  misc_RNA (1)...(19): siRNA sense strand
gguuauggaauuaauggau

SEQ ID NO: 2480889 - RNA, 19 nt, Homo sapiens
  misc_RNA (1)...(19): siRNA sense strand
ccaaaguauccuggaauca

SEQ ID NO: 2480890 - RNA, 19 nt, Homo sapiens
  misc_RNA (1)...(19): siRNA sense strand
caauugaagaauggaaaga

SEQ ID NO: 2480891 - RNA, 19 nt, Homo sapiens
  misc_RNA (1)...(19): siRNA sense strand
gcugaaaccaauuggcucu

SEQ ID NO: 2480892 - RNA, 19 nt, Homo sapiens
  misc_RNA (1)...(19): siRNA sense strand
gaacguugauaucugguca

SEQ ID NO: 2480893 - RNA, 19 nt, Homo sapiens
  misc_RNA (1)...(19): siRNA sense strand
gggauuaauuucaacgaga

SEQ ID NO: 2480894 - RNA, 19 nt, Homo sapiens
  misc_RNA (1)...(19): siRNA sense strand
aggugaugucagaguuuaa

SEQ ID NO: 2480895 - RNA, 19 nt, Homo sapiens
  misc_RNA (1)...(19): siRNA sense strand
acacagauugggagaaaau

SEQ ID NO: 2480896 - RNA, 19 nt, Homo sapiens
  misc_RNA (1)...(19): siRNA sense strand
uggacaggaugcaggcaga

SEQ ID NO: 2480897 - RNA, 19 nt, Homo sapiens
  misc_RNA (1)...(19): siRNA sense strand
guguuuagagauaagguga

SEQ ID NO: 2480898 - RNA, 19 nt, Homo sapiens
  misc_RNA (1)...(19): siRNA sense strand
guggcuacgaggugaugua

SEQ ID NO: 2480899 - RNA, 19 nt, Homo sapiens
  misc_RNA (1)...(19): siRNA sense strand
acgccaaggcuguggugaa

SEQ ID NO: 2480900 - RNA, 19 nt, Homo sapiens
  misc_RNA (1)...(19): siRNA sense strand
ucgagaugauccugagcau

SEQ ID NO: 2480901 - RNA, 19 nt, Homo sapiens
  misc_RNA (1)...(19): siRNA sense strand
ucgccaaggaugugaagca

SEQ ID NO: 2480902 - RNA, 19 nt, Homo sapiens
  misc_RNA (1)...(19): siRNA sense strand
aggccgugguggaugauga

SEQ ID NO: 2480903 - RNA, 19 nt, Homo sapiens
  misc_RNA (1)...(19): siRNA sense strand
ccaacaacgccaaggcugu

SEQ ID NO: 2480904 - RNA, 19 nt, Homo sapiens
  misc_RNA (1)...(19): siRNA sense strand
aggcuguggugaagaccuu

SEQ ID NO: 2480905 - RNA, 19 nt, Homo sapiens
  misc_RNA (1)...(19): siRNA sense strand
gaguaaaugaagugccuga

SEQ ID NO: 2480906 - RNA, 19 nt, Homo sapiens
  misc_RNA (1)...(19): siRNA sense strand
gggagauacuguugccuca

SEQ ID NO: 2480907 - RNA, 19 nt, Homo sapiens
  misc_RNA (1)...(19): siRNA sense strand
cuucaugaucauugcaauu

SEQ ID NO: 2480908 - RNA, 19 nt, Homo sapiens
  misc_RNA (1)...(19): siRNA sense strand
cuggaauaacuauguacaa

SEQ ID NO: 2480909 - RNA, 19 nt, Homo sapiens
  misc_RNA (1)...(19): siRNA sense strand
cagaguaaaugaagugccu

SEQ ID NO: 2480910 - RNA, 19 nt, Homo sapiens
  misc_RNA (1)...(19): siRNA sense strand
ccacaguaaccgaacaacu

SEQ ID NO: 2480911 - RNA, 19 nt, Homo sapiens
  misc_RNA (1)...(19): siRNA sense strand
aagauauggcagugagaga

SEQ ID NO: 2480912 - RNA, 19 nt, Homo sapiens
  misc_RNA (1)...(19): siRNA sense strand
cgaaaaugggagaagaaga

SEQ ID NO: 2480913 - RNA, 19 nt, Homo sapiens
  misc_RNA (1)...(19): siRNA sense strand
gggacaguugggugcguua

SEQ ID NO: 2480914 - RNA, 19 nt, Homo sapiens
  misc_RNA (1)...(19): siRNA sense strand
aguuggaauucaaugacaa

SEQ ID NO: 2480915 - RNA, 19 nt, Homo sapiens
  misc_RNA (1)...(19): siRNA sense strand
aagaugugguauuuggcaa

SEQ ID NO: 2480916 - RNA, 19 nt, Homo sapiens
  misc_RNA (1)...(19): siRNA sense strand
gcaaaauugauacgaggaa

SEQ ID NO: 2480917 - RNA, 19 nt, Homo sapiens
  misc_RNA (1)...(19): siRNA sense strand
ugggagaagaagaauaaaa

SEQ ID NO: 2480918 - RNA, 19 nt, Homo sapiens
  misc_RNA (1)...(19): siRNA sense strand
uggcagugagagaccauaa

SEQ ID NO: 2480919 - RNA, 19 nt, Homo sapiens
  misc_RNA (1)...(19): siRNA sense strand
ggacaauugcuguggcgua

SEQ ID NO: 2480920 - RNA, 19 nt, Homo sapiens
  misc_RNA (1)...(19): siRNA sense strand
ggaaaauucuucuggcgua

SEQ ID NO: 2480921 - RNA, 19 nt, Homo sapiens
  misc_RNA (1)...(19): siRNA sense strand
ggcucaugcuccaggacaa

SEQ ID NO: 2480922 - RNA, 19 nt, Homo sapiens
  misc_RNA (1)...(19): siRNA sense strand
aaugaugaccaguggaaaa

SEQ ID NO: 2480923 - RNA, 19 nt, Homo sapiens
  misc_RNA (1)...(19): siRNA sense strand
ccuuccggacugagaauaa

SEQ ID NO: 2480924 - RNA, 19 nt, Homo sapiens
  misc_RNA (1)...(19): siRNA sense strand
gguccaucagacuggcaaa

SEQ ID NO: 2480925 - RNA, 19 nt, Homo sapiens
  misc_RNA (1)...(19): siRNA sense strand
gggacaggcucaugcucca

SEQ ID NO: 2480926 - RNA, 19 nt, Homo sapiens
  misc_RNA (1)...(19): siRNA sense strand
augaaguccagcaggaaaa

SEQ ID NO: 2480927 - RNA, 19 nt, Homo sapiens
  misc_RNA (1)...(19): siRNA sense strand
gaucauaacaaacggguca

SEQ ID NO: 2480928 - RNA, 19 nt, Homo sapiens
  misc_RNA (1)...(19): siRNA sense strand
ccacauaggccgaauggca

SEQ ID NO: 2480929 - RNA, 19 nt, Homo sapiens
  misc_RNA (1)...(19): siRNA sense strand
cuguaggucagcagacaua

SEQ ID NO: 2480930 - RNA, 19 nt, Homo sapiens
  misc_RNA (1)...(19): siRNA sense strand
acaaacgggucauuggcaa

SEQ ID NO: 2480931 - RNA, 19 nt, Homo sapiens
  misc_RNA (1)...(19): siRNA sense strand
ccauuacaccagugaagau

SEQ ID NO: 2480932 - RNA, 19 nt, Homo sapiens
  misc_RNA (1)...(19): siRNA sense strand
caccagugaagaugaggaa

SEQ ID NO: 2480933 - RNA, 19 nt, Homo sapiens
  misc_RNA (1)...(19): siRNA sense strand
caacguggaaagugagcca

SEQ ID NO: 2480934 - RNA, 19 nt, Homo sapiens
  misc_RNA (1)...(19): siRNA sense strand
uggcugggcaagaggccua

SEQ ID NO: 2480935 - RNA, 19 nt, Homo sapiens
  misc_RNA (1)...(19): siRNA sense strand
guggugugcuacugcggaa

SEQ ID NO: 2480936 - RNA, 19 nt, Homo sapiens
  misc_RNA (1)...(19): siRNA sense strand
gcggaaggugaauggcaca

SEQ ID NO: 2480937 - RNA, 19 nt, Homo sapiens
  misc_RNA (1)...(19): siRNA sense strand
gugcuagagagguaggaaa

SEQ ID NO: 2480938 - RNA, 19 nt, Homo sapiens
  misc_RNA (1)...(19): siRNA sense strand
gugaagagauccagccaca

SEQ ID NO: 2480939 - RNA, 19 nt, Homo sapiens
  misc_RNA (1)...(19): siRNA sense strand
cagaagaggaggagcgugu

SEQ ID NO: 2480940 - RNA, 19 nt, Homo sapiens
  misc_RNA (1)...(19): siRNA sense strand
ggucaguggaggugagagu

SEQ ID NO: 2480941 - RNA, 19 nt, Homo sapiens
  misc_RNA (1)...(19): siRNA sense strand
ggaagagacuccagcagca

SEQ ID NO: 2480942 - RNA, 19 nt, Homo sapiens
  misc_RNA (1)...(19): siRNA sense strand
cuauagagagagaagaaca

SEQ ID NO: 2480943 - RNA, 19 nt, Homo sapiens
  misc_RNA (1)...(19): siRNA sense strand
caacucagaucaaggccua

SEQ ID NO: 2480944 - RNA, 19 nt, Homo sapiens
  misc_RNA (1)...(19): siRNA sense strand
caaccuacuaaaugaacaa

SEQ ID NO: 2480945 - RNA, 19 nt, Homo sapiens
  misc_RNA (1)...(19): siRNA sense strand
accuauagagagagaagaa

SEQ ID NO: 2480946 - RNA, 19 nt, Homo sapiens
  misc_RNA (1)...(19): siRNA sense strand
aggagguagagaagguuaa

SEQ ID NO: 2480947 - RNA, 19 nt, Homo sapiens
  misc_RNA (1)...(19): siRNA sense strand
gcacaaaggaagagacucc

SEQ ID NO: 2480948 - RNA, 19 nt, Homo sapiens
  misc_RNA (1)...(19): siRNA sense strand
ccuuaauuguuucuggcaa

SEQ ID NO: 2480949 - RNA, 19 nt, Homo sapiens
  misc_RNA (1)...(19): siRNA sense strand
uugaggaacuacuggccaa

SEQ ID NO: 2480950 - RNA, 19 nt, Homo sapiens
  misc_RNA (1)...(19): siRNA sense strand
gaacaacaucagauagcga

SEQ ID NO: 2480951 - RNA, 19 nt, Homo sapiens
  misc_RNA (1)...(19): siRNA sense strand
ugcuagagagguaggaaau

SEQ ID NO: 2480952 - RNA, 19 nt, Homo sapiens
  misc_RNA (1)...(19): siRNA sense strand
cugugaagauugugagccu

SEQ ID NO: 2480953 - RNA, 19 nt, Homo sapiens
  misc_RNA (1)...(19): siRNA sense strand
ggccaguagcaccaggaua

SEQ ID NO: 2480954 - RNA, 19 nt, Homo sapiens
  misc_RNA (1)...(19): siRNA sense strand
agcagaaggagguagagaa

SEQ ID NO: 2480955 - RNA, 19 nt, Homo sapiens
  misc_RNA (1)...(19): siRNA sense strand
auuuagaggaaguugucaa

SEQ ID NO: 2480956 - RNA, 19 nt, Homo sapiens
  misc_RNA (1)...(19): siRNA sense strand
aggaggagcguguggcuga

SEQ ID NO: 2480957 - RNA, 19 nt, Homo sapiens
  misc_RNA (1)...(19): siRNA sense strand
aggaaguugucaagaugga

SEQ ID NO: 2480958 - RNA, 19 nt, Homo sapiens
  misc_RNA (1)...(19): siRNA sense strand
ggacauugcuugugcugug

SEQ ID NO: 2480959 - RNA, 19 nt, Homo sapiens
  misc_RNA (1)...(19): siRNA sense strand
ccaaacagcagaaggaggu

SEQ ID NO: 2480960 - RNA, 19 nt, Homo sapiens
  misc_RNA (1)...(19): siRNA sense strand
cugaagaugaagaaaccuu

SEQ ID NO: 2480961 - RNA, 19 nt, Homo sapiens
  misc_RNA (1)...(19): siRNA sense strand
caggaagaacugcggcaca

SEQ ID NO: 2480962 - RNA, 19 nt, Homo sapiens
  misc_RNA (1)...(19): siRNA sense strand
cagcugaagaugaagaaac

SEQ ID NO: 2480963 - RNA, 19 nt, Homo sapiens
  misc_RNA (1)...(19): siRNA sense strand
cagcacaaaggaagagacu

SEQ ID NO: 2480964 - RNA, 19 nt, Homo sapiens
  misc_RNA (1)...(19): siRNA sense strand
cuggaaccacugagaucaa

SEQ ID NO: 2480965 - RNA, 19 nt, Homo sapiens
  misc_RNA (1)...(19): siRNA sense strand
gcaaaauggugcuccggau

SEQ ID NO: 2480966 - RNA, 19 nt, Homo sapiens
  misc_RNA (1)...(19): siRNA sense strand
gugcuagagagguaggaaa

SEQ ID NO: 2480967 - RNA, 19 nt, Homo sapiens
  misc_RNA (1)...(19): siRNA sense strand
gugaagagauccagccaca

SEQ ID NO: 2480968 - RNA, 19 nt, Homo sapiens
  misc_RNA (1)...(19): siRNA sense strand
cagaagaggaggagcgugu

SEQ ID NO: 2480969 - RNA, 19 nt, Homo sapiens
  misc_RNA (1)...(19): siRNA sense strand
ggucaguggaggugagagu

SEQ ID NO: 2480970 - RNA, 19 nt, Homo sapiens
  misc_RNA (1)...(19): siRNA sense strand
ggaagagacuccagcagca

SEQ ID NO: 2480971 - RNA, 19 nt, Homo sapiens
  misc_RNA (1)...(19): siRNA sense strand
cuauagagagagaagaaca

SEQ ID NO: 2480972 - RNA, 19 nt, Homo sapiens
  misc_RNA (1)...(19): siRNA sense strand
caacucagaucaaggccua

SEQ ID NO: 2480973 - RNA, 19 nt, Homo sapiens
  misc_RNA (1)...(19): siRNA sense strand
caaccuacuaaaugaacaa

SEQ ID NO: 2480974 - RNA, 19 nt, Homo sapiens
  misc_RNA (1)...(19): siRNA sense strand
gcaaaugagcugauggaag

SEQ ID NO: 2480975 - RNA, 19 nt, Homo sapiens
  misc_RNA (1)...(19): siRNA sense strand
accuauagagagagaagaa

SEQ ID NO: 2480976 - RNA, 19 nt, Homo sapiens
  misc_RNA (1)...(19): siRNA sense strand
aggagguagagaagguuaa

SEQ ID NO: 2480977 - RNA, 19 nt, Homo sapiens
  misc_RNA (1)...(19): siRNA sense strand
gcacaaaggaagagacucc

SEQ ID NO: 2480978 - RNA, 19 nt, Homo sapiens
  misc_RNA (1)...(19): siRNA sense strand
ccuuaauuguuucuggcaa

SEQ ID NO: 2480979 - RNA, 19 nt, Homo sapiens
  misc_RNA (1)...(19): siRNA sense strand
uugaggaacuacuggccaa

SEQ ID NO: 2480980 - RNA, 19 nt, Homo sapiens
  misc_RNA (1)...(19): siRNA sense strand
gaacaacaucagauagcga

SEQ ID NO: 2480981 - RNA, 19 nt, Homo sapiens
  misc_RNA (1)...(19): siRNA sense strand
ugcuagagagguaggaaau

SEQ ID NO: 2480982 - RNA, 19 nt, Homo sapiens
  misc_RNA (1)...(19): siRNA sense strand
cugugaagauugugagccu

SEQ ID NO: 2480983 - RNA, 19 nt, Homo sapiens
  misc_RNA (1)...(19): siRNA sense strand
ggccaguagcaccaggaua

SEQ ID NO: 2480984 - RNA, 19 nt, Homo sapiens
  misc_RNA (1)...(19): siRNA sense strand
agcagaaggagguagagaa

SEQ ID NO: 2480985 - RNA, 19 nt, Homo sapiens
  misc_RNA (1)...(19): siRNA sense strand
auuuagaggaaguugucaa

SEQ ID NO: 2480986 - RNA, 19 nt, Homo sapiens
  misc_RNA (1)...(19): siRNA sense strand
aggaggagcguguggcuga

SEQ ID NO: 2480987 - RNA, 19 nt, Homo sapiens
  misc_RNA (1)...(19): siRNA sense strand
auggaagaucuguuugaaa

SEQ ID NO: 2480988 - RNA, 19 nt, Homo sapiens
  misc_RNA (1)...(19): siRNA sense strand
aggaaguugucaagaugga

SEQ ID NO: 2480989 - RNA, 19 nt, Homo sapiens
  misc_RNA (1)...(19): siRNA sense strand
ggacauugcuugugcugug

SEQ ID NO: 2480990 - RNA, 19 nt, Homo sapiens
  misc_RNA (1)...(19): siRNA sense strand
ccaaacagcagaaggaggu

SEQ ID NO: 2480991 - RNA, 19 nt, Homo sapiens
  misc_RNA (1)...(19): siRNA sense strand
uccaagaugagaugggauu

SEQ ID NO: 2480992 - RNA, 19 nt, Homo sapiens
  misc_RNA (1)...(19): siRNA sense strand
cugaagaugaagaaaccuu

SEQ ID NO: 2480993 - RNA, 19 nt, Homo sapiens
  misc_RNA (1)...(19): siRNA sense strand
caggaagaacugcggcaca

SEQ ID NO: 2480994 - RNA, 19 nt, Homo sapiens
  misc_RNA (1)...(19): siRNA sense strand
cagcugaagaugaagaaac

SEQ ID NO: 2480995 - RNA, 19 nt, Homo sapiens
  misc_RNA (1)...(19): siRNA sense strand
cagcacaaaggaagagacu

SEQ ID NO: 2480996 - RNA, 19 nt, Homo sapiens
  misc_RNA (1)...(19): siRNA sense strand
cuggaaccacugagaucaa

SEQ ID NO: 2480997 - RNA, 19 nt, Homo sapiens
  misc_RNA (1)...(19): siRNA sense strand
gcaaaauggugcuccggau

SEQ ID NO: 2480998 - RNA, 19 nt, Homo sapiens
  misc_RNA (1)...(19): siRNA sense strand
aagcaaaugagcugaugga

SEQ ID NO: 2480999 - RNA, 19 nt, Homo sapiens
  misc_RNA (1)...(19): siRNA sense strand
gugcuagagagguaggaaa

SEQ ID NO: 2481000 - RNA, 19 nt, Homo sapiens
  misc_RNA (1)...(19): siRNA sense strand
gugaagagauccagccaca

SEQ ID NO: 2481001 - RNA, 19 nt, Homo sapiens
  misc_RNA (1)...(19): siRNA sense strand
cagaagaggaggagcgugu

SEQ ID NO: 2481002 - RNA, 19 nt, Homo sapiens
  misc_RNA (1)...(19): siRNA sense strand
ggucaguggaggugagagu

SEQ ID NO: 2481003 - RNA, 19 nt, Homo sapiens
  misc_RNA (1)...(19): siRNA sense strand
ggaagagacuccagcagca

SEQ ID NO: 2481004 - RNA, 19 nt, Homo sapiens
  misc_RNA (1)...(19): siRNA sense strand
cuauagagagagaagaaca

SEQ ID NO: 2481005 - RNA, 19 nt, Homo sapiens
  misc_RNA (1)...(19): siRNA sense strand
caacucagaucaaggccua

SEQ ID NO: 2481006 - RNA, 19 nt, Homo sapiens
  misc_RNA (1)...(19): siRNA sense strand
caaccuacuaaaugaacaa

SEQ ID NO: 2481007 - RNA, 19 nt, Homo sapiens
  misc_RNA (1)...(19): siRNA sense strand
accuauagagagagaagaa

SEQ ID NO: 2481008 - RNA, 19 nt, Homo sapiens
  misc_RNA (1)...(19): siRNA sense strand
aggagguagagaagguuaa

SEQ ID NO: 2481009 - RNA, 19 nt, Homo sapiens
  misc_RNA (1)...(19): siRNA sense strand
gcacaaaggaagagacucc

SEQ ID NO: 2481010 - RNA, 19 nt, Homo sapiens
  misc_RNA (1)...(19): siRNA sense strand
ccuuaauuguuucuggcaa

SEQ ID NO: 2481011 - RNA, 19 nt, Homo sapiens
  misc_RNA (1)...(19): siRNA sense strand
uugaggaacuacuggccaa

SEQ ID NO: 2481012 - RNA, 19 nt, Homo sapiens
  misc_RNA (1)...(19): siRNA sense strand
gaacaacaucagauagcga

SEQ ID NO: 2481013 - RNA, 19 nt, Homo sapiens
  misc_RNA (1)...(19): siRNA sense strand
ugcuagagagguaggaaau

SEQ ID NO: 2481014 - RNA, 19 nt, Homo sapiens
  misc_RNA (1)...(19): siRNA sense strand
cugugaagauugugagccu

SEQ ID NO: 2481015 - RNA, 19 nt, Homo sapiens
  misc_RNA (1)...(19): siRNA sense strand
ggccaguagcaccaggaua

SEQ ID NO: 2481016 - RNA, 19 nt, Homo sapiens
  misc_RNA (1)...(19): siRNA sense strand
agcagaaggagguagagaa

SEQ ID NO: 2481017 - RNA, 19 nt, Homo sapiens
  misc_RNA (1)...(19): siRNA sense strand
auuuagaggaaguugucaa

SEQ ID NO: 2481018 - RNA, 19 nt, Homo sapiens
  misc_RNA (1)...(19): siRNA sense strand
aggaggagcguguggcuga

SEQ ID NO: 2481019 - RNA, 19 nt, Homo sapiens
  misc_RNA (1)...(19): siRNA sense strand
aggaaguugucaagaugga

SEQ ID NO: 2481020 - RNA, 19 nt, Homo sapiens
  misc_RNA (1)...(19): siRNA sense strand
ggacauugcuugugcugug

SEQ ID NO: 2481021 - RNA, 19 nt, Homo sapiens
  misc_RNA (1)...(19): siRNA sense strand
ccaaacagcagaaggaggu

SEQ ID NO: 2481022 - RNA, 19 nt, Homo sapiens
  misc_RNA (1)...(19): siRNA sense strand
uccaagaugagaugggauu

SEQ ID NO: 2481023 - RNA, 19 nt, Homo sapiens
  misc_RNA (1)...(19): siRNA sense strand
cugaagaugaagaaaccuu

SEQ ID NO: 2481024 - RNA, 19 nt, Homo sapiens
  misc_RNA (1)...(19): siRNA sense strand
caggaagaacugcggcaca

SEQ ID NO: 2481025 - RNA, 19 nt, Homo sapiens
  misc_RNA (1)...(19): siRNA sense strand
cagcugaagaugaagaaac

SEQ ID NO: 2481026 - RNA, 19 nt, Homo sapiens
  misc_RNA (1)...(19): siRNA sense strand
cagcacaaaggaagagacu

SEQ ID NO: 2481027 - RNA, 19 nt, Homo sapiens
  misc_RNA (1)...(19): siRNA sense strand
cuggaaccacugagaucaa

SEQ ID NO: 2481028 - RNA, 19 nt, Homo sapiens
  misc_RNA (1)...(19): siRNA sense strand
gcaaaauggugcuccggau

SEQ ID NO: 2481029 - RNA, 19 nt, Homo sapiens
  misc_RNA (1)...(19): siRNA sense strand
gugcuagagagguaggaaa

SEQ ID NO: 2481030 - RNA, 19 nt, Homo sapiens
  misc_RNA (1)...(19): siRNA sense strand
gugaagagauccagccaca

SEQ ID NO: 2481031 - RNA, 19 nt, Homo sapiens
  misc_RNA (1)...(19): siRNA sense strand
ggucaguggaggugagagu

SEQ ID NO: 2481032 - RNA, 19 nt, Homo sapiens
  misc_RNA (1)...(19): siRNA sense strand
cuauagagagagaagaaca

SEQ ID NO: 2481033 - RNA, 19 nt, Homo sapiens
  misc_RNA (1)...(19): siRNA sense strand
caacucagaucaaggccua

SEQ ID NO: 2481034 - RNA, 19 nt, Homo sapiens
  misc_RNA (1)...(19): siRNA sense strand
accuauagagagagaagaa

SEQ ID NO: 2481035 - RNA, 19 nt, Homo sapiens
  misc_RNA (1)...(19): siRNA sense strand
ccuuaauuguuucuggcaa

SEQ ID NO: 2481036 - RNA, 19 nt, Homo sapiens
  misc_RNA (1)...(19): siRNA sense strand
ugcuagagagguaggaaau

SEQ ID NO: 2481037 - RNA, 19 nt, Homo sapiens
  misc_RNA (1)...(19): siRNA sense strand
cugugaagauugugagccu

SEQ ID NO: 2481038 - RNA, 19 nt, Homo sapiens
  misc_RNA (1)...(19): siRNA sense strand
auuuagaggaaguugucaa

SEQ ID NO: 2481039 - RNA, 19 nt, Homo sapiens
  misc_RNA (1)...(19): siRNA sense strand
aggaaguugucaagaugga

SEQ ID NO: 2481040 - RNA, 19 nt, Homo sapiens
  misc_RNA (1)...(19): siRNA sense strand
ggacauugcuugugcugug

SEQ ID NO: 2481041 - RNA, 19 nt, Homo sapiens
  misc_RNA (1)...(19): siRNA sense strand
caggaagaacugcggcaca

SEQ ID NO: 2481042 - RNA, 19 nt, Homo sapiens
  misc_RNA (1)...(19): siRNA sense strand
cuggaaccacugagaucaa

SEQ ID NO: 2481043 - RNA, 19 nt, Homo sapiens
  misc_RNA (1)...(19): siRNA sense strand
gcaaaauggugcuccggau

SEQ ID NO: 2481044 - RNA, 19 nt, Homo sapiens
  misc_RNA (1)...(19): siRNA sense strand
gugcuagagagguaggaaa

SEQ ID NO: 2481045 - RNA, 19 nt, Homo sapiens
  misc_RNA (1)...(19): siRNA sense strand
gugaagagauccagccaca

SEQ ID NO: 2481046 - RNA, 19 nt, Homo sapiens
  misc_RNA (1)...(19): siRNA sense strand
ggucaguggaggugagagu

SEQ ID NO: 2481047 - RNA, 19 nt, Homo sapiens
  misc_RNA (1)...(19): siRNA sense strand
ggaagagacuccagcagca

SEQ ID NO: 2481048 - RNA, 19 nt, Homo sapiens
  misc_RNA (1)...(19): siRNA sense strand
cuauagagagagaagaaca

SEQ ID NO: 2481049 - RNA, 19 nt, Homo sapiens
  misc_RNA (1)...(19): siRNA sense strand
caacucagaucaaggccua

SEQ ID NO: 2481050 - RNA, 19 nt, Homo sapiens
  misc_RNA (1)...(19): siRNA sense strand
accuauagagagagaagaa

SEQ ID NO: 2481051 - RNA, 19 nt, Homo sapiens
  misc_RNA (1)...(19): siRNA sense strand
aggagguagagaagguuaa

SEQ ID NO: 2481052 - RNA, 19 nt, Homo sapiens
  misc_RNA (1)...(19): siRNA sense strand
gcacaaaggaagagacucc

SEQ ID NO: 2481053 - RNA, 19 nt, Homo sapiens
  misc_RNA (1)...(19): siRNA sense strand
ccuuaauuguuucuggcaa

SEQ ID NO: 2481054 - RNA, 19 nt, Homo sapiens
  misc_RNA (1)...(19): siRNA sense strand
ugcuagagagguaggaaau

SEQ ID NO: 2481055 - RNA, 19 nt, Homo sapiens
  misc_RNA (1)...(19): siRNA sense strand
cugugaagauugugagccu

SEQ ID NO: 2481056 - RNA, 19 nt, Homo sapiens
  misc_RNA (1)...(19): siRNA sense strand
ggccaguagcaccaggaua

SEQ ID NO: 2481057 - RNA, 19 nt, Homo sapiens
  misc_RNA (1)...(19): siRNA sense strand
agcagaaggagguagagaa

SEQ ID NO: 2481058 - RNA, 19 nt, Homo sapiens
  misc_RNA (1)...(19): siRNA sense strand
auuuagaggaaguugucaa

SEQ ID NO: 2481059 - RNA, 19 nt, Homo sapiens
  misc_RNA (1)...(19): siRNA sense strand
aggaaguugucaagaugga

SEQ ID NO: 2481060 - RNA, 19 nt, Homo sapiens
  misc_RNA (1)...(19): siRNA sense strand
ggacauugcuugugcugug

SEQ ID NO: 2481061 - RNA, 19 nt, Homo sapiens
  misc_RNA (1)...(19): siRNA sense strand
ccaaacagcagaaggaggu

SEQ ID NO: 2481062 - RNA, 19 nt, Homo sapiens
  misc_RNA (1)...(19): siRNA sense strand
caggaagaacugcggcaca

SEQ ID NO: 2481063 - RNA, 19 nt, Homo sapiens
  misc_RNA (1)...(19): siRNA sense strand
cagcacaaaggaagagacu

SEQ ID NO: 2481064 - RNA, 19 nt, Homo sapiens
  misc_RNA (1)...(19): siRNA sense strand
cuggaaccacugagaucaa

SEQ ID NO: 2481065 - RNA, 19 nt, Homo sapiens
  misc_RNA (1)...(19): siRNA sense strand
gcaaaauggugcuccggau

SEQ ID NO: 2481066 - RNA, 19 nt, Homo sapiens
  misc_RNA (1)...(19): siRNA sense strand
caacaaggcagaugggaca

SEQ ID NO: 2481067 - RNA, 19 nt, Homo sapiens
  misc_RNA (1)...(19): siRNA sense strand
aggaagaagaagaggaagu

SEQ ID NO: 2481068 - RNA, 19 nt, Homo sapiens
  misc_RNA (1)...(19): siRNA sense strand
gggaagaagaagaagaacu

SEQ ID NO: 2481069 - RNA, 19 nt, Homo sapiens
  misc_RNA (1)...(19): siRNA sense strand
gcagagagcacaugggcau

SEQ ID NO: 2481070 - RNA, 19 nt, Homo sapiens
  misc_RNA (1)...(19): siRNA sense strand
uggccaagguggacgagaa

SEQ ID NO: 2481071 - RNA, 19 nt, Homo sapiens
  misc_RNA (1)...(19): siRNA sense strand
cagagaauagugaggagaa

SEQ ID NO: 2481072 - RNA, 19 nt, Homo sapiens
  misc_RNA (1)...(19): siRNA sense strand
ccaagaagucccagcccaa

SEQ ID NO: 2481073 - RNA, 19 nt, Homo sapiens
  misc_RNA (1)...(19): siRNA sense strand
cugaagaacucgaacggga

SEQ ID NO: 2481074 - RNA, 19 nt, Homo sapiens
  misc_RNA (1)...(19): siRNA sense strand
augaaaaggaggaggaaca

SEQ ID NO: 2481075 - RNA, 19 nt, Homo sapiens
  misc_RNA (1)...(19): siRNA sense strand
aggagaaggccaugggcau

SEQ ID NO: 2481076 - RNA, 19 nt, Homo sapiens
  misc_RNA (1)...(19): siRNA sense strand
agacccacuucgagagcaa

SEQ ID NO: 2481077 - RNA, 19 nt, Homo sapiens
  misc_RNA (1)...(19): siRNA sense strand
cuaaacuagaagaggaaga

SEQ ID NO: 2481078 - RNA, 19 nt, Homo sapiens
  misc_RNA (1)...(19): siRNA sense strand
acuagaagaggaagaagaa

SEQ ID NO: 2481079 - RNA, 19 nt, Homo sapiens
  misc_RNA (1)...(19): siRNA sense strand
caacaauucugcagggaug

SEQ ID NO: 2481080 - RNA, 19 nt, Homo sapiens
  misc_RNA (1)...(19): siRNA sense strand
caauggaucagaugggcaa

SEQ ID NO: 2481081 - RNA, 19 nt, Homo sapiens
  misc_RNA (1)...(19): siRNA sense strand
aagaggaaguaguugaaaa

SEQ ID NO: 2481082 - RNA, 19 nt, Homo sapiens
  misc_RNA (1)...(19): siRNA sense strand
acaacauggcggacaacaa

SEQ ID NO: 2481083 - RNA, 19 nt, Homo sapiens
  misc_RNA (1)...(19): siRNA sense strand
aggaguaugagguggguga

SEQ ID NO: 2481084 - RNA, 19 nt, Homo sapiens
  misc_RNA (1)...(19): siRNA sense strand
ugaagaaagccgagcagca

SEQ ID NO: 2481085 - RNA, 19 nt, Homo sapiens
  misc_RNA (1)...(19): siRNA sense strand
ugaaaaugaugaggagaua

SEQ ID NO: 2481086 - RNA, 19 nt, Homo sapiens
  misc_RNA (1)...(19): siRNA sense strand
cgggaaaacaccuugguua

SEQ ID NO: 2481087 - RNA, 19 nt, Homo sapiens
  misc_RNA (1)...(19): siRNA sense strand
cagaaggaggagacuuaaa

SEQ ID NO: 2481088 - RNA, 19 nt, Homo sapiens
  misc_RNA (1)...(19): siRNA sense strand
gcaacaaaguggaguggug

SEQ ID NO: 2481089 - RNA, 19 nt, Homo sapiens
  misc_RNA (1)...(19): siRNA sense strand
guggagugguggugggacu

SEQ ID NO: 2481090 - RNA, 19 nt, Homo sapiens
  misc_RNA (1)...(19): siRNA sense strand
uggaauagggccugaggga

SEQ ID NO: 2481091 - RNA, 19 nt, Homo sapiens
  misc_RNA (1)...(19): siRNA sense strand
aagaagaggaaguaguuga

SEQ ID NO: 2481092 - RNA, 19 nt, Homo sapiens
  misc_RNA (1)...(19): siRNA sense strand
ugcccaagaucgagguuau

SEQ ID NO: 2481093 - RNA, 19 nt, Homo sapiens
  misc_RNA (1)...(19): siRNA sense strand
ccauauuacaaccagcaaa

SEQ ID NO: 2481094 - RNA, 19 nt, Homo sapiens
  misc_RNA (1)...(19): siRNA sense strand
aggaaguaguugaaaauga

SEQ ID NO: 2481095 - RNA, 19 nt, Homo sapiens
  misc_RNA (1)...(19): siRNA sense strand
ccaagguggacgagaacca

SEQ ID NO: 2481096 - RNA, 19 nt, Homo sapiens
  misc_RNA (1)...(19): siRNA sense strand
ggguaaugaugucccucaa

SEQ ID NO: 2481097 - RNA, 19 nt, Homo sapiens
  misc_RNA (1)...(19): siRNA sense strand
gggagauggcugugguacu

SEQ ID NO: 2481098 - RNA, 19 nt, Homo sapiens
  misc_RNA (1)...(19): siRNA sense strand
gcgcauguccuaugagcca

SEQ ID NO: 2481099 - RNA, 19 nt, Homo sapiens
  misc_RNA (1)...(19): siRNA sense strand
ugaagaacucgaacgggaa

SEQ ID NO: 2481100 - RNA, 19 nt, Homo sapiens
  misc_RNA (1)...(19): siRNA sense strand
agggagggcaagaagauau

SEQ ID NO: 2481101 - RNA, 19 nt, Homo sapiens
  misc_RNA (1)...(19): siRNA sense strand
gagcaauucaguugggauc

SEQ ID NO: 2481102 - RNA, 19 nt, Homo sapiens
  misc_RNA (1)...(19): siRNA sense strand
gauugagaucuuuggcauu

SEQ ID NO: 2481103 - RNA, 19 nt, Homo sapiens
  misc_RNA (1)...(19): siRNA sense strand
aagaagaagaggaaguagu

SEQ ID NO: 2481104 - RNA, 19 nt, Homo sapiens
  misc_RNA (1)...(19): siRNA sense strand
ugacaacagcagaggguac

SEQ ID NO: 2481105 - RNA, 19 nt, Homo sapiens
  misc_RNA (1)...(19): siRNA sense strand
ggacagauacacacaggca

SEQ ID NO: 2481106 - RNA, 19 nt, Homo sapiens
  misc_RNA (1)...(19): siRNA sense strand
aggcaaugacuuugagaug

SEQ ID NO: 2481107 - RNA, 19 nt, Homo sapiens
  misc_RNA (1)...(19): siRNA sense strand
ccggaaaacccaagaaacu

SEQ ID NO: 2481108 - RNA, 19 nt, Homo sapiens
  misc_RNA (1)...(19): siRNA sense strand
gggcauuagauaccaucaa

SEQ ID NO: 2481109 - RNA, 19 nt, Homo sapiens
  misc_RNA (1)...(19): siRNA sense strand
agaagaggaaguaguugaa

SEQ ID NO: 2481110 - RNA, 19 nt, Homo sapiens
  misc_RNA (1)...(19): siRNA sense strand
gaucgagguuauaugcaga

SEQ ID NO: 2481111 - RNA, 19 nt, Homo sapiens
  misc_RNA (1)...(19): siRNA sense strand
cuacaaccaaugagaagau

SEQ ID NO: 2481112 - RNA, 19 nt, Homo sapiens
  misc_RNA (1)...(19): siRNA sense strand
caauguaucaacagcaaca

SEQ ID NO: 2481113 - RNA, 19 nt, Homo sapiens
  misc_RNA (1)...(19): siRNA sense strand
ggaauagggccugagggaa

SEQ ID NO: 2481114 - RNA, 19 nt, Homo sapiens
  misc_RNA (1)...(19): siRNA sense strand
gcuagagcuccuuguagaa

SEQ ID NO: 2481115 - RNA, 19 nt, Homo sapiens
  misc_RNA (1)...(19): siRNA sense strand
ugauugagaucuuuggcau

SEQ ID NO: 2481116 - RNA, 19 nt, Homo sapiens
  misc_RNA (1)...(19): siRNA sense strand
aacuagaagaggaagaaga

SEQ ID NO: 2481117 - RNA, 19 nt, Homo sapiens
  misc_RNA (1)...(19): siRNA sense strand
aaucacggcuguuggacau

SEQ ID NO: 2481118 - RNA, 19 nt, Homo sapiens
  misc_RNA (1)...(19): siRNA sense strand
acuauaaugccuugcccaa

SEQ ID NO: 2481119 - RNA, 19 nt, Homo sapiens
  misc_RNA (1)...(19): siRNA sense strand
caugggugccggaggucaa

SEQ ID NO: 2481120 - RNA, 19 nt, Homo sapiens
  misc_RNA (1)...(19): siRNA sense strand
cggaauuccaugacuccaa

SEQ ID NO: 2481121 - RNA, 19 nt, Homo sapiens
  misc_RNA (1)...(19): siRNA sense strand
agacagagcugcugccuuc

SEQ ID NO: 2481122 - RNA, 19 nt, Homo sapiens
  misc_RNA (1)...(19): siRNA sense strand
aggaggaggaacaggacca

SEQ ID NO: 2481123 - RNA, 19 nt, Homo sapiens
  misc_RNA (1)...(19): siRNA sense strand
gcagcaaggacauggguac

SEQ ID NO: 2481124 - RNA, 19 nt, Homo sapiens
  misc_RNA (1)...(19): siRNA sense strand
aagcauugcccaagaucga

SEQ ID NO: 2481125 - RNA, 19 nt, Homo sapiens
  misc_RNA (1)...(19): siRNA sense strand
ccuuggggauguaaaguua

SEQ ID NO: 2481126 - RNA, 19 nt, Homo sapiens
  misc_RNA (1)...(19): siRNA sense strand
gggacacccaagacagaau

SEQ ID NO: 2481127 - RNA, 19 nt, Homo sapiens
  misc_RNA (1)...(19): siRNA sense strand
gguccuuaugacagaguga

SEQ ID NO: 2481128 - RNA, 19 nt, Homo sapiens
  misc_RNA (1)...(19): siRNA sense strand
caacaaggcagaugggaca

SEQ ID NO: 2481129 - RNA, 19 nt, Homo sapiens
  misc_RNA (1)...(19): siRNA sense strand
ccaagaagucccagcccaa

SEQ ID NO: 2481130 - RNA, 19 nt, Homo sapiens
  misc_RNA (1)...(19): siRNA sense strand
cugaagaacucgaacggga

SEQ ID NO: 2481131 - RNA, 19 nt, Homo sapiens
  misc_RNA (1)...(19): siRNA sense strand
aggagaaggccaugggcau

SEQ ID NO: 2481132 - RNA, 19 nt, Homo sapiens
  misc_RNA (1)...(19): siRNA sense strand
caacaauucugcagggaug

SEQ ID NO: 2481133 - RNA, 19 nt, Homo sapiens
  misc_RNA (1)...(19): siRNA sense strand
caauggaucagaugggcaa

SEQ ID NO: 2481134 - RNA, 19 nt, Homo sapiens
  misc_RNA (1)...(19): siRNA sense strand
acaacauggcggacaacaa

SEQ ID NO: 2481135 - RNA, 19 nt, Homo sapiens
  misc_RNA (1)...(19): siRNA sense strand
ugaagaaagccgagcagca

SEQ ID NO: 2481136 - RNA, 19 nt, Homo sapiens
  misc_RNA (1)...(19): siRNA sense strand
cagaaggaggagacuuaaa

SEQ ID NO: 2481137 - RNA, 19 nt, Homo sapiens
  misc_RNA (1)...(19): siRNA sense strand
uggaauagggccugaggga

SEQ ID NO: 2481138 - RNA, 19 nt, Homo sapiens
  misc_RNA (1)...(19): siRNA sense strand
ugcccaagaucgagguuau

SEQ ID NO: 2481139 - RNA, 19 nt, Homo sapiens
  misc_RNA (1)...(19): siRNA sense strand
ccauauuacaaccagcaaa

SEQ ID NO: 2481140 - RNA, 19 nt, Homo sapiens
  misc_RNA (1)...(19): siRNA sense strand
ugaagaacucgaacgggaa

SEQ ID NO: 2481141 - RNA, 19 nt, Homo sapiens
  misc_RNA (1)...(19): siRNA sense strand
gcgcauguccuaugagcca

SEQ ID NO: 2481142 - RNA, 19 nt, Homo sapiens
  misc_RNA (1)...(19): siRNA sense strand
agggagggcaagaagauau

SEQ ID NO: 2481143 - RNA, 19 nt, Homo sapiens
  misc_RNA (1)...(19): siRNA sense strand
gagcaauucaguugggauc

SEQ ID NO: 2481144 - RNA, 19 nt, Homo sapiens
  misc_RNA (1)...(19): siRNA sense strand
ggacagauacacacaggca

SEQ ID NO: 2481145 - RNA, 19 nt, Homo sapiens
  misc_RNA (1)...(19): siRNA sense strand
ccggaaaacccaagaaacu

SEQ ID NO: 2481146 - RNA, 19 nt, Homo sapiens
  misc_RNA (1)...(19): siRNA sense strand
gaucgagguuauaugcaga

SEQ ID NO: 2481147 - RNA, 19 nt, Homo sapiens
  misc_RNA (1)...(19): siRNA sense strand
cuacaaccaaugagaagau

SEQ ID NO: 2481148 - RNA, 19 nt, Homo sapiens
  misc_RNA (1)...(19): siRNA sense strand
caauguaucaacagcaaca

SEQ ID NO: 2481149 - RNA, 19 nt, Homo sapiens
  misc_RNA (1)...(19): siRNA sense strand
ggaauagggccugagggaa

SEQ ID NO: 2481150 - RNA, 19 nt, Homo sapiens
  misc_RNA (1)...(19): siRNA sense strand
acuauaaugccuugcccaa

SEQ ID NO: 2481151 - RNA, 19 nt, Homo sapiens
  misc_RNA (1)...(19): siRNA sense strand
caugggugccggaggucaa

SEQ ID NO: 2481152 - RNA, 19 nt, Homo sapiens
  misc_RNA (1)...(19): siRNA sense strand
cggaauuccaugacuccaa

SEQ ID NO: 2481153 - RNA, 19 nt, Homo sapiens
  misc_RNA (1)...(19): siRNA sense strand
gcagcaaggacauggguac

SEQ ID NO: 2481154 - RNA, 19 nt, Homo sapiens
  misc_RNA (1)...(19): siRNA sense strand
aagcauugcccaagaucga

SEQ ID NO: 2481155 - RNA, 19 nt, Homo sapiens
  misc_RNA (1)...(19): siRNA sense strand
ccuuggggauguaaaguua

SEQ ID NO: 2481156 - RNA, 19 nt, Homo sapiens
  misc_RNA (1)...(19): siRNA sense strand
gggacacccaagacagaau

SEQ ID NO: 2481157 - RNA, 19 nt, Homo sapiens
  misc_RNA (1)...(19): siRNA sense strand
gguccuuaugacagaguga

SEQ ID NO: 2481158 - RNA, 19 nt, Homo sapiens
  misc_RNA (1)...(19): siRNA sense strand
aaaugaacaacaaggcaga

SEQ ID NO: 2481159 - RNA, 19 nt, Homo sapiens
  misc_RNA (1)...(19): siRNA sense strand
cgacaugauuccuauggca

SEQ ID NO: 2481160 - RNA, 19 nt, Homo sapiens
  misc_RNA (1)...(19): siRNA sense strand
uggccuucacugaggagaa

SEQ ID NO: 2481161 - RNA, 19 nt, Homo sapiens
  misc_RNA (1)...(19): siRNA sense strand
gcauguccuaugagccaaa

SEQ ID NO: 2481162 - RNA, 19 nt, Homo sapiens
  misc_RNA (1)...(19): siRNA sense strand
agugagcacaucagggauu

SEQ ID NO: 2481163 - RNA, 19 nt, Homo sapiens
  misc_RNA (1)...(19): siRNA sense strand
ggcaagaagauaugaaccu

SEQ ID NO: 2481164 - RNA, 19 nt, Homo sapiens
  misc_RNA (1)...(19): siRNA sense strand
cagcagaacuccaugggga

SEQ ID NO: 2481165 - RNA, 19 nt, Homo sapiens
  misc_RNA (1)...(19): siRNA sense strand
ccuuugaaugcaagauuga

SEQ ID NO: 2481166 - RNA, 19 nt, Homo sapiens
  misc_RNA (1)...(19): siRNA sense strand
ucacugaggagaaggccau

SEQ ID NO: 2481167 - RNA, 19 nt, Homo sapiens
  misc_RNA (1)...(19): siRNA sense strand
caacaaggcagaugggaca

SEQ ID NO: 2481168 - RNA, 19 nt, Homo sapiens
  misc_RNA (1)...(19): siRNA sense strand
aggaagaagaagaggaagu

SEQ ID NO: 2481169 - RNA, 19 nt, Homo sapiens
  misc_RNA (1)...(19): siRNA sense strand
gggaagaagaagaagaacu

SEQ ID NO: 2481170 - RNA, 19 nt, Homo sapiens
  misc_RNA (1)...(19): siRNA sense strand
gcagagagcacaugggcau

SEQ ID NO: 2481171 - RNA, 19 nt, Homo sapiens
  misc_RNA (1)...(19): siRNA sense strand
uggccaagguggacgagaa

SEQ ID NO: 2481172 - RNA, 19 nt, Homo sapiens
  misc_RNA (1)...(19): siRNA sense strand
cagagaauagugaggagaa

SEQ ID NO: 2481173 - RNA, 19 nt, Homo sapiens
  misc_RNA (1)...(19): siRNA sense strand
ccaagaagucccagcccaa

SEQ ID NO: 2481174 - RNA, 19 nt, Homo sapiens
  misc_RNA (1)...(19): siRNA sense strand
cugaagaacucgaacggga

SEQ ID NO: 2481175 - RNA, 19 nt, Homo sapiens
  misc_RNA (1)...(19): siRNA sense strand
augaaaaggaggaggaaca

SEQ ID NO: 2481176 - RNA, 19 nt, Homo sapiens
  misc_RNA (1)...(19): siRNA sense strand
aggagaaggccaugggcau

SEQ ID NO: 2481177 - RNA, 19 nt, Homo sapiens
  misc_RNA (1)...(19): siRNA sense strand
agacccacuucgagagcaa

SEQ ID NO: 2481178 - RNA, 19 nt, Homo sapiens
  misc_RNA (1)...(19): siRNA sense strand
cuaaacuagaagaggaaga

SEQ ID NO: 2481179 - RNA, 19 nt, Homo sapiens
  misc_RNA (1)...(19): siRNA sense strand
acuagaagaggaagaagaa

SEQ ID NO: 2481180 - RNA, 19 nt, Homo sapiens
  misc_RNA (1)...(19): siRNA sense strand
caacaauucugcagggaug

SEQ ID NO: 2481181 - RNA, 19 nt, Homo sapiens
  misc_RNA (1)...(19): siRNA sense strand
caauggaucagaugggcaa

SEQ ID NO: 2481182 - RNA, 19 nt, Homo sapiens
  misc_RNA (1)...(19): siRNA sense strand
aagaggaaguaguugaaaa

SEQ ID NO: 2481183 - RNA, 19 nt, Homo sapiens
  misc_RNA (1)...(19): siRNA sense strand
acaacauggcggacaacaa

SEQ ID NO: 2481184 - RNA, 19 nt, Homo sapiens
  misc_RNA (1)...(19): siRNA sense strand
aggaguaugagguggguga

SEQ ID NO: 2481185 - RNA, 19 nt, Homo sapiens
  misc_RNA (1)...(19): siRNA sense strand
ugaagaaagccgagcagca

SEQ ID NO: 2481186 - RNA, 19 nt, Homo sapiens
  misc_RNA (1)...(19): siRNA sense strand
ugaaaaugaugaggagaua

SEQ ID NO: 2481187 - RNA, 19 nt, Homo sapiens
  misc_RNA (1)...(19): siRNA sense strand
cgggaaaacaccuugguua

SEQ ID NO: 2481188 - RNA, 19 nt, Homo sapiens
  misc_RNA (1)...(19): siRNA sense strand
cagaaggaggagacuuaaa

SEQ ID NO: 2481189 - RNA, 19 nt, Homo sapiens
  misc_RNA (1)...(19): siRNA sense strand
gcaacaaaguggaguggug

SEQ ID NO: 2481190 - RNA, 19 nt, Homo sapiens
  misc_RNA (1)...(19): siRNA sense strand
guggagugguggugggacu

SEQ ID NO: 2481191 - RNA, 19 nt, Homo sapiens
  misc_RNA (1)...(19): siRNA sense strand
uggaauagggccugaggga

SEQ ID NO: 2481192 - RNA, 19 nt, Homo sapiens
  misc_RNA (1)...(19): siRNA sense strand
aagaagaggaaguaguuga

SEQ ID NO: 2481193 - RNA, 19 nt, Homo sapiens
  misc_RNA (1)...(19): siRNA sense strand
ugcccaagaucgagguuau

SEQ ID NO: 2481194 - RNA, 19 nt, Homo sapiens
  misc_RNA (1)...(19): siRNA sense strand
ccauauuacaaccagcaaa

SEQ ID NO: 2481195 - RNA, 19 nt, Homo sapiens
  misc_RNA (1)...(19): siRNA sense strand
aggaaguaguugaaaauga

SEQ ID NO: 2481196 - RNA, 19 nt, Homo sapiens
  misc_RNA (1)...(19): siRNA sense strand
ccaagguggacgagaacca

SEQ ID NO: 2481197 - RNA, 19 nt, Homo sapiens
  misc_RNA (1)...(19): siRNA sense strand
ggguaaugaugucccucaa

SEQ ID NO: 2481198 - RNA, 19 nt, Homo sapiens
  misc_RNA (1)...(19): siRNA sense strand
gggagauggcugugguacu

SEQ ID NO: 2481199 - RNA, 19 nt, Homo sapiens
  misc_RNA (1)...(19): siRNA sense strand
gcgcauguccuaugagcca

SEQ ID NO: 2481200 - RNA, 19 nt, Homo sapiens
  misc_RNA (1)...(19): siRNA sense strand
ugaagaacucgaacgggaa

SEQ ID NO: 2481201 - RNA, 19 nt, Homo sapiens
  misc_RNA (1)...(19): siRNA sense strand
agggagggcaagaagauau

SEQ ID NO: 2481202 - RNA, 19 nt, Homo sapiens
  misc_RNA (1)...(19): siRNA sense strand
gagcaauucaguugggauc

SEQ ID NO: 2481203 - RNA, 19 nt, Homo sapiens
  misc_RNA (1)...(19): siRNA sense strand
gauugagaucuuuggcauu

SEQ ID NO: 2481204 - RNA, 19 nt, Homo sapiens
  misc_RNA (1)...(19): siRNA sense strand
aagaagaagaggaaguagu

SEQ ID NO: 2481205 - RNA, 19 nt, Homo sapiens
  misc_RNA (1)...(19): siRNA sense strand
ugacaacagcagaggguac

SEQ ID NO: 2481206 - RNA, 19 nt, Homo sapiens
  misc_RNA (1)...(19): siRNA sense strand
ggacagauacacacaggca

SEQ ID NO: 2481207 - RNA, 19 nt, Homo sapiens
  misc_RNA (1)...(19): siRNA sense strand
aggcaaugacuuugagaug

SEQ ID NO: 2481208 - RNA, 19 nt, Homo sapiens
  misc_RNA (1)...(19): siRNA sense strand
ccggaaaacccaagaaacu

SEQ ID NO: 2481209 - RNA, 19 nt, Homo sapiens
  misc_RNA (1)...(19): siRNA sense strand
gggcauuagauaccaucaa

SEQ ID NO: 2481210 - RNA, 19 nt, Homo sapiens
  misc_RNA (1)...(19): siRNA sense strand
agaagaggaaguaguugaa

SEQ ID NO: 2481211 - RNA, 19 nt, Homo sapiens
  misc_RNA (1)...(19): siRNA sense strand
gaucgagguuauaugcaga

SEQ ID NO: 2481212 - RNA, 19 nt, Homo sapiens
  misc_RNA (1)...(19): siRNA sense strand
cuacaaccaaugagaagau

SEQ ID NO: 2481213 - RNA, 19 nt, Homo sapiens
  misc_RNA (1)...(19): siRNA sense strand
caauguaucaacagcaaca

SEQ ID NO: 2481214 - RNA, 19 nt, Homo sapiens
  misc_RNA (1)...(19): siRNA sense strand
ggaauagggccugagggaa

SEQ ID NO: 2481215 - RNA, 19 nt, Homo sapiens
  misc_RNA (1)...(19): siRNA sense strand
gcuagagcuccuuguagaa

SEQ ID NO: 2481216 - RNA, 19 nt, Homo sapiens
  misc_RNA (1)...(19): siRNA sense strand
ugauugagaucuuuggcau

SEQ ID NO: 2481217 - RNA, 19 nt, Homo sapiens
  misc_RNA (1)...(19): siRNA sense strand
aacuagaagaggaagaaga

SEQ ID NO: 2481218 - RNA, 19 nt, Homo sapiens
  misc_RNA (1)...(19): siRNA sense strand
aaucacggcuguuggacau

SEQ ID NO: 2481219 - RNA, 19 nt, Homo sapiens
  misc_RNA (1)...(19): siRNA sense strand
acuauaaugccuugcccaa

SEQ ID NO: 2481220 - RNA, 19 nt, Homo sapiens
  misc_RNA (1)...(19): siRNA sense strand
caugggugccggaggucaa

SEQ ID NO: 2481221 - RNA, 19 nt, Homo sapiens
  misc_RNA (1)...(19): siRNA sense strand
cggaauuccaugacuccaa

SEQ ID NO: 2481222 - RNA, 19 nt, Homo sapiens
  misc_RNA (1)...(19): siRNA sense strand
agacagagcugcugccuuc

SEQ ID NO: 2481223 - RNA, 19 nt, Homo sapiens
  misc_RNA (1)...(19): siRNA sense strand
aggaggaggaacaggacca

SEQ ID NO: 2481224 - RNA, 19 nt, Homo sapiens
  misc_RNA (1)...(19): siRNA sense strand
gcagcaaggacauggguac

SEQ ID NO: 2481225 - RNA, 19 nt, Homo sapiens
  misc_RNA (1)...(19): siRNA sense strand
aagcauugcccaagaucga

SEQ ID NO: 2481226 - RNA, 19 nt, Homo sapiens
  misc_RNA (1)...(19): siRNA sense strand
ccuuggggauguaaaguua

SEQ ID NO: 2481227 - RNA, 19 nt, Homo sapiens
  misc_RNA (1)...(19): siRNA sense strand
gggacacccaagacagaau

SEQ ID NO: 2481228 - RNA, 19 nt, Homo sapiens
  misc_RNA (1)...(19): siRNA sense strand
gguccuuaugacagaguga

SEQ ID NO: 2481229 - RNA, 19 nt, Homo sapiens
  misc_RNA (1)...(19): siRNA sense strand
uggauauggcacugggaaa

SEQ ID NO: 2481230 - RNA, 19 nt, Homo sapiens
  misc_RNA (1)...(19): siRNA sense strand
ucaaaauagcggaagaaaa

SEQ ID NO: 2481231 - RNA, 19 nt, Homo sapiens
  misc_RNA (1)...(19): siRNA sense strand
augaagaaagggagaacuu

SEQ ID NO: 2481232 - RNA, 19 nt, Homo sapiens
  misc_RNA (1)...(19): siRNA sense strand
aguccaaagcaaaguguuu

SEQ ID NO: 2481233 - RNA, 19 nt, Homo sapiens
  misc_RNA (1)...(19): siRNA sense strand
ccccaaaaugcuugaauua

SEQ ID NO: 2481234 - RNA, 19 nt, Homo sapiens
  misc_RNA (1)...(19): siRNA sense strand
guagaugaagaaagggaga

SEQ ID NO: 2481235 - RNA, 19 nt, Homo sapiens
  misc_RNA (1)...(19): siRNA sense strand
ggaagaaaauggagcugca

SEQ ID NO: 2481236 - RNA, 19 nt, Homo sapiens
  misc_RNA (1)...(19): siRNA sense strand
auacagaagauuugggaug

SEQ ID NO: 2481237 - RNA, 19 nt, Homo sapiens
  misc_RNA (1)...(19): siRNA sense strand
ggacaugaaauuaagguag

SEQ ID NO: 2481238 - RNA, 19 nt, Homo sapiens
  misc_RNA (1)...(19): siRNA sense strand
agaaugcaucagaggucaa

SEQ ID NO: 2481239 - RNA, 19 nt, Homo sapiens
  misc_RNA (1)...(19): siRNA sense strand
ggucaaaauagcggaagaa

SEQ ID NO: 2481240 - RNA, 19 nt, Homo sapiens
  misc_RNA (1)...(19): siRNA sense strand
agguagaugaagaaaggga

SEQ ID NO: 2481241 - RNA, 19 nt, Homo sapiens
  misc_RNA (1)...(19): siRNA sense strand
aaugaaguuuguaggcaca

SEQ ID NO: 2481242 - RNA, 19 nt, Homo sapiens
  misc_RNA (1)...(19): siRNA sense strand
uuuacuaguccaaagcaaa

SEQ ID NO: 2481243 - RNA, 19 nt, Homo sapiens
  misc_RNA (1)...(19): siRNA sense strand
aggucaaaauagcggaaga

SEQ ID NO: 2481244 - RNA, 19 nt, Homo sapiens
  misc_RNA (1)...(19): siRNA sense strand
cgcuuauacccgagacaga

SEQ ID NO: 2481245 - RNA, 19 nt, Homo sapiens
  misc_RNA (1)...(19): siRNA sense strand
uggcacugggaaagaagaa

SEQ ID NO: 2481246 - RNA, 19 nt, Homo sapiens
  misc_RNA (1)...(19): siRNA sense strand
augcagagguugagcggca

SEQ ID NO: 2481247 - RNA, 19 nt, Homo sapiens
  misc_RNA (1)...(19): siRNA sense strand
cgacaacauucgaagagga

SEQ ID NO: 2481248 - RNA, 19 nt, Homo sapiens
  misc_RNA (1)...(19): siRNA sense strand
ucgaagaggaauugagaac

SEQ ID NO: 2481249 - RNA, 19 nt, Homo sapiens
  misc_RNA (1)...(19): siRNA sense strand
acucggagcaggugcgcua

SEQ ID NO: 2481250 - RNA, 19 nt, Homo sapiens
  misc_RNA (1)...(19): siRNA sense strand
ucaucugguucauggacaa

SEQ ID NO: 2481251 - RNA, 19 nt, Homo sapiens
  misc_RNA (1)...(19): siRNA sense strand
cuaucgacaaggagcguuu

SEQ ID NO: 2481252 - RNA, 19 nt, Homo sapiens
  misc_RNA (1)...(19): siRNA sense strand
gcaagaaucaguaccacga

SEQ ID NO: 2481253 - RNA, 19 nt, Homo sapiens
  misc_RNA (1)...(19): siRNA sense strand
agguagaaacugaggacca

SEQ ID NO: 2481254 - RNA, 19 nt, Homo sapiens
  misc_RNA (1)...(19): siRNA sense strand
gcaaggagagggaggacga

SEQ ID NO: 2481255 - RNA, 19 nt, Homo sapiens
  misc_RNA (1)...(19): siRNA sense strand
augacuacaucaagaucaa

SEQ ID NO: 2481256 - RNA, 19 nt, Homo sapiens
  misc_RNA (1)...(19): siRNA sense strand
uggauguggacgagugcaa

SEQ ID NO: 2481257 - RNA, 19 nt, Homo sapiens
  misc_RNA (1)...(19): siRNA sense strand
augugaagguagaaacuga

SEQ ID NO: 2481258 - RNA, 19 nt, Homo sapiens
  misc_RNA (1)...(19): siRNA sense strand
gauaauguggagauggaca

SEQ ID NO: 2481259 - RNA, 19 nt, Homo sapiens
  misc_RNA (1)...(19): siRNA sense strand
aaaugagugcccagagcua

SEQ ID NO: 2481260 - RNA, 19 nt, Homo sapiens
  misc_RNA (1)...(19): siRNA sense strand
augacuaugugaagguaga

SEQ ID NO: 2481261 - RNA, 19 nt, Homo sapiens
  misc_RNA (1)...(19): siRNA sense strand
gaggaggguuucaugguca

SEQ ID NO: 2481262 - RNA, 19 nt, Homo sapiens
  misc_RNA (1)...(19): siRNA sense strand
cuguaaaauuguagacugu

SEQ ID NO: 2481263 - RNA, 19 nt, Homo sapiens
  misc_RNA (1)...(19): siRNA sense strand
agugacaacucgggagaga

SEQ ID NO: 2481264 - RNA, 19 nt, Homo sapiens
  misc_RNA (1)...(19): siRNA sense strand
ccuauuacaagaugcucaa

SEQ ID NO: 2481265 - RNA, 19 nt, Homo sapiens
  misc_RNA (1)...(19): siRNA sense strand
guggacgagugcaaggaga

SEQ ID NO: 2481266 - RNA, 19 nt, Homo sapiens
  misc_RNA (1)...(19): siRNA sense strand
aggaggguuucauggucaa

SEQ ID NO: 2481267 - RNA, 19 nt, Homo sapiens
  misc_RNA (1)...(19): siRNA sense strand
aggaugggacguggaguaa

SEQ ID NO: 2481268 - RNA, 19 nt, Homo sapiens
  misc_RNA (1)...(19): siRNA sense strand
gggacguggaguaacaaga

SEQ ID NO: 2481269 - RNA, 19 nt, Homo sapiens
  misc_RNA (1)...(19): siRNA sense strand
aaggagucuggaugaauaa

SEQ ID NO: 2481270 - RNA, 19 nt, Homo sapiens
  misc_RNA (1)...(19): siRNA sense strand
agguagaaacugaggacca

SEQ ID NO: 2481271 - RNA, 19 nt, Homo sapiens
  misc_RNA (1)...(19): siRNA sense strand
gcaaggagagggaggacga

SEQ ID NO: 2481272 - RNA, 19 nt, Homo sapiens
  misc_RNA (1)...(19): siRNA sense strand
augacuacaucaagaucaa

SEQ ID NO: 2481273 - RNA, 19 nt, Homo sapiens
  misc_RNA (1)...(19): siRNA sense strand
uggauguggacgagugcaa

SEQ ID NO: 2481274 - RNA, 19 nt, Homo sapiens
  misc_RNA (1)...(19): siRNA sense strand
augugaagguagaaacuga

SEQ ID NO: 2481275 - RNA, 19 nt, Homo sapiens
  misc_RNA (1)...(19): siRNA sense strand
gauaauguggagauggaca

SEQ ID NO: 2481276 - RNA, 19 nt, Homo sapiens
  misc_RNA (1)...(19): siRNA sense strand
aaaugagugcccagagcua

SEQ ID NO: 2481277 - RNA, 19 nt, Homo sapiens
  misc_RNA (1)...(19): siRNA sense strand
augacuaugugaagguaga

SEQ ID NO: 2481278 - RNA, 19 nt, Homo sapiens
  misc_RNA (1)...(19): siRNA sense strand
gaggaggguuucaugguca

SEQ ID NO: 2481279 - RNA, 19 nt, Homo sapiens
  misc_RNA (1)...(19): siRNA sense strand
cuguaaaauuguagacugu

SEQ ID NO: 2481280 - RNA, 19 nt, Homo sapiens
  misc_RNA (1)...(19): siRNA sense strand
agugacaacucgggagaga

SEQ ID NO: 2481281 - RNA, 19 nt, Homo sapiens
  misc_RNA (1)...(19): siRNA sense strand
ccuauuacaagaugcucaa

SEQ ID NO: 2481282 - RNA, 19 nt, Homo sapiens
  misc_RNA (1)...(19): siRNA sense strand
guggacgagugcaaggaga

SEQ ID NO: 2481283 - RNA, 19 nt, Homo sapiens
  misc_RNA (1)...(19): siRNA sense strand
aggaggguuucauggucaa

SEQ ID NO: 2481284 - RNA, 19 nt, Homo sapiens
  misc_RNA (1)...(19): siRNA sense strand
aggaugggacguggaguaa

SEQ ID NO: 2481285 - RNA, 19 nt, Homo sapiens
  misc_RNA (1)...(19): siRNA sense strand
gggacguggaguaacaaga

SEQ ID NO: 2481286 - RNA, 19 nt, Homo sapiens
  misc_RNA (1)...(19): siRNA sense strand
aaggagucuggaugaauaa

SEQ ID NO: 2481287 - RNA, 19 nt, Homo sapiens
  misc_RNA (1)...(19): siRNA sense strand
gcuaagacugagagcaagu

SEQ ID NO: 2481288 - RNA, 19 nt, Homo sapiens
  misc_RNA (1)...(19): siRNA sense strand
ugguguggcagcuggaauu

SEQ ID NO: 2481289 - RNA, 19 nt, Homo sapiens
  misc_RNA (1)...(19): siRNA sense strand
uggaagugcucgaucgcua

SEQ ID NO: 2481290 - RNA, 19 nt, Homo sapiens
  misc_RNA (1)...(19): siRNA sense strand
cagcaaggccuguggagga

SEQ ID NO: 2481291 - RNA, 19 nt, Homo sapiens
  misc_RNA (1)...(19): siRNA sense strand
agauugaggcacuggagaa

SEQ ID NO: 2481292 - RNA, 19 nt, Homo sapiens
  misc_RNA (1)...(19): siRNA sense strand
uggaaagcucagugacuau

SEQ ID NO: 2481293 - RNA, 19 nt, Homo sapiens
  misc_RNA (1)...(19): siRNA sense strand
cgacagucccugagccuga

SEQ ID NO: 2481294 - RNA, 19 nt, Homo sapiens
  misc_RNA (1)...(19): siRNA sense strand
gcuugaucaugguuggcua

SEQ ID NO: 2481295 - RNA, 19 nt, Homo sapiens
  misc_RNA (1)...(19): siRNA sense strand
guggaggaugccaaggaaa

SEQ ID NO: 2481296 - RNA, 19 nt, Homo sapiens
  misc_RNA (1)...(19): siRNA sense strand
cgugauagcucaugagacc

SEQ ID NO: 2481297 - RNA, 19 nt, Homo sapiens
  misc_RNA (1)...(19): siRNA sense strand
ggacaaagggcaaccugga

SEQ ID NO: 2481298 - RNA, 19 nt, Homo sapiens
  misc_RNA (1)...(19): siRNA sense strand
gguccaugaaggcggauga

SEQ ID NO: 2481299 - RNA, 19 nt, Homo sapiens
  misc_RNA (1)...(19): siRNA sense strand
gggucauguucgcggucau

SEQ ID NO: 2481300 - RNA, 19 nt, Homo sapiens
  misc_RNA (1)...(19): siRNA sense strand
aaggaaagccucaagacca

SEQ ID NO: 2481301 - RNA, 19 nt, Homo sapiens
  misc_RNA (1)...(19): siRNA sense strand
caacgggaucagaggacca

SEQ ID NO: 2481302 - RNA, 19 nt, Homo sapiens
  misc_RNA (1)...(19): siRNA sense strand
ggagcaugguaguggacac

SEQ ID NO: 2481303 - RNA, 19 nt, Homo sapiens
  misc_RNA (1)...(19): siRNA sense strand
cuggaaagccaacgggauc

SEQ ID NO: 2481304 - RNA, 19 nt, Homo sapiens
  misc_RNA (1)...(19): siRNA sense strand
uggaagugcucgaucgcua

SEQ ID NO: 2481305 - RNA, 19 nt, Homo sapiens
  misc_RNA (1)...(19): siRNA sense strand
cagcaaggccuguggagga

SEQ ID NO: 2481306 - RNA, 19 nt, Homo sapiens
  misc_RNA (1)...(19): siRNA sense strand
agauugaggcacuggagaa

SEQ ID NO: 2481307 - RNA, 19 nt, Homo sapiens
  misc_RNA (1)...(19): siRNA sense strand
uggaaagcucagugacuau

SEQ ID NO: 2481308 - RNA, 19 nt, Homo sapiens
  misc_RNA (1)...(19): siRNA sense strand
cgacagucccugagccuga

SEQ ID NO: 2481309 - RNA, 19 nt, Homo sapiens
  misc_RNA (1)...(19): siRNA sense strand
gcuugaucaugguuggcua

SEQ ID NO: 2481310 - RNA, 19 nt, Homo sapiens
  misc_RNA (1)...(19): siRNA sense strand
guggaggaugccaaggaaa

SEQ ID NO: 2481311 - RNA, 19 nt, Homo sapiens
  misc_RNA (1)...(19): siRNA sense strand
cgugauagcucaugagacc

SEQ ID NO: 2481312 - RNA, 19 nt, Homo sapiens
  misc_RNA (1)...(19): siRNA sense strand
ggacaaagggcaaccugga

SEQ ID NO: 2481313 - RNA, 19 nt, Homo sapiens
  misc_RNA (1)...(19): siRNA sense strand
gguccaugaaggcggauga

SEQ ID NO: 2481314 - RNA, 19 nt, Homo sapiens
  misc_RNA (1)...(19): siRNA sense strand
gggucauguucgcggucau

SEQ ID NO: 2481315 - RNA, 19 nt, Homo sapiens
  misc_RNA (1)...(19): siRNA sense strand
aaggaaagccucaagacca

SEQ ID NO: 2481316 - RNA, 19 nt, Homo sapiens
  misc_RNA (1)...(19): siRNA sense strand
caacgggaucagaggacca

SEQ ID NO: 2481317 - RNA, 19 nt, Homo sapiens
  misc_RNA (1)...(19): siRNA sense strand
ggagcaugguaguggacac

SEQ ID NO: 2481318 - RNA, 19 nt, Homo sapiens
  misc_RNA (1)...(19): siRNA sense strand
cuggaaagccaacgggauc

SEQ ID NO: 2481319 - RNA, 19 nt, Homo sapiens
  misc_RNA (1)...(19): siRNA sense strand
caaaggagcuucuaggaca

SEQ ID NO: 2481320 - RNA, 19 nt, Homo sapiens
  misc_RNA (1)...(19): siRNA sense strand
ccuuaaagacaggggaaaa

SEQ ID NO: 2481321 - RNA, 19 nt, Homo sapiens
  misc_RNA (1)...(19): siRNA sense strand
aguuaucaucagaggacaa

SEQ ID NO: 2481322 - RNA, 19 nt, Homo sapiens
  misc_RNA (1)...(19): siRNA sense strand
agacaggggaaaaggcaau

SEQ ID NO: 2481323 - RNA, 19 nt, Homo sapiens
  misc_RNA (1)...(19): siRNA sense strand
ccuucaaaccagagaccua

SEQ ID NO: 2481324 - RNA, 19 nt, Homo sapiens
  misc_RNA (1)...(19): siRNA sense strand
ugaaguacauccaggccaa

SEQ ID NO: 2481325 - RNA, 19 nt, Homo sapiens
  misc_RNA (1)...(19): siRNA sense strand
gguuguuagcagaagguau

SEQ ID NO: 2481326 - RNA, 19 nt, Homo sapiens
  misc_RNA (1)...(19): siRNA sense strand
acuauaagauugaugcaga

SEQ ID NO: 2481327 - RNA, 19 nt, Homo sapiens
  misc_RNA (1)...(19): siRNA sense strand
uggacguguucaagaggaa

SEQ ID NO: 2481328 - RNA, 19 nt, Homo sapiens
  misc_RNA (1)...(19): siRNA sense strand
aaauacaacaaaugggaca

SEQ ID NO: 2481329 - RNA, 19 nt, Homo sapiens
  misc_RNA (1)...(19): siRNA sense strand
gcaaguaccugcagagcac

SEQ ID NO: 2481330 - RNA, 19 nt, Homo sapiens
  misc_RNA (1)...(19): siRNA sense strand
agguuaacacugacaaaga

SEQ ID NO: 2481331 - RNA, 19 nt, Homo sapiens
  misc_RNA (1)...(19): siRNA sense strand
ccacaagcaggaaagaaaa

SEQ ID NO: 2481332 - RNA, 19 nt, Homo sapiens
  misc_RNA (1)...(19): siRNA sense strand
uguggagagacaugauaaa

SEQ ID NO: 2481333 - RNA, 19 nt, Homo sapiens
  misc_RNA (1)...(19): siRNA sense strand
gcaggaaagaaaaggccaa

SEQ ID NO: 2481334 - RNA, 19 nt, Homo sapiens
  misc_RNA (1)...(19): siRNA sense strand
ugacggaggccgagcucau

SEQ ID NO: 2481335 - RNA, 19 nt, Homo sapiens
  misc_RNA (1)...(19): siRNA sense strand
agaaggaagcccaggugga

SEQ ID NO: 2481336 - RNA, 19 nt, Homo sapiens
  misc_RNA (1)...(19): siRNA sense strand
gcaccaucuccuucagaau

SEQ ID NO: 2481337 - RNA, 19 nt, Homo sapiens
  misc_RNA (1)...(19): siRNA sense strand
gggagaucgcacagauguu

SEQ ID NO: 2481338 - RNA, 19 nt, Homo sapiens
  misc_RNA (1)...(19): siRNA sense strand
cccacuacccugagaacuu

SEQ ID NO: 2481339 - RNA, 19 nt, Homo sapiens
  misc_RNA (1)...(19): siRNA sense strand
gcaacuaugucacggugga

SEQ ID NO: 2481340 - RNA, 19 nt, Homo sapiens
  misc_RNA (1)...(19): siRNA sense strand
caguggagaagcagcugaa

SEQ ID NO: 2481341 - RNA, 19 nt, Homo sapiens
  misc_RNA (1)...(19): siRNA sense strand
acgugaugacccuggauuu

SEQ ID NO: 2481342 - RNA, 19 nt, Homo sapiens
  misc_RNA (1)...(19): siRNA sense strand
gugcagaaggaguagagau

SEQ ID NO: 2481343 - RNA, 19 nt, Homo sapiens
  misc_RNA (1)...(19): siRNA sense strand
guguugugcagaaggagua

SEQ ID NO: 2481344 - RNA, 19 nt, Homo sapiens
  misc_RNA (1)...(19): siRNA sense strand
gaucauagcuguaggagcc

SEQ ID NO: 2481345 - RNA, 19 nt, Homo sapiens
  misc_RNA (1)...(19): siRNA sense strand
cagcauucagaaaguguau

SEQ ID NO: 2481346 - RNA, 19 nt, Homo sapiens
  misc_RNA (1)...(19): siRNA sense strand
cagaaaguguauaagaccu

SEQ ID NO: 2481347 - RNA, 19 nt, Homo sapiens
  misc_RNA (1)...(19): siRNA sense strand
gugcagaaggaguagagau

SEQ ID NO: 2481348 - RNA, 19 nt, Homo sapiens
  misc_RNA (1)...(19): siRNA sense strand
guguugugcagaaggagua

SEQ ID NO: 2481349 - RNA, 19 nt, Homo sapiens
  misc_RNA (1)...(19): siRNA sense strand
gaucauagcuguaggagcc

SEQ ID NO: 2481350 - RNA, 19 nt, Homo sapiens
  misc_RNA (1)...(19): siRNA sense strand
cagcauucagaaaguguau

SEQ ID NO: 2481351 - RNA, 19 nt, Homo sapiens
  misc_RNA (1)...(19): siRNA sense strand
cagaaaguguauaagaccu

SEQ ID NO: 2481352 - RNA, 19 nt, Homo sapiens
  misc_RNA (1)...(19): siRNA sense strand
gagaagagacugugcguca

SEQ ID NO: 2481353 - RNA, 19 nt, Homo sapiens
  misc_RNA (1)...(19): siRNA sense strand
gccaaauaccacauggaaa

SEQ ID NO: 2481354 - RNA, 19 nt, Homo sapiens
  misc_RNA (1)...(19): siRNA sense strand
agccagagccagagccaaa

SEQ ID NO: 2481355 - RNA, 19 nt, Homo sapiens
  misc_RNA (1)...(19): siRNA sense strand
gauaaggaagagacggaau

SEQ ID NO: 2481356 - RNA, 19 nt, Homo sapiens
  misc_RNA (1)...(19): siRNA sense strand
ccucacagccagagccaga

SEQ ID NO: 2481357 - RNA, 19 nt, Homo sapiens
  misc_RNA (1)...(19): siRNA sense strand
ccaucauaggcgagacauu

SEQ ID NO: 2481358 - RNA, 19 nt, Homo sapiens
  misc_RNA (1)...(19): siRNA sense strand
aaagcaaguucaugggcau

SEQ ID NO: 2481359 - RNA, 19 nt, Homo sapiens
  misc_RNA (1)...(19): siRNA sense strand
cgaacaaaccucacagcca

SEQ ID NO: 2481360 - RNA, 19 nt, Homo sapiens
  misc_RNA (1)...(19): siRNA sense strand
acaccagaggagagaguca

SEQ ID NO: 2481361 - RNA, 19 nt, Homo sapiens
  misc_RNA (1)...(19): siRNA sense strand
uuguaaagcccauggggaa

SEQ ID NO: 2481362 - RNA, 19 nt, Homo sapiens
  misc_RNA (1)...(19): siRNA sense strand
aagauaaggaagagacgga

SEQ ID NO: 2481363 - RNA, 19 nt, Homo sapiens
  misc_RNA (1)...(19): siRNA sense strand
ccauagugucccugagcga

SEQ ID NO: 2481364 - RNA, 19 nt, Homo sapiens
  misc_RNA (1)...(19): siRNA sense strand
gggaagguguguugaggcu

SEQ ID NO: 2481365 - RNA, 19 nt, Homo sapiens
  misc_RNA (1)...(19): siRNA sense strand
gguggagcucggaggaaaa

SEQ ID NO: 2481366 - RNA, 19 nt, Homo sapiens
  misc_RNA (1)...(19): siRNA sense strand
gugaaugagcaaagcaaac

SEQ ID NO: 2481367 - RNA, 19 nt, Homo sapiens
  misc_RNA (1)...(19): siRNA sense strand
gagcaaagcaaacaccaga

SEQ ID NO: 2481368 - RNA, 19 nt, Homo sapiens
  misc_RNA (1)...(19): siRNA sense strand
ccagaagccucgaggaguc

SEQ ID NO: 2481369 - RNA, 19 nt, Homo sapiens
  misc_RNA (1)...(19): siRNA sense strand
cccgaagagccaagaguca

SEQ ID NO: 2481370 - RNA, 19 nt, Homo sapiens
  misc_RNA (1)...(19): siRNA sense strand
auaaggaagagacggaauu

SEQ ID NO: 2481371 - RNA, 19 nt, Homo sapiens
  misc_RNA (1)...(19): siRNA sense strand
acugugagugcgaggagaa

SEQ ID NO: 2481372 - RNA, 19 nt, Homo sapiens
  misc_RNA (1)...(19): siRNA sense strand
guggaagggcagcagaaga

SEQ ID NO: 2481373 - RNA, 19 nt, Homo sapiens
  misc_RNA (1)...(19): siRNA sense strand
gggucaagccuaagaggac

SEQ ID NO: 2481374 - RNA, 19 nt, Homo sapiens
  misc_RNA (1)...(19): siRNA sense strand
acaacaauggagaaaccaa

SEQ ID NO: 2481375 - RNA, 19 nt, Homo sapiens
  misc_RNA (1)...(19): siRNA sense strand
ugugaaugagcaaagcaaa

SEQ ID NO: 2481376 - RNA, 19 nt, Homo sapiens
  misc_RNA (1)...(19): siRNA sense strand
agguggaagggcagcagaa

SEQ ID NO: 2481377 - RNA, 19 nt, Homo sapiens
  misc_RNA (1)...(19): siRNA sense strand
aacuaagguuuguggcuga

SEQ ID NO: 2481378 - RNA, 19 nt, Homo sapiens
  misc_RNA (1)...(19): siRNA sense strand
gguuuguggcugagcaagu

SEQ ID NO: 2481379 - RNA, 19 nt, Homo sapiens
  misc_RNA (1)...(19): siRNA sense strand
acucagcgacagugauauu

SEQ ID NO: 2481380 - RNA, 19 nt, Homo sapiens
  misc_RNA (1)...(19): siRNA sense strand
gccaacauaaccugggcaa

SEQ ID NO: 2481381 - RNA, 19 nt, Homo sapiens
  misc_RNA (1)...(19): siRNA sense strand
acucauguauggaccaaaa

SEQ ID NO: 2481382 - RNA, 19 nt, Homo sapiens
  misc_RNA (1)...(19): siRNA sense strand
gaggaacggaagcgcgaga

SEQ ID NO: 2481383 - RNA, 19 nt, Homo sapiens
  misc_RNA (1)...(19): siRNA sense strand
ccacaccagaggagagagu

SEQ ID NO: 2481384 - RNA, 19 nt, Homo sapiens
  misc_RNA (1)...(19): siRNA sense strand
cagugauauuccacacgaa

SEQ ID NO: 2481385 - RNA, 19 nt, Homo sapiens
  misc_RNA (1)...(19): siRNA sense strand
gagaugagauucugcgcua

SEQ ID NO: 2481386 - RNA, 19 nt, Homo sapiens
  misc_RNA (1)...(19): siRNA sense strand
gauaugaugugguggcuga

SEQ ID NO: 2481387 - RNA, 19 nt, Homo sapiens
  misc_RNA (1)...(19): siRNA sense strand
gggaagagaagcagggcac

SEQ ID NO: 2481388 - RNA, 19 nt, Homo sapiens
  misc_RNA (1)...(19): siRNA sense strand
ccuuggaagugcugaaaau

SEQ ID NO: 2481389 - RNA, 19 nt, Homo sapiens
  misc_RNA (1)...(19): siRNA sense strand
ugauuugcaaacugggaaa

SEQ ID NO: 2481390 - RNA, 19 nt, Homo sapiens
  misc_RNA (1)...(19): siRNA sense strand
ccucaauucggcaguggaa

SEQ ID NO: 2481391 - RNA, 19 nt, Homo sapiens
  misc_RNA (1)...(19): siRNA sense strand
gggaggagguacucgccuu

SEQ ID NO: 2481392 - RNA, 19 nt, Homo sapiens
  misc_RNA (1)...(19): siRNA sense strand
aagcaaucugggaagagaa

SEQ ID NO: 2481393 - RNA, 19 nt, Homo sapiens
  misc_RNA (1)...(19): siRNA sense strand
uggacuaugacgugguaga

SEQ ID NO: 2481394 - RNA, 19 nt, Homo sapiens
  misc_RNA (1)...(19): siRNA sense strand
acgugguagagaugagcaa

SEQ ID NO: 2481395 - RNA, 19 nt, Homo sapiens
  misc_RNA (1)...(19): siRNA sense strand
caaucugggaagagaagca

SEQ ID NO: 2481396 - RNA, 19 nt, Homo sapiens
  misc_RNA (1)...(19): siRNA sense strand
gagaagugguugcaggaca

SEQ ID NO: 2481397 - RNA, 19 nt, Homo sapiens
  misc_RNA (1)...(19): siRNA sense strand
ggaauuggacugugggcau

SEQ ID NO: 2481398 - RNA, 19 nt, Homo sapiens
  misc_RNA (1)...(19): siRNA sense strand
gcugcagauauuugggaua

SEQ ID NO: 2481399 - RNA, 19 nt, Homo sapiens
  misc_RNA (1)...(19): siRNA sense strand
caaugcaagucgagagcga

SEQ ID NO: 2481400 - RNA, 19 nt, Homo sapiens
  misc_RNA (1)...(19): siRNA sense strand
caucagagcauaucgggau

SEQ ID NO: 2481401 - RNA, 19 nt, Homo sapiens
  misc_RNA (1)...(19): siRNA sense strand
uagacuucacccaggaaua

SEQ ID NO: 2481402 - RNA, 19 nt, Homo sapiens
  misc_RNA (1)...(19): siRNA sense strand
cugugggcauggaaugaaa

SEQ ID NO: 2481403 - RNA, 19 nt, Homo sapiens
  misc_RNA (1)...(19): siRNA sense strand
cauuggagcgcuacgggaa

SEQ ID NO: 2481404 - RNA, 19 nt, Homo sapiens
  misc_RNA (1)...(19): siRNA sense strand
gcacuaaagaucccgcaga

SEQ ID NO: 2481405 - RNA, 19 nt, Homo sapiens
  misc_RNA (1)...(19): siRNA sense strand
gagaacaacgagaggguga

SEQ ID NO: 2481406 - RNA, 19 nt, Homo sapiens
  misc_RNA (1)...(19): siRNA sense strand
ugguaagguuugugaggau

SEQ ID NO: 2481407 - RNA, 19 nt, Homo sapiens
  misc_RNA (1)...(19): siRNA sense strand
uggcaauggcaaagcagaa

SEQ ID NO: 2481408 - RNA, 19 nt, Homo sapiens
  misc_RNA (1)...(19): siRNA sense strand
cuaaagaugugcuuggcuu

SEQ ID NO: 2481409 - RNA, 19 nt, Homo sapiens
  misc_RNA (1)...(19): siRNA sense strand
cugcaauaguacacagagu

SEQ ID NO: 2481410 - RNA, 19 nt, Homo sapiens
  misc_RNA (1)...(19): siRNA sense strand
guaugaaauugaaacggau

SEQ ID NO: 2481411 - RNA, 19 nt, Homo sapiens
  misc_RNA (1)...(19): siRNA sense strand
ggaaaagaaagaagcacau

SEQ ID NO: 2481412 - RNA, 19 nt, Homo sapiens
  misc_RNA (1)...(19): siRNA sense strand
ugacguauguagaaggagu

SEQ ID NO: 2481413 - RNA, 19 nt, Homo sapiens
  misc_RNA (1)...(19): siRNA sense strand
uugugaggauccugagaau

SEQ ID NO: 2481414 - RNA, 19 nt, Homo sapiens
  misc_RNA (1)...(19): siRNA sense strand
acuccuuggcaauggcaaa

SEQ ID NO: 2481415 - RNA, 19 nt, Homo sapiens
  misc_RNA (1)...(19): siRNA sense strand
aggaaaagaaagaagcaca

SEQ ID NO: 2481416 - RNA, 19 nt, Homo sapiens
  misc_RNA (1)...(19): siRNA sense strand
aauaguacacagagugaca

SEQ ID NO: 2481417 - RNA, 19 nt, Homo sapiens
  misc_RNA (1)...(19): siRNA sense strand
agacaaucgacuucuggaa

SEQ ID NO: 2481418 - RNA, 19 nt, Homo sapiens
  misc_RNA (1)...(19): siRNA sense strand
aaguguuguucuacaguau

SEQ ID NO: 2481419 - RNA, 19 nt, Homo sapiens
  misc_RNA (1)...(19): siRNA sense strand
ucuacuaugccgagagagu

SEQ ID NO: 2481420 - RNA, 19 nt, Homo sapiens
  misc_RNA (1)...(19): siRNA sense strand
aguaugaaauugaaacgga

SEQ ID NO: 2481421 - RNA, 19 nt, Homo sapiens
  misc_RNA (1)...(19): siRNA sense strand
guguguguggugugguuua

SEQ ID NO: 2481422 - RNA, 19 nt, Homo sapiens
  misc_RNA (1)...(19): siRNA sense strand
caucaauggcacaaguguu

SEQ ID NO: 2481423 - RNA, 19 nt, Homo sapiens
  misc_RNA (1)...(19): siRNA sense strand
ucauugacuuuguggccau

SEQ ID NO: 2481424 - RNA, 19 nt, Homo sapiens
  misc_RNA (1)...(19): siRNA sense strand
uguacuacuccuuggcaau

SEQ ID NO: 2481425 - RNA, 19 nt, Homo sapiens
  misc_RNA (1)...(19): siRNA sense strand
gagaacaacgagaggguga

SEQ ID NO: 2481426 - RNA, 19 nt, Homo sapiens
  misc_RNA (1)...(19): siRNA sense strand
ugguaagguuugugaggau

SEQ ID NO: 2481427 - RNA, 19 nt, Homo sapiens
  misc_RNA (1)...(19): siRNA sense strand
uggcaauggcaaagcagaa

SEQ ID NO: 2481428 - RNA, 19 nt, Homo sapiens
  misc_RNA (1)...(19): siRNA sense strand
cuaaagaugugcuuggcuu

SEQ ID NO: 2481429 - RNA, 19 nt, Homo sapiens
  misc_RNA (1)...(19): siRNA sense strand
cugcaauaguacacagagu

SEQ ID NO: 2481430 - RNA, 19 nt, Homo sapiens
  misc_RNA (1)...(19): siRNA sense strand
guaugaaauugaaacggau

SEQ ID NO: 2481431 - RNA, 19 nt, Homo sapiens
  misc_RNA (1)...(19): siRNA sense strand
ggaaaagaaagaagcacau

SEQ ID NO: 2481432 - RNA, 19 nt, Homo sapiens
  misc_RNA (1)...(19): siRNA sense strand
ugacguauguagaaggagu

SEQ ID NO: 2481433 - RNA, 19 nt, Homo sapiens
  misc_RNA (1)...(19): siRNA sense strand
uugugaggauccugagaau

SEQ ID NO: 2481434 - RNA, 19 nt, Homo sapiens
  misc_RNA (1)...(19): siRNA sense strand
acuccuuggcaauggcaaa

SEQ ID NO: 2481435 - RNA, 19 nt, Homo sapiens
  misc_RNA (1)...(19): siRNA sense strand
aggaaaagaaagaagcaca

SEQ ID NO: 2481436 - RNA, 19 nt, Homo sapiens
  misc_RNA (1)...(19): siRNA sense strand
aauaguacacagagugaca

SEQ ID NO: 2481437 - RNA, 19 nt, Homo sapiens
  misc_RNA (1)...(19): siRNA sense strand
agacaaucgacuucuggaa

SEQ ID NO: 2481438 - RNA, 19 nt, Homo sapiens
  misc_RNA (1)...(19): siRNA sense strand
aaguguuguucuacaguau

SEQ ID NO: 2481439 - RNA, 19 nt, Homo sapiens
  misc_RNA (1)...(19): siRNA sense strand
ucuacuaugccgagagagu

SEQ ID NO: 2481440 - RNA, 19 nt, Homo sapiens
  misc_RNA (1)...(19): siRNA sense strand
aguaugaaauugaaacgga

SEQ ID NO: 2481441 - RNA, 19 nt, Homo sapiens
  misc_RNA (1)...(19): siRNA sense strand
guguguguggugugguuua

SEQ ID NO: 2481442 - RNA, 19 nt, Homo sapiens
  misc_RNA (1)...(19): siRNA sense strand
caucaauggcacaaguguu

SEQ ID NO: 2481443 - RNA, 19 nt, Homo sapiens
  misc_RNA (1)...(19): siRNA sense strand
ucauugacuuuguggccau

SEQ ID NO: 2481444 - RNA, 19 nt, Homo sapiens
  misc_RNA (1)...(19): siRNA sense strand
uguacuacuccuuggcaau

SEQ ID NO: 2481445 - RNA, 19 nt, Homo sapiens
  misc_RNA (1)...(19): siRNA sense strand
gagaacaacgagaggguga

SEQ ID NO: 2481446 - RNA, 19 nt, Homo sapiens
  misc_RNA (1)...(19): siRNA sense strand
ugguaagguuugugaggau

SEQ ID NO: 2481447 - RNA, 19 nt, Homo sapiens
  misc_RNA (1)...(19): siRNA sense strand
uggcaauggcaaagcagaa

SEQ ID NO: 2481448 - RNA, 19 nt, Homo sapiens
  misc_RNA (1)...(19): siRNA sense strand
cuaaagaugugcuuggcuu

SEQ ID NO: 2481449 - RNA, 19 nt, Homo sapiens
  misc_RNA (1)...(19): siRNA sense strand
cugcaauaguacacagagu

SEQ ID NO: 2481450 - RNA, 19 nt, Homo sapiens
  misc_RNA (1)...(19): siRNA sense strand
guaugaaauugaaacggau

SEQ ID NO: 2481451 - RNA, 19 nt, Homo sapiens
  misc_RNA (1)...(19): siRNA sense strand
ggaaaagaaagaagcacau

SEQ ID NO: 2481452 - RNA, 19 nt, Homo sapiens
  misc_RNA (1)...(19): siRNA sense strand
ugacguauguagaaggagu

SEQ ID NO: 2481453 - RNA, 19 nt, Homo sapiens
  misc_RNA (1)...(19): siRNA sense strand
uugugaggauccugagaau

SEQ ID NO: 2481454 - RNA, 19 nt, Homo sapiens
  misc_RNA (1)...(19): siRNA sense strand
acuccuuggcaauggcaaa

SEQ ID NO: 2481455 - RNA, 19 nt, Homo sapiens
  misc_RNA (1)...(19): siRNA sense strand
aggaaaagaaagaagcaca

SEQ ID NO: 2481456 - RNA, 19 nt, Homo sapiens
  misc_RNA (1)...(19): siRNA sense strand
aauaguacacagagugaca

SEQ ID NO: 2481457 - RNA, 19 nt, Homo sapiens
  misc_RNA (1)...(19): siRNA sense strand
agacaaucgacuucuggaa

SEQ ID NO: 2481458 - RNA, 19 nt, Homo sapiens
  misc_RNA (1)...(19): siRNA sense strand
aaguguuguucuacaguau

SEQ ID NO: 2481459 - RNA, 19 nt, Homo sapiens
  misc_RNA (1)...(19): siRNA sense strand
ucuacuaugccgagagagu

SEQ ID NO: 2481460 - RNA, 19 nt, Homo sapiens
  misc_RNA (1)...(19): siRNA sense strand
aguaugaaauugaaacgga

SEQ ID NO: 2481461 - RNA, 19 nt, Homo sapiens
  misc_RNA (1)...(19): siRNA sense strand
guguguguggugugguuua

SEQ ID NO: 2481462 - RNA, 19 nt, Homo sapiens
  misc_RNA (1)...(19): siRNA sense strand
caucaauggcacaaguguu

SEQ ID NO: 2481463 - RNA, 19 nt, Homo sapiens
  misc_RNA (1)...(19): siRNA sense strand
ucauugacuuuguggccau

SEQ ID NO: 2481464 - RNA, 19 nt, Homo sapiens
  misc_RNA (1)...(19): siRNA sense strand
uguacuacuccuuggcaau

SEQ ID NO: 2481465 - RNA, 19 nt, Homo sapiens
  misc_RNA (1)...(19): siRNA sense strand
gcgaugagguggaggcaga

SEQ ID NO: 2481466 - RNA, 19 nt, Homo sapiens
  misc_RNA (1)...(19): siRNA sense strand
aggcagagcuggugcacga

SEQ ID NO: 2481467 - RNA, 19 nt, Homo sapiens
  misc_RNA (1)...(19): siRNA sense strand
ggaacaaagacgagcucau

SEQ ID NO: 2481468 - RNA, 19 nt, Homo sapiens
  misc_RNA (1)...(19): siRNA sense strand
gggaagaagaagggcaaga

SEQ ID NO: 2481469 - RNA, 19 nt, Homo sapiens
  misc_RNA (1)...(19): siRNA sense strand
cagaagauagagaaggaga

SEQ ID NO: 2481470 - RNA, 19 nt, Homo sapiens
  misc_RNA (1)...(19): siRNA sense strand
cuguuugagcagaggaaga

SEQ ID NO: 2481471 - RNA, 19 nt, Homo sapiens
  misc_RNA (1)...(19): siRNA sense strand
auagagaaggagacgcaaa

SEQ ID NO: 2481472 - RNA, 19 nt, Homo sapiens
  misc_RNA (1)...(19): siRNA sense strand
agauagagaaggagacgca

SEQ ID NO: 2481473 - RNA, 19 nt, Homo sapiens
  misc_RNA (1)...(19): siRNA sense strand
ggacaagagcgaagccauc

SEQ ID NO: 2481474 - RNA, 19 nt, Homo sapiens
  misc_RNA (1)...(19): siRNA sense strand
gcaagaaggcgccagcaga

SEQ ID NO: 2481475 - RNA, 19 nt, Homo sapiens
  misc_RNA (1)...(19): siRNA sense strand
cgacgagcucauccggaaa

SEQ ID NO: 2481476 - RNA, 19 nt, Homo sapiens
  misc_RNA (1)...(19): siRNA sense strand
acgacgagcucauccggaa

SEQ ID NO: 2481477 - RNA, 19 nt, Homo sapiens
  misc_RNA (1)...(19): siRNA sense strand
aggacucggagcagagcaa

SEQ ID NO: 2481478 - RNA, 19 nt, Homo sapiens
  misc_RNA (1)...(19): siRNA sense strand
gagaugucgcugugggagu

SEQ ID NO: 2481479 - RNA, 19 nt, Homo sapiens
  misc_RNA (1)...(19): siRNA sense strand
aggggaagaagaagggcaa

SEQ ID NO: 2481480 - RNA, 19 nt, Homo sapiens
  misc_RNA (1)...(19): siRNA sense strand
gcaaagcugcagaagcaca

SEQ ID NO: 2481481 - RNA, 19 nt, Homo sapiens
  misc_RNA (1)...(19): siRNA sense strand
agcacauggacgaggucaa

SEQ ID NO: 2481482 - RNA, 19 nt, Homo sapiens
  misc_RNA (1)...(19): siRNA sense strand
ccaaggaccuguuugagca

SEQ ID NO: 2481483 - RNA, 19 nt, Homo sapiens
  misc_RNA (1)...(19): siRNA sense strand
uggacgaggucaacgacga

SEQ ID NO: 2481484 - RNA, 19 nt, Homo sapiens
  misc_RNA (1)...(19): siRNA sense strand
ucgacgagcuggugaggga

SEQ ID NO: 2481485 - RNA, 19 nt, Homo sapiens
  misc_RNA (1)...(19): siRNA sense strand
aguuugagcaggagauuga

SEQ ID NO: 2481486 - RNA, 19 nt, Homo sapiens
  misc_RNA (1)...(19): siRNA sense strand
gcaagaacgagaagagcgu

SEQ ID NO: 2481487 - RNA, 19 nt, Homo sapiens
  misc_RNA (1)...(19): siRNA sense strand
ggauggacacacagccaga

SEQ ID NO: 2481488 - RNA, 19 nt, Homo sapiens
  misc_RNA (1)...(19): siRNA sense strand
ucgacgagcuggugaggga

SEQ ID NO: 2481489 - RNA, 19 nt, Homo sapiens
  misc_RNA (1)...(19): siRNA sense strand
aguuugagcaggagauuga

SEQ ID NO: 2481490 - RNA, 19 nt, Homo sapiens
  misc_RNA (1)...(19): siRNA sense strand
gcaagaacgagaagagcgu

SEQ ID NO: 2481491 - RNA, 19 nt, Homo sapiens
  misc_RNA (1)...(19): siRNA sense strand
ggauggacacacagccaga

SEQ ID NO: 2481492 - RNA, 19 nt, Homo sapiens
  misc_RNA (1)...(19): siRNA sense strand
ucgacgagcuggugaggga

SEQ ID NO: 2481493 - RNA, 19 nt, Homo sapiens
  misc_RNA (1)...(19): siRNA sense strand
aguuugagcaggagauuga

SEQ ID NO: 2481494 - RNA, 19 nt, Homo sapiens
  misc_RNA (1)...(19): siRNA sense strand
gcaagaacgagaagagcgu

SEQ ID NO: 2481495 - RNA, 19 nt, Homo sapiens
  misc_RNA (1)...(19): siRNA sense strand
caauauggccuuugggaag

SEQ ID NO: 2481496 - RNA, 19 nt, Homo sapiens
  misc_RNA (1)...(19): siRNA sense strand
uucagaugaccgaggaaua

SEQ ID NO: 2481497 - RNA, 19 nt, Homo sapiens
  misc_RNA (1)...(19): siRNA sense strand
gcaccaacgagaagaucca

SEQ ID NO: 2481498 - RNA, 19 nt, Homo sapiens
  misc_RNA (1)...(19): siRNA sense strand
agauggaaugaaagcacua

SEQ ID NO: 2481499 - RNA, 19 nt, Homo sapiens
  misc_RNA (1)...(19): siRNA sense strand
ccauggucuuggagcugaa

SEQ ID NO: 2481500 - RNA, 19 nt, Homo sapiens
  misc_RNA (1)...(19): siRNA sense strand
agcuagugaucuuggauga

SEQ ID NO: 2481501 - RNA, 19 nt, Homo sapiens
  misc_RNA (1)...(19): siRNA sense strand
ucguggaagaagagaaagu

SEQ ID NO: 2481502 - RNA, 19 nt, Homo sapiens
  misc_RNA (1)...(19): siRNA sense strand
uuugcuagcacaaggacaa

SEQ ID NO: 2481503 - RNA, 19 nt, Homo sapiens
  misc_RNA (1)...(19): siRNA sense strand
caaugaagaccgacugcca

SEQ ID NO: 2481504 - RNA, 19 nt, Homo sapiens
  misc_RNA (1)...(19): siRNA sense strand
caauauggccuuugggaag

SEQ ID NO: 2481505 - RNA, 19 nt, Homo sapiens
  misc_RNA (1)...(19): siRNA sense strand
uucagaugaccgaggaaua

SEQ ID NO: 2481506 - RNA, 19 nt, Homo sapiens
  misc_RNA (1)...(19): siRNA sense strand
gcaccaacgagaagaucca

SEQ ID NO: 2481507 - RNA, 19 nt, Homo sapiens
  misc_RNA (1)...(19): siRNA sense strand
agauggaaugaaagcacua

SEQ ID NO: 2481508 - RNA, 19 nt, Homo sapiens
  misc_RNA (1)...(19): siRNA sense strand
agcuagugaucuuggauga

SEQ ID NO: 2481509 - RNA, 19 nt, Homo sapiens
  misc_RNA (1)...(19): siRNA sense strand
ucguggaagaagagaaagu

SEQ ID NO: 2481510 - RNA, 19 nt, Homo sapiens
  misc_RNA (1)...(19): siRNA sense strand
uuugcuagcacaaggacaa

SEQ ID NO: 2481511 - RNA, 19 nt, Homo sapiens
  misc_RNA (1)...(19): siRNA sense strand
gugcggaagcuucgggaga

SEQ ID NO: 2481512 - RNA, 19 nt, Homo sapiens
  misc_RNA (1)...(19): siRNA sense strand
gcuccagcuccgauggcaa

SEQ ID NO: 2481513 - RNA, 19 nt, Homo sapiens
  misc_RNA (1)...(19): siRNA sense strand
gcaaaugagaauagcacug

SEQ ID NO: 2481514 - RNA, 19 nt, Homo sapiens
  misc_RNA (1)...(19): siRNA sense strand
gugcggaagcuucgggaga

SEQ ID NO: 2481515 - RNA, 19 nt, Homo sapiens
  misc_RNA (1)...(19): siRNA sense strand
gcuccagcuccgauggcaa

SEQ ID NO: 2481516 - RNA, 19 nt, Homo sapiens
  misc_RNA (1)...(19): siRNA sense strand
gcaaaugagaauagcacug

SEQ ID NO: 2481517 - RNA, 19 nt, Homo sapiens
  misc_RNA (1)...(19): siRNA sense strand
gugcggaagcuucgggaga

SEQ ID NO: 2481518 - RNA, 19 nt, Homo sapiens
  misc_RNA (1)...(19): siRNA sense strand
gcuccagcuccgauggcaa

SEQ ID NO: 2481519 - RNA, 19 nt, Homo sapiens
  misc_RNA (1)...(19): siRNA sense strand
gcaaaugagaauagcacug

SEQ ID NO: 2481520 - RNA, 19 nt, Homo sapiens
  misc_RNA (1)...(19): siRNA sense strand
cgacauuggcuaugcgcua

SEQ ID NO: 2481521 - RNA, 19 nt, Homo sapiens
  misc_RNA (1)...(19): siRNA sense strand
gcagacagcuggaaggaac

SEQ ID NO: 2481522 - RNA, 19 nt, Homo sapiens
  misc_RNA (1)...(19): siRNA sense strand
aggaugacaccaaggcaga

SEQ ID NO: 2481523 - RNA, 19 nt, Homo sapiens
  misc_RNA (1)...(19): siRNA sense strand
cugcagaaacugauccuga

SEQ ID NO: 2481524 - RNA, 19 nt, Homo sapiens
  misc_RNA (1)...(19): siRNA sense strand
cgaccaugacgcugggacu

SEQ ID NO: 2481525 - RNA, 19 nt, Homo sapiens
  misc_RNA (1)...(19): siRNA sense strand
cgacauuggcuaugcgcua

SEQ ID NO: 2481526 - RNA, 19 nt, Homo sapiens
  misc_RNA (1)...(19): siRNA sense strand
gcagacagcuggaaggaac

SEQ ID NO: 2481527 - RNA, 19 nt, Homo sapiens
  misc_RNA (1)...(19): siRNA sense strand
aggaugacaccaaggcaga

SEQ ID NO: 2481528 - RNA, 19 nt, Homo sapiens
  misc_RNA (1)...(19): siRNA sense strand
cugcagaaacugauccuga

SEQ ID NO: 2481529 - RNA, 19 nt, Homo sapiens
  misc_RNA (1)...(19): siRNA sense strand
cgaccaugacgcugggacu

SEQ ID NO: 2481530 - RNA, 19 nt, Homo sapiens
  misc_RNA (1)...(19): siRNA sense strand
acauagaugaagugguaua

SEQ ID NO: 2481531 - RNA, 19 nt, Homo sapiens
  misc_RNA (1)...(19): siRNA sense strand
acaaaguagaggaaagaau

SEQ ID NO: 2481532 - RNA, 19 nt, Homo sapiens
  misc_RNA (1)...(19): siRNA sense strand
gccaaagaagggagagaau

SEQ ID NO: 2481533 - RNA, 19 nt, Homo sapiens
  misc_RNA (1)...(19): siRNA sense strand
agguggagacggaggcaua

SEQ ID NO: 2481534 - RNA, 19 nt, Homo sapiens
  misc_RNA (1)...(19): siRNA sense strand
gggcaguggcaaagaagau

SEQ ID NO: 2481535 - RNA, 19 nt, Homo sapiens
  misc_RNA (1)...(19): siRNA sense strand
gcgccaaagcugaugguga

SEQ ID NO: 2481536 - RNA, 19 nt, Homo sapiens
  misc_RNA (1)...(19): siRNA sense strand
gauugauggguguaagaaa

SEQ ID NO: 2481537 - RNA, 19 nt, Homo sapiens
  misc_RNA (1)...(19): siRNA sense strand
gaagaaagcuaaacccuga

SEQ ID NO: 2481538 - RNA, 19 nt, Homo sapiens
  misc_RNA (1)...(19): siRNA sense strand
aguagaggaaagaaugaaa

SEQ ID NO: 2481539 - RNA, 19 nt, Homo sapiens
  misc_RNA (1)...(19): siRNA sense strand
ggucacuaugguagagauu

SEQ ID NO: 2481540 - RNA, 19 nt, Homo sapiens
  misc_RNA (1)...(19): siRNA sense strand
uuaauuuggcagagaguga

SEQ ID NO: 2481541 - RNA, 19 nt, Homo sapiens
  misc_RNA (1)...(19): siRNA sense strand
uagacaaucuuaaaggaga

SEQ ID NO: 2481542 - RNA, 19 nt, Homo sapiens
  misc_RNA (1)...(19): siRNA sense strand
agaagauuacacuggcaaa

SEQ ID NO: 2481543 - RNA, 19 nt, Homo sapiens
  misc_RNA (1)...(19): siRNA sense strand
uggugaugcgcaaggcaaa

SEQ ID NO: 2481544 - RNA, 19 nt, Homo sapiens
  misc_RNA (1)...(19): siRNA sense strand
uuaugauggugaugcgcaa

SEQ ID NO: 2481545 - RNA, 19 nt, Homo sapiens
  misc_RNA (1)...(19): siRNA sense strand
gcagagagugauuuggcau

SEQ ID NO: 2481546 - RNA, 19 nt, Homo sapiens
  misc_RNA (1)...(19): siRNA sense strand
uugauggguguaagaaaua

SEQ ID NO: 2481547 - RNA, 19 nt, Homo sapiens
  misc_RNA (1)...(19): siRNA sense strand
gaagauuccacaugggagu

SEQ ID NO: 2481548 - RNA, 19 nt, Homo sapiens
  misc_RNA (1)...(19): siRNA sense strand
aggaggagccaucgacaga

SEQ ID NO: 2481549 - RNA, 19 nt, Homo sapiens
  misc_RNA (1)...(19): siRNA sense strand
augaagugguauaugacga

SEQ ID NO: 2481550 - RNA, 19 nt, Homo sapiens
  misc_RNA (1)...(19): siRNA sense strand
caaaggagaucgucugugu

SEQ ID NO: 2481551 - RNA, 19 nt, Homo sapiens
  misc_RNA (1)...(19): siRNA sense strand
acgccaaagaagggagaga

SEQ ID NO: 2481552 - RNA, 19 nt, Homo sapiens
  misc_RNA (1)...(19): siRNA sense strand
agacaaucuuaaaggagac

SEQ ID NO: 2481553 - RNA, 19 nt, Homo sapiens
  misc_RNA (1)...(19): siRNA sense strand
acucagucgucgagguaau

SEQ ID NO: 2481554 - RNA, 19 nt, Homo sapiens
  misc_RNA (1)...(19): siRNA sense strand
gcgccaacauucuggacga

SEQ ID NO: 2481555 - RNA, 19 nt, Homo sapiens
  misc_RNA (1)...(19): siRNA sense strand
ucagagaggagcuggccua

SEQ ID NO: 2481556 - RNA, 19 nt, Homo sapiens
  misc_RNA (1)...(19): siRNA sense strand
aggaguucgacaaggagaa

SEQ ID NO: 2481557 - RNA, 19 nt, Homo sapiens
  misc_RNA (1)...(19): siRNA sense strand
ccagcgaggaggacugcaa

SEQ ID NO: 2481558 - RNA, 19 nt, Homo sapiens
  misc_RNA (1)...(19): siRNA sense strand
gcaagugucugguggaggu

SEQ ID NO: 2481559 - RNA, 19 nt, Homo sapiens
  misc_RNA (1)...(19): siRNA sense strand
gagaaagccuggagagccg

SEQ ID NO: 2481560 - RNA, 19 nt, Homo sapiens
  misc_RNA (1)...(19): siRNA sense strand
acacaagggacgugggaca

SEQ ID NO: 2481561 - RNA, 19 nt, Homo sapiens
  misc_RNA (1)...(19): siRNA sense strand
acucaaagcacgucagcua

SEQ ID NO: 2481562 - RNA, 19 nt, Homo sapiens
  misc_RNA (1)...(19): siRNA sense strand
aagaaggagaugaggaaaa

SEQ ID NO: 2481563 - RNA, 19 nt, Homo sapiens
  misc_RNA (1)...(19): siRNA sense strand
cggaggaauugaaagaaaa

SEQ ID NO: 2481564 - RNA, 19 nt, Homo sapiens
  misc_RNA (1)...(19): siRNA sense strand
aguuaaaagacgagugaau

SEQ ID NO: 2481565 - RNA, 19 nt, Homo sapiens
  misc_RNA (1)...(19): siRNA sense strand
gcguauaaucccaagauca

SEQ ID NO: 2481566 - RNA, 19 nt, Homo sapiens
  misc_RNA (1)...(19): siRNA sense strand
uguugaagaaguagaagaa

SEQ ID NO: 2481567 - RNA, 19 nt, Homo sapiens
  misc_RNA (1)...(19): siRNA sense strand
gugcacagauagaagccaa

SEQ ID NO: 2481568 - RNA, 19 nt, Homo sapiens
  misc_RNA (1)...(19): siRNA sense strand
aagaagaagcagaaacaca

SEQ ID NO: 2481569 - RNA, 19 nt, Homo sapiens
  misc_RNA (1)...(19): siRNA sense strand
cuauuaagaagaagcagaa

SEQ ID NO: 2481570 - RNA, 19 nt, Homo sapiens
  misc_RNA (1)...(19): siRNA sense strand
gugaagaagcggaugagga

SEQ ID NO: 2481571 - RNA, 19 nt, Homo sapiens
  misc_RNA (1)...(19): siRNA sense strand
aaguagaagaagaggaaac

SEQ ID NO: 2481572 - RNA, 19 nt, Homo sapiens
  misc_RNA (1)...(19): siRNA sense strand
aagaaaaggccaagauuga

SEQ ID NO: 2481573 - RNA, 19 nt, Homo sapiens
  misc_RNA (1)...(19): siRNA sense strand
auggaaaccagaugaagaa

SEQ ID NO: 2481574 - RNA, 19 nt, Homo sapiens
  misc_RNA (1)...(19): siRNA sense strand
gggaagaagaaggagauga

SEQ ID NO: 2481575 - RNA, 19 nt, Homo sapiens
  misc_RNA (1)...(19): siRNA sense strand
cuuugaacccaaugaauau

SEQ ID NO: 2481576 - RNA, 19 nt, Homo sapiens
  misc_RNA (1)...(19): siRNA sense strand
ccaagauugaagaugagaa

SEQ ID NO: 2481577 - RNA, 19 nt, Homo sapiens
  misc_RNA (1)...(19): siRNA sense strand
cuauugaagaugaugauga

SEQ ID NO: 2481578 - RNA, 19 nt, Homo sapiens
  misc_RNA (1)...(19): siRNA sense strand
cagaugaagaagaugagau

SEQ ID NO: 2481579 - RNA, 19 nt, Homo sapiens
  misc_RNA (1)...(19): siRNA sense strand
gugccagauagauuggaaa

SEQ ID NO: 2481580 - RNA, 19 nt, Homo sapiens
  misc_RNA (1)...(19): siRNA sense strand
acuauuaagaagaagcaga

SEQ ID NO: 2481581 - RNA, 19 nt, Homo sapiens
  misc_RNA (1)...(19): siRNA sense strand
agaagaggaaacuggugaa

SEQ ID NO: 2481582 - RNA, 19 nt, Homo sapiens
  misc_RNA (1)...(19): siRNA sense strand
augaagaagaugagauuuc

SEQ ID NO: 2481583 - RNA, 19 nt, Homo sapiens
  misc_RNA (1)...(19): siRNA sense strand
gaccagaaauuauggguug

SEQ ID NO: 2481584 - RNA, 19 nt, Homo sapiens
  misc_RNA (1)...(19): siRNA sense strand
aauggaaaccagaugaaga

SEQ ID NO: 2481585 - RNA, 19 nt, Homo sapiens
  misc_RNA (1)...(19): siRNA sense strand
cuggagaagcuauugaaga

SEQ ID NO: 2481586 - RNA, 19 nt, Homo sapiens
  misc_RNA (1)...(19): siRNA sense strand
augagauuucggaggaauu

SEQ ID NO: 2481587 - RNA, 19 nt, Homo sapiens
  misc_RNA (1)...(19): siRNA sense strand
gguagaaacaccaacagga

SEQ ID NO: 2481588 - RNA, 19 nt, Homo sapiens
  misc_RNA (1)...(19): siRNA sense strand
aagaagaaggagaugagga

SEQ ID NO: 2481589 - RNA, 19 nt, Homo sapiens
  misc_RNA (1)...(19): siRNA sense strand
acaacaaagaacagucuga

SEQ ID NO: 2481590 - RNA, 19 nt, Homo sapiens
  misc_RNA (1)...(19): siRNA sense strand
uuaaaugugcacagauaga

SEQ ID NO: 2481591 - RNA, 19 nt, Homo sapiens
  misc_RNA (1)...(19): siRNA sense strand
acaaaugaagugcugacaa

SEQ ID NO: 2481592 - RNA, 19 nt, Homo sapiens
  misc_RNA (1)...(19): siRNA sense strand
uugaagaugaugaugauga

SEQ ID NO: 2481593 - RNA, 19 nt, Homo sapiens
  misc_RNA (1)...(19): siRNA sense strand
caggauacauugaaagccu

SEQ ID NO: 2481594 - RNA, 19 nt, Homo sapiens
  misc_RNA (1)...(19): siRNA sense strand
ugaauggaaaccagaugaa

SEQ ID NO: 2481595 - RNA, 19 nt, Homo sapiens
  misc_RNA (1)...(19): siRNA sense strand
aagaagaccccaaaggaau

SEQ ID NO: 2481596 - RNA, 19 nt, Homo sapiens
  misc_RNA (1)...(19): siRNA sense strand
cagcagagugcaagcagca

SEQ ID NO: 2481597 - RNA, 19 nt, Homo sapiens
  misc_RNA (1)...(19): siRNA sense strand
ggaugaggucagaaccaga

SEQ ID NO: 2481598 - RNA, 19 nt, Homo sapiens
  misc_RNA (1)...(19): siRNA sense strand
aagaagaggaaacugguga

SEQ ID NO: 2481599 - RNA, 19 nt, Homo sapiens
  misc_RNA (1)...(19): siRNA sense strand
aagaugagauuucggagga

SEQ ID NO: 2481600 - RNA, 19 nt, Homo sapiens
  misc_RNA (1)...(19): siRNA sense strand
ggaccagaaauuauggguu

SEQ ID NO: 2481601 - RNA, 19 nt, Homo sapiens
  misc_RNA (1)...(19): siRNA sense strand
uuuggaugauguugaagaa

SEQ ID NO: 2481602 - RNA, 19 nt, Homo sapiens
  misc_RNA (1)...(19): siRNA sense strand
gaagaaugugaauggaaac

SEQ ID NO: 2481603 - RNA, 19 nt, Homo sapiens
  misc_RNA (1)...(19): siRNA sense strand
aagaaguagaagaagagga

SEQ ID NO: 2481604 - RNA, 19 nt, Homo sapiens
  misc_RNA (1)...(19): siRNA sense strand
agaugagauuucggaggaa

SEQ ID NO: 2481605 - RNA, 19 nt, Homo sapiens
  misc_RNA (1)...(19): siRNA sense strand
agaaauuauggguuguaca

SEQ ID NO: 2481606 - RNA, 19 nt, Homo sapiens
  misc_RNA (1)...(19): siRNA sense strand
acccaaagaaggaucaaaa

SEQ ID NO: 2481607 - RNA, 19 nt, Homo sapiens
  misc_RNA (1)...(19): siRNA sense strand
acacaagggacgugggaca

SEQ ID NO: 2481608 - RNA, 19 nt, Homo sapiens
  misc_RNA (1)...(19): siRNA sense strand
acucaaagcacgucagcua

SEQ ID NO: 2481609 - RNA, 19 nt, Homo sapiens
  misc_RNA (1)...(19): siRNA sense strand
aagaaggagaugaggaaaa

SEQ ID NO: 2481610 - RNA, 19 nt, Homo sapiens
  misc_RNA (1)...(19): siRNA sense strand
cggaggaauugaaagaaaa

SEQ ID NO: 2481611 - RNA, 19 nt, Homo sapiens
  misc_RNA (1)...(19): siRNA sense strand
aguuaaaagacgagugaau

SEQ ID NO: 2481612 - RNA, 19 nt, Homo sapiens
  misc_RNA (1)...(19): siRNA sense strand
gcguauaaucccaagauca

SEQ ID NO: 2481613 - RNA, 19 nt, Homo sapiens
  misc_RNA (1)...(19): siRNA sense strand
uguugaagaaguagaagaa

SEQ ID NO: 2481614 - RNA, 19 nt, Homo sapiens
  misc_RNA (1)...(19): siRNA sense strand
gugcacagauagaagccaa

SEQ ID NO: 2481615 - RNA, 19 nt, Homo sapiens
  misc_RNA (1)...(19): siRNA sense strand
aagaagaagcagaaacaca

SEQ ID NO: 2481616 - RNA, 19 nt, Homo sapiens
  misc_RNA (1)...(19): siRNA sense strand
cuauuaagaagaagcagaa

SEQ ID NO: 2481617 - RNA, 19 nt, Homo sapiens
  misc_RNA (1)...(19): siRNA sense strand
gugaagaagcggaugagga

SEQ ID NO: 2481618 - RNA, 19 nt, Homo sapiens
  misc_RNA (1)...(19): siRNA sense strand
aaguagaagaagaggaaac

SEQ ID NO: 2481619 - RNA, 19 nt, Homo sapiens
  misc_RNA (1)...(19): siRNA sense strand
aagaaaaggccaagauuga

SEQ ID NO: 2481620 - RNA, 19 nt, Homo sapiens
  misc_RNA (1)...(19): siRNA sense strand
auggaaaccagaugaagaa

SEQ ID NO: 2481621 - RNA, 19 nt, Homo sapiens
  misc_RNA (1)...(19): siRNA sense strand
gggaagaagaaggagauga

SEQ ID NO: 2481622 - RNA, 19 nt, Homo sapiens
  misc_RNA (1)...(19): siRNA sense strand
cuuugaacccaaugaauau

SEQ ID NO: 2481623 - RNA, 19 nt, Homo sapiens
  misc_RNA (1)...(19): siRNA sense strand
ccaagauugaagaugagaa

SEQ ID NO: 2481624 - RNA, 19 nt, Homo sapiens
  misc_RNA (1)...(19): siRNA sense strand
cuauugaagaugaugauga

SEQ ID NO: 2481625 - RNA, 19 nt, Homo sapiens
  misc_RNA (1)...(19): siRNA sense strand
cagaugaagaagaugagau

SEQ ID NO: 2481626 - RNA, 19 nt, Homo sapiens
  misc_RNA (1)...(19): siRNA sense strand
gugccagauagauuggaaa

SEQ ID NO: 2481627 - RNA, 19 nt, Homo sapiens
  misc_RNA (1)...(19): siRNA sense strand
acuauuaagaagaagcaga

SEQ ID NO: 2481628 - RNA, 19 nt, Homo sapiens
  misc_RNA (1)...(19): siRNA sense strand
agaagaggaaacuggugaa

SEQ ID NO: 2481629 - RNA, 19 nt, Homo sapiens
  misc_RNA (1)...(19): siRNA sense strand
augaagaagaugagauuuc

SEQ ID NO: 2481630 - RNA, 19 nt, Homo sapiens
  misc_RNA (1)...(19): siRNA sense strand
gaccagaaauuauggguug

SEQ ID NO: 2481631 - RNA, 19 nt, Homo sapiens
  misc_RNA (1)...(19): siRNA sense strand
aauggaaaccagaugaaga

SEQ ID NO: 2481632 - RNA, 19 nt, Homo sapiens
  misc_RNA (1)...(19): siRNA sense strand
cuggagaagcuauugaaga

SEQ ID NO: 2481633 - RNA, 19 nt, Homo sapiens
  misc_RNA (1)...(19): siRNA sense strand
augagauuucggaggaauu

SEQ ID NO: 2481634 - RNA, 19 nt, Homo sapiens
  misc_RNA (1)...(19): siRNA sense strand
gguagaaacaccaacagga

SEQ ID NO: 2481635 - RNA, 19 nt, Homo sapiens
  misc_RNA (1)...(19): siRNA sense strand
aagaagaaggagaugagga

SEQ ID NO: 2481636 - RNA, 19 nt, Homo sapiens
  misc_RNA (1)...(19): siRNA sense strand
acaacaaagaacagucuga

SEQ ID NO: 2481637 - RNA, 19 nt, Homo sapiens
  misc_RNA (1)...(19): siRNA sense strand
uuaaaugugcacagauaga

SEQ ID NO: 2481638 - RNA, 19 nt, Homo sapiens
  misc_RNA (1)...(19): siRNA sense strand
acaaaugaagugcugacaa

SEQ ID NO: 2481639 - RNA, 19 nt, Homo sapiens
  misc_RNA (1)...(19): siRNA sense strand
uugaagaugaugaugauga

SEQ ID NO: 2481640 - RNA, 19 nt, Homo sapiens
  misc_RNA (1)...(19): siRNA sense strand
caggauacauugaaagccu

SEQ ID NO: 2481641 - RNA, 19 nt, Homo sapiens
  misc_RNA (1)...(19): siRNA sense strand
ugaauggaaaccagaugaa

SEQ ID NO: 2481642 - RNA, 19 nt, Homo sapiens
  misc_RNA (1)...(19): siRNA sense strand
aagaagaccccaaaggaau

SEQ ID NO: 2481643 - RNA, 19 nt, Homo sapiens
  misc_RNA (1)...(19): siRNA sense strand
cagcagagugcaagcagca

SEQ ID NO: 2481644 - RNA, 19 nt, Homo sapiens
  misc_RNA (1)...(19): siRNA sense strand
ggaugaggucagaaccaga

SEQ ID NO: 2481645 - RNA, 19 nt, Homo sapiens
  misc_RNA (1)...(19): siRNA sense strand
aagaagaggaaacugguga

SEQ ID NO: 2481646 - RNA, 19 nt, Homo sapiens
  misc_RNA (1)...(19): siRNA sense strand
aagaugagauuucggagga

SEQ ID NO: 2481647 - RNA, 19 nt, Homo sapiens
  misc_RNA (1)...(19): siRNA sense strand
ggaccagaaauuauggguu

SEQ ID NO: 2481648 - RNA, 19 nt, Homo sapiens
  misc_RNA (1)...(19): siRNA sense strand
uuuggaugauguugaagaa

SEQ ID NO: 2481649 - RNA, 19 nt, Homo sapiens
  misc_RNA (1)...(19): siRNA sense strand
gaagaaugugaauggaaac

SEQ ID NO: 2481650 - RNA, 19 nt, Homo sapiens
  misc_RNA (1)...(19): siRNA sense strand
aagaaguagaagaagagga

SEQ ID NO: 2481651 - RNA, 19 nt, Homo sapiens
  misc_RNA (1)...(19): siRNA sense strand
agaugagauuucggaggaa

SEQ ID NO: 2481652 - RNA, 19 nt, Homo sapiens
  misc_RNA (1)...(19): siRNA sense strand
agaaauuauggguuguaca

SEQ ID NO: 2481653 - RNA, 19 nt, Homo sapiens
  misc_RNA (1)...(19): siRNA sense strand
acccaaagaaggaucaaaa

SEQ ID NO: 2481654 - RNA, 19 nt, Homo sapiens
  misc_RNA (1)...(19): siRNA sense strand
guucauauauccaggguca

SEQ ID NO: 2481655 - RNA, 19 nt, Homo sapiens
  misc_RNA (1)...(19): siRNA sense strand
uaggaaaugugaugggaca

SEQ ID NO: 2481656 - RNA, 19 nt, Homo sapiens
  misc_RNA (1)...(19): siRNA sense strand
aagaaguggcaaagaaaca

SEQ ID NO: 2481657 - RNA, 19 nt, Homo sapiens
  misc_RNA (1)...(19): siRNA sense strand
aaggaggaauggugggaca

SEQ ID NO: 2481658 - RNA, 19 nt, Homo sapiens
  misc_RNA (1)...(19): siRNA sense strand
guuuaugggaaaugcacaa

SEQ ID NO: 2481659 - RNA, 19 nt, Homo sapiens
  misc_RNA (1)...(19): siRNA sense strand
agauuuauucacugagcaa

SEQ ID NO: 2481660 - RNA, 19 nt, Homo sapiens
  misc_RNA (1)...(19): siRNA sense strand
caagcaugauggugggcau

SEQ ID NO: 2481661 - RNA, 19 nt, Homo sapiens
  misc_RNA (1)...(19): siRNA sense strand
augcaagauaugggaaaua

SEQ ID NO: 2481662 - RNA, 19 nt, Homo sapiens
  misc_RNA (1)...(19): siRNA sense strand
agagaaaaggagccagaaa

SEQ ID NO: 2481663 - RNA, 19 nt, Homo sapiens
  misc_RNA (1)...(19): siRNA sense strand
caaccuagaccaauggaca

SEQ ID NO: 2481664 - RNA, 19 nt, Homo sapiens
  misc_RNA (1)...(19): siRNA sense strand
agaagaaagaucagcaacu

SEQ ID NO: 2481665 - RNA, 19 nt, Homo sapiens
  misc_RNA (1)...(19): siRNA sense strand
ucauagaaaucuugggguu

SEQ ID NO: 2481666 - RNA, 19 nt, Homo sapiens
  misc_RNA (1)...(19): siRNA sense strand
uauccaagcuucugaggga

SEQ ID NO: 2481667 - RNA, 19 nt, Homo sapiens
  misc_RNA (1)...(19): siRNA sense strand
cuacaaaaucagaagaagu

SEQ ID NO: 2481668 - RNA, 19 nt, Homo sapiens
  misc_RNA (1)...(19): siRNA sense strand
augaguaucaguagugcaa

SEQ ID NO: 2481669 - RNA, 19 nt, Homo sapiens
  misc_RNA (1)...(19): siRNA sense strand
agaccaauggacagcagaa

SEQ ID NO: 2481670 - RNA, 19 nt, Homo sapiens
  misc_RNA (1)...(19): siRNA sense strand
gcugaaaagcugcagaaga

SEQ ID NO: 2481671 - RNA, 19 nt, Homo sapiens
  misc_RNA (1)...(19): siRNA sense strand
ccuuauaggaaaugugaug

SEQ ID NO: 2481672 - RNA, 19 nt, Homo sapiens
  misc_RNA (1)...(19): siRNA sense strand
augggaaauacuaaagcaa

SEQ ID NO: 2481673 - RNA, 19 nt, Homo sapiens
  misc_RNA (1)...(19): siRNA sense strand
agauacagugcaugcaaga

SEQ ID NO: 2481674 - RNA, 19 nt, Homo sapiens
  misc_RNA (1)...(19): siRNA sense strand
cggaggaagaggaggagga

SEQ ID NO: 2481675 - RNA, 19 nt, Homo sapiens
  misc_RNA (1)...(19): siRNA sense strand
ccgaggacgacgaugaaga

SEQ ID NO: 2481676 - RNA, 19 nt, Homo sapiens
  misc_RNA (1)...(19): siRNA sense strand
acuucgaguucccggacua

SEQ ID NO: 2481677 - RNA, 19 nt, Homo sapiens
  misc_RNA (1)...(19): siRNA sense strand
ggcggaagaucauggacca

SEQ ID NO: 2481678 - RNA, 19 nt, Homo sapiens
  misc_RNA (1)...(19): siRNA sense strand
cagcacgaacggcggaaga

SEQ ID NO: 2481679 - RNA, 19 nt, Homo sapiens
  misc_RNA (1)...(19): siRNA sense strand
cagaaaugcuggagagcgu

SEQ ID NO: 2481680 - RNA, 19 nt, Homo sapiens
  misc_RNA (1)...(19): siRNA sense strand
gagaggagcaagagggagu

SEQ ID NO: 2481681 - RNA, 19 nt, Homo sapiens
  misc_RNA (1)...(19): siRNA sense strand
augaagagguuuugggaga

SEQ ID NO: 2481682 - RNA, 19 nt, Homo sapiens
  misc_RNA (1)...(19): siRNA sense strand
gcgauagcaugcuggguga

SEQ ID NO: 2481683 - RNA, 19 nt, Homo sapiens
  misc_RNA (1)...(19): siRNA sense strand
cagcagucaagaagaggaa

SEQ ID NO: 2481684 - RNA, 19 nt, Homo sapiens
  misc_RNA (1)...(19): siRNA sense strand
ugaaauugaagguggcuga

SEQ ID NO: 2481685 - RNA, 19 nt, Homo sapiens
  misc_RNA (1)...(19): siRNA sense strand
aggaaaacuaccuggagua

SEQ ID NO: 2481686 - RNA, 19 nt, Homo sapiens
  misc_RNA (1)...(19): siRNA sense strand
gggugugauccuaaccaaa

SEQ ID NO: 2481687 - RNA, 19 nt, Homo sapiens
  misc_RNA (1)...(19): siRNA sense strand
gcacugaugugaaggaggu

SEQ ID NO: 2481688 - RNA, 19 nt, Homo sapiens
  misc_RNA (1)...(19): siRNA sense strand
ucaagaagaggaagagcca

SEQ ID NO: 2481689 - RNA, 19 nt, Homo sapiens
  misc_RNA (1)...(19): siRNA sense strand
gggagaggagcaagaggga

SEQ ID NO: 2481690 - RNA, 19 nt, Homo sapiens
  misc_RNA (1)...(19): siRNA sense strand
cugaagagguuaucuggga

SEQ ID NO: 2481691 - RNA, 19 nt, Homo sapiens
  misc_RNA (1)...(19): siRNA sense strand
ugaagagguuaucugggaa

SEQ ID NO: 2481692 - RNA, 19 nt, Homo sapiens
  misc_RNA (1)...(19): siRNA sense strand
acugcaagccugaugaaga

SEQ ID NO: 2481693 - RNA, 19 nt, Homo sapiens
  misc_RNA (1)...(19): siRNA sense strand
augaagaccuugaagccca

SEQ ID NO: 2481694 - RNA, 19 nt, Homo sapiens
  misc_RNA (1)...(19): siRNA sense strand
aagaagaggaagagccaag

SEQ ID NO: 2481695 - RNA, 19 nt, Homo sapiens
  misc_RNA (1)...(19): siRNA sense strand
aggcagaaaugcuggagag

SEQ ID NO: 2481696 - RNA, 19 nt, Homo sapiens
  misc_RNA (1)...(19): siRNA sense strand
auuauuuggucaugcucaa

SEQ ID NO: 2481697 - RNA, 19 nt, Homo sapiens
  misc_RNA (1)...(19): siRNA sense strand
gcaaggaggaggagguguc

SEQ ID NO: 2481698 - RNA, 19 nt, Homo sapiens
  misc_RNA (1)...(19): siRNA sense strand
cagaaggacuauugggaga

SEQ ID NO: 2481699 - RNA, 19 nt, Homo sapiens
  misc_RNA (1)...(19): siRNA sense strand
cugcagagacagaaagaga

SEQ ID NO: 2481700 - RNA, 19 nt, Homo sapiens
  misc_RNA (1)...(19): siRNA sense strand
uggaagagauugagcagca

SEQ ID NO: 2481701 - RNA, 19 nt, Homo sapiens
  misc_RNA (1)...(19): siRNA sense strand
agagacagaaagagagauu

SEQ ID NO: 2481702 - RNA, 19 nt, Homo sapiens
  misc_RNA (1)...(19): siRNA sense strand
aagagaaagaaauggagaa

SEQ ID NO: 2481703 - RNA, 19 nt, Homo sapiens
  misc_RNA (1)...(19): siRNA sense strand
agacugagugagaacgaaa

SEQ ID NO: 2481704 - RNA, 19 nt, Homo sapiens
  misc_RNA (1)...(19): siRNA sense strand
gaaaaugagaagaugggaa

SEQ ID NO: 2481705 - RNA, 19 nt, Homo sapiens
  misc_RNA (1)...(19): siRNA sense strand
aagagagauuggaaggaga

SEQ ID NO: 2481706 - RNA, 19 nt, Homo sapiens
  misc_RNA (1)...(19): siRNA sense strand
cagcuaaacagcaggaagu

SEQ ID NO: 2481707 - RNA, 19 nt, Homo sapiens
  misc_RNA (1)...(19): siRNA sense strand
gugaaagaacagaaggacu

SEQ ID NO: 2481708 - RNA, 19 nt, Homo sapiens
  misc_RNA (1)...(19): siRNA sense strand
agaagaagcucgagcagac

SEQ ID NO: 2481709 - RNA, 19 nt, Homo sapiens
  misc_RNA (1)...(19): siRNA sense strand
cagaaugaaacuacugcaa

SEQ ID NO: 2481710 - RNA, 19 nt, Homo sapiens
  misc_RNA (1)...(19): siRNA sense strand
agaugaaggaggcgcaaga

SEQ ID NO: 2481711 - RNA, 19 nt, Homo sapiens
  misc_RNA (1)...(19): siRNA sense strand
ugaaagugaaagaacagaa

SEQ ID NO: 2481712 - RNA, 19 nt, Homo sapiens
  misc_RNA (1)...(19): siRNA sense strand
aagauaagacagagcaguu

SEQ ID NO: 2481713 - RNA, 19 nt, Homo sapiens
  misc_RNA (1)...(19): siRNA sense strand
agagagauuggaaggagaa

SEQ ID NO: 2481714 - RNA, 19 nt, Homo sapiens
  misc_RNA (1)...(19): siRNA sense strand
agauugagcagcacaacaa

SEQ ID NO: 2481715 - RNA, 19 nt, Homo sapiens
  misc_RNA (1)...(19): siRNA sense strand
acagaaagagagauuggaa

SEQ ID NO: 2481716 - RNA, 19 nt, Homo sapiens
  misc_RNA (1)...(19): siRNA sense strand
gagauuggaaggagaaaau

SEQ ID NO: 2481717 - RNA, 19 nt, Homo sapiens
  misc_RNA (1)...(19): siRNA sense strand
cgaaaggauuggauuggca

SEQ ID NO: 2481718 - RNA, 19 nt, Homo sapiens
  misc_RNA (1)...(19): siRNA sense strand
ugucaacucaagagaaaga

SEQ ID NO: 2481719 - RNA, 19 nt, Homo sapiens
  misc_RNA (1)...(19): siRNA sense strand
caagagaaagaaauggaga

SEQ ID NO: 2481720 - RNA, 19 nt, Homo sapiens
  misc_RNA (1)...(19): siRNA sense strand
aagcaggaggagcuagaaa

SEQ ID NO: 2481721 - RNA, 19 nt, Homo sapiens
  misc_RNA (1)...(19): siRNA sense strand
guuggaacugaaagugaaa

SEQ ID NO: 2481722 - RNA, 19 nt, Homo sapiens
  misc_RNA (1)...(19): siRNA sense strand
agacagagcaguuagagca

SEQ ID NO: 2481723 - RNA, 19 nt, Homo sapiens
  misc_RNA (1)...(19): siRNA sense strand
guuuaacugaacagaggaa

SEQ ID NO: 2481724 - RNA, 19 nt, Homo sapiens
  misc_RNA (1)...(19): siRNA sense strand
agacaguggagcaaaugaa

SEQ ID NO: 2481725 - RNA, 19 nt, Homo sapiens
  misc_RNA (1)...(19): siRNA sense strand
cagaaaaugaggaagacau

SEQ ID NO: 2481726 - RNA, 19 nt, Homo sapiens
  misc_RNA (1)...(19): siRNA sense strand
aagaaaaccaggagcugaa

SEQ ID NO: 2481727 - RNA, 19 nt, Homo sapiens
  misc_RNA (1)...(19): siRNA sense strand
uggaacugaaagugaaaga

SEQ ID NO: 2481728 - RNA, 19 nt, Homo sapiens
  misc_RNA (1)...(19): siRNA sense strand
ggagaagcuuguucaggga

SEQ ID NO: 2481729 - RNA, 19 nt, Homo sapiens
  misc_RNA (1)...(19): siRNA sense strand
agcaaaugaagcagaauga

SEQ ID NO: 2481730 - RNA, 19 nt, Homo sapiens
  misc_RNA (1)...(19): siRNA sense strand
augaagaaacaacaggaau

SEQ ID NO: 2481731 - RNA, 19 nt, Homo sapiens
  misc_RNA (1)...(19): siRNA sense strand
ucuuuaacaguguggagaa

SEQ ID NO: 2481732 - RNA, 19 nt, Homo sapiens
  misc_RNA (1)...(19): siRNA sense strand
aggcugagcuccaaaagaa

SEQ ID NO: 2481733 - RNA, 19 nt, Homo sapiens
  misc_RNA (1)...(19): siRNA sense strand
agauaagacagagcaguua

SEQ ID NO: 2481734 - RNA, 19 nt, Homo sapiens
  misc_RNA (1)...(19): siRNA sense strand
acaacaaggagcuuugcaa

SEQ ID NO: 2481735 - RNA, 19 nt, Homo sapiens
  misc_RNA (1)...(19): siRNA sense strand
aagugaaagaacagaagga

SEQ ID NO: 2481736 - RNA, 19 nt, Homo sapiens
  misc_RNA (1)...(19): siRNA sense strand
guccagaaaaugaggaaga

SEQ ID NO: 2481737 - RNA, 19 nt, Homo sapiens
  misc_RNA (1)...(19): siRNA sense strand
agaagcaggaggagcuaga

SEQ ID NO: 2481738 - RNA, 19 nt, Homo sapiens
  misc_RNA (1)...(19): siRNA sense strand
caacaggaauuaauggaug

SEQ ID NO: 2481739 - RNA, 19 nt, Homo sapiens
  misc_RNA (1)...(19): siRNA sense strand
guuacaugggucuggauuu

SEQ ID NO: 2481740 - RNA, 19 nt, Homo sapiens
  misc_RNA (1)...(19): siRNA sense strand
aaaaugagaagaugggaau

SEQ ID NO: 2481741 - RNA, 19 nt, Homo sapiens
  misc_RNA (1)...(19): siRNA sense strand
agcagacaguggagcaaau

SEQ ID NO: 2481742 - RNA, 19 nt, Homo sapiens
  misc_RNA (1)...(19): siRNA sense strand
acaacaaaucagcuaaaca

SEQ ID NO: 2481743 - RNA, 19 nt, Homo sapiens
  misc_RNA (1)...(19): siRNA sense strand
ucaacucaagagaaagaaa

SEQ ID NO: 2481744 - RNA, 19 nt, Homo sapiens
  misc_RNA (1)...(19): siRNA sense strand
aagacaaaauccaggacuu

SEQ ID NO: 2481745 - RNA, 19 nt, Homo sapiens
  misc_RNA (1)...(19): siRNA sense strand
guaucagccuccagaagca

SEQ ID NO: 2481746 - RNA, 19 nt, Homo sapiens
  misc_RNA (1)...(19): siRNA sense strand
aacugaaagugaaagaaca

SEQ ID NO: 2481747 - RNA, 19 nt, Homo sapiens
  misc_RNA (1)...(19): siRNA sense strand
gaugggaaucagaguggau

SEQ ID NO: 2481748 - RNA, 19 nt, Homo sapiens
  misc_RNA (1)...(19): siRNA sense strand
agaagcuuguucagggaga

SEQ ID NO: 2481749 - RNA, 19 nt, Homo sapiens
  misc_RNA (1)...(19): siRNA sense strand
gcuuguucagggagaucaa

SEQ ID NO: 2481750 - RNA, 19 nt, Homo sapiens
  misc_RNA (1)...(19): siRNA sense strand
cugcaaugaagaaacaaca

SEQ ID NO: 2481751 - RNA, 19 nt, Homo sapiens
  misc_RNA (1)...(19): siRNA sense strand
aaugaagaaacaacaggaa

SEQ ID NO: 2481752 - RNA, 19 nt, Homo sapiens
  misc_RNA (1)...(19): siRNA sense strand
gagagauuggaaggagaaa

SEQ ID NO: 2481753 - RNA, 19 nt, Homo sapiens
  misc_RNA (1)...(19): siRNA sense strand
cgucgaaaggauuggauug

SEQ ID NO: 2481754 - RNA, 19 nt, Homo sapiens
  misc_RNA (1)...(19): siRNA sense strand
cugaaggacagcuguauca

SEQ ID NO: 2481755 - RNA, 19 nt, Homo sapiens
  misc_RNA (1)...(19): siRNA sense strand
caggacuugccuauggaaa

SEQ ID NO: 2481756 - RNA, 19 nt, Homo sapiens
  misc_RNA (1)...(19): siRNA sense strand
ccaauuccguccagaaaau

SEQ ID NO: 2481757 - RNA, 19 nt, Homo sapiens
  misc_RNA (1)...(19): siRNA sense strand
gggagaucaagauaagaca

SEQ ID NO: 2481758 - RNA, 19 nt, Homo sapiens
  misc_RNA (1)...(19): siRNA sense strand
aacaggaauuaauggauga

SEQ ID NO: 2481759 - RNA, 19 nt, Homo sapiens
  misc_RNA (1)...(19): siRNA sense strand
aagaagaagcgcaagggaa

SEQ ID NO: 2481760 - RNA, 19 nt, Homo sapiens
  misc_RNA (1)...(19): siRNA sense strand
auguauaagcaucgguuua

SEQ ID NO: 2481761 - RNA, 19 nt, Homo sapiens
  misc_RNA (1)...(19): siRNA sense strand
cccaaagcccgguggaaaa

SEQ ID NO: 2481762 - RNA, 19 nt, Homo sapiens
  misc_RNA (1)...(19): siRNA sense strand
ucagaagaagagaagcaaa

SEQ ID NO: 2481763 - RNA, 19 nt, Homo sapiens
  misc_RNA (1)...(19): siRNA sense strand
cggauuucuaacugguuua

SEQ ID NO: 2481764 - RNA, 19 nt, Homo sapiens
  misc_RNA (1)...(19): siRNA sense strand
acccaaagcccgguggaaa

SEQ ID NO: 2481765 - RNA, 19 nt, Homo sapiens
  misc_RNA (1)...(19): siRNA sense strand
agauacaggcagaguucuu

SEQ ID NO: 2481766 - RNA, 19 nt, Homo sapiens
  misc_RNA (1)...(19): siRNA sense strand
agcacaagaagaagcgcaa

SEQ ID NO: 2481767 - RNA, 19 nt, Homo sapiens
  misc_RNA (1)...(19): siRNA sense strand
ccagaugucaagagagaag

SEQ ID NO: 2481768 - RNA, 19 nt, Homo sapiens
  misc_RNA (1)...(19): siRNA sense strand
gacccaaagcccagcccaa

SEQ ID NO: 2481769 - RNA, 19 nt, Homo sapiens
  misc_RNA (1)...(19): siRNA sense strand
agucagggccaguggucca

SEQ ID NO: 2481770 - RNA, 19 nt, Homo sapiens
  misc_RNA (1)...(19): siRNA sense strand
ggauaugcuucaacagcgu

SEQ ID NO: 2481771 - RNA, 19 nt, Homo sapiens
  misc_RNA (1)...(19): siRNA sense strand
cugaagagguuauguggga

SEQ ID NO: 2481772 - RNA, 19 nt, Homo sapiens
  misc_RNA (1)...(19): siRNA sense strand
ugauaauaguccugggugu

SEQ ID NO: 2481773 - RNA, 19 nt, Homo sapiens
  misc_RNA (1)...(19): siRNA sense strand
gagaggagggagagggagu

SEQ ID NO: 2481774 - RNA, 19 nt, Homo sapiens
  misc_RNA (1)...(19): siRNA sense strand
cuuugagagaggagggaga

SEQ ID NO: 2481775 - RNA, 19 nt, Homo sapiens
  misc_RNA (1)...(19): siRNA sense strand
caaaauugggugcaggaaa

SEQ ID NO: 2481776 - RNA, 19 nt, Homo sapiens
  misc_RNA (1)...(19): siRNA sense strand
ccugagauauuuagggaag

SEQ ID NO: 2481777 - RNA, 19 nt, Homo sapiens
  misc_RNA (1)...(19): siRNA sense strand
aggaaaaguaccuggugua

SEQ ID NO: 2481778 - RNA, 19 nt, Homo sapiens
  misc_RNA (1)...(19): siRNA sense strand
gagagaggagggagaggga

SEQ ID NO: 2481779 - RNA, 19 nt, Homo sapiens
  misc_RNA (1)...(19): siRNA sense strand
ugugggaaguccugagcau

SEQ ID NO: 2481780 - RNA, 19 nt, Homo sapiens
  misc_RNA (1)...(19): siRNA sense strand
aagaagaagaccugggccu

SEQ ID NO: 2481781 - RNA, 19 nt, Homo sapiens
  misc_RNA (1)...(19): siRNA sense strand
acuacuuuccugagauauu

SEQ ID NO: 2481782 - RNA, 19 nt, Homo sapiens
  misc_RNA (1)...(19): siRNA sense strand
gguaaagaucaguggagga

SEQ ID NO: 2481783 - RNA, 19 nt, Homo sapiens
  misc_RNA (1)...(19): siRNA sense strand
aggaaaacuaccuggagua

SEQ ID NO: 2481784 - RNA, 19 nt, Homo sapiens
  misc_RNA (1)...(19): siRNA sense strand
ugauaaucguccuggccau

SEQ ID NO: 2481785 - RNA, 19 nt, Homo sapiens
  misc_RNA (1)...(19): siRNA sense strand
ccaagaagcugcucaccca

SEQ ID NO: 2481786 - RNA, 19 nt, Homo sapiens
  misc_RNA (1)...(19): siRNA sense strand
acaaucagaucaugcccaa

SEQ ID NO: 2481787 - RNA, 19 nt, Homo sapiens
  misc_RNA (1)...(19): siRNA sense strand
acgauggccugcuggguga

SEQ ID NO: 2481788 - RNA, 19 nt, Homo sapiens
  misc_RNA (1)...(19): siRNA sense strand
ggagcguaucugugagaaa

SEQ ID NO: 2481789 - RNA, 19 nt, Homo sapiens
  misc_RNA (1)...(19): siRNA sense strand
agaagguguugcagggaga

SEQ ID NO: 2481790 - RNA, 19 nt, Homo sapiens
  misc_RNA (1)...(19): siRNA sense strand
ccaccuacguacuggccua

SEQ ID NO: 2481791 - RNA, 19 nt, Homo sapiens
  misc_RNA (1)...(19): siRNA sense strand
gcaucaauguccugcugaa

SEQ ID NO: 2481792 - RNA, 19 nt, Homo sapiens
  misc_RNA (1)...(19): siRNA sense strand
ggacaggcuaccaggccaa

SEQ ID NO: 2481793 - RNA, 19 nt, Homo sapiens
  misc_RNA (1)...(19): siRNA sense strand
gccuauagggacagggaca

SEQ ID NO: 2481794 - RNA, 19 nt, Homo sapiens
  misc_RNA (1)...(19): siRNA sense strand
acccagagcuaccgggcaa

SEQ ID NO: 2481795 - RNA, 19 nt, Homo sapiens
  misc_RNA (1)...(19): siRNA sense strand
agaugaaggugguggaggu

SEQ ID NO: 2481796 - RNA, 19 nt, Homo sapiens
  misc_RNA (1)...(19): siRNA sense strand
agggaagcacauuggcaaa

SEQ ID NO: 2481797 - RNA, 19 nt, Homo sapiens
  misc_RNA (1)...(19): siRNA sense strand
aagaaggaucacagggaca

SEQ ID NO: 2481798 - RNA, 19 nt, Homo sapiens
  misc_RNA (1)...(19): siRNA sense strand
uugcaggaguucugggaca

SEQ ID NO: 2481799 - RNA, 19 nt, Homo sapiens
  misc_RNA (1)...(19): siRNA sense strand
gcuacauggcccaagggaa

SEQ ID NO: 2481800 - RNA, 19 nt, Homo sapiens
  misc_RNA (1)...(19): siRNA sense strand
gcugugaggcugaggcuga

SEQ ID NO: 2481801 - RNA, 19 nt, Homo sapiens
  misc_RNA (1)...(19): siRNA sense strand
uggccguggucuugagaga

SEQ ID NO: 2481802 - RNA, 19 nt, Homo sapiens
  misc_RNA (1)...(19): siRNA sense strand
gggccaaacccaagcugau

SEQ ID NO: 2481803 - RNA, 19 nt, Homo sapiens
  misc_RNA (1)...(19): siRNA sense strand
agagauggcuugcuggaga

SEQ ID NO: 2481804 - RNA, 19 nt, Homo sapiens
  misc_RNA (1)...(19): siRNA sense strand
cuacauggcccaagggaag

SEQ ID NO: 2481805 - RNA, 19 nt, Homo sapiens
  misc_RNA (1)...(19): siRNA sense strand
uggccuacacccagagcua

SEQ ID NO: 2481806 - RNA, 19 nt, Homo sapiens
  misc_RNA (1)...(19): siRNA sense strand
ggacaaggcccaaguggcu

SEQ ID NO: 2481807 - RNA, 19 nt, Homo sapiens
  misc_RNA (1)...(19): siRNA sense strand
ugccagagucggagaacuu

SEQ ID NO: 2481808 - RNA, 19 nt, Homo sapiens
  misc_RNA (1)...(19): siRNA sense strand
gcaccaauacagauggcuu

SEQ ID NO: 2481809 - RNA, 19 nt, Homo sapiens
  misc_RNA (1)...(19): siRNA sense strand
ucguggagcagcugaggaa

SEQ ID NO: 2481810 - RNA, 19 nt, Homo sapiens
  misc_RNA (1)...(19): siRNA sense strand
uggaaggauaacuggguga

SEQ ID NO: 2481811 - RNA, 19 nt, Homo sapiens
  misc_RNA (1)...(19): siRNA sense strand
aggauaacugggugagcuu

SEQ ID NO: 2481812 - RNA, 19 nt, Homo sapiens
  misc_RNA (1)...(19): siRNA sense strand
gaagagaagcugcaggcca

SEQ ID NO: 2481813 - RNA, 19 nt, Homo sapiens
  misc_RNA (1)...(19): siRNA sense strand
gcaaagucgucgugcaggu

SEQ ID NO: 2481814 - RNA, 19 nt, Homo sapiens
  misc_RNA (1)...(19): siRNA sense strand
cugcaaggccuucgacaca

SEQ ID NO: 2481815 - RNA, 19 nt, Homo sapiens
  misc_RNA (1)...(19): siRNA sense strand
uguuugaguucguggagca

SEQ ID NO: 2481816 - RNA, 19 nt, Homo sapiens
  misc_RNA (1)...(19): siRNA sense strand
aggcugagacggaggccau

SEQ ID NO: 2481817 - RNA, 19 nt, Homo sapiens
  misc_RNA (1)...(19): siRNA sense strand
gugcagcaguucacggaca

SEQ ID NO: 2481818 - RNA, 19 nt, Homo sapiens
  misc_RNA (1)...(19): siRNA sense strand
gcugcggccuauagggaca

SEQ ID NO: 2481819 - RNA, 19 nt, Homo sapiens
  misc_RNA (1)...(19): siRNA sense strand
caucgaagcccacggcaca

SEQ ID NO: 2481820 - RNA, 19 nt, Homo sapiens
  misc_RNA (1)...(19): siRNA sense strand
ccugcaggcuucagcucaa

SEQ ID NO: 2481821 - RNA, 19 nt, Homo sapiens
  misc_RNA (1)...(19): siRNA sense strand
uggacuacuuuguggucuu

SEQ ID NO: 2481822 - RNA, 19 nt, Homo sapiens
  misc_RNA (1)...(19): siRNA sense strand
uggcacacauccugggcau

SEQ ID NO: 2481823 - RNA, 19 nt, Homo sapiens
  misc_RNA (1)...(19): siRNA sense strand
aggcugaggcugagacgga

SEQ ID NO: 2481824 - RNA, 19 nt, Homo sapiens
  misc_RNA (1)...(19): siRNA sense strand
ccggcaagcugaaggaccu

SEQ ID NO: 2481825 - RNA, 19 nt, Homo sapiens
  misc_RNA (1)...(19): siRNA sense strand
gcauuuugguggagacgau

SEQ ID NO: 2481826 - RNA, 19 nt, Homo sapiens
  misc_RNA (1)...(19): siRNA sense strand
guggagacgaugagcacca

SEQ ID NO: 2481827 - RNA, 19 nt, Homo sapiens
  misc_RNA (1)...(19): siRNA sense strand
agauucacuccgaggaaca

SEQ ID NO: 2481828 - RNA, 19 nt, Homo sapiens
  misc_RNA (1)...(19): siRNA sense strand
ugaagaaggaucacaggga

SEQ ID NO: 2481829 - RNA, 19 nt, Homo sapiens
  misc_RNA (1)...(19): siRNA sense strand
ugggugagcuucauggaca

SEQ ID NO: 2481830 - RNA, 19 nt, Homo sapiens
  misc_RNA (1)...(19): siRNA sense strand
aggacagccugcuagguau

SEQ ID NO: 2481831 - RNA, 19 nt, Homo sapiens
  misc_RNA (1)...(19): siRNA sense strand
guggugagcagguggcuga

SEQ ID NO: 2481832 - RNA, 19 nt, Homo sapiens
  misc_RNA (1)...(19): siRNA sense strand
acuccuuggcggaagagaa

SEQ ID NO: 2481833 - RNA, 19 nt, Homo sapiens
  misc_RNA (1)...(19): siRNA sense strand
ccuacuacaucgacugcau

SEQ ID NO: 2481834 - RNA, 19 nt, Homo sapiens
  misc_RNA (1)...(19): siRNA sense strand
ucucaggcaucgacgccaa

SEQ ID NO: 2481835 - RNA, 19 nt, Homo sapiens
  misc_RNA (1)...(19): siRNA sense strand
aagggaagcacauuggcaa

SEQ ID NO: 2481836 - RNA, 19 nt, Homo sapiens
  misc_RNA (1)...(19): siRNA sense strand
ucggagaacuugcaggagu

SEQ ID NO: 2481837 - RNA, 19 nt, Homo sapiens
  misc_RNA (1)...(19): siRNA sense strand
gagaacaugcccagccuga

SEQ ID NO: 2481838 - RNA, 19 nt, Homo sapiens
  misc_RNA (1)...(19): siRNA sense strand
gcguggugggcuuggugaa

SEQ ID NO: 2481839 - RNA, 19 nt, Homo sapiens
  misc_RNA (1)...(19): siRNA sense strand
ggaaggagcuggagggucu

SEQ ID NO: 2481840 - RNA, 19 nt, Homo sapiens
  misc_RNA (1)...(19): siRNA sense strand
cgauagagaaauugaaaca

SEQ ID NO: 2481841 - RNA, 19 nt, Homo sapiens
  misc_RNA (1)...(19): siRNA sense strand
ggguagaggaacuggaaca

SEQ ID NO: 2481842 - RNA, 19 nt, Homo sapiens
  misc_RNA (1)...(19): siRNA sense strand
cgccaagaguugcaggaaa

SEQ ID NO: 2481843 - RNA, 19 nt, Homo sapiens
  misc_RNA (1)...(19): siRNA sense strand
gggagaaggaggaguacau

SEQ ID NO: 2481844 - RNA, 19 nt, Homo sapiens
  misc_RNA (1)...(19): siRNA sense strand
gggcacagcuggaagcaca

SEQ ID NO: 2481845 - RNA, 19 nt, Homo sapiens
  misc_RNA (1)...(19): siRNA sense strand
ucaagagggagcugggaaa

SEQ ID NO: 2481846 - RNA, 19 nt, Homo sapiens
  misc_RNA (1)...(19): siRNA sense strand
acacauugagagaggagaa

SEQ ID NO: 2481847 - RNA, 19 nt, Homo sapiens
  misc_RNA (1)...(19): siRNA sense strand
aggaaacgguggagcugaa

SEQ ID NO: 2481848 - RNA, 19 nt, Homo sapiens
  misc_RNA (1)...(19): siRNA sense strand
aagacaaggaggagaugaa

SEQ ID NO: 2481849 - RNA, 19 nt, Homo sapiens
  misc_RNA (1)...(19): siRNA sense strand
cagagaaagcugaguuaca

SEQ ID NO: 2481850 - RNA, 19 nt, Homo sapiens
  misc_RNA (1)...(19): siRNA sense strand
cgguggagcugaagagcca

SEQ ID NO: 2481851 - RNA, 19 nt, Homo sapiens
  misc_RNA (1)...(19): siRNA sense strand
agauaaauaugcggagaau

SEQ ID NO: 2481852 - RNA, 19 nt, Homo sapiens
  misc_RNA (1)...(19): siRNA sense strand
agaaagaaggagagucuga

SEQ ID NO: 2481853 - RNA, 19 nt, Homo sapiens
  misc_RNA (1)...(19): siRNA sense strand
ggcaaauccuggagaccau

SEQ ID NO: 2481854 - RNA, 19 nt, Homo sapiens
  misc_RNA (1)...(19): siRNA sense strand
aggagaggguagaggaacu

SEQ ID NO: 2481855 - RNA, 19 nt, Homo sapiens
  misc_RNA (1)...(19): siRNA sense strand
agaaaucagaauuggaaga

SEQ ID NO: 2481856 - RNA, 19 nt, Homo sapiens
  misc_RNA (1)...(19): siRNA sense strand
acgagaaugaugaggugaa

SEQ ID NO: 2481857 - RNA, 19 nt, Homo sapiens
  misc_RNA (1)...(19): siRNA sense strand
acaacagaaccaagaaauu

SEQ ID NO: 2481858 - RNA, 19 nt, Homo sapiens
  misc_RNA (1)...(19): siRNA sense strand
gcaaauuggccgcagcgaa

SEQ ID NO: 2481859 - RNA, 19 nt, Homo sapiens
  misc_RNA (1)...(19): siRNA sense strand
auaaauaugcggagaaucu

SEQ ID NO: 2481860 - RNA, 19 nt, Homo sapiens
  misc_RNA (1)...(19): siRNA sense strand
uggaagaagaaaagaaaga

SEQ ID NO: 2481861 - RNA, 19 nt, Homo sapiens
  misc_RNA (1)...(19): siRNA sense strand
acaagaacacccaaagcaa

SEQ ID NO: 2481862 - RNA, 19 nt, Homo sapiens
  misc_RNA (1)...(19): siRNA sense strand
gauccucguaucagagaaa

SEQ ID NO: 2481863 - RNA, 19 nt, Homo sapiens
  misc_RNA (1)...(19): siRNA sense strand
uggaagaauugcaaaagaa

SEQ ID NO: 2481864 - RNA, 19 nt, Homo sapiens
  misc_RNA (1)...(19): siRNA sense strand
aacuacaaauggagagaga

SEQ ID NO: 2481865 - RNA, 19 nt, Homo sapiens
  misc_RNA (1)...(19): siRNA sense strand
aggaugaggaggaggagga

SEQ ID NO: 2481866 - RNA, 19 nt, Homo sapiens
  misc_RNA (1)...(19): siRNA sense strand
aggauacacccaaggacaa

SEQ ID NO: 2481867 - RNA, 19 nt, Homo sapiens
  misc_RNA (1)...(19): siRNA sense strand
cccucaggcuggaguuaua

SEQ ID NO: 2481868 - RNA, 19 nt, Homo sapiens
  misc_RNA (1)...(19): siRNA sense strand
aggaggaggaugaggagga

SEQ ID NO: 2481869 - RNA, 19 nt, Homo sapiens
  misc_RNA (1)...(19): siRNA sense strand
gggagcaguuacagguuca

SEQ ID NO: 2481870 - RNA, 19 nt, Homo sapiens
  misc_RNA (1)...(19): siRNA sense strand
aagcaagagaaaucagaau

SEQ ID NO: 2481871 - RNA, 19 nt, Homo sapiens
  misc_RNA (1)...(19): siRNA sense strand
cggcagaggaugcagcaga

SEQ ID NO: 2481872 - RNA, 19 nt, Homo sapiens
  misc_RNA (1)...(19): siRNA sense strand
aggaggaggaggaggagga

SEQ ID NO: 2481873 - RNA, 19 nt, Homo sapiens
  misc_RNA (1)...(19): siRNA sense strand
gaggauacacccaaggaca

SEQ ID NO: 2481874 - RNA, 19 nt, Homo sapiens
  misc_RNA (1)...(19): siRNA sense strand
acaacaaggaguuaaccaa

SEQ ID NO: 2481875 - RNA, 19 nt, Homo sapiens
  misc_RNA (1)...(19): siRNA sense strand
agcaggaagcucagggcaa

SEQ ID NO: 2481876 - RNA, 19 nt, Homo sapiens
  misc_RNA (1)...(19): siRNA sense strand
agaaugaugaggugaagau

SEQ ID NO: 2481877 - RNA, 19 nt, Homo sapiens
  misc_RNA (1)...(19): siRNA sense strand
aggcagacagguacaacaa

SEQ ID NO: 2481878 - RNA, 19 nt, Homo sapiens
  misc_RNA (1)...(19): siRNA sense strand
ggcuggaguuauacaagaa

SEQ ID NO: 2481879 - RNA, 19 nt, Homo sapiens
  misc_RNA (1)...(19): siRNA sense strand
uggcaguaacccugagaca

SEQ ID NO: 2481880 - RNA, 19 nt, Homo sapiens
  misc_RNA (1)...(19): siRNA sense strand
aggagaaggcagaccugaa

SEQ ID NO: 2481881 - RNA, 19 nt, Homo sapiens
  misc_RNA (1)...(19): siRNA sense strand
agacagacaccauuggaga

SEQ ID NO: 2481882 - RNA, 19 nt, Homo sapiens
  misc_RNA (1)...(19): siRNA sense strand
gcacuguaccagagccaga

SEQ ID NO: 2481883 - RNA, 19 nt, Homo sapiens
  misc_RNA (1)...(19): siRNA sense strand
cagcuauguaacaaacaaa

SEQ ID NO: 2481884 - RNA, 19 nt, Homo sapiens
  misc_RNA (1)...(19): siRNA sense strand
aguuaaccaaagagagaga

SEQ ID NO: 2481885 - RNA, 19 nt, Homo sapiens
  misc_RNA (1)...(19): siRNA sense strand
aggcugagcaccugcggaa

SEQ ID NO: 2481886 - RNA, 19 nt, Homo sapiens
  misc_RNA (1)...(19): siRNA sense strand
cugagcgagcugaaggaaa

SEQ ID NO: 2481887 - RNA, 19 nt, Homo sapiens
  misc_RNA (1)...(19): siRNA sense strand
cagaauuggaagagaagcu

SEQ ID NO: 2481888 - RNA, 19 nt, Homo sapiens
  misc_RNA (1)...(19): siRNA sense strand
ggaucaguuggaagaagaa

SEQ ID NO: 2481889 - RNA, 19 nt, Homo sapiens
  misc_RNA (1)...(19): siRNA sense strand
cagguaauggagucgguua

SEQ ID NO: 2481890 - RNA, 19 nt, Homo sapiens
  misc_RNA (1)...(19): siRNA sense strand
aagaaacccgacagagcaa

SEQ ID NO: 2481891 - RNA, 19 nt, Homo sapiens
  misc_RNA (1)...(19): siRNA sense strand
cuaaugagaacauggagau

SEQ ID NO: 2481892 - RNA, 19 nt, Homo sapiens
  misc_RNA (1)...(19): siRNA sense strand
ugggaaagaagcugggcga

SEQ ID NO: 2481893 - RNA, 19 nt, Homo sapiens
  misc_RNA (1)...(19): siRNA sense strand
cccaagacaaggaggagau

SEQ ID NO: 2481894 - RNA, 19 nt, Homo sapiens
  misc_RNA (1)...(19): siRNA sense strand
ggaagaaacccgacagagc

SEQ ID NO: 2481895 - RNA, 19 nt, Homo sapiens
  misc_RNA (1)...(19): siRNA sense strand
acuaaugagaacauggaga

SEQ ID NO: 2481896 - RNA, 19 nt, Homo sapiens
  misc_RNA (1)...(19): siRNA sense strand
agacccagcucguggacca

SEQ ID NO: 2481897 - RNA, 19 nt, Homo sapiens
  misc_RNA (1)...(19): siRNA sense strand
agaaagaaugccaccaaaa

SEQ ID NO: 2481898 - RNA, 19 nt, Homo sapiens
  misc_RNA (1)...(19): siRNA sense strand
gauuuguaaagcugacuaa

SEQ ID NO: 2481899 - RNA, 19 nt, Homo sapiens
  misc_RNA (1)...(19): siRNA sense strand
agcuuaacuuggaagaauu

SEQ ID NO: 2481900 - RNA, 19 nt, Homo sapiens
  misc_RNA (1)...(19): siRNA sense strand
cauugagagaggagaagga

SEQ ID NO: 2481901 - RNA, 19 nt, Homo sapiens
  misc_RNA (1)...(19): siRNA sense strand
gggauggacuuguggguga

SEQ ID NO: 2481902 - RNA, 19 nt, Homo sapiens
  misc_RNA (1)...(19): siRNA sense strand
ggacuagugcugugggcaa

SEQ ID NO: 2481903 - RNA, 19 nt, Homo sapiens
  misc_RNA (1)...(19): siRNA sense strand
caacaaagcuggacccuca

SEQ ID NO: 2481904 - RNA, 19 nt, Homo sapiens
  misc_RNA (1)...(19): siRNA sense strand
cauugauacuagagaagau

SEQ ID NO: 2481905 - RNA, 19 nt, Homo sapiens
  misc_RNA (1)...(19): siRNA sense strand
gcugagaagaucuggucua

SEQ ID NO: 2481906 - RNA, 19 nt, Homo sapiens
  misc_RNA (1)...(19): siRNA sense strand
ggaaauguuugcaucggaa

SEQ ID NO: 2481907 - RNA, 19 nt, Homo sapiens
  misc_RNA (1)...(19): siRNA sense strand
acaacaaguuccaggucau

SEQ ID NO: 2481908 - RNA, 19 nt, Homo sapiens
  misc_RNA (1)...(19): siRNA sense strand
gggaaaugaucgugccaac

SEQ ID NO: 2481909 - RNA, 19 nt, Homo sapiens
  misc_RNA (1)...(19): siRNA sense strand
cugcugaggagcugacuaa

SEQ ID NO: 2481910 - RNA, 19 nt, Homo sapiens
  misc_RNA (1)...(19): siRNA sense strand
uauucauuguccugggaaa

SEQ ID NO: 2481911 - RNA, 19 nt, Homo sapiens
  misc_RNA (1)...(19): siRNA sense strand
ggucuguggaggagcaaga

SEQ ID NO: 2481912 - RNA, 19 nt, Homo sapiens
  misc_RNA (1)...(19): siRNA sense strand
aguugaagcaguugggcau

SEQ ID NO: 2481913 - RNA, 19 nt, Homo sapiens
  misc_RNA (1)...(19): siRNA sense strand
cgggagaccaagagucgaa

SEQ ID NO: 2481914 - RNA, 19 nt, Homo sapiens
  misc_RNA (1)...(19): siRNA sense strand
gccagaagucauuggauca

SEQ ID NO: 2481915 - RNA, 19 nt, Homo sapiens
  misc_RNA (1)...(19): siRNA sense strand
gaaucagcgccuggagaaa

SEQ ID NO: 2481916 - RNA, 19 nt, Homo sapiens
  misc_RNA (1)...(19): siRNA sense strand
gcucuaaaccagaacggga

SEQ ID NO: 2481917 - RNA, 19 nt, Homo sapiens
  misc_RNA (1)...(19): siRNA sense strand
aggaaaaggucuuagagca

SEQ ID NO: 2481918 - RNA, 19 nt, Homo sapiens
  misc_RNA (1)...(19): siRNA sense strand
uggaaggugccaaggucua

SEQ ID NO: 2481919 - RNA, 19 nt, Homo sapiens
  misc_RNA (1)...(19): siRNA sense strand
ccacugcaucccaaggaaa

SEQ ID NO: 2481920 - RNA, 19 nt, Homo sapiens
  misc_RNA (1)...(19): siRNA sense strand
cccuaaauacuguggagau

SEQ ID NO: 2481921 - RNA, 19 nt, Homo sapiens
  misc_RNA (1)...(19): siRNA sense strand
uggaagguguauaccggaa

SEQ ID NO: 2481922 - RNA, 19 nt, Homo sapiens
  misc_RNA (1)...(19): siRNA sense strand
acuacgagguggcugagaa

SEQ ID NO: 2481923 - RNA, 19 nt, Homo sapiens
  misc_RNA (1)...(19): siRNA sense strand
gggagcacuuuguggagga

SEQ ID NO: 2481924 - RNA, 19 nt, Homo sapiens
  misc_RNA (1)...(19): siRNA sense strand
agaaagagcauuugguccu

SEQ ID NO: 2481925 - RNA, 19 nt, Homo sapiens
  misc_RNA (1)...(19): siRNA sense strand
acgagguggcugagaagau

SEQ ID NO: 2481926 - RNA, 19 nt, Homo sapiens
  misc_RNA (1)...(19): siRNA sense strand
gcucuaaaccagaugugca

SEQ ID NO: 2481927 - RNA, 19 nt, Homo sapiens
  misc_RNA (1)...(19): siRNA sense strand
cggcuggacuucacggcau

SEQ ID NO: 2481928 - RNA, 19 nt, Homo sapiens
  misc_RNA (1)...(19): siRNA sense strand
aagagagagcagagguguu

SEQ ID NO: 2481929 - RNA, 19 nt, Homo sapiens
  misc_RNA (1)...(19): siRNA sense strand
gcgccuggagaaauauaaa

SEQ ID NO: 2481930 - RNA, 19 nt, Homo sapiens
  misc_RNA (1)...(19): siRNA sense strand
ucuccaaggugcagagccu

SEQ ID NO: 2481931 - RNA, 19 nt, Homo sapiens
  misc_RNA (1)...(19): siRNA sense strand
gaaaguaccgucugggucu

SEQ ID NO: 2481932 - RNA, 19 nt, Homo sapiens
  misc_RNA (1)...(19): siRNA sense strand
gugggugacuuuugagauu

SEQ ID NO: 2481933 - RNA, 19 nt, Homo sapiens
  misc_RNA (1)...(19): siRNA sense strand
ggaaaaggucuuagagcag

SEQ ID NO: 2481934 - RNA, 19 nt, Homo sapiens
  misc_RNA (1)...(19): siRNA sense strand
gaaaugugggauuggacca

SEQ ID NO: 2481935 - RNA, 19 nt, Homo sapiens
  misc_RNA (1)...(19): siRNA sense strand
uggaggagccuguguacga

SEQ ID NO: 2481936 - RNA, 19 nt, Homo sapiens
  misc_RNA (1)...(19): siRNA sense strand
gggaggagucugauguacu

SEQ ID NO: 2481937 - RNA, 19 nt, Homo sapiens
  misc_RNA (1)...(19): siRNA sense strand
gcagcagcaaggacaacaa

SEQ ID NO: 2481938 - RNA, 19 nt, Homo sapiens
  misc_RNA (1)...(19): siRNA sense strand
cugacuacgagguggcuga

SEQ ID NO: 2481939 - RNA, 19 nt, Homo sapiens
  misc_RNA (1)...(19): siRNA sense strand
ggaaguuuauauagagcag

SEQ ID NO: 2481940 - RNA, 19 nt, Homo sapiens
  misc_RNA (1)...(19): siRNA sense strand
ggagccaguguaugaggaa

SEQ ID NO: 2481941 - RNA, 19 nt, Homo sapiens
  misc_RNA (1)...(19): siRNA sense strand
ccgaaguggaggaggagaa

SEQ ID NO: 2481942 - RNA, 19 nt, Homo sapiens
  misc_RNA (1)...(19): siRNA sense strand
agauaaagacccuaggaga

SEQ ID NO: 2481943 - RNA, 19 nt, Homo sapiens
  misc_RNA (1)...(19): siRNA sense strand
acacaggacuucaaggaga

SEQ ID NO: 2481944 - RNA, 19 nt, Homo sapiens
  misc_RNA (1)...(19): siRNA sense strand
gggccaaguuacuggagga

SEQ ID NO: 2481945 - RNA, 19 nt, Homo sapiens
  misc_RNA (1)...(19): siRNA sense strand
aagaugagcuccagcgaca

SEQ ID NO: 2481946 - RNA, 19 nt, Homo sapiens
  misc_RNA (1)...(19): siRNA sense strand
ugaagaagcuggacgagga

SEQ ID NO: 2481947 - RNA, 19 nt, Homo sapiens
  misc_RNA (1)...(19): siRNA sense strand
ggaugaagaagcuggacga

SEQ ID NO: 2481948 - RNA, 19 nt, Homo sapiens
  misc_RNA (1)...(19): siRNA sense strand
gcaagaaggagaaggaggu

SEQ ID NO: 2481949 - RNA, 19 nt, Homo sapiens
  misc_RNA (1)...(19): siRNA sense strand
uguccgaaguggaggagga

SEQ ID NO: 2481950 - RNA, 19 nt, Homo sapiens
  misc_RNA (1)...(19): siRNA sense strand
aggagaagcagaaggcuca

SEQ ID NO: 2481951 - RNA, 19 nt, Homo sapiens
  misc_RNA (1)...(19): siRNA sense strand
aggagaaggaccuggcaga

SEQ ID NO: 2481952 - RNA, 19 nt, Homo sapiens
  misc_RNA (1)...(19): siRNA sense strand
ccgaauaccucacgccuga

SEQ ID NO: 2481953 - RNA, 19 nt, Homo sapiens
  misc_RNA (1)...(19): siRNA sense strand
ucaaggagaaggacggcua

SEQ ID NO: 2481954 - RNA, 19 nt, Homo sapiens
  misc_RNA (1)...(19): siRNA sense strand
agaucgaauacguggauga

SEQ ID NO: 2481955 - RNA, 19 nt, Homo sapiens
  misc_RNA (1)...(19): siRNA sense strand
cugaagaagaugagcucca

SEQ ID NO: 2481956 - RNA, 19 nt, Homo sapiens
  misc_RNA (1)...(19): siRNA sense strand
cggugaaccuggacgagga

SEQ ID NO: 2481957 - RNA, 19 nt, Homo sapiens
  misc_RNA (1)...(19): siRNA sense strand
gcacucugguggaggagga

SEQ ID NO: 2481958 - RNA, 19 nt, Homo sapiens
  misc_RNA (1)...(19): siRNA sense strand
gggcaaaguuggggcugaa

SEQ ID NO: 2481959 - RNA, 19 nt, Homo sapiens
  misc_RNA (1)...(19): siRNA sense strand
acgaagagcuugaagggga

SEQ ID NO: 2481960 - RNA, 19 nt, Homo sapiens
  misc_RNA (1)...(19): siRNA sense strand
gauaaagacccuaggagag

SEQ ID NO: 2481961 - RNA, 19 nt, Homo sapiens
  misc_RNA (1)...(19): siRNA sense strand
agaaggagaaggagguagu

SEQ ID NO: 2481962 - RNA, 19 nt, Homo sapiens
  misc_RNA (1)...(19): siRNA sense strand
gaguggagaacauggacau

SEQ ID NO: 2481963 - RNA, 19 nt, Homo sapiens
  misc_RNA (1)...(19): siRNA sense strand
acuaacaaacuccgggcaa

SEQ ID NO: 2481964 - RNA, 19 nt, Homo sapiens
  misc_RNA (1)...(19): siRNA sense strand
agaaggagccugugccuca

SEQ ID NO: 2481965 - RNA, 19 nt, Homo sapiens
  misc_RNA (1)...(19): siRNA sense strand
ggcaagagcaugaacgcga

SEQ ID NO: 2481966 - RNA, 19 nt, Homo sapiens
  misc_RNA (1)...(19): siRNA sense strand
gcaagagcaugaacgcgaa

SEQ ID NO: 2481967 - RNA, 19 nt, Homo sapiens
  misc_RNA (1)...(19): siRNA sense strand
aagaccaagcggaggguga

SEQ ID NO: 2481968 - RNA, 19 nt, Homo sapiens
  misc_RNA (1)...(19): siRNA sense strand
augaggaucccgagcggaa

SEQ ID NO: 2481969 - RNA, 19 nt, Homo sapiens
  misc_RNA (1)...(19): siRNA sense strand
uguccaaguaugacgaaga

SEQ ID NO: 2481970 - RNA, 19 nt, Homo sapiens
  misc_RNA (1)...(19): siRNA sense strand
aggagaagcgccugcugaa

SEQ ID NO: 2481971 - RNA, 19 nt, Homo sapiens
  misc_RNA (1)...(19): siRNA sense strand
ugcagaagcagcuggagaa

SEQ ID NO: 2481972 - RNA, 19 nt, Homo sapiens
  misc_RNA (1)...(19): siRNA sense strand
cggcagcugcagaaggaga

SEQ ID NO: 2481973 - RNA, 19 nt, Homo sapiens
  misc_RNA (1)...(19): siRNA sense strand
aaguggaggaggagaagga

SEQ ID NO: 2481974 - RNA, 19 nt, Homo sapiens
  misc_RNA (1)...(19): siRNA sense strand
aagcggagggugaagaaaa

SEQ ID NO: 2481975 - RNA, 19 nt, Homo sapiens
  misc_RNA (1)...(19): siRNA sense strand
aggagaagcagcagcagga

SEQ ID NO: 2481976 - RNA, 19 nt, Homo sapiens
  misc_RNA (1)...(19): siRNA sense strand
ucagcaucgaggagacuaa

SEQ ID NO: 2481977 - RNA, 19 nt, Homo sapiens
  misc_RNA (1)...(19): siRNA sense strand
cgagaaggugguggagauu

SEQ ID NO: 2481978 - RNA, 19 nt, Homo sapiens
  misc_RNA (1)...(19): siRNA sense strand
ugaaccuggacgaggagaa

SEQ ID NO: 2481979 - RNA, 19 nt, Homo sapiens
  misc_RNA (1)...(19): siRNA sense strand
acacccgaguggagaacau

SEQ ID NO: 2481980 - RNA, 19 nt, Homo sapiens
  misc_RNA (1)...(19): siRNA sense strand
agguuaaugccaucaagaa

SEQ ID NO: 2481981 - RNA, 19 nt, Homo sapiens
  misc_RNA (1)...(19): siRNA sense strand
aguaugacgaagagcuuga

SEQ ID NO: 2481982 - RNA, 19 nt, Homo sapiens
  misc_RNA (1)...(19): siRNA sense strand
agcgggagcuggaggagau

SEQ ID NO: 2481983 - RNA, 19 nt, Homo sapiens
  misc_RNA (1)...(19): siRNA sense strand
gagcagaagcuaaagccaa

SEQ ID NO: 2481984 - RNA, 19 nt, Homo sapiens
  misc_RNA (1)...(19): siRNA sense strand
cggacaugcugaaggacau

SEQ ID NO: 2481985 - RNA, 19 nt, Homo sapiens
  misc_RNA (1)...(19): siRNA sense strand
uggcuaaagaccagacgaa

SEQ ID NO: 2481986 - RNA, 19 nt, Homo sapiens
  misc_RNA (1)...(19): siRNA sense strand
ggcccaaggucaaagccaa

SEQ ID NO: 2481987 - RNA, 19 nt, Homo sapiens
  misc_RNA (1)...(19): siRNA sense strand
cagaugaaccugagccuga

SEQ ID NO: 2481988 - RNA, 19 nt, Homo sapiens
  misc_RNA (1)...(19): siRNA sense strand
uggagaagguauuugggau

SEQ ID NO: 2481989 - RNA, 19 nt, Homo sapiens
  misc_RNA (1)...(19): siRNA sense strand
aagaaggaucccaaggaau

SEQ ID NO: 2481990 - RNA, 19 nt, Homo sapiens
  misc_RNA (1)...(19): siRNA sense strand
agcuaaagccaaagcccaa

SEQ ID NO: 2481991 - RNA, 19 nt, Homo sapiens
  misc_RNA (1)...(19): siRNA sense strand
ccaagaaacagaaugcuga

SEQ ID NO: 2481992 - RNA, 19 nt, Homo sapiens
  misc_RNA (1)...(19): siRNA sense strand
aaacaagagucuagcagcu

SEQ ID NO: 2481993 - RNA, 19 nt, Homo sapiens
  misc_RNA (1)...(19): siRNA sense strand
aagaaagcccgaaagguga

SEQ ID NO: 2481994 - RNA, 19 nt, Homo sapiens
  misc_RNA (1)...(19): siRNA sense strand
cauugaacgagcaggcuau

SEQ ID NO: 2481995 - RNA, 19 nt, Homo sapiens
  misc_RNA (1)...(19): siRNA sense strand
aggcgggagcagaagcuaa

SEQ ID NO: 2481996 - RNA, 19 nt, Homo sapiens
  misc_RNA (1)...(19): siRNA sense strand
ccaagagccugaagcacca

SEQ ID NO: 2481997 - RNA, 19 nt, Homo sapiens
  misc_RNA (1)...(19): siRNA sense strand
ccaucaagcgcucggacau

SEQ ID NO: 2481998 - RNA, 19 nt, Homo sapiens
  misc_RNA (1)...(19): siRNA sense strand
ucugggaggugcugcgcaa

SEQ ID NO: 2481999 - RNA, 19 nt, Homo sapiens
  misc_RNA (1)...(19): siRNA sense strand
agcagaaguaccuggacua

SEQ ID NO: 2482000 - RNA, 19 nt, Homo sapiens
  misc_RNA (1)...(19): siRNA sense strand
aggcgauggaagcggauuu

SEQ ID NO: 2482001 - RNA, 19 nt, Homo sapiens
  misc_RNA (1)...(19): siRNA sense strand
auacaaaggcucaggagac

SEQ ID NO: 2482002 - RNA, 19 nt, Homo sapiens
  misc_RNA (1)...(19): siRNA sense strand
caagaaagcccgaaaggug

SEQ ID NO: 2482003 - RNA, 19 nt, Homo sapiens
  misc_RNA (1)...(19): siRNA sense strand
cgacuaaggacucacccaa

SEQ ID NO: 2482004 - RNA, 19 nt, Homo sapiens
  misc_RNA (1)...(19): siRNA sense strand
gcaacugggacgaagcuga

SEQ ID NO: 2482005 - RNA, 19 nt, Homo sapiens
  misc_RNA (1)...(19): siRNA sense strand
ggacgaagcugauaucgga

SEQ ID NO: 2482006 - RNA, 19 nt, Homo sapiens
  misc_RNA (1)...(19): siRNA sense strand
aagccaagaaagcccgaaa

SEQ ID NO: 2482007 - RNA, 19 nt, Homo sapiens
  misc_RNA (1)...(19): siRNA sense strand
cgaaaucauugaacgagca

SEQ ID NO: 2482008 - RNA, 19 nt, Homo sapiens
  misc_RNA (1)...(19): siRNA sense strand
ucucagaggaugugaaggu

SEQ ID NO: 2482009 - RNA, 19 nt, Homo sapiens
  misc_RNA (1)...(19): siRNA sense strand
ccugcaagguacaaaagaa

SEQ ID NO: 2482010 - RNA, 19 nt, Homo sapiens
  misc_RNA (1)...(19): siRNA sense strand
gcagcagugaucagaguca

SEQ ID NO: 2482011 - RNA, 19 nt, Homo sapiens
  misc_RNA (1)...(19): siRNA sense strand
gagcagaagcuaaagccaa

SEQ ID NO: 2482012 - RNA, 19 nt, Homo sapiens
  misc_RNA (1)...(19): siRNA sense strand
cggacaugcugaaggacau

SEQ ID NO: 2482013 - RNA, 19 nt, Homo sapiens
  misc_RNA (1)...(19): siRNA sense strand
uggcuaaagaccagacgaa

SEQ ID NO: 2482014 - RNA, 19 nt, Homo sapiens
  misc_RNA (1)...(19): siRNA sense strand
ggcccaaggucaaagccaa

SEQ ID NO: 2482015 - RNA, 19 nt, Homo sapiens
  misc_RNA (1)...(19): siRNA sense strand
cagaugaaccugagccuga

SEQ ID NO: 2482016 - RNA, 19 nt, Homo sapiens
  misc_RNA (1)...(19): siRNA sense strand
uggagaagguauuugggau

SEQ ID NO: 2482017 - RNA, 19 nt, Homo sapiens
  misc_RNA (1)...(19): siRNA sense strand
aagaaggaucccaaggaau

SEQ ID NO: 2482018 - RNA, 19 nt, Homo sapiens
  misc_RNA (1)...(19): siRNA sense strand
agcuaaagccaaagcccaa

SEQ ID NO: 2482019 - RNA, 19 nt, Homo sapiens
  misc_RNA (1)...(19): siRNA sense strand
ccaagaaacagaaugcuga

SEQ ID NO: 2482020 - RNA, 19 nt, Homo sapiens
  misc_RNA (1)...(19): siRNA sense strand
aaacaagagucuagcagcu

SEQ ID NO: 2482021 - RNA, 19 nt, Homo sapiens
  misc_RNA (1)...(19): siRNA sense strand
aagaaagcccgaaagguga

SEQ ID NO: 2482022 - RNA, 19 nt, Homo sapiens
  misc_RNA (1)...(19): siRNA sense strand
cauugaacgagcaggcuau

SEQ ID NO: 2482023 - RNA, 19 nt, Homo sapiens
  misc_RNA (1)...(19): siRNA sense strand
aggcgggagcagaagcuaa

SEQ ID NO: 2482024 - RNA, 19 nt, Homo sapiens
  misc_RNA (1)...(19): siRNA sense strand
ccaagagccugaagcacca

SEQ ID NO: 2482025 - RNA, 19 nt, Homo sapiens
  misc_RNA (1)...(19): siRNA sense strand
ccaucaagcgcucggacau

SEQ ID NO: 2482026 - RNA, 19 nt, Homo sapiens
  misc_RNA (1)...(19): siRNA sense strand
ucugggaggugcugcgcaa

SEQ ID NO: 2482027 - RNA, 19 nt, Homo sapiens
  misc_RNA (1)...(19): siRNA sense strand
agcagaaguaccuggacua

SEQ ID NO: 2482028 - RNA, 19 nt, Homo sapiens
  misc_RNA (1)...(19): siRNA sense strand
aggcgauggaagcggauuu

SEQ ID NO: 2482029 - RNA, 19 nt, Homo sapiens
  misc_RNA (1)...(19): siRNA sense strand
auacaaaggcucaggagac

SEQ ID NO: 2482030 - RNA, 19 nt, Homo sapiens
  misc_RNA (1)...(19): siRNA sense strand
caagaaagcccgaaaggug

SEQ ID NO: 2482031 - RNA, 19 nt, Homo sapiens
  misc_RNA (1)...(19): siRNA sense strand
cgacuaaggacucacccaa

SEQ ID NO: 2482032 - RNA, 19 nt, Homo sapiens
  misc_RNA (1)...(19): siRNA sense strand
gcaacugggacgaagcuga

SEQ ID NO: 2482033 - RNA, 19 nt, Homo sapiens
  misc_RNA (1)...(19): siRNA sense strand
ggacgaagcugauaucgga

SEQ ID NO: 2482034 - RNA, 19 nt, Homo sapiens
  misc_RNA (1)...(19): siRNA sense strand
aagccaagaaagcccgaaa

SEQ ID NO: 2482035 - RNA, 19 nt, Homo sapiens
  misc_RNA (1)...(19): siRNA sense strand
cgaaaucauugaacgagca

SEQ ID NO: 2482036 - RNA, 19 nt, Homo sapiens
  misc_RNA (1)...(19): siRNA sense strand
ucucagaggaugugaaggu

SEQ ID NO: 2482037 - RNA, 19 nt, Homo sapiens
  misc_RNA (1)...(19): siRNA sense strand
ccugcaagguacaaaagaa

SEQ ID NO: 2482038 - RNA, 19 nt, Homo sapiens
  misc_RNA (1)...(19): siRNA sense strand
gcagcagugaucagaguca

SEQ ID NO: 2482039 - RNA, 19 nt, Homo sapiens
  misc_RNA (1)...(19): siRNA sense strand
gagcagaagcuaaagccaa

SEQ ID NO: 2482040 - RNA, 19 nt, Homo sapiens
  misc_RNA (1)...(19): siRNA sense strand
cggacaugcugaaggacau

SEQ ID NO: 2482041 - RNA, 19 nt, Homo sapiens
  misc_RNA (1)...(19): siRNA sense strand
uggcuaaagaccagacgaa

SEQ ID NO: 2482042 - RNA, 19 nt, Homo sapiens
  misc_RNA (1)...(19): siRNA sense strand
ggcccaaggucaaagccaa

SEQ ID NO: 2482043 - RNA, 19 nt, Homo sapiens
  misc_RNA (1)...(19): siRNA sense strand
cagaugaaccugagccuga

SEQ ID NO: 2482044 - RNA, 19 nt, Homo sapiens
  misc_RNA (1)...(19): siRNA sense strand
uggagaagguauuugggau

SEQ ID NO: 2482045 - RNA, 19 nt, Homo sapiens
  misc_RNA (1)...(19): siRNA sense strand
aagaaggaucccaaggaau

SEQ ID NO: 2482046 - RNA, 19 nt, Homo sapiens
  misc_RNA (1)...(19): siRNA sense strand
agcuaaagccaaagcccaa

SEQ ID NO: 2482047 - RNA, 19 nt, Homo sapiens
  misc_RNA (1)...(19): siRNA sense strand
ccaagaaacagaaugcuga

SEQ ID NO: 2482048 - RNA, 19 nt, Homo sapiens
  misc_RNA (1)...(19): siRNA sense strand
aaacaagagucuagcagcu

SEQ ID NO: 2482049 - RNA, 19 nt, Homo sapiens
  misc_RNA (1)...(19): siRNA sense strand
aagaaagcccgaaagguga

SEQ ID NO: 2482050 - RNA, 19 nt, Homo sapiens
  misc_RNA (1)...(19): siRNA sense strand
cauugaacgagcaggcuau

SEQ ID NO: 2482051 - RNA, 19 nt, Homo sapiens
  misc_RNA (1)...(19): siRNA sense strand
aggcgggagcagaagcuaa

SEQ ID NO: 2482052 - RNA, 19 nt, Homo sapiens
  misc_RNA (1)...(19): siRNA sense strand
ccaagagccugaagcacca

SEQ ID NO: 2482053 - RNA, 19 nt, Homo sapiens
  misc_RNA (1)...(19): siRNA sense strand
ccaucaagcgcucggacau

SEQ ID NO: 2482054 - RNA, 19 nt, Homo sapiens
  misc_RNA (1)...(19): siRNA sense strand
ucugggaggugcugcgcaa

SEQ ID NO: 2482055 - RNA, 19 nt, Homo sapiens
  misc_RNA (1)...(19): siRNA sense strand
agcagaaguaccuggacua

SEQ ID NO: 2482056 - RNA, 19 nt, Homo sapiens
  misc_RNA (1)...(19): siRNA sense strand
aggcgauggaagcggauuu

SEQ ID NO: 2482057 - RNA, 19 nt, Homo sapiens
  misc_RNA (1)...(19): siRNA sense strand
auacaaaggcucaggagac

SEQ ID NO: 2482058 - RNA, 19 nt, Homo sapiens
  misc_RNA (1)...(19): siRNA sense strand
caagaaagcccgaaaggug

SEQ ID NO: 2482059 - RNA, 19 nt, Homo sapiens
  misc_RNA (1)...(19): siRNA sense strand
cgacuaaggacucacccaa

SEQ ID NO: 2482060 - RNA, 19 nt, Homo sapiens
  misc_RNA (1)...(19): siRNA sense strand
gcaacugggacgaagcuga

SEQ ID NO: 2482061 - RNA, 19 nt, Homo sapiens
  misc_RNA (1)...(19): siRNA sense strand
ggacgaagcugauaucgga

SEQ ID NO: 2482062 - RNA, 19 nt, Homo sapiens
  misc_RNA (1)...(19): siRNA sense strand
aagccaagaaagcccgaaa

SEQ ID NO: 2482063 - RNA, 19 nt, Homo sapiens
  misc_RNA (1)...(19): siRNA sense strand
cgaaaucauugaacgagca

SEQ ID NO: 2482064 - RNA, 19 nt, Homo sapiens
  misc_RNA (1)...(19): siRNA sense strand
ucucagaggaugugaaggu

SEQ ID NO: 2482065 - RNA, 19 nt, Homo sapiens
  misc_RNA (1)...(19): siRNA sense strand
ccugcaagguacaaaagaa

SEQ ID NO: 2482066 - RNA, 19 nt, Homo sapiens
  misc_RNA (1)...(19): siRNA sense strand
gcagcagugaucagaguca

SEQ ID NO: 2482067 - RNA, 19 nt, Homo sapiens
  misc_RNA (1)...(19): siRNA sense strand
ggacggagccauucgggaa

SEQ ID NO: 2482068 - RNA, 19 nt, Homo sapiens
  misc_RNA (1)...(19): siRNA sense strand
gcacaggcaaagaggggaa

SEQ ID NO: 2482069 - RNA, 19 nt, Homo sapiens
  misc_RNA (1)...(19): siRNA sense strand
cugaccaugcccagggaaa

SEQ ID NO: 2482070 - RNA, 19 nt, Homo sapiens
  misc_RNA (1)...(19): siRNA sense strand
gcacaaagacucugggacc

SEQ ID NO: 2482071 - RNA, 19 nt, Homo sapiens
  misc_RNA (1)...(19): siRNA sense strand
ccaccaaagcacaaagacu

SEQ ID NO: 2482072 - RNA, 19 nt, Homo sapiens
  misc_RNA (1)...(19): siRNA sense strand
guuuacagguagaggagcu

SEQ ID NO: 2482073 - RNA, 19 nt, Homo sapiens
  misc_RNA (1)...(19): siRNA sense strand
agacagagcucacugacca

SEQ ID NO: 2482074 - RNA, 19 nt, Homo sapiens
  misc_RNA (1)...(19): siRNA sense strand
guggaaaggaugagcgccu

SEQ ID NO: 2482075 - RNA, 19 nt, Homo sapiens
  misc_RNA (1)...(19): siRNA sense strand
agaagaagaaggaucggau

SEQ ID NO: 2482076 - RNA, 19 nt, Homo sapiens
  misc_RNA (1)...(19): siRNA sense strand
cuuaaucgccuucgggaga

SEQ ID NO: 2482077 - RNA, 19 nt, Homo sapiens
  misc_RNA (1)...(19): siRNA sense strand
aggcaaagaggggaagaaa

SEQ ID NO: 2482078 - RNA, 19 nt, Homo sapiens
  misc_RNA (1)...(19): siRNA sense strand
ucagagaagaagaaggauc

SEQ ID NO: 2482079 - RNA, 19 nt, Homo sapiens
  misc_RNA (1)...(19): siRNA sense strand
ggcugaaccugcuggcuca

SEQ ID NO: 2482080 - RNA, 19 nt, Homo sapiens
  misc_RNA (1)...(19): siRNA sense strand
ggacggagccauucgggaa

SEQ ID NO: 2482081 - RNA, 19 nt, Homo sapiens
  misc_RNA (1)...(19): siRNA sense strand
gcacaggcaaagaggggaa

SEQ ID NO: 2482082 - RNA, 19 nt, Homo sapiens
  misc_RNA (1)...(19): siRNA sense strand
cugaccaugcccagggaaa

SEQ ID NO: 2482083 - RNA, 19 nt, Homo sapiens
  misc_RNA (1)...(19): siRNA sense strand
gcacaaagacucugggacc

SEQ ID NO: 2482084 - RNA, 19 nt, Homo sapiens
  misc_RNA (1)...(19): siRNA sense strand
ccaccaaagcacaaagacu

SEQ ID NO: 2482085 - RNA, 19 nt, Homo sapiens
  misc_RNA (1)...(19): siRNA sense strand
guuuacagguagaggagcu

SEQ ID NO: 2482086 - RNA, 19 nt, Homo sapiens
  misc_RNA (1)...(19): siRNA sense strand
agacagagcucacugacca

SEQ ID NO: 2482087 - RNA, 19 nt, Homo sapiens
  misc_RNA (1)...(19): siRNA sense strand
guggaaaggaugagcgccu

SEQ ID NO: 2482088 - RNA, 19 nt, Homo sapiens
  misc_RNA (1)...(19): siRNA sense strand
agaagaagaaggaucggau

SEQ ID NO: 2482089 - RNA, 19 nt, Homo sapiens
  misc_RNA (1)...(19): siRNA sense strand
cuuaaucgccuucgggaga

SEQ ID NO: 2482090 - RNA, 19 nt, Homo sapiens
  misc_RNA (1)...(19): siRNA sense strand
aggcaaagaggggaagaaa

SEQ ID NO: 2482091 - RNA, 19 nt, Homo sapiens
  misc_RNA (1)...(19): siRNA sense strand
ucagagaagaagaaggauc

SEQ ID NO: 2482092 - RNA, 19 nt, Homo sapiens
  misc_RNA (1)...(19): siRNA sense strand
ggcugaaccugcuggcuca

SEQ ID NO: 2482093 - RNA, 19 nt, Homo sapiens
  misc_RNA (1)...(19): siRNA sense strand
ggacggagccauucgggaa

SEQ ID NO: 2482094 - RNA, 19 nt, Homo sapiens
  misc_RNA (1)...(19): siRNA sense strand
gcacaggcaaagaggggaa

SEQ ID NO: 2482095 - RNA, 19 nt, Homo sapiens
  misc_RNA (1)...(19): siRNA sense strand
cugaccaugcccagggaaa

SEQ ID NO: 2482096 - RNA, 19 nt, Homo sapiens
  misc_RNA (1)...(19): siRNA sense strand
gcacaaagacucugggacc

SEQ ID NO: 2482097 - RNA, 19 nt, Homo sapiens
  misc_RNA (1)...(19): siRNA sense strand
ccaccaaagcacaaagacu

SEQ ID NO: 2482098 - RNA, 19 nt, Homo sapiens
  misc_RNA (1)...(19): siRNA sense strand
guuuacagguagaggagcu

SEQ ID NO: 2482099 - RNA, 19 nt, Homo sapiens
  misc_RNA (1)...(19): siRNA sense strand
agacagagcucacugacca

SEQ ID NO: 2482100 - RNA, 19 nt, Homo sapiens
  misc_RNA (1)...(19): siRNA sense strand
guggaaaggaugagcgccu

SEQ ID NO: 2482101 - RNA, 19 nt, Homo sapiens
  misc_RNA (1)...(19): siRNA sense strand
agaagaagaaggaucggau

SEQ ID NO: 2482102 - RNA, 19 nt, Homo sapiens
  misc_RNA (1)...(19): siRNA sense strand
cuuaaucgccuucgggaga

SEQ ID NO: 2482103 - RNA, 19 nt, Homo sapiens
  misc_RNA (1)...(19): siRNA sense strand
aggcaaagaggggaagaaa

SEQ ID NO: 2482104 - RNA, 19 nt, Homo sapiens
  misc_RNA (1)...(19): siRNA sense strand
ucagagaagaagaaggauc

SEQ ID NO: 2482105 - RNA, 19 nt, Homo sapiens
  misc_RNA (1)...(19): siRNA sense strand
ggcugaaccugcuggcuca

SEQ ID NO: 2482106 - RNA, 19 nt, Homo sapiens
  misc_RNA (1)...(19): siRNA sense strand
gagaagaacuauuuggaga

SEQ ID NO: 2482107 - RNA, 19 nt, Homo sapiens
  misc_RNA (1)...(19): siRNA sense strand
uguuggagcuagacagaaa

SEQ ID NO: 2482108 - RNA, 19 nt, Homo sapiens
  misc_RNA (1)...(19): siRNA sense strand
cgucaagguuacagcaaaa

SEQ ID NO: 2482109 - RNA, 19 nt, Homo sapiens
  misc_RNA (1)...(19): siRNA sense strand
cuacagaaauccagagacu

SEQ ID NO: 2482110 - RNA, 19 nt, Homo sapiens
  misc_RNA (1)...(19): siRNA sense strand
agucaagagaccugugaaa

SEQ ID NO: 2482111 - RNA, 19 nt, Homo sapiens
  misc_RNA (1)...(19): siRNA sense strand
acacauaugaugaggcuau

SEQ ID NO: 2482112 - RNA, 19 nt, Homo sapiens
  misc_RNA (1)...(19): siRNA sense strand
uguaacaagcauugacaaa

SEQ ID NO: 2482113 - RNA, 19 nt, Homo sapiens
  misc_RNA (1)...(19): siRNA sense strand
acuuauagaccuugcacaa

SEQ ID NO: 2482114 - RNA, 19 nt, Homo sapiens
  misc_RNA (1)...(19): siRNA sense strand
agaagaacuauuuggagaa

SEQ ID NO: 2482115 - RNA, 19 nt, Homo sapiens
  misc_RNA (1)...(19): siRNA sense strand
ucucaggaaauuagugaaa

SEQ ID NO: 2482116 - RNA, 19 nt, Homo sapiens
  misc_RNA (1)...(19): siRNA sense strand
aguuaaaggaugggaagaa

SEQ ID NO: 2482117 - RNA, 19 nt, Homo sapiens
  misc_RNA (1)...(19): siRNA sense strand
ugauauuagugaagggacu

SEQ ID NO: 2482118 - RNA, 19 nt, Homo sapiens
  misc_RNA (1)...(19): siRNA sense strand
auaugauacuguaggaaga

SEQ ID NO: 2482119 - RNA, 19 nt, Homo sapiens
  misc_RNA (1)...(19): siRNA sense strand
ccauauaagugauaaucca

SEQ ID NO: 2482120 - RNA, 19 nt, Homo sapiens
  misc_RNA (1)...(19): siRNA sense strand
gggcacugaacgagguaau

SEQ ID NO: 2482121 - RNA, 19 nt, Homo sapiens
  misc_RNA (1)...(19): siRNA sense strand
aggaagaagaccuugcuua

SEQ ID NO: 2482122 - RNA, 19 nt, Homo sapiens
  misc_RNA (1)...(19): siRNA sense strand
agauaaaugauguggaaac

SEQ ID NO: 2482123 - RNA, 19 nt, Homo sapiens
  misc_RNA (1)...(19): siRNA sense strand
ggaaauucaacaucaggaa

SEQ ID NO: 2482124 - RNA, 19 nt, Homo sapiens
  misc_RNA (1)...(19): siRNA sense strand
guuaucaagugcagaguca

SEQ ID NO: 2482125 - RNA, 19 nt, Homo sapiens
  misc_RNA (1)...(19): siRNA sense strand
gguccauauaagugauaau

SEQ ID NO: 2482126 - RNA, 19 nt, Homo sapiens
  misc_RNA (1)...(19): siRNA sense strand
cugggaugcuucugcaaua

SEQ ID NO: 2482127 - RNA, 19 nt, Homo sapiens
  misc_RNA (1)...(19): siRNA sense strand
auuuggagguggugcacaa

SEQ ID NO: 2482128 - RNA, 19 nt, Homo sapiens
  misc_RNA (1)...(19): siRNA sense strand
agaaagccgacuacagaua

SEQ ID NO: 2482129 - RNA, 19 nt, Homo sapiens
  misc_RNA (1)...(19): siRNA sense strand
uggaacaacgcuaggaaca

SEQ ID NO: 2482130 - RNA, 19 nt, Homo sapiens
  misc_RNA (1)...(19): siRNA sense strand
gauaagaagugguaccagu

SEQ ID NO: 2482131 - RNA, 19 nt, Homo sapiens
  misc_RNA (1)...(19): siRNA sense strand
gauuaaugagggagcgcuu

SEQ ID NO: 2482132 - RNA, 19 nt, Homo sapiens
  misc_RNA (1)...(19): siRNA sense strand
ggaccucaaaucaaagaaa

SEQ ID NO: 2482133 - RNA, 19 nt, Homo sapiens
  misc_RNA (1)...(19): siRNA sense strand
aaucaaagaaagccgacua

SEQ ID NO: 2482134 - RNA, 19 nt, Homo sapiens
  misc_RNA (1)...(19): siRNA sense strand
uaacagugaugcaugggaa

SEQ ID NO: 2482135 - RNA, 19 nt, Homo sapiens
  misc_RNA (1)...(19): siRNA sense strand
ccuguuacauguugcgaau

SEQ ID NO: 2482136 - RNA, 19 nt, Homo sapiens
  misc_RNA (1)...(19): siRNA sense strand
uggaaacuccggaggguga

SEQ ID NO: 2482137 - RNA, 19 nt, Homo sapiens
  misc_RNA (1)...(19): siRNA sense strand
agaugaaagagggcagaaa

SEQ ID NO: 2482138 - RNA, 19 nt, Homo sapiens
  misc_RNA (1)...(19): siRNA sense strand
acgucaagguuacagcaaa

SEQ ID NO: 2482139 - RNA, 19 nt, Homo sapiens
  misc_RNA (1)...(19): siRNA sense strand
cuuugaaucuggaacagua

SEQ ID NO: 2482140 - RNA, 19 nt, Homo sapiens
  misc_RNA (1)...(19): siRNA sense strand
gugaaacaccauacccaaa

SEQ ID NO: 2482141 - RNA, 19 nt, Homo sapiens
  misc_RNA (1)...(19): siRNA sense strand
uguuacauguugcgaauau

SEQ ID NO: 2482142 - RNA, 19 nt, Homo sapiens
  misc_RNA (1)...(19): siRNA sense strand
agacauuguagaugaagau

SEQ ID NO: 2482143 - RNA, 19 nt, Homo sapiens
  misc_RNA (1)...(19): siRNA sense strand
gcuuaaauuuugcagagaa

SEQ ID NO: 2482144 - RNA, 19 nt, Homo sapiens
  misc_RNA (1)...(19): siRNA sense strand
cagacauuguagaugaaga

SEQ ID NO: 2482145 - RNA, 19 nt, Homo sapiens
  misc_RNA (1)...(19): siRNA sense strand
cgaaaaggagaaauugaaa

SEQ ID NO: 2482146 - RNA, 19 nt, Homo sapiens
  misc_RNA (1)...(19): siRNA sense strand
acagaaacgucaagguuac

SEQ ID NO: 2482147 - RNA, 19 nt, Homo sapiens
  misc_RNA (1)...(19): siRNA sense strand
aaauaaagaugacaggcca

SEQ ID NO: 2482148 - RNA, 19 nt, Homo sapiens
  misc_RNA (1)...(19): siRNA sense strand
aauaaagaugacaggccaa

SEQ ID NO: 2482149 - RNA, 19 nt, Homo sapiens
  misc_RNA (1)...(19): siRNA sense strand
ugacaguggagcugcagua

SEQ ID NO: 2482150 - RNA, 19 nt, Homo sapiens
  misc_RNA (1)...(19): siRNA sense strand
cauuguagaugaagaucca

SEQ ID NO: 2482151 - RNA, 19 nt, Homo sapiens
  misc_RNA (1)...(19): siRNA sense strand
gguuuggguggguggagaa

SEQ ID NO: 2482152 - RNA, 19 nt, Homo sapiens
  misc_RNA (1)...(19): siRNA sense strand
cuucacuccuguagaaaca

SEQ ID NO: 2482153 - RNA, 19 nt, Homo sapiens
  misc_RNA (1)...(19): siRNA sense strand
gcucaugagauuauguuga

SEQ ID NO: 2482154 - RNA, 19 nt, Homo sapiens
  misc_RNA (1)...(19): siRNA sense strand
cguaugaacccuggagaga

SEQ ID NO: 2482155 - RNA, 19 nt, Homo sapiens
  misc_RNA (1)...(19): siRNA sense strand
agaaacaccugaagcacca

SEQ ID NO: 2482156 - RNA, 19 nt, Homo sapiens
  misc_RNA (1)...(19): siRNA sense strand
gagauaaaugauguggaaa

SEQ ID NO: 2482157 - RNA, 19 nt, Homo sapiens
  misc_RNA (1)...(19): siRNA sense strand
ccagaggaucgcugcaaau

SEQ ID NO: 2482158 - RNA, 19 nt, Homo sapiens
  misc_RNA (1)...(19): siRNA sense strand
cuaaaccaguacagacaau

SEQ ID NO: 2482159 - RNA, 19 nt, Homo sapiens
  misc_RNA (1)...(19): siRNA sense strand
ggaccuuauuccugcacuu

SEQ ID NO: 2482160 - RNA, 19 nt, Homo sapiens
  misc_RNA (1)...(19): siRNA sense strand
uggagaaccaccacaacaa

SEQ ID NO: 2482161 - RNA, 19 nt, Homo sapiens
  misc_RNA (1)...(19): siRNA sense strand
ucugaugggcuucgugaua

SEQ ID NO: 2482162 - RNA, 19 nt, Homo sapiens
  misc_RNA (1)...(19): siRNA sense strand
ucaagagaccugugaaaau

SEQ ID NO: 2482163 - RNA, 19 nt, Homo sapiens
  misc_RNA (1)...(19): siRNA sense strand
caucuggaguuguugguga

SEQ ID NO: 2482164 - RNA, 19 nt, Homo sapiens
  misc_RNA (1)...(19): siRNA sense strand
ucagaagaggccugccaua

SEQ ID NO: 2482165 - RNA, 19 nt, Homo sapiens
  misc_RNA (1)...(19): siRNA sense strand
ccucaagguggaauucaaa

SEQ ID NO: 2482166 - RNA, 19 nt, Homo sapiens
  misc_RNA (1)...(19): siRNA sense strand
gaagaaacgucuacaggca

SEQ ID NO: 2482167 - RNA, 19 nt, Homo sapiens
  misc_RNA (1)...(19): siRNA sense strand
aggcaaaagucaaaguuau

SEQ ID NO: 2482168 - RNA, 19 nt, Homo sapiens
  misc_RNA (1)...(19): siRNA sense strand
aguguaaguuggacgaaaa

SEQ ID NO: 2482169 - RNA, 19 nt, Homo sapiens
  misc_RNA (1)...(19): siRNA sense strand
ccauagagccaaagccagu

SEQ ID NO: 2482170 - RNA, 19 nt, Homo sapiens
  misc_RNA (1)...(19): siRNA sense strand
ggcaaaagucaaaguuauu

SEQ ID NO: 2482171 - RNA, 19 nt, Homo sapiens
  misc_RNA (1)...(19): siRNA sense strand
cagcuuuguuagaggagga

SEQ ID NO: 2482172 - RNA, 19 nt, Homo sapiens
  misc_RNA (1)...(19): siRNA sense strand
gagcauguggucaggguca

SEQ ID NO: 2482173 - RNA, 19 nt, Homo sapiens
  misc_RNA (1)...(19): siRNA sense strand
aggaaggcguugaggccca

SEQ ID NO: 2482174 - RNA, 19 nt, Homo sapiens
  misc_RNA (1)...(19): siRNA sense strand
cuuuguuagaggaggaaga

SEQ ID NO: 2482175 - RNA, 19 nt, Homo sapiens
  misc_RNA (1)...(19): siRNA sense strand
aggaaaacuaccuggagua

SEQ ID NO: 2482176 - RNA, 19 nt, Homo sapiens
  misc_RNA (1)...(19): siRNA sense strand
uagaggaggaagagggagu

SEQ ID NO: 2482177 - RNA, 19 nt, Homo sapiens
  misc_RNA (1)...(19): siRNA sense strand
caauugcaauggagggcga

SEQ ID NO: 2482178 - RNA, 19 nt, Homo sapiens
  misc_RNA (1)...(19): siRNA sense strand
augugaaaguccuggagca

SEQ ID NO: 2482179 - RNA, 19 nt, Homo sapiens
  misc_RNA (1)...(19): siRNA sense strand
ccgcaaguaucgagccaag

SEQ ID NO: 2482180 - RNA, 19 nt, Homo sapiens
  misc_RNA (1)...(19): siRNA sense strand
aggcagaaaugcuggagag

SEQ ID NO: 2482181 - RNA, 19 nt, Homo sapiens
  misc_RNA (1)...(19): siRNA sense strand
ccuccgagucccugaagau

SEQ ID NO: 2482182 - RNA, 19 nt, Homo sapiens
  misc_RNA (1)...(19): siRNA sense strand
aagaaggagaguaaaguca

SEQ ID NO: 2482183 - RNA, 19 nt, Homo sapiens
  misc_RNA (1)...(19): siRNA sense strand
gaacaugacagaauggcca

SEQ ID NO: 2482184 - RNA, 19 nt, Homo sapiens
  misc_RNA (1)...(19): siRNA sense strand
gaugacgauucgagggcca

SEQ ID NO: 2482185 - RNA, 19 nt, Homo sapiens
  misc_RNA (1)...(19): siRNA sense strand
aagaagaaggagaguaaag

SEQ ID NO: 2482186 - RNA, 19 nt, Homo sapiens
  misc_RNA (1)...(19): siRNA sense strand
aaguauugccacucaguau

SEQ ID NO: 2482187 - RNA, 19 nt, Homo sapiens
  misc_RNA (1)...(19): siRNA sense strand
agacaguggaccaagagau

SEQ ID NO: 2482188 - RNA, 19 nt, Homo sapiens
  misc_RNA (1)...(19): siRNA sense strand
gguguuauuugcuuggaca

SEQ ID NO: 2482189 - RNA, 19 nt, Homo sapiens
  misc_RNA (1)...(19): siRNA sense strand
aagaaggagaguaaaguca

SEQ ID NO: 2482190 - RNA, 19 nt, Homo sapiens
  misc_RNA (1)...(19): siRNA sense strand
gaacaugacagaauggcca

SEQ ID NO: 2482191 - RNA, 19 nt, Homo sapiens
  misc_RNA (1)...(19): siRNA sense strand
gaugacgauucgagggcca

SEQ ID NO: 2482192 - RNA, 19 nt, Homo sapiens
  misc_RNA (1)...(19): siRNA sense strand
aagaagaaggagaguaaag

SEQ ID NO: 2482193 - RNA, 19 nt, Homo sapiens
  misc_RNA (1)...(19): siRNA sense strand
aaguauugccacucaguau

SEQ ID NO: 2482194 - RNA, 19 nt, Homo sapiens
  misc_RNA (1)...(19): siRNA sense strand
agacaguggaccaagagau

SEQ ID NO: 2482195 - RNA, 19 nt, Homo sapiens
  misc_RNA (1)...(19): siRNA sense strand
gguguuauuugcuuggaca

SEQ ID NO: 2482196 - RNA, 19 nt, Homo sapiens
  misc_RNA (1)...(19): siRNA sense strand
guuuauguucggcgguaua

SEQ ID NO: 2482197 - RNA, 19 nt, Homo sapiens
  misc_RNA (1)...(19): siRNA sense strand
agcccaaacagaagggaau

SEQ ID NO: 2482198 - RNA, 19 nt, Homo sapiens
  misc_RNA (1)...(19): siRNA sense strand
ggauccaggaggaggaguu

SEQ ID NO: 2482199 - RNA, 19 nt, Homo sapiens
  misc_RNA (1)...(19): siRNA sense strand
cucugaaagccaagaauau

SEQ ID NO: 2482200 - RNA, 19 nt, Homo sapiens
  misc_RNA (1)...(19): siRNA sense strand
aggagaggauccaggagga

SEQ ID NO: 2482201 - RNA, 19 nt, Homo sapiens
  misc_RNA (1)...(19): siRNA sense strand
ccagaauucgucaggguca

SEQ ID NO: 2482202 - RNA, 19 nt, Homo sapiens
  misc_RNA (1)...(19): siRNA sense strand
ggaaaugaguagugaagcc

SEQ ID NO: 2482203 - RNA, 19 nt, Homo sapiens
  misc_RNA (1)...(19): siRNA sense strand
uggugauggauaagaaaca

SEQ ID NO: 2482204 - RNA, 19 nt, Homo sapiens
  misc_RNA (1)...(19): siRNA sense strand
uggacacagaguauagaaa

SEQ ID NO: 2482205 - RNA, 19 nt, Homo sapiens
  misc_RNA (1)...(19): siRNA sense strand
uuaaugagaugaagcgguu

SEQ ID NO: 2482206 - RNA, 19 nt, Homo sapiens
  misc_RNA (1)...(19): siRNA sense strand
acuaacauacagugacaau

SEQ ID NO: 2482207 - RNA, 19 nt, Homo sapiens
  misc_RNA (1)...(19): siRNA sense strand
caaauauguuucagagcuc

SEQ ID NO: 2482208 - RNA, 19 nt, Homo sapiens
  misc_RNA (1)...(19): siRNA sense strand
guauaguguggaucaggaa

SEQ ID NO: 2482209 - RNA, 19 nt, Homo sapiens
  misc_RNA (1)...(19): siRNA sense strand
aagccaagaauauggagau

SEQ ID NO: 2482210 - RNA, 19 nt, Homo sapiens
  misc_RNA (1)...(19): siRNA sense strand
agccaagaauauggagauu

SEQ ID NO: 2482211 - RNA, 19 nt, Homo sapiens
  misc_RNA (1)...(19): siRNA sense strand
gagaugaagcgguuggaag

SEQ ID NO: 2482212 - RNA, 19 nt, Homo sapiens
  misc_RNA (1)...(19): siRNA sense strand
gagauuaaaguaaaggacu

SEQ ID NO: 2482213 - RNA, 19 nt, Homo sapiens
  misc_RNA (1)...(19): siRNA sense strand
guuuauguucggcgguaua

SEQ ID NO: 2482214 - RNA, 19 nt, Homo sapiens
  misc_RNA (1)...(19): siRNA sense strand
agcccaaacagaagggaau

SEQ ID NO: 2482215 - RNA, 19 nt, Homo sapiens
  misc_RNA (1)...(19): siRNA sense strand
ggauccaggaggaggaguu

SEQ ID NO: 2482216 - RNA, 19 nt, Homo sapiens
  misc_RNA (1)...(19): siRNA sense strand
cucugaaagccaagaauau

SEQ ID NO: 2482217 - RNA, 19 nt, Homo sapiens
  misc_RNA (1)...(19): siRNA sense strand
aggagaggauccaggagga

SEQ ID NO: 2482218 - RNA, 19 nt, Homo sapiens
  misc_RNA (1)...(19): siRNA sense strand
ccagaauucgucaggguca

SEQ ID NO: 2482219 - RNA, 19 nt, Homo sapiens
  misc_RNA (1)...(19): siRNA sense strand
ggaaaugaguagugaagcc

SEQ ID NO: 2482220 - RNA, 19 nt, Homo sapiens
  misc_RNA (1)...(19): siRNA sense strand
uggugauggauaagaaaca

SEQ ID NO: 2482221 - RNA, 19 nt, Homo sapiens
  misc_RNA (1)...(19): siRNA sense strand
uggacacagaguauagaaa

SEQ ID NO: 2482222 - RNA, 19 nt, Homo sapiens
  misc_RNA (1)...(19): siRNA sense strand
uuaaugagaugaagcgguu

SEQ ID NO: 2482223 - RNA, 19 nt, Homo sapiens
  misc_RNA (1)...(19): siRNA sense strand
acuaacauacagugacaau

SEQ ID NO: 2482224 - RNA, 19 nt, Homo sapiens
  misc_RNA (1)...(19): siRNA sense strand
caaauauguuucagagcuc

SEQ ID NO: 2482225 - RNA, 19 nt, Homo sapiens
  misc_RNA (1)...(19): siRNA sense strand
guauaguguggaucaggaa

SEQ ID NO: 2482226 - RNA, 19 nt, Homo sapiens
  misc_RNA (1)...(19): siRNA sense strand
aagccaagaauauggagau

SEQ ID NO: 2482227 - RNA, 19 nt, Homo sapiens
  misc_RNA (1)...(19): siRNA sense strand
agccaagaauauggagauu

SEQ ID NO: 2482228 - RNA, 19 nt, Homo sapiens
  misc_RNA (1)...(19): siRNA sense strand
gagaugaagcgguuggaag

SEQ ID NO: 2482229 - RNA, 19 nt, Homo sapiens
  misc_RNA (1)...(19): siRNA sense strand
gagauuaaaguaaaggacu

SEQ ID NO: 2482230 - RNA, 19 nt, Homo sapiens
  misc_RNA (1)...(19): siRNA sense strand
cugaaaucaucaugggcua

SEQ ID NO: 2482231 - RNA, 19 nt, Homo sapiens
  misc_RNA (1)...(19): siRNA sense strand
aaugaaagugguagagaau

SEQ ID NO: 2482232 - RNA, 19 nt, Homo sapiens
  misc_RNA (1)...(19): siRNA sense strand
acacaaaagugaugaacau

SEQ ID NO: 2482233 - RNA, 19 nt, Homo sapiens
  misc_RNA (1)...(19): siRNA sense strand
ggagcagagaugugggaau

SEQ ID NO: 2482234 - RNA, 19 nt, Homo sapiens
  misc_RNA (1)...(19): siRNA sense strand
ucguggagcuguuuagaaa

SEQ ID NO: 2482235 - RNA, 19 nt, Homo sapiens
  misc_RNA (1)...(19): siRNA sense strand
aggaggaggcauucggaaa

SEQ ID NO: 2482236 - RNA, 19 nt, Homo sapiens
  misc_RNA (1)...(19): siRNA sense strand
gagaaggacaucagcggua

SEQ ID NO: 2482237 - RNA, 19 nt, Homo sapiens
  misc_RNA (1)...(19): siRNA sense strand
cgauggaguacgugcagaa

SEQ ID NO: 2482238 - RNA, 19 nt, Homo sapiens
  misc_RNA (1)...(19): siRNA sense strand
ugucagaucacaugggcua

SEQ ID NO: 2482239 - RNA, 19 nt, Homo sapiens
  misc_RNA (1)...(19): siRNA sense strand
ccgucaacaaauuaagaaa

SEQ ID NO: 2482240 - RNA, 19 nt, Homo sapiens
  misc_RNA (1)...(19): siRNA sense strand
ccuuugagaccgaggugua

SEQ ID NO: 2482241 - RNA, 19 nt, Homo sapiens
  misc_RNA (1)...(19): siRNA sense strand
ccguggaaccauacacaaa

SEQ ID NO: 2482242 - RNA, 19 nt, Homo sapiens
  misc_RNA (1)...(19): siRNA sense strand
guuuggaaauaauggugaa

SEQ ID NO: 2482243 - RNA, 19 nt, Homo sapiens
  misc_RNA (1)...(19): siRNA sense strand
cauugaugcaguuuggaaa

SEQ ID NO: 2482244 - RNA, 19 nt, Homo sapiens
  misc_RNA (1)...(19): siRNA sense strand
ucucagaggaucccggaaa

SEQ ID NO: 2482245 - RNA, 19 nt, Homo sapiens
  misc_RNA (1)...(19): siRNA sense strand
cagugaaagcagcaaagaa

SEQ ID NO: 2482246 - RNA, 19 nt, Homo sapiens
  misc_RNA (1)...(19): siRNA sense strand
cggaaaguauugucggcca

SEQ ID NO: 2482247 - RNA, 19 nt, Homo sapiens
  misc_RNA (1)...(19): siRNA sense strand
uggaaauaauggugaaggu

SEQ ID NO: 2482248 - RNA, 19 nt, Homo sapiens
  misc_RNA (1)...(19): siRNA sense strand
ccucaagagucaaggagac

SEQ ID NO: 2482249 - RNA, 19 nt, Homo sapiens
  misc_RNA (1)...(19): siRNA sense strand
ggucaaauucccugaguug

SEQ ID NO: 2482250 - RNA, 19 nt, Homo sapiens
  misc_RNA (1)...(19): siRNA sense strand
cuugagaagccaauggaga

SEQ ID NO: 2482251 - RNA, 19 nt, Homo sapiens
  misc_RNA (1)...(19): siRNA sense strand
gcaggaucuagaacagaaa

SEQ ID NO: 2482252 - RNA, 19 nt, Homo sapiens
  misc_RNA (1)...(19): siRNA sense strand
agaaaaugaaagugguaga

SEQ ID NO: 2482253 - RNA, 19 nt, Homo sapiens
  misc_RNA (1)...(19): siRNA sense strand
agauugaccuagagaccca

SEQ ID NO: 2482254 - RNA, 19 nt, Homo sapiens
  misc_RNA (1)...(19): siRNA sense strand
cuugggaccuggugugaau

SEQ ID NO: 2482255 - RNA, 19 nt, Homo sapiens
  misc_RNA (1)...(19): siRNA sense strand
augcaagaucugaauggaa

SEQ ID NO: 2482256 - RNA, 19 nt, Homo sapiens
  misc_RNA (1)...(19): siRNA sense strand
cggcuagaaaacuggauaa

SEQ ID NO: 2482257 - RNA, 19 nt, Homo sapiens
  misc_RNA (1)...(19): siRNA sense strand
ucaccaaggccucaagauu

SEQ ID NO: 2482258 - RNA, 19 nt, Homo sapiens
  misc_RNA (1)...(19): siRNA sense strand
gacuacacuggcagagaaa

SEQ ID NO: 2482259 - RNA, 19 nt, Homo sapiens
  misc_RNA (1)...(19): siRNA sense strand
gcacaaucuacgaagaauc

SEQ ID NO: 2482260 - RNA, 19 nt, Homo sapiens
  misc_RNA (1)...(19): siRNA sense strand
aagaaaacauggcuggcaa

SEQ ID NO: 2482261 - RNA, 19 nt, Homo sapiens
  misc_RNA (1)...(19): siRNA sense strand
ggauaacgucauuagcaga

SEQ ID NO: 2482262 - RNA, 19 nt, Homo sapiens
  misc_RNA (1)...(19): siRNA sense strand
ccccauaccugaagaccaa

SEQ ID NO: 2482263 - RNA, 19 nt, Homo sapiens
  misc_RNA (1)...(19): siRNA sense strand
cgggccaucuugagcacua

SEQ ID NO: 2482264 - RNA, 19 nt, Homo sapiens
  misc_RNA (1)...(19): siRNA sense strand
cuacacuggcagagaaacu

SEQ ID NO: 2482265 - RNA, 19 nt, Homo sapiens
  misc_RNA (1)...(19): siRNA sense strand
cagcaaagaaggaggcguc

SEQ ID NO: 2482266 - RNA, 19 nt, Homo sapiens
  misc_RNA (1)...(19): siRNA sense strand
uugagaagccaauggagau

SEQ ID NO: 2482267 - RNA, 19 nt, Homo sapiens
  misc_RNA (1)...(19): siRNA sense strand
gcuauaagaucauggaugc

SEQ ID NO: 2482268 - RNA, 19 nt, Homo sapiens
  misc_RNA (1)...(19): siRNA sense strand
cgucauuagcagaaucuca

SEQ ID NO: 2482269 - RNA, 19 nt, Homo sapiens
  misc_RNA (1)...(19): siRNA sense strand
aagucagguugcuggucaa

SEQ ID NO: 2482270 - RNA, 19 nt, Homo sapiens
  misc_RNA (1)...(19): siRNA sense strand
ggaacgaaggguacaucau

SEQ ID NO: 2482271 - RNA, 19 nt, Homo sapiens
  misc_RNA (1)...(19): siRNA sense strand
ucagguugcuggucaaauu

SEQ ID NO: 2482272 - RNA, 19 nt, Homo sapiens
  misc_RNA (1)...(19): siRNA sense strand
gcgguaagacccagaucca

SEQ ID NO: 2482273 - RNA, 19 nt, Homo sapiens
  misc_RNA (1)...(19): siRNA sense strand
gcggagaagcaucgugagu

SEQ ID NO: 2482274 - RNA, 19 nt, Homo sapiens
  misc_RNA (1)...(19): siRNA sense strand
ccuuugugguggagcggca

SEQ ID NO: 2482275 - RNA, 19 nt, Homo sapiens
  misc_RNA (1)...(19): siRNA sense strand
aaauaauggugaaggugcu

SEQ ID NO: 2482276 - RNA, 19 nt, Homo sapiens
  misc_RNA (1)...(19): siRNA sense strand
aaauuaagaaacuggagga

SEQ ID NO: 2482277 - RNA, 19 nt, Homo sapiens
  misc_RNA (1)...(19): siRNA sense strand
gugaugaacauggaagaau

SEQ ID NO: 2482278 - RNA, 19 nt, Homo sapiens
  misc_RNA (1)...(19): siRNA sense strand
ugacuacacuggcagagaa

SEQ ID NO: 2482279 - RNA, 19 nt, Homo sapiens
  misc_RNA (1)...(19): siRNA sense strand
gguaagacccagauccagu

SEQ ID NO: 2482280 - RNA, 19 nt, Homo sapiens
  misc_RNA (1)...(19): siRNA sense strand
gagucaaggagacaugcaa

SEQ ID NO: 2482281 - RNA, 19 nt, Homo sapiens
  misc_RNA (1)...(19): siRNA sense strand
gagacaugcaagaucugaa

SEQ ID NO: 2482282 - RNA, 19 nt, Homo sapiens
  misc_RNA (1)...(19): siRNA sense strand
agugaaagcagcaaagaag

SEQ ID NO: 2482283 - RNA, 19 nt, Homo sapiens
  misc_RNA (1)...(19): siRNA sense strand
cugaaaucaucaugggcua

SEQ ID NO: 2482284 - RNA, 19 nt, Homo sapiens
  misc_RNA (1)...(19): siRNA sense strand
aaugaaagugguagagaau

SEQ ID NO: 2482285 - RNA, 19 nt, Homo sapiens
  misc_RNA (1)...(19): siRNA sense strand
acacaaaagugaugaacau

SEQ ID NO: 2482286 - RNA, 19 nt, Homo sapiens
  misc_RNA (1)...(19): siRNA sense strand
ggagcagagaugugggaau

SEQ ID NO: 2482287 - RNA, 19 nt, Homo sapiens
  misc_RNA (1)...(19): siRNA sense strand
ucguggagcuguuuagaaa

SEQ ID NO: 2482288 - RNA, 19 nt, Homo sapiens
  misc_RNA (1)...(19): siRNA sense strand
aggaggaggcauucggaaa

SEQ ID NO: 2482289 - RNA, 19 nt, Homo sapiens
  misc_RNA (1)...(19): siRNA sense strand
gagaaggacaucagcggua

SEQ ID NO: 2482290 - RNA, 19 nt, Homo sapiens
  misc_RNA (1)...(19): siRNA sense strand
cgauggaguacgugcagaa

SEQ ID NO: 2482291 - RNA, 19 nt, Homo sapiens
  misc_RNA (1)...(19): siRNA sense strand
ugucagaucacaugggcua

SEQ ID NO: 2482292 - RNA, 19 nt, Homo sapiens
  misc_RNA (1)...(19): siRNA sense strand
ccgucaacaaauuaagaaa

SEQ ID NO: 2482293 - RNA, 19 nt, Homo sapiens
  misc_RNA (1)...(19): siRNA sense strand
ccuuugagaccgaggugua

SEQ ID NO: 2482294 - RNA, 19 nt, Homo sapiens
  misc_RNA (1)...(19): siRNA sense strand
ccguggaaccauacacaaa

SEQ ID NO: 2482295 - RNA, 19 nt, Homo sapiens
  misc_RNA (1)...(19): siRNA sense strand
guuuggaaauaauggugaa

SEQ ID NO: 2482296 - RNA, 19 nt, Homo sapiens
  misc_RNA (1)...(19): siRNA sense strand
cauugaugcaguuuggaaa

SEQ ID NO: 2482297 - RNA, 19 nt, Homo sapiens
  misc_RNA (1)...(19): siRNA sense strand
ucucagaggaucccggaaa

SEQ ID NO: 2482298 - RNA, 19 nt, Homo sapiens
  misc_RNA (1)...(19): siRNA sense strand
cagugaaagcagcaaagaa

SEQ ID NO: 2482299 - RNA, 19 nt, Homo sapiens
  misc_RNA (1)...(19): siRNA sense strand
cggaaaguauugucggcca

SEQ ID NO: 2482300 - RNA, 19 nt, Homo sapiens
  misc_RNA (1)...(19): siRNA sense strand
uggaaauaauggugaaggu

SEQ ID NO: 2482301 - RNA, 19 nt, Homo sapiens
  misc_RNA (1)...(19): siRNA sense strand
ccucaagagucaaggagac

SEQ ID NO: 2482302 - RNA, 19 nt, Homo sapiens
  misc_RNA (1)...(19): siRNA sense strand
ggucaaauucccugaguug

SEQ ID NO: 2482303 - RNA, 19 nt, Homo sapiens
  misc_RNA (1)...(19): siRNA sense strand
cuugagaagccaauggaga

SEQ ID NO: 2482304 - RNA, 19 nt, Homo sapiens
  misc_RNA (1)...(19): siRNA sense strand
gcaggaucuagaacagaaa

SEQ ID NO: 2482305 - RNA, 19 nt, Homo sapiens
  misc_RNA (1)...(19): siRNA sense strand
agaaaaugaaagugguaga

SEQ ID NO: 2482306 - RNA, 19 nt, Homo sapiens
  misc_RNA (1)...(19): siRNA sense strand
agauugaccuagagaccca

SEQ ID NO: 2482307 - RNA, 19 nt, Homo sapiens
  misc_RNA (1)...(19): siRNA sense strand
cuugggaccuggugugaau

SEQ ID NO: 2482308 - RNA, 19 nt, Homo sapiens
  misc_RNA (1)...(19): siRNA sense strand
augcaagaucugaauggaa

SEQ ID NO: 2482309 - RNA, 19 nt, Homo sapiens
  misc_RNA (1)...(19): siRNA sense strand
cggcuagaaaacuggauaa

SEQ ID NO: 2482310 - RNA, 19 nt, Homo sapiens
  misc_RNA (1)...(19): siRNA sense strand
ucaccaaggccucaagauu

SEQ ID NO: 2482311 - RNA, 19 nt, Homo sapiens
  misc_RNA (1)...(19): siRNA sense strand
gacuacacuggcagagaaa

SEQ ID NO: 2482312 - RNA, 19 nt, Homo sapiens
  misc_RNA (1)...(19): siRNA sense strand
gcacaaucuacgaagaauc

SEQ ID NO: 2482313 - RNA, 19 nt, Homo sapiens
  misc_RNA (1)...(19): siRNA sense strand
aagaaaacauggcuggcaa

SEQ ID NO: 2482314 - RNA, 19 nt, Homo sapiens
  misc_RNA (1)...(19): siRNA sense strand
ggauaacgucauuagcaga

SEQ ID NO: 2482315 - RNA, 19 nt, Homo sapiens
  misc_RNA (1)...(19): siRNA sense strand
ccccauaccugaagaccaa

SEQ ID NO: 2482316 - RNA, 19 nt, Homo sapiens
  misc_RNA (1)...(19): siRNA sense strand
cgggccaucuugagcacua

SEQ ID NO: 2482317 - RNA, 19 nt, Homo sapiens
  misc_RNA (1)...(19): siRNA sense strand
cuacacuggcagagaaacu

SEQ ID NO: 2482318 - RNA, 19 nt, Homo sapiens
  misc_RNA (1)...(19): siRNA sense strand
cagcaaagaaggaggcguc

SEQ ID NO: 2482319 - RNA, 19 nt, Homo sapiens
  misc_RNA (1)...(19): siRNA sense strand
uugagaagccaauggagau

SEQ ID NO: 2482320 - RNA, 19 nt, Homo sapiens
  misc_RNA (1)...(19): siRNA sense strand
gcuauaagaucauggaugc

SEQ ID NO: 2482321 - RNA, 19 nt, Homo sapiens
  misc_RNA (1)...(19): siRNA sense strand
cgucauuagcagaaucuca

SEQ ID NO: 2482322 - RNA, 19 nt, Homo sapiens
  misc_RNA (1)...(19): siRNA sense strand
aagucagguugcuggucaa

SEQ ID NO: 2482323 - RNA, 19 nt, Homo sapiens
  misc_RNA (1)...(19): siRNA sense strand
ggaacgaaggguacaucau

SEQ ID NO: 2482324 - RNA, 19 nt, Homo sapiens
  misc_RNA (1)...(19): siRNA sense strand
ucagguugcuggucaaauu

SEQ ID NO: 2482325 - RNA, 19 nt, Homo sapiens
  misc_RNA (1)...(19): siRNA sense strand
gcgguaagacccagaucca

SEQ ID NO: 2482326 - RNA, 19 nt, Homo sapiens
  misc_RNA (1)...(19): siRNA sense strand
gcggagaagcaucgugagu

SEQ ID NO: 2482327 - RNA, 19 nt, Homo sapiens
  misc_RNA (1)...(19): siRNA sense strand
ccuuugugguggagcggca

SEQ ID NO: 2482328 - RNA, 19 nt, Homo sapiens
  misc_RNA (1)...(19): siRNA sense strand
aaauaauggugaaggugcu

SEQ ID NO: 2482329 - RNA, 19 nt, Homo sapiens
  misc_RNA (1)...(19): siRNA sense strand
aaauuaagaaacuggagga

SEQ ID NO: 2482330 - RNA, 19 nt, Homo sapiens
  misc_RNA (1)...(19): siRNA sense strand
gugaugaacauggaagaau

SEQ ID NO: 2482331 - RNA, 19 nt, Homo sapiens
  misc_RNA (1)...(19): siRNA sense strand
ugacuacacuggcagagaa

SEQ ID NO: 2482332 - RNA, 19 nt, Homo sapiens
  misc_RNA (1)...(19): siRNA sense strand
gguaagacccagauccagu

SEQ ID NO: 2482333 - RNA, 19 nt, Homo sapiens
  misc_RNA (1)...(19): siRNA sense strand
gagucaaggagacaugcaa

SEQ ID NO: 2482334 - RNA, 19 nt, Homo sapiens
  misc_RNA (1)...(19): siRNA sense strand
gagacaugcaagaucugaa

SEQ ID NO: 2482335 - RNA, 19 nt, Homo sapiens
  misc_RNA (1)...(19): siRNA sense strand
agugaaagcagcaaagaag

SEQ ID NO: 2482336 - RNA, 19 nt, Homo sapiens
  misc_RNA (1)...(19): siRNA sense strand
gagaagaagcccaggguga

SEQ ID NO: 2482337 - RNA, 19 nt, Homo sapiens
  misc_RNA (1)...(19): siRNA sense strand
acaaggacuuacuggaaaa

SEQ ID NO: 2482338 - RNA, 19 nt, Homo sapiens
  misc_RNA (1)...(19): siRNA sense strand
aaguucaccaaguggauaa

SEQ ID NO: 2482339 - RNA, 19 nt, Homo sapiens
  misc_RNA (1)...(19): siRNA sense strand
aggagagcucagaggauca

SEQ ID NO: 2482340 - RNA, 19 nt, Homo sapiens
  misc_RNA (1)...(19): siRNA sense strand
gcguggaugucaagcucau

SEQ ID NO: 2482341 - RNA, 19 nt, Homo sapiens
  misc_RNA (1)...(19): siRNA sense strand
aggacugcacgaagguuua

SEQ ID NO: 2482342 - RNA, 19 nt, Homo sapiens
  misc_RNA (1)...(19): siRNA sense strand
ucgugaagcucaauagcca

SEQ ID NO: 2482343 - RNA, 19 nt, Homo sapiens
  misc_RNA (1)...(19): siRNA sense strand
gcucagaggaucaaggccu

SEQ ID NO: 2482344 - RNA, 19 nt, Homo sapiens
  misc_RNA (1)...(19): siRNA sense strand
gagaagaagcccaggguga

SEQ ID NO: 2482345 - RNA, 19 nt, Homo sapiens
  misc_RNA (1)...(19): siRNA sense strand
acaaggacuuacuggaaaa

SEQ ID NO: 2482346 - RNA, 19 nt, Homo sapiens
  misc_RNA (1)...(19): siRNA sense strand
aaguucaccaaguggauaa

SEQ ID NO: 2482347 - RNA, 19 nt, Homo sapiens
  misc_RNA (1)...(19): siRNA sense strand
aggagagcucagaggauca

SEQ ID NO: 2482348 - RNA, 19 nt, Homo sapiens
  misc_RNA (1)...(19): siRNA sense strand
gcguggaugucaagcucau

SEQ ID NO: 2482349 - RNA, 19 nt, Homo sapiens
  misc_RNA (1)...(19): siRNA sense strand
aggacugcacgaagguuua

SEQ ID NO: 2482350 - RNA, 19 nt, Homo sapiens
  misc_RNA (1)...(19): siRNA sense strand
ucgugaagcucaauagcca

SEQ ID NO: 2482351 - RNA, 19 nt, Homo sapiens
  misc_RNA (1)...(19): siRNA sense strand
gcucagaggaucaaggccu

SEQ ID NO: 2482352 - RNA, 19 nt, Homo sapiens
  misc_RNA (1)...(19): siRNA sense strand
cguaagaaacagaaggaag

SEQ ID NO: 2482353 - RNA, 19 nt, Homo sapiens
  misc_RNA (1)...(19): siRNA sense strand
agaaggaagauguggaagu

SEQ ID NO: 2482354 - RNA, 19 nt, Homo sapiens
  misc_RNA (1)...(19): siRNA sense strand
ggaaguuguaggaggcagu

SEQ ID NO: 2482355 - RNA, 19 nt, Homo sapiens
  misc_RNA (1)...(19): siRNA sense strand
accaacacgccuagagcua

SEQ ID NO: 2482356 - RNA, 19 nt, Homo sapiens
  misc_RNA (1)...(19): siRNA sense strand
acauugaagaguuugagaa

SEQ ID NO: 2482357 - RNA, 19 nt, Homo sapiens
  misc_RNA (1)...(19): siRNA sense strand
aguuugagaacauucgaaa

SEQ ID NO: 2482358 - RNA, 19 nt, Homo sapiens
  misc_RNA (1)...(19): siRNA sense strand
cauugaagaguuugagaac

SEQ ID NO: 2482359 - RNA, 19 nt, Homo sapiens
  misc_RNA (1)...(19): siRNA sense strand
ugacagauguugagaccca

SEQ ID NO: 2482360 - RNA, 19 nt, Homo sapiens
  misc_RNA (1)...(19): siRNA sense strand
uggaacaugugauggaaaa

SEQ ID NO: 2482361 - RNA, 19 nt, Homo sapiens
  misc_RNA (1)...(19): siRNA sense strand
cggagauggcccagauaca

SEQ ID NO: 2482362 - RNA, 19 nt, Homo sapiens
  misc_RNA (1)...(19): siRNA sense strand
aagcaauuaaacagagcua

SEQ ID NO: 2482363 - RNA, 19 nt, Homo sapiens
  misc_RNA (1)...(19): siRNA sense strand
cuuagaaauggaaggaaaa

SEQ ID NO: 2482364 - RNA, 19 nt, Homo sapiens
  misc_RNA (1)...(19): siRNA sense strand
aggaagagaaagagaaccu

SEQ ID NO: 2482365 - RNA, 19 nt, Homo sapiens
  misc_RNA (1)...(19): siRNA sense strand
aaggaaaacacaaggaaga

SEQ ID NO: 2482366 - RNA, 19 nt, Homo sapiens
  misc_RNA (1)...(19): siRNA sense strand
ccggauucaacaugggcaa

SEQ ID NO: 2482367 - RNA, 19 nt, Homo sapiens
  misc_RNA (1)...(19): siRNA sense strand
gggagaagauauaaccgga

SEQ ID NO: 2482368 - RNA, 19 nt, Homo sapiens
  misc_RNA (1)...(19): siRNA sense strand
gagcagaccagaaagcuga

SEQ ID NO: 2482369 - RNA, 19 nt, Homo sapiens
  misc_RNA (1)...(19): siRNA sense strand
caacuggagcugauggaca

SEQ ID NO: 2482370 - RNA, 19 nt, Homo sapiens
  misc_RNA (1)...(19): siRNA sense strand
cuggaacaugugauggaaa

SEQ ID NO: 2482371 - RNA, 19 nt, Homo sapiens
  misc_RNA (1)...(19): siRNA sense strand
uuaaaggaagagaaagaga

SEQ ID NO: 2482372 - RNA, 19 nt, Homo sapiens
  misc_RNA (1)...(19): siRNA sense strand
ccacauaggaaaugaaaag

SEQ ID NO: 2482373 - RNA, 19 nt, Homo sapiens
  misc_RNA (1)...(19): siRNA sense strand
auuuagagacugugcagau

SEQ ID NO: 2482374 - RNA, 19 nt, Homo sapiens
  misc_RNA (1)...(19): siRNA sense strand
auucacaguaugacagauu

SEQ ID NO: 2482375 - RNA, 19 nt, Homo sapiens
  misc_RNA (1)...(19): siRNA sense strand
uuccagaacacgauggcaa

SEQ ID NO: 2482376 - RNA, 19 nt, Homo sapiens
  misc_RNA (1)...(19): siRNA sense strand
ugagaauuacauuguggaa

SEQ ID NO: 2482377 - RNA, 19 nt, Homo sapiens
  misc_RNA (1)...(19): siRNA sense strand
aggcaguacaugcuaagaa

SEQ ID NO: 2482378 - RNA, 19 nt, Homo sapiens
  misc_RNA (1)...(19): siRNA sense strand
gugaauauuggcuggggaa

SEQ ID NO: 2482379 - RNA, 19 nt, Homo sapiens
  misc_RNA (1)...(19): siRNA sense strand
agaauugaguuaauggacu

SEQ ID NO: 2482380 - RNA, 19 nt, Homo sapiens
  misc_RNA (1)...(19): siRNA sense strand
ccagaaaacagugggagaa

SEQ ID NO: 2482381 - RNA, 19 nt, Homo sapiens
  misc_RNA (1)...(19): siRNA sense strand
uggaaaucccuccggugaa

SEQ ID NO: 2482382 - RNA, 19 nt, Homo sapiens
  misc_RNA (1)...(19): siRNA sense strand
ggagaagauauaaccggau

SEQ ID NO: 2482383 - RNA, 19 nt, Homo sapiens
  misc_RNA (1)...(19): siRNA sense strand
ugacagauguugagaccca

SEQ ID NO: 2482384 - RNA, 19 nt, Homo sapiens
  misc_RNA (1)...(19): siRNA sense strand
uggaacaugugauggaaaa

SEQ ID NO: 2482385 - RNA, 19 nt, Homo sapiens
  misc_RNA (1)...(19): siRNA sense strand
cggagauggcccagauaca

SEQ ID NO: 2482386 - RNA, 19 nt, Homo sapiens
  misc_RNA (1)...(19): siRNA sense strand
aagcaauuaaacagagcua

SEQ ID NO: 2482387 - RNA, 19 nt, Homo sapiens
  misc_RNA (1)...(19): siRNA sense strand
cuuagaaauggaaggaaaa

SEQ ID NO: 2482388 - RNA, 19 nt, Homo sapiens
  misc_RNA (1)...(19): siRNA sense strand
aggaagagaaagagaaccu

SEQ ID NO: 2482389 - RNA, 19 nt, Homo sapiens
  misc_RNA (1)...(19): siRNA sense strand
aaggaaaacacaaggaaga

SEQ ID NO: 2482390 - RNA, 19 nt, Homo sapiens
  misc_RNA (1)...(19): siRNA sense strand
ccggauucaacaugggcaa

SEQ ID NO: 2482391 - RNA, 19 nt, Homo sapiens
  misc_RNA (1)...(19): siRNA sense strand
gggagaagauauaaccgga

SEQ ID NO: 2482392 - RNA, 19 nt, Homo sapiens
  misc_RNA (1)...(19): siRNA sense strand
gagcagaccagaaagcuga

SEQ ID NO: 2482393 - RNA, 19 nt, Homo sapiens
  misc_RNA (1)...(19): siRNA sense strand
caacuggagcugauggaca

SEQ ID NO: 2482394 - RNA, 19 nt, Homo sapiens
  misc_RNA (1)...(19): siRNA sense strand
cuggaacaugugauggaaa

SEQ ID NO: 2482395 - RNA, 19 nt, Homo sapiens
  misc_RNA (1)...(19): siRNA sense strand
uuaaaggaagagaaagaga

SEQ ID NO: 2482396 - RNA, 19 nt, Homo sapiens
  misc_RNA (1)...(19): siRNA sense strand
ccacauaggaaaugaaaag

SEQ ID NO: 2482397 - RNA, 19 nt, Homo sapiens
  misc_RNA (1)...(19): siRNA sense strand
auuuagagacugugcagau

SEQ ID NO: 2482398 - RNA, 19 nt, Homo sapiens
  misc_RNA (1)...(19): siRNA sense strand
auucacaguaugacagauu

SEQ ID NO: 2482399 - RNA, 19 nt, Homo sapiens
  misc_RNA (1)...(19): siRNA sense strand
uuccagaacacgauggcaa

SEQ ID NO: 2482400 - RNA, 19 nt, Homo sapiens
  misc_RNA (1)...(19): siRNA sense strand
ugagaauuacauuguggaa

SEQ ID NO: 2482401 - RNA, 19 nt, Homo sapiens
  misc_RNA (1)...(19): siRNA sense strand
aggcaguacaugcuaagaa

SEQ ID NO: 2482402 - RNA, 19 nt, Homo sapiens
  misc_RNA (1)...(19): siRNA sense strand
gugaauauuggcuggggaa

SEQ ID NO: 2482403 - RNA, 19 nt, Homo sapiens
  misc_RNA (1)...(19): siRNA sense strand
agaauugaguuaauggacu

SEQ ID NO: 2482404 - RNA, 19 nt, Homo sapiens
  misc_RNA (1)...(19): siRNA sense strand
ccagaaaacagugggagaa

SEQ ID NO: 2482405 - RNA, 19 nt, Homo sapiens
  misc_RNA (1)...(19): siRNA sense strand
uggaaaucccuccggugaa

SEQ ID NO: 2482406 - RNA, 19 nt, Homo sapiens
  misc_RNA (1)...(19): siRNA sense strand
ggagaagauauaaccggau

SEQ ID NO: 2482407 - RNA, 19 nt, Homo sapiens
  misc_RNA (1)...(19): siRNA sense strand
gggaagagguggugggaac

SEQ ID NO: 2482408 - RNA, 19 nt, Homo sapiens
  misc_RNA (1)...(19): siRNA sense strand
gaguaaaaccacaggaaaa

SEQ ID NO: 2482409 - RNA, 19 nt, Homo sapiens
  misc_RNA (1)...(19): siRNA sense strand
agauauagcaacugaacua

SEQ ID NO: 2482410 - RNA, 19 nt, Homo sapiens
  misc_RNA (1)...(19): siRNA sense strand
agaaauacgcagaugacaa

SEQ ID NO: 2482411 - RNA, 19 nt, Homo sapiens
  misc_RNA (1)...(19): siRNA sense strand
aagaagacgcugaggauau

SEQ ID NO: 2482412 - RNA, 19 nt, Homo sapiens
  misc_RNA (1)...(19): siRNA sense strand
ucaggaaaauggagagaaa

SEQ ID NO: 2482413 - RNA, 19 nt, Homo sapiens
  misc_RNA (1)...(19): siRNA sense strand
cacuaaaugaccaggguua

SEQ ID NO: 2482414 - RNA, 19 nt, Homo sapiens
  misc_RNA (1)...(19): siRNA sense strand
aagagaugcaccugagaaa

SEQ ID NO: 2482415 - RNA, 19 nt, Homo sapiens
  misc_RNA (1)...(19): siRNA sense strand
gucuaaugauggagaaaca

SEQ ID NO: 2482416 - RNA, 19 nt, Homo sapiens
  misc_RNA (1)...(19): siRNA sense strand
augcaaggguguacaacua

SEQ ID NO: 2482417 - RNA, 19 nt, Homo sapiens
  misc_RNA (1)...(19): siRNA sense strand
cugaggauauaguggaaau

SEQ ID NO: 2482418 - RNA, 19 nt, Homo sapiens
  misc_RNA (1)...(19): siRNA sense strand
agaaagaaagggaaguauu

SEQ ID NO: 2482419 - RNA, 19 nt, Homo sapiens
  misc_RNA (1)...(19): siRNA sense strand
gaguauagaggcagaggau

SEQ ID NO: 2482420 - RNA, 19 nt, Homo sapiens
  misc_RNA (1)...(19): siRNA sense strand
cccaccagcuauugagaaa

SEQ ID NO: 2482421 - RNA, 19 nt, Homo sapiens
  misc_RNA (1)...(19): siRNA sense strand
ugaaauagaaagaaaggga

SEQ ID NO: 2482422 - RNA, 19 nt, Homo sapiens
  misc_RNA (1)...(19): siRNA sense strand
caaucaaaauccaggaauu

SEQ ID NO: 2482423 - RNA, 19 nt, Homo sapiens
  misc_RNA (1)...(19): siRNA sense strand
ggacauuacaauaaagcca

SEQ ID NO: 2482424 - RNA, 19 nt, Homo sapiens
  misc_RNA (1)...(19): siRNA sense strand
aggauuuggacgaggaaga

SEQ ID NO: 2482425 - RNA, 19 nt, Homo sapiens
  misc_RNA (1)...(19): siRNA sense strand
aggcagaggauuuggacga

SEQ ID NO: 2482426 - RNA, 19 nt, Homo sapiens
  misc_RNA (1)...(19): siRNA sense strand
gaaauagaaagaaagggaa

SEQ ID NO: 2482427 - RNA, 19 nt, Homo sapiens
  misc_RNA (1)...(19): siRNA sense strand
gcuggaaagcagagaacca

SEQ ID NO: 2482428 - RNA, 19 nt, Homo sapiens
  misc_RNA (1)...(19): siRNA sense strand
ggugguuccuggagaaaca

SEQ ID NO: 2482429 - RNA, 19 nt, Homo sapiens
  misc_RNA (1)...(19): siRNA sense strand
auggagaaacaaugguaaa

SEQ ID NO: 2482430 - RNA, 19 nt, Homo sapiens
  misc_RNA (1)...(19): siRNA sense strand
aggaaaauggagagaaaga

SEQ ID NO: 2482431 - RNA, 19 nt, Homo sapiens
  misc_RNA (1)...(19): siRNA sense strand
gagaaaguacauuggcuau

SEQ ID NO: 2482432 - RNA, 19 nt, Homo sapiens
  misc_RNA (1)...(19): siRNA sense strand
ucugaaguuuacagcgaua

SEQ ID NO: 2482433 - RNA, 19 nt, Homo sapiens
  misc_RNA (1)...(19): siRNA sense strand
cgggagacacagugacuau

SEQ ID NO: 2482434 - RNA, 19 nt, Homo sapiens
  misc_RNA (1)...(19): siRNA sense strand
gcaaaggacagaaaacaaa

SEQ ID NO: 2482435 - RNA, 19 nt, Homo sapiens
  misc_RNA (1)...(19): siRNA sense strand
ccugguacuuggugaucaa

SEQ ID NO: 2482436 - RNA, 19 nt, Homo sapiens
  misc_RNA (1)...(19): siRNA sense strand
ugagaaaguacauuggcua

SEQ ID NO: 2482437 - RNA, 19 nt, Homo sapiens
  misc_RNA (1)...(19): siRNA sense strand
gugggaacuucucaggaaa

SEQ ID NO: 2482438 - RNA, 19 nt, Homo sapiens
  misc_RNA (1)...(19): siRNA sense strand
ccauggagcagcaaaguau

SEQ ID NO: 2482439 - RNA, 19 nt, Homo sapiens
  misc_RNA (1)...(19): siRNA sense strand
caaggaugaaauagaaaga

SEQ ID NO: 2482440 - RNA, 19 nt, Homo sapiens
  misc_RNA (1)...(19): siRNA sense strand
uaauagcaaaggacagaaa

SEQ ID NO: 2482441 - RNA, 19 nt, Homo sapiens
  misc_RNA (1)...(19): siRNA sense strand
agucaacauuggaucgauu

SEQ ID NO: 2482442 - RNA, 19 nt, Homo sapiens
  misc_RNA (1)...(19): siRNA sense strand
aacaauagaaugugagcuu

SEQ ID NO: 2482443 - RNA, 19 nt, Homo sapiens
  misc_RNA (1)...(19): siRNA sense strand
ugaacaugugauugcaaua

SEQ ID NO: 2482444 - RNA, 19 nt, Homo sapiens
  misc_RNA (1)...(19): siRNA sense strand
cagaaagacuaaagguggu

SEQ ID NO: 2482445 - RNA, 19 nt, Homo sapiens
  misc_RNA (1)...(19): siRNA sense strand
gaaccuagauuuugagcga

SEQ ID NO: 2482446 - RNA, 19 nt, Homo sapiens
  misc_RNA (1)...(19): siRNA sense strand
gaaaauggagagaaagaga

SEQ ID NO: 2482447 - RNA, 19 nt, Homo sapiens
  misc_RNA (1)...(19): siRNA sense strand
cuuuggaggaagccagaaa

SEQ ID NO: 2482448 - RNA, 19 nt, Homo sapiens
  misc_RNA (1)...(19): siRNA sense strand
guuggaauugagagaggaa

SEQ ID NO: 2482449 - RNA, 19 nt, Homo sapiens
  misc_RNA (1)...(19): siRNA sense strand
caaccaaagaagacgcuga

SEQ ID NO: 2482450 - RNA, 19 nt, Homo sapiens
  misc_RNA (1)...(19): siRNA sense strand
gacaaggaugaaauagaaa

SEQ ID NO: 2482451 - RNA, 19 nt, Homo sapiens
  misc_RNA (1)...(19): siRNA sense strand
aacaaagaguucugaggau

SEQ ID NO: 2482452 - RNA, 19 nt, Homo sapiens
  misc_RNA (1)...(19): siRNA sense strand
aauaagagcuggaaagcag

SEQ ID NO: 2482453 - RNA, 19 nt, Homo sapiens
  misc_RNA (1)...(19): siRNA sense strand
gguucgugucaguaauaua

SEQ ID NO: 2482454 - RNA, 19 nt, Homo sapiens
  misc_RNA (1)...(19): siRNA sense strand
ggucggauuccacgaacaa

SEQ ID NO: 2482455 - RNA, 19 nt, Homo sapiens
  misc_RNA (1)...(19): siRNA sense strand
ccauuaucagaaagacuaa

SEQ ID NO: 2482456 - RNA, 19 nt, Homo sapiens
  misc_RNA (1)...(19): siRNA sense strand
caagguuggaauugagaga

SEQ ID NO: 2482457 - RNA, 19 nt, Homo sapiens
  misc_RNA (1)...(19): siRNA sense strand
ccaaagaagacgcugagga

SEQ ID NO: 2482458 - RNA, 19 nt, Homo sapiens
  misc_RNA (1)...(19): siRNA sense strand
uggagaguauagaggcaga

SEQ ID NO: 2482459 - RNA, 19 nt, Homo sapiens
  misc_RNA (1)...(19): siRNA sense strand
gauggagaaacaaugguaa

SEQ ID NO: 2482460 - RNA, 19 nt, Homo sapiens
  misc_RNA (1)...(19): siRNA sense strand
acuaugagccuuugacaca

SEQ ID NO: 2482461 - RNA, 19 nt, Homo sapiens
  misc_RNA (1)...(19): siRNA sense strand
agauccaggccuaggaaaa

SEQ ID NO: 2482462 - RNA, 19 nt, Homo sapiens
  misc_RNA (1)...(19): siRNA sense strand
gcguguauguuugugguaa

SEQ ID NO: 2482463 - RNA, 19 nt, Homo sapiens
  misc_RNA (1)...(19): siRNA sense strand
cguaugaauagucaagauu

SEQ ID NO: 2482464 - RNA, 19 nt, Homo sapiens
  misc_RNA (1)...(19): siRNA sense strand
gcacgagcaagguuggaau

SEQ ID NO: 2482465 - RNA, 19 nt, Homo sapiens
  misc_RNA (1)...(19): siRNA sense strand
guucugaggauggguguaa

SEQ ID NO: 2482466 - RNA, 19 nt, Homo sapiens
  misc_RNA (1)...(19): siRNA sense strand
gagagaggaagcaaccaaa

SEQ ID NO: 2482467 - RNA, 19 nt, Homo sapiens
  misc_RNA (1)...(19): siRNA sense strand
cgcugaggauauaguggaa

SEQ ID NO: 2482468 - RNA, 19 nt, Homo sapiens
  misc_RNA (1)...(19): siRNA sense strand
gguucuggaaugagcaaca

SEQ ID NO: 2482469 - RNA, 19 nt, Homo sapiens
  misc_RNA (1)...(19): siRNA sense strand
augacaaggaugaaauaga

SEQ ID NO: 2482470 - RNA, 19 nt, Homo sapiens
  misc_RNA (1)...(19): siRNA sense strand
auagaaagaaagggaagua

SEQ ID NO: 2482471 - RNA, 19 nt, Homo sapiens
  misc_RNA (1)...(19): siRNA sense strand
aaggcaugcagcugaguua

SEQ ID NO: 2482472 - RNA, 19 nt, Homo sapiens
  misc_RNA (1)...(19): siRNA sense strand
aggaauugaugucugauga

SEQ ID NO: 2482473 - RNA, 19 nt, Homo sapiens
  misc_RNA (1)...(19): siRNA sense strand
ggacagaaaacaaagaguu

SEQ ID NO: 2482474 - RNA, 19 nt, Homo sapiens
  misc_RNA (1)...(19): siRNA sense strand
uuggaggaagccagaaaua

SEQ ID NO: 2482475 - RNA, 19 nt, Homo sapiens
  misc_RNA (1)...(19): siRNA sense strand
aaaggugguuccuggagaa

SEQ ID NO: 2482476 - RNA, 19 nt, Homo sapiens
  misc_RNA (1)...(19): siRNA sense strand
gggaagagguggugggaac

SEQ ID NO: 2482477 - RNA, 19 nt, Homo sapiens
  misc_RNA (1)...(19): siRNA sense strand
gaguaaaaccacaggaaaa

SEQ ID NO: 2482478 - RNA, 19 nt, Homo sapiens
  misc_RNA (1)...(19): siRNA sense strand
agauauagcaacugaacua

SEQ ID NO: 2482479 - RNA, 19 nt, Homo sapiens
  misc_RNA (1)...(19): siRNA sense strand
agaaauacgcagaugacaa

SEQ ID NO: 2482480 - RNA, 19 nt, Homo sapiens
  misc_RNA (1)...(19): siRNA sense strand
aagaagacgcugaggauau

SEQ ID NO: 2482481 - RNA, 19 nt, Homo sapiens
  misc_RNA (1)...(19): siRNA sense strand
ucaggaaaauggagagaaa

SEQ ID NO: 2482482 - RNA, 19 nt, Homo sapiens
  misc_RNA (1)...(19): siRNA sense strand
cacuaaaugaccaggguua

SEQ ID NO: 2482483 - RNA, 19 nt, Homo sapiens
  misc_RNA (1)...(19): siRNA sense strand
aagagaugcaccugagaaa

SEQ ID NO: 2482484 - RNA, 19 nt, Homo sapiens
  misc_RNA (1)...(19): siRNA sense strand
gucuaaugauggagaaaca

SEQ ID NO: 2482485 - RNA, 19 nt, Homo sapiens
  misc_RNA (1)...(19): siRNA sense strand
augcaaggguguacaacua

SEQ ID NO: 2482486 - RNA, 19 nt, Homo sapiens
  misc_RNA (1)...(19): siRNA sense strand
cugaggauauaguggaaau

SEQ ID NO: 2482487 - RNA, 19 nt, Homo sapiens
  misc_RNA (1)...(19): siRNA sense strand
agaaagaaagggaaguauu

SEQ ID NO: 2482488 - RNA, 19 nt, Homo sapiens
  misc_RNA (1)...(19): siRNA sense strand
gaguauagaggcagaggau

SEQ ID NO: 2482489 - RNA, 19 nt, Homo sapiens
  misc_RNA (1)...(19): siRNA sense strand
cccaccagcuauugagaaa

SEQ ID NO: 2482490 - RNA, 19 nt, Homo sapiens
  misc_RNA (1)...(19): siRNA sense strand
ugaaauagaaagaaaggga

SEQ ID NO: 2482491 - RNA, 19 nt, Homo sapiens
  misc_RNA (1)...(19): siRNA sense strand
caaucaaaauccaggaauu

SEQ ID NO: 2482492 - RNA, 19 nt, Homo sapiens
  misc_RNA (1)...(19): siRNA sense strand
ggacauuacaauaaagcca

SEQ ID NO: 2482493 - RNA, 19 nt, Homo sapiens
  misc_RNA (1)...(19): siRNA sense strand
aggauuuggacgaggaaga

SEQ ID NO: 2482494 - RNA, 19 nt, Homo sapiens
  misc_RNA (1)...(19): siRNA sense strand
aggcagaggauuuggacga

SEQ ID NO: 2482495 - RNA, 19 nt, Homo sapiens
  misc_RNA (1)...(19): siRNA sense strand
gaaauagaaagaaagggaa

SEQ ID NO: 2482496 - RNA, 19 nt, Homo sapiens
  misc_RNA (1)...(19): siRNA sense strand
gcuggaaagcagagaacca

SEQ ID NO: 2482497 - RNA, 19 nt, Homo sapiens
  misc_RNA (1)...(19): siRNA sense strand
ggugguuccuggagaaaca

SEQ ID NO: 2482498 - RNA, 19 nt, Homo sapiens
  misc_RNA (1)...(19): siRNA sense strand
auggagaaacaaugguaaa

SEQ ID NO: 2482499 - RNA, 19 nt, Homo sapiens
  misc_RNA (1)...(19): siRNA sense strand
aggaaaauggagagaaaga

SEQ ID NO: 2482500 - RNA, 19 nt, Homo sapiens
  misc_RNA (1)...(19): siRNA sense strand
gagaaaguacauuggcuau

SEQ ID NO: 2482501 - RNA, 19 nt, Homo sapiens
  misc_RNA (1)...(19): siRNA sense strand
ucugaaguuuacagcgaua

SEQ ID NO: 2482502 - RNA, 19 nt, Homo sapiens
  misc_RNA (1)...(19): siRNA sense strand
cgggagacacagugacuau

SEQ ID NO: 2482503 - RNA, 19 nt, Homo sapiens
  misc_RNA (1)...(19): siRNA sense strand
gcaaaggacagaaaacaaa

SEQ ID NO: 2482504 - RNA, 19 nt, Homo sapiens
  misc_RNA (1)...(19): siRNA sense strand
ccugguacuuggugaucaa

SEQ ID NO: 2482505 - RNA, 19 nt, Homo sapiens
  misc_RNA (1)...(19): siRNA sense strand
ugagaaaguacauuggcua

SEQ ID NO: 2482506 - RNA, 19 nt, Homo sapiens
  misc_RNA (1)...(19): siRNA sense strand
gugggaacuucucaggaaa

SEQ ID NO: 2482507 - RNA, 19 nt, Homo sapiens
  misc_RNA (1)...(19): siRNA sense strand
ccauggagcagcaaaguau

SEQ ID NO: 2482508 - RNA, 19 nt, Homo sapiens
  misc_RNA (1)...(19): siRNA sense strand
caaggaugaaauagaaaga

SEQ ID NO: 2482509 - RNA, 19 nt, Homo sapiens
  misc_RNA (1)...(19): siRNA sense strand
uaauagcaaaggacagaaa

SEQ ID NO: 2482510 - RNA, 19 nt, Homo sapiens
  misc_RNA (1)...(19): siRNA sense strand
agucaacauuggaucgauu

SEQ ID NO: 2482511 - RNA, 19 nt, Homo sapiens
  misc_RNA (1)...(19): siRNA sense strand
aacaauagaaugugagcuu

SEQ ID NO: 2482512 - RNA, 19 nt, Homo sapiens
  misc_RNA (1)...(19): siRNA sense strand
ugaacaugugauugcaaua

SEQ ID NO: 2482513 - RNA, 19 nt, Homo sapiens
  misc_RNA (1)...(19): siRNA sense strand
cagaaagacuaaagguggu

SEQ ID NO: 2482514 - RNA, 19 nt, Homo sapiens
  misc_RNA (1)...(19): siRNA sense strand
gaaccuagauuuugagcga

SEQ ID NO: 2482515 - RNA, 19 nt, Homo sapiens
  misc_RNA (1)...(19): siRNA sense strand
gaaaauggagagaaagaga

SEQ ID NO: 2482516 - RNA, 19 nt, Homo sapiens
  misc_RNA (1)...(19): siRNA sense strand
cuuuggaggaagccagaaa

SEQ ID NO: 2482517 - RNA, 19 nt, Homo sapiens
  misc_RNA (1)...(19): siRNA sense strand
guuggaauugagagaggaa

SEQ ID NO: 2482518 - RNA, 19 nt, Homo sapiens
  misc_RNA (1)...(19): siRNA sense strand
caaccaaagaagacgcuga

SEQ ID NO: 2482519 - RNA, 19 nt, Homo sapiens
  misc_RNA (1)...(19): siRNA sense strand
gacaaggaugaaauagaaa

SEQ ID NO: 2482520 - RNA, 19 nt, Homo sapiens
  misc_RNA (1)...(19): siRNA sense strand
aacaaagaguucugaggau

SEQ ID NO: 2482521 - RNA, 19 nt, Homo sapiens
  misc_RNA (1)...(19): siRNA sense strand
aauaagagcuggaaagcag

SEQ ID NO: 2482522 - RNA, 19 nt, Homo sapiens
  misc_RNA (1)...(19): siRNA sense strand
gguucgugucaguaauaua

SEQ ID NO: 2482523 - RNA, 19 nt, Homo sapiens
  misc_RNA (1)...(19): siRNA sense strand
ggucggauuccacgaacaa

SEQ ID NO: 2482524 - RNA, 19 nt, Homo sapiens
  misc_RNA (1)...(19): siRNA sense strand
ccauuaucagaaagacuaa

SEQ ID NO: 2482525 - RNA, 19 nt, Homo sapiens
  misc_RNA (1)...(19): siRNA sense strand
caagguuggaauugagaga

SEQ ID NO: 2482526 - RNA, 19 nt, Homo sapiens
  misc_RNA (1)...(19): siRNA sense strand
ccaaagaagacgcugagga

SEQ ID NO: 2482527 - RNA, 19 nt, Homo sapiens
  misc_RNA (1)...(19): siRNA sense strand
uggagaguauagaggcaga

SEQ ID NO: 2482528 - RNA, 19 nt, Homo sapiens
  misc_RNA (1)...(19): siRNA sense strand
gauggagaaacaaugguaa

SEQ ID NO: 2482529 - RNA, 19 nt, Homo sapiens
  misc_RNA (1)...(19): siRNA sense strand
acuaugagccuuugacaca

SEQ ID NO: 2482530 - RNA, 19 nt, Homo sapiens
  misc_RNA (1)...(19): siRNA sense strand
agauccaggccuaggaaaa

SEQ ID NO: 2482531 - RNA, 19 nt, Homo sapiens
  misc_RNA (1)...(19): siRNA sense strand
gcguguauguuugugguaa

SEQ ID NO: 2482532 - RNA, 19 nt, Homo sapiens
  misc_RNA (1)...(19): siRNA sense strand
cguaugaauagucaagauu

SEQ ID NO: 2482533 - RNA, 19 nt, Homo sapiens
  misc_RNA (1)...(19): siRNA sense strand
gcacgagcaagguuggaau

SEQ ID NO: 2482534 - RNA, 19 nt, Homo sapiens
  misc_RNA (1)...(19): siRNA sense strand
guucugaggauggguguaa

SEQ ID NO: 2482535 - RNA, 19 nt, Homo sapiens
  misc_RNA (1)...(19): siRNA sense strand
gagagaggaagcaaccaaa

SEQ ID NO: 2482536 - RNA, 19 nt, Homo sapiens
  misc_RNA (1)...(19): siRNA sense strand
cgcugaggauauaguggaa

SEQ ID NO: 2482537 - RNA, 19 nt, Homo sapiens
  misc_RNA (1)...(19): siRNA sense strand
gguucuggaaugagcaaca

SEQ ID NO: 2482538 - RNA, 19 nt, Homo sapiens
  misc_RNA (1)...(19): siRNA sense strand
augacaaggaugaaauaga

SEQ ID NO: 2482539 - RNA, 19 nt, Homo sapiens
  misc_RNA (1)...(19): siRNA sense strand
auagaaagaaagggaagua

SEQ ID NO: 2482540 - RNA, 19 nt, Homo sapiens
  misc_RNA (1)...(19): siRNA sense strand
aaggcaugcagcugaguua

SEQ ID NO: 2482541 - RNA, 19 nt, Homo sapiens
  misc_RNA (1)...(19): siRNA sense strand
aggaauugaugucugauga

SEQ ID NO: 2482542 - RNA, 19 nt, Homo sapiens
  misc_RNA (1)...(19): siRNA sense strand
ggacagaaaacaaagaguu

SEQ ID NO: 2482543 - RNA, 19 nt, Homo sapiens
  misc_RNA (1)...(19): siRNA sense strand
uuggaggaagccagaaaua

SEQ ID NO: 2482544 - RNA, 19 nt, Homo sapiens
  misc_RNA (1)...(19): siRNA sense strand
aaaggugguuccuggagaa

SEQ ID NO: 2482545 - RNA, 19 nt, Homo sapiens
  misc_RNA (1)...(19): siRNA sense strand
gcuuauaacagguccaaaa

SEQ ID NO: 2482546 - RNA, 19 nt, Homo sapiens
  misc_RNA (1)...(19): siRNA sense strand
augggaaaccugaggauca

SEQ ID NO: 2482547 - RNA, 19 nt, Homo sapiens
  misc_RNA (1)...(19): siRNA sense strand
ccccaaaaggaguggaaau

SEQ ID NO: 2482548 - RNA, 19 nt, Homo sapiens
  misc_RNA (1)...(19): siRNA sense strand
gaguggaaaucaaugcaga

SEQ ID NO: 2482549 - RNA, 19 nt, Homo sapiens
  misc_RNA (1)...(19): siRNA sense strand
gauuuauggcuggcggaaa

SEQ ID NO: 2482550 - RNA, 19 nt, Homo sapiens
  misc_RNA (1)...(19): siRNA sense strand
acaauaaugaagugguagu

SEQ ID NO: 2482551 - RNA, 19 nt, Homo sapiens
  misc_RNA (1)...(19): siRNA sense strand
cuucaaagaacuaagguug

SEQ ID NO: 2482552 - RNA, 19 nt, Homo sapiens
  misc_RNA (1)...(19): siRNA sense strand
aguggaaaucaaugcagaa

SEQ ID NO: 2482553 - RNA, 19 nt, Homo sapiens
  misc_RNA (1)...(19): siRNA sense strand
gguaaugcccuguacuuca

SEQ ID NO: 2482554 - RNA, 19 nt, Homo sapiens
  misc_RNA (1)...(19): siRNA sense strand
agugguaguaggagcugaa

SEQ ID NO: 2482555 - RNA, 19 nt, Homo sapiens
  misc_RNA (1)...(19): siRNA sense strand
gcuuauaacagguccaaaa

SEQ ID NO: 2482556 - RNA, 19 nt, Homo sapiens
  misc_RNA (1)...(19): siRNA sense strand
augggaaaccugaggauca

SEQ ID NO: 2482557 - RNA, 19 nt, Homo sapiens
  misc_RNA (1)...(19): siRNA sense strand
ccccaaaaggaguggaaau

SEQ ID NO: 2482558 - RNA, 19 nt, Homo sapiens
  misc_RNA (1)...(19): siRNA sense strand
gaguggaaaucaaugcaga

SEQ ID NO: 2482559 - RNA, 19 nt, Homo sapiens
  misc_RNA (1)...(19): siRNA sense strand
gauuuauggcuggcggaaa

SEQ ID NO: 2482560 - RNA, 19 nt, Homo sapiens
  misc_RNA (1)...(19): siRNA sense strand
acaauaaugaagugguagu

SEQ ID NO: 2482561 - RNA, 19 nt, Homo sapiens
  misc_RNA (1)...(19): siRNA sense strand
cuucaaagaacuaagguug

SEQ ID NO: 2482562 - RNA, 19 nt, Homo sapiens
  misc_RNA (1)...(19): siRNA sense strand
aguggaaaucaaugcagaa

SEQ ID NO: 2482563 - RNA, 19 nt, Homo sapiens
  misc_RNA (1)...(19): siRNA sense strand
gguaaugcccuguacuuca

SEQ ID NO: 2482564 - RNA, 19 nt, Homo sapiens
  misc_RNA (1)...(19): siRNA sense strand
agugguaguaggagcugaa

SEQ ID NO: 2482565 - RNA, 19 nt, Homo sapiens
  misc_RNA (1)...(19): siRNA sense strand
gggaaagacauaaaggaga

SEQ ID NO: 2482566 - RNA, 19 nt, Homo sapiens
  misc_RNA (1)...(19): siRNA sense strand
guuaagaaaugaugggagu

SEQ ID NO: 2482567 - RNA, 19 nt, Homo sapiens
  misc_RNA (1)...(19): siRNA sense strand
cuuuagaagaagccagaaa

SEQ ID NO: 2482568 - RNA, 19 nt, Homo sapiens
  misc_RNA (1)...(19): siRNA sense strand
ggaaagacauaaaggagag

SEQ ID NO: 2482569 - RNA, 19 nt, Homo sapiens
  misc_RNA (1)...(19): siRNA sense strand
aauacaaccucuacgggaa

SEQ ID NO: 2482570 - RNA, 19 nt, Homo sapiens
  misc_RNA (1)...(19): siRNA sense strand
cauaaaggagagagcccua

SEQ ID NO: 2482571 - RNA, 19 nt, Homo sapiens
  misc_RNA (1)...(19): siRNA sense strand
guuacagagccauggacaa

SEQ ID NO: 2482572 - RNA, 19 nt, Homo sapiens
  misc_RNA (1)...(19): siRNA sense strand
aagacuaccuuguuggcaa

SEQ ID NO: 2482573 - RNA, 19 nt, Homo sapiens
  misc_RNA (1)...(19): siRNA sense strand
auuuauaggaucugcagaa

SEQ ID NO: 2482574 - RNA, 19 nt, Homo sapiens
  misc_RNA (1)...(19): siRNA sense strand
uggaguuugaagagaaauu

SEQ ID NO: 2482575 - RNA, 19 nt, Homo sapiens
  misc_RNA (1)...(19): siRNA sense strand
gggaaaguuaagaaaugau

SEQ ID NO: 2482576 - RNA, 19 nt, Homo sapiens
  misc_RNA (1)...(19): siRNA sense strand
ugccuugaucaaagagaaa

SEQ ID NO: 2482577 - RNA, 19 nt, Homo sapiens
  misc_RNA (1)...(19): siRNA sense strand
auacaaccucuacgggaaa

SEQ ID NO: 2482578 - RNA, 19 nt, Homo sapiens
  misc_RNA (1)...(19): siRNA sense strand
ugguugagauugaugggau

SEQ ID NO: 2482579 - RNA, 19 nt, Homo sapiens
  misc_RNA (1)...(19): siRNA sense strand
auggcagauuugaaugaaa

SEQ ID NO: 2482580 - RNA, 19 nt, Homo sapiens
  misc_RNA (1)...(19): siRNA sense strand
gguugagauugaugggaug

SEQ ID NO: 2482581 - RNA, 19 nt, Homo sapiens
  misc_RNA (1)...(19): siRNA sense strand
acauuagccugguggaacu

SEQ ID NO: 2482582 - RNA, 19 nt, Homo sapiens
  misc_RNA (1)...(19): siRNA sense strand
augcaaaagcuuuagaaga

SEQ ID NO: 2482583 - RNA, 19 nt, Homo sapiens
  misc_RNA (1)...(19): siRNA sense strand
cuacuauguggaagagcuu

SEQ ID NO: 2482584 - RNA, 19 nt, Homo sapiens
  misc_RNA (1)...(19): siRNA sense strand
cagaaaaccaggaggaaga

SEQ ID NO: 2482585 - RNA, 19 nt, Homo sapiens
  misc_RNA (1)...(19): siRNA sense strand
ccuaaugagaagggaguau

SEQ ID NO: 2482586 - RNA, 19 nt, Homo sapiens
  misc_RNA (1)...(19): siRNA sense strand
ggcaguaguaggugcucaa

SEQ ID NO: 2482587 - RNA, 19 nt, Homo sapiens
  misc_RNA (1)...(19): siRNA sense strand
ggaaaggagaccaagucca

SEQ ID NO: 2482588 - RNA, 19 nt, Homo sapiens
  misc_RNA (1)...(19): siRNA sense strand
gaacaggaauggaaaggag

SEQ ID NO: 2482589 - RNA, 19 nt, Homo sapiens
  misc_RNA (1)...(19): siRNA sense strand
cagaaaaccaggaggaaga

SEQ ID NO: 2482590 - RNA, 19 nt, Homo sapiens
  misc_RNA (1)...(19): siRNA sense strand
ccuaaugagaagggaguau

SEQ ID NO: 2482591 - RNA, 19 nt, Homo sapiens
  misc_RNA (1)...(19): siRNA sense strand
ggcaguaguaggugcucaa

SEQ ID NO: 2482592 - RNA, 19 nt, Homo sapiens
  misc_RNA (1)...(19): siRNA sense strand
ggaaaggagaccaagucca

SEQ ID NO: 2482593 - RNA, 19 nt, Homo sapiens
  misc_RNA (1)...(19): siRNA sense strand
gaacaggaauggaaaggag

SEQ ID NO: 2482594 - RNA, 19 nt, Homo sapiens
  misc_RNA (1)...(19): siRNA sense strand
cgaaaauggaaaacagaua

SEQ ID NO: 2482595 - RNA, 19 nt, Homo sapiens
  misc_RNA (1)...(19): siRNA sense strand
guagcaauuuggagcggua

SEQ ID NO: 2482596 - RNA, 19 nt, Homo sapiens
  misc_RNA (1)...(19): siRNA sense strand
cuuuagugaaguagaagua

SEQ ID NO: 2482597 - RNA, 19 nt, Homo sapiens
  misc_RNA (1)...(19): siRNA sense strand
cuaugagauuggugaacga

SEQ ID NO: 2482598 - RNA, 19 nt, Homo sapiens
  misc_RNA (1)...(19): siRNA sense strand
agauaucaggauuuggaaa

SEQ ID NO: 2482599 - RNA, 19 nt, Homo sapiens
  misc_RNA (1)...(19): siRNA sense strand
uggugaacgaguagauuau

SEQ ID NO: 2482600 - RNA, 19 nt, Homo sapiens
  misc_RNA (1)...(19): siRNA sense strand
gcaaaugggacuuacgagu

SEQ ID NO: 2482601 - RNA, 19 nt, Homo sapiens
  misc_RNA (1)...(19): siRNA sense strand
uugaaugcgauaaggguuu

SEQ ID NO: 2482602 - RNA, 19 nt, Homo sapiens
  misc_RNA (1)...(19): siRNA sense strand
acuuaaaggaucaguagca

SEQ ID NO: 2482603 - RNA, 19 nt, Homo sapiens
  misc_RNA (1)...(19): siRNA sense strand
uugugaacuuaaaggauca

SEQ ID NO: 2482604 - RNA, 19 nt, Homo sapiens
  misc_RNA (1)...(19): siRNA sense strand
cuacuaugagauuggugaa

SEQ ID NO: 2482605 - RNA, 19 nt, Homo sapiens
  misc_RNA (1)...(19): siRNA sense strand
cagaguguaaaguggucaa

SEQ ID NO: 2482606 - RNA, 19 nt, Homo sapiens
  misc_RNA (1)...(19): siRNA sense strand
ucggaaucauacauggcua

SEQ ID NO: 2482607 - RNA, 19 nt, Homo sapiens
  misc_RNA (1)...(19): siRNA sense strand
gacgccuguuauagagaaa

SEQ ID NO: 2482608 - RNA, 19 nt, Homo sapiens
  misc_RNA (1)...(19): siRNA sense strand
cgaaaauggaaaacagaua

SEQ ID NO: 2482609 - RNA, 19 nt, Homo sapiens
  misc_RNA (1)...(19): siRNA sense strand
guagcaauuuggagcggua

SEQ ID NO: 2482610 - RNA, 19 nt, Homo sapiens
  misc_RNA (1)...(19): siRNA sense strand
cuuuagugaaguagaagua

SEQ ID NO: 2482611 - RNA, 19 nt, Homo sapiens
  misc_RNA (1)...(19): siRNA sense strand
cuaugagauuggugaacga

SEQ ID NO: 2482612 - RNA, 19 nt, Homo sapiens
  misc_RNA (1)...(19): siRNA sense strand
agauaucaggauuuggaaa

SEQ ID NO: 2482613 - RNA, 19 nt, Homo sapiens
  misc_RNA (1)...(19): siRNA sense strand
uggugaacgaguagauuau

SEQ ID NO: 2482614 - RNA, 19 nt, Homo sapiens
  misc_RNA (1)...(19): siRNA sense strand
gcaaaugggacuuacgagu

SEQ ID NO: 2482615 - RNA, 19 nt, Homo sapiens
  misc_RNA (1)...(19): siRNA sense strand
uugaaugcgauaaggguuu

SEQ ID NO: 2482616 - RNA, 19 nt, Homo sapiens
  misc_RNA (1)...(19): siRNA sense strand
acuuaaaggaucaguagca

SEQ ID NO: 2482617 - RNA, 19 nt, Homo sapiens
  misc_RNA (1)...(19): siRNA sense strand
uugugaacuuaaaggauca

SEQ ID NO: 2482618 - RNA, 19 nt, Homo sapiens
  misc_RNA (1)...(19): siRNA sense strand
agcagaugguggagcugaa

SEQ ID NO: 2482619 - RNA, 19 nt, Homo sapiens
  misc_RNA (1)...(19): siRNA sense strand
agaugguggagcugaauau

SEQ ID NO: 2482620 - RNA, 19 nt, Homo sapiens
  misc_RNA (1)...(19): siRNA sense strand
cuacuaugagauuggugaa

SEQ ID NO: 2482621 - RNA, 19 nt, Homo sapiens
  misc_RNA (1)...(19): siRNA sense strand
cagaguguaaaguggucaa

SEQ ID NO: 2482622 - RNA, 19 nt, Homo sapiens
  misc_RNA (1)...(19): siRNA sense strand
ucggaaucauacauggcua

SEQ ID NO: 2482623 - RNA, 19 nt, Homo sapiens
  misc_RNA (1)...(19): siRNA sense strand
gaaagcagaugguggagcu

SEQ ID NO: 2482624 - RNA, 19 nt, Homo sapiens
  misc_RNA (1)...(19): siRNA sense strand
gacgccuguuauagagaaa

SEQ ID NO: 2482625 - RNA, 19 nt, Homo sapiens
  misc_RNA (1)...(19): siRNA sense strand
cgaaaauggaaaacagaua

SEQ ID NO: 2482626 - RNA, 19 nt, Homo sapiens
  misc_RNA (1)...(19): siRNA sense strand
guagcaauuuggagcggua

SEQ ID NO: 2482627 - RNA, 19 nt, Homo sapiens
  misc_RNA (1)...(19): siRNA sense strand
cuuuagugaaguagaagua

SEQ ID NO: 2482628 - RNA, 19 nt, Homo sapiens
  misc_RNA (1)...(19): siRNA sense strand
cuaugagauuggugaacga

SEQ ID NO: 2482629 - RNA, 19 nt, Homo sapiens
  misc_RNA (1)...(19): siRNA sense strand
agauaucaggauuuggaaa

SEQ ID NO: 2482630 - RNA, 19 nt, Homo sapiens
  misc_RNA (1)...(19): siRNA sense strand
uggugaacgaguagauuau

SEQ ID NO: 2482631 - RNA, 19 nt, Homo sapiens
  misc_RNA (1)...(19): siRNA sense strand
gcaaaugggacuuacgagu

SEQ ID NO: 2482632 - RNA, 19 nt, Homo sapiens
  misc_RNA (1)...(19): siRNA sense strand
uugaaugcgauaaggguuu

SEQ ID NO: 2482633 - RNA, 19 nt, Homo sapiens
  misc_RNA (1)...(19): siRNA sense strand
acuuaaaggaucaguagca

SEQ ID NO: 2482634 - RNA, 19 nt, Homo sapiens
  misc_RNA (1)...(19): siRNA sense strand
uugugaacuuaaaggauca

SEQ ID NO: 2482635 - RNA, 19 nt, Homo sapiens
  misc_RNA (1)...(19): siRNA sense strand
agcagaugguggagcugaa

SEQ ID NO: 2482636 - RNA, 19 nt, Homo sapiens
  misc_RNA (1)...(19): siRNA sense strand
agaugguggagcugaauau

SEQ ID NO: 2482637 - RNA, 19 nt, Homo sapiens
  misc_RNA (1)...(19): siRNA sense strand
cuacuaugagauuggugaa

SEQ ID NO: 2482638 - RNA, 19 nt, Homo sapiens
  misc_RNA (1)...(19): siRNA sense strand
cagaguguaaaguggucaa

SEQ ID NO: 2482639 - RNA, 19 nt, Homo sapiens
  misc_RNA (1)...(19): siRNA sense strand
ucggaaucauacauggcua

SEQ ID NO: 2482640 - RNA, 19 nt, Homo sapiens
  misc_RNA (1)...(19): siRNA sense strand
gaaagcagaugguggagcu

SEQ ID NO: 2482641 - RNA, 19 nt, Homo sapiens
  misc_RNA (1)...(19): siRNA sense strand
gacgccuguuauagagaaa

SEQ ID NO: 2482642 - RNA, 19 nt, Homo sapiens
  misc_RNA (1)...(19): siRNA sense strand
cgaaaauggaaaacagaua

SEQ ID NO: 2482643 - RNA, 19 nt, Homo sapiens
  misc_RNA (1)...(19): siRNA sense strand
guagcaauuuggagcggua

SEQ ID NO: 2482644 - RNA, 19 nt, Homo sapiens
  misc_RNA (1)...(19): siRNA sense strand
cuuuagugaaguagaagua

SEQ ID NO: 2482645 - RNA, 19 nt, Homo sapiens
  misc_RNA (1)...(19): siRNA sense strand
cuaugagauuggugaacga

SEQ ID NO: 2482646 - RNA, 19 nt, Homo sapiens
  misc_RNA (1)...(19): siRNA sense strand
agauaucaggauuuggaaa

SEQ ID NO: 2482647 - RNA, 19 nt, Homo sapiens
  misc_RNA (1)...(19): siRNA sense strand
uggugaacgaguagauuau

SEQ ID NO: 2482648 - RNA, 19 nt, Homo sapiens
  misc_RNA (1)...(19): siRNA sense strand
gcaaaugggacuuacgagu

SEQ ID NO: 2482649 - RNA, 19 nt, Homo sapiens
  misc_RNA (1)...(19): siRNA sense strand
uugaaugcgauaaggguuu

SEQ ID NO: 2482650 - RNA, 19 nt, Homo sapiens
  misc_RNA (1)...(19): siRNA sense strand
acuuaaaggaucaguagca

SEQ ID NO: 2482651 - RNA, 19 nt, Homo sapiens
  misc_RNA (1)...(19): siRNA sense strand
uugugaacuuaaaggauca

SEQ ID NO: 2482652 - RNA, 19 nt, Homo sapiens
  misc_RNA (1)...(19): siRNA sense strand
cuacuaugagauuggugaa

SEQ ID NO: 2482653 - RNA, 19 nt, Homo sapiens
  misc_RNA (1)...(19): siRNA sense strand
cagaguguaaaguggucaa

SEQ ID NO: 2482654 - RNA, 19 nt, Homo sapiens
  misc_RNA (1)...(19): siRNA sense strand
ucggaaucauacauggcua

SEQ ID NO: 2482655 - RNA, 19 nt, Homo sapiens
  misc_RNA (1)...(19): siRNA sense strand
gacgccuguuauagagaaa

SEQ ID NO: 2482656 - RNA, 19 nt, Homo sapiens
  misc_RNA (1)...(19): siRNA sense strand
cgaaaauggaaaacagaua

SEQ ID NO: 2482657 - RNA, 19 nt, Homo sapiens
  misc_RNA (1)...(19): siRNA sense strand
guagcaauuuggagcggua

SEQ ID NO: 2482658 - RNA, 19 nt, Homo sapiens
  misc_RNA (1)...(19): siRNA sense strand
cuuuagugaaguagaagua

SEQ ID NO: 2482659 - RNA, 19 nt, Homo sapiens
  misc_RNA (1)...(19): siRNA sense strand
cuaugagauuggugaacga

SEQ ID NO: 2482660 - RNA, 19 nt, Homo sapiens
  misc_RNA (1)...(19): siRNA sense strand
agauaucaggauuuggaaa

SEQ ID NO: 2482661 - RNA, 19 nt, Homo sapiens
  misc_RNA (1)...(19): siRNA sense strand
uggugaacgaguagauuau

SEQ ID NO: 2482662 - RNA, 19 nt, Homo sapiens
  misc_RNA (1)...(19): siRNA sense strand
gcaaaugggacuuacgagu

SEQ ID NO: 2482663 - RNA, 19 nt, Homo sapiens
  misc_RNA (1)...(19): siRNA sense strand
uugaaugcgauaaggguuu

SEQ ID NO: 2482664 - RNA, 19 nt, Homo sapiens
  misc_RNA (1)...(19): siRNA sense strand
acuuaaaggaucaguagca

SEQ ID NO: 2482665 - RNA, 19 nt, Homo sapiens
  misc_RNA (1)...(19): siRNA sense strand
uugugaacuuaaaggauca

SEQ ID NO: 2482666 - RNA, 19 nt, Homo sapiens
  misc_RNA (1)...(19): siRNA sense strand
cuacuaugagauuggugaa

SEQ ID NO: 2482667 - RNA, 19 nt, Homo sapiens
  misc_RNA (1)...(19): siRNA sense strand
cagaguguaaaguggucaa

SEQ ID NO: 2482668 - RNA, 19 nt, Homo sapiens
  misc_RNA (1)...(19): siRNA sense strand
ucggaaucauacauggcua

SEQ ID NO: 2482669 - RNA, 19 nt, Homo sapiens
  misc_RNA (1)...(19): siRNA sense strand
gacgccuguuauagagaaa

SEQ ID NO: 2482670 - RNA, 19 nt, Homo sapiens
  misc_RNA (1)...(19): siRNA sense strand
cgaaaauggaaaacagaua

SEQ ID NO: 2482671 - RNA, 19 nt, Homo sapiens
  misc_RNA (1)...(19): siRNA sense strand
guagcaauuuggagcggua

SEQ ID NO: 2482672 - RNA, 19 nt, Homo sapiens
  misc_RNA (1)...(19): siRNA sense strand
cuuuagugaaguagaagua

SEQ ID NO: 2482673 - RNA, 19 nt, Homo sapiens
  misc_RNA (1)...(19): siRNA sense strand
cuaugagauuggugaacga

SEQ ID NO: 2482674 - RNA, 19 nt, Homo sapiens
  misc_RNA (1)...(19): siRNA sense strand
agauaucaggauuuggaaa

SEQ ID NO: 2482675 - RNA, 19 nt, Homo sapiens
  misc_RNA (1)...(19): siRNA sense strand
uggugaacgaguagauuau

SEQ ID NO: 2482676 - RNA, 19 nt, Homo sapiens
  misc_RNA (1)...(19): siRNA sense strand
gcaaaugggacuuacgagu

SEQ ID NO: 2482677 - RNA, 19 nt, Homo sapiens
  misc_RNA (1)...(19): siRNA sense strand
uugaaugcgauaaggguuu

SEQ ID NO: 2482678 - RNA, 19 nt, Homo sapiens
  misc_RNA (1)...(19): siRNA sense strand
acuuaaaggaucaguagca

SEQ ID NO: 2482679 - RNA, 19 nt, Homo sapiens
  misc_RNA (1)...(19): siRNA sense strand
uugugaacuuaaaggauca

SEQ ID NO: 2482680 - RNA, 19 nt, Homo sapiens
  misc_RNA (1)...(19): siRNA sense strand
agcagaugguggagcugaa

SEQ ID NO: 2482681 - RNA, 19 nt, Homo sapiens
  misc_RNA (1)...(19): siRNA sense strand
agaugguggagcugaauau

SEQ ID NO: 2482682 - RNA, 19 nt, Homo sapiens
  misc_RNA (1)...(19): siRNA sense strand
cuacuaugagauuggugaa

SEQ ID NO: 2482683 - RNA, 19 nt, Homo sapiens
  misc_RNA (1)...(19): siRNA sense strand
cagaguguaaaguggucaa

SEQ ID NO: 2482684 - RNA, 19 nt, Homo sapiens
  misc_RNA (1)...(19): siRNA sense strand
ucggaaucauacauggcua

SEQ ID NO: 2482685 - RNA, 19 nt, Homo sapiens
  misc_RNA (1)...(19): siRNA sense strand
gaaagcagaugguggagcu

SEQ ID NO: 2482686 - RNA, 19 nt, Homo sapiens
  misc_RNA (1)...(19): siRNA sense strand
gacgccuguuauagagaaa

SEQ ID NO: 2482687 - RNA, 19 nt, Homo sapiens
  misc_RNA (1)...(19): siRNA sense strand
cgaaaauggaaaacagaua

SEQ ID NO: 2482688 - RNA, 19 nt, Homo sapiens
  misc_RNA (1)...(19): siRNA sense strand
guagcaauuuggagcggua

SEQ ID NO: 2482689 - RNA, 19 nt, Homo sapiens
  misc_RNA (1)...(19): siRNA sense strand
cuuuagugaaguagaagua

SEQ ID NO: 2482690 - RNA, 19 nt, Homo sapiens
  misc_RNA (1)...(19): siRNA sense strand
cuaugagauuggugaacga

SEQ ID NO: 2482691 - RNA, 19 nt, Homo sapiens
  misc_RNA (1)...(19): siRNA sense strand
agauaucaggauuuggaaa

SEQ ID NO: 2482692 - RNA, 19 nt, Homo sapiens
  misc_RNA (1)...(19): siRNA sense strand
uggugaacgaguagauuau

SEQ ID NO: 2482693 - RNA, 19 nt, Homo sapiens
  misc_RNA (1)...(19): siRNA sense strand
gcaaaugggacuuacgagu

SEQ ID NO: 2482694 - RNA, 19 nt, Homo sapiens
  misc_RNA (1)...(19): siRNA sense strand
uugaaugcgauaaggguuu

SEQ ID NO: 2482695 - RNA, 19 nt, Homo sapiens
  misc_RNA (1)...(19): siRNA sense strand
acuuaaaggaucaguagca

SEQ ID NO: 2482696 - RNA, 19 nt, Homo sapiens
  misc_RNA (1)...(19): siRNA sense strand
uugugaacuuaaaggauca

SEQ ID NO: 2482697 - RNA, 19 nt, Homo sapiens
  misc_RNA (1)...(19): siRNA sense strand
cuacuaugagauuggugaa

SEQ ID NO: 2482698 - RNA, 19 nt, Homo sapiens
  misc_RNA (1)...(19): siRNA sense strand
cagaguguaaaguggucaa

SEQ ID NO: 2482699 - RNA, 19 nt, Homo sapiens
  misc_RNA (1)...(19): siRNA sense strand
ucggaaucauacauggcua

SEQ ID NO: 2482700 - RNA, 19 nt, Homo sapiens
  misc_RNA (1)...(19): siRNA sense strand
gacgccuguuauagagaaa

SEQ ID NO: 2482701 - RNA, 19 nt, Homo sapiens
  misc_RNA (1)...(19): siRNA sense strand
cgaaaauggaaaacagaua

SEQ ID NO: 2482702 - RNA, 19 nt, Homo sapiens
  misc_RNA (1)...(19): siRNA sense strand
guagcaauuuggagcggua

SEQ ID NO: 2482703 - RNA, 19 nt, Homo sapiens
  misc_RNA (1)...(19): siRNA sense strand
cuuuagugaaguagaagua

SEQ ID NO: 2482704 - RNA, 19 nt, Homo sapiens
  misc_RNA (1)...(19): siRNA sense strand
cuaugagauuggugaacga

SEQ ID NO: 2482705 - RNA, 19 nt, Homo sapiens
  misc_RNA (1)...(19): siRNA sense strand
agauaucaggauuuggaaa

SEQ ID NO: 2482706 - RNA, 19 nt, Homo sapiens
  misc_RNA (1)...(19): siRNA sense strand
uggugaacgaguagauuau

SEQ ID NO: 2482707 - RNA, 19 nt, Homo sapiens
  misc_RNA (1)...(19): siRNA sense strand
gcaaaugggacuuacgagu

SEQ ID NO: 2482708 - RNA, 19 nt, Homo sapiens
  misc_RNA (1)...(19): siRNA sense strand
uugaaugcgauaaggguuu

SEQ ID NO: 2482709 - RNA, 19 nt, Homo sapiens
  misc_RNA (1)...(19): siRNA sense strand
acuuaaaggaucaguagca

SEQ ID NO: 2482710 - RNA, 19 nt, Homo sapiens
  misc_RNA (1)...(19): siRNA sense strand
uugugaacuuaaaggauca

SEQ ID NO: 2482711 - RNA, 19 nt, Homo sapiens
  misc_RNA (1)...(19): siRNA sense strand
cuacuaugagauuggugaa

SEQ ID NO: 2482712 - RNA, 19 nt, Homo sapiens
  misc_RNA (1)...(19): siRNA sense strand
cagaguguaaaguggucaa

SEQ ID NO: 2482713 - RNA, 19 nt, Homo sapiens
  misc_RNA (1)...(19): siRNA sense strand
ucggaaucauacauggcua

SEQ ID NO: 2482714 - RNA, 19 nt, Homo sapiens
  misc_RNA (1)...(19): siRNA sense strand
gacgccuguuauagagaaa

SEQ ID NO: 2482715 - RNA, 19 nt, Homo sapiens
  misc_RNA (1)...(19): siRNA sense strand
cgaaaauggaaaacagaua

SEQ ID NO: 2482716 - RNA, 19 nt, Homo sapiens
  misc_RNA (1)...(19): siRNA sense strand
guagcaauuuggagcggua

SEQ ID NO: 2482717 - RNA, 19 nt, Homo sapiens
  misc_RNA (1)...(19): siRNA sense strand
cuuuagugaaguagaagua

SEQ ID NO: 2482718 - RNA, 19 nt, Homo sapiens
  misc_RNA (1)...(19): siRNA sense strand
cuaugagauuggugaacga

SEQ ID NO: 2482719 - RNA, 19 nt, Homo sapiens
  misc_RNA (1)...(19): siRNA sense strand
agauaucaggauuuggaaa

SEQ ID NO: 2482720 - RNA, 19 nt, Homo sapiens
  misc_RNA (1)...(19): siRNA sense strand
uggugaacgaguagauuau

SEQ ID NO: 2482721 - RNA, 19 nt, Homo sapiens
  misc_RNA (1)...(19): siRNA sense strand
gcaaaugggacuuacgagu

SEQ ID NO: 2482722 - RNA, 19 nt, Homo sapiens
  misc_RNA (1)...(19): siRNA sense strand
uugaaugcgauaaggguuu

SEQ ID NO: 2482723 - RNA, 19 nt, Homo sapiens
  misc_RNA (1)...(19): siRNA sense strand
acuuaaaggaucaguagca

SEQ ID NO: 2482724 - RNA, 19 nt, Homo sapiens
  misc_RNA (1)...(19): siRNA sense strand
uugugaacuuaaaggauca

SEQ ID NO: 2482725 - RNA, 19 nt, Homo sapiens
  misc_RNA (1)...(19): siRNA sense strand
agcagaugguggagcugaa

SEQ ID NO: 2482726 - RNA, 19 nt, Homo sapiens
  misc_RNA (1)...(19): siRNA sense strand
agaugguggagcugaauau

SEQ ID NO: 2482727 - RNA, 19 nt, Homo sapiens
  misc_RNA (1)...(19): siRNA sense strand
cuacuaugagauuggugaa

SEQ ID NO: 2482728 - RNA, 19 nt, Homo sapiens
  misc_RNA (1)...(19): siRNA sense strand
cagaguguaaaguggucaa

SEQ ID NO: 2482729 - RNA, 19 nt, Homo sapiens
  misc_RNA (1)...(19): siRNA sense strand
ucggaaucauacauggcua

SEQ ID NO: 2482730 - RNA, 19 nt, Homo sapiens
  misc_RNA (1)...(19): siRNA sense strand
gaaagcagaugguggagcu

SEQ ID NO: 2482731 - RNA, 19 nt, Homo sapiens
  misc_RNA (1)...(19): siRNA sense strand
gacgccuguuauagagaaa

SEQ ID NO: 2482732 - RNA, 19 nt, Homo sapiens
  misc_RNA (1)...(19): siRNA sense strand
cgaaaauggaaaacagaua

SEQ ID NO: 2482733 - RNA, 19 nt, Homo sapiens
  misc_RNA (1)...(19): siRNA sense strand
guagcaauuuggagcggua

SEQ ID NO: 2482734 - RNA, 19 nt, Homo sapiens
  misc_RNA (1)...(19): siRNA sense strand
cuuuagugaaguagaagua

SEQ ID NO: 2482735 - RNA, 19 nt, Homo sapiens
  misc_RNA (1)...(19): siRNA sense strand
cuaugagauuggugaacga

SEQ ID NO: 2482736 - RNA, 19 nt, Homo sapiens
  misc_RNA (1)...(19): siRNA sense strand
agauaucaggauuuggaaa

SEQ ID NO: 2482737 - RNA, 19 nt, Homo sapiens
  misc_RNA (1)...(19): siRNA sense strand
uggugaacgaguagauuau

SEQ ID NO: 2482738 - RNA, 19 nt, Homo sapiens
  misc_RNA (1)...(19): siRNA sense strand
gcaaaugggacuuacgagu

SEQ ID NO: 2482739 - RNA, 19 nt, Homo sapiens
  misc_RNA (1)...(19): siRNA sense strand
uugaaugcgauaaggguuu

SEQ ID NO: 2482740 - RNA, 19 nt, Homo sapiens
  misc_RNA (1)...(19): siRNA sense strand
acuuaaaggaucaguagca

SEQ ID NO: 2482741 - RNA, 19 nt, Homo sapiens
  misc_RNA (1)...(19): siRNA sense strand
uugugaacuuaaaggauca

SEQ ID NO: 2482742 - RNA, 19 nt, Homo sapiens
  misc_RNA (1)...(19): siRNA sense strand
cuacuaugagauuggugaa

SEQ ID NO: 2482743 - RNA, 19 nt, Homo sapiens
  misc_RNA (1)...(19): siRNA sense strand
cagaguguaaaguggucaa

SEQ ID NO: 2482744 - RNA, 19 nt, Homo sapiens
  misc_RNA (1)...(19): siRNA sense strand
ucggaaucauacauggcua

SEQ ID NO: 2482745 - RNA, 19 nt, Homo sapiens
  misc_RNA (1)...(19): siRNA sense strand
gacgccuguuauagagaaa

SEQ ID NO: 2482746 - RNA, 19 nt, Homo sapiens
  misc_RNA (1)...(19): siRNA sense strand
cgaaaauggaaaacagaua

SEQ ID NO: 2482747 - RNA, 19 nt, Homo sapiens
  misc_RNA (1)...(19): siRNA sense strand
guagcaauuuggagcggua

SEQ ID NO: 2482748 - RNA, 19 nt, Homo sapiens
  misc_RNA (1)...(19): siRNA sense strand
cuuuagugaaguagaagua

SEQ ID NO: 2482749 - RNA, 19 nt, Homo sapiens
  misc_RNA (1)...(19): siRNA sense strand
cuaugagauuggugaacga

SEQ ID NO: 2482750 - RNA, 19 nt, Homo sapiens
  misc_RNA (1)...(19): siRNA sense strand
agauaucaggauuuggaaa

SEQ ID NO: 2482751 - RNA, 19 nt, Homo sapiens
  misc_RNA (1)...(19): siRNA sense strand
uggugaacgaguagauuau

SEQ ID NO: 2482752 - RNA, 19 nt, Homo sapiens
  misc_RNA (1)...(19): siRNA sense strand
gcaaaugggacuuacgagu

SEQ ID NO: 2482753 - RNA, 19 nt, Homo sapiens
  misc_RNA (1)...(19): siRNA sense strand
uugaaugcgauaaggguuu

SEQ ID NO: 2482754 - RNA, 19 nt, Homo sapiens
  misc_RNA (1)...(19): siRNA sense strand
acuuaaaggaucaguagca

SEQ ID NO: 2482755 - RNA, 19 nt, Homo sapiens
  misc_RNA (1)...(19): siRNA sense strand
uugugaacuuaaaggauca

SEQ ID NO: 2482756 - RNA, 19 nt, Homo sapiens
  misc_RNA (1)...(19): siRNA sense strand
agcagaugguggagcugaa

SEQ ID NO: 2482757 - RNA, 19 nt, Homo sapiens
  misc_RNA (1)...(19): siRNA sense strand
agaugguggagcugaauau

SEQ ID NO: 2482758 - RNA, 19 nt, Homo sapiens
  misc_RNA (1)...(19): siRNA sense strand
cuacuaugagauuggugaa

SEQ ID NO: 2482759 - RNA, 19 nt, Homo sapiens
  misc_RNA (1)...(19): siRNA sense strand
cagaguguaaaguggucaa

SEQ ID NO: 2482760 - RNA, 19 nt, Homo sapiens
  misc_RNA (1)...(19): siRNA sense strand
ucggaaucauacauggcua

SEQ ID NO: 2482761 - RNA, 19 nt, Homo sapiens
  misc_RNA (1)...(19): siRNA sense strand
gaaagcagaugguggagcu

SEQ ID NO: 2482762 - RNA, 19 nt, Homo sapiens
  misc_RNA (1)...(19): siRNA sense strand
gacgccuguuauagagaaa

SEQ ID NO: 2482763 - RNA, 19 nt, Homo sapiens
  misc_RNA (1)...(19): siRNA sense strand
cgaaaauggaaaacagaua

SEQ ID NO: 2482764 - RNA, 19 nt, Homo sapiens
  misc_RNA (1)...(19): siRNA sense strand
guagcaauuuggagcggua

SEQ ID NO: 2482765 - RNA, 19 nt, Homo sapiens
  misc_RNA (1)...(19): siRNA sense strand
cuuuagugaaguagaagua

SEQ ID NO: 2482766 - RNA, 19 nt, Homo sapiens
  misc_RNA (1)...(19): siRNA sense strand
cuaugagauuggugaacga

SEQ ID NO: 2482767 - RNA, 19 nt, Homo sapiens
  misc_RNA (1)...(19): siRNA sense strand
agauaucaggauuuggaaa

SEQ ID NO: 2482768 - RNA, 19 nt, Homo sapiens
  misc_RNA (1)...(19): siRNA sense strand
uggugaacgaguagauuau

SEQ ID NO: 2482769 - RNA, 19 nt, Homo sapiens
  misc_RNA (1)...(19): siRNA sense strand
gcaaaugggacuuacgagu

SEQ ID NO: 2482770 - RNA, 19 nt, Homo sapiens
  misc_RNA (1)...(19): siRNA sense strand
uugaaugcgauaaggguuu

SEQ ID NO: 2482771 - RNA, 19 nt, Homo sapiens
  misc_RNA (1)...(19): siRNA sense strand
acuuaaaggaucaguagca

SEQ ID NO: 2482772 - RNA, 19 nt, Homo sapiens
  misc_RNA (1)...(19): siRNA sense strand
uugugaacuuaaaggauca

SEQ ID NO: 2482773 - RNA, 19 nt, Homo sapiens
  misc_RNA (1)...(19): siRNA sense strand
agcagaugguggagcugaa

SEQ ID NO: 2482774 - RNA, 19 nt, Homo sapiens
  misc_RNA (1)...(19): siRNA sense strand
agaugguggagcugaauau

SEQ ID NO: 2482775 - RNA, 19 nt, Homo sapiens
  misc_RNA (1)...(19): siRNA sense strand
cuacuaugagauuggugaa

SEQ ID NO: 2482776 - RNA, 19 nt, Homo sapiens
  misc_RNA (1)...(19): siRNA sense strand
cagaguguaaaguggucaa

SEQ ID NO: 2482777 - RNA, 19 nt, Homo sapiens
  misc_RNA (1)...(19): siRNA sense strand
ucggaaucauacauggcua

SEQ ID NO: 2482778 - RNA, 19 nt, Homo sapiens
  misc_RNA (1)...(19): siRNA sense strand
gaaagcagaugguggagcu

SEQ ID NO: 2482779 - RNA, 19 nt, Homo sapiens
  misc_RNA (1)...(19): siRNA sense strand
gacgccuguuauagagaaa

SEQ ID NO: 2482780 - RNA, 19 nt, Homo sapiens
  misc_RNA (1)...(19): siRNA sense strand
cgaaaauggaaaacagaua

SEQ ID NO: 2482781 - RNA, 19 nt, Homo sapiens
  misc_RNA (1)...(19): siRNA sense strand
guagcaauuuggagcggua

SEQ ID NO: 2482782 - RNA, 19 nt, Homo sapiens
  misc_RNA (1)...(19): siRNA sense strand
cuuuagugaaguagaagua

SEQ ID NO: 2482783 - RNA, 19 nt, Homo sapiens
  misc_RNA (1)...(19): siRNA sense strand
cuaugagauuggugaacga

SEQ ID NO: 2482784 - RNA, 19 nt, Homo sapiens
  misc_RNA (1)...(19): siRNA sense strand
agauaucaggauuuggaaa

SEQ ID NO: 2482785 - RNA, 19 nt, Homo sapiens
  misc_RNA (1)...(19): siRNA sense strand
uggugaacgaguagauuau

SEQ ID NO: 2482786 - RNA, 19 nt, Homo sapiens
  misc_RNA (1)...(19): siRNA sense strand
gcaaaugggacuuacgagu

SEQ ID NO: 2482787 - RNA, 19 nt, Homo sapiens
  misc_RNA (1)...(19): siRNA sense strand
uugaaugcgauaaggguuu

SEQ ID NO: 2482788 - RNA, 19 nt, Homo sapiens
  misc_RNA (1)...(19): siRNA sense strand
acuuaaaggaucaguagca

SEQ ID NO: 2482789 - RNA, 19 nt, Homo sapiens
  misc_RNA (1)...(19): siRNA sense strand
uugugaacuuaaaggauca

SEQ ID NO: 2482790 - RNA, 19 nt, Homo sapiens
  misc_RNA (1)...(19): siRNA sense strand
agcagaugguggagcugaa

SEQ ID NO: 2482791 - RNA, 19 nt, Homo sapiens
  misc_RNA (1)...(19): siRNA sense strand
agaugguggagcugaauau

SEQ ID NO: 2482792 - RNA, 19 nt, Homo sapiens
  misc_RNA (1)...(19): siRNA sense strand
cuacuaugagauuggugaa

SEQ ID NO: 2482793 - RNA, 19 nt, Homo sapiens
  misc_RNA (1)...(19): siRNA sense strand
cagaguguaaaguggucaa

SEQ ID NO: 2482794 - RNA, 19 nt, Homo sapiens
  misc_RNA (1)...(19): siRNA sense strand
ucggaaucauacauggcua

SEQ ID NO: 2482795 - RNA, 19 nt, Homo sapiens
  misc_RNA (1)...(19): siRNA sense strand
gaaagcagaugguggagcu

SEQ ID NO: 2482796 - RNA, 19 nt, Homo sapiens
  misc_RNA (1)...(19): siRNA sense strand
gacgccuguuauagagaaa

SEQ ID NO: 2482797 - RNA, 19 nt, Homo sapiens
  misc_RNA (1)...(19): siRNA sense strand
cgaaaauggaaaacagaua

SEQ ID NO: 2482798 - RNA, 19 nt, Homo sapiens
  misc_RNA (1)...(19): siRNA sense strand
guagcaauuuggagcggua

SEQ ID NO: 2482799 - RNA, 19 nt, Homo sapiens
  misc_RNA (1)...(19): siRNA sense strand
cuuuagugaaguagaagua

SEQ ID NO: 2482800 - RNA, 19 nt, Homo sapiens
  misc_RNA (1)...(19): siRNA sense strand
cuaugagauuggugaacga

SEQ ID NO: 2482801 - RNA, 19 nt, Homo sapiens
  misc_RNA (1)...(19): siRNA sense strand
agauaucaggauuuggaaa

SEQ ID NO: 2482802 - RNA, 19 nt, Homo sapiens
  misc_RNA (1)...(19): siRNA sense strand
uggugaacgaguagauuau

SEQ ID NO: 2482803 - RNA, 19 nt, Homo sapiens
  misc_RNA (1)...(19): siRNA sense strand
gcaaaugggacuuacgagu

SEQ ID NO: 2482804 - RNA, 19 nt, Homo sapiens
  misc_RNA (1)...(19): siRNA sense strand
uugaaugcgauaaggguuu

SEQ ID NO: 2482805 - RNA, 19 nt, Homo sapiens
  misc_RNA (1)...(19): siRNA sense strand
acuuaaaggaucaguagca

SEQ ID NO: 2482806 - RNA, 19 nt, Homo sapiens
  misc_RNA (1)...(19): siRNA sense strand
uugugaacuuaaaggauca

SEQ ID NO: 2482807 - RNA, 19 nt, Homo sapiens
  misc_RNA (1)...(19): siRNA sense strand
agcagaugguggagcugaa

SEQ ID NO: 2482808 - RNA, 19 nt, Homo sapiens
  misc_RNA (1)...(19): siRNA sense strand
agaugguggagcugaauau

SEQ ID NO: 2482809 - RNA, 19 nt, Homo sapiens
  misc_RNA (1)...(19): siRNA sense strand
cuacuaugagauuggugaa

SEQ ID NO: 2482810 - RNA, 19 nt, Homo sapiens
  misc_RNA (1)...(19): siRNA sense strand
cagaguguaaaguggucaa

SEQ ID NO: 2482811 - RNA, 19 nt, Homo sapiens
  misc_RNA (1)...(19): siRNA sense strand
ucggaaucauacauggcua

SEQ ID NO: 2482812 - RNA, 19 nt, Homo sapiens
  misc_RNA (1)...(19): siRNA sense strand
gaaagcagaugguggagcu

SEQ ID NO: 2482813 - RNA, 19 nt, Homo sapiens
  misc_RNA (1)...(19): siRNA sense strand
gacgccuguuauagagaaa

SEQ ID NO: 2482814 - RNA, 19 nt, Homo sapiens
  misc_RNA (1)...(19): siRNA sense strand
aggcagagaaugaggaaga

SEQ ID NO: 2482815 - RNA, 19 nt, Homo sapiens
  misc_RNA (1)...(19): siRNA sense strand
cggaggaagaagaggaaga

SEQ ID NO: 2482816 - RNA, 19 nt, Homo sapiens
  misc_RNA (1)...(19): siRNA sense strand
cagcagagcuccagccaga

SEQ ID NO: 2482817 - RNA, 19 nt, Homo sapiens
  misc_RNA (1)...(19): siRNA sense strand
agaagaaggccaagcgaga

SEQ ID NO: 2482818 - RNA, 19 nt, Homo sapiens
  misc_RNA (1)...(19): siRNA sense strand
agaggaagacagugaggaa

SEQ ID NO: 2482819 - RNA, 19 nt, Homo sapiens
  misc_RNA (1)...(19): siRNA sense strand
gcgaggaagaggauggcua

SEQ ID NO: 2482820 - RNA, 19 nt, Homo sapiens
  misc_RNA (1)...(19): siRNA sense strand
cugaagaggacgaugaaga

SEQ ID NO: 2482821 - RNA, 19 nt, Homo sapiens
  misc_RNA (1)...(19): siRNA sense strand
augaagaugauguggacaa

SEQ ID NO: 2482822 - RNA, 19 nt, Homo sapiens
  misc_RNA (1)...(19): siRNA sense strand
aagaagaagaagagaugau

SEQ ID NO: 2482823 - RNA, 19 nt, Homo sapiens
  misc_RNA (1)...(19): siRNA sense strand
augaagaagaagaagaaga

SEQ ID NO: 2482824 - RNA, 19 nt, Homo sapiens
  misc_RNA (1)...(19): siRNA sense strand
acaagaagaagaaggccaa

SEQ ID NO: 2482825 - RNA, 19 nt, Homo sapiens
  misc_RNA (1)...(19): siRNA sense strand
ucaaagaucagaaggccua

SEQ ID NO: 2482826 - RNA, 19 nt, Homo sapiens
  misc_RNA (1)...(19): siRNA sense strand
aagaagaagaagaagagau

SEQ ID NO: 2482827 - RNA, 19 nt, Homo sapiens
  misc_RNA (1)...(19): siRNA sense strand
aggaaugcagcgaggaaga

SEQ ID NO: 2482828 - RNA, 19 nt, Homo sapiens
  misc_RNA (1)...(19): siRNA sense strand
gaggacucaacuagggaaa

SEQ ID NO: 2482829 - RNA, 19 nt, Homo sapiens
  misc_RNA (1)...(19): siRNA sense strand
augaggaagaugaggauga

SEQ ID NO: 2482830 - RNA, 19 nt, Homo sapiens
  misc_RNA (1)...(19): siRNA sense strand
cagagaguggcaagcgaaa

SEQ ID NO: 2482831 - RNA, 19 nt, Homo sapiens
  misc_RNA (1)...(19): siRNA sense strand
acgaugaagaagaagaaga

SEQ ID NO: 2482832 - RNA, 19 nt, Homo sapiens
  misc_RNA (1)...(19): siRNA sense strand
agaggaugaaguagaacua

SEQ ID NO: 2482833 - RNA, 19 nt, Homo sapiens
  misc_RNA (1)...(19): siRNA sense strand
caagaaugcugguggcaag

SEQ ID NO: 2482834 - RNA, 19 nt, Homo sapiens
  misc_RNA (1)...(19): siRNA sense strand
gaaaauggcaacagcgaca

SEQ ID NO: 2482835 - RNA, 19 nt, Homo sapiens
  misc_RNA (1)...(19): siRNA sense strand
cagugaggaggcagagaau

SEQ ID NO: 2482836 - RNA, 19 nt, Homo sapiens
  misc_RNA (1)...(19): siRNA sense strand
gacaagaagaagaaggcca

SEQ ID NO: 2482837 - RNA, 19 nt, Homo sapiens
  misc_RNA (1)...(19): siRNA sense strand
ugaggaaugcagcgaggaa

SEQ ID NO: 2482838 - RNA, 19 nt, Homo sapiens
  misc_RNA (1)...(19): siRNA sense strand
ccgaggaggcugaagagga

SEQ ID NO: 2482839 - RNA, 19 nt, Homo sapiens
  misc_RNA (1)...(19): siRNA sense strand
aggcugaagaggacgauga

SEQ ID NO: 2482840 - RNA, 19 nt, Homo sapiens
  misc_RNA (1)...(19): siRNA sense strand
aaguagaacuagcacgcau

SEQ ID NO: 2482841 - RNA, 19 nt, Homo sapiens
  misc_RNA (1)...(19): siRNA sense strand
caaaucuggaggugggaca

SEQ ID NO: 2482842 - RNA, 19 nt, Homo sapiens
  misc_RNA (1)...(19): siRNA sense strand
ucauuaaagagcuggcaca

SEQ ID NO: 2482843 - RNA, 19 nt, Homo sapiens
  misc_RNA (1)...(19): siRNA sense strand
aggaagacagugaggaaug

SEQ ID NO: 2482844 - RNA, 19 nt, Homo sapiens
  misc_RNA (1)...(19): siRNA sense strand
aagaggacgaugaagaaga

SEQ ID NO: 2482845 - RNA, 19 nt, Homo sapiens
  misc_RNA (1)...(19): siRNA sense strand
aucacaaaccagaggauga

SEQ ID NO: 2482846 - RNA, 19 nt, Homo sapiens
  misc_RNA (1)...(19): siRNA sense strand
ccugaggaacagaugauuu

SEQ ID NO: 2482847 - RNA, 19 nt, Homo sapiens
  misc_RNA (1)...(19): siRNA sense strand
agaaugaggaagaugagga

SEQ ID NO: 2482848 - RNA, 19 nt, Homo sapiens
  misc_RNA (1)...(19): siRNA sense strand
gggcugaagaaaauggcaa

SEQ ID NO: 2482849 - RNA, 19 nt, Homo sapiens
  misc_RNA (1)...(19): siRNA sense strand
aggacgaugaagaagaaga

SEQ ID NO: 2482850 - RNA, 19 nt, Homo sapiens
  misc_RNA (1)...(19): siRNA sense strand
ccagagaguggcaagcgaa

SEQ ID NO: 2482851 - RNA, 19 nt, Homo sapiens
  misc_RNA (1)...(19): siRNA sense strand
ggcacagauugcagggcga

SEQ ID NO: 2482852 - RNA, 19 nt, Homo sapiens
  misc_RNA (1)...(19): siRNA sense strand
acaucaaggugcugacucu

SEQ ID NO: 2482853 - RNA, 19 nt, Homo sapiens
  misc_RNA (1)...(19): siRNA sense strand
ggauggaaggcaaagagga

SEQ ID NO: 2482854 - RNA, 19 nt, Homo sapiens
  misc_RNA (1)...(19): siRNA sense strand
aaccagaggaugaaguaga

SEQ ID NO: 2482855 - RNA, 19 nt, Homo sapiens
  misc_RNA (1)...(19): siRNA sense strand
acaaggaaggcaagcuaca

SEQ ID NO: 2482856 - RNA, 19 nt, Homo sapiens
  misc_RNA (1)...(19): siRNA sense strand
cugaggaugaagaugaaaa

SEQ ID NO: 2482857 - RNA, 19 nt, Homo sapiens
  misc_RNA (1)...(19): siRNA sense strand
aggugggacaggcgaggaa

SEQ ID NO: 2482858 - RNA, 19 nt, Homo sapiens
  misc_RNA (1)...(19): siRNA sense strand
cuuugaggacagugaggau

SEQ ID NO: 2482859 - RNA, 19 nt, Homo sapiens
  misc_RNA (1)...(19): siRNA sense strand
ccauggaggaugcucacaa

SEQ ID NO: 2482860 - RNA, 19 nt, Homo sapiens
  misc_RNA (1)...(19): siRNA sense strand
cagccagcgugaugaaaau

SEQ ID NO: 2482861 - RNA, 19 nt, Homo sapiens
  misc_RNA (1)...(19): siRNA sense strand
aggcagagaaugaggaaga

SEQ ID NO: 2482862 - RNA, 19 nt, Homo sapiens
  misc_RNA (1)...(19): siRNA sense strand
cggaggaagaagaggaaga

SEQ ID NO: 2482863 - RNA, 19 nt, Homo sapiens
  misc_RNA (1)...(19): siRNA sense strand
cagcagagcuccagccaga

SEQ ID NO: 2482864 - RNA, 19 nt, Homo sapiens
  misc_RNA (1)...(19): siRNA sense strand
agaagaaggccaagcgaga

SEQ ID NO: 2482865 - RNA, 19 nt, Homo sapiens
  misc_RNA (1)...(19): siRNA sense strand
agaggaagacagugaggaa

SEQ ID NO: 2482866 - RNA, 19 nt, Homo sapiens
  misc_RNA (1)...(19): siRNA sense strand
gcgaggaagaggauggcua

SEQ ID NO: 2482867 - RNA, 19 nt, Homo sapiens
  misc_RNA (1)...(19): siRNA sense strand
cugaagaggacgaugaaga

SEQ ID NO: 2482868 - RNA, 19 nt, Homo sapiens
  misc_RNA (1)...(19): siRNA sense strand
augaagaugauguggacaa

SEQ ID NO: 2482869 - RNA, 19 nt, Homo sapiens
  misc_RNA (1)...(19): siRNA sense strand
aagaagaagaagagaugau

SEQ ID NO: 2482870 - RNA, 19 nt, Homo sapiens
  misc_RNA (1)...(19): siRNA sense strand
augaagaagaagaagaaga

SEQ ID NO: 2482871 - RNA, 19 nt, Homo sapiens
  misc_RNA (1)...(19): siRNA sense strand
acaagaagaagaaggccaa

SEQ ID NO: 2482872 - RNA, 19 nt, Homo sapiens
  misc_RNA (1)...(19): siRNA sense strand
ucaaagaucagaaggccua

SEQ ID NO: 2482873 - RNA, 19 nt, Homo sapiens
  misc_RNA (1)...(19): siRNA sense strand
aagaagaagaagaagagau

SEQ ID NO: 2482874 - RNA, 19 nt, Homo sapiens
  misc_RNA (1)...(19): siRNA sense strand
aggaaugcagcgaggaaga

SEQ ID NO: 2482875 - RNA, 19 nt, Homo sapiens
  misc_RNA (1)...(19): siRNA sense strand
gaggacucaacuagggaaa

SEQ ID NO: 2482876 - RNA, 19 nt, Homo sapiens
  misc_RNA (1)...(19): siRNA sense strand
augaggaagaugaggauga

SEQ ID NO: 2482877 - RNA, 19 nt, Homo sapiens
  misc_RNA (1)...(19): siRNA sense strand
cagagaguggcaagcgaaa

SEQ ID NO: 2482878 - RNA, 19 nt, Homo sapiens
  misc_RNA (1)...(19): siRNA sense strand
acgaugaagaagaagaaga

SEQ ID NO: 2482879 - RNA, 19 nt, Homo sapiens
  misc_RNA (1)...(19): siRNA sense strand
agaggaugaaguagaacua

SEQ ID NO: 2482880 - RNA, 19 nt, Homo sapiens
  misc_RNA (1)...(19): siRNA sense strand
caagaaugcugguggcaag

SEQ ID NO: 2482881 - RNA, 19 nt, Homo sapiens
  misc_RNA (1)...(19): siRNA sense strand
gaaaauggcaacagcgaca

SEQ ID NO: 2482882 - RNA, 19 nt, Homo sapiens
  misc_RNA (1)...(19): siRNA sense strand
cagugaggaggcagagaau

SEQ ID NO: 2482883 - RNA, 19 nt, Homo sapiens
  misc_RNA (1)...(19): siRNA sense strand
gacaagaagaagaaggcca

SEQ ID NO: 2482884 - RNA, 19 nt, Homo sapiens
  misc_RNA (1)...(19): siRNA sense strand
ugaggaaugcagcgaggaa

SEQ ID NO: 2482885 - RNA, 19 nt, Homo sapiens
  misc_RNA (1)...(19): siRNA sense strand
ccgaggaggcugaagagga

SEQ ID NO: 2482886 - RNA, 19 nt, Homo sapiens
  misc_RNA (1)...(19): siRNA sense strand
aggcugaagaggacgauga

SEQ ID NO: 2482887 - RNA, 19 nt, Homo sapiens
  misc_RNA (1)...(19): siRNA sense strand
aaguagaacuagcacgcau

SEQ ID NO: 2482888 - RNA, 19 nt, Homo sapiens
  misc_RNA (1)...(19): siRNA sense strand
caaaucuggaggugggaca

SEQ ID NO: 2482889 - RNA, 19 nt, Homo sapiens
  misc_RNA (1)...(19): siRNA sense strand
ucauuaaagagcuggcaca

SEQ ID NO: 2482890 - RNA, 19 nt, Homo sapiens
  misc_RNA (1)...(19): siRNA sense strand
aggaagacagugaggaaug

SEQ ID NO: 2482891 - RNA, 19 nt, Homo sapiens
  misc_RNA (1)...(19): siRNA sense strand
aagaggacgaugaagaaga

SEQ ID NO: 2482892 - RNA, 19 nt, Homo sapiens
  misc_RNA (1)...(19): siRNA sense strand
aucacaaaccagaggauga

SEQ ID NO: 2482893 - RNA, 19 nt, Homo sapiens
  misc_RNA (1)...(19): siRNA sense strand
ccugaggaacagaugauuu

SEQ ID NO: 2482894 - RNA, 19 nt, Homo sapiens
  misc_RNA (1)...(19): siRNA sense strand
agaaugaggaagaugagga

SEQ ID NO: 2482895 - RNA, 19 nt, Homo sapiens
  misc_RNA (1)...(19): siRNA sense strand
gggcugaagaaaauggcaa

SEQ ID NO: 2482896 - RNA, 19 nt, Homo sapiens
  misc_RNA (1)...(19): siRNA sense strand
aggacgaugaagaagaaga

SEQ ID NO: 2482897 - RNA, 19 nt, Homo sapiens
  misc_RNA (1)...(19): siRNA sense strand
ccagagaguggcaagcgaa

SEQ ID NO: 2482898 - RNA, 19 nt, Homo sapiens
  misc_RNA (1)...(19): siRNA sense strand
ggcacagauugcagggcga

SEQ ID NO: 2482899 - RNA, 19 nt, Homo sapiens
  misc_RNA (1)...(19): siRNA sense strand
acaucaaggugcugacucu

SEQ ID NO: 2482900 - RNA, 19 nt, Homo sapiens
  misc_RNA (1)...(19): siRNA sense strand
ggauggaaggcaaagagga

SEQ ID NO: 2482901 - RNA, 19 nt, Homo sapiens
  misc_RNA (1)...(19): siRNA sense strand
aaccagaggaugaaguaga

SEQ ID NO: 2482902 - RNA, 19 nt, Homo sapiens
  misc_RNA (1)...(19): siRNA sense strand
acaaggaaggcaagcuaca

SEQ ID NO: 2482903 - RNA, 19 nt, Homo sapiens
  misc_RNA (1)...(19): siRNA sense strand
cugaggaugaagaugaaaa

SEQ ID NO: 2482904 - RNA, 19 nt, Homo sapiens
  misc_RNA (1)...(19): siRNA sense strand
aggugggacaggcgaggaa

SEQ ID NO: 2482905 - RNA, 19 nt, Homo sapiens
  misc_RNA (1)...(19): siRNA sense strand
cuuugaggacagugaggau

SEQ ID NO: 2482906 - RNA, 19 nt, Homo sapiens
  misc_RNA (1)...(19): siRNA sense strand
ccauggaggaugcucacaa

SEQ ID NO: 2482907 - RNA, 19 nt, Homo sapiens
  misc_RNA (1)...(19): siRNA sense strand
cagccagcgugaugaaaau

SEQ ID NO: 2482908 - RNA, 19 nt, Homo sapiens
  misc_RNA (1)...(19): siRNA sense strand
aggagaaagcugauguaaa

SEQ ID NO: 2482909 - RNA, 19 nt, Homo sapiens
  misc_RNA (1)...(19): siRNA sense strand
uguuaaaucaaguggagua

SEQ ID NO: 2482910 - RNA, 19 nt, Homo sapiens
  misc_RNA (1)...(19): siRNA sense strand
caguagacaauuugggaau

SEQ ID NO: 2482911 - RNA, 19 nt, Homo sapiens
  misc_RNA (1)...(19): siRNA sense strand
uggacaaagcuaagaaaga

SEQ ID NO: 2482912 - RNA, 19 nt, Homo sapiens
  misc_RNA (1)...(19): siRNA sense strand
aggaguguguauaaggaaa

SEQ ID NO: 2482913 - RNA, 19 nt, Homo sapiens
  misc_RNA (1)...(19): siRNA sense strand
ccaaaauaccugaugcaaa

SEQ ID NO: 2482914 - RNA, 19 nt, Homo sapiens
  misc_RNA (1)...(19): siRNA sense strand
cgggaagccaucagaguuu

SEQ ID NO: 2482915 - RNA, 19 nt, Homo sapiens
  misc_RNA (1)...(19): siRNA sense strand
guucacaguacguggaaaa

SEQ ID NO: 2482916 - RNA, 19 nt, Homo sapiens
  misc_RNA (1)...(19): siRNA sense strand
guuuacaagaauaggucua

SEQ ID NO: 2482917 - RNA, 19 nt, Homo sapiens
  misc_RNA (1)...(19): siRNA sense strand
cacagaggccacugagaaa

SEQ ID NO: 2482918 - RNA, 19 nt, Homo sapiens
  misc_RNA (1)...(19): siRNA sense strand
gcgcaaucgaguucgggaa

SEQ ID NO: 2482919 - RNA, 19 nt, Homo sapiens
  misc_RNA (1)...(19): siRNA sense strand
ccaaaucacuugugggguu

SEQ ID NO: 2482920 - RNA, 19 nt, Homo sapiens
  misc_RNA (1)...(19): siRNA sense strand
cgucacacuagcagccaaa

SEQ ID NO: 2482921 - RNA, 19 nt, Homo sapiens
  misc_RNA (1)...(19): siRNA sense strand
ggaguguguauaaggaaaa

SEQ ID NO: 2482922 - RNA, 19 nt, Homo sapiens
  misc_RNA (1)...(19): siRNA sense strand
aauaaacgccaccgggcaa

SEQ ID NO: 2482923 - RNA, 19 nt, Homo sapiens
  misc_RNA (1)...(19): siRNA sense strand
cuagacaauuacauggaga

SEQ ID NO: 2482924 - RNA, 19 nt, Homo sapiens
  misc_RNA (1)...(19): siRNA sense strand
gacaaagcuaagaaagaca

SEQ ID NO: 2482925 - RNA, 19 nt, Homo sapiens
  misc_RNA (1)...(19): siRNA sense strand
uggaaaauuugaugagcca

SEQ ID NO: 2482926 - RNA, 19 nt, Homo sapiens
  misc_RNA (1)...(19): siRNA sense strand
uuauaugccaguagacaau

SEQ ID NO: 2482927 - RNA, 19 nt, Homo sapiens
  misc_RNA (1)...(19): siRNA sense strand
ugagaaagcaaaacaagaa

SEQ ID NO: 2482928 - RNA, 19 nt, Homo sapiens
  misc_RNA (1)...(19): siRNA sense strand
agacagaagaaccucaaau

SEQ ID NO: 2482929 - RNA, 19 nt, Homo sapiens
  misc_RNA (1)...(19): siRNA sense strand
uacaagaccaucuggacaa

SEQ ID NO: 2482930 - RNA, 19 nt, Homo sapiens
  misc_RNA (1)...(19): siRNA sense strand
cuugaguuguaaggagaaa

SEQ ID NO: 2482931 - RNA, 19 nt, Homo sapiens
  misc_RNA (1)...(19): siRNA sense strand
ggaaaauuacuucggccaa

SEQ ID NO: 2482932 - RNA, 19 nt, Homo sapiens
  misc_RNA (1)...(19): siRNA sense strand
cuggaauucaagugacuau

SEQ ID NO: 2482933 - RNA, 19 nt, Homo sapiens
  misc_RNA (1)...(19): siRNA sense strand
uuuauaugccaguagacaa

SEQ ID NO: 2482934 - RNA, 19 nt, Homo sapiens
  misc_RNA (1)...(19): siRNA sense strand
ccaguagacaauuugggaa

SEQ ID NO: 2482935 - RNA, 19 nt, Homo sapiens
  misc_RNA (1)...(19): siRNA sense strand
acuugaagaccuggagcaa

SEQ ID NO: 2482936 - RNA, 19 nt, Homo sapiens
  misc_RNA (1)...(19): siRNA sense strand
gaauaaacgccaccgggca

SEQ ID NO: 2482937 - RNA, 19 nt, Homo sapiens
  misc_RNA (1)...(19): siRNA sense strand
gaaaaggcagggaaggauu

SEQ ID NO: 2482938 - RNA, 19 nt, Homo sapiens
  misc_RNA (1)...(19): siRNA sense strand
guuaaaucaaguggaguau

SEQ ID NO: 2482939 - RNA, 19 nt, Homo sapiens
  misc_RNA (1)...(19): siRNA sense strand
aggagaaagcugauguaaa

SEQ ID NO: 2482940 - RNA, 19 nt, Homo sapiens
  misc_RNA (1)...(19): siRNA sense strand
uguuaaaucaaguggagua

SEQ ID NO: 2482941 - RNA, 19 nt, Homo sapiens
  misc_RNA (1)...(19): siRNA sense strand
caguagacaauuugggaau

SEQ ID NO: 2482942 - RNA, 19 nt, Homo sapiens
  misc_RNA (1)...(19): siRNA sense strand
uggacaaagcuaagaaaga

SEQ ID NO: 2482943 - RNA, 19 nt, Homo sapiens
  misc_RNA (1)...(19): siRNA sense strand
aggaguguguauaaggaaa

SEQ ID NO: 2482944 - RNA, 19 nt, Homo sapiens
  misc_RNA (1)...(19): siRNA sense strand
ccaaaauaccugaugcaaa

SEQ ID NO: 2482945 - RNA, 19 nt, Homo sapiens
  misc_RNA (1)...(19): siRNA sense strand
cgggaagccaucagaguuu

SEQ ID NO: 2482946 - RNA, 19 nt, Homo sapiens
  misc_RNA (1)...(19): siRNA sense strand
guucacaguacguggaaaa

SEQ ID NO: 2482947 - RNA, 19 nt, Homo sapiens
  misc_RNA (1)...(19): siRNA sense strand
guuuacaagaauaggucua

SEQ ID NO: 2482948 - RNA, 19 nt, Homo sapiens
  misc_RNA (1)...(19): siRNA sense strand
cacagaggccacugagaaa

SEQ ID NO: 2482949 - RNA, 19 nt, Homo sapiens
  misc_RNA (1)...(19): siRNA sense strand
gcgcaaucgaguucgggaa

SEQ ID NO: 2482950 - RNA, 19 nt, Homo sapiens
  misc_RNA (1)...(19): siRNA sense strand
ccaaaucacuugugggguu

SEQ ID NO: 2482951 - RNA, 19 nt, Homo sapiens
  misc_RNA (1)...(19): siRNA sense strand
cgucacacuagcagccaaa

SEQ ID NO: 2482952 - RNA, 19 nt, Homo sapiens
  misc_RNA (1)...(19): siRNA sense strand
ggaguguguauaaggaaaa

SEQ ID NO: 2482953 - RNA, 19 nt, Homo sapiens
  misc_RNA (1)...(19): siRNA sense strand
aauaaacgccaccgggcaa

SEQ ID NO: 2482954 - RNA, 19 nt, Homo sapiens
  misc_RNA (1)...(19): siRNA sense strand
cuagacaauuacauggaga

SEQ ID NO: 2482955 - RNA, 19 nt, Homo sapiens
  misc_RNA (1)...(19): siRNA sense strand
gacaaagcuaagaaagaca

SEQ ID NO: 2482956 - RNA, 19 nt, Homo sapiens
  misc_RNA (1)...(19): siRNA sense strand
uggaaaauuugaugagcca

SEQ ID NO: 2482957 - RNA, 19 nt, Homo sapiens
  misc_RNA (1)...(19): siRNA sense strand
uuauaugccaguagacaau

SEQ ID NO: 2482958 - RNA, 19 nt, Homo sapiens
  misc_RNA (1)...(19): siRNA sense strand
ugagaaagcaaaacaagaa

SEQ ID NO: 2482959 - RNA, 19 nt, Homo sapiens
  misc_RNA (1)...(19): siRNA sense strand
agacagaagaaccucaaau

SEQ ID NO: 2482960 - RNA, 19 nt, Homo sapiens
  misc_RNA (1)...(19): siRNA sense strand
uacaagaccaucuggacaa

SEQ ID NO: 2482961 - RNA, 19 nt, Homo sapiens
  misc_RNA (1)...(19): siRNA sense strand
cuugaguuguaaggagaaa

SEQ ID NO: 2482962 - RNA, 19 nt, Homo sapiens
  misc_RNA (1)...(19): siRNA sense strand
ggaaaauuacuucggccaa

SEQ ID NO: 2482963 - RNA, 19 nt, Homo sapiens
  misc_RNA (1)...(19): siRNA sense strand
cuggaauucaagugacuau

SEQ ID NO: 2482964 - RNA, 19 nt, Homo sapiens
  misc_RNA (1)...(19): siRNA sense strand
uuuauaugccaguagacaa

SEQ ID NO: 2482965 - RNA, 19 nt, Homo sapiens
  misc_RNA (1)...(19): siRNA sense strand
ccaguagacaauuugggaa

SEQ ID NO: 2482966 - RNA, 19 nt, Homo sapiens
  misc_RNA (1)...(19): siRNA sense strand
acuugaagaccuggagcaa

SEQ ID NO: 2482967 - RNA, 19 nt, Homo sapiens
  misc_RNA (1)...(19): siRNA sense strand
gaauaaacgccaccgggca

SEQ ID NO: 2482968 - RNA, 19 nt, Homo sapiens
  misc_RNA (1)...(19): siRNA sense strand
gaaaaggcagggaaggauu

SEQ ID NO: 2482969 - RNA, 19 nt, Homo sapiens
  misc_RNA (1)...(19): siRNA sense strand
guuaaaucaaguggaguau

SEQ ID NO: 2482970 - RNA, 19 nt, Homo sapiens
  misc_RNA (1)...(19): siRNA sense strand
gggaagauagaaauggaga

SEQ ID NO: 2482971 - RNA, 19 nt, Homo sapiens
  misc_RNA (1)...(19): siRNA sense strand
aauggagggaagauagaaa

SEQ ID NO: 2482972 - RNA, 19 nt, Homo sapiens
  misc_RNA (1)...(19): siRNA sense strand
cagguuuaauagaugacaa

SEQ ID NO: 2482973 - RNA, 19 nt, Homo sapiens
  misc_RNA (1)...(19): siRNA sense strand
agaauggagggaagauaga

SEQ ID NO: 2482974 - RNA, 19 nt, Homo sapiens
  misc_RNA (1)...(19): siRNA sense strand
cagguuuaauagaugacaa

SEQ ID NO: 2482975 - RNA, 19 nt, Homo sapiens
  misc_RNA (1)...(19): siRNA sense strand
agagaaaguuaaaggugca

SEQ ID NO: 2482976 - RNA, 19 nt, Homo sapiens
  misc_RNA (1)...(19): siRNA sense strand
ggauuguggaaaagggaua

SEQ ID NO: 2482977 - RNA, 19 nt, Homo sapiens
  misc_RNA (1)...(19): siRNA sense strand
uugauaggauuguggaaaa

SEQ ID NO: 2482978 - RNA, 19 nt, Homo sapiens
  misc_RNA (1)...(19): siRNA sense strand
gauauuacagugagcgaga

SEQ ID NO: 2482979 - RNA, 19 nt, Homo sapiens
  misc_RNA (1)...(19): siRNA sense strand
gggcacaggcugagcugau

SEQ ID NO: 2482980 - RNA, 19 nt, Homo sapiens
  misc_RNA (1)...(19): siRNA sense strand
uaaagaaaacaguggacaa

SEQ ID NO: 2482981 - RNA, 19 nt, Homo sapiens
  misc_RNA (1)...(19): siRNA sense strand
uauuccagaaggagagaaa

SEQ ID NO: 2482982 - RNA, 19 nt, Homo sapiens
  misc_RNA (1)...(19): siRNA sense strand
ugaaauucuuagagguugu

SEQ ID NO: 2482983 - RNA, 19 nt, Homo sapiens
  misc_RNA (1)...(19): siRNA sense strand
cugcagaugccguuaaaca

SEQ ID NO: 2482984 - RNA, 19 nt, Homo sapiens
  misc_RNA (1)...(19): siRNA sense strand
ucucuaaaauuguggaaca

SEQ ID NO: 2482985 - RNA, 19 nt, Homo sapiens
  misc_RNA (1)...(19): siRNA sense strand
caguggaggaugggauaaa

SEQ ID NO: 2482986 - RNA, 19 nt, Homo sapiens
  misc_RNA (1)...(19): siRNA sense strand
gggauauuacagugagcga

SEQ ID NO: 2482987 - RNA, 19 nt, Homo sapiens
  misc_RNA (1)...(19): siRNA sense strand
agagaaaauucaaggcgau

SEQ ID NO: 2482988 - RNA, 19 nt, Homo sapiens
  misc_RNA (1)...(19): siRNA sense strand
gugcagauauaaaugcuga

SEQ ID NO: 2482989 - RNA, 19 nt, Homo sapiens
  misc_RNA (1)...(19): siRNA sense strand
gcgauuucuucgaggugga

SEQ ID NO: 2482990 - RNA, 19 nt, Homo sapiens
  misc_RNA (1)...(19): siRNA sense strand
cucucaaaguguuaaagaa

SEQ ID NO: 2482991 - RNA, 19 nt, Homo sapiens
  misc_RNA (1)...(19): siRNA sense strand
gggcccaagccgcaguuaa

SEQ ID NO: 2482992 - RNA, 19 nt, Homo sapiens
  misc_RNA (1)...(19): siRNA sense strand
acauguggucuguaggaau

SEQ ID NO: 2482993 - RNA, 19 nt, Homo sapiens
  misc_RNA (1)...(19): siRNA sense strand
cucuaaaugccaaggacuu

SEQ ID NO: 2482994 - RNA, 19 nt, Homo sapiens
  misc_RNA (1)...(19): siRNA sense strand
gagagaaaauucaaggcga

SEQ ID NO: 2482995 - RNA, 19 nt, Homo sapiens
  misc_RNA (1)...(19): siRNA sense strand
aggcaguggaggaugggau

SEQ ID NO: 2482996 - RNA, 19 nt, Homo sapiens
  misc_RNA (1)...(19): siRNA sense strand
uuugaaaccccuacagaaa

SEQ ID NO: 2482997 - RNA, 19 nt, Homo sapiens
  misc_RNA (1)...(19): siRNA sense strand
acucgucacaggaggagaa

SEQ ID NO: 2482998 - RNA, 19 nt, Homo sapiens
  misc_RNA (1)...(19): siRNA sense strand
gauccaaagaaacggcuga

SEQ ID NO: 2482999 - RNA, 19 nt, Homo sapiens
  misc_RNA (1)...(19): siRNA sense strand
cuaaaauuguggaacauca

SEQ ID NO: 2483000 - RNA, 19 nt, Homo sapiens
  misc_RNA (1)...(19): siRNA sense strand
cgucacaggaggagaacug

SEQ ID NO: 2483001 - RNA, 19 nt, Homo sapiens
  misc_RNA (1)...(19): siRNA sense strand
augaagacaguauguggaa

SEQ ID NO: 2483002 - RNA, 19 nt, Homo sapiens
  misc_RNA (1)...(19): siRNA sense strand
gcagcauccaggagagcca

SEQ ID NO: 2483003 - RNA, 19 nt, Homo sapiens
  misc_RNA (1)...(19): siRNA sense strand
uggaagaauucaaggacca

SEQ ID NO: 2483004 - RNA, 19 nt, Homo sapiens
  misc_RNA (1)...(19): siRNA sense strand
caagagugacauaggagaa

SEQ ID NO: 2483005 - RNA, 19 nt, Homo sapiens
  misc_RNA (1)...(19): siRNA sense strand
ugauuuaggugguggaacu

SEQ ID NO: 2483006 - RNA, 19 nt, Homo sapiens
  misc_RNA (1)...(19): siRNA sense strand
ggucaaacgcaaguggaaa

SEQ ID NO: 2483007 - RNA, 19 nt, Homo sapiens
  misc_RNA (1)...(19): siRNA sense strand
ugccuauggucuagacaaa

SEQ ID NO: 2483008 - RNA, 19 nt, Homo sapiens
  misc_RNA (1)...(19): siRNA sense strand
acaacaaacuccuuggaca

SEQ ID NO: 2483009 - RNA, 19 nt, Homo sapiens
  misc_RNA (1)...(19): siRNA sense strand
aaggaguauuugaggugaa

SEQ ID NO: 2483010 - RNA, 19 nt, Homo sapiens
  misc_RNA (1)...(19): siRNA sense strand
agauaaaggcacaggacgu

SEQ ID NO: 2483011 - RNA, 19 nt, Homo sapiens
  misc_RNA (1)...(19): siRNA sense strand
uagacaaaucagaagacaa

SEQ ID NO: 2483012 - RNA, 19 nt, Homo sapiens
  misc_RNA (1)...(19): siRNA sense strand
cugaagaagaccggcgaaa

SEQ ID NO: 2483013 - RNA, 19 nt, Homo sapiens
  misc_RNA (1)...(19): siRNA sense strand
aguacauguuucugcuaaa

SEQ ID NO: 2483014 - RNA, 19 nt, Homo sapiens
  misc_RNA (1)...(19): siRNA sense strand
ugcuaaagauaaaggcaca

SEQ ID NO: 2483015 - RNA, 19 nt, Homo sapiens
  misc_RNA (1)...(19): siRNA sense strand
aguuauggaagguaaacaa

SEQ ID NO: 2483016 - RNA, 19 nt, Homo sapiens
  misc_RNA (1)...(19): siRNA sense strand
uuaauauggcugaaggaau

SEQ ID NO: 2483017 - RNA, 19 nt, Homo sapiens
  misc_RNA (1)...(19): siRNA sense strand
ggaacaaaaggaagaucaa

SEQ ID NO: 2483018 - RNA, 19 nt, Homo sapiens
  misc_RNA (1)...(19): siRNA sense strand
aaagagagauggcuggaga

SEQ ID NO: 2483019 - RNA, 19 nt, Homo sapiens
  misc_RNA (1)...(19): siRNA sense strand
auaugaugauccugaagua

SEQ ID NO: 2483020 - RNA, 19 nt, Homo sapiens
  misc_RNA (1)...(19): siRNA sense strand
gucaaacgcaaguggaaau

SEQ ID NO: 2483021 - RNA, 19 nt, Homo sapiens
  misc_RNA (1)...(19): siRNA sense strand
uggcagagccccaaguaaa

SEQ ID NO: 2483022 - RNA, 19 nt, Homo sapiens
  misc_RNA (1)...(19): siRNA sense strand
ggauuaugcaucagaagca

SEQ ID NO: 2483023 - RNA, 19 nt, Homo sapiens
  misc_RNA (1)...(19): siRNA sense strand
gcacaggacgugagcagca

SEQ ID NO: 2483024 - RNA, 19 nt, Homo sapiens
  misc_RNA (1)...(19): siRNA sense strand
ccaagauggaagaauucaa

SEQ ID NO: 2483025 - RNA, 19 nt, Homo sapiens
  misc_RNA (1)...(19): siRNA sense strand
guucgaaauggcauacaaa

SEQ ID NO: 2483026 - RNA, 19 nt, Homo sapiens
  misc_RNA (1)...(19): siRNA sense strand
cagaagucagcaagaguga

SEQ ID NO: 2483027 - RNA, 19 nt, Homo sapiens
  misc_RNA (1)...(19): siRNA sense strand
gcucaugggaaauuguauu

SEQ ID NO: 2483028 - RNA, 19 nt, Homo sapiens
  misc_RNA (1)...(19): siRNA sense strand
uugaugaagaugaaagaga

SEQ ID NO: 2483029 - RNA, 19 nt, Homo sapiens
  misc_RNA (1)...(19): siRNA sense strand
ucaaugacucgcagagaca

SEQ ID NO: 2483030 - RNA, 19 nt, Homo sapiens
  misc_RNA (1)...(19): siRNA sense strand
ugucagggugaaagagaga

SEQ ID NO: 2483031 - RNA, 19 nt, Homo sapiens
  misc_RNA (1)...(19): siRNA sense strand
uggauuaagcaaagaugau

SEQ ID NO: 2483032 - RNA, 19 nt, Homo sapiens
  misc_RNA (1)...(19): siRNA sense strand
cugaugaggcuguggccau

SEQ ID NO: 2483033 - RNA, 19 nt, Homo sapiens
  misc_RNA (1)...(19): siRNA sense strand
cagcagauggugagcgacu

SEQ ID NO: 2483034 - RNA, 19 nt, Homo sapiens
  misc_RNA (1)...(19): siRNA sense strand
uggucaaacgcaaguggaa

SEQ ID NO: 2483035 - RNA, 19 nt, Homo sapiens
  misc_RNA (1)...(19): siRNA sense strand
cauuugacauugaugccaa

SEQ ID NO: 2483036 - RNA, 19 nt, Homo sapiens
  misc_RNA (1)...(19): siRNA sense strand
caagcugaaagaagagauu

SEQ ID NO: 2483037 - RNA, 19 nt, Homo sapiens
  misc_RNA (1)...(19): siRNA sense strand
aagaucaaaaggaggaaaa

SEQ ID NO: 2483038 - RNA, 19 nt, Homo sapiens
  misc_RNA (1)...(19): siRNA sense strand
ggcaguuauggaagguaaa

SEQ ID NO: 2483039 - RNA, 19 nt, Homo sapiens
  misc_RNA (1)...(19): siRNA sense strand
ccugaaguacagaaagaca

SEQ ID NO: 2483040 - RNA, 19 nt, Homo sapiens
  misc_RNA (1)...(19): siRNA sense strand
aaggaguucaagagagaga

SEQ ID NO: 2483041 - RNA, 19 nt, Homo sapiens
  misc_RNA (1)...(19): siRNA sense strand
cagagaaauaugcugaaga

SEQ ID NO: 2483042 - RNA, 19 nt, Homo sapiens
  misc_RNA (1)...(19): siRNA sense strand
cagaaaccaagauggaaga

SEQ ID NO: 2483043 - RNA, 19 nt, Homo sapiens
  misc_RNA (1)...(19): siRNA sense strand
gcaagagugacauaggaga

SEQ ID NO: 2483044 - RNA, 19 nt, Homo sapiens
  misc_RNA (1)...(19): siRNA sense strand
caacaaacuccuuggacag

SEQ ID NO: 2483045 - RNA, 19 nt, Homo sapiens
  misc_RNA (1)...(19): siRNA sense strand
cgugagcagcagauuguaa

SEQ ID NO: 2483046 - RNA, 19 nt, Homo sapiens
  misc_RNA (1)...(19): siRNA sense strand
aggaguauuugaggugaaa

SEQ ID NO: 2483047 - RNA, 19 nt, Homo sapiens
  misc_RNA (1)...(19): siRNA sense strand
cugaaugugcuucggguga

SEQ ID NO: 2483048 - RNA, 19 nt, Homo sapiens
  misc_RNA (1)...(19): siRNA sense strand
gcgaaagaaggaacgaguu

SEQ ID NO: 2483049 - RNA, 19 nt, Homo sapiens
  misc_RNA (1)...(19): siRNA sense strand
auccugaaguacagaaaga

SEQ ID NO: 2483050 - RNA, 19 nt, Homo sapiens
  misc_RNA (1)...(19): siRNA sense strand
augaaagagacugcagaaa

SEQ ID NO: 2483051 - RNA, 19 nt, Homo sapiens
  misc_RNA (1)...(19): siRNA sense strand
agggauugucacugaucua

SEQ ID NO: 2483052 - RNA, 19 nt, Homo sapiens
  misc_RNA (1)...(19): siRNA sense strand
uggaaauuaaaguguguca

SEQ ID NO: 2483053 - RNA, 19 nt, Homo sapiens
  misc_RNA (1)...(19): siRNA sense strand
gugagcgacuuguuggaau

SEQ ID NO: 2483054 - RNA, 19 nt, Homo sapiens
  misc_RNA (1)...(19): siRNA sense strand
ugaaguacagaaagacauu

SEQ ID NO: 2483055 - RNA, 19 nt, Homo sapiens
  misc_RNA (1)...(19): siRNA sense strand
gaugaagaugaaagagacu

SEQ ID NO: 2483056 - RNA, 19 nt, Homo sapiens
  misc_RNA (1)...(19): siRNA sense strand
ggaguucaagagagagaca

SEQ ID NO: 2483057 - RNA, 19 nt, Homo sapiens
  misc_RNA (1)...(19): siRNA sense strand
uauugaaacucuaggaggu

SEQ ID NO: 2483058 - RNA, 19 nt, Homo sapiens
  misc_RNA (1)...(19): siRNA sense strand
agaaaauauuagacaggca

SEQ ID NO: 2483059 - RNA, 19 nt, Homo sapiens
  misc_RNA (1)...(19): siRNA sense strand
cugaaguacagaaagacau

SEQ ID NO: 2483060 - RNA, 19 nt, Homo sapiens
  misc_RNA (1)...(19): siRNA sense strand
aaucagaagacaaagucau

SEQ ID NO: 2483061 - RNA, 19 nt, Homo sapiens
  misc_RNA (1)...(19): siRNA sense strand
gagacgaagaagagaggaa

SEQ ID NO: 2483062 - RNA, 19 nt, Homo sapiens
  misc_RNA (1)...(19): siRNA sense strand
gaagagaggaagagggcau

SEQ ID NO: 2483063 - RNA, 19 nt, Homo sapiens
  misc_RNA (1)...(19): siRNA sense strand
uuggagagcaagagggcaa

SEQ ID NO: 2483064 - RNA, 19 nt, Homo sapiens
  misc_RNA (1)...(19): siRNA sense strand
acgagaaccaggagaucua

SEQ ID NO: 2483065 - RNA, 19 nt, Homo sapiens
  misc_RNA (1)...(19): siRNA sense strand
ccugaagaaaugagacgaa

SEQ ID NO: 2483066 - RNA, 19 nt, Homo sapiens
  misc_RNA (1)...(19): siRNA sense strand
gaagcagaagcgagagcaa

SEQ ID NO: 2483067 - RNA, 19 nt, Homo sapiens
  misc_RNA (1)...(19): siRNA sense strand
cccugagagccguggguaa

SEQ ID NO: 2483068 - RNA, 19 nt, Homo sapiens
  misc_RNA (1)...(19): siRNA sense strand
cucuaaacccugaagaaau

SEQ ID NO: 2483069 - RNA, 19 nt, Homo sapiens
  misc_RNA (1)...(19): siRNA sense strand
auucagacuuugaggaugu

SEQ ID NO: 2483070 - RNA, 19 nt, Homo sapiens
  misc_RNA (1)...(19): siRNA sense strand
ugaagaaaugagacgaaga

SEQ ID NO: 2483071 - RNA, 19 nt, Homo sapiens
  misc_RNA (1)...(19): siRNA sense strand
aaggaagcuugcuggacua

SEQ ID NO: 2483072 - RNA, 19 nt, Homo sapiens
  misc_RNA (1)...(19): siRNA sense strand
ugaagagcuauaagaacaa

SEQ ID NO: 2483073 - RNA, 19 nt, Homo sapiens
  misc_RNA (1)...(19): siRNA sense strand
cuauaagaacaaugcucua

SEQ ID NO: 2483074 - RNA, 19 nt, Homo sapiens
  misc_RNA (1)...(19): siRNA sense strand
gggaaacauagcuggagau

SEQ ID NO: 2483075 - RNA, 19 nt, Homo sapiens
  misc_RNA (1)...(19): siRNA sense strand
aaaucucugccgagggaaa

SEQ ID NO: 2483076 - RNA, 19 nt, Homo sapiens
  misc_RNA (1)...(19): siRNA sense strand
gaacaaugcucuaaacccu

SEQ ID NO: 2483077 - RNA, 19 nt, Homo sapiens
  misc_RNA (1)...(19): siRNA sense strand
ccugcggcuuggagagcaa

SEQ ID NO: 2483078 - RNA, 19 nt, Homo sapiens
  misc_RNA (1)...(19): siRNA sense strand
ucugaagaggaaugagaau

SEQ ID NO: 2483079 - RNA, 19 nt, Homo sapiens
  misc_RNA (1)...(19): siRNA sense strand
aggaaugagaauuguacau

SEQ ID NO: 2483080 - RNA, 19 nt, Homo sapiens
  misc_RNA (1)...(19): siRNA sense strand
ugggaaacauagcuggaga

SEQ ID NO: 2483081 - RNA, 19 nt, Homo sapiens
  misc_RNA (1)...(19): siRNA sense strand
ccuucagaaagcagaguuu

SEQ ID NO: 2483082 - RNA, 19 nt, Homo sapiens
  misc_RNA (1)...(19): siRNA sense strand
gacgaagaagagaggaaga

SEQ ID NO: 2483083 - RNA, 19 nt, Homo sapiens
  misc_RNA (1)...(19): siRNA sense strand
gagagaugguggagaugcu

SEQ ID NO: 2483084 - RNA, 19 nt, Homo sapiens
  misc_RNA (1)...(19): siRNA sense strand
gaaggaagcuugcuggacu

SEQ ID NO: 2483085 - RNA, 19 nt, Homo sapiens
  misc_RNA (1)...(19): siRNA sense strand
caagagugguggaucgguu

SEQ ID NO: 2483086 - RNA, 19 nt, Homo sapiens
  misc_RNA (1)...(19): siRNA sense strand
ccacacagaaauuccggaa

SEQ ID NO: 2483087 - RNA, 19 nt, Homo sapiens
  misc_RNA (1)...(19): siRNA sense strand
cuuugaggauguucaggaa

SEQ ID NO: 2483088 - RNA, 19 nt, Homo sapiens
  misc_RNA (1)...(19): siRNA sense strand
ggagauugguagagcugcu

SEQ ID NO: 2483089 - RNA, 19 nt, Homo sapiens
  misc_RNA (1)...(19): siRNA sense strand
ccaagucgaugaaacgcaa

SEQ ID NO: 2483090 - RNA, 19 nt, Homo sapiens
  misc_RNA (1)...(19): siRNA sense strand
ccaaggagucaauccggaa

SEQ ID NO: 2483091 - RNA, 19 nt, Homo sapiens
  misc_RNA (1)...(19): siRNA sense strand
aggcuguuauagaugcaaa

SEQ ID NO: 2483092 - RNA, 19 nt, Homo sapiens
  misc_RNA (1)...(19): siRNA sense strand
cuguaauggauucgaagau

SEQ ID NO: 2483093 - RNA, 19 nt, Homo sapiens
  misc_RNA (1)...(19): siRNA sense strand
cauggcgagcccagggaaa

SEQ ID NO: 2483094 - RNA, 19 nt, Homo sapiens
  misc_RNA (1)...(19): siRNA sense strand
augagaagauccaggcagu

SEQ ID NO: 2483095 - RNA, 19 nt, Homo sapiens
  misc_RNA (1)...(19): siRNA sense strand
agcagaagcgagagcaaca

SEQ ID NO: 2483096 - RNA, 19 nt, Homo sapiens
  misc_RNA (1)...(19): siRNA sense strand
cugaagaggaaugagaauu

SEQ ID NO: 2483097 - RNA, 19 nt, Homo sapiens
  misc_RNA (1)...(19): siRNA sense strand
guguagaagacgaugauag

SEQ ID NO: 2483098 - RNA, 19 nt, Homo sapiens
  misc_RNA (1)...(19): siRNA sense strand
gcugauuaaugaagaagcu

SEQ ID NO: 2483099 - RNA, 19 nt, Homo sapiens
  misc_RNA (1)...(19): siRNA sense strand
cagucugggcccugucaaa

SEQ ID NO: 2483100 - RNA, 19 nt, Homo sapiens
  misc_RNA (1)...(19): siRNA sense strand
aaauauuacugcuggcaac

SEQ ID NO: 2483101 - RNA, 19 nt, Homo sapiens
  misc_RNA (1)...(19): siRNA sense strand
ucacaagagagauggugga

SEQ ID NO: 2483102 - RNA, 19 nt, Homo sapiens
  misc_RNA (1)...(19): siRNA sense strand
auuaucgaaugaagagcua

SEQ ID NO: 2483103 - RNA, 19 nt, Homo sapiens
  misc_RNA (1)...(19): siRNA sense strand
augaagagcuugagcacca

SEQ ID NO: 2483104 - RNA, 19 nt, Homo sapiens
  misc_RNA (1)...(19): siRNA sense strand
gcuuauggaagaagaacca

SEQ ID NO: 2483105 - RNA, 19 nt, Homo sapiens
  misc_RNA (1)...(19): siRNA sense strand
gcuugagcaccaugacaua

SEQ ID NO: 2483106 - RNA, 19 nt, Homo sapiens
  misc_RNA (1)...(19): siRNA sense strand
gauaaagaaauuucgggau

SEQ ID NO: 2483107 - RNA, 19 nt, Homo sapiens
  misc_RNA (1)...(19): siRNA sense strand
auaaagaaauuucgggaug

SEQ ID NO: 2483108 - RNA, 19 nt, Homo sapiens
  misc_RNA (1)...(19): siRNA sense strand
ggacgcugauggaggagga

SEQ ID NO: 2483109 - RNA, 19 nt, Homo sapiens
  misc_RNA (1)...(19): siRNA sense strand
aggcgaauauggagcaaac

SEQ ID NO: 2483110 - RNA, 19 nt, Homo sapiens
  misc_RNA (1)...(19): siRNA sense strand
gguggaucaugcaggcgaa

SEQ ID NO: 2483111 - RNA, 19 nt, Homo sapiens
  misc_RNA (1)...(19): siRNA sense strand
uggcgguggaagagagcau

SEQ ID NO: 2483112 - RNA, 19 nt, Homo sapiens
  misc_RNA (1)...(19): siRNA sense strand
agacaauaucagucgggca

SEQ ID NO: 2483113 - RNA, 19 nt, Homo sapiens
  misc_RNA (1)...(19): siRNA sense strand
ggaugaagagcuugagcac

SEQ ID NO: 2483114 - RNA, 19 nt, Homo sapiens
  misc_RNA (1)...(19): siRNA sense strand
cgggccagucauucagaaa

SEQ ID NO: 2483115 - RNA, 19 nt, Homo sapiens
  misc_RNA (1)...(19): siRNA sense strand
ggccagucauucagaaaau

SEQ ID NO: 2483116 - RNA, 19 nt, Homo sapiens
  misc_RNA (1)...(19): siRNA sense strand
caacaguucugaugcccuu

SEQ ID NO: 2483117 - RNA, 19 nt, Homo sapiens
  misc_RNA (1)...(19): siRNA sense strand
acaaagacucaguggaaaa

SEQ ID NO: 2483118 - RNA, 19 nt, Homo sapiens
  misc_RNA (1)...(19): siRNA sense strand
ugaaggagcuggugagccu

SEQ ID NO: 2483119 - RNA, 19 nt, Homo sapiens
  misc_RNA (1)...(19): siRNA sense strand
augcagaagcggaagcaca

SEQ ID NO: 2483120 - RNA, 19 nt, Homo sapiens
  misc_RNA (1)...(19): siRNA sense strand
ugucacugcccaaggagaa

SEQ ID NO: 2483121 - RNA, 19 nt, Homo sapiens
  misc_RNA (1)...(19): siRNA sense strand
gugugaacagugaggagau

SEQ ID NO: 2483122 - RNA, 19 nt, Homo sapiens
  misc_RNA (1)...(19): siRNA sense strand
cugcaugcugggugccaua

SEQ ID NO: 2483123 - RNA, 19 nt, Homo sapiens
  misc_RNA (1)...(19): siRNA sense strand
ccaaagauaaugaugucca

SEQ ID NO: 2483124 - RNA, 19 nt, Homo sapiens
  misc_RNA (1)...(19): siRNA sense strand
ccaugacaucugagcucua

SEQ ID NO: 2483125 - RNA, 19 nt, Homo sapiens
  misc_RNA (1)...(19): siRNA sense strand
cgaaguaccucccgcagca

SEQ ID NO: 2483126 - RNA, 19 nt, Homo sapiens
  misc_RNA (1)...(19): siRNA sense strand
cugugaaauuaaaggaaga

SEQ ID NO: 2483127 - RNA, 19 nt, Homo sapiens
  misc_RNA (1)...(19): siRNA sense strand
aagcgaaugcagagagguu

SEQ ID NO: 2483128 - RNA, 19 nt, Homo sapiens
  misc_RNA (1)...(19): siRNA sense strand
ucgacuuggacuagaaauu

SEQ ID NO: 2483129 - RNA, 19 nt, Homo sapiens
  misc_RNA (1)...(19): siRNA sense strand
cuaauaaagcgaaugcaga

SEQ ID NO: 2483130 - RNA, 19 nt, Homo sapiens
  misc_RNA (1)...(19): siRNA sense strand
gggacuaugaagugucaga

SEQ ID NO: 2483131 - RNA, 19 nt, Homo sapiens
  misc_RNA (1)...(19): siRNA sense strand
auuaaaggaagaagaacga

SEQ ID NO: 2483132 - RNA, 19 nt, Homo sapiens
  misc_RNA (1)...(19): siRNA sense strand
agaaaagcugucugugaaa

SEQ ID NO: 2483133 - RNA, 19 nt, Homo sapiens
  misc_RNA (1)...(19): siRNA sense strand
ucuugagggccuagcagaa

SEQ ID NO: 2483134 - RNA, 19 nt, Homo sapiens
  misc_RNA (1)...(19): siRNA sense strand
ccuacaaggauuccaucaa

SEQ ID NO: 2483135 - RNA, 19 nt, Homo sapiens
  misc_RNA (1)...(19): siRNA sense strand
gagaauguaaggaagacca

SEQ ID NO: 2483136 - RNA, 19 nt, Homo sapiens
  misc_RNA (1)...(19): siRNA sense strand
uugaaaaggcugcagaaau

SEQ ID NO: 2483137 - RNA, 19 nt, Homo sapiens
  misc_RNA (1)...(19): siRNA sense strand
agaauguaaggaagaccaa

SEQ ID NO: 2483138 - RNA, 19 nt, Homo sapiens
  misc_RNA (1)...(19): siRNA sense strand
auggcgggacuaagagaua

SEQ ID NO: 2483139 - RNA, 19 nt, Homo sapiens
  misc_RNA (1)...(19): siRNA sense strand
aagcaagggacuaugaagu

SEQ ID NO: 2483140 - RNA, 19 nt, Homo sapiens
  misc_RNA (1)...(19): siRNA sense strand
uucaagagaauguaaggaa

SEQ ID NO: 2483141 - RNA, 19 nt, Homo sapiens
  misc_RNA (1)...(19): siRNA sense strand
uaagaaugguuguggccaa

SEQ ID NO: 2483142 - RNA, 19 nt, Homo sapiens
  misc_RNA (1)...(19): siRNA sense strand
aggauucagcauagagaaa

SEQ ID NO: 2483143 - RNA, 19 nt, Homo sapiens
  misc_RNA (1)...(19): siRNA sense strand
cauugauaguagugauaga

SEQ ID NO: 2483144 - RNA, 19 nt, Homo sapiens
  misc_RNA (1)...(19): siRNA sense strand
ccauaaaaggagaaggcuu

SEQ ID NO: 2483145 - RNA, 19 nt, Homo sapiens
  misc_RNA (1)...(19): siRNA sense strand
caacaauaggauucagcau

SEQ ID NO: 2483146 - RNA, 19 nt, Homo sapiens
  misc_RNA (1)...(19): siRNA sense strand
gcaagaagguguagacugg

SEQ ID NO: 2483147 - RNA, 19 nt, Homo sapiens
  misc_RNA (1)...(19): siRNA sense strand
gucaaggaagauacagaaa

SEQ ID NO: 2483148 - RNA, 19 nt, Homo sapiens
  misc_RNA (1)...(19): siRNA sense strand
cuauuauaaagaaggccaa

SEQ ID NO: 2483149 - RNA, 19 nt, Homo sapiens
  misc_RNA (1)...(19): siRNA sense strand
aaggagaaggcuugcaaga

SEQ ID NO: 2483150 - RNA, 19 nt, Homo sapiens
  misc_RNA (1)...(19): siRNA sense strand
gugccuugggcuagauaau

SEQ ID NO: 2483151 - RNA, 19 nt, Homo sapiens
  misc_RNA (1)...(19): siRNA sense strand
aggucaaggaagauacaga

SEQ ID NO: 2483152 - RNA, 19 nt, Homo sapiens
  misc_RNA (1)...(19): siRNA sense strand
ugucauugauaguagugau

SEQ ID NO: 2483153 - RNA, 19 nt, Homo sapiens
  misc_RNA (1)...(19): siRNA sense strand
uaagaaugguuguggccaa

SEQ ID NO: 2483154 - RNA, 19 nt, Homo sapiens
  misc_RNA (1)...(19): siRNA sense strand
aggauucagcauagagaaa

SEQ ID NO: 2483155 - RNA, 19 nt, Homo sapiens
  misc_RNA (1)...(19): siRNA sense strand
cauugauaguagugauaga

SEQ ID NO: 2483156 - RNA, 19 nt, Homo sapiens
  misc_RNA (1)...(19): siRNA sense strand
ccauaaaaggagaaggcuu

SEQ ID NO: 2483157 - RNA, 19 nt, Homo sapiens
  misc_RNA (1)...(19): siRNA sense strand
caacaauaggauucagcau

SEQ ID NO: 2483158 - RNA, 19 nt, Homo sapiens
  misc_RNA (1)...(19): siRNA sense strand
gcaagaagguguagacugg

SEQ ID NO: 2483159 - RNA, 19 nt, Homo sapiens
  misc_RNA (1)...(19): siRNA sense strand
gucaaggaagauacagaaa

SEQ ID NO: 2483160 - RNA, 19 nt, Homo sapiens
  misc_RNA (1)...(19): siRNA sense strand
cuauuauaaagaaggccaa

SEQ ID NO: 2483161 - RNA, 19 nt, Homo sapiens
  misc_RNA (1)...(19): siRNA sense strand
aaggagaaggcuugcaaga

SEQ ID NO: 2483162 - RNA, 19 nt, Homo sapiens
  misc_RNA (1)...(19): siRNA sense strand
gugccuugggcuagauaau

SEQ ID NO: 2483163 - RNA, 19 nt, Homo sapiens
  misc_RNA (1)...(19): siRNA sense strand
aggucaaggaagauacaga

SEQ ID NO: 2483164 - RNA, 19 nt, Homo sapiens
  misc_RNA (1)...(19): siRNA sense strand
ugucauugauaguagugau

SEQ ID NO: 2483165 - RNA, 19 nt, Homo sapiens
  misc_RNA (1)...(19): siRNA sense strand
gcaugauggagcugaccaa

SEQ ID NO: 2483166 - RNA, 19 nt, Homo sapiens
  misc_RNA (1)...(19): siRNA sense strand
gcuucaagaacgagaugga

SEQ ID NO: 2483167 - RNA, 19 nt, Homo sapiens
  misc_RNA (1)...(19): siRNA sense strand
ccggcaagcgcgaguucua

SEQ ID NO: 2483168 - RNA, 19 nt, Homo sapiens
  misc_RNA (1)...(19): siRNA sense strand
gcaagagccaccugagcga

SEQ ID NO: 2483169 - RNA, 19 nt, Homo sapiens
  misc_RNA (1)...(19): siRNA sense strand
ccaucugcuucaagaacga

SEQ ID NO: 2483170 - RNA, 19 nt, Homo sapiens
  misc_RNA (1)...(19): siRNA sense strand
cguccguggucaugugcau

SEQ ID NO: 2483171 - RNA, 19 nt, Homo sapiens
  misc_RNA (1)...(19): siRNA sense strand
ggugaauucuucugggcau

SEQ ID NO: 2483172 - RNA, 19 nt, Homo sapiens
  misc_RNA (1)...(19): siRNA sense strand
uggacguggaugagaagaa

SEQ ID NO: 2483173 - RNA, 19 nt, Homo sapiens
  misc_RNA (1)...(19): siRNA sense strand
guggaaugugucagaauau

SEQ ID NO: 2483174 - RNA, 19 nt, Homo sapiens
  misc_RNA (1)...(19): siRNA sense strand
cggugaucgugcugcagua

SEQ ID NO: 2483175 - RNA, 19 nt, Homo sapiens
  misc_RNA (1)...(19): siRNA sense strand
cccaaguggaccagaguca

SEQ ID NO: 2483176 - RNA, 19 nt, Homo sapiens
  misc_RNA (1)...(19): siRNA sense strand
caguggaaugugucagaau

SEQ ID NO: 2483177 - RNA, 19 nt, Homo sapiens
  misc_RNA (1)...(19): siRNA sense strand
uuuacaaggagcuggucaa

SEQ ID NO: 2483178 - RNA, 19 nt, Homo sapiens
  misc_RNA (1)...(19): siRNA sense strand
ggcagauaucaguggcuau

SEQ ID NO: 2483179 - RNA, 19 nt, Homo sapiens
  misc_RNA (1)...(19): siRNA sense strand
caagaggagugaaagguuc

SEQ ID NO: 2483180 - RNA, 19 nt, Homo sapiens
  misc_RNA (1)...(19): siRNA sense strand
aggccgaagugcagagcaa

SEQ ID NO: 2483181 - RNA, 19 nt, Homo sapiens
  misc_RNA (1)...(19): siRNA sense strand
agaagaaggcggagcacca

SEQ ID NO: 2483182 - RNA, 19 nt, Homo sapiens
  misc_RNA (1)...(19): siRNA sense strand
cugaacaacugcugcguga

SEQ ID NO: 2483183 - RNA, 19 nt, Homo sapiens
  misc_RNA (1)...(19): siRNA sense strand
cgaucaggauggagaauuc

SEQ ID NO: 2483184 - RNA, 19 nt, Homo sapiens
  misc_RNA (1)...(19): siRNA sense strand
aggccaagucucugcuuaa

SEQ ID NO: 2483185 - RNA, 19 nt, Homo sapiens
  misc_RNA (1)...(19): siRNA sense strand
agaaguuggccgagaucau

SEQ ID NO: 2483186 - RNA, 19 nt, Homo sapiens
  misc_RNA (1)...(19): siRNA sense strand
uguugauggauaugugaaa

SEQ ID NO: 2483187 - RNA, 19 nt, Homo sapiens
  misc_RNA (1)...(19): siRNA sense strand
gggugauggagguguugaa

SEQ ID NO: 2483188 - RNA, 19 nt, Homo sapiens
  misc_RNA (1)...(19): siRNA sense strand
gcuacugugcugugggaca

SEQ ID NO: 2483189 - RNA, 19 nt, Homo sapiens
  misc_RNA (1)...(19): siRNA sense strand
aguccgugacagaggagaa

SEQ ID NO: 2483190 - RNA, 19 nt, Homo sapiens
  misc_RNA (1)...(19): siRNA sense strand
ugaauaagcaacaggccca

SEQ ID NO: 2483191 - RNA, 19 nt, Homo sapiens
  misc_RNA (1)...(19): siRNA sense strand
ggaccuucuuguugcgcuu

SEQ ID NO: 2483192 - RNA, 19 nt, Homo sapiens
  misc_RNA (1)...(19): siRNA sense strand
uggcagaaccggcagcaga

SEQ ID NO: 2483193 - RNA, 19 nt, Homo sapiens
  misc_RNA (1)...(19): siRNA sense strand
cccaguggauugagagcca

SEQ ID NO: 2483194 - RNA, 19 nt, Homo sapiens
  misc_RNA (1)...(19): siRNA sense strand
gguugcagcgugaggcaca

SEQ ID NO: 2483195 - RNA, 19 nt, Homo sapiens
  misc_RNA (1)...(19): siRNA sense strand
ucagugagcagcaggccaa

SEQ ID NO: 2483196 - RNA, 19 nt, Homo sapiens
  misc_RNA (1)...(19): siRNA sense strand
aggccugguugcagcguga

SEQ ID NO: 2483197 - RNA, 19 nt, Homo sapiens
  misc_RNA (1)...(19): siRNA sense strand
cauucaucauugagaagca

SEQ ID NO: 2483198 - RNA, 19 nt, Homo sapiens
  misc_RNA (1)...(19): siRNA sense strand
ccauucaccacgcgggauu

SEQ ID NO: 2483199 - RNA, 19 nt, Homo sapiens
  misc_RNA (1)...(19): siRNA sense strand
ccuauaacauguacccaca

SEQ ID NO: 2483200 - RNA, 19 nt, Homo sapiens
  misc_RNA (1)...(19): siRNA sense strand
ccgagaagcaccagaagac

SEQ ID NO: 2483201 - RNA, 19 nt, Homo sapiens
  misc_RNA (1)...(19): siRNA sense strand
agaugcuggccgaggucaa

SEQ ID NO: 2483202 - RNA, 19 nt, Homo sapiens
  misc_RNA (1)...(19): siRNA sense strand
gggacaaugccuuugcuga

SEQ ID NO: 2483203 - RNA, 19 nt, Homo sapiens
  misc_RNA (1)...(19): siRNA sense strand
agagaaugagcugaagaaa

SEQ ID NO: 2483204 - RNA, 19 nt, Homo sapiens
  misc_RNA (1)...(19): siRNA sense strand
ggugaauucuucugggcau

SEQ ID NO: 2483205 - RNA, 19 nt, Homo sapiens
  misc_RNA (1)...(19): siRNA sense strand
gcaaagagcccuacccuga

SEQ ID NO: 2483206 - RNA, 19 nt, Homo sapiens
  misc_RNA (1)...(19): siRNA sense strand
cggugaucgugcugcagua

SEQ ID NO: 2483207 - RNA, 19 nt, Homo sapiens
  misc_RNA (1)...(19): siRNA sense strand
cccaaguggaccagaguca

SEQ ID NO: 2483208 - RNA, 19 nt, Homo sapiens
  misc_RNA (1)...(19): siRNA sense strand
ggcagauaucaguggcuau

SEQ ID NO: 2483209 - RNA, 19 nt, Homo sapiens
  misc_RNA (1)...(19): siRNA sense strand
caagaggagugaaagguuc

SEQ ID NO: 2483210 - RNA, 19 nt, Homo sapiens
  misc_RNA (1)...(19): siRNA sense strand
gcaaagagcccuacccuga

SEQ ID NO: 2483211 - RNA, 19 nt, Homo sapiens
  misc_RNA (1)...(19): siRNA sense strand
cggugaucgugcugcagua

SEQ ID NO: 2483212 - RNA, 19 nt, Homo sapiens
  misc_RNA (1)...(19): siRNA sense strand
cccaaguggaccagaguca

SEQ ID NO: 2483213 - RNA, 19 nt, Homo sapiens
  misc_RNA (1)...(19): siRNA sense strand
ggcagauaucaguggcuau

SEQ ID NO: 2483214 - RNA, 19 nt, Homo sapiens
  misc_RNA (1)...(19): siRNA sense strand
caagaggagugaaagguuc

SEQ ID NO: 2483215 - RNA, 19 nt, Homo sapiens
  misc_RNA (1)...(19): siRNA sense strand
ccacagauuuguacggcaa

SEQ ID NO: 2483216 - RNA, 19 nt, Homo sapiens
  misc_RNA (1)...(19): siRNA sense strand
agaaagaggagcuggagga

SEQ ID NO: 2483217 - RNA, 19 nt, Homo sapiens
  misc_RNA (1)...(19): siRNA sense strand
aagcgagguuacagagaca

SEQ ID NO: 2483218 - RNA, 19 nt, Homo sapiens
  misc_RNA (1)...(19): siRNA sense strand
ccaagaaagaggagcugga

SEQ ID NO: 2483219 - RNA, 19 nt, Homo sapiens
  misc_RNA (1)...(19): siRNA sense strand
uugcaaaggccaagagaag

SEQ ID NO: 2483220 - RNA, 19 nt, Homo sapiens
  misc_RNA (1)...(19): siRNA sense strand
aagccugggagcugggaua

SEQ ID NO: 2483221 - RNA, 19 nt, Homo sapiens
  misc_RNA (1)...(19): siRNA sense strand
ggaugaugggauugacuau

SEQ ID NO: 2483222 - RNA, 19 nt, Homo sapiens
  misc_RNA (1)...(19): siRNA sense strand
agguguuaccauuggaauu

SEQ ID NO: 2483223 - RNA, 19 nt, Homo sapiens
  misc_RNA (1)...(19): siRNA sense strand
ccgaugugcaggagaaguu

SEQ ID NO: 2483224 - RNA, 19 nt, Homo sapiens
  misc_RNA (1)...(19): siRNA sense strand
cuauaaugccgaagcaagu

SEQ ID NO: 2483225 - RNA, 19 nt, Homo sapiens
  misc_RNA (1)...(19): siRNA sense strand
aggaaaauuuuguccgcua

SEQ ID NO: 2483226 - RNA, 19 nt, Homo sapiens
  misc_RNA (1)...(19): siRNA sense strand
caagagaagacgcagccua

SEQ ID NO: 2483227 - RNA, 19 nt, Homo sapiens
  misc_RNA (1)...(19): siRNA sense strand
gcaggaaggauuugaccga

SEQ ID NO: 2483228 - RNA, 19 nt, Homo sapiens
  misc_RNA (1)...(19): siRNA sense strand
gaauuauggaugaugggau

SEQ ID NO: 2483229 - RNA, 19 nt, Homo sapiens
  misc_RNA (1)...(19): siRNA sense strand
acuccaagguugcaggcau

SEQ ID NO: 2483230 - RNA, 19 nt, Homo sapiens
  misc_RNA (1)...(19): siRNA sense strand
ccugugaggggaaggaaaa

SEQ ID NO: 2483231 - RNA, 19 nt, Homo sapiens
  misc_RNA (1)...(19): siRNA sense strand
uggccauguccaagaaaga

SEQ ID NO: 2483232 - RNA, 19 nt, Homo sapiens
  misc_RNA (1)...(19): siRNA sense strand
aggaagagcuggacgaagc

SEQ ID NO: 2483233 - RNA, 19 nt, Homo sapiens
  misc_RNA (1)...(19): siRNA sense strand
cagugguaucugaucaaua

SEQ ID NO: 2483234 - RNA, 19 nt, Homo sapiens
  misc_RNA (1)...(19): siRNA sense strand
ucugaucaauacugggcaa

SEQ ID NO: 2483235 - RNA, 19 nt, Homo sapiens
  misc_RNA (1)...(19): siRNA sense strand
ggaaccagcuucacgacga

SEQ ID NO: 2483236 - RNA, 19 nt, Homo sapiens
  misc_RNA (1)...(19): siRNA sense strand
cugaaggaguggacccuga

SEQ ID NO: 2483237 - RNA, 19 nt, Homo sapiens
  misc_RNA (1)...(19): siRNA sense strand
ggacccuggagcugggauu

SEQ ID NO: 2483238 - RNA, 19 nt, Homo sapiens
  misc_RNA (1)...(19): siRNA sense strand
cuguggaguuggaguagca

SEQ ID NO: 2483239 - RNA, 19 nt, Homo sapiens
  misc_RNA (1)...(19): siRNA sense strand
ccagaagaggagaccugaa

SEQ ID NO: 2483240 - RNA, 19 nt, Homo sapiens
  misc_RNA (1)...(19): siRNA sense strand
ccaaggugggcuuugacaa

SEQ ID NO: 2483241 - RNA, 19 nt, Homo sapiens
  misc_RNA (1)...(19): siRNA sense strand
acgaagccguggagagaag

SEQ ID NO: 2483242 - RNA, 19 nt, Homo sapiens
  misc_RNA (1)...(19): siRNA sense strand
ugggagaagaugugugaaa

SEQ ID NO: 2483243 - RNA, 19 nt, Homo sapiens
  misc_RNA (1)...(19): siRNA sense strand
gacaaauacuucaaggaga

SEQ ID NO: 2483244 - RNA, 19 nt, Homo sapiens
  misc_RNA (1)...(19): siRNA sense strand
caacuuggcuagugcccua

SEQ ID NO: 2483245 - RNA, 19 nt, Homo sapiens
  misc_RNA (1)...(19): siRNA sense strand
aauacuucaaggagagaaa

SEQ ID NO: 2483246 - RNA, 19 nt, Homo sapiens
  misc_RNA (1)...(19): siRNA sense strand
agccugaacagauggguaa

SEQ ID NO: 2483247 - RNA, 19 nt, Homo sapiens
  misc_RNA (1)...(19): siRNA sense strand
uggaugaaguccugagaac

SEQ ID NO: 2483248 - RNA, 19 nt, Homo sapiens
  misc_RNA (1)...(19): siRNA sense strand
agcagaaagcacuggagaa

SEQ ID NO: 2483249 - RNA, 19 nt, Homo sapiens
  misc_RNA (1)...(19): siRNA sense strand
cccuagugcugaagaggau

SEQ ID NO: 2483250 - RNA, 19 nt, Homo sapiens
  misc_RNA (1)...(19): siRNA sense strand
cuccacagauagagaacau

SEQ ID NO: 2483251 - RNA, 19 nt, Homo sapiens
  misc_RNA (1)...(19): siRNA sense strand
gcggaagggcacugagucu

SEQ ID NO: 2483252 - RNA, 19 nt, Homo sapiens
  misc_RNA (1)...(19): siRNA sense strand
acaaauacuucaaggagag

SEQ ID NO: 2483253 - RNA, 19 nt, Homo sapiens
  misc_RNA (1)...(19): siRNA sense strand
ccgacauggugacagagaa

SEQ ID NO: 2483254 - RNA, 19 nt, Homo sapiens
  misc_RNA (1)...(19): siRNA sense strand
cgacauggugacagagaag

SEQ ID NO: 2483255 - RNA, 19 nt, Homo sapiens
  misc_RNA (1)...(19): siRNA sense strand
gcuaaugggacugggccaa

SEQ ID NO: 2483256 - RNA, 19 nt, Homo sapiens
  misc_RNA (1)...(19): siRNA sense strand
guugcuuccugguggagaa

SEQ ID NO: 2483257 - RNA, 19 nt, Homo sapiens
  misc_RNA (1)...(19): siRNA sense strand
caacaaugccaaagccacu

SEQ ID NO: 2483258 - RNA, 19 nt, Homo sapiens
  misc_RNA (1)...(19): siRNA sense strand
gagcagaaagcacuggaga

SEQ ID NO: 2483259 - RNA, 19 nt, Homo sapiens
  misc_RNA (1)...(19): siRNA sense strand
gggcaaucugggaucucaa

SEQ ID NO: 2483260 - RNA, 19 nt, Homo sapiens
  misc_RNA (1)...(19): siRNA sense strand
agagcuagaggcagccaaa

SEQ ID NO: 2483261 - RNA, 19 nt, Homo sapiens
  misc_RNA (1)...(19): siRNA sense strand
gaacagauggguaaggaug

SEQ ID NO: 2483262 - RNA, 19 nt, Homo sapiens
  misc_RNA (1)...(19): siRNA sense strand
guggccacuuucagacaaa

SEQ ID NO: 2483263 - RNA, 19 nt, Homo sapiens
  misc_RNA (1)...(19): siRNA sense strand
acuacaagccugaacagau

SEQ ID NO: 2483264 - RNA, 19 nt, Homo sapiens
  misc_RNA (1)...(19): siRNA sense strand
gcugaagaggauccagauu

SEQ ID NO: 2483265 - RNA, 19 nt, Homo sapiens
  misc_RNA (1)...(19): siRNA sense strand
cagaagaaucagucaacgu

SEQ ID NO: 2483266 - RNA, 19 nt, Homo sapiens
  misc_RNA (1)...(19): siRNA sense strand
acaacaaccacauggccaa

SEQ ID NO: 2483267 - RNA, 19 nt, Homo sapiens
  misc_RNA (1)...(19): siRNA sense strand
acgaaguguucaaggaucu

SEQ ID NO: 2483268 - RNA, 19 nt, Homo sapiens
  misc_RNA (1)...(19): siRNA sense strand
gcgaugagcacaagaccga

SEQ ID NO: 2483269 - RNA, 19 nt, Homo sapiens
  misc_RNA (1)...(19): siRNA sense strand
ucucagagguggagcuggu

SEQ ID NO: 2483270 - RNA, 19 nt, Homo sapiens
  misc_RNA (1)...(19): siRNA sense strand
agugaaaggcaaagaacaa

SEQ ID NO: 2483271 - RNA, 19 nt, Homo sapiens
  misc_RNA (1)...(19): siRNA sense strand
gcggaaagugaaaggcaaa

SEQ ID NO: 2483272 - RNA, 19 nt, Homo sapiens
  misc_RNA (1)...(19): siRNA sense strand
ugaucaaccguuagagaaa

SEQ ID NO: 2483273 - RNA, 19 nt, Homo sapiens
  misc_RNA (1)...(19): siRNA sense strand
gcaugaaacuacagcgucu

SEQ ID NO: 2483274 - RNA, 19 nt, Homo sapiens
  misc_RNA (1)...(19): siRNA sense strand
aggcaaagaacaagagaag

SEQ ID NO: 2483275 - RNA, 19 nt, Homo sapiens
  misc_RNA (1)...(19): siRNA sense strand
cugaugaggcccaggaaga

SEQ ID NO: 2483276 - RNA, 19 nt, Homo sapiens
  misc_RNA (1)...(19): siRNA sense strand
agcaaggauuuguggagaa

SEQ ID NO: 2483277 - RNA, 19 nt, Homo sapiens
  misc_RNA (1)...(19): siRNA sense strand
ggcggaaagugaaaggcaa

SEQ ID NO: 2483278 - RNA, 19 nt, Homo sapiens
  misc_RNA (1)...(19): siRNA sense strand
cuaaaagaauugucaggaa

SEQ ID NO: 2483279 - RNA, 19 nt, Homo sapiens
  misc_RNA (1)...(19): siRNA sense strand
aaggaauugaccugaauaa

SEQ ID NO: 2483280 - RNA, 19 nt, Homo sapiens
  misc_RNA (1)...(19): siRNA sense strand
ucacaagcuaugaagaaau

SEQ ID NO: 2483281 - RNA, 19 nt, Homo sapiens
  misc_RNA (1)...(19): siRNA sense strand
ugaaauggccagagcagga

SEQ ID NO: 2483282 - RNA, 19 nt, Homo sapiens
  misc_RNA (1)...(19): siRNA sense strand
aagaggaugcagugaauau

SEQ ID NO: 2483283 - RNA, 19 nt, Homo sapiens
  misc_RNA (1)...(19): siRNA sense strand
ucucacaagcuaugaagaa

SEQ ID NO: 2483284 - RNA, 19 nt, Homo sapiens
  misc_RNA (1)...(19): siRNA sense strand
gaccugaauaauagaacua

SEQ ID NO: 2483285 - RNA, 19 nt, Homo sapiens
  misc_RNA (1)...(19): siRNA sense strand
caauggagcaagagcacuu

SEQ ID NO: 2483286 - RNA, 19 nt, Homo sapiens
  misc_RNA (1)...(19): siRNA sense strand
gaaccugauguaaggaaau

SEQ ID NO: 2483287 - RNA, 19 nt, Homo sapiens
  misc_RNA (1)...(19): siRNA sense strand
ugaaccugauguaaggaaa

SEQ ID NO: 2483288 - RNA, 19 nt, Homo sapiens
  misc_RNA (1)...(19): siRNA sense strand
aaggauuuguggagaagau

SEQ ID NO: 2483289 - RNA, 19 nt, Homo sapiens
  misc_RNA (1)...(19): siRNA sense strand
cuaaaaugauagucaguga

SEQ ID NO: 2483290 - RNA, 19 nt, Homo sapiens
  misc_RNA (1)...(19): siRNA sense strand
acucaagagaccaaaucaa

SEQ ID NO: 2483291 - RNA, 19 nt, Homo sapiens
  misc_RNA (1)...(19): siRNA sense strand
gcgaauaagagcacacagu

SEQ ID NO: 2483292 - RNA, 19 nt, Homo sapiens
  misc_RNA (1)...(19): siRNA sense strand
aagaaaugggugcaaggaa

SEQ ID NO: 2483293 - RNA, 19 nt, Homo sapiens
  misc_RNA (1)...(19): siRNA sense strand
cgucaggccuggacaacca

SEQ ID NO: 2483294 - RNA, 19 nt, Homo sapiens
  misc_RNA (1)...(19): siRNA sense strand
gaauaagagcacacagucu

SEQ ID NO: 2483295 - RNA, 19 nt, Homo sapiens
  misc_RNA (1)...(19): siRNA sense strand
guauagaacaagaugcagu

SEQ ID NO: 2483296 - RNA, 19 nt, Homo sapiens
  misc_RNA (1)...(19): siRNA sense strand
caggaaaacuaaugaaaag

SEQ ID NO: 2483297 - RNA, 19 nt, Homo sapiens
  misc_RNA (1)...(19): siRNA sense strand
ucaacaacuuggucgcgaa

SEQ ID NO: 2483298 - RNA, 19 nt, Homo sapiens
  misc_RNA (1)...(19): siRNA sense strand
auaagagauuggaggauuc

SEQ ID NO: 2483299 - RNA, 19 nt, Homo sapiens
  misc_RNA (1)...(19): siRNA sense strand
aaguauagaacaagaugca

SEQ ID NO: 2483300 - RNA, 19 nt, Homo sapiens
  misc_RNA (1)...(19): siRNA sense strand
gagaagauggacaggugga

SEQ ID NO: 2483301 - RNA, 19 nt, Homo sapiens
  misc_RNA (1)...(19): siRNA sense strand
ccauucgguucgaggagau

SEQ ID NO: 2483302 - RNA, 19 nt, Homo sapiens
  misc_RNA (1)...(19): siRNA sense strand
uucuaagacccuugaacaa

SEQ ID NO: 2483303 - RNA, 19 nt, Homo sapiens
  misc_RNA (1)...(19): siRNA sense strand
ccaaauauauaucuccaga

SEQ ID NO: 2483304 - RNA, 19 nt, Homo sapiens
  misc_RNA (1)...(19): siRNA sense strand
cucacaagcuaugaagaaa

SEQ ID NO: 2483305 - RNA, 19 nt, Homo sapiens
  misc_RNA (1)...(19): siRNA sense strand
ucaaguagcaggacagcca

SEQ ID NO: 2483306 - RNA, 19 nt, Homo sapiens
  misc_RNA (1)...(19): siRNA sense strand
gugaaguccauuaaagcuu

SEQ ID NO: 2483307 - RNA, 19 nt, Homo sapiens
  misc_RNA (1)...(19): siRNA sense strand
ucucugaguacauggaaaa

SEQ ID NO: 2483308 - RNA, 19 nt, Homo sapiens
  misc_RNA (1)...(19): siRNA sense strand
aaaagaggaugcagugaau

SEQ ID NO: 2483309 - RNA, 19 nt, Homo sapiens
  misc_RNA (1)...(19): siRNA sense strand
caaccauggagaaggucuu

SEQ ID NO: 2483310 - RNA, 19 nt, Homo sapiens
  misc_RNA (1)...(19): siRNA sense strand
ggaaagugaaaggcaaaga

SEQ ID NO: 2483311 - RNA, 19 nt, Homo sapiens
  misc_RNA (1)...(19): siRNA sense strand
acacuuaagaagcagccaa

SEQ ID NO: 2483312 - RNA, 19 nt, Homo sapiens
  misc_RNA (1)...(19): siRNA sense strand
aagugaaaggcaaagaaca

SEQ ID NO: 2483313 - RNA, 19 nt, Homo sapiens
  misc_RNA (1)...(19): siRNA sense strand
ugacaucauagcaaggauu

SEQ ID NO: 2483314 - RNA, 19 nt, Homo sapiens
  misc_RNA (1)...(19): siRNA sense strand
acauaugccgggaagauga

SEQ ID NO: 2483315 - RNA, 19 nt, Homo sapiens
  misc_RNA (1)...(19): siRNA sense strand
ggaaugugacagugcccau

SEQ ID NO: 2483316 - RNA, 19 nt, Homo sapiens
  misc_RNA (1)...(19): siRNA sense strand
gugcaauggagcaagagca

SEQ ID NO: 2483317 - RNA, 19 nt, Homo sapiens
  misc_RNA (1)...(19): siRNA sense strand
cuaacagcacucagaauca

SEQ ID NO: 2483318 - RNA, 19 nt, Homo sapiens
  misc_RNA (1)...(19): siRNA sense strand
ugaaaggcaaagaacaaga

SEQ ID NO: 2483319 - RNA, 19 nt, Homo sapiens
  misc_RNA (1)...(19): siRNA sense strand
cuuuauaucaacggacaua

SEQ ID NO: 2483320 - RNA, 19 nt, Homo sapiens
  misc_RNA (1)...(19): siRNA sense strand
cggaggagcuacuggagca

SEQ ID NO: 2483321 - RNA, 19 nt, Homo sapiens
  misc_RNA (1)...(19): siRNA sense strand
ccgucuacaccgaggccua

SEQ ID NO: 2483322 - RNA, 19 nt, Homo sapiens
  misc_RNA (1)...(19): siRNA sense strand
agaaggacgcagacagcau

SEQ ID NO: 2483323 - RNA, 19 nt, Homo sapiens
  misc_RNA (1)...(19): siRNA sense strand
ccucaaaggaagaccuaaa

SEQ ID NO: 2483324 - RNA, 19 nt, Homo sapiens
  misc_RNA (1)...(19): siRNA sense strand
ggggaaucuuggaggaaaa

SEQ ID NO: 2483325 - RNA, 19 nt, Homo sapiens
  misc_RNA (1)...(19): siRNA sense strand
gggaaugucaacaaggaaa

SEQ ID NO: 2483326 - RNA, 19 nt, Homo sapiens
  misc_RNA (1)...(19): siRNA sense strand
gaggaaaagaagauggaua

SEQ ID NO: 2483327 - RNA, 19 nt, Homo sapiens
  misc_RNA (1)...(19): siRNA sense strand
cgaccuaaccagcgggaau

SEQ ID NO: 2483328 - RNA, 19 nt, Homo sapiens
  misc_RNA (1)...(19): siRNA sense strand
gcgauuuauugaaggaaaa

SEQ ID NO: 2483329 - RNA, 19 nt, Homo sapiens
  misc_RNA (1)...(19): siRNA sense strand
cugcaaaggacacggagaa

SEQ ID NO: 2483330 - RNA, 19 nt, Homo sapiens
  misc_RNA (1)...(19): siRNA sense strand
caaaguacaucuuggccaa

SEQ ID NO: 2483331 - RNA, 19 nt, Homo sapiens
  misc_RNA (1)...(19): siRNA sense strand
gcuaccggaugaagagaaa

SEQ ID NO: 2483332 - RNA, 19 nt, Homo sapiens
  misc_RNA (1)...(19): siRNA sense strand
acggagaagauaagggaau

SEQ ID NO: 2483333 - RNA, 19 nt, Homo sapiens
  misc_RNA (1)...(19): siRNA sense strand
acacaaggcgagauggcaa

SEQ ID NO: 2483334 - RNA, 19 nt, Homo sapiens
  misc_RNA (1)...(19): siRNA sense strand
cuuaguugguucagaagua

SEQ ID NO: 2483335 - RNA, 19 nt, Homo sapiens
  misc_RNA (1)...(19): siRNA sense strand
caaaggacagugugagcaa

SEQ ID NO: 2483336 - RNA, 19 nt, Homo sapiens
  misc_RNA (1)...(19): siRNA sense strand
gaagauaaauuacagguga

SEQ ID NO: 2483337 - RNA, 19 nt, Homo sapiens
  misc_RNA (1)...(19): siRNA sense strand
cguuauaaauggaaaccca

SEQ ID NO: 2483338 - RNA, 19 nt, Homo sapiens
  misc_RNA (1)...(19): siRNA sense strand
ccgcaaggauaaggagcaa

SEQ ID NO: 2483339 - RNA, 19 nt, Homo sapiens
  misc_RNA (1)...(19): siRNA sense strand
cggaugaagagaaagaauu

SEQ ID NO: 2483340 - RNA, 19 nt, Homo sapiens
  misc_RNA (1)...(19): siRNA sense strand
cggagaagauaagggaauu

SEQ ID NO: 2483341 - RNA, 19 nt, Homo sapiens
  misc_RNA (1)...(19): siRNA sense strand
gguuacaauucaacaaaca

SEQ ID NO: 2483342 - RNA, 19 nt, Homo sapiens
  misc_RNA (1)...(19): siRNA sense strand
cggaaauauggaacaacaa

SEQ ID NO: 2483343 - RNA, 19 nt, Homo sapiens
  misc_RNA (1)...(19): siRNA sense strand
gcagaagcaccuagaacau

SEQ ID NO: 2483344 - RNA, 19 nt, Homo sapiens
  misc_RNA (1)...(19): siRNA sense strand
aagaagaagaaguccuuaa

SEQ ID NO: 2483345 - RNA, 19 nt, Homo sapiens
  misc_RNA (1)...(19): siRNA sense strand
auaccaaucacgaagauaa

SEQ ID NO: 2483346 - RNA, 19 nt, Homo sapiens
  misc_RNA (1)...(19): siRNA sense strand
agugaaagcaggugucaau

SEQ ID NO: 2483347 - RNA, 19 nt, Homo sapiens
  misc_RNA (1)...(19): siRNA sense strand
acaaggaaaacaaggaaaa

SEQ ID NO: 2483348 - RNA, 19 nt, Homo sapiens
  misc_RNA (1)...(19): siRNA sense strand
caucaaaguggcugaagau

SEQ ID NO: 2483349 - RNA, 19 nt, Homo sapiens
  misc_RNA (1)...(19): siRNA sense strand
uggaauguguuuagggagu

SEQ ID NO: 2483350 - RNA, 19 nt, Homo sapiens
  misc_RNA (1)...(19): siRNA sense strand
acgaaagucaccugaaauu

SEQ ID NO: 2483351 - RNA, 19 nt, Homo sapiens
  misc_RNA (1)...(19): siRNA sense strand
cgacuuucucuuacggaua

SEQ ID NO: 2483352 - RNA, 19 nt, Homo sapiens
  misc_RNA (1)...(19): siRNA sense strand
gcaaggauaaggagcaaca

SEQ ID NO: 2483353 - RNA, 19 nt, Homo sapiens
  misc_RNA (1)...(19): siRNA sense strand
cacuauuggcuuugugaua

SEQ ID NO: 2483354 - RNA, 19 nt, Homo sapiens
  misc_RNA (1)...(19): siRNA sense strand
agauggagauucugacgaa

SEQ ID NO: 2483355 - RNA, 19 nt, Homo sapiens
  misc_RNA (1)...(19): siRNA sense strand
ugcaagaauuggagcugua

SEQ ID NO: 2483356 - RNA, 19 nt, Homo sapiens
  misc_RNA (1)...(19): siRNA sense strand
gucaaagguguucgagaaa

SEQ ID NO: 2483357 - RNA, 19 nt, Homo sapiens
  misc_RNA (1)...(19): siRNA sense strand
ggagauuccagcacugaaa

SEQ ID NO: 2483358 - RNA, 19 nt, Homo sapiens
  misc_RNA (1)...(19): siRNA sense strand
gccuaaaugccgagagugu

SEQ ID NO: 2483359 - RNA, 19 nt, Homo sapiens
  misc_RNA (1)...(19): siRNA sense strand
ugugaagcauuuagaugaa

SEQ ID NO: 2483360 - RNA, 19 nt, Homo sapiens
  misc_RNA (1)...(19): siRNA sense strand
acaaaguuuaccagaggaa

SEQ ID NO: 2483361 - RNA, 19 nt, Homo sapiens
  misc_RNA (1)...(19): siRNA sense strand
aaaguuuaccagaggaaau

SEQ ID NO: 2483362 - RNA, 19 nt, Homo sapiens
  misc_RNA (1)...(19): siRNA sense strand
ucugaagcucugagaacaa

SEQ ID NO: 2483363 - RNA, 19 nt, Homo sapiens
  misc_RNA (1)...(19): siRNA sense strand
caggaugauucuuguguga

SEQ ID NO: 2483364 - RNA, 19 nt, Homo sapiens
  misc_RNA (1)...(19): siRNA sense strand
gcauuuagaugaaagccau

SEQ ID NO: 2483365 - RNA, 19 nt, Homo sapiens
  misc_RNA (1)...(19): siRNA sense strand
ccaccuaaccuuggagcaa

SEQ ID NO: 2483366 - RNA, 19 nt, Homo sapiens
  misc_RNA (1)...(19): siRNA sense strand
ucuacaggaaagacagaaa

SEQ ID NO: 2483367 - RNA, 19 nt, Homo sapiens
  misc_RNA (1)...(19): siRNA sense strand
aggaaguagaccuaguuaa

SEQ ID NO: 2483368 - RNA, 19 nt, Homo sapiens
  misc_RNA (1)...(19): siRNA sense strand
caaccguuauaaauggaaa

SEQ ID NO: 2483369 - RNA, 19 nt, Homo sapiens
  misc_RNA (1)...(19): siRNA sense strand
ggaaugucaacaaggaaaa

SEQ ID NO: 2483370 - RNA, 19 nt, Homo sapiens
  misc_RNA (1)...(19): siRNA sense strand
caauaagagcaacuggaau

SEQ ID NO: 2483371 - RNA, 19 nt, Homo sapiens
  misc_RNA (1)...(19): siRNA sense strand
cuaguuaauuguaggacca

SEQ ID NO: 2483372 - RNA, 19 nt, Homo sapiens
  misc_RNA (1)...(19): siRNA sense strand
ccggaugaagagaaagaau

SEQ ID NO: 2483373 - RNA, 19 nt, Homo sapiens
  misc_RNA (1)...(19): siRNA sense strand
ggagaagauaagggaauuu

SEQ ID NO: 2483374 - RNA, 19 nt, Homo sapiens
  misc_RNA (1)...(19): siRNA sense strand
cuaauaacuguucaggaaa

SEQ ID NO: 2483375 - RNA, 19 nt, Homo sapiens
  misc_RNA (1)...(19): siRNA sense strand
aggauaaggagcaacagaa

SEQ ID NO: 2483376 - RNA, 19 nt, Homo sapiens
  misc_RNA (1)...(19): siRNA sense strand
cugaaauuucugaacgaau

SEQ ID NO: 2483377 - RNA, 19 nt, Homo sapiens
  misc_RNA (1)...(19): siRNA sense strand
uugaaguuguacacgauaa

SEQ ID NO: 2483378 - RNA, 19 nt, Homo sapiens
  misc_RNA (1)...(19): siRNA sense strand
agcgauuuauugaaggaaa

SEQ ID NO: 2483379 - RNA, 19 nt, Homo sapiens
  misc_RNA (1)...(19): siRNA sense strand
aaagguaucagaagagcaa

SEQ ID NO: 2483380 - RNA, 19 nt, Homo sapiens
  misc_RNA (1)...(19): siRNA sense strand
caaggaugucauaaacaaa

SEQ ID NO: 2483381 - RNA, 19 nt, Homo sapiens
  misc_RNA (1)...(19): siRNA sense strand
ccaagauguauaaugcuua

SEQ ID NO: 2483382 - RNA, 19 nt, Homo sapiens
  misc_RNA (1)...(19): siRNA sense strand
ucggaaauauggaacaaca

SEQ ID NO: 2483383 - RNA, 19 nt, Homo sapiens
  misc_RNA (1)...(19): siRNA sense strand
ccuugugacaugugguaau

SEQ ID NO: 2483384 - RNA, 19 nt, Homo sapiens
  misc_RNA (1)...(19): siRNA sense strand
ggaaagaguuuggugagca

SEQ ID NO: 2483385 - RNA, 19 nt, Homo sapiens
  misc_RNA (1)...(19): siRNA sense strand
cugaagagcaugacggaga

SEQ ID NO: 2483386 - RNA, 19 nt, Homo sapiens
  misc_RNA (1)...(19): siRNA sense strand
gggugaacgaggaggauca

SEQ ID NO: 2483387 - RNA, 19 nt, Homo sapiens
  misc_RNA (1)...(19): siRNA sense strand
cgggcgaguucaaagggaa

SEQ ID NO: 2483388 - RNA, 19 nt, Homo sapiens
  misc_RNA (1)...(19): siRNA sense strand
gugugaagcucauggugga

SEQ ID NO: 2483389 - RNA, 19 nt, Homo sapiens
  misc_RNA (1)...(19): siRNA sense strand
auuacaagccugaggagga

SEQ ID NO: 2483390 - RNA, 19 nt, Homo sapiens
  misc_RNA (1)...(19): siRNA sense strand
ccucaaggguggagacgac

SEQ ID NO: 2483391 - RNA, 19 nt, Homo sapiens
  misc_RNA (1)...(19): siRNA sense strand
cggagaaggagcagcagca

SEQ ID NO: 2483392 - RNA, 19 nt, Homo sapiens
  misc_RNA (1)...(19): siRNA sense strand
aguucaaagggaaguacua

SEQ ID NO: 2483393 - RNA, 19 nt, Homo sapiens
  misc_RNA (1)...(19): siRNA sense strand
uacaagaagcugcgggaca

SEQ ID NO: 2483394 - RNA, 19 nt, Homo sapiens
  misc_RNA (1)...(19): siRNA sense strand
auaacaaccacauggccaa

SEQ ID NO: 2483395 - RNA, 19 nt, Homo sapiens
  misc_RNA (1)...(19): siRNA sense strand
caguauuugacguguccaa

SEQ ID NO: 2483396 - RNA, 19 nt, Homo sapiens
  misc_RNA (1)...(19): siRNA sense strand
gcaacaugaaggagguuuu

SEQ ID NO: 2483397 - RNA, 19 nt, Homo sapiens
  misc_RNA (1)...(19): siRNA sense strand
auggagaagaaguuggaga

SEQ ID NO: 2483398 - RNA, 19 nt, Homo sapiens
  misc_RNA (1)...(19): siRNA sense strand
ccgaaguagaacaggugca

SEQ ID NO: 2483399 - RNA, 19 nt, Homo sapiens
  misc_RNA (1)...(19): siRNA sense strand
guggaaauggagaagaagu

SEQ ID NO: 2483400 - RNA, 19 nt, Homo sapiens
  misc_RNA (1)...(19): siRNA sense strand
gaagaaagcuauaaggacu

SEQ ID NO: 2483401 - RNA, 19 nt, Homo sapiens
  misc_RNA (1)...(19): siRNA sense strand
cuucagacaugcaggguga

SEQ ID NO: 2483402 - RNA, 19 nt, Homo sapiens
  misc_RNA (1)...(19): siRNA sense strand
ugguugagacugagcuaaa

SEQ ID NO: 2483403 - RNA, 19 nt, Homo sapiens
  misc_RNA (1)...(19): siRNA sense strand
gaagaaaguagcagggaug

SEQ ID NO: 2483404 - RNA, 19 nt, Homo sapiens
  misc_RNA (1)...(19): siRNA sense strand
gaaugugauuggagcuaga

SEQ ID NO: 2483405 - RNA, 19 nt, Homo sapiens
  misc_RNA (1)...(19): siRNA sense strand
ugaagaaaguagcagggau

SEQ ID NO: 2483406 - RNA, 19 nt, Homo sapiens
  misc_RNA (1)...(19): siRNA sense strand
cauugaacagaaagaagaa

SEQ ID NO: 2483407 - RNA, 19 nt, Homo sapiens
  misc_RNA (1)...(19): siRNA sense strand
ugguggagucaaugaagaa

SEQ ID NO: 2483408 - RNA, 19 nt, Homo sapiens
  misc_RNA (1)...(19): siRNA sense strand
ggauacgcugagugaagaa

SEQ ID NO: 2483409 - RNA, 19 nt, Homo sapiens
  misc_RNA (1)...(19): siRNA sense strand
agaaaacaagggaggagaa

SEQ ID NO: 2483410 - RNA, 19 nt, Homo sapiens
  misc_RNA (1)...(19): siRNA sense strand
acaagggaggagaagacaa

SEQ ID NO: 2483411 - RNA, 19 nt, Homo sapiens
  misc_RNA (1)...(19): siRNA sense strand
auaaagaagcgcugcagga

SEQ ID NO: 2483412 - RNA, 19 nt, Homo sapiens
  misc_RNA (1)...(19): siRNA sense strand
gcagcauugaacagaaaga

SEQ ID NO: 2483413 - RNA, 19 nt, Homo sapiens
  misc_RNA (1)...(19): siRNA sense strand
cgacgaaaugguggaguca

SEQ ID NO: 2483414 - RNA, 19 nt, Homo sapiens
  misc_RNA (1)...(19): siRNA sense strand
cugagugaagaaagcuaua

SEQ ID NO: 2483415 - RNA, 19 nt, Homo sapiens
  misc_RNA (1)...(19): siRNA sense strand
acacuauggacuucagaca

SEQ ID NO: 2483416 - RNA, 19 nt, Homo sapiens
  misc_RNA (1)...(19): siRNA sense strand
agaauuugccacaggaaac

SEQ ID NO: 2483417 - RNA, 19 nt, Homo sapiens
  misc_RNA (1)...(19): siRNA sense strand
cagaggaccugguggccaa

SEQ ID NO: 2483418 - RNA, 19 nt, Homo sapiens
  misc_RNA (1)...(19): siRNA sense strand
uggccaaagccgagcggaa

SEQ ID NO: 2483419 - RNA, 19 nt, Homo sapiens
  misc_RNA (1)...(19): siRNA sense strand
gagcauuacagcaaggaca

SEQ ID NO: 2483420 - RNA, 19 nt, Homo sapiens
  misc_RNA (1)...(19): siRNA sense strand
gagcuguccugcaggguga

SEQ ID NO: 2483421 - RNA, 19 nt, Homo sapiens
  misc_RNA (1)...(19): siRNA sense strand
ugguggagcauuacagcaa

SEQ ID NO: 2483422 - RNA, 19 nt, Homo sapiens
  misc_RNA (1)...(19): siRNA sense strand
cuaaaaugucacugaaaga

SEQ ID NO: 2483423 - RNA, 19 nt, Homo sapiens
  misc_RNA (1)...(19): siRNA sense strand
acgagaaccuggugcgucu

SEQ ID NO: 2483424 - RNA, 19 nt, Homo sapiens
  misc_RNA (1)...(19): siRNA sense strand
uggccgagggcauggagua

SEQ ID NO: 2483425 - RNA, 19 nt, Homo sapiens
  misc_RNA (1)...(19): siRNA sense strand
ugacgaagaugcaacacga

SEQ ID NO: 2483426 - RNA, 19 nt, Homo sapiens
  misc_RNA (1)...(19): siRNA sense strand
gggaaguucaccagcaagu

SEQ ID NO: 2483427 - RNA, 19 nt, Homo sapiens
  misc_RNA (1)...(19): siRNA sense strand
acgggaaguucaccagcaa

SEQ ID NO: 2483428 - RNA, 19 nt, Homo sapiens
  misc_RNA (1)...(19): siRNA sense strand
cagaggaccugguggccaa

SEQ ID NO: 2483429 - RNA, 19 nt, Homo sapiens
  misc_RNA (1)...(19): siRNA sense strand
uggccaaagccgagcggaa

SEQ ID NO: 2483430 - RNA, 19 nt, Homo sapiens
  misc_RNA (1)...(19): siRNA sense strand
gagcauuacagcaaggaca

SEQ ID NO: 2483431 - RNA, 19 nt, Homo sapiens
  misc_RNA (1)...(19): siRNA sense strand
gagcuguccugcaggguga

SEQ ID NO: 2483432 - RNA, 19 nt, Homo sapiens
  misc_RNA (1)...(19): siRNA sense strand
ugguggagcauuacagcaa

SEQ ID NO: 2483433 - RNA, 19 nt, Homo sapiens
  misc_RNA (1)...(19): siRNA sense strand
cuaaaaugucacugaaaga

SEQ ID NO: 2483434 - RNA, 19 nt, Homo sapiens
  misc_RNA (1)...(19): siRNA sense strand
acgagaaccuggugcgucu

SEQ ID NO: 2483435 - RNA, 19 nt, Homo sapiens
  misc_RNA (1)...(19): siRNA sense strand
uggccgagggcauggagua

SEQ ID NO: 2483436 - RNA, 19 nt, Homo sapiens
  misc_RNA (1)...(19): siRNA sense strand
ugacgaagaugcaacacga

SEQ ID NO: 2483437 - RNA, 19 nt, Homo sapiens
  misc_RNA (1)...(19): siRNA sense strand
gggaaguucaccagcaagu

SEQ ID NO: 2483438 - RNA, 19 nt, Homo sapiens
  misc_RNA (1)...(19): siRNA sense strand
acgggaaguucaccagcaa

SEQ ID NO: 2483439 - RNA, 19 nt, Homo sapiens
  misc_RNA (1)...(19): siRNA sense strand
cagaggaccugguggccaa

SEQ ID NO: 2483440 - RNA, 19 nt, Homo sapiens
  misc_RNA (1)...(19): siRNA sense strand
uggccaaagccgagcggaa

SEQ ID NO: 2483441 - RNA, 19 nt, Homo sapiens
  misc_RNA (1)...(19): siRNA sense strand
gagcauuacagcaaggaca

SEQ ID NO: 2483442 - RNA, 19 nt, Homo sapiens
  misc_RNA (1)...(19): siRNA sense strand
gagcuguccugcaggguga

SEQ ID NO: 2483443 - RNA, 19 nt, Homo sapiens
  misc_RNA (1)...(19): siRNA sense strand
ugguggagcauuacagcaa

SEQ ID NO: 2483444 - RNA, 19 nt, Homo sapiens
  misc_RNA (1)...(19): siRNA sense strand
cuaaaaugucacugaaaga

SEQ ID NO: 2483445 - RNA, 19 nt, Homo sapiens
  misc_RNA (1)...(19): siRNA sense strand
acgagaaccuggugcgucu

SEQ ID NO: 2483446 - RNA, 19 nt, Homo sapiens
  misc_RNA (1)...(19): siRNA sense strand
uggccgagggcauggagua

SEQ ID NO: 2483447 - RNA, 19 nt, Homo sapiens
  misc_RNA (1)...(19): siRNA sense strand
ugacgaagaugcaacacga

SEQ ID NO: 2483448 - RNA, 19 nt, Homo sapiens
  misc_RNA (1)...(19): siRNA sense strand
gggaaguucaccagcaagu

SEQ ID NO: 2483449 - RNA, 19 nt, Homo sapiens
  misc_RNA (1)...(19): siRNA sense strand
acgggaaguucaccagcaa

SEQ ID NO: 2483450 - RNA, 19 nt, Homo sapiens
  misc_RNA (1)...(19): siRNA sense strand
uggagaagguguuacggaa

SEQ ID NO: 2483451 - RNA, 19 nt, Homo sapiens
  misc_RNA (1)...(19): siRNA sense strand
gcagacagcuggaggugga

SEQ ID NO: 2483452 - RNA, 19 nt, Homo sapiens
  misc_RNA (1)...(19): siRNA sense strand
aggaauuugaacugagcaa

SEQ ID NO: 2483453 - RNA, 19 nt, Homo sapiens
  misc_RNA (1)...(19): siRNA sense strand
gggagguggaggagaagau

SEQ ID NO: 2483454 - RNA, 19 nt, Homo sapiens
  misc_RNA (1)...(19): siRNA sense strand
gcaucaaggagaagaccau

SEQ ID NO: 2483455 - RNA, 19 nt, Homo sapiens
  misc_RNA (1)...(19): siRNA sense strand
aagaagaccaagacggaga

SEQ ID NO: 2483456 - RNA, 19 nt, Homo sapiens
  misc_RNA (1)...(19): siRNA sense strand
uggacgaggagcugagcaa

SEQ ID NO: 2483457 - RNA, 19 nt, Homo sapiens
  misc_RNA (1)...(19): siRNA sense strand
agccggaggcggagaacaa

SEQ ID NO: 2483458 - RNA, 19 nt, Homo sapiens
  misc_RNA (1)...(19): siRNA sense strand
gcuacguggcccaggagaa

SEQ ID NO: 2483459 - RNA, 19 nt, Homo sapiens
  misc_RNA (1)...(19): siRNA sense strand
agguggaggagaagaucaa

SEQ ID NO: 2483460 - RNA, 19 nt, Homo sapiens
  misc_RNA (1)...(19): siRNA sense strand
gugaagaccauccgggaca

SEQ ID NO: 2483461 - RNA, 19 nt, Homo sapiens
  misc_RNA (1)...(19): siRNA sense strand
guggcuuggaugagagcaa

SEQ ID NO: 2483462 - RNA, 19 nt, Homo sapiens
  misc_RNA (1)...(19): siRNA sense strand
ugcagaagcaaguggagaa

SEQ ID NO: 2483463 - RNA, 19 nt, Homo sapiens
  misc_RNA (1)...(19): siRNA sense strand
acaaggaugccaaggguga

SEQ ID NO: 2483464 - RNA, 19 nt, Homo sapiens
  misc_RNA (1)...(19): siRNA sense strand
aggcggagaacaagcacaa

SEQ ID NO: 2483465 - RNA, 19 nt, Homo sapiens
  misc_RNA (1)...(19): siRNA sense strand
ccgagaacaagaaggacuu

SEQ ID NO: 2483466 - RNA, 19 nt, Homo sapiens
  misc_RNA (1)...(19): siRNA sense strand
cggauguggucgagagccu

SEQ ID NO: 2483467 - RNA, 19 nt, Homo sapiens
  misc_RNA (1)...(19): siRNA sense strand
cugacguggcugagaucaa

SEQ ID NO: 2483468 - RNA, 19 nt, Homo sapiens
  misc_RNA (1)...(19): siRNA sense strand
aggaagaccacuacggcau

SEQ ID NO: 2483469 - RNA, 19 nt, Homo sapiens
  misc_RNA (1)...(19): siRNA sense strand
ucaucgacgagguggacaa

SEQ ID NO: 2483470 - RNA, 19 nt, Homo sapiens
  misc_RNA (1)...(19): siRNA sense strand
gaggagaagaucaagcaga

SEQ ID NO: 2483471 - RNA, 19 nt, Homo sapiens
  misc_RNA (1)...(19): siRNA sense strand
cagagaucgugaagaccau

SEQ ID NO: 2483472 - RNA, 19 nt, Homo sapiens
  misc_RNA (1)...(19): siRNA sense strand
ucauggauguuguggacga

SEQ ID NO: 2483473 - RNA, 19 nt, Homo sapiens
  misc_RNA (1)...(19): siRNA sense strand
guggaacacuaccgggaga

SEQ ID NO: 2483474 - RNA, 19 nt, Homo sapiens
  misc_RNA (1)...(19): siRNA sense strand
aggagcagcuaaagaucau

SEQ ID NO: 2483475 - RNA, 19 nt, Homo sapiens
  misc_RNA (1)...(19): siRNA sense strand
ugaagaagaccaagacgga

SEQ ID NO: 2483476 - RNA, 19 nt, Homo sapiens
  misc_RNA (1)...(19): siRNA sense strand
uggaugagagcaaggccaa

SEQ ID NO: 2483477 - RNA, 19 nt, Homo sapiens
  misc_RNA (1)...(19): siRNA sense strand
uggagaaggacgacaagga

SEQ ID NO: 2483478 - RNA, 19 nt, Homo sapiens
  misc_RNA (1)...(19): siRNA sense strand
ugagacggccacaggacaa

SEQ ID NO: 2483479 - RNA, 19 nt, Homo sapiens
  misc_RNA (1)...(19): siRNA sense strand
gcagagaucgugaagacca

SEQ ID NO: 2483480 - RNA, 19 nt, Homo sapiens
  misc_RNA (1)...(19): siRNA sense strand
uggccauugcggagcgcua

SEQ ID NO: 2483481 - RNA, 19 nt, Homo sapiens
  misc_RNA (1)...(19): siRNA sense strand
cugcgagaccguauggaga

SEQ ID NO: 2483482 - RNA, 19 nt, Homo sapiens
  misc_RNA (1)...(19): siRNA sense strand
aggugcacuucguggaaca

SEQ ID NO: 2483483 - RNA, 19 nt, Homo sapiens
  misc_RNA (1)...(19): siRNA sense strand
ggacaaggaugccaagggu

SEQ ID NO: 2483484 - RNA, 19 nt, Homo sapiens
  misc_RNA (1)...(19): siRNA sense strand
gccuggagaaggacgacaa

SEQ ID NO: 2483485 - RNA, 19 nt, Homo sapiens
  misc_RNA (1)...(19): siRNA sense strand
gagaagaaguacacggcca

SEQ ID NO: 2483486 - RNA, 19 nt, Homo sapiens
  misc_RNA (1)...(19): siRNA sense strand
gcacaggcuacgaccgcaa

SEQ ID NO: 2483487 - RNA, 19 nt, Homo sapiens
  misc_RNA (1)...(19): siRNA sense strand
ggaugaacugcguggugca

SEQ ID NO: 2483488 - RNA, 19 nt, Homo sapiens
  misc_RNA (1)...(19): siRNA sense strand
ccgugcagcuucugggcuu

SEQ ID NO: 2483489 - RNA, 19 nt, Homo sapiens
  misc_RNA (1)...(19): siRNA sense strand
ggguacaggcugaacgacu

SEQ ID NO: 2483490 - RNA, 19 nt, Homo sapiens
  misc_RNA (1)...(19): siRNA sense strand
acgacguggugcagaacuu

SEQ ID NO: 2483491 - RNA, 19 nt, Homo sapiens
  misc_RNA (1)...(19): siRNA sense strand
ggauggaguguguguggca

SEQ ID NO: 2483492 - RNA, 19 nt, Homo sapiens
  misc_RNA (1)...(19): siRNA sense strand
ccgugcagcuucugggcuu

SEQ ID NO: 2483493 - RNA, 19 nt, Homo sapiens
  misc_RNA (1)...(19): siRNA sense strand
ggguacaggcugaacgacu

SEQ ID NO: 2483494 - RNA, 19 nt, Homo sapiens
  misc_RNA (1)...(19): siRNA sense strand
acgacguggugcagaacuu

SEQ ID NO: 2483495 - RNA, 19 nt, Homo sapiens
  misc_RNA (1)...(19): siRNA sense strand
ggauggaguguguguggca

SEQ ID NO: 2483496 - RNA, 19 nt, Homo sapiens
  misc_RNA (1)...(19): siRNA sense strand
auaaguacuaugagcgaaa

SEQ ID NO: 2483497 - RNA, 19 nt, Homo sapiens
  misc_RNA (1)...(19): siRNA sense strand
ccucacugccgaaaggaaa

SEQ ID NO: 2483498 - RNA, 19 nt, Homo sapiens
  misc_RNA (1)...(19): siRNA sense strand
aggaagaagagaaaacaaa

SEQ ID NO: 2483499 - RNA, 19 nt, Homo sapiens
  misc_RNA (1)...(19): siRNA sense strand
ggcugaagaggaacagaaa

SEQ ID NO: 2483500 - RNA, 19 nt, Homo sapiens
  misc_RNA (1)...(19): siRNA sense strand
ggaaagaacauaauggccu

SEQ ID NO: 2483501 - RNA, 19 nt, Homo sapiens
  misc_RNA (1)...(19): siRNA sense strand
accagaaaccaguggaaaa

SEQ ID NO: 2483502 - RNA, 19 nt, Homo sapiens
  misc_RNA (1)...(19): siRNA sense strand
uggagaaggugcagagggu

SEQ ID NO: 2483503 - RNA, 19 nt, Homo sapiens
  misc_RNA (1)...(19): siRNA sense strand
ggaacagaaaagaaagaau

SEQ ID NO: 2483504 - RNA, 19 nt, Homo sapiens
  misc_RNA (1)...(19): siRNA sense strand
aagagauggcagagcauga

SEQ ID NO: 2483505 - RNA, 19 nt, Homo sapiens
  misc_RNA (1)...(19): siRNA sense strand
aggcugaagaggaacagaa

SEQ ID NO: 2483506 - RNA, 19 nt, Homo sapiens
  misc_RNA (1)...(19): siRNA sense strand
uugaacaaggugacauaaa

SEQ ID NO: 2483507 - RNA, 19 nt, Homo sapiens
  misc_RNA (1)...(19): siRNA sense strand
agaaggaggcugaagagga

SEQ ID NO: 2483508 - RNA, 19 nt, Homo sapiens
  misc_RNA (1)...(19): siRNA sense strand
ucaaagagauggcagagca

SEQ ID NO: 2483509 - RNA, 19 nt, Homo sapiens
  misc_RNA (1)...(19): siRNA sense strand
caaagagauggcagagcau

SEQ ID NO: 2483510 - RNA, 19 nt, Homo sapiens
  misc_RNA (1)...(19): siRNA sense strand
agaugaaugaagaacagua

SEQ ID NO: 2483511 - RNA, 19 nt, Homo sapiens
  misc_RNA (1)...(19): siRNA sense strand
guauaaguacuaugagcga

SEQ ID NO: 2483512 - RNA, 19 nt, Homo sapiens
  misc_RNA (1)...(19): siRNA sense strand
aagaggaacagaaaagaaa

SEQ ID NO: 2483513 - RNA, 19 nt, Homo sapiens
  misc_RNA (1)...(19): siRNA sense strand
aaaucaaagagauggcaga

SEQ ID NO: 2483514 - RNA, 19 nt, Homo sapiens
  misc_RNA (1)...(19): siRNA sense strand
gcagaaaaucaaagagaug

SEQ ID NO: 2483515 - RNA, 19 nt, Homo sapiens
  misc_RNA (1)...(19): siRNA sense strand
ccuacagaugaaugaagaa

SEQ ID NO: 2483516 - RNA, 19 nt, Homo sapiens
  misc_RNA (1)...(19): siRNA sense strand
ggaagaagagaaaacaaau

SEQ ID NO: 2483517 - RNA, 19 nt, Homo sapiens
  misc_RNA (1)...(19): siRNA sense strand
gugucagggacucuggaaa

SEQ ID NO: 2483518 - RNA, 19 nt, Homo sapiens
  misc_RNA (1)...(19): siRNA sense strand
cugaagaugaugagaagcu

SEQ ID NO: 2483519 - RNA, 19 nt, Homo sapiens
  misc_RNA (1)...(19): siRNA sense strand
agagaaaacaaaugaacca

SEQ ID NO: 2483520 - RNA, 19 nt, Homo sapiens
  misc_RNA (1)...(19): siRNA sense strand
agaaaagaaagaauggaga

SEQ ID NO: 2483521 - RNA, 19 nt, Homo sapiens
  misc_RNA (1)...(19): siRNA sense strand
agcaagaagaacaugaauu

SEQ ID NO: 2483522 - RNA, 19 nt, Homo sapiens
  misc_RNA (1)...(19): siRNA sense strand
ccuacaacaaugccagcaa

SEQ ID NO: 2483523 - RNA, 19 nt, Homo sapiens
  misc_RNA (1)...(19): siRNA sense strand
ggaucggaugcuggagaaa

SEQ ID NO: 2483524 - RNA, 19 nt, Homo sapiens
  misc_RNA (1)...(19): siRNA sense strand
acaccaugcccuggauaaa

SEQ ID NO: 2483525 - RNA, 19 nt, Homo sapiens
  misc_RNA (1)...(19): siRNA sense strand
cauccaaggccaugggcau

SEQ ID NO: 2483526 - RNA, 19 nt, Homo sapiens
  misc_RNA (1)...(19): siRNA sense strand
cgcagaagaaggauggcaa

SEQ ID NO: 2483527 - RNA, 19 nt, Homo sapiens
  misc_RNA (1)...(19): siRNA sense strand
cagaagaaggauggcaaga

SEQ ID NO: 2483528 - RNA, 19 nt, Homo sapiens
  misc_RNA (1)...(19): siRNA sense strand
auguguacaaggugcuaaa

SEQ ID NO: 2483529 - RNA, 19 nt, Homo sapiens
  misc_RNA (1)...(19): siRNA sense strand
aagagaugguugaaggcaa

SEQ ID NO: 2483530 - RNA, 19 nt, Homo sapiens
  misc_RNA (1)...(19): siRNA sense strand
uggauauggccgaggaaca

SEQ ID NO: 2483531 - RNA, 19 nt, Homo sapiens
  misc_RNA (1)...(19): siRNA sense strand
agcagaaguaccuggaaua

SEQ ID NO: 2483532 - RNA, 19 nt, Homo sapiens
  misc_RNA (1)...(19): siRNA sense strand
agaugagggcccagaugaa

SEQ ID NO: 2483533 - RNA, 19 nt, Homo sapiens
  misc_RNA (1)...(19): siRNA sense strand
guguugaagacauggauga

SEQ ID NO: 2483534 - RNA, 19 nt, Homo sapiens
  misc_RNA (1)...(19): siRNA sense strand
gcgugcaaucggaaagcua

SEQ ID NO: 2483535 - RNA, 19 nt, Homo sapiens
  misc_RNA (1)...(19): siRNA sense strand
ucuuggaggcuguggauga

SEQ ID NO: 2483536 - RNA, 19 nt, Homo sapiens
  misc_RNA (1)...(19): siRNA sense strand
ucagagaauaugaugaaca

SEQ ID NO: 2483537 - RNA, 19 nt, Homo sapiens
  misc_RNA (1)...(19): siRNA sense strand
ccaagauggccacgagcau

SEQ ID NO: 2483538 - RNA, 19 nt, Homo sapiens
  misc_RNA (1)...(19): siRNA sense strand
gaccagaaaugcugccaga

SEQ ID NO: 2483539 - RNA, 19 nt, Homo sapiens
  misc_RNA (1)...(19): siRNA sense strand
aggagaucgacaaggaaga

SEQ ID NO: 2483540 - RNA, 19 nt, Homo sapiens
  misc_RNA (1)...(19): siRNA sense strand
ggaugaggacggagauuuu

SEQ ID NO: 2483541 - RNA, 19 nt, Homo sapiens
  misc_RNA (1)...(19): siRNA sense strand
agacccugguggaggcauu

SEQ ID NO: 2483542 - RNA, 19 nt, Homo sapiens
  misc_RNA (1)...(19): siRNA sense strand
ggcaagaggaccaagaagu

SEQ ID NO: 2483543 - RNA, 19 nt, Homo sapiens
  misc_RNA (1)...(19): siRNA sense strand
cgccaugagaccagcaaga

SEQ ID NO: 2483544 - RNA, 19 nt, Homo sapiens
  misc_RNA (1)...(19): siRNA sense strand
ggacggagauuuuggcgau

SEQ ID NO: 2483545 - RNA, 19 nt, Homo sapiens
  misc_RNA (1)...(19): siRNA sense strand
accugaugauuaaggacua

SEQ ID NO: 2483546 - RNA, 19 nt, Homo sapiens
  misc_RNA (1)...(19): siRNA sense strand
ggcaaauaaguuggugaaa

SEQ ID NO: 2483547 - RNA, 19 nt, Homo sapiens
  misc_RNA (1)...(19): siRNA sense strand
ggaaaagaaguuugggauc

SEQ ID NO: 2483548 - RNA, 19 nt, Homo sapiens
  misc_RNA (1)...(19): siRNA sense strand
ucgaaugagcccugggaac

SEQ ID NO: 2483549 - RNA, 19 nt, Homo sapiens
  misc_RNA (1)...(19): siRNA sense strand
ccaagaaguccaagcaccu

SEQ ID NO: 2483550 - RNA, 19 nt, Homo sapiens
  misc_RNA (1)...(19): siRNA sense strand
cgaggaggagagagagacu

SEQ ID NO: 2483551 - RNA, 19 nt, Homo sapiens
  misc_RNA (1)...(19): siRNA sense strand
cugcaggagagggcaaaua

SEQ ID NO: 2483552 - RNA, 19 nt, Homo sapiens
  misc_RNA (1)...(19): siRNA sense strand
gggaagcuucagcgugcaa

SEQ ID NO: 2483553 - RNA, 19 nt, Homo sapiens
  misc_RNA (1)...(19): siRNA sense strand
gggaugacauacaagucga

SEQ ID NO: 2483554 - RNA, 19 nt, Homo sapiens
  misc_RNA (1)...(19): siRNA sense strand
augagggcccagaugaaua

SEQ ID NO: 2483555 - RNA, 19 nt, Homo sapiens
  misc_RNA (1)...(19): siRNA sense strand
aagagaugguugaaggcaa

SEQ ID NO: 2483556 - RNA, 19 nt, Homo sapiens
  misc_RNA (1)...(19): siRNA sense strand
uggauauggccgaggaaca

SEQ ID NO: 2483557 - RNA, 19 nt, Homo sapiens
  misc_RNA (1)...(19): siRNA sense strand
agcagaaguaccuggaaua

SEQ ID NO: 2483558 - RNA, 19 nt, Homo sapiens
  misc_RNA (1)...(19): siRNA sense strand
agaugagggcccagaugaa

SEQ ID NO: 2483559 - RNA, 19 nt, Homo sapiens
  misc_RNA (1)...(19): siRNA sense strand
guguugaagacauggauga

SEQ ID NO: 2483560 - RNA, 19 nt, Homo sapiens
  misc_RNA (1)...(19): siRNA sense strand
gcgugcaaucggaaagcua

SEQ ID NO: 2483561 - RNA, 19 nt, Homo sapiens
  misc_RNA (1)...(19): siRNA sense strand
ucuuggaggcuguggauga

SEQ ID NO: 2483562 - RNA, 19 nt, Homo sapiens
  misc_RNA (1)...(19): siRNA sense strand
ucagagaauaugaugaaca

SEQ ID NO: 2483563 - RNA, 19 nt, Homo sapiens
  misc_RNA (1)...(19): siRNA sense strand
ccaagauggccacgagcau

SEQ ID NO: 2483564 - RNA, 19 nt, Homo sapiens
  misc_RNA (1)...(19): siRNA sense strand
gaccagaaaugcugccaga

SEQ ID NO: 2483565 - RNA, 19 nt, Homo sapiens
  misc_RNA (1)...(19): siRNA sense strand
aggagaucgacaaggaaga

SEQ ID NO: 2483566 - RNA, 19 nt, Homo sapiens
  misc_RNA (1)...(19): siRNA sense strand
ggaugaggacggagauuuu

SEQ ID NO: 2483567 - RNA, 19 nt, Homo sapiens
  misc_RNA (1)...(19): siRNA sense strand
agacccugguggaggcauu

SEQ ID NO: 2483568 - RNA, 19 nt, Homo sapiens
  misc_RNA (1)...(19): siRNA sense strand
ggcaagaggaccaagaagu

SEQ ID NO: 2483569 - RNA, 19 nt, Homo sapiens
  misc_RNA (1)...(19): siRNA sense strand
cgccaugagaccagcaaga

SEQ ID NO: 2483570 - RNA, 19 nt, Homo sapiens
  misc_RNA (1)...(19): siRNA sense strand
ggacggagauuuuggcgau

SEQ ID NO: 2483571 - RNA, 19 nt, Homo sapiens
  misc_RNA (1)...(19): siRNA sense strand
accugaugauuaaggacua

SEQ ID NO: 2483572 - RNA, 19 nt, Homo sapiens
  misc_RNA (1)...(19): siRNA sense strand
ggcaaauaaguuggugaaa

SEQ ID NO: 2483573 - RNA, 19 nt, Homo sapiens
  misc_RNA (1)...(19): siRNA sense strand
ggaaaagaaguuugggauc

SEQ ID NO: 2483574 - RNA, 19 nt, Homo sapiens
  misc_RNA (1)...(19): siRNA sense strand
ucgaaugagcccugggaac

SEQ ID NO: 2483575 - RNA, 19 nt, Homo sapiens
  misc_RNA (1)...(19): siRNA sense strand
ccaagaaguccaagcaccu

SEQ ID NO: 2483576 - RNA, 19 nt, Homo sapiens
  misc_RNA (1)...(19): siRNA sense strand
cgaggaggagagagagacu

SEQ ID NO: 2483577 - RNA, 19 nt, Homo sapiens
  misc_RNA (1)...(19): siRNA sense strand
cugcaggagagggcaaaua

SEQ ID NO: 2483578 - RNA, 19 nt, Homo sapiens
  misc_RNA (1)...(19): siRNA sense strand
gggaagcuucagcgugcaa

SEQ ID NO: 2483579 - RNA, 19 nt, Homo sapiens
  misc_RNA (1)...(19): siRNA sense strand
gggaugacauacaagucga

SEQ ID NO: 2483580 - RNA, 19 nt, Homo sapiens
  misc_RNA (1)...(19): siRNA sense strand
augagggcccagaugaaua

SEQ ID NO: 2483581 - RNA, 19 nt, Homo sapiens
  misc_RNA (1)...(19): siRNA sense strand
aagagaugguugaaggcaa

SEQ ID NO: 2483582 - RNA, 19 nt, Homo sapiens
  misc_RNA (1)...(19): siRNA sense strand
uggauauggccgaggaaca

SEQ ID NO: 2483583 - RNA, 19 nt, Homo sapiens
  misc_RNA (1)...(19): siRNA sense strand
agcagaaguaccuggaaua

SEQ ID NO: 2483584 - RNA, 19 nt, Homo sapiens
  misc_RNA (1)...(19): siRNA sense strand
agaugagggcccagaugaa

SEQ ID NO: 2483585 - RNA, 19 nt, Homo sapiens
  misc_RNA (1)...(19): siRNA sense strand
guguugaagacauggauga

SEQ ID NO: 2483586 - RNA, 19 nt, Homo sapiens
  misc_RNA (1)...(19): siRNA sense strand
gcgugcaaucggaaagcua

SEQ ID NO: 2483587 - RNA, 19 nt, Homo sapiens
  misc_RNA (1)...(19): siRNA sense strand
ucuuggaggcuguggauga

SEQ ID NO: 2483588 - RNA, 19 nt, Homo sapiens
  misc_RNA (1)...(19): siRNA sense strand
ucagagaauaugaugaaca

SEQ ID NO: 2483589 - RNA, 19 nt, Homo sapiens
  misc_RNA (1)...(19): siRNA sense strand
ccaagauggccacgagcau

SEQ ID NO: 2483590 - RNA, 19 nt, Homo sapiens
  misc_RNA (1)...(19): siRNA sense strand
gaccagaaaugcugccaga

SEQ ID NO: 2483591 - RNA, 19 nt, Homo sapiens
  misc_RNA (1)...(19): siRNA sense strand
aggagaucgacaaggaaga

SEQ ID NO: 2483592 - RNA, 19 nt, Homo sapiens
  misc_RNA (1)...(19): siRNA sense strand
ggaugaggacggagauuuu

SEQ ID NO: 2483593 - RNA, 19 nt, Homo sapiens
  misc_RNA (1)...(19): siRNA sense strand
agacccugguggaggcauu

SEQ ID NO: 2483594 - RNA, 19 nt, Homo sapiens
  misc_RNA (1)...(19): siRNA sense strand
ggcaagaggaccaagaagu

SEQ ID NO: 2483595 - RNA, 19 nt, Homo sapiens
  misc_RNA (1)...(19): siRNA sense strand
cgccaugagaccagcaaga

SEQ ID NO: 2483596 - RNA, 19 nt, Homo sapiens
  misc_RNA (1)...(19): siRNA sense strand
ggacggagauuuuggcgau

SEQ ID NO: 2483597 - RNA, 19 nt, Homo sapiens
  misc_RNA (1)...(19): siRNA sense strand
accugaugauuaaggacua

SEQ ID NO: 2483598 - RNA, 19 nt, Homo sapiens
  misc_RNA (1)...(19): siRNA sense strand
ggcaaauaaguuggugaaa

SEQ ID NO: 2483599 - RNA, 19 nt, Homo sapiens
  misc_RNA (1)...(19): siRNA sense strand
ggaaaagaaguuugggauc

SEQ ID NO: 2483600 - RNA, 19 nt, Homo sapiens
  misc_RNA (1)...(19): siRNA sense strand
ucgaaugagcccugggaac

SEQ ID NO: 2483601 - RNA, 19 nt, Homo sapiens
  misc_RNA (1)...(19): siRNA sense strand
ccaagaaguccaagcaccu

SEQ ID NO: 2483602 - RNA, 19 nt, Homo sapiens
  misc_RNA (1)...(19): siRNA sense strand
cgaggaggagagagagacu

SEQ ID NO: 2483603 - RNA, 19 nt, Homo sapiens
  misc_RNA (1)...(19): siRNA sense strand
cugcaggagagggcaaaua

SEQ ID NO: 2483604 - RNA, 19 nt, Homo sapiens
  misc_RNA (1)...(19): siRNA sense strand
gggaagcuucagcgugcaa

SEQ ID NO: 2483605 - RNA, 19 nt, Homo sapiens
  misc_RNA (1)...(19): siRNA sense strand
gggaugacauacaagucga

SEQ ID NO: 2483606 - RNA, 19 nt, Homo sapiens
  misc_RNA (1)...(19): siRNA sense strand
augagggcccagaugaaua

SEQ ID NO: 2483607 - RNA, 19 nt, Homo sapiens
  misc_RNA (1)...(19): siRNA sense strand
ggacaguagaggauggauu

SEQ ID NO: 2483608 - RNA, 19 nt, Homo sapiens
  misc_RNA (1)...(19): siRNA sense strand
aggauggauuacagaaaua

SEQ ID NO: 2483609 - RNA, 19 nt, Homo sapiens
  misc_RNA (1)...(19): siRNA sense strand
agacauacuguuagagaga

SEQ ID NO: 2483610 - RNA, 19 nt, Homo sapiens
  misc_RNA (1)...(19): siRNA sense strand
cagaaauacgagagaggau

SEQ ID NO: 2483611 - RNA, 19 nt, Homo sapiens
  misc_RNA (1)...(19): siRNA sense strand
augaagaauuagcagcaaa

SEQ ID NO: 2483612 - RNA, 19 nt, Homo sapiens
  misc_RNA (1)...(19): siRNA sense strand
cuauugcagucgaaagaaa

SEQ ID NO: 2483613 - RNA, 19 nt, Homo sapiens
  misc_RNA (1)...(19): siRNA sense strand
aauaagacggacagaagaa

SEQ ID NO: 2483614 - RNA, 19 nt, Homo sapiens
  misc_RNA (1)...(19): siRNA sense strand
augguagacuauagcaaua

SEQ ID NO: 2483615 - RNA, 19 nt, Homo sapiens
  misc_RNA (1)...(19): siRNA sense strand
gcugcaagguggaggcguu

SEQ ID NO: 2483616 - RNA, 19 nt, Homo sapiens
  misc_RNA (1)...(19): siRNA sense strand
uuggaagcauuuaaggaaa

SEQ ID NO: 2483617 - RNA, 19 nt, Homo sapiens
  misc_RNA (1)...(19): siRNA sense strand
agaaaagauaccaguguua

SEQ ID NO: 2483618 - RNA, 19 nt, Homo sapiens
  misc_RNA (1)...(19): siRNA sense strand
agaggauggauuacagaaa

SEQ ID NO: 2483619 - RNA, 19 nt, Homo sapiens
  misc_RNA (1)...(19): siRNA sense strand
ugaacagugcauagacaua

SEQ ID NO: 2483620 - RNA, 19 nt, Homo sapiens
  misc_RNA (1)...(19): siRNA sense strand
gauaaaugccuguagucau

SEQ ID NO: 2483621 - RNA, 19 nt, Homo sapiens
  misc_RNA (1)...(19): siRNA sense strand
gcuugaaagaguaugaaca

SEQ ID NO: 2483622 - RNA, 19 nt, Homo sapiens
  misc_RNA (1)...(19): siRNA sense strand
agaagaugguacugcaaca

SEQ ID NO: 2483623 - RNA, 19 nt, Homo sapiens
  misc_RNA (1)...(19): siRNA sense strand
gcuuaugugaacuggagaa

SEQ ID NO: 2483624 - RNA, 19 nt, Homo sapiens
  misc_RNA (1)...(19): siRNA sense strand
cgggauuagcugaugaaaa

SEQ ID NO: 2483625 - RNA, 19 nt, Homo sapiens
  misc_RNA (1)...(19): siRNA sense strand
cuguagucauuauggcuua

SEQ ID NO: 2483626 - RNA, 19 nt, Homo sapiens
  misc_RNA (1)...(19): siRNA sense strand
ggagauugucuaagaggca

SEQ ID NO: 2483627 - RNA, 19 nt, Homo sapiens
  misc_RNA (1)...(19): siRNA sense strand
acagagaaagggacagauu

SEQ ID NO: 2483628 - RNA, 19 nt, Homo sapiens
  misc_RNA (1)...(19): siRNA sense strand
ccuggaacuucuuggugaa

SEQ ID NO: 2483629 - RNA, 19 nt, Homo sapiens
  misc_RNA (1)...(19): siRNA sense strand
ggagauuauuugguagcaa

SEQ ID NO: 2483630 - RNA, 19 nt, Homo sapiens
  misc_RNA (1)...(19): siRNA sense strand
gagagaaggcagagcuuuu

SEQ ID NO: 2483631 - RNA, 19 nt, Homo sapiens
  misc_RNA (1)...(19): siRNA sense strand
augaaaaccuggaugaaga

SEQ ID NO: 2483632 - RNA, 19 nt, Homo sapiens
  misc_RNA (1)...(19): siRNA sense strand
caucgaucuuagugacauu

SEQ ID NO: 2483633 - RNA, 19 nt, Homo sapiens
  misc_RNA (1)...(19): siRNA sense strand
agaagaaggcaucaguaau

SEQ ID NO: 2483634 - RNA, 19 nt, Homo sapiens
  misc_RNA (1)...(19): siRNA sense strand
caaagagaugguagacuau

SEQ ID NO: 2483635 - RNA, 19 nt, Homo sapiens
  misc_RNA (1)...(19): siRNA sense strand
ugguagcaauugaagagaa

SEQ ID NO: 2483636 - RNA, 19 nt, Homo sapiens
  misc_RNA (1)...(19): siRNA sense strand
uugaaguaccagaucauua

SEQ ID NO: 2483637 - RNA, 19 nt, Homo sapiens
  misc_RNA (1)...(19): siRNA sense strand
aagcagaaccugaagccau

SEQ ID NO: 2483638 - RNA, 19 nt, Homo sapiens
  misc_RNA (1)...(19): siRNA sense strand
aagugaacagucuggauua

SEQ ID NO: 2483639 - RNA, 19 nt, Homo sapiens
  misc_RNA (1)...(19): siRNA sense strand
uguacaaagagaugguaga

SEQ ID NO: 2483640 - RNA, 19 nt, Homo sapiens
  misc_RNA (1)...(19): siRNA sense strand
caacagagaaagggacaga

SEQ ID NO: 2483641 - RNA, 19 nt, Homo sapiens
  misc_RNA (1)...(19): siRNA sense strand
gucaauuguugcuguggaa

SEQ ID NO: 2483642 - RNA, 19 nt, Homo sapiens
  misc_RNA (1)...(19): siRNA sense strand
cuguggaacuagaacugaa

SEQ ID NO: 2483643 - RNA, 19 nt, Homo sapiens
  misc_RNA (1)...(19): siRNA sense strand
cagcaaaagugguucagau

SEQ ID NO: 2483644 - RNA, 19 nt, Homo sapiens
  misc_RNA (1)...(19): siRNA sense strand
cggacucugugguggaaaa

SEQ ID NO: 2483645 - RNA, 19 nt, Homo sapiens
  misc_RNA (1)...(19): siRNA sense strand
caaucgaauaagacggaca

SEQ ID NO: 2483646 - RNA, 19 nt, Homo sapiens
  misc_RNA (1)...(19): siRNA sense strand
cagcaguggcucugaaaau

SEQ ID NO: 2483647 - RNA, 19 nt, Homo sapiens
  misc_RNA (1)...(19): siRNA sense strand
ugacaugcacagaaaugaa

SEQ ID NO: 2483648 - RNA, 19 nt, Homo sapiens
  misc_RNA (1)...(19): siRNA sense strand
ccacauaagaccaacaauc

SEQ ID NO: 2483649 - RNA, 19 nt, Homo sapiens
  misc_RNA (1)...(19): siRNA sense strand
agagaaagggacagauugu

SEQ ID NO: 2483650 - RNA, 19 nt, Homo sapiens
  misc_RNA (1)...(19): siRNA sense strand
gagaauaaaauguggugga

SEQ ID NO: 2483651 - RNA, 19 nt, Homo sapiens
  misc_RNA (1)...(19): siRNA sense strand
gcugaggcuggguggaauu

SEQ ID NO: 2483652 - RNA, 19 nt, Homo sapiens
  misc_RNA (1)...(19): siRNA sense strand
ugaagaauuagcagcaaaa

SEQ ID NO: 2483653 - RNA, 19 nt, Homo sapiens
  misc_RNA (1)...(19): siRNA sense strand
cuuuaacugccaugagcua

SEQ ID NO: 2483654 - RNA, 19 nt, Homo sapiens
  misc_RNA (1)...(19): siRNA sense strand
ugcuaaggaugaagauaca

SEQ ID NO: 2483655 - RNA, 19 nt, Homo sapiens
  misc_RNA (1)...(19): siRNA sense strand
guuugaaguaccagaucau

SEQ ID NO: 2483656 - RNA, 19 nt, Homo sapiens
  misc_RNA (1)...(19): siRNA sense strand
aagaccaacaaucgaauaa

SEQ ID NO: 2483657 - RNA, 19 nt, Homo sapiens
  misc_RNA (1)...(19): siRNA sense strand
ugacuaaagcagaaccuga

SEQ ID NO: 2483658 - RNA, 19 nt, Homo sapiens
  misc_RNA (1)...(19): siRNA sense strand
gugcuaaggaugaagauac

SEQ ID NO: 2483659 - RNA, 19 nt, Homo sapiens
  misc_RNA (1)...(19): siRNA sense strand
cguacacgcuugaaagagu

SEQ ID NO: 2483660 - RNA, 19 nt, Homo sapiens
  misc_RNA (1)...(19): siRNA sense strand
ccuucagagaccagaugua

SEQ ID NO: 2483661 - RNA, 19 nt, Homo sapiens
  misc_RNA (1)...(19): siRNA sense strand
agaugguagacuauagcaa

SEQ ID NO: 2483662 - RNA, 19 nt, Homo sapiens
  misc_RNA (1)...(19): siRNA sense strand
ucuuagugacauugaccaa

SEQ ID NO: 2483663 - RNA, 19 nt, Homo sapiens
  misc_RNA (1)...(19): siRNA sense strand
ccagaagaugguacugcaa

SEQ ID NO: 2483664 - RNA, 19 nt, Homo sapiens
  misc_RNA (1)...(19): siRNA sense strand
ucagagaugaaguugguau

SEQ ID NO: 2483665 - RNA, 19 nt, Homo sapiens
  misc_RNA (1)...(19): siRNA sense strand
ccgaaugauugggcauaau

SEQ ID NO: 2483666 - RNA, 19 nt, Homo sapiens
  misc_RNA (1)...(19): siRNA sense strand
agaaauacgagagaggauu

SEQ ID NO: 2483667 - RNA, 19 nt, Homo sapiens
  misc_RNA (1)...(19): siRNA sense strand
gacuaaagcagaaccugaa

SEQ ID NO: 2483668 - RNA, 19 nt, Homo sapiens
  misc_RNA (1)...(19): siRNA sense strand
gaaaugaaaugaaaagcca

SEQ ID NO: 2483669 - RNA, 19 nt, Homo sapiens
  misc_RNA (1)...(19): siRNA sense strand
uggaauugaagaagcagau

SEQ ID NO: 2483670 - RNA, 19 nt, Homo sapiens
  misc_RNA (1)...(19): siRNA sense strand
ggacaaaggcgcaagucga

SEQ ID NO: 2483671 - RNA, 19 nt, Homo sapiens
  misc_RNA (1)...(19): siRNA sense strand
uggaagcuguggagcggaa

SEQ ID NO: 2483672 - RNA, 19 nt, Homo sapiens
  misc_RNA (1)...(19): siRNA sense strand
gcgcaagucgagaggaaac

SEQ ID NO: 2483673 - RNA, 19 nt, Homo sapiens
  misc_RNA (1)...(19): siRNA sense strand
aggucaaggucaagcucau

SEQ ID NO: 2483674 - RNA, 19 nt, Homo sapiens
  misc_RNA (1)...(19): siRNA sense strand
ugcccgaagugaaggagaa

SEQ ID NO: 2483675 - RNA, 19 nt, Homo sapiens
  misc_RNA (1)...(19): siRNA sense strand
uuguauggucucugaggaa

SEQ ID NO: 2483676 - RNA, 19 nt, Homo sapiens
  misc_RNA (1)...(19): siRNA sense strand
acggaauggguaugggaca

SEQ ID NO: 2483677 - RNA, 19 nt, Homo sapiens
  misc_RNA (1)...(19): siRNA sense strand
acgggaagacacugggaca

SEQ ID NO: 2483678 - RNA, 19 nt, Homo sapiens
  misc_RNA (1)...(19): siRNA sense strand
cagaacaaagaaagggacu

SEQ ID NO: 2483679 - RNA, 19 nt, Homo sapiens
  misc_RNA (1)...(19): siRNA sense strand
gccuagugcccgaagugaa

SEQ ID NO: 2483680 - RNA, 19 nt, Homo sapiens
  misc_RNA (1)...(19): siRNA sense strand
aggaaggcggcaacagcua

SEQ ID NO: 2483681 - RNA, 19 nt, Homo sapiens
  misc_RNA (1)...(19): siRNA sense strand
agaauacagcugugaggca

SEQ ID NO: 2483682 - RNA, 19 nt, Homo sapiens
  misc_RNA (1)...(19): siRNA sense strand
ggacaaaggcgcaagucga

SEQ ID NO: 2483683 - RNA, 19 nt, Homo sapiens
  misc_RNA (1)...(19): siRNA sense strand
uggaagcuguggagcggaa

SEQ ID NO: 2483684 - RNA, 19 nt, Homo sapiens
  misc_RNA (1)...(19): siRNA sense strand
gcgcaagucgagaggaaac

SEQ ID NO: 2483685 - RNA, 19 nt, Homo sapiens
  misc_RNA (1)...(19): siRNA sense strand
aggucaaggucaagcucau

SEQ ID NO: 2483686 - RNA, 19 nt, Homo sapiens
  misc_RNA (1)...(19): siRNA sense strand
ugcccgaagugaaggagaa

SEQ ID NO: 2483687 - RNA, 19 nt, Homo sapiens
  misc_RNA (1)...(19): siRNA sense strand
uuguauggucucugaggaa

SEQ ID NO: 2483688 - RNA, 19 nt, Homo sapiens
  misc_RNA (1)...(19): siRNA sense strand
acggaauggguaugggaca

SEQ ID NO: 2483689 - RNA, 19 nt, Homo sapiens
  misc_RNA (1)...(19): siRNA sense strand
acgggaagacacugggaca

SEQ ID NO: 2483690 - RNA, 19 nt, Homo sapiens
  misc_RNA (1)...(19): siRNA sense strand
cagaacaaagaaagggacu

SEQ ID NO: 2483691 - RNA, 19 nt, Homo sapiens
  misc_RNA (1)...(19): siRNA sense strand
gccuagugcccgaagugaa

SEQ ID NO: 2483692 - RNA, 19 nt, Homo sapiens
  misc_RNA (1)...(19): siRNA sense strand
aggaaggcggcaacagcua

SEQ ID NO: 2483693 - RNA, 19 nt, Homo sapiens
  misc_RNA (1)...(19): siRNA sense strand
agaauacagcugugaggca

SEQ ID NO: 2483694 - RNA, 19 nt, Homo sapiens
  misc_RNA (1)...(19): siRNA sense strand
ggacaaaggcgcaagucga

SEQ ID NO: 2483695 - RNA, 19 nt, Homo sapiens
  misc_RNA (1)...(19): siRNA sense strand
uggaagcuguggagcggaa

SEQ ID NO: 2483696 - RNA, 19 nt, Homo sapiens
  misc_RNA (1)...(19): siRNA sense strand
gcgcaagucgagaggaaac

SEQ ID NO: 2483697 - RNA, 19 nt, Homo sapiens
  misc_RNA (1)...(19): siRNA sense strand
aggucaaggucaagcucau

SEQ ID NO: 2483698 - RNA, 19 nt, Homo sapiens
  misc_RNA (1)...(19): siRNA sense strand
ugcccgaagugaaggagaa

SEQ ID NO: 2483699 - RNA, 19 nt, Homo sapiens
  misc_RNA (1)...(19): siRNA sense strand
uuguauggucucugaggaa

SEQ ID NO: 2483700 - RNA, 19 nt, Homo sapiens
  misc_RNA (1)...(19): siRNA sense strand
acggaauggguaugggaca

SEQ ID NO: 2483701 - RNA, 19 nt, Homo sapiens
  misc_RNA (1)...(19): siRNA sense strand
acgggaagacacugggaca

SEQ ID NO: 2483702 - RNA, 19 nt, Homo sapiens
  misc_RNA (1)...(19): siRNA sense strand
cagaacaaagaaagggacu

SEQ ID NO: 2483703 - RNA, 19 nt, Homo sapiens
  misc_RNA (1)...(19): siRNA sense strand
gccuagugcccgaagugaa

SEQ ID NO: 2483704 - RNA, 19 nt, Homo sapiens
  misc_RNA (1)...(19): siRNA sense strand
aggaaggcggcaacagcua

SEQ ID NO: 2483705 - RNA, 19 nt, Homo sapiens
  misc_RNA (1)...(19): siRNA sense strand
agaauacagcugugaggca

SEQ ID NO: 2483706 - RNA, 19 nt, Homo sapiens
  misc_RNA (1)...(19): siRNA sense strand
ggacaaaggcgcaagucga

SEQ ID NO: 2483707 - RNA, 19 nt, Homo sapiens
  misc_RNA (1)...(19): siRNA sense strand
uggaagcuguggagcggaa

SEQ ID NO: 2483708 - RNA, 19 nt, Homo sapiens
  misc_RNA (1)...(19): siRNA sense strand
gcgcaagucgagaggaaac

SEQ ID NO: 2483709 - RNA, 19 nt, Homo sapiens
  misc_RNA (1)...(19): siRNA sense strand
aggucaaggucaagcucau

SEQ ID NO: 2483710 - RNA, 19 nt, Homo sapiens
  misc_RNA (1)...(19): siRNA sense strand
ugcccgaagugaaggagaa

SEQ ID NO: 2483711 - RNA, 19 nt, Homo sapiens
  misc_RNA (1)...(19): siRNA sense strand
uuguauggucucugaggaa

SEQ ID NO: 2483712 - RNA, 19 nt, Homo sapiens
  misc_RNA (1)...(19): siRNA sense strand
acggaauggguaugggaca

SEQ ID NO: 2483713 - RNA, 19 nt, Homo sapiens
  misc_RNA (1)...(19): siRNA sense strand
acgggaagacacugggaca

SEQ ID NO: 2483714 - RNA, 19 nt, Homo sapiens
  misc_RNA (1)...(19): siRNA sense strand
cagaacaaagaaagggacu

SEQ ID NO: 2483715 - RNA, 19 nt, Homo sapiens
  misc_RNA (1)...(19): siRNA sense strand
gccuagugcccgaagugaa

SEQ ID NO: 2483716 - RNA, 19 nt, Homo sapiens
  misc_RNA (1)...(19): siRNA sense strand
aggaaggcggcaacagcua

SEQ ID NO: 2483717 - RNA, 19 nt, Homo sapiens
  misc_RNA (1)...(19): siRNA sense strand
agaauacagcugugaggca

SEQ ID NO: 2483718 - RNA, 19 nt, Homo sapiens
  misc_RNA (1)...(19): siRNA sense strand
ggacaaaggcgcaagucga

SEQ ID NO: 2483719 - RNA, 19 nt, Homo sapiens
  misc_RNA (1)...(19): siRNA sense strand
uggaagcuguggagcggaa

SEQ ID NO: 2483720 - RNA, 19 nt, Homo sapiens
  misc_RNA (1)...(19): siRNA sense strand
gcgcaagucgagaggaaac

SEQ ID NO: 2483721 - RNA, 19 nt, Homo sapiens
  misc_RNA (1)...(19): siRNA sense strand
aggucaaggucaagcucau

SEQ ID NO: 2483722 - RNA, 19 nt, Homo sapiens
  misc_RNA (1)...(19): siRNA sense strand
ugcccgaagugaaggagaa

SEQ ID NO: 2483723 - RNA, 19 nt, Homo sapiens
  misc_RNA (1)...(19): siRNA sense strand
uuguauggucucugaggaa

SEQ ID NO: 2483724 - RNA, 19 nt, Homo sapiens
  misc_RNA (1)...(19): siRNA sense strand
acggaauggguaugggaca

SEQ ID NO: 2483725 - RNA, 19 nt, Homo sapiens
  misc_RNA (1)...(19): siRNA sense strand
acgggaagacacugggaca

SEQ ID NO: 2483726 - RNA, 19 nt, Homo sapiens
  misc_RNA (1)...(19): siRNA sense strand
cagaacaaagaaagggacu

SEQ ID NO: 2483727 - RNA, 19 nt, Homo sapiens
  misc_RNA (1)...(19): siRNA sense strand
gccuagugcccgaagugaa

SEQ ID NO: 2483728 - RNA, 19 nt, Homo sapiens
  misc_RNA (1)...(19): siRNA sense strand
aggaaggcggcaacagcua

SEQ ID NO: 2483729 - RNA, 19 nt, Homo sapiens
  misc_RNA (1)...(19): siRNA sense strand
agaauacagcugugaggca

SEQ ID NO: 2483730 - RNA, 19 nt, Homo sapiens
  misc_RNA (1)...(19): siRNA sense strand
gcuaagaaaucccgggacu

SEQ ID NO: 2483731 - RNA, 19 nt, Homo sapiens
  misc_RNA (1)...(19): siRNA sense strand
gaugaaggccugaagguca

SEQ ID NO: 2483732 - RNA, 19 nt, Homo sapiens
  misc_RNA (1)...(19): siRNA sense strand
gcacaagaaugaauggaac

SEQ ID NO: 2483733 - RNA, 19 nt, Homo sapiens
  misc_RNA (1)...(19): siRNA sense strand
cggugaugcaagaggagau

SEQ ID NO: 2483734 - RNA, 19 nt, Homo sapiens
  misc_RNA (1)...(19): siRNA sense strand
cggcacuuccagaggguga

SEQ ID NO: 2483735 - RNA, 19 nt, Homo sapiens
  misc_RNA (1)...(19): siRNA sense strand
cuaagaaaucccgggacua

SEQ ID NO: 2483736 - RNA, 19 nt, Homo sapiens
  misc_RNA (1)...(19): siRNA sense strand
ggacaagaacugugaccug

SEQ ID NO: 2483737 - RNA, 19 nt, Homo sapiens
  misc_RNA (1)...(19): siRNA sense strand
gggaacagcggcaugggau

SEQ ID NO: 2483738 - RNA, 19 nt, Homo sapiens
  misc_RNA (1)...(19): siRNA sense strand
ugaaagaguucuacgggga

SEQ ID NO: 2483739 - RNA, 19 nt, Homo sapiens
  misc_RNA (1)...(19): siRNA sense strand
gggugaugggccugauuga

SEQ ID NO: 2483740 - RNA, 19 nt, Homo sapiens
  misc_RNA (1)...(19): siRNA sense strand
uuaagaagaugauugcaga

SEQ ID NO: 2483741 - RNA, 19 nt, Homo sapiens
  misc_RNA (1)...(19): siRNA sense strand
uggugaggccucugaugaa

SEQ ID NO: 2483742 - RNA, 19 nt, Homo sapiens
  misc_RNA (1)...(19): siRNA sense strand
ccagaguuugagagaguau

SEQ ID NO: 2483743 - RNA, 19 nt, Homo sapiens
  misc_RNA (1)...(19): siRNA sense strand
uggaaaggcaagauuaaaa

SEQ ID NO: 2483744 - RNA, 19 nt, Homo sapiens
  misc_RNA (1)...(19): siRNA sense strand
ggagagugaaguacaacaa

SEQ ID NO: 2483745 - RNA, 19 nt, Homo sapiens
  misc_RNA (1)...(19): siRNA sense strand
ggagagugaaguacaacaa

SEQ ID NO: 2483746 - RNA, 19 nt, Homo sapiens
  misc_RNA (1)...(19): siRNA sense strand
ccucagaaugccagcaaca

SEQ ID NO: 2483747 - RNA, 19 nt, Homo sapiens
  misc_RNA (1)...(19): siRNA sense strand
cgacaaaacacaaagcaga

SEQ ID NO: 2483748 - RNA, 19 nt, Homo sapiens
  misc_RNA (1)...(19): siRNA sense strand
auguggagcccaugagcaa

SEQ ID NO: 2483749 - RNA, 19 nt, Homo sapiens
  misc_RNA (1)...(19): siRNA sense strand
gcagcuauguggagcccau

SEQ ID NO: 2483750 - RNA, 19 nt, Homo sapiens
  misc_RNA (1)...(19): siRNA sense strand
gaucagaagggcaagggca

SEQ ID NO: 2483751 - RNA, 19 nt, Homo sapiens
  misc_RNA (1)...(19): siRNA sense strand
ggaugaaagagucucgaca

SEQ ID NO: 2483752 - RNA, 19 nt, Homo sapiens
  misc_RNA (1)...(19): siRNA sense strand
gacaaaacacaaagcagaa

SEQ ID NO: 2483753 - RNA, 19 nt, Homo sapiens
  misc_RNA (1)...(19): siRNA sense strand
aaaaggaucagaagggcaa

SEQ ID NO: 2483754 - RNA, 19 nt, Homo sapiens
  misc_RNA (1)...(19): siRNA sense strand
ccucagaaugccagcaaca

SEQ ID NO: 2483755 - RNA, 19 nt, Homo sapiens
  misc_RNA (1)...(19): siRNA sense strand
cgacaaaacacaaagcaga

SEQ ID NO: 2483756 - RNA, 19 nt, Homo sapiens
  misc_RNA (1)...(19): siRNA sense strand
auguggagcccaugagcaa

SEQ ID NO: 2483757 - RNA, 19 nt, Homo sapiens
  misc_RNA (1)...(19): siRNA sense strand
gcagcuauguggagcccau

SEQ ID NO: 2483758 - RNA, 19 nt, Homo sapiens
  misc_RNA (1)...(19): siRNA sense strand
gaucagaagggcaagggca

SEQ ID NO: 2483759 - RNA, 19 nt, Homo sapiens
  misc_RNA (1)...(19): siRNA sense strand
ggaugaaagagucucgaca

SEQ ID NO: 2483760 - RNA, 19 nt, Homo sapiens
  misc_RNA (1)...(19): siRNA sense strand
gacaaaacacaaagcagaa

SEQ ID NO: 2483761 - RNA, 19 nt, Homo sapiens
  misc_RNA (1)...(19): siRNA sense strand
aaaaggaucagaagggcaa

SEQ ID NO: 2483762 - RNA, 19 nt, Homo sapiens
  misc_RNA (1)...(19): siRNA sense strand
cgacaaaacacaaagcaga

SEQ ID NO: 2483763 - RNA, 19 nt, Homo sapiens
  misc_RNA (1)...(19): siRNA sense strand
auguggagcccaugagcaa

SEQ ID NO: 2483764 - RNA, 19 nt, Homo sapiens
  misc_RNA (1)...(19): siRNA sense strand
gcagcuauguggagcccau

SEQ ID NO: 2483765 - RNA, 19 nt, Homo sapiens
  misc_RNA (1)...(19): siRNA sense strand
gaucagaagggcaagggca

SEQ ID NO: 2483766 - RNA, 19 nt, Homo sapiens
  misc_RNA (1)...(19): siRNA sense strand
gacaaaacacaaagcagaa

SEQ ID NO: 2483767 - RNA, 19 nt, Homo sapiens
  misc_RNA (1)...(19): siRNA sense strand
aaaaggaucagaagggcaa

SEQ ID NO: 2483768 - RNA, 19 nt, Homo sapiens
  misc_RNA (1)...(19): siRNA sense strand
acugaaaacuggugagaca

SEQ ID NO: 2483769 - RNA, 19 nt, Homo sapiens
  misc_RNA (1)...(19): siRNA sense strand
cugaagaagucgcggucga

SEQ ID NO: 2483770 - RNA, 19 nt, Homo sapiens
  misc_RNA (1)...(19): siRNA sense strand
cgaucgucccggagagcaa

SEQ ID NO: 2483771 - RNA, 19 nt, Homo sapiens
  misc_RNA (1)...(19): siRNA sense strand
cuacagaugcagaggugau

SEQ ID NO: 2483772 - RNA, 19 nt, Homo sapiens
  misc_RNA (1)...(19): siRNA sense strand
ggacauuauugacaggaac

SEQ ID NO: 2483773 - RNA, 19 nt, Homo sapiens
  misc_RNA (1)...(19): siRNA sense strand
uggacauuauugacaggaa

SEQ ID NO: 2483774 - RNA, 19 nt, Homo sapiens
  misc_RNA (1)...(19): siRNA sense strand
uuucacagacauugccaaa

SEQ ID NO: 2483775 - RNA, 19 nt, Homo sapiens
  misc_RNA (1)...(19): siRNA sense strand
cugcuauccggaaggaaau

SEQ ID NO: 2483776 - RNA, 19 nt, Homo sapiens
  misc_RNA (1)...(19): siRNA sense strand
acugcaaugaugagagcau

SEQ ID NO: 2483777 - RNA, 19 nt, Homo sapiens
  misc_RNA (1)...(19): siRNA sense strand
acugaaaacuggugagaca

SEQ ID NO: 2483778 - RNA, 19 nt, Homo sapiens
  misc_RNA (1)...(19): siRNA sense strand
cugaagaagucgcggucga

SEQ ID NO: 2483779 - RNA, 19 nt, Homo sapiens
  misc_RNA (1)...(19): siRNA sense strand
cgaucgucccggagagcaa

SEQ ID NO: 2483780 - RNA, 19 nt, Homo sapiens
  misc_RNA (1)...(19): siRNA sense strand
cuacagaugcagaggugau

SEQ ID NO: 2483781 - RNA, 19 nt, Homo sapiens
  misc_RNA (1)...(19): siRNA sense strand
ggacauuauugacaggaac

SEQ ID NO: 2483782 - RNA, 19 nt, Homo sapiens
  misc_RNA (1)...(19): siRNA sense strand
uggacauuauugacaggaa

SEQ ID NO: 2483783 - RNA, 19 nt, Homo sapiens
  misc_RNA (1)...(19): siRNA sense strand
uuucacagacauugccaaa

SEQ ID NO: 2483784 - RNA, 19 nt, Homo sapiens
  misc_RNA (1)...(19): siRNA sense strand
cugcuauccggaaggaaau

SEQ ID NO: 2483785 - RNA, 19 nt, Homo sapiens
  misc_RNA (1)...(19): siRNA sense strand
acugcaaugaugagagcau

SEQ ID NO: 2483786 - RNA, 19 nt, Homo sapiens
  misc_RNA (1)...(19): siRNA sense strand
ccagaaacgucaacggcuu

SEQ ID NO: 2483787 - RNA, 19 nt, Homo sapiens
  misc_RNA (1)...(19): siRNA sense strand
guauaaaacgagaagagaa

SEQ ID NO: 2483788 - RNA, 19 nt, Homo sapiens
  misc_RNA (1)...(19): siRNA sense strand
aggaauauacggaugaaaa

SEQ ID NO: 2483789 - RNA, 19 nt, Homo sapiens
  misc_RNA (1)...(19): siRNA sense strand
agagaaacuagaagaucuu

SEQ ID NO: 2483790 - RNA, 19 nt, Homo sapiens
  misc_RNA (1)...(19): siRNA sense strand
aguuugaucacaagaaaga

SEQ ID NO: 2483791 - RNA, 19 nt, Homo sapiens
  misc_RNA (1)...(19): siRNA sense strand
ccaccaagcaagagagacc

SEQ ID NO: 2483792 - RNA, 19 nt, Homo sapiens
  misc_RNA (1)...(19): siRNA sense strand
gagaugaaugaaagaccau

SEQ ID NO: 2483793 - RNA, 19 nt, Homo sapiens
  misc_RNA (1)...(19): siRNA sense strand
aauaaggagcccugggagu

SEQ ID NO: 2483794 - RNA, 19 nt, Homo sapiens
  misc_RNA (1)...(19): siRNA sense strand
aaauucaggucauaggaga

SEQ ID NO: 2483795 - RNA, 19 nt, Homo sapiens
  misc_RNA (1)...(19): siRNA sense strand
ccuugagagucaugaugga

SEQ ID NO: 2483796 - RNA, 19 nt, Homo sapiens
  misc_RNA (1)...(19): siRNA sense strand
caacaauuguacuggacag

SEQ ID NO: 2483797 - RNA, 19 nt, Homo sapiens
  misc_RNA (1)...(19): siRNA sense strand
gagaggaggaagagggagu

SEQ ID NO: 2483798 - RNA, 19 nt, Homo sapiens
  misc_RNA (1)...(19): siRNA sense strand
aagauuuggugcaggaaaa

SEQ ID NO: 2483799 - RNA, 19 nt, Homo sapiens
  misc_RNA (1)...(19): siRNA sense strand
aggaaaaguaccuggagua

SEQ ID NO: 2483800 - RNA, 19 nt, Homo sapiens
  misc_RNA (1)...(19): siRNA sense strand
cuuugagagaggaggaaga

SEQ ID NO: 2483801 - RNA, 19 nt, Homo sapiens
  misc_RNA (1)...(19): siRNA sense strand
ucacuaagaagguggcuga

SEQ ID NO: 2483802 - RNA, 19 nt, Homo sapiens
  misc_RNA (1)...(19): siRNA sense strand
ugauaauuguccuggucau

SEQ ID NO: 2483803 - RNA, 19 nt, Homo sapiens
  misc_RNA (1)...(19): siRNA sense strand
cggcaaagccucugagucc

SEQ ID NO: 2483804 - RNA, 19 nt, Homo sapiens
  misc_RNA (1)...(19): siRNA sense strand
ugggaggagcugaguguga

SEQ ID NO: 2483805 - RNA, 19 nt, Homo sapiens
  misc_RNA (1)...(19): siRNA sense strand
gaguaugugaucaagguca

SEQ ID NO: 2483806 - RNA, 19 nt, Homo sapiens
  misc_RNA (1)...(19): siRNA sense strand
gugugauggagguguauga

SEQ ID NO: 2483807 - RNA, 19 nt, Homo sapiens
  misc_RNA (1)...(19): siRNA sense strand
gagagaggaggaagaggga

SEQ ID NO: 2483808 - RNA, 19 nt, Homo sapiens
  misc_RNA (1)...(19): siRNA sense strand
gugaucaaggucagugcaa

SEQ ID NO: 2483809 - RNA, 19 nt, Homo sapiens
  misc_RNA (1)...(19): siRNA sense strand
aggcagaaaugcuggagag

SEQ ID NO: 2483810 - RNA, 19 nt, Homo sapiens
  misc_RNA (1)...(19): siRNA sense strand
aggagagggaagugguaaa

SEQ ID NO: 2483811 - RNA, 19 nt, Homo sapiens
  misc_RNA (1)...(19): siRNA sense strand
agggaggagcugaggcaaa

SEQ ID NO: 2483812 - RNA, 19 nt, Homo sapiens
  misc_RNA (1)...(19): siRNA sense strand
ggucaaugcuucccggaca

SEQ ID NO: 2483813 - RNA, 19 nt, Homo sapiens
  misc_RNA (1)...(19): siRNA sense strand
gagaccagcagaugugaua

SEQ ID NO: 2483814 - RNA, 19 nt, Homo sapiens
  misc_RNA (1)...(19): siRNA sense strand
ucaucaaauuccaggagau

SEQ ID NO: 2483815 - RNA, 19 nt, Homo sapiens
  misc_RNA (1)...(19): siRNA sense strand
ggcuaauggagaugucaaa

SEQ ID NO: 2483816 - RNA, 19 nt, Homo sapiens
  misc_RNA (1)...(19): siRNA sense strand
uggagaaagaagaugugaa

SEQ ID NO: 2483817 - RNA, 19 nt, Homo sapiens
  misc_RNA (1)...(19): siRNA sense strand
aggcgagaggcuugggcua

SEQ ID NO: 2483818 - RNA, 19 nt, Homo sapiens
  misc_RNA (1)...(19): siRNA sense strand
gggcugacucuguggggaa

SEQ ID NO: 2483819 - RNA, 19 nt, Homo sapiens
  misc_RNA (1)...(19): siRNA sense strand
acgacguagccgaggauga

SEQ ID NO: 2483820 - RNA, 19 nt, Homo sapiens
  misc_RNA (1)...(19): siRNA sense strand
gcugguagaaggagagaac

SEQ ID NO: 2483821 - RNA, 19 nt, Homo sapiens
  misc_RNA (1)...(19): siRNA sense strand
ggacguuuacauugagcau

SEQ ID NO: 2483822 - RNA, 19 nt, Homo sapiens
  misc_RNA (1)...(19): siRNA sense strand
aggagagaacacaaggauu

SEQ ID NO: 2483823 - RNA, 19 nt, Homo sapiens
  misc_RNA (1)...(19): siRNA sense strand
ggagaugaggcgagaggcu

SEQ ID NO: 2483824 - RNA, 19 nt, Homo sapiens
  misc_RNA (1)...(19): siRNA sense strand
cggugcugguagaaggaga

SEQ ID NO: 2483825 - RNA, 19 nt, Homo sapiens
  misc_RNA (1)...(19): siRNA sense strand
acaagauggcugaggccga

SEQ ID NO: 2483826 - RNA, 19 nt, Homo sapiens
  misc_RNA (1)...(19): siRNA sense strand
aguuugaaccucuggacau

SEQ ID NO: 2483827 - RNA, 19 nt, Homo sapiens
  misc_RNA (1)...(19): siRNA sense strand
caguacaaggagagggaag

SEQ ID NO: 2483828 - RNA, 19 nt, Homo sapiens
  misc_RNA (1)...(19): siRNA sense strand
ugucauacauugaucgacu

SEQ ID NO: 2483829 - RNA, 19 nt, Homo sapiens
  misc_RNA (1)...(19): siRNA sense strand
ccucugaucaugugcccaa

SEQ ID NO: 2483830 - RNA, 19 nt, Homo sapiens
  misc_RNA (1)...(19): siRNA sense strand
cgucagcgucacugguauu

SEQ ID NO: 2483831 - RNA, 19 nt, Homo sapiens
  misc_RNA (1)...(19): siRNA sense strand
aggcuaauggagaugucaa

SEQ ID NO: 2483832 - RNA, 19 nt, Homo sapiens
  misc_RNA (1)...(19): siRNA sense strand
ucucugaagucaaacccaa

SEQ ID NO: 2483833 - RNA, 19 nt, Homo sapiens
  misc_RNA (1)...(19): siRNA sense strand
cagcagcauacguggagau

SEQ ID NO: 2483834 - RNA, 19 nt, Homo sapiens
  misc_RNA (1)...(19): siRNA sense strand
ugguagaaggagagaacac

SEQ ID NO: 2483835 - RNA, 19 nt, Homo sapiens
  misc_RNA (1)...(19): siRNA sense strand
cggauugugaagaugaaca

SEQ ID NO: 2483836 - RNA, 19 nt, Homo sapiens
  misc_RNA (1)...(19): siRNA sense strand
agggaggagcugaggcaaa

SEQ ID NO: 2483837 - RNA, 19 nt, Homo sapiens
  misc_RNA (1)...(19): siRNA sense strand
ggucaaugcuucccggaca

SEQ ID NO: 2483838 - RNA, 19 nt, Homo sapiens
  misc_RNA (1)...(19): siRNA sense strand
gagaccagcagaugugaua

SEQ ID NO: 2483839 - RNA, 19 nt, Homo sapiens
  misc_RNA (1)...(19): siRNA sense strand
ucaucaaauuccaggagau

SEQ ID NO: 2483840 - RNA, 19 nt, Homo sapiens
  misc_RNA (1)...(19): siRNA sense strand
ggcuaauggagaugucaaa

SEQ ID NO: 2483841 - RNA, 19 nt, Homo sapiens
  misc_RNA (1)...(19): siRNA sense strand
uggagaaagaagaugugaa

SEQ ID NO: 2483842 - RNA, 19 nt, Homo sapiens
  misc_RNA (1)...(19): siRNA sense strand
aggcgagaggcuugggcua

SEQ ID NO: 2483843 - RNA, 19 nt, Homo sapiens
  misc_RNA (1)...(19): siRNA sense strand
gcugguagaaggagagaac

SEQ ID NO: 2483844 - RNA, 19 nt, Homo sapiens
  misc_RNA (1)...(19): siRNA sense strand
aggagagaacacaaggauu

SEQ ID NO: 2483845 - RNA, 19 nt, Homo sapiens
  misc_RNA (1)...(19): siRNA sense strand
ggagaugaggcgagaggcu

SEQ ID NO: 2483846 - RNA, 19 nt, Homo sapiens
  misc_RNA (1)...(19): siRNA sense strand
cggugcugguagaaggaga

SEQ ID NO: 2483847 - RNA, 19 nt, Homo sapiens
  misc_RNA (1)...(19): siRNA sense strand
acaagauggcugaggccga

SEQ ID NO: 2483848 - RNA, 19 nt, Homo sapiens
  misc_RNA (1)...(19): siRNA sense strand
aguuugaaccucuggacau

SEQ ID NO: 2483849 - RNA, 19 nt, Homo sapiens
  misc_RNA (1)...(19): siRNA sense strand
ugucauacauugaucgacu

SEQ ID NO: 2483850 - RNA, 19 nt, Homo sapiens
  misc_RNA (1)...(19): siRNA sense strand
ccucugaucaugugcccaa

SEQ ID NO: 2483851 - RNA, 19 nt, Homo sapiens
  misc_RNA (1)...(19): siRNA sense strand
cgucagcgucacugguauu

SEQ ID NO: 2483852 - RNA, 19 nt, Homo sapiens
  misc_RNA (1)...(19): siRNA sense strand
aggcuaauggagaugucaa

SEQ ID NO: 2483853 - RNA, 19 nt, Homo sapiens
  misc_RNA (1)...(19): siRNA sense strand
cagcagcauacguggagau

SEQ ID NO: 2483854 - RNA, 19 nt, Homo sapiens
  misc_RNA (1)...(19): siRNA sense strand
ugguagaaggagagaacac

SEQ ID NO: 2483855 - RNA, 19 nt, Homo sapiens
  misc_RNA (1)...(19): siRNA sense strand
cggauugugaagaugaaca

SEQ ID NO: 2483856 - RNA, 19 nt, Homo sapiens
  misc_RNA (1)...(19): siRNA sense strand
cgauaugugucuuggagga

SEQ ID NO: 2483857 - RNA, 19 nt, Homo sapiens
  misc_RNA (1)...(19): siRNA sense strand
aggaaggaucagagugaca

SEQ ID NO: 2483858 - RNA, 19 nt, Homo sapiens
  misc_RNA (1)...(19): siRNA sense strand
acugagacccacagaggaa

SEQ ID NO: 2483859 - RNA, 19 nt, Homo sapiens
  misc_RNA (1)...(19): siRNA sense strand
cagauaaacucuaugccuu

SEQ ID NO: 2483860 - RNA, 19 nt, Homo sapiens
  misc_RNA (1)...(19): siRNA sense strand
ccuaauagaugaacaccca

SEQ ID NO: 2483861 - RNA, 19 nt, Homo sapiens
  misc_RNA (1)...(19): siRNA sense strand
cagcauaaccuuugcccga

SEQ ID NO: 2483862 - RNA, 19 nt, Homo sapiens
  misc_RNA (1)...(19): siRNA sense strand
ucacuaugauauucggcua

SEQ ID NO: 2483863 - RNA, 19 nt, Homo sapiens
  misc_RNA (1)...(19): siRNA sense strand
agugacaguugauggcgaa

SEQ ID NO: 2483864 - RNA, 19 nt, Homo sapiens
  misc_RNA (1)...(19): siRNA sense strand
ccuggaagcaagaggccga

SEQ ID NO: 2483865 - RNA, 19 nt, Homo sapiens
  misc_RNA (1)...(19): siRNA sense strand
aguuuauggaagaaccuaa

SEQ ID NO: 2483866 - RNA, 19 nt, Homo sapiens
  misc_RNA (1)...(19): siRNA sense strand
gagugacaguugauggcga

SEQ ID NO: 2483867 - RNA, 19 nt, Homo sapiens
  misc_RNA (1)...(19): siRNA sense strand
ccuuacacccugagccaaa

SEQ ID NO: 2483868 - RNA, 19 nt, Homo sapiens
  misc_RNA (1)...(19): siRNA sense strand
cagaagaccaccaggccau

SEQ ID NO: 2483869 - RNA, 19 nt, Homo sapiens
  misc_RNA (1)...(19): siRNA sense strand
agguaaaguccccaggaaa

SEQ ID NO: 2483870 - RNA, 19 nt, Homo sapiens
  misc_RNA (1)...(19): siRNA sense strand
aauucuuagugaugccaaa

SEQ ID NO: 2483871 - RNA, 19 nt, Homo sapiens
  misc_RNA (1)...(19): siRNA sense strand
ccgagagacaagaauguga

SEQ ID NO: 2483872 - RNA, 19 nt, Homo sapiens
  misc_RNA (1)...(19): siRNA sense strand
uuugcaaguccuucagaaa

SEQ ID NO: 2483873 - RNA, 19 nt, Homo sapiens
  misc_RNA (1)...(19): siRNA sense strand
caaacugggaacaggacca

SEQ ID NO: 2483874 - RNA, 19 nt, Homo sapiens
  misc_RNA (1)...(19): siRNA sense strand
ccuuacacccugagccaaa

SEQ ID NO: 2483875 - RNA, 19 nt, Homo sapiens
  misc_RNA (1)...(19): siRNA sense strand
cagaagaccaccaggccau

SEQ ID NO: 2483876 - RNA, 19 nt, Homo sapiens
  misc_RNA (1)...(19): siRNA sense strand
agguaaaguccccaggaaa

SEQ ID NO: 2483877 - RNA, 19 nt, Homo sapiens
  misc_RNA (1)...(19): siRNA sense strand
aauucuuagugaugccaaa

SEQ ID NO: 2483878 - RNA, 19 nt, Homo sapiens
  misc_RNA (1)...(19): siRNA sense strand
ccgagagacaagaauguga

SEQ ID NO: 2483879 - RNA, 19 nt, Homo sapiens
  misc_RNA (1)...(19): siRNA sense strand
uuugcaaguccuucagaaa

SEQ ID NO: 2483880 - RNA, 19 nt, Homo sapiens
  misc_RNA (1)...(19): siRNA sense strand
caaacugggaacaggacca

SEQ ID NO: 2483881 - RNA, 19 nt, Homo sapiens
  misc_RNA (1)...(19): siRNA sense strand
ccaaaauagaugagaucaa

SEQ ID NO: 2483882 - RNA, 19 nt, Homo sapiens
  misc_RNA (1)...(19): siRNA sense strand
uggaaagaaagaagcguau

SEQ ID NO: 2483883 - RNA, 19 nt, Homo sapiens
  misc_RNA (1)...(19): siRNA sense strand
caccaagugcaaagaggaa

SEQ ID NO: 2483884 - RNA, 19 nt, Homo sapiens
  misc_RNA (1)...(19): siRNA sense strand
auggaaagaaagaagcgua

SEQ ID NO: 2483885 - RNA, 19 nt, Homo sapiens
  misc_RNA (1)...(19): siRNA sense strand
caaaaguguuaaugcccaa

SEQ ID NO: 2483886 - RNA, 19 nt, Homo sapiens
  misc_RNA (1)...(19): siRNA sense strand
agaaagaagcguaugacac

SEQ ID NO: 2483887 - RNA, 19 nt, Homo sapiens
  misc_RNA (1)...(19): siRNA sense strand
uguuaaugcccaagugacu

SEQ ID NO: 2483888 - RNA, 19 nt, Homo sapiens
  misc_RNA (1)...(19): siRNA sense strand
cccaagugacugacaucaa

SEQ ID NO: 2483889 - RNA, 19 nt, Homo sapiens
  misc_RNA (1)...(19): siRNA sense strand
aagaaagaagcguaugaca

SEQ ID NO: 2483890 - RNA, 19 nt, Homo sapiens
  misc_RNA (1)...(19): siRNA sense strand
auuacuagugacucagaaa

SEQ ID NO: 2483891 - RNA, 19 nt, Homo sapiens
  misc_RNA (1)...(19): siRNA sense strand
ccaaaauagaugagaucaa

SEQ ID NO: 2483892 - RNA, 19 nt, Homo sapiens
  misc_RNA (1)...(19): siRNA sense strand
uggaaagaaagaagcguau

SEQ ID NO: 2483893 - RNA, 19 nt, Homo sapiens
  misc_RNA (1)...(19): siRNA sense strand
caccaagugcaaagaggaa

SEQ ID NO: 2483894 - RNA, 19 nt, Homo sapiens
  misc_RNA (1)...(19): siRNA sense strand
auggaaagaaagaagcgua

SEQ ID NO: 2483895 - RNA, 19 nt, Homo sapiens
  misc_RNA (1)...(19): siRNA sense strand
caaaaguguuaaugcccaa

SEQ ID NO: 2483896 - RNA, 19 nt, Homo sapiens
  misc_RNA (1)...(19): siRNA sense strand
agaaagaagcguaugacac

SEQ ID NO: 2483897 - RNA, 19 nt, Homo sapiens
  misc_RNA (1)...(19): siRNA sense strand
uguuaaugcccaagugacu

SEQ ID NO: 2483898 - RNA, 19 nt, Homo sapiens
  misc_RNA (1)...(19): siRNA sense strand
cccaagugacugacaucaa

SEQ ID NO: 2483899 - RNA, 19 nt, Homo sapiens
  misc_RNA (1)...(19): siRNA sense strand
aagaaagaagcguaugaca

SEQ ID NO: 2483900 - RNA, 19 nt, Homo sapiens
  misc_RNA (1)...(19): siRNA sense strand
auuacuagugacucagaaa

SEQ ID NO: 2483901 - RNA, 19 nt, Homo sapiens
  misc_RNA (1)...(19): siRNA sense strand
caccaagugcaaagaggaa

SEQ ID NO: 2483902 - RNA, 19 nt, Homo sapiens
  misc_RNA (1)...(19): siRNA sense strand
caaaaguguuaaugcccaa

SEQ ID NO: 2483903 - RNA, 19 nt, Homo sapiens
  misc_RNA (1)...(19): siRNA sense strand
uguuaaugcccaagugacu

SEQ ID NO: 2483904 - RNA, 19 nt, Homo sapiens
  misc_RNA (1)...(19): siRNA sense strand
cccaagugacugacaucaa

SEQ ID NO: 2483905 - RNA, 19 nt, Homo sapiens
  misc_RNA (1)...(19): siRNA sense strand
caccaagugcaaagaggaa

SEQ ID NO: 2483906 - RNA, 19 nt, Homo sapiens
  misc_RNA (1)...(19): siRNA sense strand
caaaaguguuaaugcccaa

SEQ ID NO: 2483907 - RNA, 19 nt, Homo sapiens
  misc_RNA (1)...(19): siRNA sense strand
uguuaaugcccaagugacu

SEQ ID NO: 2483908 - RNA, 19 nt, Homo sapiens
  misc_RNA (1)...(19): siRNA sense strand
cccaagugacugacaucaa

SEQ ID NO: 2483909 - RNA, 19 nt, Homo sapiens
  misc_RNA (1)...(19): siRNA sense strand
caccaagugcaaagaggaa

SEQ ID NO: 2483910 - RNA, 19 nt, Homo sapiens
  misc_RNA (1)...(19): siRNA sense strand
caaaaguguuaaugcccaa

SEQ ID NO: 2483911 - RNA, 19 nt, Homo sapiens
  misc_RNA (1)...(19): siRNA sense strand
uguuaaugcccaagugacu

SEQ ID NO: 2483912 - RNA, 19 nt, Homo sapiens
  misc_RNA (1)...(19): siRNA sense strand
cccaagugacugacaucaa

SEQ ID NO: 2483913 - RNA, 19 nt, Homo sapiens
  misc_RNA (1)...(19): siRNA sense strand
caccaagugcaaagaggaa

SEQ ID NO: 2483914 - RNA, 19 nt, Homo sapiens
  misc_RNA (1)...(19): siRNA sense strand
caaaaguguuaaugcccaa

SEQ ID NO: 2483915 - RNA, 19 nt, Homo sapiens
  misc_RNA (1)...(19): siRNA sense strand
uguuaaugcccaagugacu

SEQ ID NO: 2483916 - RNA, 19 nt, Homo sapiens
  misc_RNA (1)...(19): siRNA sense strand
cccaagugacugacaucaa

SEQ ID NO: 2483917 - RNA, 19 nt, Homo sapiens
  misc_RNA (1)...(19): siRNA sense strand
caccaagugcaaagaggaa

SEQ ID NO: 2483918 - RNA, 19 nt, Homo sapiens
  misc_RNA (1)...(19): siRNA sense strand
caaaaguguuaaugcccaa

SEQ ID NO: 2483919 - RNA, 19 nt, Homo sapiens
  misc_RNA (1)...(19): siRNA sense strand
uguuaaugcccaagugacu

SEQ ID NO: 2483920 - RNA, 19 nt, Homo sapiens
  misc_RNA (1)...(19): siRNA sense strand
cccaagugacugacaucaa

SEQ ID NO: 2483921 - RNA, 19 nt, Homo sapiens
  misc_RNA (1)...(19): siRNA sense strand
caccaagugcaaagaggaa

SEQ ID NO: 2483922 - RNA, 19 nt, Homo sapiens
  misc_RNA (1)...(19): siRNA sense strand
caaaaguguuaaugcccaa

SEQ ID NO: 2483923 - RNA, 19 nt, Homo sapiens
  misc_RNA (1)...(19): siRNA sense strand
uguuaaugcccaagugacu

SEQ ID NO: 2483924 - RNA, 19 nt, Homo sapiens
  misc_RNA (1)...(19): siRNA sense strand
cccaagugacugacaucaa

SEQ ID NO: 2483925 - RNA, 19 nt, Homo sapiens
  misc_RNA (1)...(19): siRNA sense strand
agaagaagcaacagggaaa

SEQ ID NO: 2483926 - RNA, 19 nt, Homo sapiens
  misc_RNA (1)...(19): siRNA sense strand
gaacaauaugcaugagaaa

SEQ ID NO: 2483927 - RNA, 19 nt, Homo sapiens
  misc_RNA (1)...(19): siRNA sense strand
ccuuaggagaagagggaaa

SEQ ID NO: 2483928 - RNA, 19 nt, Homo sapiens
  misc_RNA (1)...(19): siRNA sense strand
ccuuaaagaccgagcgcaa

SEQ ID NO: 2483929 - RNA, 19 nt, Homo sapiens
  misc_RNA (1)...(19): siRNA sense strand
ccuagaaugucuugggaau

SEQ ID NO: 2483930 - RNA, 19 nt, Homo sapiens
  misc_RNA (1)...(19): siRNA sense strand
gccacaaacacuaggguaa

SEQ ID NO: 2483931 - RNA, 19 nt, Homo sapiens
  misc_RNA (1)...(19): siRNA sense strand
ggaucagaccugugaacua

SEQ ID NO: 2483932 - RNA, 19 nt, Homo sapiens
  misc_RNA (1)...(19): siRNA sense strand
gcuuaauggcuguuugaaa

SEQ ID NO: 2483933 - RNA, 19 nt, Homo sapiens
  misc_RNA (1)...(19): siRNA sense strand
uguaaugaacagugagaau

SEQ ID NO: 2483934 - RNA, 19 nt, Homo sapiens
  misc_RNA (1)...(19): siRNA sense strand
ggaaagacuguuugcaaau

SEQ ID NO: 2483935 - RNA, 19 nt, Homo sapiens
  misc_RNA (1)...(19): siRNA sense strand
cgguuaaauguuugugaua

SEQ ID NO: 2483936 - RNA, 19 nt, Homo sapiens
  misc_RNA (1)...(19): siRNA sense strand
gaagaaaagaaguugguaa

SEQ ID NO: 2483937 - RNA, 19 nt, Homo sapiens
  misc_RNA (1)...(19): siRNA sense strand
aggaaacaugcuagaauua

SEQ ID NO: 2483938 - RNA, 19 nt, Homo sapiens
  misc_RNA (1)...(19): siRNA sense strand
agagggaaacagaaagaaa

SEQ ID NO: 2483939 - RNA, 19 nt, Homo sapiens
  misc_RNA (1)...(19): siRNA sense strand
acucaaugguguaaaucaa

SEQ ID NO: 2483940 - RNA, 19 nt, Homo sapiens
  misc_RNA (1)...(19): siRNA sense strand
guguaaggccaaagaauca

SEQ ID NO: 2483941 - RNA, 19 nt, Homo sapiens
  misc_RNA (1)...(19): siRNA sense strand
ggaagaaaagucaaagaaa

SEQ ID NO: 2483942 - RNA, 19 nt, Homo sapiens
  misc_RNA (1)...(19): siRNA sense strand
gagcaggugaugaggaaaa

SEQ ID NO: 2483943 - RNA, 19 nt, Homo sapiens
  misc_RNA (1)...(19): siRNA sense strand
ggauauaggcauaagguuc

SEQ ID NO: 2483944 - RNA, 19 nt, Homo sapiens
  misc_RNA (1)...(19): siRNA sense strand
ccacaaacacuaggguaaa

SEQ ID NO: 2483945 - RNA, 19 nt, Homo sapiens
  misc_RNA (1)...(19): siRNA sense strand
gcgcaugaacagauuuaaa

SEQ ID NO: 2483946 - RNA, 19 nt, Homo sapiens
  misc_RNA (1)...(19): siRNA sense strand
cuaccaagauauuugacaa

SEQ ID NO: 2483947 - RNA, 19 nt, Homo sapiens
  misc_RNA (1)...(19): siRNA sense strand
gugcagaaucagaacagaa

SEQ ID NO: 2483948 - RNA, 19 nt, Homo sapiens
  misc_RNA (1)...(19): siRNA sense strand
guauaaagugcaaacacaa

SEQ ID NO: 2483949 - RNA, 19 nt, Homo sapiens
  misc_RNA (1)...(19): siRNA sense strand
gagcaggugcacaagguaa

SEQ ID NO: 2483950 - RNA, 19 nt, Homo sapiens
  misc_RNA (1)...(19): siRNA sense strand
ggguaaaaguuggacgaua

SEQ ID NO: 2483951 - RNA, 19 nt, Homo sapiens
  misc_RNA (1)...(19): siRNA sense strand
gcaaggauaagaugggcaa

SEQ ID NO: 2483952 - RNA, 19 nt, Homo sapiens
  misc_RNA (1)...(19): siRNA sense strand
ggaaaaggagccaggaauu

SEQ ID NO: 2483953 - RNA, 19 nt, Homo sapiens
  misc_RNA (1)...(19): siRNA sense strand
caagcgaccagcagggaaa

SEQ ID NO: 2483954 - RNA, 19 nt, Homo sapiens
  misc_RNA (1)...(19): siRNA sense strand
aguacuacguggaggcuuu

SEQ ID NO: 2483955 - RNA, 19 nt, Homo sapiens
  misc_RNA (1)...(19): siRNA sense strand
gggugagcuuauagaugaa

SEQ ID NO: 2483956 - RNA, 19 nt, Homo sapiens
  misc_RNA (1)...(19): siRNA sense strand
gugaagaagauaugccauu

SEQ ID NO: 2483957 - RNA, 19 nt, Homo sapiens
  misc_RNA (1)...(19): siRNA sense strand
cugcagaugagaaggaaaa

SEQ ID NO: 2483958 - RNA, 19 nt, Homo sapiens
  misc_RNA (1)...(19): siRNA sense strand
gugcaaacacaaagaaaau

SEQ ID NO: 2483959 - RNA, 19 nt, Homo sapiens
  misc_RNA (1)...(19): siRNA sense strand
gauucaagugacauagaaa

SEQ ID NO: 2483960 - RNA, 19 nt, Homo sapiens
  misc_RNA (1)...(19): siRNA sense strand
agaacaagcagguggacga

SEQ ID NO: 2483961 - RNA, 19 nt, Homo sapiens
  misc_RNA (1)...(19): siRNA sense strand
ugaaugaguauguggguga

SEQ ID NO: 2483962 - RNA, 19 nt, Homo sapiens
  misc_RNA (1)...(19): siRNA sense strand
uaacaguguccuugaaauu

SEQ ID NO: 2483963 - RNA, 19 nt, Homo sapiens
  misc_RNA (1)...(19): siRNA sense strand
gcucagagggagaacuaau

SEQ ID NO: 2483964 - RNA, 19 nt, Homo sapiens
  misc_RNA (1)...(19): siRNA sense strand
aggaagaccgaaagaauga

SEQ ID NO: 2483965 - RNA, 19 nt, Homo sapiens
  misc_RNA (1)...(19): siRNA sense strand
gcgccaauauccagagguu

SEQ ID NO: 2483966 - RNA, 19 nt, Homo sapiens
  misc_RNA (1)...(19): siRNA sense strand
ggguguaaggccaaagaau

SEQ ID NO: 2483967 - RNA, 19 nt, Homo sapiens
  misc_RNA (1)...(19): siRNA sense strand
cagaaucagaacagaagua

SEQ ID NO: 2483968 - RNA, 19 nt, Homo sapiens
  misc_RNA (1)...(19): siRNA sense strand
gugagaacucguuaauaaa

SEQ ID NO: 2483969 - RNA, 19 nt, Homo sapiens
  misc_RNA (1)...(19): siRNA sense strand
gccaauauccagagguuga

SEQ ID NO: 2483970 - RNA, 19 nt, Homo sapiens
  misc_RNA (1)...(19): siRNA sense strand
gggaauggaaagacuguuu

SEQ ID NO: 2483971 - RNA, 19 nt, Homo sapiens
  misc_RNA (1)...(19): siRNA sense strand
gaggaaaagcgaagugauu

SEQ ID NO: 2483972 - RNA, 19 nt, Homo sapiens
  misc_RNA (1)...(19): siRNA sense strand
ggaugaguuuccagagcau

SEQ ID NO: 2483973 - RNA, 19 nt, Homo sapiens
  misc_RNA (1)...(19): siRNA sense strand
cguugcaacuguaaagcua

SEQ ID NO: 2483974 - RNA, 19 nt, Homo sapiens
  misc_RNA (1)...(19): siRNA sense strand
agggugaauuugugaauga

SEQ ID NO: 2483975 - RNA, 19 nt, Homo sapiens
  misc_RNA (1)...(19): siRNA sense strand
cgucauguuugaaggcaga

SEQ ID NO: 2483976 - RNA, 19 nt, Homo sapiens
  misc_RNA (1)...(19): siRNA sense strand
cacaaaugauccugaguca

SEQ ID NO: 2483977 - RNA, 19 nt, Homo sapiens
  misc_RNA (1)...(19): siRNA sense strand
gucuaaaacuacugaacaa

SEQ ID NO: 2483978 - RNA, 19 nt, Homo sapiens
  misc_RNA (1)...(19): siRNA sense strand
gaucuagugcucagaacaa

SEQ ID NO: 2483979 - RNA, 19 nt, Homo sapiens
  misc_RNA (1)...(19): siRNA sense strand
gcacacagacauuggcaca

SEQ ID NO: 2483980 - RNA, 19 nt, Homo sapiens
  misc_RNA (1)...(19): siRNA sense strand
ccacauacaauuugaagca

SEQ ID NO: 2483981 - RNA, 19 nt, Homo sapiens
  misc_RNA (1)...(19): siRNA sense strand
uggagcaggugaugaggaa

SEQ ID NO: 2483982 - RNA, 19 nt, Homo sapiens
  misc_RNA (1)...(19): siRNA sense strand
ggguaaaagcaaaacagaa

SEQ ID NO: 2483983 - RNA, 19 nt, Homo sapiens
  misc_RNA (1)...(19): siRNA sense strand
aguauaaagugcaaacaca

SEQ ID NO: 2483984 - RNA, 19 nt, Homo sapiens
  misc_RNA (1)...(19): siRNA sense strand
acugagaugccaagaggaa

SEQ ID NO: 2483985 - RNA, 19 nt, Homo sapiens
  misc_RNA (1)...(19): siRNA sense strand
ugaacuacccagaagaaau

SEQ ID NO: 2483986 - RNA, 19 nt, Homo sapiens
  misc_RNA (1)...(19): siRNA sense strand
cugaggaauugcuaguuaa

SEQ ID NO: 2483987 - RNA, 19 nt, Homo sapiens
  misc_RNA (1)...(19): siRNA sense strand
aguuaaaacgccaggaaau

SEQ ID NO: 2483988 - RNA, 19 nt, Homo sapiens
  misc_RNA (1)...(19): siRNA sense strand
ggagaauggcauaacugaa

SEQ ID NO: 2483989 - RNA, 19 nt, Homo sapiens
  misc_RNA (1)...(19): siRNA sense strand
gggagauugucuggguaaa

SEQ ID NO: 2483990 - RNA, 19 nt, Homo sapiens
  misc_RNA (1)...(19): siRNA sense strand
ggauagacucugaaugcau

SEQ ID NO: 2483991 - RNA, 19 nt, Homo sapiens
  misc_RNA (1)...(19): siRNA sense strand
acaucaauucgaagagcua

SEQ ID NO: 2483992 - RNA, 19 nt, Homo sapiens
  misc_RNA (1)...(19): siRNA sense strand
gaacagugagaaugaugaa

SEQ ID NO: 2483993 - RNA, 19 nt, Homo sapiens
  misc_RNA (1)...(19): siRNA sense strand
agaagaagcaacagggaaa

SEQ ID NO: 2483994 - RNA, 19 nt, Homo sapiens
  misc_RNA (1)...(19): siRNA sense strand
gaacaauaugcaugagaaa

SEQ ID NO: 2483995 - RNA, 19 nt, Homo sapiens
  misc_RNA (1)...(19): siRNA sense strand
ccuuaggagaagagggaaa

SEQ ID NO: 2483996 - RNA, 19 nt, Homo sapiens
  misc_RNA (1)...(19): siRNA sense strand
ccuuaaagaccgagcgcaa

SEQ ID NO: 2483997 - RNA, 19 nt, Homo sapiens
  misc_RNA (1)...(19): siRNA sense strand
ccuagaaugucuugggaau

SEQ ID NO: 2483998 - RNA, 19 nt, Homo sapiens
  misc_RNA (1)...(19): siRNA sense strand
gccacaaacacuaggguaa

SEQ ID NO: 2483999 - RNA, 19 nt, Homo sapiens
  misc_RNA (1)...(19): siRNA sense strand
gcuuaauggcuguuugaaa

SEQ ID NO: 2484000 - RNA, 19 nt, Homo sapiens
  misc_RNA (1)...(19): siRNA sense strand
uguaaugaacagugagaau

SEQ ID NO: 2484001 - RNA, 19 nt, Homo sapiens
  misc_RNA (1)...(19): siRNA sense strand
ggaaagacuguuugcaaau

SEQ ID NO: 2484002 - RNA, 19 nt, Homo sapiens
  misc_RNA (1)...(19): siRNA sense strand
cgguuaaauguuugugaua

SEQ ID NO: 2484003 - RNA, 19 nt, Homo sapiens
  misc_RNA (1)...(19): siRNA sense strand
gaagaaaagaaguugguaa

SEQ ID NO: 2484004 - RNA, 19 nt, Homo sapiens
  misc_RNA (1)...(19): siRNA sense strand
aggaaacaugcuagaauua

SEQ ID NO: 2484005 - RNA, 19 nt, Homo sapiens
  misc_RNA (1)...(19): siRNA sense strand
agagggaaacagaaagaaa

SEQ ID NO: 2484006 - RNA, 19 nt, Homo sapiens
  misc_RNA (1)...(19): siRNA sense strand
acucaaugguguaaaucaa

SEQ ID NO: 2484007 - RNA, 19 nt, Homo sapiens
  misc_RNA (1)...(19): siRNA sense strand
guguaaggccaaagaauca

SEQ ID NO: 2484008 - RNA, 19 nt, Homo sapiens
  misc_RNA (1)...(19): siRNA sense strand
ggaagaaaagucaaagaaa

SEQ ID NO: 2484009 - RNA, 19 nt, Homo sapiens
  misc_RNA (1)...(19): siRNA sense strand
gagcaggugaugaggaaaa

SEQ ID NO: 2484010 - RNA, 19 nt, Homo sapiens
  misc_RNA (1)...(19): siRNA sense strand
ggauauaggcauaagguuc

SEQ ID NO: 2484011 - RNA, 19 nt, Homo sapiens
  misc_RNA (1)...(19): siRNA sense strand
ccacaaacacuaggguaaa

SEQ ID NO: 2484012 - RNA, 19 nt, Homo sapiens
  misc_RNA (1)...(19): siRNA sense strand
gcgcaugaacagauuuaaa

SEQ ID NO: 2484013 - RNA, 19 nt, Homo sapiens
  misc_RNA (1)...(19): siRNA sense strand
cuaccaagauauuugacaa

SEQ ID NO: 2484014 - RNA, 19 nt, Homo sapiens
  misc_RNA (1)...(19): siRNA sense strand
gugcagaaucagaacagaa

SEQ ID NO: 2484015 - RNA, 19 nt, Homo sapiens
  misc_RNA (1)...(19): siRNA sense strand
guauaaagugcaaacacaa

SEQ ID NO: 2484016 - RNA, 19 nt, Homo sapiens
  misc_RNA (1)...(19): siRNA sense strand
gagcaggugcacaagguaa

SEQ ID NO: 2484017 - RNA, 19 nt, Homo sapiens
  misc_RNA (1)...(19): siRNA sense strand
ggguaaaaguuggacgaua

SEQ ID NO: 2484018 - RNA, 19 nt, Homo sapiens
  misc_RNA (1)...(19): siRNA sense strand
gcaaggauaagaugggcaa

SEQ ID NO: 2484019 - RNA, 19 nt, Homo sapiens
  misc_RNA (1)...(19): siRNA sense strand
ggaaaaggagccaggaauu

SEQ ID NO: 2484020 - RNA, 19 nt, Homo sapiens
  misc_RNA (1)...(19): siRNA sense strand
caagcgaccagcagggaaa

SEQ ID NO: 2484021 - RNA, 19 nt, Homo sapiens
  misc_RNA (1)...(19): siRNA sense strand
aguacuacguggaggcuuu

SEQ ID NO: 2484022 - RNA, 19 nt, Homo sapiens
  misc_RNA (1)...(19): siRNA sense strand
gggugagcuuauagaugaa

SEQ ID NO: 2484023 - RNA, 19 nt, Homo sapiens
  misc_RNA (1)...(19): siRNA sense strand
gugaagaagauaugccauu

SEQ ID NO: 2484024 - RNA, 19 nt, Homo sapiens
  misc_RNA (1)...(19): siRNA sense strand
cugcagaugagaaggaaaa

SEQ ID NO: 2484025 - RNA, 19 nt, Homo sapiens
  misc_RNA (1)...(19): siRNA sense strand
gugcaaacacaaagaaaau

SEQ ID NO: 2484026 - RNA, 19 nt, Homo sapiens
  misc_RNA (1)...(19): siRNA sense strand
gauucaagugacauagaaa

SEQ ID NO: 2484027 - RNA, 19 nt, Homo sapiens
  misc_RNA (1)...(19): siRNA sense strand
agaacaagcagguggacga

SEQ ID NO: 2484028 - RNA, 19 nt, Homo sapiens
  misc_RNA (1)...(19): siRNA sense strand
ugaaugaguauguggguga

SEQ ID NO: 2484029 - RNA, 19 nt, Homo sapiens
  misc_RNA (1)...(19): siRNA sense strand
uaacaguguccuugaaauu

SEQ ID NO: 2484030 - RNA, 19 nt, Homo sapiens
  misc_RNA (1)...(19): siRNA sense strand
gcucagagggagaacuaau

SEQ ID NO: 2484031 - RNA, 19 nt, Homo sapiens
  misc_RNA (1)...(19): siRNA sense strand
aggaagaccgaaagaauga

SEQ ID NO: 2484032 - RNA, 19 nt, Homo sapiens
  misc_RNA (1)...(19): siRNA sense strand
gcgccaauauccagagguu

SEQ ID NO: 2484033 - RNA, 19 nt, Homo sapiens
  misc_RNA (1)...(19): siRNA sense strand
ggguguaaggccaaagaau

SEQ ID NO: 2484034 - RNA, 19 nt, Homo sapiens
  misc_RNA (1)...(19): siRNA sense strand
cagaaucagaacagaagua

SEQ ID NO: 2484035 - RNA, 19 nt, Homo sapiens
  misc_RNA (1)...(19): siRNA sense strand
gugagaacucguuaauaaa

SEQ ID NO: 2484036 - RNA, 19 nt, Homo sapiens
  misc_RNA (1)...(19): siRNA sense strand
gccaauauccagagguuga

SEQ ID NO: 2484037 - RNA, 19 nt, Homo sapiens
  misc_RNA (1)...(19): siRNA sense strand
gggaauggaaagacuguuu

SEQ ID NO: 2484038 - RNA, 19 nt, Homo sapiens
  misc_RNA (1)...(19): siRNA sense strand
gaggaaaagcgaagugauu

SEQ ID NO: 2484039 - RNA, 19 nt, Homo sapiens
  misc_RNA (1)...(19): siRNA sense strand
ggaugaguuuccagagcau

SEQ ID NO: 2484040 - RNA, 19 nt, Homo sapiens
  misc_RNA (1)...(19): siRNA sense strand
cguugcaacuguaaagcua

SEQ ID NO: 2484041 - RNA, 19 nt, Homo sapiens
  misc_RNA (1)...(19): siRNA sense strand
agggugaauuugugaauga

SEQ ID NO: 2484042 - RNA, 19 nt, Homo sapiens
  misc_RNA (1)...(19): siRNA sense strand
cgucauguuugaaggcaga

SEQ ID NO: 2484043 - RNA, 19 nt, Homo sapiens
  misc_RNA (1)...(19): siRNA sense strand
cacaaaugauccugaguca

SEQ ID NO: 2484044 - RNA, 19 nt, Homo sapiens
  misc_RNA (1)...(19): siRNA sense strand
gucuaaaacuacugaacaa

SEQ ID NO: 2484045 - RNA, 19 nt, Homo sapiens
  misc_RNA (1)...(19): siRNA sense strand
gaucuagugcucagaacaa

SEQ ID NO: 2484046 - RNA, 19 nt, Homo sapiens
  misc_RNA (1)...(19): siRNA sense strand
gcacacagacauuggcaca

SEQ ID NO: 2484047 - RNA, 19 nt, Homo sapiens
  misc_RNA (1)...(19): siRNA sense strand
ccacauacaauuugaagca

SEQ ID NO: 2484048 - RNA, 19 nt, Homo sapiens
  misc_RNA (1)...(19): siRNA sense strand
uggagcaggugaugaggaa

SEQ ID NO: 2484049 - RNA, 19 nt, Homo sapiens
  misc_RNA (1)...(19): siRNA sense strand
ggguaaaagcaaaacagaa

SEQ ID NO: 2484050 - RNA, 19 nt, Homo sapiens
  misc_RNA (1)...(19): siRNA sense strand
aguauaaagugcaaacaca

SEQ ID NO: 2484051 - RNA, 19 nt, Homo sapiens
  misc_RNA (1)...(19): siRNA sense strand
acugagaugccaagaggaa

SEQ ID NO: 2484052 - RNA, 19 nt, Homo sapiens
  misc_RNA (1)...(19): siRNA sense strand
cugaggaauugcuaguuaa

SEQ ID NO: 2484053 - RNA, 19 nt, Homo sapiens
  misc_RNA (1)...(19): siRNA sense strand
aguuaaaacgccaggaaau

SEQ ID NO: 2484054 - RNA, 19 nt, Homo sapiens
  misc_RNA (1)...(19): siRNA sense strand
ggagaauggcauaacugaa

SEQ ID NO: 2484055 - RNA, 19 nt, Homo sapiens
  misc_RNA (1)...(19): siRNA sense strand
gggagauugucuggguaaa

SEQ ID NO: 2484056 - RNA, 19 nt, Homo sapiens
  misc_RNA (1)...(19): siRNA sense strand
ggauagacucugaaugcau

SEQ ID NO: 2484057 - RNA, 19 nt, Homo sapiens
  misc_RNA (1)...(19): siRNA sense strand
acaucaauucgaagagcua

SEQ ID NO: 2484058 - RNA, 19 nt, Homo sapiens
  misc_RNA (1)...(19): siRNA sense strand
gaacagugagaaugaugaa

SEQ ID NO: 2484059 - RNA, 19 nt, Homo sapiens
  misc_RNA (1)...(19): siRNA sense strand
acaagcagguggacgagaa

SEQ ID NO: 2484060 - RNA, 19 nt, Homo sapiens
  misc_RNA (1)...(19): siRNA sense strand
aaucagaaaccuagaggaa

SEQ ID NO: 2484061 - RNA, 19 nt, Homo sapiens
  misc_RNA (1)...(19): siRNA sense strand
aaggaaagcuggagggcca

SEQ ID NO: 2484062 - RNA, 19 nt, Homo sapiens
  misc_RNA (1)...(19): siRNA sense strand
cagaauguacagagaggaa

SEQ ID NO: 2484063 - RNA, 19 nt, Homo sapiens
  misc_RNA (1)...(19): siRNA sense strand
gguagaacuggguggcaaa

SEQ ID NO: 2484064 - RNA, 19 nt, Homo sapiens
  misc_RNA (1)...(19): siRNA sense strand
cuaaauuggcagugacgaa

SEQ ID NO: 2484065 - RNA, 19 nt, Homo sapiens
  misc_RNA (1)...(19): siRNA sense strand
ggguagaacuggguggcaa

SEQ ID NO: 2484066 - RNA, 19 nt, Homo sapiens
  misc_RNA (1)...(19): siRNA sense strand
aggacaacaaagagacuua

SEQ ID NO: 2484067 - RNA, 19 nt, Homo sapiens
  misc_RNA (1)...(19): siRNA sense strand
ugauaaggccacagagcau

SEQ ID NO: 2484068 - RNA, 19 nt, Homo sapiens
  misc_RNA (1)...(19): siRNA sense strand
gaauguacagagaggaaga

SEQ ID NO: 2484069 - RNA, 19 nt, Homo sapiens
  misc_RNA (1)...(19): siRNA sense strand
gguuagcagacuucagaua

SEQ ID NO: 2484070 - RNA, 19 nt, Homo sapiens
  misc_RNA (1)...(19): siRNA sense strand
ugacagacucgcugagaga

SEQ ID NO: 2484071 - RNA, 19 nt, Homo sapiens
  misc_RNA (1)...(19): siRNA sense strand
uggaaaauguguauggcua

SEQ ID NO: 2484072 - RNA, 19 nt, Homo sapiens
  misc_RNA (1)...(19): siRNA sense strand
gugcaaggggaauggaaua

SEQ ID NO: 2484073 - RNA, 19 nt, Homo sapiens
  misc_RNA (1)...(19): siRNA sense strand
cugaagaaauaaaugcaga

SEQ ID NO: 2484074 - RNA, 19 nt, Homo sapiens
  misc_RNA (1)...(19): siRNA sense strand
auauagcaauggagagaca

SEQ ID NO: 2484075 - RNA, 19 nt, Homo sapiens
  misc_RNA (1)...(19): siRNA sense strand
gagugagaccucuggagaa

SEQ ID NO: 2484076 - RNA, 19 nt, Homo sapiens
  misc_RNA (1)...(19): siRNA sense strand
auacugaagcuauuggaaa

SEQ ID NO: 2484077 - RNA, 19 nt, Homo sapiens
  misc_RNA (1)...(19): siRNA sense strand
acucagagcuacagaugca

SEQ ID NO: 2484078 - RNA, 19 nt, Homo sapiens
  misc_RNA (1)...(19): siRNA sense strand
gaggaagauguguguaaau

SEQ ID NO: 2484079 - RNA, 19 nt, Homo sapiens
  misc_RNA (1)...(19): siRNA sense strand
augcagaugaugagauaga

SEQ ID NO: 2484080 - RNA, 19 nt, Homo sapiens
  misc_RNA (1)...(19): siRNA sense strand
cugcaaucacugagcaaaa

SEQ ID NO: 2484081 - RNA, 19 nt, Homo sapiens
  misc_RNA (1)...(19): siRNA sense strand
acauauagcaauggagaga

SEQ ID NO: 2484082 - RNA, 19 nt, Homo sapiens
  misc_RNA (1)...(19): siRNA sense strand
aguauguggacuugacuaa

SEQ ID NO: 2484083 - RNA, 19 nt, Homo sapiens
  misc_RNA (1)...(19): siRNA sense strand
auauaaacucagagcuaca

SEQ ID NO: 2484084 - RNA, 19 nt, Homo sapiens
  misc_RNA (1)...(19): siRNA sense strand
cugaaggacaacaaagaga

SEQ ID NO: 2484085 - RNA, 19 nt, Homo sapiens
  misc_RNA (1)...(19): siRNA sense strand
ucuagaaaucagaaaccua

SEQ ID NO: 2484086 - RNA, 19 nt, Homo sapiens
  misc_RNA (1)...(19): siRNA sense strand
gcuugcaggagcuguaaua

SEQ ID NO: 2484087 - RNA, 19 nt, Homo sapiens
  misc_RNA (1)...(19): siRNA sense strand
gcagaggagaccaagucaa

SEQ ID NO: 2484088 - RNA, 19 nt, Homo sapiens
  misc_RNA (1)...(19): siRNA sense strand
gucucaugcugaaggacaa

SEQ ID NO: 2484089 - RNA, 19 nt, Homo sapiens
  misc_RNA (1)...(19): siRNA sense strand
uugcaacugaucagaguaa

SEQ ID NO: 2484090 - RNA, 19 nt, Homo sapiens
  misc_RNA (1)...(19): siRNA sense strand
cauaaaccacuuuggaaaa

SEQ ID NO: 2484091 - RNA, 19 nt, Homo sapiens
  misc_RNA (1)...(19): siRNA sense strand
ggcaaacugcaucggguua

SEQ ID NO: 2484092 - RNA, 19 nt, Homo sapiens
  misc_RNA (1)...(19): siRNA sense strand
auagcaauggagagacaaa

SEQ ID NO: 2484093 - RNA, 19 nt, Homo sapiens
  misc_RNA (1)...(19): siRNA sense strand
gugaaugaacagucuagaa

SEQ ID NO: 2484094 - RNA, 19 nt, Homo sapiens
  misc_RNA (1)...(19): siRNA sense strand
gggagcuguagaagaacaa

SEQ ID NO: 2484095 - RNA, 19 nt, Homo sapiens
  misc_RNA (1)...(19): siRNA sense strand
agagcaaguucuuaggcau

SEQ ID NO: 2484096 - RNA, 19 nt, Homo sapiens
  misc_RNA (1)...(19): siRNA sense strand
cgugacaaugguuggagaa

SEQ ID NO: 2484097 - RNA, 19 nt, Homo sapiens
  misc_RNA (1)...(19): siRNA sense strand
ggaaaauguguauggcuau

SEQ ID NO: 2484098 - RNA, 19 nt, Homo sapiens
  misc_RNA (1)...(19): siRNA sense strand
augaugagauagaggauac

SEQ ID NO: 2484099 - RNA, 19 nt, Homo sapiens
  misc_RNA (1)...(19): siRNA sense strand
ucagauauguacacagcau

SEQ ID NO: 2484100 - RNA, 19 nt, Homo sapiens
  misc_RNA (1)...(19): siRNA sense strand
ugaagcuauuggaaagaau

SEQ ID NO: 2484101 - RNA, 19 nt, Homo sapiens
  misc_RNA (1)...(19): siRNA sense strand
ccacagcugaggacagaau

SEQ ID NO: 2484102 - RNA, 19 nt, Homo sapiens
  misc_RNA (1)...(19): siRNA sense strand
acagacucgcugagagaau

SEQ ID NO: 2484103 - RNA, 19 nt, Homo sapiens
  misc_RNA (1)...(19): siRNA sense strand
gcaucggguuacagcugaa

SEQ ID NO: 2484104 - RNA, 19 nt, Homo sapiens
  misc_RNA (1)...(19): siRNA sense strand
ggauauucagccagcauca

SEQ ID NO: 2484105 - RNA, 19 nt, Homo sapiens
  misc_RNA (1)...(19): siRNA sense strand
caauggagagacaaaguau

SEQ ID NO: 2484106 - RNA, 19 nt, Homo sapiens
  misc_RNA (1)...(19): siRNA sense strand
ccgcgguggcagugcaaaa

SEQ ID NO: 2484107 - RNA, 19 nt, Homo sapiens
  misc_RNA (1)...(19): siRNA sense strand
ucacugagcaaaagaacua

SEQ ID NO: 2484108 - RNA, 19 nt, Homo sapiens
  misc_RNA (1)...(19): siRNA sense strand
caucacuaauggagccaca

SEQ ID NO: 2484109 - RNA, 19 nt, Homo sapiens
  misc_RNA (1)...(19): siRNA sense strand
gcgugacaaugguuggaga

SEQ ID NO: 2484110 - RNA, 19 nt, Homo sapiens
  misc_RNA (1)...(19): siRNA sense strand
gccacagagcauaagcaua

SEQ ID NO: 2484111 - RNA, 19 nt, Homo sapiens
  misc_RNA (1)...(19): siRNA sense strand
agaguaagccgguggcagu

SEQ ID NO: 2484112 - RNA, 19 nt, Homo sapiens
  misc_RNA (1)...(19): siRNA sense strand
gcgagggagccugaagaaa

SEQ ID NO: 2484113 - RNA, 19 nt, Homo sapiens
  misc_RNA (1)...(19): siRNA sense strand
ccauuugaauccaggcgau

SEQ ID NO: 2484114 - RNA, 19 nt, Homo sapiens
  misc_RNA (1)...(19): siRNA sense strand
cuucaucucgagagggaaa

SEQ ID NO: 2484115 - RNA, 19 nt, Homo sapiens
  misc_RNA (1)...(19): siRNA sense strand
gcgucuuggaggaaagcaa

SEQ ID NO: 2484116 - RNA, 19 nt, Homo sapiens
  misc_RNA (1)...(19): siRNA sense strand
gcgaacaaauacaggccca

SEQ ID NO: 2484117 - RNA, 19 nt, Homo sapiens
  misc_RNA (1)...(19): siRNA sense strand
ucacagaugaugaccgcua

SEQ ID NO: 2484118 - RNA, 19 nt, Homo sapiens
  misc_RNA (1)...(19): siRNA sense strand
uacaaugaguggagggagu

SEQ ID NO: 2484119 - RNA, 19 nt, Homo sapiens
  misc_RNA (1)...(19): siRNA sense strand
ucccagagagcguggagaa

SEQ ID NO: 2484120 - RNA, 19 nt, Homo sapiens
  misc_RNA (1)...(19): siRNA sense strand
ggaagcagaugaaggcucu

SEQ ID NO: 2484121 - RNA, 19 nt, Homo sapiens
  misc_RNA (1)...(19): siRNA sense strand
gcaugaaccuggaggccug

SEQ ID NO: 2484122 - RNA, 19 nt, Homo sapiens
  misc_RNA (1)...(19): siRNA sense strand
gacaauacaucgaccacga

SEQ ID NO: 2484123 - RNA, 19 nt, Homo sapiens
  misc_RNA (1)...(19): siRNA sense strand
agaugaaggcucugcggga

SEQ ID NO: 2484124 - RNA, 19 nt, Homo sapiens
  misc_RNA (1)...(19): siRNA sense strand
ggggaaagccugaggaguc

SEQ ID NO: 2484125 - RNA, 19 nt, Homo sapiens
  misc_RNA (1)...(19): siRNA sense strand
aagaaaagucaaccugaaa

SEQ ID NO: 2484126 - RNA, 19 nt, Homo sapiens
  misc_RNA (1)...(19): siRNA sense strand
cuucaucucgagagggaaa

SEQ ID NO: 2484127 - RNA, 19 nt, Homo sapiens
  misc_RNA (1)...(19): siRNA sense strand
gcgucuuggaggaaagcaa

SEQ ID NO: 2484128 - RNA, 19 nt, Homo sapiens
  misc_RNA (1)...(19): siRNA sense strand
gcgaacaaauacaggccca

SEQ ID NO: 2484129 - RNA, 19 nt, Homo sapiens
  misc_RNA (1)...(19): siRNA sense strand
ucacagaugaugaccgcua

SEQ ID NO: 2484130 - RNA, 19 nt, Homo sapiens
  misc_RNA (1)...(19): siRNA sense strand
uacaaugaguggagggagu

SEQ ID NO: 2484131 - RNA, 19 nt, Homo sapiens
  misc_RNA (1)...(19): siRNA sense strand
ucccagagagcguggagaa

SEQ ID NO: 2484132 - RNA, 19 nt, Homo sapiens
  misc_RNA (1)...(19): siRNA sense strand
ggaagcagaugaaggcucu

SEQ ID NO: 2484133 - RNA, 19 nt, Homo sapiens
  misc_RNA (1)...(19): siRNA sense strand
gcaugaaccuggaggccug

SEQ ID NO: 2484134 - RNA, 19 nt, Homo sapiens
  misc_RNA (1)...(19): siRNA sense strand
gacaauacaucgaccacga

SEQ ID NO: 2484135 - RNA, 19 nt, Homo sapiens
  misc_RNA (1)...(19): siRNA sense strand
agaugaaggcucugcggga

SEQ ID NO: 2484136 - RNA, 19 nt, Homo sapiens
  misc_RNA (1)...(19): siRNA sense strand
ggggaaagccugaggaguc

SEQ ID NO: 2484137 - RNA, 19 nt, Homo sapiens
  misc_RNA (1)...(19): siRNA sense strand
aagaaaagucaaccugaaa

SEQ ID NO: 2484138 - RNA, 19 nt, Homo sapiens
  misc_RNA (1)...(19): siRNA sense strand
cuucaucucgagagggaaa

SEQ ID NO: 2484139 - RNA, 19 nt, Homo sapiens
  misc_RNA (1)...(19): siRNA sense strand
gcgucuuggaggaaagcaa

SEQ ID NO: 2484140 - RNA, 19 nt, Homo sapiens
  misc_RNA (1)...(19): siRNA sense strand
gcgaacaaauacaggccca

SEQ ID NO: 2484141 - RNA, 19 nt, Homo sapiens
  misc_RNA (1)...(19): siRNA sense strand
ucacagaugaugaccgcua

SEQ ID NO: 2484142 - RNA, 19 nt, Homo sapiens
  misc_RNA (1)...(19): siRNA sense strand
gggcaaaguggcaggacac

SEQ ID NO: 2484143 - RNA, 19 nt, Homo sapiens
  misc_RNA (1)...(19): siRNA sense strand
uacaaugaguggagggagu

SEQ ID NO: 2484144 - RNA, 19 nt, Homo sapiens
  misc_RNA (1)...(19): siRNA sense strand
ucccagagagcguggagaa

SEQ ID NO: 2484145 - RNA, 19 nt, Homo sapiens
  misc_RNA (1)...(19): siRNA sense strand
agggcaaaguggcaggaca

SEQ ID NO: 2484146 - RNA, 19 nt, Homo sapiens
  misc_RNA (1)...(19): siRNA sense strand
ggaagcagaugaaggcucu

SEQ ID NO: 2484147 - RNA, 19 nt, Homo sapiens
  misc_RNA (1)...(19): siRNA sense strand
gcaugaaccuggaggccug

SEQ ID NO: 2484148 - RNA, 19 nt, Homo sapiens
  misc_RNA (1)...(19): siRNA sense strand
gacaauacaucgaccacga

SEQ ID NO: 2484149 - RNA, 19 nt, Homo sapiens
  misc_RNA (1)...(19): siRNA sense strand
agaugaaggcucugcggga

SEQ ID NO: 2484150 - RNA, 19 nt, Homo sapiens
  misc_RNA (1)...(19): siRNA sense strand
ggggaaagccugaggaguc

SEQ ID NO: 2484151 - RNA, 19 nt, Homo sapiens
  misc_RNA (1)...(19): siRNA sense strand
aagaaaagucaaccugaaa

SEQ ID NO: 2484152 - RNA, 19 nt, Homo sapiens
  misc_RNA (1)...(19): siRNA sense strand
cuucaucucgagagggaaa

SEQ ID NO: 2484153 - RNA, 19 nt, Homo sapiens
  misc_RNA (1)...(19): siRNA sense strand
gcgucuuggaggaaagcaa

SEQ ID NO: 2484154 - RNA, 19 nt, Homo sapiens
  misc_RNA (1)...(19): siRNA sense strand
gcgaacaaauacaggccca

SEQ ID NO: 2484155 - RNA, 19 nt, Homo sapiens
  misc_RNA (1)...(19): siRNA sense strand
ucacagaugaugaccgcua

SEQ ID NO: 2484156 - RNA, 19 nt, Homo sapiens
  misc_RNA (1)...(19): siRNA sense strand
uacaaugaguggagggagu

SEQ ID NO: 2484157 - RNA, 19 nt, Homo sapiens
  misc_RNA (1)...(19): siRNA sense strand
ucccagagagcguggagaa

SEQ ID NO: 2484158 - RNA, 19 nt, Homo sapiens
  misc_RNA (1)...(19): siRNA sense strand
ggaagcagaugaaggcucu

SEQ ID NO: 2484159 - RNA, 19 nt, Homo sapiens
  misc_RNA (1)...(19): siRNA sense strand
gcaugaaccuggaggccug

SEQ ID NO: 2484160 - RNA, 19 nt, Homo sapiens
  misc_RNA (1)...(19): siRNA sense strand
gacaauacaucgaccacga

SEQ ID NO: 2484161 - RNA, 19 nt, Homo sapiens
  misc_RNA (1)...(19): siRNA sense strand
agaugaaggcucugcggga

SEQ ID NO: 2484162 - RNA, 19 nt, Homo sapiens
  misc_RNA (1)...(19): siRNA sense strand
ggggaaagccugaggaguc

SEQ ID NO: 2484163 - RNA, 19 nt, Homo sapiens
  misc_RNA (1)...(19): siRNA sense strand
aagaaaagucaaccugaaa

SEQ ID NO: 2484164 - RNA, 19 nt, Homo sapiens
  misc_RNA (1)...(19): siRNA sense strand
cuucaucucgagagggaaa

SEQ ID NO: 2484165 - RNA, 19 nt, Homo sapiens
  misc_RNA (1)...(19): siRNA sense strand
gcgucuuggaggaaagcaa

SEQ ID NO: 2484166 - RNA, 19 nt, Homo sapiens
  misc_RNA (1)...(19): siRNA sense strand
gcgaacaaauacaggccca

SEQ ID NO: 2484167 - RNA, 19 nt, Homo sapiens
  misc_RNA (1)...(19): siRNA sense strand
ucacagaugaugaccgcua

SEQ ID NO: 2484168 - RNA, 19 nt, Homo sapiens
  misc_RNA (1)...(19): siRNA sense strand
uacaaugaguggagggagu

SEQ ID NO: 2484169 - RNA, 19 nt, Homo sapiens
  misc_RNA (1)...(19): siRNA sense strand
ucccagagagcguggagaa

SEQ ID NO: 2484170 - RNA, 19 nt, Homo sapiens
  misc_RNA (1)...(19): siRNA sense strand
ggaagcagaugaaggcucu

SEQ ID NO: 2484171 - RNA, 19 nt, Homo sapiens
  misc_RNA (1)...(19): siRNA sense strand
gcaugaaccuggaggccug

SEQ ID NO: 2484172 - RNA, 19 nt, Homo sapiens
  misc_RNA (1)...(19): siRNA sense strand
gacaauacaucgaccacga

SEQ ID NO: 2484173 - RNA, 19 nt, Homo sapiens
  misc_RNA (1)...(19): siRNA sense strand
agaugaaggcucugcggga

SEQ ID NO: 2484174 - RNA, 19 nt, Homo sapiens
  misc_RNA (1)...(19): siRNA sense strand
ggggaaagccugaggaguc

SEQ ID NO: 2484175 - RNA, 19 nt, Homo sapiens
  misc_RNA (1)...(19): siRNA sense strand
aagaaaagucaaccugaaa

SEQ ID NO: 2484176 - RNA, 19 nt, Homo sapiens
  misc_RNA (1)...(19): siRNA sense strand
ugucaaaccagcagagcaa

SEQ ID NO: 2484177 - RNA, 19 nt, Homo sapiens
  misc_RNA (1)...(19): siRNA sense strand
augaauauacagaggucaa

SEQ ID NO: 2484178 - RNA, 19 nt, Homo sapiens
  misc_RNA (1)...(19): siRNA sense strand
gucaaugaaugguggaaaa

SEQ ID NO: 2484179 - RNA, 19 nt, Homo sapiens
  misc_RNA (1)...(19): siRNA sense strand
cuuuagaugacgugaucaa

SEQ ID NO: 2484180 - RNA, 19 nt, Homo sapiens
  misc_RNA (1)...(19): siRNA sense strand
ucaaagaagcugccgggaa

SEQ ID NO: 2484181 - RNA, 19 nt, Homo sapiens
  misc_RNA (1)...(19): siRNA sense strand
agguagaagaaggagauaa

SEQ ID NO: 2484182 - RNA, 19 nt, Homo sapiens
  misc_RNA (1)...(19): siRNA sense strand
cauugagagugggaagaaa

SEQ ID NO: 2484183 - RNA, 19 nt, Homo sapiens
  misc_RNA (1)...(19): siRNA sense strand
gcaggaacaguguggguga

SEQ ID NO: 2484184 - RNA, 19 nt, Homo sapiens
  misc_RNA (1)...(19): siRNA sense strand
gaucaaaagagcaaacaau

SEQ ID NO: 2484185 - RNA, 19 nt, Homo sapiens
  misc_RNA (1)...(19): siRNA sense strand
cagugaaggccgcaagaca

SEQ ID NO: 2484186 - RNA, 19 nt, Homo sapiens
  misc_RNA (1)...(19): siRNA sense strand
aauaaaagaggcaggguuu

SEQ ID NO: 2484187 - RNA, 19 nt, Homo sapiens
  misc_RNA (1)...(19): siRNA sense strand
gggaaaagcaaucugaaga

SEQ ID NO: 2484188 - RNA, 19 nt, Homo sapiens
  misc_RNA (1)...(19): siRNA sense strand
auaaggaggauguugacaa

SEQ ID NO: 2484189 - RNA, 19 nt, Homo sapiens
  misc_RNA (1)...(19): siRNA sense strand
cauaaacaaugaauggcau

SEQ ID NO: 2484190 - RNA, 19 nt, Homo sapiens
  misc_RNA (1)...(19): siRNA sense strand
gcaucaaaacauugcgcua

SEQ ID NO: 2484191 - RNA, 19 nt, Homo sapiens
  misc_RNA (1)...(19): siRNA sense strand
ugagaugcgcauugccaaa

SEQ ID NO: 2484192 - RNA, 19 nt, Homo sapiens
  misc_RNA (1)...(19): siRNA sense strand
ccagguagaagaaggagau

SEQ ID NO: 2484193 - RNA, 19 nt, Homo sapiens
  misc_RNA (1)...(19): siRNA sense strand
agucaaugaaugguggaaa

SEQ ID NO: 2484194 - RNA, 19 nt, Homo sapiens
  misc_RNA (1)...(19): siRNA sense strand
gucuggaaauggaagagaa

SEQ ID NO: 2484195 - RNA, 19 nt, Homo sapiens
  misc_RNA (1)...(19): siRNA sense strand
auucaagaugucuggaaau

SEQ ID NO: 2484196 - RNA, 19 nt, Homo sapiens
  misc_RNA (1)...(19): siRNA sense strand
aggaaagagcccuugcauu

SEQ ID NO: 2484197 - RNA, 19 nt, Homo sapiens
  misc_RNA (1)...(19): siRNA sense strand
uggacaaugcuguugaauu

SEQ ID NO: 2484198 - RNA, 19 nt, Homo sapiens
  misc_RNA (1)...(19): siRNA sense strand
ugaaaaucucucagaagaa

SEQ ID NO: 2484199 - RNA, 19 nt, Homo sapiens
  misc_RNA (1)...(19): siRNA sense strand
aagaaggagauaaggagga

SEQ ID NO: 2484200 - RNA, 19 nt, Homo sapiens
  misc_RNA (1)...(19): siRNA sense strand
gagcgggcuaagaaguaua

SEQ ID NO: 2484201 - RNA, 19 nt, Homo sapiens
  misc_RNA (1)...(19): siRNA sense strand
auggaagagaacugggaga

SEQ ID NO: 2484202 - RNA, 19 nt, Homo sapiens
  misc_RNA (1)...(19): siRNA sense strand
cgaaagagaucgucugcug

SEQ ID NO: 2484203 - RNA, 19 nt, Homo sapiens
  misc_RNA (1)...(19): siRNA sense strand
auacaagacaugaaccuau

SEQ ID NO: 2484204 - RNA, 19 nt, Homo sapiens
  misc_RNA (1)...(19): siRNA sense strand
cagugaguggcaagaaauu

SEQ ID NO: 2484205 - RNA, 19 nt, Homo sapiens
  misc_RNA (1)...(19): siRNA sense strand
guggaaacacagugguugu

SEQ ID NO: 2484206 - RNA, 19 nt, Homo sapiens
  misc_RNA (1)...(19): siRNA sense strand
cccuggagcuuggaggaaa

SEQ ID NO: 2484207 - RNA, 19 nt, Homo sapiens
  misc_RNA (1)...(19): siRNA sense strand
uggaaauggaagagaacug

SEQ ID NO: 2484208 - RNA, 19 nt, Homo sapiens
  misc_RNA (1)...(19): siRNA sense strand
uagaagaaggagauaagga

SEQ ID NO: 2484209 - RNA, 19 nt, Homo sapiens
  misc_RNA (1)...(19): siRNA sense strand
gcuaagaaguauauccuug

SEQ ID NO: 2484210 - RNA, 19 nt, Homo sapiens
  misc_RNA (1)...(19): siRNA sense strand
ggaagaaagaaggggccaa

SEQ ID NO: 2484211 - RNA, 19 nt, Homo sapiens
  misc_RNA (1)...(19): siRNA sense strand
gaagaaagaaggggccaaa

SEQ ID NO: 2484212 - RNA, 19 nt, Homo sapiens
  misc_RNA (1)...(19): siRNA sense strand
gcgcauugccaaagaggag

SEQ ID NO: 2484213 - RNA, 19 nt, Homo sapiens
  misc_RNA (1)...(19): siRNA sense strand
caaacuggaauguggagga

SEQ ID NO: 2484214 - RNA, 19 nt, Homo sapiens
  misc_RNA (1)...(19): siRNA sense strand
ggaagagaacugggagagu

SEQ ID NO: 2484215 - RNA, 19 nt, Homo sapiens
  misc_RNA (1)...(19): siRNA sense strand
aggaaaggcaagagacuca

SEQ ID NO: 2484216 - RNA, 19 nt, Homo sapiens
  misc_RNA (1)...(19): siRNA sense strand
acaucgaggacuuggagaa

SEQ ID NO: 2484217 - RNA, 19 nt, Homo sapiens
  misc_RNA (1)...(19): siRNA sense strand
agacagaucucaugcagga

SEQ ID NO: 2484218 - RNA, 19 nt, Homo sapiens
  misc_RNA (1)...(19): siRNA sense strand
ccaggaaaggcaagagacu

SEQ ID NO: 2484219 - RNA, 19 nt, Homo sapiens
  misc_RNA (1)...(19): siRNA sense strand
acagauaauccuagggagu

SEQ ID NO: 2484220 - RNA, 19 nt, Homo sapiens
  misc_RNA (1)...(19): siRNA sense strand
accagaaggaugaggaaaa

SEQ ID NO: 2484221 - RNA, 19 nt, Homo sapiens
  misc_RNA (1)...(19): siRNA sense strand
gaggaaaaguugucggcuu

SEQ ID NO: 2484222 - RNA, 19 nt, Homo sapiens
  misc_RNA (1)...(19): siRNA sense strand
guagagaagagaaggcgau

SEQ ID NO: 2484223 - RNA, 19 nt, Homo sapiens
  misc_RNA (1)...(19): siRNA sense strand
ggucaaauaucuaaccacu

SEQ ID NO: 2484224 - RNA, 19 nt, Homo sapiens
  misc_RNA (1)...(19): siRNA sense strand
ccacaaaacaauucgcaga

SEQ ID NO: 2484225 - RNA, 19 nt, Homo sapiens
  misc_RNA (1)...(19): siRNA sense strand
cagaaaucgaggaggcucu

SEQ ID NO: 2484226 - RNA, 19 nt, Homo sapiens
  misc_RNA (1)...(19): siRNA sense strand
ggcgauugcuagagagccu

SEQ ID NO: 2484227 - RNA, 19 nt, Homo sapiens
  misc_RNA (1)...(19): siRNA sense strand
cuauguuggcacaggcauu

SEQ ID NO: 2484228 - RNA, 19 nt, Homo sapiens
  misc_RNA (1)...(19): siRNA sense strand
ccuaaggagauaccgggaa

SEQ ID NO: 2484229 - RNA, 19 nt, Homo sapiens
  misc_RNA (1)...(19): siRNA sense strand
ccuagggaguugcagguca

SEQ ID NO: 2484230 - RNA, 19 nt, Homo sapiens
  misc_RNA (1)...(19): siRNA sense strand
cgggagagggcaugacagu

SEQ ID NO: 2484231 - RNA, 19 nt, Homo sapiens
  misc_RNA (1)...(19): siRNA sense strand
acuacugggcucagggaaa

SEQ ID NO: 2484232 - RNA, 19 nt, Homo sapiens
  misc_RNA (1)...(19): siRNA sense strand
agaucaaacaaaggagaaa

SEQ ID NO: 2484233 - RNA, 19 nt, Homo sapiens
  misc_RNA (1)...(19): siRNA sense strand
ccuccaucaacgaaggaaa

SEQ ID NO: 2484234 - RNA, 19 nt, Homo sapiens
  misc_RNA (1)...(19): siRNA sense strand
ggaaagcugugcugccaga

SEQ ID NO: 2484235 - RNA, 19 nt, Homo sapiens
  misc_RNA (1)...(19): siRNA sense strand
gugccagccaggacagaaa

SEQ ID NO: 2484236 - RNA, 19 nt, Homo sapiens
  misc_RNA (1)...(19): siRNA sense strand
ggaggauggcaaagagagu

SEQ ID NO: 2484237 - RNA, 19 nt, Homo sapiens
  misc_RNA (1)...(19): siRNA sense strand
ccucagaaacagacaccau

SEQ ID NO: 2484238 - RNA, 19 nt, Homo sapiens
  misc_RNA (1)...(19): siRNA sense strand
gcagauugcuacagggguu

SEQ ID NO: 2484239 - RNA, 19 nt, Homo sapiens
  misc_RNA (1)...(19): siRNA sense strand
cggugaaagcgaauuccua

SEQ ID NO: 2484240 - RNA, 19 nt, Homo sapiens
  misc_RNA (1)...(19): siRNA sense strand
gugccagccaggacagaaa

SEQ ID NO: 2484241 - RNA, 19 nt, Homo sapiens
  misc_RNA (1)...(19): siRNA sense strand
ccucagaaacagacaccau

SEQ ID NO: 2484242 - RNA, 19 nt, Homo sapiens
  misc_RNA (1)...(19): siRNA sense strand
gcagauugcuacagggguu

SEQ ID NO: 2484243 - RNA, 19 nt, Homo sapiens
  misc_RNA (1)...(19): siRNA sense strand
cggugaaagcgaauuccua

SEQ ID NO: 2484244 - RNA, 19 nt, Homo sapiens
  misc_RNA (1)...(19): siRNA sense strand
aggaagaggaagagaguuu

SEQ ID NO: 2484245 - RNA, 19 nt, Homo sapiens
  misc_RNA (1)...(19): siRNA sense strand
gagauggaggagacagaaa

SEQ ID NO: 2484246 - RNA, 19 nt, Homo sapiens
  misc_RNA (1)...(19): siRNA sense strand
cgccaaagcccaagcucaa

SEQ ID NO: 2484247 - RNA, 19 nt, Homo sapiens
  misc_RNA (1)...(19): siRNA sense strand
ccaccaucuuccugagcaa

SEQ ID NO: 2484248 - RNA, 19 nt, Homo sapiens
  misc_RNA (1)...(19): siRNA sense strand
ccauugaccaugaaggaau

SEQ ID NO: 2484249 - RNA, 19 nt, Homo sapiens
  misc_RNA (1)...(19): siRNA sense strand
agaaauggacaaagaucuu

SEQ ID NO: 2484250 - RNA, 19 nt, Homo sapiens
  misc_RNA (1)...(19): siRNA sense strand
auucugaggaagaggaaga

SEQ ID NO: 2484251 - RNA, 19 nt, Homo sapiens
  misc_RNA (1)...(19): siRNA sense strand
aagaagacccggaggaaac

SEQ ID NO: 2484252 - RNA, 19 nt, Homo sapiens
  misc_RNA (1)...(19): siRNA sense strand
gcuaaaagaaauggacaaa

SEQ ID NO: 2484253 - RNA, 19 nt, Homo sapiens
  misc_RNA (1)...(19): siRNA sense strand
gagaaaaggagguggauuc

SEQ ID NO: 2484254 - RNA, 19 nt, Homo sapiens
  misc_RNA (1)...(19): siRNA sense strand
uggcagaggugaugcagca

SEQ ID NO: 2484255 - RNA, 19 nt, Homo sapiens
  misc_RNA (1)...(19): siRNA sense strand
ccaaagaaaagaacaagaa

SEQ ID NO: 2484256 - RNA, 19 nt, Homo sapiens
  misc_RNA (1)...(19): siRNA sense strand
cugagauggaggagacaga

SEQ ID NO: 2484257 - RNA, 19 nt, Homo sapiens
  misc_RNA (1)...(19): siRNA sense strand
cugugaagcugcaggguuc

SEQ ID NO: 2484258 - RNA, 19 nt, Homo sapiens
  misc_RNA (1)...(19): siRNA sense strand
cagacuaugcugagagugu

SEQ ID NO: 2484259 - RNA, 19 nt, Homo sapiens
  misc_RNA (1)...(19): siRNA sense strand
cccaugaaguccaguaaaa

SEQ ID NO: 2484260 - RNA, 19 nt, Homo sapiens
  misc_RNA (1)...(19): siRNA sense strand
ucaccaaagaaaagaacaa

SEQ ID NO: 2484261 - RNA, 19 nt, Homo sapiens
  misc_RNA (1)...(19): siRNA sense strand
gugaagaagacccggagga

SEQ ID NO: 2484262 - RNA, 19 nt, Homo sapiens
  misc_RNA (1)...(19): siRNA sense strand
augacagucuggagaugua

SEQ ID NO: 2484263 - RNA, 19 nt, Homo sapiens
  misc_RNA (1)...(19): siRNA sense strand
gggugaugcaguacgucaa

SEQ ID NO: 2484264 - RNA, 19 nt, Homo sapiens
  misc_RNA (1)...(19): siRNA sense strand
acaggaaggcagugaugau

SEQ ID NO: 2484265 - RNA, 19 nt, Homo sapiens
  misc_RNA (1)...(19): siRNA sense strand
uggaggagacagaaagcau

SEQ ID NO: 2484266 - RNA, 19 nt, Homo sapiens
  misc_RNA (1)...(19): siRNA sense strand
ugaagaagacccggaggaa

SEQ ID NO: 2484267 - RNA, 19 nt, Homo sapiens
  misc_RNA (1)...(19): siRNA sense strand
aggacuuguucuacgaaga

SEQ ID NO: 2484268 - RNA, 19 nt, Homo sapiens
  misc_RNA (1)...(19): siRNA sense strand
uuucagaugaggugggcuu

SEQ ID NO: 2484269 - RNA, 19 nt, Homo sapiens
  misc_RNA (1)...(19): siRNA sense strand
caagaaaccccgagaaaag

SEQ ID NO: 2484270 - RNA, 19 nt, Homo sapiens
  misc_RNA (1)...(19): siRNA sense strand
agcaagaaaccccgagaaa

SEQ ID NO: 2484271 - RNA, 19 nt, Homo sapiens
  misc_RNA (1)...(19): siRNA sense strand
gaucaugcugcaaaggaga

SEQ ID NO: 2484272 - RNA, 19 nt, Homo sapiens
  misc_RNA (1)...(19): siRNA sense strand
ucaacauggcagaggugau

SEQ ID NO: 2484273 - RNA, 19 nt, Homo sapiens
  misc_RNA (1)...(19): siRNA sense strand
acagcaacgugaaggaugu

SEQ ID NO: 2484274 - RNA, 19 nt, Homo sapiens
  misc_RNA (1)...(19): siRNA sense strand
cagccaacccauugaccau

SEQ ID NO: 2484275 - RNA, 19 nt, Homo sapiens
  misc_RNA (1)...(19): siRNA sense strand
ugaccaugaaggaaucaaa

SEQ ID NO: 2484276 - RNA, 19 nt, Homo sapiens
  misc_RNA (1)...(19): siRNA sense strand
gcuaguggacugguggaaa

SEQ ID NO: 2484277 - RNA, 19 nt, Homo sapiens
  misc_RNA (1)...(19): siRNA sense strand
agaccuuggccgugggacu

SEQ ID NO: 2484278 - RNA, 19 nt, Homo sapiens
  misc_RNA (1)...(19): siRNA sense strand
ugcuaaaagaaauggacaa

SEQ ID NO: 2484279 - RNA, 19 nt, Homo sapiens
  misc_RNA (1)...(19): siRNA sense strand
cagcuugacccugaagaaa

SEQ ID NO: 2484280 - RNA, 19 nt, Homo sapiens
  misc_RNA (1)...(19): siRNA sense strand
caucagaacaggaaggcag

SEQ ID NO: 2484281 - RNA, 19 nt, Homo sapiens
  misc_RNA (1)...(19): siRNA sense strand
cugugggaggccagagcua

SEQ ID NO: 2484282 - RNA, 19 nt, Homo sapiens
  misc_RNA (1)...(19): siRNA sense strand
aggaauuugaugaggauuu

SEQ ID NO: 2484283 - RNA, 19 nt, Homo sapiens
  misc_RNA (1)...(19): siRNA sense strand
acuccaaccugcugggcua

SEQ ID NO: 2484284 - RNA, 19 nt, Homo sapiens
  misc_RNA (1)...(19): siRNA sense strand
ggaucaucgaaguggaaaa

SEQ ID NO: 2484285 - RNA, 19 nt, Homo sapiens
  misc_RNA (1)...(19): siRNA sense strand
agaaggaauuugaugagga

SEQ ID NO: 2484286 - RNA, 19 nt, Homo sapiens
  misc_RNA (1)...(19): siRNA sense strand
cgcaagaagaccaugaaga

SEQ ID NO: 2484287 - RNA, 19 nt, Homo sapiens
  misc_RNA (1)...(19): siRNA sense strand
ugggaagugacaaggagua

SEQ ID NO: 2484288 - RNA, 19 nt, Homo sapiens
  misc_RNA (1)...(19): siRNA sense strand
aguaccaagugaauggcaa

SEQ ID NO: 2484289 - RNA, 19 nt, Homo sapiens
  misc_RNA (1)...(19): siRNA sense strand
aggucaacaucgccaggaa

SEQ ID NO: 2484290 - RNA, 19 nt, Homo sapiens
  misc_RNA (1)...(19): siRNA sense strand
acaccaucaucgagcagau

SEQ ID NO: 2484291 - RNA, 19 nt, Homo sapiens
  misc_RNA (1)...(19): siRNA sense strand
aguacaucaaugagcagua

SEQ ID NO: 2484292 - RNA, 19 nt, Homo sapiens
  misc_RNA (1)...(19): siRNA sense strand
ggaagaaacgcaucccuga

SEQ ID NO: 2484293 - RNA, 19 nt, Homo sapiens
  misc_RNA (1)...(19): siRNA sense strand
uaugagacuuacagggcca

SEQ ID NO: 2484294 - RNA, 19 nt, Homo sapiens
  misc_RNA (1)...(19): siRNA sense strand
aggaauuugaugaggauuu

SEQ ID NO: 2484295 - RNA, 19 nt, Homo sapiens
  misc_RNA (1)...(19): siRNA sense strand
acuccaaccugcugggcua

SEQ ID NO: 2484296 - RNA, 19 nt, Homo sapiens
  misc_RNA (1)...(19): siRNA sense strand
ggaucaucgaaguggaaaa

SEQ ID NO: 2484297 - RNA, 19 nt, Homo sapiens
  misc_RNA (1)...(19): siRNA sense strand
agaaggaauuugaugagga

SEQ ID NO: 2484298 - RNA, 19 nt, Homo sapiens
  misc_RNA (1)...(19): siRNA sense strand
cgcaagaagaccaugaaga

SEQ ID NO: 2484299 - RNA, 19 nt, Homo sapiens
  misc_RNA (1)...(19): siRNA sense strand
ugggaagugacaaggagua

SEQ ID NO: 2484300 - RNA, 19 nt, Homo sapiens
  misc_RNA (1)...(19): siRNA sense strand
aguaccaagugaauggcaa

SEQ ID NO: 2484301 - RNA, 19 nt, Homo sapiens
  misc_RNA (1)...(19): siRNA sense strand
aggucaacaucgccaggaa

SEQ ID NO: 2484302 - RNA, 19 nt, Homo sapiens
  misc_RNA (1)...(19): siRNA sense strand
acaccaucaucgagcagau

SEQ ID NO: 2484303 - RNA, 19 nt, Homo sapiens
  misc_RNA (1)...(19): siRNA sense strand
aguacaucaaugagcagua

SEQ ID NO: 2484304 - RNA, 19 nt, Homo sapiens
  misc_RNA (1)...(19): siRNA sense strand
ggaagaaacgcaucccuga

SEQ ID NO: 2484305 - RNA, 19 nt, Homo sapiens
  misc_RNA (1)...(19): siRNA sense strand
uaugagacuuacagggcca

SEQ ID NO: 2484306 - RNA, 19 nt, Homo sapiens
  misc_RNA (1)...(19): siRNA sense strand
acuccaaccugcugggcua

SEQ ID NO: 2484307 - RNA, 19 nt, Homo sapiens
  misc_RNA (1)...(19): siRNA sense strand
cgcaagaagaccaugaaga

SEQ ID NO: 2484308 - RNA, 19 nt, Homo sapiens
  misc_RNA (1)...(19): siRNA sense strand
acaccaucaucgagcagau

SEQ ID NO: 2484309 - RNA, 19 nt, Homo sapiens
  misc_RNA (1)...(19): siRNA sense strand
aguacaucaaugagcagua

SEQ ID NO: 2484310 - RNA, 19 nt, Homo sapiens
  misc_RNA (1)...(19): siRNA sense strand
caggaggaucagagggaaa

SEQ ID NO: 2484311 - RNA, 19 nt, Homo sapiens
  misc_RNA (1)...(19): siRNA sense strand
cuuauaucccagaggaaau

SEQ ID NO: 2484312 - RNA, 19 nt, Homo sapiens
  misc_RNA (1)...(19): siRNA sense strand
cugcaagaccuguggacca

SEQ ID NO: 2484313 - RNA, 19 nt, Homo sapiens
  misc_RNA (1)...(19): siRNA sense strand
ggaaagagaacugaggaca

SEQ ID NO: 2484314 - RNA, 19 nt, Homo sapiens
  misc_RNA (1)...(19): siRNA sense strand
aguacaggcaggaggauca

SEQ ID NO: 2484315 - RNA, 19 nt, Homo sapiens
  misc_RNA (1)...(19): siRNA sense strand
uugacaaaguggauggcau

SEQ ID NO: 2484316 - RNA, 19 nt, Homo sapiens
  misc_RNA (1)...(19): siRNA sense strand
ucaccaagcagaaugggaa

SEQ ID NO: 2484317 - RNA, 19 nt, Homo sapiens
  misc_RNA (1)...(19): siRNA sense strand
ggaucagagggaaagagaa

SEQ ID NO: 2484318 - RNA, 19 nt, Homo sapiens
  misc_RNA (1)...(19): siRNA sense strand
guuugaacagauucggaaa

SEQ ID NO: 2484319 - RNA, 19 nt, Homo sapiens
  misc_RNA (1)...(19): siRNA sense strand
gaggaaaucuacugggguu

SEQ ID NO: 2484320 - RNA, 19 nt, Homo sapiens
  misc_RNA (1)...(19): siRNA sense strand
accuaaaggagaaggaguu

SEQ ID NO: 2484321 - RNA, 19 nt, Homo sapiens
  misc_RNA (1)...(19): siRNA sense strand
gggaaagagaacugaggac

SEQ ID NO: 2484322 - RNA, 19 nt, Homo sapiens
  misc_RNA (1)...(19): siRNA sense strand
ggcacagcaacgugagaau

SEQ ID NO: 2484323 - RNA, 19 nt, Homo sapiens
  misc_RNA (1)...(19): siRNA sense strand
gaaagagaacugaggacac

SEQ ID NO: 2484324 - RNA, 19 nt, Homo sapiens
  misc_RNA (1)...(19): siRNA sense strand
guagccaauaugaggaaga

SEQ ID NO: 2484325 - RNA, 19 nt, Homo sapiens
  misc_RNA (1)...(19): siRNA sense strand
ccccaaaaccuaaaggaga

SEQ ID NO: 2484326 - RNA, 19 nt, Homo sapiens
  misc_RNA (1)...(19): siRNA sense strand
ggcaggaggaucagaggga

SEQ ID NO: 2484327 - RNA, 19 nt, Homo sapiens
  misc_RNA (1)...(19): siRNA sense strand
ccaagagugggcacagcaa

SEQ ID NO: 2484328 - RNA, 19 nt, Homo sapiens
  misc_RNA (1)...(19): siRNA sense strand
ucuuauaucccagaggaaa

SEQ ID NO: 2484329 - RNA, 19 nt, Homo sapiens
  misc_RNA (1)...(19): siRNA sense strand
caggaggaucagagggaaa

SEQ ID NO: 2484330 - RNA, 19 nt, Homo sapiens
  misc_RNA (1)...(19): siRNA sense strand
cuuauaucccagaggaaau

SEQ ID NO: 2484331 - RNA, 19 nt, Homo sapiens
  misc_RNA (1)...(19): siRNA sense strand
cugcaagaccuguggacca

SEQ ID NO: 2484332 - RNA, 19 nt, Homo sapiens
  misc_RNA (1)...(19): siRNA sense strand
ggaaagagaacugaggaca

SEQ ID NO: 2484333 - RNA, 19 nt, Homo sapiens
  misc_RNA (1)...(19): siRNA sense strand
aguacaggcaggaggauca

SEQ ID NO: 2484334 - RNA, 19 nt, Homo sapiens
  misc_RNA (1)...(19): siRNA sense strand
uugacaaaguggauggcau

SEQ ID NO: 2484335 - RNA, 19 nt, Homo sapiens
  misc_RNA (1)...(19): siRNA sense strand
ucaccaagcagaaugggaa

SEQ ID NO: 2484336 - RNA, 19 nt, Homo sapiens
  misc_RNA (1)...(19): siRNA sense strand
ggaucagagggaaagagaa

SEQ ID NO: 2484337 - RNA, 19 nt, Homo sapiens
  misc_RNA (1)...(19): siRNA sense strand
guuugaacagauucggaaa

SEQ ID NO: 2484338 - RNA, 19 nt, Homo sapiens
  misc_RNA (1)...(19): siRNA sense strand
gaggaaaucuacugggguu

SEQ ID NO: 2484339 - RNA, 19 nt, Homo sapiens
  misc_RNA (1)...(19): siRNA sense strand
accuaaaggagaaggaguu

SEQ ID NO: 2484340 - RNA, 19 nt, Homo sapiens
  misc_RNA (1)...(19): siRNA sense strand
gggaaagagaacugaggac

SEQ ID NO: 2484341 - RNA, 19 nt, Homo sapiens
  misc_RNA (1)...(19): siRNA sense strand
ggcacagcaacgugagaau

SEQ ID NO: 2484342 - RNA, 19 nt, Homo sapiens
  misc_RNA (1)...(19): siRNA sense strand
gaaagagaacugaggacac

SEQ ID NO: 2484343 - RNA, 19 nt, Homo sapiens
  misc_RNA (1)...(19): siRNA sense strand
guagccaauaugaggaaga

SEQ ID NO: 2484344 - RNA, 19 nt, Homo sapiens
  misc_RNA (1)...(19): siRNA sense strand
ccccaaaaccuaaaggaga

SEQ ID NO: 2484345 - RNA, 19 nt, Homo sapiens
  misc_RNA (1)...(19): siRNA sense strand
ggcaggaggaucagaggga

SEQ ID NO: 2484346 - RNA, 19 nt, Homo sapiens
  misc_RNA (1)...(19): siRNA sense strand
ccaagagugggcacagcaa

SEQ ID NO: 2484347 - RNA, 19 nt, Homo sapiens
  misc_RNA (1)...(19): siRNA sense strand
ucuuauaucccagaggaaa

SEQ ID NO: 2484348 - RNA, 19 nt, Homo sapiens
  misc_RNA (1)...(19): siRNA sense strand
caggaggaucagagggaaa

SEQ ID NO: 2484349 - RNA, 19 nt, Homo sapiens
  misc_RNA (1)...(19): siRNA sense strand
cuuauaucccagaggaaau

SEQ ID NO: 2484350 - RNA, 19 nt, Homo sapiens
  misc_RNA (1)...(19): siRNA sense strand
cugcaagaccuguggacca

SEQ ID NO: 2484351 - RNA, 19 nt, Homo sapiens
  misc_RNA (1)...(19): siRNA sense strand
ggaaagagaacugaggaca

SEQ ID NO: 2484352 - RNA, 19 nt, Homo sapiens
  misc_RNA (1)...(19): siRNA sense strand
aguacaggcaggaggauca

SEQ ID NO: 2484353 - RNA, 19 nt, Homo sapiens
  misc_RNA (1)...(19): siRNA sense strand
uugacaaaguggauggcau

SEQ ID NO: 2484354 - RNA, 19 nt, Homo sapiens
  misc_RNA (1)...(19): siRNA sense strand
ucaccaagcagaaugggaa

SEQ ID NO: 2484355 - RNA, 19 nt, Homo sapiens
  misc_RNA (1)...(19): siRNA sense strand
ggaucagagggaaagagaa

SEQ ID NO: 2484356 - RNA, 19 nt, Homo sapiens
  misc_RNA (1)...(19): siRNA sense strand
guuugaacagauucggaaa

SEQ ID NO: 2484357 - RNA, 19 nt, Homo sapiens
  misc_RNA (1)...(19): siRNA sense strand
gaggaaaucuacugggguu

SEQ ID NO: 2484358 - RNA, 19 nt, Homo sapiens
  misc_RNA (1)...(19): siRNA sense strand
accuaaaggagaaggaguu

SEQ ID NO: 2484359 - RNA, 19 nt, Homo sapiens
  misc_RNA (1)...(19): siRNA sense strand
gggaaagagaacugaggac

SEQ ID NO: 2484360 - RNA, 19 nt, Homo sapiens
  misc_RNA (1)...(19): siRNA sense strand
ggcacagcaacgugagaau

SEQ ID NO: 2484361 - RNA, 19 nt, Homo sapiens
  misc_RNA (1)...(19): siRNA sense strand
gaaagagaacugaggacac

SEQ ID NO: 2484362 - RNA, 19 nt, Homo sapiens
  misc_RNA (1)...(19): siRNA sense strand
guagccaauaugaggaaga

SEQ ID NO: 2484363 - RNA, 19 nt, Homo sapiens
  misc_RNA (1)...(19): siRNA sense strand
ccccaaaaccuaaaggaga

SEQ ID NO: 2484364 - RNA, 19 nt, Homo sapiens
  misc_RNA (1)...(19): siRNA sense strand
ggcaggaggaucagaggga

SEQ ID NO: 2484365 - RNA, 19 nt, Homo sapiens
  misc_RNA (1)...(19): siRNA sense strand
ccaagagugggcacagcaa

SEQ ID NO: 2484366 - RNA, 19 nt, Homo sapiens
  misc_RNA (1)...(19): siRNA sense strand
ucuuauaucccagaggaaa

SEQ ID NO: 2484367 - RNA, 19 nt, Homo sapiens
  misc_RNA (1)...(19): siRNA sense strand
ucaagauggaacagaggaa

SEQ ID NO: 2484368 - RNA, 19 nt, Homo sapiens
  misc_RNA (1)...(19): siRNA sense strand
aggaaacaccagaggaagu

SEQ ID NO: 2484369 - RNA, 19 nt, Homo sapiens
  misc_RNA (1)...(19): siRNA sense strand
ucaccaaagcggagaagca

SEQ ID NO: 2484370 - RNA, 19 nt, Homo sapiens
  misc_RNA (1)...(19): siRNA sense strand
gcuaaagaagauugaccau

SEQ ID NO: 2484371 - RNA, 19 nt, Homo sapiens
  misc_RNA (1)...(19): siRNA sense strand
gaggaagcugagugaccaa

SEQ ID NO: 2484372 - RNA, 19 nt, Homo sapiens
  misc_RNA (1)...(19): siRNA sense strand
guacacaaguucaagcagu

SEQ ID NO: 2484373 - RNA, 19 nt, Homo sapiens
  misc_RNA (1)...(19): siRNA sense strand
cuucgggaaacaugguuaa

SEQ ID NO: 2484374 - RNA, 19 nt, Homo sapiens
  misc_RNA (1)...(19): siRNA sense strand
ucaagauggaacagaggaa

SEQ ID NO: 2484375 - RNA, 19 nt, Homo sapiens
  misc_RNA (1)...(19): siRNA sense strand
aggaaacaccagaggaagu

SEQ ID NO: 2484376 - RNA, 19 nt, Homo sapiens
  misc_RNA (1)...(19): siRNA sense strand
ucaccaaagcggagaagca

SEQ ID NO: 2484377 - RNA, 19 nt, Homo sapiens
  misc_RNA (1)...(19): siRNA sense strand
gcuaaagaagauugaccau

SEQ ID NO: 2484378 - RNA, 19 nt, Homo sapiens
  misc_RNA (1)...(19): siRNA sense strand
gaggaagcugagugaccaa

SEQ ID NO: 2484379 - RNA, 19 nt, Homo sapiens
  misc_RNA (1)...(19): siRNA sense strand
guacacaaguucaagcagu

SEQ ID NO: 2484380 - RNA, 19 nt, Homo sapiens
  misc_RNA (1)...(19): siRNA sense strand
cuucgggaaacaugguuaa

SEQ ID NO: 2484381 - RNA, 19 nt, Homo sapiens
  misc_RNA (1)...(19): siRNA sense strand
gagaaaugcacgaggcaau

SEQ ID NO: 2484382 - RNA, 19 nt, Homo sapiens
  misc_RNA (1)...(19): siRNA sense strand
gugcaaaauccuuggaaaa

SEQ ID NO: 2484383 - RNA, 19 nt, Homo sapiens
  misc_RNA (1)...(19): siRNA sense strand
gcugaagaggcuagacaaa

SEQ ID NO: 2484384 - RNA, 19 nt, Homo sapiens
  misc_RNA (1)...(19): siRNA sense strand
caaucuagcaugaggaaaa

SEQ ID NO: 2484385 - RNA, 19 nt, Homo sapiens
  misc_RNA (1)...(19): siRNA sense strand
ggaaacaggcagaggaaac

SEQ ID NO: 2484386 - RNA, 19 nt, Homo sapiens
  misc_RNA (1)...(19): siRNA sense strand
caucucagcaguagggaaa

SEQ ID NO: 2484387 - RNA, 19 nt, Homo sapiens
  misc_RNA (1)...(19): siRNA sense strand
ugaagaacugggagguaua

SEQ ID NO: 2484388 - RNA, 19 nt, Homo sapiens
  misc_RNA (1)...(19): siRNA sense strand
aggaaggcuuuguggagua

SEQ ID NO: 2484389 - RNA, 19 nt, Homo sapiens
  misc_RNA (1)...(19): siRNA sense strand
agaggaaaccuaugagaau

SEQ ID NO: 2484390 - RNA, 19 nt, Homo sapiens
  misc_RNA (1)...(19): siRNA sense strand
ggcaaaugcagaugaacua

SEQ ID NO: 2484391 - RNA, 19 nt, Homo sapiens
  misc_RNA (1)...(19): siRNA sense strand
uggauaauuuggugaaaca

SEQ ID NO: 2484392 - RNA, 19 nt, Homo sapiens
  misc_RNA (1)...(19): siRNA sense strand
uauuaaaacugcaggacua

SEQ ID NO: 2484393 - RNA, 19 nt, Homo sapiens
  misc_RNA (1)...(19): siRNA sense strand
cugcaggacuagaagaaaa

SEQ ID NO: 2484394 - RNA, 19 nt, Homo sapiens
  misc_RNA (1)...(19): siRNA sense strand
cgacaaugugguccggaaa

SEQ ID NO: 2484395 - RNA, 19 nt, Homo sapiens
  misc_RNA (1)...(19): siRNA sense strand
gaagaugaggacugggcaa

SEQ ID NO: 2484396 - RNA, 19 nt, Homo sapiens
  misc_RNA (1)...(19): siRNA sense strand
uguuaaagacccagacaga

SEQ ID NO: 2484397 - RNA, 19 nt, Homo sapiens
  misc_RNA (1)...(19): siRNA sense strand
ccggaaacaggcagaggaa

SEQ ID NO: 2484398 - RNA, 19 nt, Homo sapiens
  misc_RNA (1)...(19): siRNA sense strand
cgguaaaugacucgugcua

SEQ ID NO: 2484399 - RNA, 19 nt, Homo sapiens
  misc_RNA (1)...(19): siRNA sense strand
gggcaaaugcagaugaacu

SEQ ID NO: 2484400 - RNA, 19 nt, Homo sapiens
  misc_RNA (1)...(19): siRNA sense strand
guauaauugcggaaggaga

SEQ ID NO: 2484401 - RNA, 19 nt, Homo sapiens
  misc_RNA (1)...(19): siRNA sense strand
agaugaagacuaugaugaa

SEQ ID NO: 2484402 - RNA, 19 nt, Homo sapiens
  misc_RNA (1)...(19): siRNA sense strand
ccauggaagaccaaggcaa

SEQ ID NO: 2484403 - RNA, 19 nt, Homo sapiens
  misc_RNA (1)...(19): siRNA sense strand
uaauagaugaggauggcaa

SEQ ID NO: 2484404 - RNA, 19 nt, Homo sapiens
  misc_RNA (1)...(19): siRNA sense strand
gagguauauugaaagcaaa

SEQ ID NO: 2484405 - RNA, 19 nt, Homo sapiens
  misc_RNA (1)...(19): siRNA sense strand
aggaaaccuaugagaauau

SEQ ID NO: 2484406 - RNA, 19 nt, Homo sapiens
  misc_RNA (1)...(19): siRNA sense strand
ccgacaaugugguccggaa

SEQ ID NO: 2484407 - RNA, 19 nt, Homo sapiens
  misc_RNA (1)...(19): siRNA sense strand
ccagcaaauggaaggaauu

SEQ ID NO: 2484408 - RNA, 19 nt, Homo sapiens
  misc_RNA (1)...(19): siRNA sense strand
gaugaugaugguugggaau

SEQ ID NO: 2484409 - RNA, 19 nt, Homo sapiens
  misc_RNA (1)...(19): siRNA sense strand
uauaauugcggaaggagaa

SEQ ID NO: 2484410 - RNA, 19 nt, Homo sapiens
  misc_RNA (1)...(19): siRNA sense strand
cugaggaucaaguuggaaa

SEQ ID NO: 2484411 - RNA, 19 nt, Homo sapiens
  misc_RNA (1)...(19): siRNA sense strand
aggaacacauuaugcaaau

SEQ ID NO: 2484412 - RNA, 19 nt, Homo sapiens
  misc_RNA (1)...(19): siRNA sense strand
gauccucauccaagaguaa

SEQ ID NO: 2484413 - RNA, 19 nt, Homo sapiens
  misc_RNA (1)...(19): siRNA sense strand
gugaccugauugaaaguaa

SEQ ID NO: 2484414 - RNA, 19 nt, Homo sapiens
  misc_RNA (1)...(19): siRNA sense strand
ggaauuuaauagaugagga

SEQ ID NO: 2484415 - RNA, 19 nt, Homo sapiens
  misc_RNA (1)...(19): siRNA sense strand
ccuguaaugccgugggaca

SEQ ID NO: 2484416 - RNA, 19 nt, Homo sapiens
  misc_RNA (1)...(19): siRNA sense strand
cagaggaaaccuaugagaa

SEQ ID NO: 2484417 - RNA, 19 nt, Homo sapiens
  misc_RNA (1)...(19): siRNA sense strand
acugggagguauauugaaa

SEQ ID NO: 2484418 - RNA, 19 nt, Homo sapiens
  misc_RNA (1)...(19): siRNA sense strand
uucaguagcuacaaagaaa

SEQ ID NO: 2484419 - RNA, 19 nt, Homo sapiens
  misc_RNA (1)...(19): siRNA sense strand
gcauauggccugggaguca

SEQ ID NO: 2484420 - RNA, 19 nt, Homo sapiens
  misc_RNA (1)...(19): siRNA sense strand
gcuaaggaguuaaaggaag

SEQ ID NO: 2484421 - RNA, 19 nt, Homo sapiens
  misc_RNA (1)...(19): siRNA sense strand
ccgaacagguugucaaacu

SEQ ID NO: 2484422 - RNA, 19 nt, Homo sapiens
  misc_RNA (1)...(19): siRNA sense strand
ucuuacaagccaucagaaa

SEQ ID NO: 2484423 - RNA, 19 nt, Homo sapiens
  misc_RNA (1)...(19): siRNA sense strand
cagacuugcuaccgggauu

SEQ ID NO: 2484424 - RNA, 19 nt, Homo sapiens
  misc_RNA (1)...(19): siRNA sense strand
guguaaacguugaagaggu

SEQ ID NO: 2484425 - RNA, 19 nt, Homo sapiens
  misc_RNA (1)...(19): siRNA sense strand
agauaaagaagaagcuguu

SEQ ID NO: 2484426 - RNA, 19 nt, Homo sapiens
  misc_RNA (1)...(19): siRNA sense strand
cauggaagaccaaggcaau

SEQ ID NO: 2484427 - RNA, 19 nt, Homo sapiens
  misc_RNA (1)...(19): siRNA sense strand
ugaugaugaugguugggaa

SEQ ID NO: 2484428 - RNA, 19 nt, Homo sapiens
  misc_RNA (1)...(19): siRNA sense strand
acaguacgguggagauaau

SEQ ID NO: 2484429 - RNA, 19 nt, Homo sapiens
  misc_RNA (1)...(19): siRNA sense strand
aaacuagaagcaacagaaa

SEQ ID NO: 2484430 - RNA, 19 nt, Homo sapiens
  misc_RNA (1)...(19): siRNA sense strand
ggagaauaugagugaugau

SEQ ID NO: 2484431 - RNA, 19 nt, Homo sapiens
  misc_RNA (1)...(19): siRNA sense strand
aauuaaggccauugguaca

SEQ ID NO: 2484432 - RNA, 19 nt, Homo sapiens
  misc_RNA (1)...(19): siRNA sense strand
aaagacaagaugaagacua

SEQ ID NO: 2484433 - RNA, 19 nt, Homo sapiens
  misc_RNA (1)...(19): siRNA sense strand
aguccgugguccugaguau

SEQ ID NO: 2484434 - RNA, 19 nt, Homo sapiens
  misc_RNA (1)...(19): siRNA sense strand
gacacuagccucaacaaua

SEQ ID NO: 2484435 - RNA, 19 nt, Homo sapiens
  misc_RNA (1)...(19): siRNA sense strand
ucuaccugcuccugggaaa

SEQ ID NO: 2484436 - RNA, 19 nt, Homo sapiens
  misc_RNA (1)...(19): siRNA sense strand
ugaacaggucgaagaguca

SEQ ID NO: 2484437 - RNA, 19 nt, Homo sapiens
  misc_RNA (1)...(19): siRNA sense strand
uccacuacaugaagauaaa

SEQ ID NO: 2484438 - RNA, 19 nt, Homo sapiens
  misc_RNA (1)...(19): siRNA sense strand
caauauuguugcacagacu

SEQ ID NO: 2484439 - RNA, 19 nt, Homo sapiens
  misc_RNA (1)...(19): siRNA sense strand
acauggagaauaugaguga

SEQ ID NO: 2484440 - RNA, 19 nt, Homo sapiens
  misc_RNA (1)...(19): siRNA sense strand
uacaagaugaggaugauaa

SEQ ID NO: 2484441 - RNA, 19 nt, Homo sapiens
  misc_RNA (1)...(19): siRNA sense strand
gaccauggccagacagaca

SEQ ID NO: 2484442 - RNA, 19 nt, Homo sapiens
  misc_RNA (1)...(19): siRNA sense strand
acacuagccucaacaauau

SEQ ID NO: 2484443 - RNA, 19 nt, Homo sapiens
  misc_RNA (1)...(19): siRNA sense strand
cugugugaccugauugaaa

SEQ ID NO: 2484444 - RNA, 19 nt, Homo sapiens
  misc_RNA (1)...(19): siRNA sense strand
gcagaacuggccaggaauu

SEQ ID NO: 2484445 - RNA, 19 nt, Homo sapiens
  misc_RNA (1)...(19): siRNA sense strand
uugaagaacugggagguau

SEQ ID NO: 2484446 - RNA, 19 nt, Homo sapiens
  misc_RNA (1)...(19): siRNA sense strand
cacuacaagaugaggauga

SEQ ID NO: 2484447 - RNA, 19 nt, Homo sapiens
  misc_RNA (1)...(19): siRNA sense strand
gcacgaggcaauuaaacau

SEQ ID NO: 2484448 - RNA, 19 nt, Homo sapiens
  misc_RNA (1)...(19): siRNA sense strand
cuuacaagccaucagaaau

SEQ ID NO: 2484449 - RNA, 19 nt, Homo sapiens
  misc_RNA (1)...(19): siRNA sense strand
ugguugauuuggaagaaga

SEQ ID NO: 2484450 - RNA, 19 nt, Homo sapiens
  misc_RNA (1)...(19): siRNA sense strand
uggaagaagaugaggacug

SEQ ID NO: 2484451 - RNA, 19 nt, Homo sapiens
  misc_RNA (1)...(19): siRNA sense strand
ugccgauacugcagaagaa

SEQ ID NO: 2484452 - RNA, 19 nt, Homo sapiens
  misc_RNA (1)...(19): siRNA sense strand
gaaccuuggagaucagcaa

SEQ ID NO: 2484453 - RNA, 19 nt, Homo sapiens
  misc_RNA (1)...(19): siRNA sense strand
cgaaaugagcagagaagau

SEQ ID NO: 2484454 - RNA, 19 nt, Homo sapiens
  misc_RNA (1)...(19): siRNA sense strand
uggaaguaguagucggaaa

SEQ ID NO: 2484455 - RNA, 19 nt, Homo sapiens
  misc_RNA (1)...(19): siRNA sense strand
gaccaaaagucaaggggaa

SEQ ID NO: 2484456 - RNA, 19 nt, Homo sapiens
  misc_RNA (1)...(19): siRNA sense strand
gaggguugaccaagagaaa

SEQ ID NO: 2484457 - RNA, 19 nt, Homo sapiens
  misc_RNA (1)...(19): siRNA sense strand
agauaugcuguguggauaa

SEQ ID NO: 2484458 - RNA, 19 nt, Homo sapiens
  misc_RNA (1)...(19): siRNA sense strand
ggaaguaguagucggaaaa

SEQ ID NO: 2484459 - RNA, 19 nt, Homo sapiens
  misc_RNA (1)...(19): siRNA sense strand
caaugaaagaccagcaaaa

SEQ ID NO: 2484460 - RNA, 19 nt, Homo sapiens
  misc_RNA (1)...(19): siRNA sense strand
guauggagccagacgaaau

SEQ ID NO: 2484461 - RNA, 19 nt, Homo sapiens
  misc_RNA (1)...(19): siRNA sense strand
uaggauugguagaagaaau

SEQ ID NO: 2484462 - RNA, 19 nt, Homo sapiens
  misc_RNA (1)...(19): siRNA sense strand
uaggaaagucugauggauu

SEQ ID NO: 2484463 - RNA, 19 nt, Homo sapiens
  misc_RNA (1)...(19): siRNA sense strand
ugagguuuguagaaagaaa

SEQ ID NO: 2484464 - RNA, 19 nt, Homo sapiens
  misc_RNA (1)...(19): siRNA sense strand
ccauaucagagucaagaaa

SEQ ID NO: 2484465 - RNA, 19 nt, Homo sapiens
  misc_RNA (1)...(19): siRNA sense strand
ggguauggagccagacgaa

SEQ ID NO: 2484466 - RNA, 19 nt, Homo sapiens
  misc_RNA (1)...(19): siRNA sense strand
aggcagaaauccaccaaaa

SEQ ID NO: 2484467 - RNA, 19 nt, Homo sapiens
  misc_RNA (1)...(19): siRNA sense strand
guuuaaagauauguggcaa

SEQ ID NO: 2484468 - RNA, 19 nt, Homo sapiens
  misc_RNA (1)...(19): siRNA sense strand
gaauggaguaaccgaacaa

SEQ ID NO: 2484469 - RNA, 19 nt, Homo sapiens
  misc_RNA (1)...(19): siRNA sense strand
aauccugaguggagcagaa

SEQ ID NO: 2484470 - RNA, 19 nt, Homo sapiens
  misc_RNA (1)...(19): siRNA sense strand
gggaaacucaaaugugaau

SEQ ID NO: 2484471 - RNA, 19 nt, Homo sapiens
  misc_RNA (1)...(19): siRNA sense strand
aggauugguagaagaaauu

SEQ ID NO: 2484472 - RNA, 19 nt, Homo sapiens
  misc_RNA (1)...(19): siRNA sense strand
cagaaauugaggaaugaga

SEQ ID NO: 2484473 - RNA, 19 nt, Homo sapiens
  misc_RNA (1)...(19): siRNA sense strand
gaaccaugugcuaaagaau

SEQ ID NO: 2484474 - RNA, 19 nt, Homo sapiens
  misc_RNA (1)...(19): siRNA sense strand
ucaagaaagcacagagucu

SEQ ID NO: 2484475 - RNA, 19 nt, Homo sapiens
  misc_RNA (1)...(19): siRNA sense strand
ugcauaaagaaaugggcaa

SEQ ID NO: 2484476 - RNA, 19 nt, Homo sapiens
  misc_RNA (1)...(19): siRNA sense strand
guggaaccgauguaggaaa

SEQ ID NO: 2484477 - RNA, 19 nt, Homo sapiens
  misc_RNA (1)...(19): siRNA sense strand
gagccauggccuucagaau

SEQ ID NO: 2484478 - RNA, 19 nt, Homo sapiens
  misc_RNA (1)...(19): siRNA sense strand
agaaauugaggaaugagaa

SEQ ID NO: 2484479 - RNA, 19 nt, Homo sapiens
  misc_RNA (1)...(19): siRNA sense strand
cuaaauugugggacucaaa

SEQ ID NO: 2484480 - RNA, 19 nt, Homo sapiens
  misc_RNA (1)...(19): siRNA sense strand
uggucuaaauugugggacu

SEQ ID NO: 2484481 - RNA, 19 nt, Homo sapiens
  misc_RNA (1)...(19): siRNA sense strand
aaggaguauuggaugggua

SEQ ID NO: 2484482 - RNA, 19 nt, Homo sapiens
  misc_RNA (1)...(19): siRNA sense strand
aaggaugaccucaaugaaa

SEQ ID NO: 2484483 - RNA, 19 nt, Homo sapiens
  misc_RNA (1)...(19): siRNA sense strand
ggaggaugcuggacccgaa

SEQ ID NO: 2484484 - RNA, 19 nt, Homo sapiens
  misc_RNA (1)...(19): siRNA sense strand
gugcuaaagaauguggaaa

SEQ ID NO: 2484485 - RNA, 19 nt, Homo sapiens
  misc_RNA (1)...(19): siRNA sense strand
ugaaggagacuguggacca

SEQ ID NO: 2484486 - RNA, 19 nt, Homo sapiens
  misc_RNA (1)...(19): siRNA sense strand
agaaguggugcaugggcaa

SEQ ID NO: 2484487 - RNA, 19 nt, Homo sapiens
  misc_RNA (1)...(19): siRNA sense strand
ucaaaugugaauggaguaa

SEQ ID NO: 2484488 - RNA, 19 nt, Homo sapiens
  misc_RNA (1)...(19): siRNA sense strand
aggaaugagaagcaccaua

SEQ ID NO: 2484489 - RNA, 19 nt, Homo sapiens
  misc_RNA (1)...(19): siRNA sense strand
ccucagauacagcuggauu

SEQ ID NO: 2484490 - RNA, 19 nt, Homo sapiens
  misc_RNA (1)...(19): siRNA sense strand
cagaaguggugcaugggca

SEQ ID NO: 2484491 - RNA, 19 nt, Homo sapiens
  misc_RNA (1)...(19): siRNA sense strand
cagaaucaaccuuggcaga

SEQ ID NO: 2484492 - RNA, 19 nt, Homo sapiens
  misc_RNA (1)...(19): siRNA sense strand
ggauggguauggagccaga

SEQ ID NO: 2484493 - RNA, 19 nt, Homo sapiens
  misc_RNA (1)...(19): siRNA sense strand
ggguugaccaagagaaaug

SEQ ID NO: 2484494 - RNA, 19 nt, Homo sapiens
  misc_RNA (1)...(19): siRNA sense strand
gguaaagaauccugagugg

SEQ ID NO: 2484495 - RNA, 19 nt, Homo sapiens
  misc_RNA (1)...(19): siRNA sense strand
ugagauaugcuguguggau

SEQ ID NO: 2484496 - RNA, 19 nt, Homo sapiens
  misc_RNA (1)...(19): siRNA sense strand
agacgaaaugagcagagaa

SEQ ID NO: 2484497 - RNA, 19 nt, Homo sapiens
  misc_RNA (1)...(19): siRNA sense strand
cagaucagagagugggaca

SEQ ID NO: 2484498 - RNA, 19 nt, Homo sapiens
  misc_RNA (1)...(19): siRNA sense strand
aacagaaccaugugcuaaa

SEQ ID NO: 2484499 - RNA, 19 nt, Homo sapiens
  misc_RNA (1)...(19): siRNA sense strand
cucagauacagcuggauua

SEQ ID NO: 2484500 - RNA, 19 nt, Homo sapiens
  misc_RNA (1)...(19): siRNA sense strand
agaaggaaguugugggugc

SEQ ID NO: 2484501 - RNA, 19 nt, Homo sapiens
  misc_RNA (1)...(19): siRNA sense strand
acauagcuguggugagguu

SEQ ID NO: 2484502 - RNA, 19 nt, Homo sapiens
  misc_RNA (1)...(19): siRNA sense strand
uugaaaugcgguaaccaua

SEQ ID NO: 2484503 - RNA, 19 nt, Homo sapiens
  misc_RNA (1)...(19): siRNA sense strand
agugaagaugcuacauuua

SEQ ID NO: 2484504 - RNA, 19 nt, Homo sapiens
  misc_RNA (1)...(19): siRNA sense strand
cgucaggaagcaaaccuaa

SEQ ID NO: 2484505 - RNA, 19 nt, Homo sapiens
  misc_RNA (1)...(19): siRNA sense strand
aauaggauugguagaagaa

SEQ ID NO: 2484506 - RNA, 19 nt, Homo sapiens
  misc_RNA (1)...(19): siRNA sense strand
aggaguauuggauggguau

SEQ ID NO: 2484507 - RNA, 19 nt, Homo sapiens
  misc_RNA (1)...(19): siRNA sense strand
ggaaguugugggugcagau

SEQ ID NO: 2484508 - RNA, 19 nt, Homo sapiens
  misc_RNA (1)...(19): siRNA sense strand
caccaaaacaggagggcca

SEQ ID NO: 2484509 - RNA, 19 nt, Homo sapiens
  misc_RNA (1)...(19): siRNA sense strand
agauauguggcaaggacuu

SEQ ID NO: 2484510 - RNA, 19 nt, Homo sapiens
  misc_RNA (1)...(19): siRNA sense strand
cagccaauugcuagaacuu

SEQ ID NO: 2484511 - RNA, 19 nt, Homo sapiens
  misc_RNA (1)...(19): siRNA sense strand
ccuugugguuccuuagauu

SEQ ID NO: 2484512 - RNA, 19 nt, Homo sapiens
  misc_RNA (1)...(19): siRNA sense strand
caaccuuggcagaaauuga

SEQ ID NO: 2484513 - RNA, 19 nt, Homo sapiens
  misc_RNA (1)...(19): siRNA sense strand
agaacuuggcagucaucaa

SEQ ID NO: 2484514 - RNA, 19 nt, Homo sapiens
  misc_RNA (1)...(19): siRNA sense strand
guggaaacgcacacagguu

SEQ ID NO: 2484515 - RNA, 19 nt, Homo sapiens
  misc_RNA (1)...(19): siRNA sense strand
cgaaaugagcagagaagau

SEQ ID NO: 2484516 - RNA, 19 nt, Homo sapiens
  misc_RNA (1)...(19): siRNA sense strand
uggaaguaguagucggaaa

SEQ ID NO: 2484517 - RNA, 19 nt, Homo sapiens
  misc_RNA (1)...(19): siRNA sense strand
gaccaaaagucaaggggaa

SEQ ID NO: 2484518 - RNA, 19 nt, Homo sapiens
  misc_RNA (1)...(19): siRNA sense strand
gaggguugaccaagagaaa

SEQ ID NO: 2484519 - RNA, 19 nt, Homo sapiens
  misc_RNA (1)...(19): siRNA sense strand
agauaugcuguguggauaa

SEQ ID NO: 2484520 - RNA, 19 nt, Homo sapiens
  misc_RNA (1)...(19): siRNA sense strand
ggaaguaguagucggaaaa

SEQ ID NO: 2484521 - RNA, 19 nt, Homo sapiens
  misc_RNA (1)...(19): siRNA sense strand
caaugaaagaccagcaaaa

SEQ ID NO: 2484522 - RNA, 19 nt, Homo sapiens
  misc_RNA (1)...(19): siRNA sense strand
guauggagccagacgaaau

SEQ ID NO: 2484523 - RNA, 19 nt, Homo sapiens
  misc_RNA (1)...(19): siRNA sense strand
uaggauugguagaagaaau

SEQ ID NO: 2484524 - RNA, 19 nt, Homo sapiens
  misc_RNA (1)...(19): siRNA sense strand
uaggaaagucugauggauu

SEQ ID NO: 2484525 - RNA, 19 nt, Homo sapiens
  misc_RNA (1)...(19): siRNA sense strand
ugagguuuguagaaagaaa

SEQ ID NO: 2484526 - RNA, 19 nt, Homo sapiens
  misc_RNA (1)...(19): siRNA sense strand
ccauaucagagucaagaaa

SEQ ID NO: 2484527 - RNA, 19 nt, Homo sapiens
  misc_RNA (1)...(19): siRNA sense strand
ggguauggagccagacgaa

SEQ ID NO: 2484528 - RNA, 19 nt, Homo sapiens
  misc_RNA (1)...(19): siRNA sense strand
aggcagaaauccaccaaaa

SEQ ID NO: 2484529 - RNA, 19 nt, Homo sapiens
  misc_RNA (1)...(19): siRNA sense strand
guuuaaagauauguggcaa

SEQ ID NO: 2484530 - RNA, 19 nt, Homo sapiens
  misc_RNA (1)...(19): siRNA sense strand
gaauggaguaaccgaacaa

SEQ ID NO: 2484531 - RNA, 19 nt, Homo sapiens
  misc_RNA (1)...(19): siRNA sense strand
aauccugaguggagcagaa

SEQ ID NO: 2484532 - RNA, 19 nt, Homo sapiens
  misc_RNA (1)...(19): siRNA sense strand
gggaaacucaaaugugaau

SEQ ID NO: 2484533 - RNA, 19 nt, Homo sapiens
  misc_RNA (1)...(19): siRNA sense strand
aggauugguagaagaaauu

SEQ ID NO: 2484534 - RNA, 19 nt, Homo sapiens
  misc_RNA (1)...(19): siRNA sense strand
cagaaauugaggaaugaga

SEQ ID NO: 2484535 - RNA, 19 nt, Homo sapiens
  misc_RNA (1)...(19): siRNA sense strand
gaaccaugugcuaaagaau

SEQ ID NO: 2484536 - RNA, 19 nt, Homo sapiens
  misc_RNA (1)...(19): siRNA sense strand
ucaagaaagcacagagucu

SEQ ID NO: 2484537 - RNA, 19 nt, Homo sapiens
  misc_RNA (1)...(19): siRNA sense strand
ugcauaaagaaaugggcaa

SEQ ID NO: 2484538 - RNA, 19 nt, Homo sapiens
  misc_RNA (1)...(19): siRNA sense strand
guggaaccgauguaggaaa

SEQ ID NO: 2484539 - RNA, 19 nt, Homo sapiens
  misc_RNA (1)...(19): siRNA sense strand
gagccauggccuucagaau

SEQ ID NO: 2484540 - RNA, 19 nt, Homo sapiens
  misc_RNA (1)...(19): siRNA sense strand
agaaauugaggaaugagaa

SEQ ID NO: 2484541 - RNA, 19 nt, Homo sapiens
  misc_RNA (1)...(19): siRNA sense strand
cuaaauugugggacucaaa

SEQ ID NO: 2484542 - RNA, 19 nt, Homo sapiens
  misc_RNA (1)...(19): siRNA sense strand
uggucuaaauugugggacu

SEQ ID NO: 2484543 - RNA, 19 nt, Homo sapiens
  misc_RNA (1)...(19): siRNA sense strand
aaggaguauuggaugggua

SEQ ID NO: 2484544 - RNA, 19 nt, Homo sapiens
  misc_RNA (1)...(19): siRNA sense strand
aaggaugaccucaaugaaa

SEQ ID NO: 2484545 - RNA, 19 nt, Homo sapiens
  misc_RNA (1)...(19): siRNA sense strand
ggaggaugcuggacccgaa

SEQ ID NO: 2484546 - RNA, 19 nt, Homo sapiens
  misc_RNA (1)...(19): siRNA sense strand
gugcuaaagaauguggaaa

SEQ ID NO: 2484547 - RNA, 19 nt, Homo sapiens
  misc_RNA (1)...(19): siRNA sense strand
ugaaggagacuguggacca

SEQ ID NO: 2484548 - RNA, 19 nt, Homo sapiens
  misc_RNA (1)...(19): siRNA sense strand
agaaguggugcaugggcaa

SEQ ID NO: 2484549 - RNA, 19 nt, Homo sapiens
  misc_RNA (1)...(19): siRNA sense strand
ucaaaugugaauggaguaa

SEQ ID NO: 2484550 - RNA, 19 nt, Homo sapiens
  misc_RNA (1)...(19): siRNA sense strand
aggaaugagaagcaccaua

SEQ ID NO: 2484551 - RNA, 19 nt, Homo sapiens
  misc_RNA (1)...(19): siRNA sense strand
ccucagauacagcuggauu

SEQ ID NO: 2484552 - RNA, 19 nt, Homo sapiens
  misc_RNA (1)...(19): siRNA sense strand
cagaaguggugcaugggca

SEQ ID NO: 2484553 - RNA, 19 nt, Homo sapiens
  misc_RNA (1)...(19): siRNA sense strand
cagaaucaaccuuggcaga

SEQ ID NO: 2484554 - RNA, 19 nt, Homo sapiens
  misc_RNA (1)...(19): siRNA sense strand
ggauggguauggagccaga

SEQ ID NO: 2484555 - RNA, 19 nt, Homo sapiens
  misc_RNA (1)...(19): siRNA sense strand
ggguugaccaagagaaaug

SEQ ID NO: 2484556 - RNA, 19 nt, Homo sapiens
  misc_RNA (1)...(19): siRNA sense strand
gguaaagaauccugagugg

SEQ ID NO: 2484557 - RNA, 19 nt, Homo sapiens
  misc_RNA (1)...(19): siRNA sense strand
ugagauaugcuguguggau

SEQ ID NO: 2484558 - RNA, 19 nt, Homo sapiens
  misc_RNA (1)...(19): siRNA sense strand
agacgaaaugagcagagaa

SEQ ID NO: 2484559 - RNA, 19 nt, Homo sapiens
  misc_RNA (1)...(19): siRNA sense strand
cagaucagagagugggaca

SEQ ID NO: 2484560 - RNA, 19 nt, Homo sapiens
  misc_RNA (1)...(19): siRNA sense strand
aacagaaccaugugcuaaa

SEQ ID NO: 2484561 - RNA, 19 nt, Homo sapiens
  misc_RNA (1)...(19): siRNA sense strand
cucagauacagcuggauua

SEQ ID NO: 2484562 - RNA, 19 nt, Homo sapiens
  misc_RNA (1)...(19): siRNA sense strand
agaaggaaguugugggugc

SEQ ID NO: 2484563 - RNA, 19 nt, Homo sapiens
  misc_RNA (1)...(19): siRNA sense strand
acauagcuguggugagguu

SEQ ID NO: 2484564 - RNA, 19 nt, Homo sapiens
  misc_RNA (1)...(19): siRNA sense strand
uugaaaugcgguaaccaua

SEQ ID NO: 2484565 - RNA, 19 nt, Homo sapiens
  misc_RNA (1)...(19): siRNA sense strand
agugaagaugcuacauuua

SEQ ID NO: 2484566 - RNA, 19 nt, Homo sapiens
  misc_RNA (1)...(19): siRNA sense strand
cgucaggaagcaaaccuaa

SEQ ID NO: 2484567 - RNA, 19 nt, Homo sapiens
  misc_RNA (1)...(19): siRNA sense strand
aauaggauugguagaagaa

SEQ ID NO: 2484568 - RNA, 19 nt, Homo sapiens
  misc_RNA (1)...(19): siRNA sense strand
aggaguauuggauggguau

SEQ ID NO: 2484569 - RNA, 19 nt, Homo sapiens
  misc_RNA (1)...(19): siRNA sense strand
ggaaguugugggugcagau

SEQ ID NO: 2484570 - RNA, 19 nt, Homo sapiens
  misc_RNA (1)...(19): siRNA sense strand
caccaaaacaggagggcca

SEQ ID NO: 2484571 - RNA, 19 nt, Homo sapiens
  misc_RNA (1)...(19): siRNA sense strand
agauauguggcaaggacuu

SEQ ID NO: 2484572 - RNA, 19 nt, Homo sapiens
  misc_RNA (1)...(19): siRNA sense strand
cagccaauugcuagaacuu

SEQ ID NO: 2484573 - RNA, 19 nt, Homo sapiens
  misc_RNA (1)...(19): siRNA sense strand
ccuugugguuccuuagauu

SEQ ID NO: 2484574 - RNA, 19 nt, Homo sapiens
  misc_RNA (1)...(19): siRNA sense strand
caaccuuggcagaaauuga

SEQ ID NO: 2484575 - RNA, 19 nt, Homo sapiens
  misc_RNA (1)...(19): siRNA sense strand
agaacuuggcagucaucaa

SEQ ID NO: 2484576 - RNA, 19 nt, Homo sapiens
  misc_RNA (1)...(19): siRNA sense strand
guggaaacgcacacagguu

SEQ ID NO: 2484577 - RNA, 19 nt, Homo sapiens
  misc_RNA (1)...(19): siRNA sense strand
cgaaaugagcagagaagau

SEQ ID NO: 2484578 - RNA, 19 nt, Homo sapiens
  misc_RNA (1)...(19): siRNA sense strand
uggaaguaguagucggaaa

SEQ ID NO: 2484579 - RNA, 19 nt, Homo sapiens
  misc_RNA (1)...(19): siRNA sense strand
gaccaaaagucaaggggaa

SEQ ID NO: 2484580 - RNA, 19 nt, Homo sapiens
  misc_RNA (1)...(19): siRNA sense strand
gaggguugaccaagagaaa

SEQ ID NO: 2484581 - RNA, 19 nt, Homo sapiens
  misc_RNA (1)...(19): siRNA sense strand
agauaugcuguguggauaa

SEQ ID NO: 2484582 - RNA, 19 nt, Homo sapiens
  misc_RNA (1)...(19): siRNA sense strand
ggaaguaguagucggaaaa

SEQ ID NO: 2484583 - RNA, 19 nt, Homo sapiens
  misc_RNA (1)...(19): siRNA sense strand
caaugaaagaccagcaaaa

SEQ ID NO: 2484584 - RNA, 19 nt, Homo sapiens
  misc_RNA (1)...(19): siRNA sense strand
guauggagccagacgaaau

SEQ ID NO: 2484585 - RNA, 19 nt, Homo sapiens
  misc_RNA (1)...(19): siRNA sense strand
uaggauugguagaagaaau

SEQ ID NO: 2484586 - RNA, 19 nt, Homo sapiens
  misc_RNA (1)...(19): siRNA sense strand
uaggaaagucugauggauu

SEQ ID NO: 2484587 - RNA, 19 nt, Homo sapiens
  misc_RNA (1)...(19): siRNA sense strand
ugagguuuguagaaagaaa

SEQ ID NO: 2484588 - RNA, 19 nt, Homo sapiens
  misc_RNA (1)...(19): siRNA sense strand
ccauaucagagucaagaaa

SEQ ID NO: 2484589 - RNA, 19 nt, Homo sapiens
  misc_RNA (1)...(19): siRNA sense strand
ggguauggagccagacgaa

SEQ ID NO: 2484590 - RNA, 19 nt, Homo sapiens
  misc_RNA (1)...(19): siRNA sense strand
aggcagaaauccaccaaaa

SEQ ID NO: 2484591 - RNA, 19 nt, Homo sapiens
  misc_RNA (1)...(19): siRNA sense strand
guuuaaagauauguggcaa

SEQ ID NO: 2484592 - RNA, 19 nt, Homo sapiens
  misc_RNA (1)...(19): siRNA sense strand
gaauggaguaaccgaacaa

SEQ ID NO: 2484593 - RNA, 19 nt, Homo sapiens
  misc_RNA (1)...(19): siRNA sense strand
aauccugaguggagcagaa

SEQ ID NO: 2484594 - RNA, 19 nt, Homo sapiens
  misc_RNA (1)...(19): siRNA sense strand
gggaaacucaaaugugaau

SEQ ID NO: 2484595 - RNA, 19 nt, Homo sapiens
  misc_RNA (1)...(19): siRNA sense strand
aggauugguagaagaaauu

SEQ ID NO: 2484596 - RNA, 19 nt, Homo sapiens
  misc_RNA (1)...(19): siRNA sense strand
cagaaauugaggaaugaga

SEQ ID NO: 2484597 - RNA, 19 nt, Homo sapiens
  misc_RNA (1)...(19): siRNA sense strand
gaaccaugugcuaaagaau

SEQ ID NO: 2484598 - RNA, 19 nt, Homo sapiens
  misc_RNA (1)...(19): siRNA sense strand
ucaagaaagcacagagucu

SEQ ID NO: 2484599 - RNA, 19 nt, Homo sapiens
  misc_RNA (1)...(19): siRNA sense strand
ugcauaaagaaaugggcaa

SEQ ID NO: 2484600 - RNA, 19 nt, Homo sapiens
  misc_RNA (1)...(19): siRNA sense strand
guggaaccgauguaggaaa

SEQ ID NO: 2484601 - RNA, 19 nt, Homo sapiens
  misc_RNA (1)...(19): siRNA sense strand
gagccauggccuucagaau

SEQ ID NO: 2484602 - RNA, 19 nt, Homo sapiens
  misc_RNA (1)...(19): siRNA sense strand
agaaauugaggaaugagaa

SEQ ID NO: 2484603 - RNA, 19 nt, Homo sapiens
  misc_RNA (1)...(19): siRNA sense strand
cuaaauugugggacucaaa

SEQ ID NO: 2484604 - RNA, 19 nt, Homo sapiens
  misc_RNA (1)...(19): siRNA sense strand
uggucuaaauugugggacu

SEQ ID NO: 2484605 - RNA, 19 nt, Homo sapiens
  misc_RNA (1)...(19): siRNA sense strand
aaggaguauuggaugggua

SEQ ID NO: 2484606 - RNA, 19 nt, Homo sapiens
  misc_RNA (1)...(19): siRNA sense strand
aaggaugaccucaaugaaa

SEQ ID NO: 2484607 - RNA, 19 nt, Homo sapiens
  misc_RNA (1)...(19): siRNA sense strand
ggaggaugcuggacccgaa

SEQ ID NO: 2484608 - RNA, 19 nt, Homo sapiens
  misc_RNA (1)...(19): siRNA sense strand
gugcuaaagaauguggaaa

SEQ ID NO: 2484609 - RNA, 19 nt, Homo sapiens
  misc_RNA (1)...(19): siRNA sense strand
ugaaggagacuguggacca

SEQ ID NO: 2484610 - RNA, 19 nt, Homo sapiens
  misc_RNA (1)...(19): siRNA sense strand
agaaguggugcaugggcaa

SEQ ID NO: 2484611 - RNA, 19 nt, Homo sapiens
  misc_RNA (1)...(19): siRNA sense strand
ucaaaugugaauggaguaa

SEQ ID NO: 2484612 - RNA, 19 nt, Homo sapiens
  misc_RNA (1)...(19): siRNA sense strand
aggaaugagaagcaccaua

SEQ ID NO: 2484613 - RNA, 19 nt, Homo sapiens
  misc_RNA (1)...(19): siRNA sense strand
ccucagauacagcuggauu

SEQ ID NO: 2484614 - RNA, 19 nt, Homo sapiens
  misc_RNA (1)...(19): siRNA sense strand
cagaaguggugcaugggca

SEQ ID NO: 2484615 - RNA, 19 nt, Homo sapiens
  misc_RNA (1)...(19): siRNA sense strand
cagaaucaaccuuggcaga

SEQ ID NO: 2484616 - RNA, 19 nt, Homo sapiens
  misc_RNA (1)...(19): siRNA sense strand
ggauggguauggagccaga

SEQ ID NO: 2484617 - RNA, 19 nt, Homo sapiens
  misc_RNA (1)...(19): siRNA sense strand
ggguugaccaagagaaaug

SEQ ID NO: 2484618 - RNA, 19 nt, Homo sapiens
  misc_RNA (1)...(19): siRNA sense strand
gguaaagaauccugagugg

SEQ ID NO: 2484619 - RNA, 19 nt, Homo sapiens
  misc_RNA (1)...(19): siRNA sense strand
ugagauaugcuguguggau

SEQ ID NO: 2484620 - RNA, 19 nt, Homo sapiens
  misc_RNA (1)...(19): siRNA sense strand
agacgaaaugagcagagaa

SEQ ID NO: 2484621 - RNA, 19 nt, Homo sapiens
  misc_RNA (1)...(19): siRNA sense strand
cagaucagagagugggaca

SEQ ID NO: 2484622 - RNA, 19 nt, Homo sapiens
  misc_RNA (1)...(19): siRNA sense strand
aacagaaccaugugcuaaa

SEQ ID NO: 2484623 - RNA, 19 nt, Homo sapiens
  misc_RNA (1)...(19): siRNA sense strand
cucagauacagcuggauua

SEQ ID NO: 2484624 - RNA, 19 nt, Homo sapiens
  misc_RNA (1)...(19): siRNA sense strand
agaaggaaguugugggugc

SEQ ID NO: 2484625 - RNA, 19 nt, Homo sapiens
  misc_RNA (1)...(19): siRNA sense strand
acauagcuguggugagguu

SEQ ID NO: 2484626 - RNA, 19 nt, Homo sapiens
  misc_RNA (1)...(19): siRNA sense strand
uugaaaugcgguaaccaua

SEQ ID NO: 2484627 - RNA, 19 nt, Homo sapiens
  misc_RNA (1)...(19): siRNA sense strand
agugaagaugcuacauuua

SEQ ID NO: 2484628 - RNA, 19 nt, Homo sapiens
  misc_RNA (1)...(19): siRNA sense strand
cgucaggaagcaaaccuaa

SEQ ID NO: 2484629 - RNA, 19 nt, Homo sapiens
  misc_RNA (1)...(19): siRNA sense strand
aauaggauugguagaagaa

SEQ ID NO: 2484630 - RNA, 19 nt, Homo sapiens
  misc_RNA (1)...(19): siRNA sense strand
aggaguauuggauggguau

SEQ ID NO: 2484631 - RNA, 19 nt, Homo sapiens
  misc_RNA (1)...(19): siRNA sense strand
ggaaguugugggugcagau

SEQ ID NO: 2484632 - RNA, 19 nt, Homo sapiens
  misc_RNA (1)...(19): siRNA sense strand
caccaaaacaggagggcca

SEQ ID NO: 2484633 - RNA, 19 nt, Homo sapiens
  misc_RNA (1)...(19): siRNA sense strand
agauauguggcaaggacuu

SEQ ID NO: 2484634 - RNA, 19 nt, Homo sapiens
  misc_RNA (1)...(19): siRNA sense strand
cagccaauugcuagaacuu

SEQ ID NO: 2484635 - RNA, 19 nt, Homo sapiens
  misc_RNA (1)...(19): siRNA sense strand
ccuugugguuccuuagauu

SEQ ID NO: 2484636 - RNA, 19 nt, Homo sapiens
  misc_RNA (1)...(19): siRNA sense strand
caaccuuggcagaaauuga

SEQ ID NO: 2484637 - RNA, 19 nt, Homo sapiens
  misc_RNA (1)...(19): siRNA sense strand
agaacuuggcagucaucaa

SEQ ID NO: 2484638 - RNA, 19 nt, Homo sapiens
  misc_RNA (1)...(19): siRNA sense strand
guggaaacgcacacagguu

SEQ ID NO: 2484639 - RNA, 19 nt, Homo sapiens
  misc_RNA (1)...(19): siRNA sense strand
aggcagaaguggaggccau

SEQ ID NO: 2484640 - RNA, 19 nt, Homo sapiens
  misc_RNA (1)...(19): siRNA sense strand
aggacaaggagguggaaga

SEQ ID NO: 2484641 - RNA, 19 nt, Homo sapiens
  misc_RNA (1)...(19): siRNA sense strand
aggaagagcuggaggaggu

SEQ ID NO: 2484642 - RNA, 19 nt, Homo sapiens
  misc_RNA (1)...(19): siRNA sense strand
cugcagaagcugagcacau

SEQ ID NO: 2484643 - RNA, 19 nt, Homo sapiens
  misc_RNA (1)...(19): siRNA sense strand
aguugaagcagaagggaga

SEQ ID NO: 2484644 - RNA, 19 nt, Homo sapiens
  misc_RNA (1)...(19): siRNA sense strand
cugaaagacuaauggagca

SEQ ID NO: 2484645 - RNA, 19 nt, Homo sapiens
  misc_RNA (1)...(19): siRNA sense strand
cugaaggaguugaagcaga

SEQ ID NO: 2484646 - RNA, 19 nt, Homo sapiens
  misc_RNA (1)...(19): siRNA sense strand
gcugugacaaagagaacaa

SEQ ID NO: 2484647 - RNA, 19 nt, Homo sapiens
  misc_RNA (1)...(19): siRNA sense strand
caaaugaccugcacggaca

SEQ ID NO: 2484648 - RNA, 19 nt, Homo sapiens
  misc_RNA (1)...(19): siRNA sense strand
ggaaggaagagcuggagga

SEQ ID NO: 2484649 - RNA, 19 nt, Homo sapiens
  misc_RNA (1)...(19): siRNA sense strand
agaccagauuggaggcuga

SEQ ID NO: 2484650 - RNA, 19 nt, Homo sapiens
  misc_RNA (1)...(19): siRNA sense strand
aagaccaacugcagggcua

SEQ ID NO: 2484651 - RNA, 19 nt, Homo sapiens
  misc_RNA (1)...(19): siRNA sense strand
ggaaucagcauaaggcaga

SEQ ID NO: 2484652 - RNA, 19 nt, Homo sapiens
  misc_RNA (1)...(19): siRNA sense strand
ggguaacagaucuuguaaa

SEQ ID NO: 2484653 - RNA, 19 nt, Homo sapiens
  misc_RNA (1)...(19): siRNA sense strand
ugacaaggcagaaggaacu

SEQ ID NO: 2484654 - RNA, 19 nt, Homo sapiens
  misc_RNA (1)...(19): siRNA sense strand
cugaaaacggagaaacaaa

SEQ ID NO: 2484655 - RNA, 19 nt, Homo sapiens
  misc_RNA (1)...(19): siRNA sense strand
gguccaaagaggcugagaa

SEQ ID NO: 2484656 - RNA, 19 nt, Homo sapiens
  misc_RNA (1)...(19): siRNA sense strand
ggcacaacaucgagcgcau

SEQ ID NO: 2484657 - RNA, 19 nt, Homo sapiens
  misc_RNA (1)...(19): siRNA sense strand
caacaaacccuggaggaga

SEQ ID NO: 2484658 - RNA, 19 nt, Homo sapiens
  misc_RNA (1)...(19): siRNA sense strand
agaugaacaaagagauuga

SEQ ID NO: 2484659 - RNA, 19 nt, Homo sapiens
  misc_RNA (1)...(19): siRNA sense strand
ccgcauucaagcuggagaa

SEQ ID NO: 2484660 - RNA, 19 nt, Homo sapiens
  misc_RNA (1)...(19): siRNA sense strand
uggaggaacggaaggaaga

SEQ ID NO: 2484661 - RNA, 19 nt, Homo sapiens
  misc_RNA (1)...(19): siRNA sense strand
gucugaagucugaggucaa

SEQ ID NO: 2484662 - RNA, 19 nt, Homo sapiens
  misc_RNA (1)...(19): siRNA sense strand
aggccucagugaagaacua

SEQ ID NO: 2484663 - RNA, 19 nt, Homo sapiens
  misc_RNA (1)...(19): siRNA sense strand
ggcuaugagcggaagaaca

SEQ ID NO: 2484664 - RNA, 19 nt, Homo sapiens
  misc_RNA (1)...(19): siRNA sense strand
gaggauucugaaagacuaa

SEQ ID NO: 2484665 - RNA, 19 nt, Homo sapiens
  misc_RNA (1)...(19): siRNA sense strand
cgagaagagcgaggaguau

SEQ ID NO: 2484666 - RNA, 19 nt, Homo sapiens
  misc_RNA (1)...(19): siRNA sense strand
ugaaagacuaauggagcaa

SEQ ID NO: 2484667 - RNA, 19 nt, Homo sapiens
  misc_RNA (1)...(19): siRNA sense strand
uuguaaaagaaaagggaga

SEQ ID NO: 2484668 - RNA, 19 nt, Homo sapiens
  misc_RNA (1)...(19): siRNA sense strand
aggagaagaugcgggaaga

SEQ ID NO: 2484669 - RNA, 19 nt, Homo sapiens
  misc_RNA (1)...(19): siRNA sense strand
cuuaaagaugagaugaaca

SEQ ID NO: 2484670 - RNA, 19 nt, Homo sapiens
  misc_RNA (1)...(19): siRNA sense strand
agucugaggucaagaugca

SEQ ID NO: 2484671 - RNA, 19 nt, Homo sapiens
  misc_RNA (1)...(19): siRNA sense strand
ugaagaucacggaggcgaa

SEQ ID NO: 2484672 - RNA, 19 nt, Homo sapiens
  misc_RNA (1)...(19): siRNA sense strand
ccaagcaggucauggccuu

SEQ ID NO: 2484673 - RNA, 19 nt, Homo sapiens
  misc_RNA (1)...(19): siRNA sense strand
gaggagaagaugcgggaag

SEQ ID NO: 2484674 - RNA, 19 nt, Homo sapiens
  misc_RNA (1)...(19): siRNA sense strand
cuggagaaugagaggcuga

SEQ ID NO: 2484675 - RNA, 19 nt, Homo sapiens
  misc_RNA (1)...(19): siRNA sense strand
cugacaaggcagaaggaac

SEQ ID NO: 2484676 - RNA, 19 nt, Homo sapiens
  misc_RNA (1)...(19): siRNA sense strand
uccuuaaagaugagaugaa

SEQ ID NO: 2484677 - RNA, 19 nt, Homo sapiens
  misc_RNA (1)...(19): siRNA sense strand
uguuacugcugcaagacaa

SEQ ID NO: 2484678 - RNA, 19 nt, Homo sapiens
  misc_RNA (1)...(19): siRNA sense strand
agggagaccuugagcugga

SEQ ID NO: 2484679 - RNA, 19 nt, Homo sapiens
  misc_RNA (1)...(19): siRNA sense strand
gugacaaagagaacaagau

SEQ ID NO: 2484680 - RNA, 19 nt, Homo sapiens
  misc_RNA (1)...(19): siRNA sense strand
acgaacuggcugagacuga

SEQ ID NO: 2484681 - RNA, 19 nt, Homo sapiens
  misc_RNA (1)...(19): siRNA sense strand
aaagacuaauggagcaaca

SEQ ID NO: 2484682 - RNA, 19 nt, Homo sapiens
  misc_RNA (1)...(19): siRNA sense strand
aaugagaggcugaaggcca

SEQ ID NO: 2484683 - RNA, 19 nt, Homo sapiens
  misc_RNA (1)...(19): siRNA sense strand
gugcaugcagauuaagaau

SEQ ID NO: 2484684 - RNA, 19 nt, Homo sapiens
  misc_RNA (1)...(19): siRNA sense strand
cgggauagccugguggaga

SEQ ID NO: 2484685 - RNA, 19 nt, Homo sapiens
  misc_RNA (1)...(19): siRNA sense strand
caauggaggacaaacucaa

SEQ ID NO: 2484686 - RNA, 19 nt, Homo sapiens
  misc_RNA (1)...(19): siRNA sense strand
ggacaaacucaaccaggca

SEQ ID NO: 2484687 - RNA, 19 nt, Homo sapiens
  misc_RNA (1)...(19): siRNA sense strand
agacugagcacgagaacac

SEQ ID NO: 2484688 - RNA, 19 nt, Homo sapiens
  misc_RNA (1)...(19): siRNA sense strand
agggagaccgagacaaaga

SEQ ID NO: 2484689 - RNA, 19 nt, Homo sapiens
  misc_RNA (1)...(19): siRNA sense strand
cagaagggagaccgagaca

SEQ ID NO: 2484690 - RNA, 19 nt, Homo sapiens
  misc_RNA (1)...(19): siRNA sense strand
caggagaaggagugccuca

SEQ ID NO: 2484691 - RNA, 19 nt, Homo sapiens
  misc_RNA (1)...(19): siRNA sense strand
cgagacaaagagagcuuga

SEQ ID NO: 2484692 - RNA, 19 nt, Homo sapiens
  misc_RNA (1)...(19): siRNA sense strand
acaaagagaacaagauccu

SEQ ID NO: 2484693 - RNA, 19 nt, Homo sapiens
  misc_RNA (1)...(19): siRNA sense strand
uggcugagacugagcacga

SEQ ID NO: 2484694 - RNA, 19 nt, Homo sapiens
  misc_RNA (1)...(19): siRNA sense strand
acaaggagguggaagagcu

SEQ ID NO: 2484695 - RNA, 19 nt, Homo sapiens
  misc_RNA (1)...(19): siRNA sense strand
gggaagaccgggauagccu

SEQ ID NO: 2484696 - RNA, 19 nt, Homo sapiens
  misc_RNA (1)...(19): siRNA sense strand
auaagagucaggugaugaa

SEQ ID NO: 2484697 - RNA, 19 nt, Homo sapiens
  misc_RNA (1)...(19): siRNA sense strand
gggauagccugguggagag

SEQ ID NO: 2484698 - RNA, 19 nt, Homo sapiens
  misc_RNA (1)...(19): siRNA sense strand
aggcagaaguggaggccau

SEQ ID NO: 2484699 - RNA, 19 nt, Homo sapiens
  misc_RNA (1)...(19): siRNA sense strand
aggacaaggagguggaaga

SEQ ID NO: 2484700 - RNA, 19 nt, Homo sapiens
  misc_RNA (1)...(19): siRNA sense strand
aggaagagcuggaggaggu

SEQ ID NO: 2484701 - RNA, 19 nt, Homo sapiens
  misc_RNA (1)...(19): siRNA sense strand
cugcagaagcugagcacau

SEQ ID NO: 2484702 - RNA, 19 nt, Homo sapiens
  misc_RNA (1)...(19): siRNA sense strand
aguugaagcagaagggaga

SEQ ID NO: 2484703 - RNA, 19 nt, Homo sapiens
  misc_RNA (1)...(19): siRNA sense strand
cugaaagacuaauggagca

SEQ ID NO: 2484704 - RNA, 19 nt, Homo sapiens
  misc_RNA (1)...(19): siRNA sense strand
cugaaggaguugaagcaga

SEQ ID NO: 2484705 - RNA, 19 nt, Homo sapiens
  misc_RNA (1)...(19): siRNA sense strand
gcugugacaaagagaacaa

SEQ ID NO: 2484706 - RNA, 19 nt, Homo sapiens
  misc_RNA (1)...(19): siRNA sense strand
caaaugaccugcacggaca

SEQ ID NO: 2484707 - RNA, 19 nt, Homo sapiens
  misc_RNA (1)...(19): siRNA sense strand
ggaaggaagagcuggagga

SEQ ID NO: 2484708 - RNA, 19 nt, Homo sapiens
  misc_RNA (1)...(19): siRNA sense strand
agaccagauuggaggcuga

SEQ ID NO: 2484709 - RNA, 19 nt, Homo sapiens
  misc_RNA (1)...(19): siRNA sense strand
aagaccaacugcagggcua

SEQ ID NO: 2484710 - RNA, 19 nt, Homo sapiens
  misc_RNA (1)...(19): siRNA sense strand
ggaaucagcauaaggcaga

SEQ ID NO: 2484711 - RNA, 19 nt, Homo sapiens
  misc_RNA (1)...(19): siRNA sense strand
ggguaacagaucuuguaaa

SEQ ID NO: 2484712 - RNA, 19 nt, Homo sapiens
  misc_RNA (1)...(19): siRNA sense strand
ugacaaggcagaaggaacu

SEQ ID NO: 2484713 - RNA, 19 nt, Homo sapiens
  misc_RNA (1)...(19): siRNA sense strand
cugaaaacggagaaacaaa

SEQ ID NO: 2484714 - RNA, 19 nt, Homo sapiens
  misc_RNA (1)...(19): siRNA sense strand
gguccaaagaggcugagaa

SEQ ID NO: 2484715 - RNA, 19 nt, Homo sapiens
  misc_RNA (1)...(19): siRNA sense strand
ggcacaacaucgagcgcau

SEQ ID NO: 2484716 - RNA, 19 nt, Homo sapiens
  misc_RNA (1)...(19): siRNA sense strand
caacaaacccuggaggaga

SEQ ID NO: 2484717 - RNA, 19 nt, Homo sapiens
  misc_RNA (1)...(19): siRNA sense strand
agaugaacaaagagauuga

SEQ ID NO: 2484718 - RNA, 19 nt, Homo sapiens
  misc_RNA (1)...(19): siRNA sense strand
ccgcauucaagcuggagaa

SEQ ID NO: 2484719 - RNA, 19 nt, Homo sapiens
  misc_RNA (1)...(19): siRNA sense strand
uggaggaacggaaggaaga

SEQ ID NO: 2484720 - RNA, 19 nt, Homo sapiens
  misc_RNA (1)...(19): siRNA sense strand
gucugaagucugaggucaa

SEQ ID NO: 2484721 - RNA, 19 nt, Homo sapiens
  misc_RNA (1)...(19): siRNA sense strand
aggccucagugaagaacua

SEQ ID NO: 2484722 - RNA, 19 nt, Homo sapiens
  misc_RNA (1)...(19): siRNA sense strand
ggcuaugagcggaagaaca

SEQ ID NO: 2484723 - RNA, 19 nt, Homo sapiens
  misc_RNA (1)...(19): siRNA sense strand
gaggauucugaaagacuaa

SEQ ID NO: 2484724 - RNA, 19 nt, Homo sapiens
  misc_RNA (1)...(19): siRNA sense strand
cgagaagagcgaggaguau

SEQ ID NO: 2484725 - RNA, 19 nt, Homo sapiens
  misc_RNA (1)...(19): siRNA sense strand
ugaaagacuaauggagcaa

SEQ ID NO: 2484726 - RNA, 19 nt, Homo sapiens
  misc_RNA (1)...(19): siRNA sense strand
uuguaaaagaaaagggaga

SEQ ID NO: 2484727 - RNA, 19 nt, Homo sapiens
  misc_RNA (1)...(19): siRNA sense strand
aggagaagaugcgggaaga

SEQ ID NO: 2484728 - RNA, 19 nt, Homo sapiens
  misc_RNA (1)...(19): siRNA sense strand
cuuaaagaugagaugaaca

SEQ ID NO: 2484729 - RNA, 19 nt, Homo sapiens
  misc_RNA (1)...(19): siRNA sense strand
agucugaggucaagaugca

SEQ ID NO: 2484730 - RNA, 19 nt, Homo sapiens
  misc_RNA (1)...(19): siRNA sense strand
ugaagaucacggaggcgaa

SEQ ID NO: 2484731 - RNA, 19 nt, Homo sapiens
  misc_RNA (1)...(19): siRNA sense strand
ccaagcaggucauggccuu

SEQ ID NO: 2484732 - RNA, 19 nt, Homo sapiens
  misc_RNA (1)...(19): siRNA sense strand
gaggagaagaugcgggaag

SEQ ID NO: 2484733 - RNA, 19 nt, Homo sapiens
  misc_RNA (1)...(19): siRNA sense strand
cuggagaaugagaggcuga

SEQ ID NO: 2484734 - RNA, 19 nt, Homo sapiens
  misc_RNA (1)...(19): siRNA sense strand
cugacaaggcagaaggaac

SEQ ID NO: 2484735 - RNA, 19 nt, Homo sapiens
  misc_RNA (1)...(19): siRNA sense strand
uccuuaaagaugagaugaa

SEQ ID NO: 2484736 - RNA, 19 nt, Homo sapiens
  misc_RNA (1)...(19): siRNA sense strand
uguuacugcugcaagacaa

SEQ ID NO: 2484737 - RNA, 19 nt, Homo sapiens
  misc_RNA (1)...(19): siRNA sense strand
agggagaccuugagcugga

SEQ ID NO: 2484738 - RNA, 19 nt, Homo sapiens
  misc_RNA (1)...(19): siRNA sense strand
gugacaaagagaacaagau

SEQ ID NO: 2484739 - RNA, 19 nt, Homo sapiens
  misc_RNA (1)...(19): siRNA sense strand
acgaacuggcugagacuga

SEQ ID NO: 2484740 - RNA, 19 nt, Homo sapiens
  misc_RNA (1)...(19): siRNA sense strand
aaagacuaauggagcaaca

SEQ ID NO: 2484741 - RNA, 19 nt, Homo sapiens
  misc_RNA (1)...(19): siRNA sense strand
aaugagaggcugaaggcca

SEQ ID NO: 2484742 - RNA, 19 nt, Homo sapiens
  misc_RNA (1)...(19): siRNA sense strand
gugcaugcagauuaagaau

SEQ ID NO: 2484743 - RNA, 19 nt, Homo sapiens
  misc_RNA (1)...(19): siRNA sense strand
cgggauagccugguggaga

SEQ ID NO: 2484744 - RNA, 19 nt, Homo sapiens
  misc_RNA (1)...(19): siRNA sense strand
caauggaggacaaacucaa

SEQ ID NO: 2484745 - RNA, 19 nt, Homo sapiens
  misc_RNA (1)...(19): siRNA sense strand
ggacaaacucaaccaggca

SEQ ID NO: 2484746 - RNA, 19 nt, Homo sapiens
  misc_RNA (1)...(19): siRNA sense strand
agacugagcacgagaacac

SEQ ID NO: 2484747 - RNA, 19 nt, Homo sapiens
  misc_RNA (1)...(19): siRNA sense strand
agggagaccgagacaaaga

SEQ ID NO: 2484748 - RNA, 19 nt, Homo sapiens
  misc_RNA (1)...(19): siRNA sense strand
cagaagggagaccgagaca

SEQ ID NO: 2484749 - RNA, 19 nt, Homo sapiens
  misc_RNA (1)...(19): siRNA sense strand
caggagaaggagugccuca

SEQ ID NO: 2484750 - RNA, 19 nt, Homo sapiens
  misc_RNA (1)...(19): siRNA sense strand
cgagacaaagagagcuuga

SEQ ID NO: 2484751 - RNA, 19 nt, Homo sapiens
  misc_RNA (1)...(19): siRNA sense strand
acaaagagaacaagauccu

SEQ ID NO: 2484752 - RNA, 19 nt, Homo sapiens
  misc_RNA (1)...(19): siRNA sense strand
uggcugagacugagcacga

SEQ ID NO: 2484753 - RNA, 19 nt, Homo sapiens
  misc_RNA (1)...(19): siRNA sense strand
acaaggagguggaagagcu

SEQ ID NO: 2484754 - RNA, 19 nt, Homo sapiens
  misc_RNA (1)...(19): siRNA sense strand
gggaagaccgggauagccu

SEQ ID NO: 2484755 - RNA, 19 nt, Homo sapiens
  misc_RNA (1)...(19): siRNA sense strand
auaagagucaggugaugaa

SEQ ID NO: 2484756 - RNA, 19 nt, Homo sapiens
  misc_RNA (1)...(19): siRNA sense strand
gggauagccugguggagag

SEQ ID NO: 2484757 - RNA, 19 nt, Homo sapiens
  misc_RNA (1)...(19): siRNA sense strand
ccaaguacuacaaggaaaa

SEQ ID NO: 2484758 - RNA, 19 nt, Homo sapiens
  misc_RNA (1)...(19): siRNA sense strand
acgaauacuacuacaggaa

SEQ ID NO: 2484759 - RNA, 19 nt, Homo sapiens
  misc_RNA (1)...(19): siRNA sense strand
uggagaauggagugaagaa

SEQ ID NO: 2484760 - RNA, 19 nt, Homo sapiens
  misc_RNA (1)...(19): siRNA sense strand
gaacaaagucacucggauc

SEQ ID NO: 2484761 - RNA, 19 nt, Homo sapiens
  misc_RNA (1)...(19): siRNA sense strand
uagcagaggugaaagagga

SEQ ID NO: 2484762 - RNA, 19 nt, Homo sapiens
  misc_RNA (1)...(19): siRNA sense strand
cauuaaaguauguguccuu

SEQ ID NO: 2484763 - RNA, 19 nt, Homo sapiens
  misc_RNA (1)...(19): siRNA sense strand
ucucaaaacagaaggccaa

SEQ ID NO: 2484764 - RNA, 19 nt, Homo sapiens
  misc_RNA (1)...(19): siRNA sense strand
ugauaaaagucuucgggau

SEQ ID NO: 2484765 - RNA, 19 nt, Homo sapiens
  misc_RNA (1)...(19): siRNA sense strand
cuuucuucgugaugacaaa

SEQ ID NO: 2484766 - RNA, 19 nt, Homo sapiens
  misc_RNA (1)...(19): siRNA sense strand
ugcaagaugucaagggcca

SEQ ID NO: 2484767 - RNA, 19 nt, Homo sapiens
  misc_RNA (1)...(19): siRNA sense strand
uggacaaccagaggagaua

SEQ ID NO: 2484768 - RNA, 19 nt, Homo sapiens
  misc_RNA (1)...(19): siRNA sense strand
cgaacaaagucacucggau

SEQ ID NO: 2484769 - RNA, 19 nt, Homo sapiens
  misc_RNA (1)...(19): siRNA sense strand
cagaggugaaagaggagau

SEQ ID NO: 2484770 - RNA, 19 nt, Homo sapiens
  misc_RNA (1)...(19): siRNA sense strand
gugaagaaguuggugcaca

SEQ ID NO: 2484771 - RNA, 19 nt, Homo sapiens
  misc_RNA (1)...(19): siRNA sense strand
gcauugagaucuacuggga

SEQ ID NO: 2484772 - RNA, 19 nt, Homo sapiens
  misc_RNA (1)...(19): siRNA sense strand
ggggauagcagaggugaaa

SEQ ID NO: 2484773 - RNA, 19 nt, Homo sapiens
  misc_RNA (1)...(19): siRNA sense strand
gagugaagaaguuggugca

SEQ ID NO: 2484774 - RNA, 19 nt, Homo sapiens
  misc_RNA (1)...(19): siRNA sense strand
gauaaaagucuucgggauc

SEQ ID NO: 2484775 - RNA, 19 nt, Homo sapiens
  misc_RNA (1)...(19): siRNA sense strand
ccagcagcuacuagggaga

SEQ ID NO: 2484776 - RNA, 19 nt, Homo sapiens
  misc_RNA (1)...(19): siRNA sense strand
ugaagaaguuggugcacag

SEQ ID NO: 2484777 - RNA, 19 nt, Homo sapiens
  misc_RNA (1)...(19): siRNA sense strand
cggaggaaaauuugacauu

SEQ ID NO: 2484778 - RNA, 19 nt, Homo sapiens
  misc_RNA (1)...(19): siRNA sense strand
uggagaauggagugaagaa

SEQ ID NO: 2484779 - RNA, 19 nt, Homo sapiens
  misc_RNA (1)...(19): siRNA sense strand
gaacaaagucacucggauc

SEQ ID NO: 2484780 - RNA, 19 nt, Homo sapiens
  misc_RNA (1)...(19): siRNA sense strand
uagcagaggugaaagagga

SEQ ID NO: 2484781 - RNA, 19 nt, Homo sapiens
  misc_RNA (1)...(19): siRNA sense strand
ucucaaaacagaaggccaa

SEQ ID NO: 2484782 - RNA, 19 nt, Homo sapiens
  misc_RNA (1)...(19): siRNA sense strand
cuuucuucgugaugacaaa

SEQ ID NO: 2484783 - RNA, 19 nt, Homo sapiens
  misc_RNA (1)...(19): siRNA sense strand
cgaacaaagucacucggau

SEQ ID NO: 2484784 - RNA, 19 nt, Homo sapiens
  misc_RNA (1)...(19): siRNA sense strand
cagaggugaaagaggagau

SEQ ID NO: 2484785 - RNA, 19 nt, Homo sapiens
  misc_RNA (1)...(19): siRNA sense strand
gugaagaaguuggugcaca

SEQ ID NO: 2484786 - RNA, 19 nt, Homo sapiens
  misc_RNA (1)...(19): siRNA sense strand
ggggauagcagaggugaaa

SEQ ID NO: 2484787 - RNA, 19 nt, Homo sapiens
  misc_RNA (1)...(19): siRNA sense strand
gagugaagaaguuggugca

SEQ ID NO: 2484788 - RNA, 19 nt, Homo sapiens
  misc_RNA (1)...(19): siRNA sense strand
ugaagaaguuggugcacag

SEQ ID NO: 2484789 - RNA, 19 nt, Homo sapiens
  misc_RNA (1)...(19): siRNA sense strand
cgggaggugcagaggacaa

SEQ ID NO: 2484790 - RNA, 19 nt, Homo sapiens
  misc_RNA (1)...(19): siRNA sense strand
ccaaugaaccacaaggaga

SEQ ID NO: 2484791 - RNA, 19 nt, Homo sapiens
  misc_RNA (1)...(19): siRNA sense strand
aaaagagaacagugagaaa

SEQ ID NO: 2484792 - RNA, 19 nt, Homo sapiens
  misc_RNA (1)...(19): siRNA sense strand
aggccgagcaagauggaau

SEQ ID NO: 2484793 - RNA, 19 nt, Homo sapiens
  misc_RNA (1)...(19): siRNA sense strand
aggacuacauggaaggcau

SEQ ID NO: 2484794 - RNA, 19 nt, Homo sapiens
  misc_RNA (1)...(19): siRNA sense strand
agauaaaagagaacaguga

SEQ ID NO: 2484795 - RNA, 19 nt, Homo sapiens
  misc_RNA (1)...(19): siRNA sense strand
cggcaggagaagauggcga

SEQ ID NO: 2484796 - RNA, 19 nt, Homo sapiens
  misc_RNA (1)...(19): siRNA sense strand
cuaaugaccaagaggagga

SEQ ID NO: 2484797 - RNA, 19 nt, Homo sapiens
  misc_RNA (1)...(19): siRNA sense strand
aggugcaggccaagaagaa

SEQ ID NO: 2484798 - RNA, 19 nt, Homo sapiens
  misc_RNA (1)...(19): siRNA sense strand
aggacaagauaaaagagaa

SEQ ID NO: 2484799 - RNA, 19 nt, Homo sapiens
  misc_RNA (1)...(19): siRNA sense strand
ggacaagauaaaagagaac

SEQ ID NO: 2484800 - RNA, 19 nt, Homo sapiens
  misc_RNA (1)...(19): siRNA sense strand
gggugaaggccauggaggu

SEQ ID NO: 2484801 - RNA, 19 nt, Homo sapiens
  misc_RNA (1)...(19): siRNA sense strand
agguaauugcagccacaaa

SEQ ID NO: 2484802 - RNA, 19 nt, Homo sapiens
  misc_RNA (1)...(19): siRNA sense strand
ugaacaagacccugccgua

SEQ ID NO: 2484803 - RNA, 19 nt, Homo sapiens
  misc_RNA (1)...(19): siRNA sense strand
gugccaagcuaguccggga

SEQ ID NO: 2484804 - RNA, 19 nt, Homo sapiens
  misc_RNA (1)...(19): siRNA sense strand
aggccaagaagaaagccaa

SEQ ID NO: 2484805 - RNA, 19 nt, Homo sapiens
  misc_RNA (1)...(19): siRNA sense strand
ugaaccagcuggauggcuu

SEQ ID NO: 2484806 - RNA, 19 nt, Homo sapiens
  misc_RNA (1)...(19): siRNA sense strand
aagagaacagugagaaaau

SEQ ID NO: 2484807 - RNA, 19 nt, Homo sapiens
  misc_RNA (1)...(19): siRNA sense strand
uguugauccuaaugaccaa

SEQ ID NO: 2484808 - RNA, 19 nt, Homo sapiens
  misc_RNA (1)...(19): siRNA sense strand
gcgcuuugacagugagaag

SEQ ID NO: 2484809 - RNA, 19 nt, Homo sapiens
  misc_RNA (1)...(19): siRNA sense strand
caacaaaacuggacggaac

SEQ ID NO: 2484810 - RNA, 19 nt, Homo sapiens
  misc_RNA (1)...(19): siRNA sense strand
ggcagaagcugaagggucu

SEQ ID NO: 2484811 - RNA, 19 nt, Homo sapiens
  misc_RNA (1)...(19): siRNA sense strand
agaggauggaagagagaca

SEQ ID NO: 2484812 - RNA, 19 nt, Homo sapiens
  misc_RNA (1)...(19): siRNA sense strand
cagaugaagaagagagaag

SEQ ID NO: 2484813 - RNA, 19 nt, Homo sapiens
  misc_RNA (1)...(19): siRNA sense strand
gggaccagcucaugaggca

SEQ ID NO: 2484814 - RNA, 19 nt, Homo sapiens
  misc_RNA (1)...(19): siRNA sense strand
ggagugacaucgagugugu

SEQ ID NO: 2484815 - RNA, 19 nt, Homo sapiens
  misc_RNA (1)...(19): siRNA sense strand
ugaugaaaugggucaacaa

SEQ ID NO: 2484816 - RNA, 19 nt, Homo sapiens
  misc_RNA (1)...(19): siRNA sense strand
gagagaagucccugcacca

SEQ ID NO: 2484817 - RNA, 19 nt, Homo sapiens
  misc_RNA (1)...(19): siRNA sense strand
cggcagaagcugaaggguc

SEQ ID NO: 2484818 - RNA, 19 nt, Homo sapiens
  misc_RNA (1)...(19): siRNA sense strand
cuacuuagaagauggcaca

SEQ ID NO: 2484819 - RNA, 19 nt, Homo sapiens
  misc_RNA (1)...(19): siRNA sense strand
uugcaaacaucgugcccuu

SEQ ID NO: 2484820 - RNA, 19 nt, Homo sapiens
  misc_RNA (1)...(19): siRNA sense strand
ccuuggagaggauggaaga

SEQ ID NO: 2484821 - RNA, 19 nt, Homo sapiens
  misc_RNA (1)...(19): siRNA sense strand
cuuguaaaucagaugaaga

SEQ ID NO: 2484822 - RNA, 19 nt, Homo sapiens
  misc_RNA (1)...(19): siRNA sense strand
cggaagugcagcagagggu

SEQ ID NO: 2484823 - RNA, 19 nt, Homo sapiens
  misc_RNA (1)...(19): siRNA sense strand
agaaucaggcaauggacau

SEQ ID NO: 2484824 - RNA, 19 nt, Homo sapiens
  misc_RNA (1)...(19): siRNA sense strand
gaacauagcccuuugggag

SEQ ID NO: 2484825 - RNA, 19 nt, Homo sapiens
  misc_RNA (1)...(19): siRNA sense strand
gagaugaccuggagagccu

SEQ ID NO: 2484826 - RNA, 19 nt, Homo sapiens
  misc_RNA (1)...(19): siRNA sense strand
ggaucagcgagaagaagau

SEQ ID NO: 2484827 - RNA, 19 nt, Homo sapiens
  misc_RNA (1)...(19): siRNA sense strand
acuacaacgugauggucau

SEQ ID NO: 2484828 - RNA, 19 nt, Homo sapiens
  misc_RNA (1)...(19): siRNA sense strand
cggaucagcgagaagaaga

SEQ ID NO: 2484829 - RNA, 19 nt, Homo sapiens
  misc_RNA (1)...(19): siRNA sense strand
cuggagugugugaagacaa

SEQ ID NO: 2484830 - RNA, 19 nt, Homo sapiens
  misc_RNA (1)...(19): siRNA sense strand
ggcaagaggucucccggau

SEQ ID NO: 2484831 - RNA, 19 nt, Homo sapiens
  misc_RNA (1)...(19): siRNA sense strand
gagaugaccuggagagccu

SEQ ID NO: 2484832 - RNA, 19 nt, Homo sapiens
  misc_RNA (1)...(19): siRNA sense strand
ggaucagcgagaagaagau

SEQ ID NO: 2484833 - RNA, 19 nt, Homo sapiens
  misc_RNA (1)...(19): siRNA sense strand
acuacaacgugauggucau

SEQ ID NO: 2484834 - RNA, 19 nt, Homo sapiens
  misc_RNA (1)...(19): siRNA sense strand
cggaucagcgagaagaaga

SEQ ID NO: 2484835 - RNA, 19 nt, Homo sapiens
  misc_RNA (1)...(19): siRNA sense strand
cuggagugugugaagacaa

SEQ ID NO: 2484836 - RNA, 19 nt, Homo sapiens
  misc_RNA (1)...(19): siRNA sense strand
ggcaagaggucucccggau

SEQ ID NO: 2484837 - RNA, 19 nt, Homo sapiens
  misc_RNA (1)...(19): siRNA sense strand
ccuuggaauuagugacaca

SEQ ID NO: 2484838 - RNA, 19 nt, Homo sapiens
  misc_RNA (1)...(19): siRNA sense strand
uuuaaaagcaggagaccaa

SEQ ID NO: 2484839 - RNA, 19 nt, Homo sapiens
  misc_RNA (1)...(19): siRNA sense strand
aaucaaauuacuagaggca

SEQ ID NO: 2484840 - RNA, 19 nt, Homo sapiens
  misc_RNA (1)...(19): siRNA sense strand
uggaaaucccacuaggaau

SEQ ID NO: 2484841 - RNA, 19 nt, Homo sapiens
  misc_RNA (1)...(19): siRNA sense strand
gaaucuaauccuuggguag

SEQ ID NO: 2484842 - RNA, 19 nt, Homo sapiens
  misc_RNA (1)...(19): siRNA sense strand
ggaaucuaauccuugggua

SEQ ID NO: 2484843 - RNA, 19 nt, Homo sapiens
  misc_RNA (1)...(19): siRNA sense strand
cugugggcuuagaggauga

SEQ ID NO: 2484844 - RNA, 19 nt, Homo sapiens
  misc_RNA (1)...(19): siRNA sense strand
augaguuggugaagcguca

SEQ ID NO: 2484845 - RNA, 19 nt, Homo sapiens
  misc_RNA (1)...(19): siRNA sense strand
cuuaagaaugacagagaug

SEQ ID NO: 2484846 - RNA, 19 nt, Homo sapiens
  misc_RNA (1)...(19): siRNA sense strand
agaccuacuggaagaucua

SEQ ID NO: 2484847 - RNA, 19 nt, Homo sapiens
  misc_RNA (1)...(19): siRNA sense strand
caaaauacaugaauggcca

SEQ ID NO: 2484848 - RNA, 19 nt, Homo sapiens
  misc_RNA (1)...(19): siRNA sense strand
gcuaaguacuguuuggccu

SEQ ID NO: 2484849 - RNA, 19 nt, Homo sapiens
  misc_RNA (1)...(19): siRNA sense strand
ccuuggaauuagugacaca

SEQ ID NO: 2484850 - RNA, 19 nt, Homo sapiens
  misc_RNA (1)...(19): siRNA sense strand
uuuaaaagcaggagaccaa

SEQ ID NO: 2484851 - RNA, 19 nt, Homo sapiens
  misc_RNA (1)...(19): siRNA sense strand
aaucaaauuacuagaggca

SEQ ID NO: 2484852 - RNA, 19 nt, Homo sapiens
  misc_RNA (1)...(19): siRNA sense strand
uggaaaucccacuaggaau

SEQ ID NO: 2484853 - RNA, 19 nt, Homo sapiens
  misc_RNA (1)...(19): siRNA sense strand
gaaucuaauccuuggguag

SEQ ID NO: 2484854 - RNA, 19 nt, Homo sapiens
  misc_RNA (1)...(19): siRNA sense strand
ggaaucuaauccuugggua

SEQ ID NO: 2484855 - RNA, 19 nt, Homo sapiens
  misc_RNA (1)...(19): siRNA sense strand
cugugggcuuagaggauga

SEQ ID NO: 2484856 - RNA, 19 nt, Homo sapiens
  misc_RNA (1)...(19): siRNA sense strand
augaguuggugaagcguca

SEQ ID NO: 2484857 - RNA, 19 nt, Homo sapiens
  misc_RNA (1)...(19): siRNA sense strand
cuuaagaaugacagagaug

SEQ ID NO: 2484858 - RNA, 19 nt, Homo sapiens
  misc_RNA (1)...(19): siRNA sense strand
agaccuacuggaagaucua

SEQ ID NO: 2484859 - RNA, 19 nt, Homo sapiens
  misc_RNA (1)...(19): siRNA sense strand
caaaauacaugaauggcca

SEQ ID NO: 2484860 - RNA, 19 nt, Homo sapiens
  misc_RNA (1)...(19): siRNA sense strand
gcuaaguacuguuuggccu

SEQ ID NO: 2484861 - RNA, 19 nt, Homo sapiens
  misc_RNA (1)...(19): siRNA sense strand
gggaaagagugguggguga

SEQ ID NO: 2484862 - RNA, 19 nt, Homo sapiens
  misc_RNA (1)...(19): siRNA sense strand
agggcuggcacaagagaua

SEQ ID NO: 2484863 - RNA, 19 nt, Homo sapiens
  misc_RNA (1)...(19): siRNA sense strand
auaugaaguggaagaacaa

SEQ ID NO: 2484864 - RNA, 19 nt, Homo sapiens
  misc_RNA (1)...(19): siRNA sense strand
gcucagaggaggaggaguc

SEQ ID NO: 2484865 - RNA, 19 nt, Homo sapiens
  misc_RNA (1)...(19): siRNA sense strand
gacggauagcagcgggaaa

SEQ ID NO: 2484866 - RNA, 19 nt, Homo sapiens
  misc_RNA (1)...(19): siRNA sense strand
agagauacuuugugcucga

SEQ ID NO: 2484867 - RNA, 19 nt, Homo sapiens
  misc_RNA (1)...(19): siRNA sense strand
gcgcauugaccuugacacu

SEQ ID NO: 2484868 - RNA, 19 nt, Homo sapiens
  misc_RNA (1)...(19): siRNA sense strand
cugagaggcaggaagguca

SEQ ID NO: 2484869 - RNA, 19 nt, Homo sapiens
  misc_RNA (1)...(19): siRNA sense strand
uguggaacauucugcgcaa

SEQ ID NO: 2484870 - RNA, 19 nt, Homo sapiens
  misc_RNA (1)...(19): siRNA sense strand
ucgagcagcugcagcgaga

SEQ ID NO: 2484871 - RNA, 19 nt, Homo sapiens
  misc_RNA (1)...(19): siRNA sense strand
ugugggaggugguggagga

SEQ ID NO: 2484872 - RNA, 19 nt, Homo sapiens
  misc_RNA (1)...(19): siRNA sense strand
agagaaggaucgagcagcu

SEQ ID NO: 2484873 - RNA, 19 nt, Homo sapiens
  misc_RNA (1)...(19): siRNA sense strand
ggcgcaaagucauggagga

SEQ ID NO: 2484874 - RNA, 19 nt, Homo sapiens
  misc_RNA (1)...(19): siRNA sense strand
cggucauguccaucaacaa

SEQ ID NO: 2484875 - RNA, 19 nt, Homo sapiens
  misc_RNA (1)...(19): siRNA sense strand
gggaaagagugguggguga

SEQ ID NO: 2484876 - RNA, 19 nt, Homo sapiens
  misc_RNA (1)...(19): siRNA sense strand
agggcuggcacaagagaua

SEQ ID NO: 2484877 - RNA, 19 nt, Homo sapiens
  misc_RNA (1)...(19): siRNA sense strand
auaugaaguggaagaacaa

SEQ ID NO: 2484878 - RNA, 19 nt, Homo sapiens
  misc_RNA (1)...(19): siRNA sense strand
gcucagaggaggaggaguc

SEQ ID NO: 2484879 - RNA, 19 nt, Homo sapiens
  misc_RNA (1)...(19): siRNA sense strand
gacggauagcagcgggaaa

SEQ ID NO: 2484880 - RNA, 19 nt, Homo sapiens
  misc_RNA (1)...(19): siRNA sense strand
agagauacuuugugcucga

SEQ ID NO: 2484881 - RNA, 19 nt, Homo sapiens
  misc_RNA (1)...(19): siRNA sense strand
gcgcauugaccuugacacu

SEQ ID NO: 2484882 - RNA, 19 nt, Homo sapiens
  misc_RNA (1)...(19): siRNA sense strand
cugagaggcaggaagguca

SEQ ID NO: 2484883 - RNA, 19 nt, Homo sapiens
  misc_RNA (1)...(19): siRNA sense strand
uguggaacauucugcgcaa

SEQ ID NO: 2484884 - RNA, 19 nt, Homo sapiens
  misc_RNA (1)...(19): siRNA sense strand
ucgagcagcugcagcgaga

SEQ ID NO: 2484885 - RNA, 19 nt, Homo sapiens
  misc_RNA (1)...(19): siRNA sense strand
ugugggaggugguggagga

SEQ ID NO: 2484886 - RNA, 19 nt, Homo sapiens
  misc_RNA (1)...(19): siRNA sense strand
agagaaggaucgagcagcu

SEQ ID NO: 2484887 - RNA, 19 nt, Homo sapiens
  misc_RNA (1)...(19): siRNA sense strand
ggcgcaaagucauggagga

SEQ ID NO: 2484888 - RNA, 19 nt, Homo sapiens
  misc_RNA (1)...(19): siRNA sense strand
cggucauguccaucaacaa

SEQ ID NO: 2484889 - RNA, 19 nt, Homo sapiens
  misc_RNA (1)...(19): siRNA sense strand
ggacagagcagcugcccaa

SEQ ID NO: 2484890 - RNA, 19 nt, Homo sapiens
  misc_RNA (1)...(19): siRNA sense strand
gcaccuucauggacggcua

SEQ ID NO: 2484891 - RNA, 19 nt, Homo sapiens
  misc_RNA (1)...(19): siRNA sense strand
gggcauggacagagcagcu

SEQ ID NO: 2484892 - RNA, 19 nt, Homo sapiens
  misc_RNA (1)...(19): siRNA sense strand
ggacagagcagcugcccaa

SEQ ID NO: 2484893 - RNA, 19 nt, Homo sapiens
  misc_RNA (1)...(19): siRNA sense strand
gcaccuucauggacggcua

SEQ ID NO: 2484894 - RNA, 19 nt, Homo sapiens
  misc_RNA (1)...(19): siRNA sense strand
gggcauggacagagcagcu

SEQ ID NO: 2484895 - RNA, 19 nt, Homo sapiens
  misc_RNA (1)...(19): siRNA sense strand
ggacagagcagcugcccaa

SEQ ID NO: 2484896 - RNA, 19 nt, Homo sapiens
  misc_RNA (1)...(19): siRNA sense strand
gcaccuucauggacggcua

SEQ ID NO: 2484897 - RNA, 19 nt, Homo sapiens
  misc_RNA (1)...(19): siRNA sense strand
gggcauggacagagcagcu

SEQ ID NO: 2484898 - RNA, 19 nt, Homo sapiens
  misc_RNA (1)...(19): siRNA sense strand
aggucaaacaggagaacaa

SEQ ID NO: 2484899 - RNA, 19 nt, Homo sapiens
  misc_RNA (1)...(19): siRNA sense strand
gagaaggaguacaagguga

SEQ ID NO: 2484900 - RNA, 19 nt, Homo sapiens
  misc_RNA (1)...(19): siRNA sense strand
cugcagaacacgaugguga

SEQ ID NO: 2484901 - RNA, 19 nt, Homo sapiens
  misc_RNA (1)...(19): siRNA sense strand
gggacaaggccugggaaau

SEQ ID NO: 2484902 - RNA, 19 nt, Homo sapiens
  misc_RNA (1)...(19): siRNA sense strand
ccgcuaugaauuugggauu

SEQ ID NO: 2484903 - RNA, 19 nt, Homo sapiens
  misc_RNA (1)...(19): siRNA sense strand
acuucaagcugcaggacuu

SEQ ID NO: 2484904 - RNA, 19 nt, Homo sapiens
  misc_RNA (1)...(19): siRNA sense strand
agaaggaguacaaggugaa

SEQ ID NO: 2484905 - RNA, 19 nt, Homo sapiens
  misc_RNA (1)...(19): siRNA sense strand
gggacguggccaaggucaa

SEQ ID NO: 2484906 - RNA, 19 nt, Homo sapiens
  misc_RNA (1)...(19): siRNA sense strand
gguucaagguguuugcaga

SEQ ID NO: 2484907 - RNA, 19 nt, Homo sapiens
  misc_RNA (1)...(19): siRNA sense strand
cggaaaggguacaaugcca

SEQ ID NO: 2484908 - RNA, 19 nt, Homo sapiens
  misc_RNA (1)...(19): siRNA sense strand
ugggacaaggccugggaaa

SEQ ID NO: 2484909 - RNA, 19 nt, Homo sapiens
  misc_RNA (1)...(19): siRNA sense strand
agaauaagaccaauggcau

SEQ ID NO: 2484910 - RNA, 19 nt, Homo sapiens
  misc_RNA (1)...(19): siRNA sense strand
gugagaaccuguuucgaga

SEQ ID NO: 2484911 - RNA, 19 nt, Homo sapiens
  misc_RNA (1)...(19): siRNA sense strand
gagaagguggacugggaca

SEQ ID NO: 2484912 - RNA, 19 nt, Homo sapiens
  misc_RNA (1)...(19): siRNA sense strand
uggaggaugucgaggccuu

SEQ ID NO: 2484913 - RNA, 19 nt, Homo sapiens
  misc_RNA (1)...(19): siRNA sense strand
cggacagcgagaagcggaa

SEQ ID NO: 2484914 - RNA, 19 nt, Homo sapiens
  misc_RNA (1)...(19): siRNA sense strand
gaauaagaccaauggcauc

SEQ ID NO: 2484915 - RNA, 19 nt, Homo sapiens
  misc_RNA (1)...(19): siRNA sense strand
uggagaagguggacuggga

SEQ ID NO: 2484916 - RNA, 19 nt, Homo sapiens
  misc_RNA (1)...(19): siRNA sense strand
acucgaggagauagaagaa

SEQ ID NO: 2484917 - RNA, 19 nt, Homo sapiens
  misc_RNA (1)...(19): siRNA sense strand
cagaauaagaccaauggca

SEQ ID NO: 2484918 - RNA, 19 nt, Homo sapiens
  misc_RNA (1)...(19): siRNA sense strand
aagaaggucaucaggaaca

SEQ ID NO: 2484919 - RNA, 19 nt, Homo sapiens
  misc_RNA (1)...(19): siRNA sense strand
ccaaggucaaacaggagaa

SEQ ID NO: 2484920 - RNA, 19 nt, Homo sapiens
  misc_RNA (1)...(19): siRNA sense strand
aggaguacaaggugaagau

SEQ ID NO: 2484921 - RNA, 19 nt, Homo sapiens
  misc_RNA (1)...(19): siRNA sense strand
ggguacaaugccagggagu

SEQ ID NO: 2484922 - RNA, 19 nt, Homo sapiens
  misc_RNA (1)...(19): siRNA sense strand
ccagacugcuucaaggaca

SEQ ID NO: 2484923 - RNA, 19 nt, Homo sapiens
  misc_RNA (1)...(19): siRNA sense strand
agguagaggaggccgauga

SEQ ID NO: 2484924 - RNA, 19 nt, Homo sapiens
  misc_RNA (1)...(19): siRNA sense strand
ucaucagggacguggccaa

SEQ ID NO: 2484925 - RNA, 19 nt, Homo sapiens
  misc_RNA (1)...(19): siRNA sense strand
cagacugcuucaaggacau

SEQ ID NO: 2484926 - RNA, 19 nt, Homo sapiens
  misc_RNA (1)...(19): siRNA sense strand
auaccaucguggagaaaau

SEQ ID NO: 2484927 - RNA, 19 nt, Homo sapiens
  misc_RNA (1)...(19): siRNA sense strand
agaggauccacgaguacaa

SEQ ID NO: 2484928 - RNA, 19 nt, Homo sapiens
  misc_RNA (1)...(19): siRNA sense strand
aagugaucuuccuggagaa

SEQ ID NO: 2484929 - RNA, 19 nt, Homo sapiens
  misc_RNA (1)...(19): siRNA sense strand
cgaggagauagaagaagau

SEQ ID NO: 2484930 - RNA, 19 nt, Homo sapiens
  misc_RNA (1)...(19): siRNA sense strand
aggaacucgaggagauaga

SEQ ID NO: 2484931 - RNA, 19 nt, Homo sapiens
  misc_RNA (1)...(19): siRNA sense strand
gggaaaucacgaagaagac

SEQ ID NO: 2484932 - RNA, 19 nt, Homo sapiens
  misc_RNA (1)...(19): siRNA sense strand
ccgguuaccacauggccaa

SEQ ID NO: 2484933 - RNA, 19 nt, Homo sapiens
  misc_RNA (1)...(19): siRNA sense strand
aggacuucaacgugggaga

SEQ ID NO: 2484934 - RNA, 19 nt, Homo sapiens
  misc_RNA (1)...(19): siRNA sense strand
ccgaggugcggaagagcuu

SEQ ID NO: 2484935 - RNA, 19 nt, Homo sapiens
  misc_RNA (1)...(19): siRNA sense strand
ugaacaugcugaugcacca

SEQ ID NO: 2484936 - RNA, 19 nt, Homo sapiens
  misc_RNA (1)...(19): siRNA sense strand
caucaugaagguugggcaa

SEQ ID NO: 2484937 - RNA, 19 nt, Homo sapiens
  misc_RNA (1)...(19): siRNA sense strand
gcaauaggccagagcagga

SEQ ID NO: 2484938 - RNA, 19 nt, Homo sapiens
  misc_RNA (1)...(19): siRNA sense strand
cugugaaccaggaagagaa

SEQ ID NO: 2484939 - RNA, 19 nt, Homo sapiens
  misc_RNA (1)...(19): siRNA sense strand
ccagcaaggaggcagacaa

SEQ ID NO: 2484940 - RNA, 19 nt, Homo sapiens
  misc_RNA (1)...(19): siRNA sense strand
agacugugaaccaggaaga

SEQ ID NO: 2484941 - RNA, 19 nt, Homo sapiens
  misc_RNA (1)...(19): siRNA sense strand
ccaagaaccuggagcccgu

SEQ ID NO: 2484942 - RNA, 19 nt, Homo sapiens
  misc_RNA (1)...(19): siRNA sense strand
ggaaauacgcuuuaccauc

SEQ ID NO: 2484943 - RNA, 19 nt, Homo sapiens
  misc_RNA (1)...(19): siRNA sense strand
ggaagagaagaguggccca

SEQ ID NO: 2484944 - RNA, 19 nt, Homo sapiens
  misc_RNA (1)...(19): siRNA sense strand
gaagaguggcccaggugca

SEQ ID NO: 2484945 - RNA, 19 nt, Homo sapiens
  misc_RNA (1)...(19): siRNA sense strand
guguaugaguuuagaguca

SEQ ID NO: 2484946 - RNA, 19 nt, Homo sapiens
  misc_RNA (1)...(19): siRNA sense strand
cugaugaaguaaagaguau

SEQ ID NO: 2484947 - RNA, 19 nt, Homo sapiens
  misc_RNA (1)...(19): siRNA sense strand
gggagagaacaaugauaaa

SEQ ID NO: 2484948 - RNA, 19 nt, Homo sapiens
  misc_RNA (1)...(19): siRNA sense strand
ccaauaaagaugaagccaa

SEQ ID NO: 2484949 - RNA, 19 nt, Homo sapiens
  misc_RNA (1)...(19): siRNA sense strand
agggaaaguguaugauaaa

SEQ ID NO: 2484950 - RNA, 19 nt, Homo sapiens
  misc_RNA (1)...(19): siRNA sense strand
ggugaaugcccuuggucaa

SEQ ID NO: 2484951 - RNA, 19 nt, Homo sapiens
  misc_RNA (1)...(19): siRNA sense strand
agauaagggcacagcagaa

SEQ ID NO: 2484952 - RNA, 19 nt, Homo sapiens
  misc_RNA (1)...(19): siRNA sense strand
acuuauaagcggaagaaca

SEQ ID NO: 2484953 - RNA, 19 nt, Homo sapiens
  misc_RNA (1)...(19): siRNA sense strand
ucgaaagagaaauggaaau

SEQ ID NO: 2484954 - RNA, 19 nt, Homo sapiens
  misc_RNA (1)...(19): siRNA sense strand
gcggaagaacacagaaaca

SEQ ID NO: 2484955 - RNA, 19 nt, Homo sapiens
  misc_RNA (1)...(19): siRNA sense strand
ccgcagaagaggacggcuu

SEQ ID NO: 2484956 - RNA, 19 nt, Homo sapiens
  misc_RNA (1)...(19): siRNA sense strand
gagaagaaaagcagaaaga

SEQ ID NO: 2484957 - RNA, 19 nt, Homo sapiens
  misc_RNA (1)...(19): siRNA sense strand
cgucagaaaauuuuggaaa

SEQ ID NO: 2484958 - RNA, 19 nt, Homo sapiens
  misc_RNA (1)...(19): siRNA sense strand
cugaagaaagagaagaaaa

SEQ ID NO: 2484959 - RNA, 19 nt, Homo sapiens
  misc_RNA (1)...(19): siRNA sense strand
cgguaaauccaaacugcua

SEQ ID NO: 2484960 - RNA, 19 nt, Homo sapiens
  misc_RNA (1)...(19): siRNA sense strand
auggaaacagcgaaggaua

SEQ ID NO: 2484961 - RNA, 19 nt, Homo sapiens
  misc_RNA (1)...(19): siRNA sense strand
uugcaaaucauucgguaaa

SEQ ID NO: 2484962 - RNA, 19 nt, Homo sapiens
  misc_RNA (1)...(19): siRNA sense strand
aagcggaagaacacagaaa

SEQ ID NO: 2484963 - RNA, 19 nt, Homo sapiens
  misc_RNA (1)...(19): siRNA sense strand
gaaucaaaggauacagaca

SEQ ID NO: 2484964 - RNA, 19 nt, Homo sapiens
  misc_RNA (1)...(19): siRNA sense strand
cagaaacagcucuagacaa

SEQ ID NO: 2484965 - RNA, 19 nt, Homo sapiens
  misc_RNA (1)...(19): siRNA sense strand
ggggagagaacaaugauaa

SEQ ID NO: 2484966 - RNA, 19 nt, Homo sapiens
  misc_RNA (1)...(19): siRNA sense strand
aaggauacagacagugaua

SEQ ID NO: 2484967 - RNA, 19 nt, Homo sapiens
  misc_RNA (1)...(19): siRNA sense strand
guuuagagucaaagaaucu

SEQ ID NO: 2484968 - RNA, 19 nt, Homo sapiens
  misc_RNA (1)...(19): siRNA sense strand
agaagaagaagagaagaaa

SEQ ID NO: 2484969 - RNA, 19 nt, Homo sapiens
  misc_RNA (1)...(19): siRNA sense strand
caucgaaagagaaauggaa

SEQ ID NO: 2484970 - RNA, 19 nt, Homo sapiens
  misc_RNA (1)...(19): siRNA sense strand
agauggaccaaaugcuaaa

SEQ ID NO: 2484971 - RNA, 19 nt, Homo sapiens
  misc_RNA (1)...(19): siRNA sense strand
ugaugaugauggagacgau

SEQ ID NO: 2484972 - RNA, 19 nt, Homo sapiens
  misc_RNA (1)...(19): siRNA sense strand
cuuaaaccaagaauggaaa

SEQ ID NO: 2484973 - RNA, 19 nt, Homo sapiens
  misc_RNA (1)...(19): siRNA sense strand
ggauaaagaccccaccaaa

SEQ ID NO: 2484974 - RNA, 19 nt, Homo sapiens
  misc_RNA (1)...(19): siRNA sense strand
agaagagaagaaagaugaa

SEQ ID NO: 2484975 - RNA, 19 nt, Homo sapiens
  misc_RNA (1)...(19): siRNA sense strand
ucagaauacuguggagaga

SEQ ID NO: 2484976 - RNA, 19 nt, Homo sapiens
  misc_RNA (1)...(19): siRNA sense strand
aggcugaugcccugaagua

SEQ ID NO: 2484977 - RNA, 19 nt, Homo sapiens
  misc_RNA (1)...(19): siRNA sense strand
gaagaaaagcagaaagauc

SEQ ID NO: 2484978 - RNA, 19 nt, Homo sapiens
  misc_RNA (1)...(19): siRNA sense strand
agagaauguggguuuauaa

SEQ ID NO: 2484979 - RNA, 19 nt, Homo sapiens
  misc_RNA (1)...(19): siRNA sense strand
uccugaagaaagagaagaa

SEQ ID NO: 2484980 - RNA, 19 nt, Homo sapiens
  misc_RNA (1)...(19): siRNA sense strand
agcugacagaagagggaaa

SEQ ID NO: 2484981 - RNA, 19 nt, Homo sapiens
  misc_RNA (1)...(19): siRNA sense strand
ugacaauuucugugccauu

SEQ ID NO: 2484982 - RNA, 19 nt, Homo sapiens
  misc_RNA (1)...(19): siRNA sense strand
agaaagauacagcugaaaa

SEQ ID NO: 2484983 - RNA, 19 nt, Homo sapiens
  misc_RNA (1)...(19): siRNA sense strand
cagcagaagaacuaaagga

SEQ ID NO: 2484984 - RNA, 19 nt, Homo sapiens
  misc_RNA (1)...(19): siRNA sense strand
agcagaagaacuaaaggaa

SEQ ID NO: 2484985 - RNA, 19 nt, Homo sapiens
  misc_RNA (1)...(19): siRNA sense strand
ccgcugaggauguggauac

SEQ ID NO: 2484986 - RNA, 19 nt, Homo sapiens
  misc_RNA (1)...(19): siRNA sense strand
ccucuaaccauguuuacaa

SEQ ID NO: 2484987 - RNA, 19 nt, Homo sapiens
  misc_RNA (1)...(19): siRNA sense strand
ccgcaaggguaacaaaauu

SEQ ID NO: 2484988 - RNA, 19 nt, Homo sapiens
  misc_RNA (1)...(19): siRNA sense strand
guguaugaguuuagaguca

SEQ ID NO: 2484989 - RNA, 19 nt, Homo sapiens
  misc_RNA (1)...(19): siRNA sense strand
cugaugaaguaaagaguau

SEQ ID NO: 2484990 - RNA, 19 nt, Homo sapiens
  misc_RNA (1)...(19): siRNA sense strand
gggagagaacaaugauaaa

SEQ ID NO: 2484991 - RNA, 19 nt, Homo sapiens
  misc_RNA (1)...(19): siRNA sense strand
ccaauaaagaugaagccaa

SEQ ID NO: 2484992 - RNA, 19 nt, Homo sapiens
  misc_RNA (1)...(19): siRNA sense strand
agggaaaguguaugauaaa

SEQ ID NO: 2484993 - RNA, 19 nt, Homo sapiens
  misc_RNA (1)...(19): siRNA sense strand
ggugaaugcccuuggucaa

SEQ ID NO: 2484994 - RNA, 19 nt, Homo sapiens
  misc_RNA (1)...(19): siRNA sense strand
agauaagggcacagcagaa

SEQ ID NO: 2484995 - RNA, 19 nt, Homo sapiens
  misc_RNA (1)...(19): siRNA sense strand
acuuauaagcggaagaaca

SEQ ID NO: 2484996 - RNA, 19 nt, Homo sapiens
  misc_RNA (1)...(19): siRNA sense strand
ucgaaagagaaauggaaau

SEQ ID NO: 2484997 - RNA, 19 nt, Homo sapiens
  misc_RNA (1)...(19): siRNA sense strand
gcggaagaacacagaaaca

SEQ ID NO: 2484998 - RNA, 19 nt, Homo sapiens
  misc_RNA (1)...(19): siRNA sense strand
ccgcagaagaggacggcuu

SEQ ID NO: 2484999 - RNA, 19 nt, Homo sapiens
  misc_RNA (1)...(19): siRNA sense strand
gagaagaaaagcagaaaga

SEQ ID NO: 2485000 - RNA, 19 nt, Homo sapiens
  misc_RNA (1)...(19): siRNA sense strand
cgucagaaaauuuuggaaa

SEQ ID NO: 2485001 - RNA, 19 nt, Homo sapiens
  misc_RNA (1)...(19): siRNA sense strand
cugaagaaagagaagaaaa

SEQ ID NO: 2485002 - RNA, 19 nt, Homo sapiens
  misc_RNA (1)...(19): siRNA sense strand
cgguaaauccaaacugcua

SEQ ID NO: 2485003 - RNA, 19 nt, Homo sapiens
  misc_RNA (1)...(19): siRNA sense strand
auggaaacagcgaaggaua

SEQ ID NO: 2485004 - RNA, 19 nt, Homo sapiens
  misc_RNA (1)...(19): siRNA sense strand
uugcaaaucauucgguaaa

SEQ ID NO: 2485005 - RNA, 19 nt, Homo sapiens
  misc_RNA (1)...(19): siRNA sense strand
aagcggaagaacacagaaa

SEQ ID NO: 2485006 - RNA, 19 nt, Homo sapiens
  misc_RNA (1)...(19): siRNA sense strand
gaaucaaaggauacagaca

SEQ ID NO: 2485007 - RNA, 19 nt, Homo sapiens
  misc_RNA (1)...(19): siRNA sense strand
cagaaacagcucuagacaa

SEQ ID NO: 2485008 - RNA, 19 nt, Homo sapiens
  misc_RNA (1)...(19): siRNA sense strand
ggggagagaacaaugauaa

SEQ ID NO: 2485009 - RNA, 19 nt, Homo sapiens
  misc_RNA (1)...(19): siRNA sense strand
aaggauacagacagugaua

SEQ ID NO: 2485010 - RNA, 19 nt, Homo sapiens
  misc_RNA (1)...(19): siRNA sense strand
guuuagagucaaagaaucu

SEQ ID NO: 2485011 - RNA, 19 nt, Homo sapiens
  misc_RNA (1)...(19): siRNA sense strand
agaagaagaagagaagaaa

SEQ ID NO: 2485012 - RNA, 19 nt, Homo sapiens
  misc_RNA (1)...(19): siRNA sense strand
caucgaaagagaaauggaa

SEQ ID NO: 2485013 - RNA, 19 nt, Homo sapiens
  misc_RNA (1)...(19): siRNA sense strand
agauggaccaaaugcuaaa

SEQ ID NO: 2485014 - RNA, 19 nt, Homo sapiens
  misc_RNA (1)...(19): siRNA sense strand
ugaugaugauggagacgau

SEQ ID NO: 2485015 - RNA, 19 nt, Homo sapiens
  misc_RNA (1)...(19): siRNA sense strand
cuuaaaccaagaauggaaa

SEQ ID NO: 2485016 - RNA, 19 nt, Homo sapiens
  misc_RNA (1)...(19): siRNA sense strand
ggauaaagaccccaccaaa

SEQ ID NO: 2485017 - RNA, 19 nt, Homo sapiens
  misc_RNA (1)...(19): siRNA sense strand
agaagagaagaaagaugaa

SEQ ID NO: 2485018 - RNA, 19 nt, Homo sapiens
  misc_RNA (1)...(19): siRNA sense strand
ucagaauacuguggagaga

SEQ ID NO: 2485019 - RNA, 19 nt, Homo sapiens
  misc_RNA (1)...(19): siRNA sense strand
aggcugaugcccugaagua

SEQ ID NO: 2485020 - RNA, 19 nt, Homo sapiens
  misc_RNA (1)...(19): siRNA sense strand
gaagaaaagcagaaagauc

SEQ ID NO: 2485021 - RNA, 19 nt, Homo sapiens
  misc_RNA (1)...(19): siRNA sense strand
agagaauguggguuuauaa

SEQ ID NO: 2485022 - RNA, 19 nt, Homo sapiens
  misc_RNA (1)...(19): siRNA sense strand
uccugaagaaagagaagaa

SEQ ID NO: 2485023 - RNA, 19 nt, Homo sapiens
  misc_RNA (1)...(19): siRNA sense strand
agcugacagaagagggaaa

SEQ ID NO: 2485024 - RNA, 19 nt, Homo sapiens
  misc_RNA (1)...(19): siRNA sense strand
ugacaauuucugugccauu

SEQ ID NO: 2485025 - RNA, 19 nt, Homo sapiens
  misc_RNA (1)...(19): siRNA sense strand
agaaagauacagcugaaaa

SEQ ID NO: 2485026 - RNA, 19 nt, Homo sapiens
  misc_RNA (1)...(19): siRNA sense strand
cagcagaagaacuaaagga

SEQ ID NO: 2485027 - RNA, 19 nt, Homo sapiens
  misc_RNA (1)...(19): siRNA sense strand
agcagaagaacuaaaggaa

SEQ ID NO: 2485028 - RNA, 19 nt, Homo sapiens
  misc_RNA (1)...(19): siRNA sense strand
ccgcugaggauguggauac

SEQ ID NO: 2485029 - RNA, 19 nt, Homo sapiens
  misc_RNA (1)...(19): siRNA sense strand
ccucuaaccauguuuacaa

SEQ ID NO: 2485030 - RNA, 19 nt, Homo sapiens
  misc_RNA (1)...(19): siRNA sense strand
ccgcaaggguaacaaaauu

SEQ ID NO: 2485031 - RNA, 19 nt, Homo sapiens
  misc_RNA (1)...(19): siRNA sense strand
guguaugaguuuagaguca

SEQ ID NO: 2485032 - RNA, 19 nt, Homo sapiens
  misc_RNA (1)...(19): siRNA sense strand
cugaugaaguaaagaguau

SEQ ID NO: 2485033 - RNA, 19 nt, Homo sapiens
  misc_RNA (1)...(19): siRNA sense strand
gggagagaacaaugauaaa

SEQ ID NO: 2485034 - RNA, 19 nt, Homo sapiens
  misc_RNA (1)...(19): siRNA sense strand
ccaauaaagaugaagccaa

SEQ ID NO: 2485035 - RNA, 19 nt, Homo sapiens
  misc_RNA (1)...(19): siRNA sense strand
agggaaaguguaugauaaa

SEQ ID NO: 2485036 - RNA, 19 nt, Homo sapiens
  misc_RNA (1)...(19): siRNA sense strand
ggugaaugcccuuggucaa

SEQ ID NO: 2485037 - RNA, 19 nt, Homo sapiens
  misc_RNA (1)...(19): siRNA sense strand
agauaagggcacagcagaa

SEQ ID NO: 2485038 - RNA, 19 nt, Homo sapiens
  misc_RNA (1)...(19): siRNA sense strand
acuuauaagcggaagaaca

SEQ ID NO: 2485039 - RNA, 19 nt, Homo sapiens
  misc_RNA (1)...(19): siRNA sense strand
ucgaaagagaaauggaaau

SEQ ID NO: 2485040 - RNA, 19 nt, Homo sapiens
  misc_RNA (1)...(19): siRNA sense strand
gcggaagaacacagaaaca

SEQ ID NO: 2485041 - RNA, 19 nt, Homo sapiens
  misc_RNA (1)...(19): siRNA sense strand
ccgcagaagaggacggcuu

SEQ ID NO: 2485042 - RNA, 19 nt, Homo sapiens
  misc_RNA (1)...(19): siRNA sense strand
gagaagaaaagcagaaaga

SEQ ID NO: 2485043 - RNA, 19 nt, Homo sapiens
  misc_RNA (1)...(19): siRNA sense strand
cgucagaaaauuuuggaaa

SEQ ID NO: 2485044 - RNA, 19 nt, Homo sapiens
  misc_RNA (1)...(19): siRNA sense strand
cugaagaaagagaagaaaa

SEQ ID NO: 2485045 - RNA, 19 nt, Homo sapiens
  misc_RNA (1)...(19): siRNA sense strand
cgguaaauccaaacugcua

SEQ ID NO: 2485046 - RNA, 19 nt, Homo sapiens
  misc_RNA (1)...(19): siRNA sense strand
auggaaacagcgaaggaua

SEQ ID NO: 2485047 - RNA, 19 nt, Homo sapiens
  misc_RNA (1)...(19): siRNA sense strand
uugcaaaucauucgguaaa

SEQ ID NO: 2485048 - RNA, 19 nt, Homo sapiens
  misc_RNA (1)...(19): siRNA sense strand
aagcggaagaacacagaaa

SEQ ID NO: 2485049 - RNA, 19 nt, Homo sapiens
  misc_RNA (1)...(19): siRNA sense strand
gaaucaaaggauacagaca

SEQ ID NO: 2485050 - RNA, 19 nt, Homo sapiens
  misc_RNA (1)...(19): siRNA sense strand
cagaaacagcucuagacaa

SEQ ID NO: 2485051 - RNA, 19 nt, Homo sapiens
  misc_RNA (1)...(19): siRNA sense strand
ggggagagaacaaugauaa

SEQ ID NO: 2485052 - RNA, 19 nt, Homo sapiens
  misc_RNA (1)...(19): siRNA sense strand
aaggauacagacagugaua

SEQ ID NO: 2485053 - RNA, 19 nt, Homo sapiens
  misc_RNA (1)...(19): siRNA sense strand
guuuagagucaaagaaucu

SEQ ID NO: 2485054 - RNA, 19 nt, Homo sapiens
  misc_RNA (1)...(19): siRNA sense strand
agaagaagaagagaagaaa

SEQ ID NO: 2485055 - RNA, 19 nt, Homo sapiens
  misc_RNA (1)...(19): siRNA sense strand
caucgaaagagaaauggaa

SEQ ID NO: 2485056 - RNA, 19 nt, Homo sapiens
  misc_RNA (1)...(19): siRNA sense strand
agauggaccaaaugcuaaa

SEQ ID NO: 2485057 - RNA, 19 nt, Homo sapiens
  misc_RNA (1)...(19): siRNA sense strand
ugaugaugauggagacgau

SEQ ID NO: 2485058 - RNA, 19 nt, Homo sapiens
  misc_RNA (1)...(19): siRNA sense strand
cuuaaaccaagaauggaaa

SEQ ID NO: 2485059 - RNA, 19 nt, Homo sapiens
  misc_RNA (1)...(19): siRNA sense strand
ggauaaagaccccaccaaa

SEQ ID NO: 2485060 - RNA, 19 nt, Homo sapiens
  misc_RNA (1)...(19): siRNA sense strand
agaagagaagaaagaugaa

SEQ ID NO: 2485061 - RNA, 19 nt, Homo sapiens
  misc_RNA (1)...(19): siRNA sense strand
ucagaauacuguggagaga

SEQ ID NO: 2485062 - RNA, 19 nt, Homo sapiens
  misc_RNA (1)...(19): siRNA sense strand
aggcugaugcccugaagua

SEQ ID NO: 2485063 - RNA, 19 nt, Homo sapiens
  misc_RNA (1)...(19): siRNA sense strand
gaagaaaagcagaaagauc

SEQ ID NO: 2485064 - RNA, 19 nt, Homo sapiens
  misc_RNA (1)...(19): siRNA sense strand
agagaauguggguuuauaa

SEQ ID NO: 2485065 - RNA, 19 nt, Homo sapiens
  misc_RNA (1)...(19): siRNA sense strand
uccugaagaaagagaagaa

SEQ ID NO: 2485066 - RNA, 19 nt, Homo sapiens
  misc_RNA (1)...(19): siRNA sense strand
agcugacagaagagggaaa

SEQ ID NO: 2485067 - RNA, 19 nt, Homo sapiens
  misc_RNA (1)...(19): siRNA sense strand
ugacaauuucugugccauu

SEQ ID NO: 2485068 - RNA, 19 nt, Homo sapiens
  misc_RNA (1)...(19): siRNA sense strand
agaaagauacagcugaaaa

SEQ ID NO: 2485069 - RNA, 19 nt, Homo sapiens
  misc_RNA (1)...(19): siRNA sense strand
cagcagaagaacuaaagga

SEQ ID NO: 2485070 - RNA, 19 nt, Homo sapiens
  misc_RNA (1)...(19): siRNA sense strand
agcagaagaacuaaaggaa

SEQ ID NO: 2485071 - RNA, 19 nt, Homo sapiens
  misc_RNA (1)...(19): siRNA sense strand
ccgcugaggauguggauac

SEQ ID NO: 2485072 - RNA, 19 nt, Homo sapiens
  misc_RNA (1)...(19): siRNA sense strand
ccucuaaccauguuuacaa

SEQ ID NO: 2485073 - RNA, 19 nt, Homo sapiens
  misc_RNA (1)...(19): siRNA sense strand
ccgcaaggguaacaaaauu

SEQ ID NO: 2485074 - RNA, 19 nt, Homo sapiens
  misc_RNA (1)...(19): siRNA sense strand
gugagguccaggagggaga

SEQ ID NO: 2485075 - RNA, 19 nt, Homo sapiens
  misc_RNA (1)...(19): siRNA sense strand
gugagguccaggagggaga

SEQ ID NO: 2485076 - RNA, 19 nt, Homo sapiens
  misc_RNA (1)...(19): siRNA sense strand
ggguagcaguggugggcaa

SEQ ID NO: 2485077 - RNA, 19 nt, Homo sapiens
  misc_RNA (1)...(19): siRNA sense strand
ccaaagaacaccugggcuu

SEQ ID NO: 2485078 - RNA, 19 nt, Homo sapiens
  misc_RNA (1)...(19): siRNA sense strand
cggaacagauagaggccga

SEQ ID NO: 2485079 - RNA, 19 nt, Homo sapiens
  misc_RNA (1)...(19): siRNA sense strand
gcaacgacauucugggcuu

SEQ ID NO: 2485080 - RNA, 19 nt, Homo sapiens
  misc_RNA (1)...(19): siRNA sense strand
gugauuaccugguccggaa

SEQ ID NO: 2485081 - RNA, 19 nt, Homo sapiens
  misc_RNA (1)...(19): siRNA sense strand
agauagaggccgaugucau

SEQ ID NO: 2485082 - RNA, 19 nt, Homo sapiens
  misc_RNA (1)...(19): siRNA sense strand
gcaccagcagugugggcaa

SEQ ID NO: 2485083 - RNA, 19 nt, Homo sapiens
  misc_RNA (1)...(19): siRNA sense strand
ccauauaugucauugggca

SEQ ID NO: 2485084 - RNA, 19 nt, Homo sapiens
  misc_RNA (1)...(19): siRNA sense strand
ugaacaagccugacagcca

SEQ ID NO: 2485085 - RNA, 19 nt, Homo sapiens
  misc_RNA (1)...(19): siRNA sense strand
gcuuugacagugaaggcaa

SEQ ID NO: 2485086 - RNA, 19 nt, Homo sapiens
  misc_RNA (1)...(19): siRNA sense strand
ggucaugagaaguaccuga

SEQ ID NO: 2485087 - RNA, 19 nt, Homo sapiens
  misc_RNA (1)...(19): siRNA sense strand
ccugggaguuugaggccga

SEQ ID NO: 2485088 - RNA, 19 nt, Homo sapiens
  misc_RNA (1)...(19): siRNA sense strand
caagaaacccugaagcugu

SEQ ID NO: 2485089 - RNA, 19 nt, Homo sapiens
  misc_RNA (1)...(19): siRNA sense strand
gcaacguggaugcuggcaa

SEQ ID NO: 2485090 - RNA, 19 nt, Homo sapiens
  misc_RNA (1)...(19): siRNA sense strand
gaguaggagacaaugacuu

SEQ ID NO: 2485091 - RNA, 19 nt, Homo sapiens
  misc_RNA (1)...(19): siRNA sense strand
cuuugacagugaaggcaau

SEQ ID NO: 2485092 - RNA, 19 nt, Homo sapiens
  misc_RNA (1)...(19): siRNA sense strand
acgccacagugaagagcau

SEQ ID NO: 2485093 - RNA, 19 nt, Homo sapiens
  misc_RNA (1)...(19): siRNA sense strand
gugaaggcaauguagugaa

SEQ ID NO: 2485094 - RNA, 19 nt, Homo sapiens
  misc_RNA (1)...(19): siRNA sense strand
ccagcaaucuccagccuca

SEQ ID NO: 2485095 - RNA, 19 nt, Homo sapiens
  misc_RNA (1)...(19): siRNA sense strand
cugaguaugggcugaguga

SEQ ID NO: 2485096 - RNA, 19 nt, Homo sapiens
  misc_RNA (1)...(19): siRNA sense strand
aguuugaggccgagauucu

SEQ ID NO: 2485097 - RNA, 19 nt, Homo sapiens
  misc_RNA (1)...(19): siRNA sense strand
acuccaagccgcagcagau

SEQ ID NO: 2485098 - RNA, 19 nt, Homo sapiens
  misc_RNA (1)...(19): siRNA sense strand
gggauggacuagaggagca

SEQ ID NO: 2485099 - RNA, 19 nt, Homo sapiens
  misc_RNA (1)...(19): siRNA sense strand
gcccagaucuacaggguca

SEQ ID NO: 2485100 - RNA, 19 nt, Homo sapiens
  misc_RNA (1)...(19): siRNA sense strand
gcuaugagguggagcgccu

SEQ ID NO: 2485101 - RNA, 19 nt, Homo sapiens
  misc_RNA (1)...(19): siRNA sense strand
uuugcauacugcugggaaa

SEQ ID NO: 2485102 - RNA, 19 nt, Homo sapiens
  misc_RNA (1)...(19): siRNA sense strand
cucuacuacuacugggaaa

SEQ ID NO: 2485103 - RNA, 19 nt, Homo sapiens
  misc_RNA (1)...(19): siRNA sense strand
agguggagcgccuggacaa

SEQ ID NO: 2485104 - RNA, 19 nt, Homo sapiens
  misc_RNA (1)...(19): siRNA sense strand
gggaaagagauuaccgaag

SEQ ID NO: 2485105 - RNA, 19 nt, Homo sapiens
  misc_RNA (1)...(19): siRNA sense strand
cugcaaaugcugcgggaug

SEQ ID NO: 2485106 - RNA, 19 nt, Homo sapiens
  misc_RNA (1)...(19): siRNA sense strand
gcuuacaaguguuuccaga

SEQ ID NO: 2485107 - RNA, 19 nt, Homo sapiens
  misc_RNA (1)...(19): siRNA sense strand
ccucaguaccacgcagaaa

SEQ ID NO: 2485108 - RNA, 19 nt, Homo sapiens
  misc_RNA (1)...(19): siRNA sense strand
uggcaagagaugaguuaau

SEQ ID NO: 2485109 - RNA, 19 nt, Homo sapiens
  misc_RNA (1)...(19): siRNA sense strand
gugaacuggaacagacuaa

SEQ ID NO: 2485110 - RNA, 19 nt, Homo sapiens
  misc_RNA (1)...(19): siRNA sense strand
ugguagacccagcgaucaa

SEQ ID NO: 2485111 - RNA, 19 nt, Homo sapiens
  misc_RNA (1)...(19): siRNA sense strand
aggaacaagagaugcaaga

SEQ ID NO: 2485112 - RNA, 19 nt, Homo sapiens
  misc_RNA (1)...(19): siRNA sense strand
ugaaaggugaacuggaaca

SEQ ID NO: 2485113 - RNA, 19 nt, Homo sapiens
  misc_RNA (1)...(19): siRNA sense strand
gguucgauugagugaaaca

SEQ ID NO: 2485114 - RNA, 19 nt, Homo sapiens
  misc_RNA (1)...(19): siRNA sense strand
caaacuggaacaagcccaa

SEQ ID NO: 2485115 - RNA, 19 nt, Homo sapiens
  misc_RNA (1)...(19): siRNA sense strand
uggcaagagaugaguuaau

SEQ ID NO: 2485116 - RNA, 19 nt, Homo sapiens
  misc_RNA (1)...(19): siRNA sense strand
gugaacuggaacagacuaa

SEQ ID NO: 2485117 - RNA, 19 nt, Homo sapiens
  misc_RNA (1)...(19): siRNA sense strand
ugguagacccagcgaucaa

SEQ ID NO: 2485118 - RNA, 19 nt, Homo sapiens
  misc_RNA (1)...(19): siRNA sense strand
aggaacaagagaugcaaga

SEQ ID NO: 2485119 - RNA, 19 nt, Homo sapiens
  misc_RNA (1)...(19): siRNA sense strand
ugaaaggugaacuggaaca

SEQ ID NO: 2485120 - RNA, 19 nt, Homo sapiens
  misc_RNA (1)...(19): siRNA sense strand
gguucgauugagugaaaca

SEQ ID NO: 2485121 - RNA, 19 nt, Homo sapiens
  misc_RNA (1)...(19): siRNA sense strand
caaacuggaacaagcccaa

SEQ ID NO: 2485122 - RNA, 19 nt, Homo sapiens
  misc_RNA (1)...(19): siRNA sense strand
uggcaagagaugaguuaau

SEQ ID NO: 2485123 - RNA, 19 nt, Homo sapiens
  misc_RNA (1)...(19): siRNA sense strand
gugaacuggaacagacuaa

SEQ ID NO: 2485124 - RNA, 19 nt, Homo sapiens
  misc_RNA (1)...(19): siRNA sense strand
ugguagacccagcgaucaa

SEQ ID NO: 2485125 - RNA, 19 nt, Homo sapiens
  misc_RNA (1)...(19): siRNA sense strand
aggaacaagagaugcaaga

SEQ ID NO: 2485126 - RNA, 19 nt, Homo sapiens
  misc_RNA (1)...(19): siRNA sense strand
ugaaaggugaacuggaaca

SEQ ID NO: 2485127 - RNA, 19 nt, Homo sapiens
  misc_RNA (1)...(19): siRNA sense strand
gguucgauugagugaaaca

SEQ ID NO: 2485128 - RNA, 19 nt, Homo sapiens
  misc_RNA (1)...(19): siRNA sense strand
caaacuggaacaagcccaa

SEQ ID NO: 2485129 - RNA, 19 nt, Homo sapiens
  misc_RNA (1)...(19): siRNA sense strand
gcuugaggauucugggcua

SEQ ID NO: 2485130 - RNA, 19 nt, Homo sapiens
  misc_RNA (1)...(19): siRNA sense strand
gcaaggauccgauuggcaa

SEQ ID NO: 2485131 - RNA, 19 nt, Homo sapiens
  misc_RNA (1)...(19): siRNA sense strand
agaauacgcuggaccgcua

SEQ ID NO: 2485132 - RNA, 19 nt, Homo sapiens
  misc_RNA (1)...(19): siRNA sense strand
cagaggaugaggaggcaga

SEQ ID NO: 2485133 - RNA, 19 nt, Homo sapiens
  misc_RNA (1)...(19): siRNA sense strand
gcaucuaccaccagaacca

SEQ ID NO: 2485134 - RNA, 19 nt, Homo sapiens
  misc_RNA (1)...(19): siRNA sense strand
gaaagaaggagaaugccga

SEQ ID NO: 2485135 - RNA, 19 nt, Homo sapiens
  misc_RNA (1)...(19): siRNA sense strand
cagaaggugcgcuuggcaa

SEQ ID NO: 2485136 - RNA, 19 nt, Homo sapiens
  misc_RNA (1)...(19): siRNA sense strand
caaggauccgauuggcaaa

SEQ ID NO: 2485137 - RNA, 19 nt, Homo sapiens
  misc_RNA (1)...(19): siRNA sense strand
gugaauaccuccugcggcu

SEQ ID NO: 2485138 - RNA, 19 nt, Homo sapiens
  misc_RNA (1)...(19): siRNA sense strand
cgauuggcaaagaguggua

SEQ ID NO: 2485139 - RNA, 19 nt, Homo sapiens
  misc_RNA (1)...(19): siRNA sense strand
cugagaagggcacaaacaa

SEQ ID NO: 2485140 - RNA, 19 nt, Homo sapiens
  misc_RNA (1)...(19): siRNA sense strand
gugcugaacuucuaccgaa

SEQ ID NO: 2485141 - RNA, 19 nt, Homo sapiens
  misc_RNA (1)...(19): siRNA sense strand
gggaccgaaagaaggagaa

SEQ ID NO: 2485142 - RNA, 19 nt, Homo sapiens
  misc_RNA (1)...(19): siRNA sense strand
ggaccgaaagaaggagaau

SEQ ID NO: 2485143 - RNA, 19 nt, Homo sapiens
  misc_RNA (1)...(19): siRNA sense strand
gagaugagguucugguggu

SEQ ID NO: 2485144 - RNA, 19 nt, Homo sapiens
  misc_RNA (1)...(19): siRNA sense strand
gcaugcaggagcuggacau

SEQ ID NO: 2485145 - RNA, 19 nt, Homo sapiens
  misc_RNA (1)...(19): siRNA sense strand
gggcauuaaaggagaggaa

SEQ ID NO: 2485146 - RNA, 19 nt, Homo sapiens
  misc_RNA (1)...(19): siRNA sense strand
gcauuaaaggagaggaaau

SEQ ID NO: 2485147 - RNA, 19 nt, Homo sapiens
  misc_RNA (1)...(19): siRNA sense strand
caagaagagcagaggaaaa

SEQ ID NO: 2485148 - RNA, 19 nt, Homo sapiens
  misc_RNA (1)...(19): siRNA sense strand
gggccuaaagagagaggaa

SEQ ID NO: 2485149 - RNA, 19 nt, Homo sapiens
  misc_RNA (1)...(19): siRNA sense strand
agauguugacguugggaaa

SEQ ID NO: 2485150 - RNA, 19 nt, Homo sapiens
  misc_RNA (1)...(19): siRNA sense strand
ugaagaaaguaauggcaca

SEQ ID NO: 2485151 - RNA, 19 nt, Homo sapiens
  misc_RNA (1)...(19): siRNA sense strand
aggaaauaguucagcaguu

SEQ ID NO: 2485152 - RNA, 19 nt, Homo sapiens
  misc_RNA (1)...(19): siRNA sense strand
gagcagaggaaaagacauu

SEQ ID NO: 2485153 - RNA, 19 nt, Homo sapiens
  misc_RNA (1)...(19): siRNA sense strand
gaggaagucuacagcccaa

SEQ ID NO: 2485154 - RNA, 19 nt, Homo sapiens
  misc_RNA (1)...(19): siRNA sense strand
cuuugaaggacaagggcau

SEQ ID NO: 2485155 - RNA, 19 nt, Homo sapiens
  misc_RNA (1)...(19): siRNA sense strand
cgucauuggccauaguuau

SEQ ID NO: 2485156 - RNA, 19 nt, Homo sapiens
  misc_RNA (1)...(19): siRNA sense strand
cccaagaagaagagggaag

SEQ ID NO: 2485157 - RNA, 19 nt, Homo sapiens
  misc_RNA (1)...(19): siRNA sense strand
gggaagagccuacugcaga

SEQ ID NO: 2485158 - RNA, 19 nt, Homo sapiens
  misc_RNA (1)...(19): siRNA sense strand
gcgacuucguggugcugaa

SEQ ID NO: 2485159 - RNA, 19 nt, Homo sapiens
  misc_RNA (1)...(19): siRNA sense strand
ggauaacgucauuggccau

SEQ ID NO: 2485160 - RNA, 19 nt, Homo sapiens
  misc_RNA (1)...(19): siRNA sense strand
acauaaaagcuuugaagga

SEQ ID NO: 2485161 - RNA, 19 nt, Homo sapiens
  misc_RNA (1)...(19): siRNA sense strand
aguacaacauuccgagaca

SEQ ID NO: 2485162 - RNA, 19 nt, Homo sapiens
  misc_RNA (1)...(19): siRNA sense strand
gauguuaucuucagagcca

SEQ ID NO: 2485163 - RNA, 19 nt, Homo sapiens
  misc_RNA (1)...(19): siRNA sense strand
auguugacguugggaaaua

SEQ ID NO: 2485164 - RNA, 19 nt, Homo sapiens
  misc_RNA (1)...(19): siRNA sense strand
gcuauacccuggaggagga

SEQ ID NO: 2485165 - RNA, 19 nt, Homo sapiens
  misc_RNA (1)...(19): siRNA sense strand
augcaagagaaccuggaaa

SEQ ID NO: 2485166 - RNA, 19 nt, Homo sapiens
  misc_RNA (1)...(19): siRNA sense strand
aaagagagaggaagcaaaa

SEQ ID NO: 2485167 - RNA, 19 nt, Homo sapiens
  misc_RNA (1)...(19): siRNA sense strand
gaaaagacauuuagaggcu

SEQ ID NO: 2485168 - RNA, 19 nt, Homo sapiens
  misc_RNA (1)...(19): siRNA sense strand
cuaaagagagaggaagcaa

SEQ ID NO: 2485169 - RNA, 19 nt, Homo sapiens
  misc_RNA (1)...(19): siRNA sense strand
ugcaagagaaccuggaaaa

SEQ ID NO: 2485170 - RNA, 19 nt, Homo sapiens
  misc_RNA (1)...(19): siRNA sense strand
ggaacgaaugggagguuuu

SEQ ID NO: 2485171 - RNA, 19 nt, Homo sapiens
  misc_RNA (1)...(19): siRNA sense strand
uggacaaccuuaaagcaga

SEQ ID NO: 2485172 - RNA, 19 nt, Homo sapiens
  misc_RNA (1)...(19): siRNA sense strand
ggcacugauaaucgaaaua

SEQ ID NO: 2485173 - RNA, 19 nt, Homo sapiens
  misc_RNA (1)...(19): siRNA sense strand
ccagaagaccaggaaacaa

SEQ ID NO: 2485174 - RNA, 19 nt, Homo sapiens
  misc_RNA (1)...(19): siRNA sense strand
cauaaggggccuaaagaga

SEQ ID NO: 2485175 - RNA, 19 nt, Homo sapiens
  misc_RNA (1)...(19): siRNA sense strand
gaccaguggaggaagucua

SEQ ID NO: 2485176 - RNA, 19 nt, Homo sapiens
  misc_RNA (1)...(19): siRNA sense strand
auaaaagcuuugaaggaca

SEQ ID NO: 2485177 - RNA, 19 nt, Homo sapiens
  misc_RNA (1)...(19): siRNA sense strand
ugaagugaccaguggagga

SEQ ID NO: 2485178 - RNA, 19 nt, Homo sapiens
  misc_RNA (1)...(19): siRNA sense strand
agauguguuuaaagcagua

SEQ ID NO: 2485179 - RNA, 19 nt, Homo sapiens
  misc_RNA (1)...(19): siRNA sense strand
acaagaagagcagaggaaa

SEQ ID NO: 2485180 - RNA, 19 nt, Homo sapiens
  misc_RNA (1)...(19): siRNA sense strand
caagacagaauuugcccaa

SEQ ID NO: 2485181 - RNA, 19 nt, Homo sapiens
  misc_RNA (1)...(19): siRNA sense strand
aagagaaugaagacagcau

SEQ ID NO: 2485182 - RNA, 19 nt, Homo sapiens
  misc_RNA (1)...(19): siRNA sense strand
gaagaagagggaagagccu

SEQ ID NO: 2485183 - RNA, 19 nt, Homo sapiens
  misc_RNA (1)...(19): siRNA sense strand
gaaauauccgugcuggcaa

SEQ ID NO: 2485184 - RNA, 19 nt, Homo sapiens
  misc_RNA (1)...(19): siRNA sense strand
ccaggaaacaauggaaaca

SEQ ID NO: 2485185 - RNA, 19 nt, Homo sapiens
  misc_RNA (1)...(19): siRNA sense strand
auauaguugaugaugggaa

SEQ ID NO: 2485186 - RNA, 19 nt, Homo sapiens
  misc_RNA (1)...(19): siRNA sense strand
ugaugggaaaucucagaaa

SEQ ID NO: 2485187 - RNA, 19 nt, Homo sapiens
  misc_RNA (1)...(19): siRNA sense strand
acaagggcauuaaaggaga

SEQ ID NO: 2485188 - RNA, 19 nt, Homo sapiens
  misc_RNA (1)...(19): siRNA sense strand
gagaggaaauaguucagca

SEQ ID NO: 2485189 - RNA, 19 nt, Homo sapiens
  misc_RNA (1)...(19): siRNA sense strand
aaugcaagcacuuuagaau

SEQ ID NO: 2485190 - RNA, 19 nt, Homo sapiens
  misc_RNA (1)...(19): siRNA sense strand
acaacgacucggagaacaa

SEQ ID NO: 2485191 - RNA, 19 nt, Homo sapiens
  misc_RNA (1)...(19): siRNA sense strand
aagaggagcacaugggcaa

SEQ ID NO: 2485192 - RNA, 19 nt, Homo sapiens
  misc_RNA (1)...(19): siRNA sense strand
gcugcuacgaggaguacaa

SEQ ID NO: 2485193 - RNA, 19 nt, Homo sapiens
  misc_RNA (1)...(19): siRNA sense strand
ugauaaacgcagggcacaa

SEQ ID NO: 2485194 - RNA, 19 nt, Homo sapiens
  misc_RNA (1)...(19): siRNA sense strand
agcagauguuugagcagaa

SEQ ID NO: 2485195 - RNA, 19 nt, Homo sapiens
  misc_RNA (1)...(19): siRNA sense strand
acgacaacgacucggagaa

SEQ ID NO: 2485196 - RNA, 19 nt, Homo sapiens
  misc_RNA (1)...(19): siRNA sense strand
ccucacucaucgagagcca

SEQ ID NO: 2485197 - RNA, 19 nt, Homo sapiens
  misc_RNA (1)...(19): siRNA sense strand
cgucguaguaagaagacca

SEQ ID NO: 2485198 - RNA, 19 nt, Homo sapiens
  misc_RNA (1)...(19): siRNA sense strand
ccgacaagaacaagcggca

SEQ ID NO: 2485199 - RNA, 19 nt, Homo sapiens
  misc_RNA (1)...(19): siRNA sense strand
aggaguacaaggaccgcaa

SEQ ID NO: 2485200 - RNA, 19 nt, Homo sapiens
  misc_RNA (1)...(19): siRNA sense strand
gcugauaaacgcagggcac

SEQ ID NO: 2485201 - RNA, 19 nt, Homo sapiens
  misc_RNA (1)...(19): siRNA sense strand
agaacaaccaggaguccau

SEQ ID NO: 2485202 - RNA, 19 nt, Homo sapiens
  misc_RNA (1)...(19): siRNA sense strand
cuaagacgauugcagggaa

SEQ ID NO: 2485203 - RNA, 19 nt, Homo sapiens
  misc_RNA (1)...(19): siRNA sense strand
agaccaaacugcaaaacau

SEQ ID NO: 2485204 - RNA, 19 nt, Homo sapiens
  misc_RNA (1)...(19): siRNA sense strand
caaaacaggcaguucgaau

SEQ ID NO: 2485205 - RNA, 19 nt, Homo sapiens
  misc_RNA (1)...(19): siRNA sense strand
acaacgacucggagaacaa

SEQ ID NO: 2485206 - RNA, 19 nt, Homo sapiens
  misc_RNA (1)...(19): siRNA sense strand
aagaggagcacaugggcaa

SEQ ID NO: 2485207 - RNA, 19 nt, Homo sapiens
  misc_RNA (1)...(19): siRNA sense strand
gcugcuacgaggaguacaa

SEQ ID NO: 2485208 - RNA, 19 nt, Homo sapiens
  misc_RNA (1)...(19): siRNA sense strand
ugauaaacgcagggcacaa

SEQ ID NO: 2485209 - RNA, 19 nt, Homo sapiens
  misc_RNA (1)...(19): siRNA sense strand
agcagauguuugagcagaa

SEQ ID NO: 2485210 - RNA, 19 nt, Homo sapiens
  misc_RNA (1)...(19): siRNA sense strand
acgacaacgacucggagaa

SEQ ID NO: 2485211 - RNA, 19 nt, Homo sapiens
  misc_RNA (1)...(19): siRNA sense strand
ccucacucaucgagagcca

SEQ ID NO: 2485212 - RNA, 19 nt, Homo sapiens
  misc_RNA (1)...(19): siRNA sense strand
cgucguaguaagaagacca

SEQ ID NO: 2485213 - RNA, 19 nt, Homo sapiens
  misc_RNA (1)...(19): siRNA sense strand
ccgacaagaacaagcggca

SEQ ID NO: 2485214 - RNA, 19 nt, Homo sapiens
  misc_RNA (1)...(19): siRNA sense strand
aggaguacaaggaccgcaa

SEQ ID NO: 2485215 - RNA, 19 nt, Homo sapiens
  misc_RNA (1)...(19): siRNA sense strand
gcugauaaacgcagggcac

SEQ ID NO: 2485216 - RNA, 19 nt, Homo sapiens
  misc_RNA (1)...(19): siRNA sense strand
agaacaaccaggaguccau

SEQ ID NO: 2485217 - RNA, 19 nt, Homo sapiens
  misc_RNA (1)...(19): siRNA sense strand
cuaagacgauugcagggaa

SEQ ID NO: 2485218 - RNA, 19 nt, Homo sapiens
  misc_RNA (1)...(19): siRNA sense strand
agaccaaacugcaaaacau

SEQ ID NO: 2485219 - RNA, 19 nt, Homo sapiens
  misc_RNA (1)...(19): siRNA sense strand
caaaacaggcaguucgaau

SEQ ID NO: 2485220 - RNA, 19 nt, Homo sapiens
  misc_RNA (1)...(19): siRNA sense strand
ccaaauggcggaagcgcga

SEQ ID NO: 2485221 - RNA, 19 nt, Homo sapiens
  misc_RNA (1)...(19): siRNA sense strand
gcucaaagccaaacagcac

SEQ ID NO: 2485222 - RNA, 19 nt, Homo sapiens
  misc_RNA (1)...(19): siRNA sense strand
cgcccuacgaggaggugua

SEQ ID NO: 2485223 - RNA, 19 nt, Homo sapiens
  misc_RNA (1)...(19): siRNA sense strand
cgguaugaacugcgggaau

SEQ ID NO: 2485224 - RNA, 19 nt, Homo sapiens
  misc_RNA (1)...(19): siRNA sense strand
acgaaagggagccaaacaa

SEQ ID NO: 2485225 - RNA, 19 nt, Homo sapiens
  misc_RNA (1)...(19): siRNA sense strand
gcggaaaacacgaaaggga

SEQ ID NO: 2485226 - RNA, 19 nt, Homo sapiens
  misc_RNA (1)...(19): siRNA sense strand
acgugugguaccagggcaa

SEQ ID NO: 2485227 - RNA, 19 nt, Homo sapiens
  misc_RNA (1)...(19): siRNA sense strand
cuucgaaguggcugugaau

SEQ ID NO: 2485228 - RNA, 19 nt, Homo sapiens
  misc_RNA (1)...(19): siRNA sense strand
caucauugcugguguggcu

SEQ ID NO: 2485229 - RNA, 19 nt, Homo sapiens
  misc_RNA (1)...(19): siRNA sense strand
uggaaggcccagacaccaa

SEQ ID NO: 2485230 - RNA, 19 nt, Homo sapiens
  misc_RNA (1)...(19): siRNA sense strand
agguggacggcgauguuaa

SEQ ID NO: 2485231 - RNA, 19 nt, Homo sapiens
  misc_RNA (1)...(19): siRNA sense strand
cggugacugcggugaagaa

SEQ ID NO: 2485232 - RNA, 19 nt, Homo sapiens
  misc_RNA (1)...(19): siRNA sense strand
cggugacugcggugaagaa

SEQ ID NO: 2485233 - RNA, 19 nt, Homo sapiens
  misc_RNA (1)...(19): siRNA sense strand
uauagggccuuguggguca

SEQ ID NO: 2485234 - RNA, 19 nt, Homo sapiens
  misc_RNA (1)...(19): siRNA sense strand
agaucagagccgagaacaa

SEQ ID NO: 2485235 - RNA, 19 nt, Homo sapiens
  misc_RNA (1)...(19): siRNA sense strand
ggggaaagaucaagggcuu

SEQ ID NO: 2485236 - RNA, 19 nt, Homo sapiens
  misc_RNA (1)...(19): siRNA sense strand
ggagaaagcuagggugcga

SEQ ID NO: 2485237 - RNA, 19 nt, Homo sapiens
  misc_RNA (1)...(19): siRNA sense strand
cagacaaacugguggcacu

SEQ ID NO: 2485238 - RNA, 19 nt, Homo sapiens
  misc_RNA (1)...(19): siRNA sense strand
gggaauaucaaauacguga

SEQ ID NO: 2485239 - RNA, 19 nt, Homo sapiens
  misc_RNA (1)...(19): siRNA sense strand
cagaguaucaggaugggaa

SEQ ID NO: 2485240 - RNA, 19 nt, Homo sapiens
  misc_RNA (1)...(19): siRNA sense strand
ugucauuguuugauggcau

SEQ ID NO: 2485241 - RNA, 19 nt, Homo sapiens
  misc_RNA (1)...(19): siRNA sense strand
gugaacgacgugaggaaca

SEQ ID NO: 2485242 - RNA, 19 nt, Homo sapiens
  misc_RNA (1)...(19): siRNA sense strand
ccuccaagcgacaggcuau

SEQ ID NO: 2485243 - RNA, 19 nt, Homo sapiens
  misc_RNA (1)...(19): siRNA sense strand
cauaaagguaggaaaguac

SEQ ID NO: 2485244 - RNA, 19 nt, Homo sapiens
  misc_RNA (1)...(19): siRNA sense strand
gagacucauuggaggacca

SEQ ID NO: 2485245 - RNA, 19 nt, Homo sapiens
  misc_RNA (1)...(19): siRNA sense strand
cucaagacaaauugcuaua

SEQ ID NO: 2485246 - RNA, 19 nt, Homo sapiens
  misc_RNA (1)...(19): siRNA sense strand
cauuggaggaccagcugaa

SEQ ID NO: 2485247 - RNA, 19 nt, Homo sapiens
  misc_RNA (1)...(19): siRNA sense strand
ccucaagacaaauugcuau

SEQ ID NO: 2485248 - RNA, 19 nt, Homo sapiens
  misc_RNA (1)...(19): siRNA sense strand
ugggcauaaagguaggaaa

SEQ ID NO: 2485249 - RNA, 19 nt, Homo sapiens
  misc_RNA (1)...(19): siRNA sense strand
auaucaaauacgugaacga

SEQ ID NO: 2485250 - RNA, 19 nt, Homo sapiens
  misc_RNA (1)...(19): siRNA sense strand
gaacaagacucgaagacgc

SEQ ID NO: 2485251 - RNA, 19 nt, Homo sapiens
  misc_RNA (1)...(19): siRNA sense strand
aggaacaucacaaagaaaa

SEQ ID NO: 2485252 - RNA, 19 nt, Homo sapiens
  misc_RNA (1)...(19): siRNA sense strand
gagacaguucagaguauca

SEQ ID NO: 2485253 - RNA, 19 nt, Homo sapiens
  misc_RNA (1)...(19): siRNA sense strand
caucaaaguuucugcugcu

SEQ ID NO: 2485254 - RNA, 19 nt, Homo sapiens
  misc_RNA (1)...(19): siRNA sense strand
agaucagagccgagaacaa

SEQ ID NO: 2485255 - RNA, 19 nt, Homo sapiens
  misc_RNA (1)...(19): siRNA sense strand
ggggaaagaucaagggcuu

SEQ ID NO: 2485256 - RNA, 19 nt, Homo sapiens
  misc_RNA (1)...(19): siRNA sense strand
ggagaaagcuagggugcga

SEQ ID NO: 2485257 - RNA, 19 nt, Homo sapiens
  misc_RNA (1)...(19): siRNA sense strand
cagacaaacugguggcacu

SEQ ID NO: 2485258 - RNA, 19 nt, Homo sapiens
  misc_RNA (1)...(19): siRNA sense strand
gggaauaucaaauacguga

SEQ ID NO: 2485259 - RNA, 19 nt, Homo sapiens
  misc_RNA (1)...(19): siRNA sense strand
cagaguaucaggaugggaa

SEQ ID NO: 2485260 - RNA, 19 nt, Homo sapiens
  misc_RNA (1)...(19): siRNA sense strand
ugucauuguuugauggcau

SEQ ID NO: 2485261 - RNA, 19 nt, Homo sapiens
  misc_RNA (1)...(19): siRNA sense strand
gugaacgacgugaggaaca

SEQ ID NO: 2485262 - RNA, 19 nt, Homo sapiens
  misc_RNA (1)...(19): siRNA sense strand
ccuccaagcgacaggcuau

SEQ ID NO: 2485263 - RNA, 19 nt, Homo sapiens
  misc_RNA (1)...(19): siRNA sense strand
cauaaagguaggaaaguac

SEQ ID NO: 2485264 - RNA, 19 nt, Homo sapiens
  misc_RNA (1)...(19): siRNA sense strand
gagacucauuggaggacca

SEQ ID NO: 2485265 - RNA, 19 nt, Homo sapiens
  misc_RNA (1)...(19): siRNA sense strand
cucaagacaaauugcuaua

SEQ ID NO: 2485266 - RNA, 19 nt, Homo sapiens
  misc_RNA (1)...(19): siRNA sense strand
cauuggaggaccagcugaa

SEQ ID NO: 2485267 - RNA, 19 nt, Homo sapiens
  misc_RNA (1)...(19): siRNA sense strand
ccucaagacaaauugcuau

SEQ ID NO: 2485268 - RNA, 19 nt, Homo sapiens
  misc_RNA (1)...(19): siRNA sense strand
ugggcauaaagguaggaaa

SEQ ID NO: 2485269 - RNA, 19 nt, Homo sapiens
  misc_RNA (1)...(19): siRNA sense strand
auaucaaauacgugaacga

SEQ ID NO: 2485270 - RNA, 19 nt, Homo sapiens
  misc_RNA (1)...(19): siRNA sense strand
gaacaagacucgaagacgc

SEQ ID NO: 2485271 - RNA, 19 nt, Homo sapiens
  misc_RNA (1)...(19): siRNA sense strand
aggaacaucacaaagaaaa

SEQ ID NO: 2485272 - RNA, 19 nt, Homo sapiens
  misc_RNA (1)...(19): siRNA sense strand
gagacaguucagaguauca

SEQ ID NO: 2485273 - RNA, 19 nt, Homo sapiens
  misc_RNA (1)...(19): siRNA sense strand
caucaaaguuucugcugcu

SEQ ID NO: 2485274 - RNA, 19 nt, Homo sapiens
  misc_RNA (1)...(19): siRNA sense strand
agaucagagccgagaacaa

SEQ ID NO: 2485275 - RNA, 19 nt, Homo sapiens
  misc_RNA (1)...(19): siRNA sense strand
ggggaaagaucaagggcuu

SEQ ID NO: 2485276 - RNA, 19 nt, Homo sapiens
  misc_RNA (1)...(19): siRNA sense strand
ggagaaagcuagggugcga

SEQ ID NO: 2485277 - RNA, 19 nt, Homo sapiens
  misc_RNA (1)...(19): siRNA sense strand
cagacaaacugguggcacu

SEQ ID NO: 2485278 - RNA, 19 nt, Homo sapiens
  misc_RNA (1)...(19): siRNA sense strand
gggaauaucaaauacguga

SEQ ID NO: 2485279 - RNA, 19 nt, Homo sapiens
  misc_RNA (1)...(19): siRNA sense strand
cagaguaucaggaugggaa

SEQ ID NO: 2485280 - RNA, 19 nt, Homo sapiens
  misc_RNA (1)...(19): siRNA sense strand
ugucauuguuugauggcau

SEQ ID NO: 2485281 - RNA, 19 nt, Homo sapiens
  misc_RNA (1)...(19): siRNA sense strand
gugaacgacgugaggaaca

SEQ ID NO: 2485282 - RNA, 19 nt, Homo sapiens
  misc_RNA (1)...(19): siRNA sense strand
ccuccaagcgacaggcuau

SEQ ID NO: 2485283 - RNA, 19 nt, Homo sapiens
  misc_RNA (1)...(19): siRNA sense strand
cauaaagguaggaaaguac

SEQ ID NO: 2485284 - RNA, 19 nt, Homo sapiens
  misc_RNA (1)...(19): siRNA sense strand
gagacucauuggaggacca

SEQ ID NO: 2485285 - RNA, 19 nt, Homo sapiens
  misc_RNA (1)...(19): siRNA sense strand
cucaagacaaauugcuaua

SEQ ID NO: 2485286 - RNA, 19 nt, Homo sapiens
  misc_RNA (1)...(19): siRNA sense strand
cauuggaggaccagcugaa

SEQ ID NO: 2485287 - RNA, 19 nt, Homo sapiens
  misc_RNA (1)...(19): siRNA sense strand
ccucaagacaaauugcuau

SEQ ID NO: 2485288 - RNA, 19 nt, Homo sapiens
  misc_RNA (1)...(19): siRNA sense strand
ugggcauaaagguaggaaa

SEQ ID NO: 2485289 - RNA, 19 nt, Homo sapiens
  misc_RNA (1)...(19): siRNA sense strand
auaucaaauacgugaacga

SEQ ID NO: 2485290 - RNA, 19 nt, Homo sapiens
  misc_RNA (1)...(19): siRNA sense strand
gaacaagacucgaagacgc

SEQ ID NO: 2485291 - RNA, 19 nt, Homo sapiens
  misc_RNA (1)...(19): siRNA sense strand
aggaacaucacaaagaaaa

SEQ ID NO: 2485292 - RNA, 19 nt, Homo sapiens
  misc_RNA (1)...(19): siRNA sense strand
gagacaguucagaguauca

SEQ ID NO: 2485293 - RNA, 19 nt, Homo sapiens
  misc_RNA (1)...(19): siRNA sense strand
caucaaaguuucugcugcu

SEQ ID NO: 2485294 - RNA, 19 nt, Homo sapiens
  misc_RNA (1)...(19): siRNA sense strand
agaucagagccgagaacaa

SEQ ID NO: 2485295 - RNA, 19 nt, Homo sapiens
  misc_RNA (1)...(19): siRNA sense strand
ggggaaagaucaagggcuu

SEQ ID NO: 2485296 - RNA, 19 nt, Homo sapiens
  misc_RNA (1)...(19): siRNA sense strand
ggagaaagcuagggugcga

SEQ ID NO: 2485297 - RNA, 19 nt, Homo sapiens
  misc_RNA (1)...(19): siRNA sense strand
cagacaaacugguggcacu

SEQ ID NO: 2485298 - RNA, 19 nt, Homo sapiens
  misc_RNA (1)...(19): siRNA sense strand
gggaauaucaaauacguga

SEQ ID NO: 2485299 - RNA, 19 nt, Homo sapiens
  misc_RNA (1)...(19): siRNA sense strand
cagaguaucaggaugggaa

SEQ ID NO: 2485300 - RNA, 19 nt, Homo sapiens
  misc_RNA (1)...(19): siRNA sense strand
ugucauuguuugauggcau

SEQ ID NO: 2485301 - RNA, 19 nt, Homo sapiens
  misc_RNA (1)...(19): siRNA sense strand
gugaacgacgugaggaaca

SEQ ID NO: 2485302 - RNA, 19 nt, Homo sapiens
  misc_RNA (1)...(19): siRNA sense strand
ccuccaagcgacaggcuau

SEQ ID NO: 2485303 - RNA, 19 nt, Homo sapiens
  misc_RNA (1)...(19): siRNA sense strand
cauaaagguaggaaaguac

SEQ ID NO: 2485304 - RNA, 19 nt, Homo sapiens
  misc_RNA (1)...(19): siRNA sense strand
gagacucauuggaggacca

SEQ ID NO: 2485305 - RNA, 19 nt, Homo sapiens
  misc_RNA (1)...(19): siRNA sense strand
cucaagacaaauugcuaua

SEQ ID NO: 2485306 - RNA, 19 nt, Homo sapiens
  misc_RNA (1)...(19): siRNA sense strand
cauuggaggaccagcugaa

SEQ ID NO: 2485307 - RNA, 19 nt, Homo sapiens
  misc_RNA (1)...(19): siRNA sense strand
ccucaagacaaauugcuau

SEQ ID NO: 2485308 - RNA, 19 nt, Homo sapiens
  misc_RNA (1)...(19): siRNA sense strand
ugggcauaaagguaggaaa

SEQ ID NO: 2485309 - RNA, 19 nt, Homo sapiens
  misc_RNA (1)...(19): siRNA sense strand
auaucaaauacgugaacga

SEQ ID NO: 2485310 - RNA, 19 nt, Homo sapiens
  misc_RNA (1)...(19): siRNA sense strand
gaacaagacucgaagacgc

SEQ ID NO: 2485311 - RNA, 19 nt, Homo sapiens
  misc_RNA (1)...(19): siRNA sense strand
aggaacaucacaaagaaaa

SEQ ID NO: 2485312 - RNA, 19 nt, Homo sapiens
  misc_RNA (1)...(19): siRNA sense strand
gagacaguucagaguauca

SEQ ID NO: 2485313 - RNA, 19 nt, Homo sapiens
  misc_RNA (1)...(19): siRNA sense strand
caucaaaguuucugcugcu

SEQ ID NO: 2485314 - RNA, 19 nt, Homo sapiens
  misc_RNA (1)...(19): siRNA sense strand
aggaauacuaugaggaaga

SEQ ID NO: 2485315 - RNA, 19 nt, Homo sapiens
  misc_RNA (1)...(19): siRNA sense strand
gggaagaugggaaggguga

SEQ ID NO: 2485316 - RNA, 19 nt, Homo sapiens
  misc_RNA (1)...(19): siRNA sense strand
uggauaagcugguggugga

SEQ ID NO: 2485317 - RNA, 19 nt, Homo sapiens
  misc_RNA (1)...(19): siRNA sense strand
ugaggaaguuucacggcua

SEQ ID NO: 2485318 - RNA, 19 nt, Homo sapiens
  misc_RNA (1)...(19): siRNA sense strand
aggcaaaccaagagaaggu

SEQ ID NO: 2485319 - RNA, 19 nt, Homo sapiens
  misc_RNA (1)...(19): siRNA sense strand
gguuaaugcagcugacgau

SEQ ID NO: 2485320 - RNA, 19 nt, Homo sapiens
  misc_RNA (1)...(19): siRNA sense strand
cagagaaacgagagaacgu

SEQ ID NO: 2485321 - RNA, 19 nt, Homo sapiens
  misc_RNA (1)...(19): siRNA sense strand
agacagccuuguaugggaa

SEQ ID NO: 2485322 - RNA, 19 nt, Homo sapiens
  misc_RNA (1)...(19): siRNA sense strand
uuguaugggaagaugggaa

SEQ ID NO: 2485323 - RNA, 19 nt, Homo sapiens
  misc_RNA (1)...(19): siRNA sense strand
gaugauaucaccaugguca

SEQ ID NO: 2485324 - RNA, 19 nt, Homo sapiens
  misc_RNA (1)...(19): siRNA sense strand
acuacaucaagaagacaua

SEQ ID NO: 2485325 - RNA, 19 nt, Homo sapiens
  misc_RNA (1)...(19): siRNA sense strand
gagaaacgagagaacguca

SEQ ID NO: 2485326 - RNA, 19 nt, Homo sapiens
  misc_RNA (1)...(19): siRNA sense strand
guaacaaguugcagugcuc

SEQ ID NO: 2485327 - RNA, 19 nt, Homo sapiens
  misc_RNA (1)...(19): siRNA sense strand
aggaauacuaugaggaaga

SEQ ID NO: 2485328 - RNA, 19 nt, Homo sapiens
  misc_RNA (1)...(19): siRNA sense strand
gggaagaugggaaggguga

SEQ ID NO: 2485329 - RNA, 19 nt, Homo sapiens
  misc_RNA (1)...(19): siRNA sense strand
uggauaagcugguggugga

SEQ ID NO: 2485330 - RNA, 19 nt, Homo sapiens
  misc_RNA (1)...(19): siRNA sense strand
ugaggaaguuucacggcua

SEQ ID NO: 2485331 - RNA, 19 nt, Homo sapiens
  misc_RNA (1)...(19): siRNA sense strand
aggcaaaccaagagaaggu

SEQ ID NO: 2485332 - RNA, 19 nt, Homo sapiens
  misc_RNA (1)...(19): siRNA sense strand
gguuaaugcagcugacgau

SEQ ID NO: 2485333 - RNA, 19 nt, Homo sapiens
  misc_RNA (1)...(19): siRNA sense strand
cagagaaacgagagaacgu

SEQ ID NO: 2485334 - RNA, 19 nt, Homo sapiens
  misc_RNA (1)...(19): siRNA sense strand
agacagccuuguaugggaa

SEQ ID NO: 2485335 - RNA, 19 nt, Homo sapiens
  misc_RNA (1)...(19): siRNA sense strand
uuguaugggaagaugggaa

SEQ ID NO: 2485336 - RNA, 19 nt, Homo sapiens
  misc_RNA (1)...(19): siRNA sense strand
gaugauaucaccaugguca

SEQ ID NO: 2485337 - RNA, 19 nt, Homo sapiens
  misc_RNA (1)...(19): siRNA sense strand
acuacaucaagaagacaua

SEQ ID NO: 2485338 - RNA, 19 nt, Homo sapiens
  misc_RNA (1)...(19): siRNA sense strand
gagaaacgagagaacguca

SEQ ID NO: 2485339 - RNA, 19 nt, Homo sapiens
  misc_RNA (1)...(19): siRNA sense strand
guaacaaguugcagugcuc

SEQ ID NO: 2485340 - RNA, 19 nt, Homo sapiens
  misc_RNA (1)...(19): siRNA sense strand
cggcaagaacugugauaaa

SEQ ID NO: 2485341 - RNA, 19 nt, Homo sapiens
  misc_RNA (1)...(19): siRNA sense strand
aaagaaugcacuugggaaa

SEQ ID NO: 2485342 - RNA, 19 nt, Homo sapiens
  misc_RNA (1)...(19): siRNA sense strand
cauuugaaguggaggaaga

SEQ ID NO: 2485343 - RNA, 19 nt, Homo sapiens
  misc_RNA (1)...(19): siRNA sense strand
acaacacaguuaagggaaa

SEQ ID NO: 2485344 - RNA, 19 nt, Homo sapiens
  misc_RNA (1)...(19): siRNA sense strand
caucaagaacggaaagaau

SEQ ID NO: 2485345 - RNA, 19 nt, Homo sapiens
  misc_RNA (1)...(19): siRNA sense strand
cauagaaagaagugaugaa

SEQ ID NO: 2485346 - RNA, 19 nt, Homo sapiens
  misc_RNA (1)...(19): siRNA sense strand
uaacagugucugagagcua

SEQ ID NO: 2485347 - RNA, 19 nt, Homo sapiens
  misc_RNA (1)...(19): siRNA sense strand
gccaugaggcacugggaaa

SEQ ID NO: 2485348 - RNA, 19 nt, Homo sapiens
  misc_RNA (1)...(19): siRNA sense strand
agucuaaacugcauggcaa

SEQ ID NO: 2485349 - RNA, 19 nt, Homo sapiens
  misc_RNA (1)...(19): siRNA sense strand
ggaaauggaccucaggcaa

SEQ ID NO: 2485350 - RNA, 19 nt, Homo sapiens
  misc_RNA (1)...(19): siRNA sense strand
ugaaagaauguguguggaa

SEQ ID NO: 2485351 - RNA, 19 nt, Homo sapiens
  misc_RNA (1)...(19): siRNA sense strand
ggaagaugagugugccaaa

SEQ ID NO: 2485352 - RNA, 19 nt, Homo sapiens
  misc_RNA (1)...(19): siRNA sense strand
aguauuugauggagaaaca

SEQ ID NO: 2485353 - RNA, 19 nt, Homo sapiens
  misc_RNA (1)...(19): siRNA sense strand
ccgugaugauaauggcaua

SEQ ID NO: 2485354 - RNA, 19 nt, Homo sapiens
  misc_RNA (1)...(19): siRNA sense strand
ccguaauggauuugugcua

SEQ ID NO: 2485355 - RNA, 19 nt, Homo sapiens
  misc_RNA (1)...(19): siRNA sense strand
cgucuaagcaaaggagaua

SEQ ID NO: 2485356 - RNA, 19 nt, Homo sapiens
  misc_RNA (1)...(19): siRNA sense strand
agagauggaaccagugaaa

SEQ ID NO: 2485357 - RNA, 19 nt, Homo sapiens
  misc_RNA (1)...(19): siRNA sense strand
cgauauugccuuagaugau

SEQ ID NO: 2485358 - RNA, 19 nt, Homo sapiens
  misc_RNA (1)...(19): siRNA sense strand
gcaguaauuggguaggaaa

SEQ ID NO: 2485359 - RNA, 19 nt, Homo sapiens
  misc_RNA (1)...(19): siRNA sense strand
augaaugcucuaaggauaa

SEQ ID NO: 2485360 - RNA, 19 nt, Homo sapiens
  misc_RNA (1)...(19): siRNA sense strand
ccugaagacauaagaucua

SEQ ID NO: 2485361 - RNA, 19 nt, Homo sapiens
  misc_RNA (1)...(19): siRNA sense strand
augggaacgaagaggauaa

SEQ ID NO: 2485362 - RNA, 19 nt, Homo sapiens
  misc_RNA (1)...(19): siRNA sense strand
agacaggauaagaagaauu

SEQ ID NO: 2485363 - RNA, 19 nt, Homo sapiens
  misc_RNA (1)...(19): siRNA sense strand
ccuuguggcuacuggaaau

SEQ ID NO: 2485364 - RNA, 19 nt, Homo sapiens
  misc_RNA (1)...(19): siRNA sense strand
gcaucaagaaugugcuuau

SEQ ID NO: 2485365 - RNA, 19 nt, Homo sapiens
  misc_RNA (1)...(19): siRNA sense strand
uagaaguauuugauggaga

SEQ ID NO: 2485366 - RNA, 19 nt, Homo sapiens
  misc_RNA (1)...(19): siRNA sense strand
aagaagugaugaagagagu

SEQ ID NO: 2485367 - RNA, 19 nt, Homo sapiens
  misc_RNA (1)...(19): siRNA sense strand
acacaagaccagaucgaga

SEQ ID NO: 2485368 - RNA, 19 nt, Homo sapiens
  misc_RNA (1)...(19): siRNA sense strand
cagaauguggauugaguuu

SEQ ID NO: 2485369 - RNA, 19 nt, Homo sapiens
  misc_RNA (1)...(19): siRNA sense strand
gaaagaaugcacuugggaa

SEQ ID NO: 2485370 - RNA, 19 nt, Homo sapiens
  misc_RNA (1)...(19): siRNA sense strand
ucaagaacggaaagaauau

SEQ ID NO: 2485371 - RNA, 19 nt, Homo sapiens
  misc_RNA (1)...(19): siRNA sense strand
caguaauuggguaggaaaa

SEQ ID NO: 2485372 - RNA, 19 nt, Homo sapiens
  misc_RNA (1)...(19): siRNA sense strand
cagaagauccacaguccaa

SEQ ID NO: 2485373 - RNA, 19 nt, Homo sapiens
  misc_RNA (1)...(19): siRNA sense strand
cuacaauucucagggcaaa

SEQ ID NO: 2485374 - RNA, 19 nt, Homo sapiens
  misc_RNA (1)...(19): siRNA sense strand
ccuggaaguuagagaugga

SEQ ID NO: 2485375 - RNA, 19 nt, Homo sapiens
  misc_RNA (1)...(19): siRNA sense strand
augcaucuguucaaagaaa

SEQ ID NO: 2485376 - RNA, 19 nt, Homo sapiens
  misc_RNA (1)...(19): siRNA sense strand
guucuuacuucuacagaca

SEQ ID NO: 2485377 - RNA, 19 nt, Homo sapiens
  misc_RNA (1)...(19): siRNA sense strand
aaagaauguguguggaaaa

SEQ ID NO: 2485378 - RNA, 19 nt, Homo sapiens
  misc_RNA (1)...(19): siRNA sense strand
ccuaauaagaacugugugu

SEQ ID NO: 2485379 - RNA, 19 nt, Homo sapiens
  misc_RNA (1)...(19): siRNA sense strand
gcuacaucaagaacggaaa

SEQ ID NO: 2485380 - RNA, 19 nt, Homo sapiens
  misc_RNA (1)...(19): siRNA sense strand
ccgucuaagcaaaggagau

SEQ ID NO: 2485381 - RNA, 19 nt, Homo sapiens
  misc_RNA (1)...(19): siRNA sense strand
agauggaaccagugaaaau

SEQ ID NO: 2485382 - RNA, 19 nt, Homo sapiens
  misc_RNA (1)...(19): siRNA sense strand
agacaaagaugaaugcucu

SEQ ID NO: 2485383 - RNA, 19 nt, Homo sapiens
  misc_RNA (1)...(19): siRNA sense strand
ccuuagaugaugaagacuu

SEQ ID NO: 2485384 - RNA, 19 nt, Homo sapiens
  misc_RNA (1)...(19): siRNA sense strand
ucuacaauucucagggcaa

SEQ ID NO: 2485385 - RNA, 19 nt, Homo sapiens
  misc_RNA (1)...(19): siRNA sense strand
agagacggguacuggagaa

SEQ ID NO: 2485386 - RNA, 19 nt, Homo sapiens
  misc_RNA (1)...(19): siRNA sense strand
ucaaauuagccuuuaguga

SEQ ID NO: 2485387 - RNA, 19 nt, Homo sapiens
  misc_RNA (1)...(19): siRNA sense strand
auagacaggauaagaagaa

SEQ ID NO: 2485388 - RNA, 19 nt, Homo sapiens
  misc_RNA (1)...(19): siRNA sense strand
aguaaacucacuuggagaa

SEQ ID NO: 2485389 - RNA, 19 nt, Homo sapiens
  misc_RNA (1)...(19): siRNA sense strand
ggagauaucgcacaggcaa

SEQ ID NO: 2485390 - RNA, 19 nt, Homo sapiens
  misc_RNA (1)...(19): siRNA sense strand
agacaugacaauugugcuu

SEQ ID NO: 2485391 - RNA, 19 nt, Homo sapiens
  misc_RNA (1)...(19): siRNA sense strand
cugacggaacugugaacaa

SEQ ID NO: 2485392 - RNA, 19 nt, Homo sapiens
  misc_RNA (1)...(19): siRNA sense strand
cuguauagauguccagcau

SEQ ID NO: 2485393 - RNA, 19 nt, Homo sapiens
  misc_RNA (1)...(19): siRNA sense strand
uuucugugguuaugacaaa

SEQ ID NO: 2485394 - RNA, 19 nt, Homo sapiens
  misc_RNA (1)...(19): siRNA sense strand
gcaaauaugauuaugugga

SEQ ID NO: 2485395 - RNA, 19 nt, Homo sapiens
  misc_RNA (1)...(19): siRNA sense strand
guaauggauuugugcuaca

SEQ ID NO: 2485396 - RNA, 19 nt, Homo sapiens
  misc_RNA (1)...(19): siRNA sense strand
aggauaaaacagagacuau

SEQ ID NO: 2485397 - RNA, 19 nt, Homo sapiens
  misc_RNA (1)...(19): siRNA sense strand
aucaagaacggaaagaaua

SEQ ID NO: 2485398 - RNA, 19 nt, Homo sapiens
  misc_RNA (1)...(19): siRNA sense strand
gucuaaacugcauggcaaa

SEQ ID NO: 2485399 - RNA, 19 nt, Homo sapiens
  misc_RNA (1)...(19): siRNA sense strand
gggcucucgacuugaauua

SEQ ID NO: 2485400 - RNA, 19 nt, Homo sapiens
  misc_RNA (1)...(19): siRNA sense strand
cugaagaagcuaguggaaa

SEQ ID NO: 2485401 - RNA, 19 nt, Homo sapiens
  misc_RNA (1)...(19): siRNA sense strand
ccugaagaagcuaguggaa

SEQ ID NO: 2485402 - RNA, 19 nt, Homo sapiens
  misc_RNA (1)...(19): siRNA sense strand
gggacaaggcaguggaguc

SEQ ID NO: 2485403 - RNA, 19 nt, Homo sapiens
  misc_RNA (1)...(19): siRNA sense strand
uggcagaacagcugggaac

SEQ ID NO: 2485404 - RNA, 19 nt, Homo sapiens
  misc_RNA (1)...(19): siRNA sense strand
ugaacgaggugauuggcau

SEQ ID NO: 2485405 - RNA, 19 nt, Homo sapiens
  misc_RNA (1)...(19): siRNA sense strand
uggccaagucucugcagaa

SEQ ID NO: 2485406 - RNA, 19 nt, Homo sapiens
  misc_RNA (1)...(19): siRNA sense strand
ccaaggugcuggagcugga

SEQ ID NO: 2485407 - RNA, 19 nt, Homo sapiens
  misc_RNA (1)...(19): siRNA sense strand
ugaaagacugugaggccga

SEQ ID NO: 2485408 - RNA, 19 nt, Homo sapiens
  misc_RNA (1)...(19): siRNA sense strand
cugccuuuccuuacagaua

SEQ ID NO: 2485409 - RNA, 19 nt, Homo sapiens
  misc_RNA (1)...(19): siRNA sense strand
ccaacuaccugcaccgcau

SEQ ID NO: 2485410 - RNA, 19 nt, Homo sapiens
  misc_RNA (1)...(19): siRNA sense strand
ucaaggagcugguguccga

SEQ ID NO: 2485411 - RNA, 19 nt, Homo sapiens
  misc_RNA (1)...(19): siRNA sense strand
ccucagucaucaugggucu

SEQ ID NO: 2485412 - RNA, 19 nt, Homo sapiens
  misc_RNA (1)...(19): siRNA sense strand
agagugaagucaagcccau

SEQ ID NO: 2485413 - RNA, 19 nt, Homo sapiens
  misc_RNA (1)...(19): siRNA sense strand
acgucaagagugagaucau

SEQ ID NO: 2485414 - RNA, 19 nt, Homo sapiens
  misc_RNA (1)...(19): siRNA sense strand
aggagaugguggagagcaa

SEQ ID NO: 2485415 - RNA, 19 nt, Homo sapiens
  misc_RNA (1)...(19): siRNA sense strand
gggcuaaacugcacgguca

SEQ ID NO: 2485416 - RNA, 19 nt, Homo sapiens
  misc_RNA (1)...(19): siRNA sense strand
uggaggaagaggaggaaga

SEQ ID NO: 2485417 - RNA, 19 nt, Homo sapiens
  misc_RNA (1)...(19): siRNA sense strand
uggcaaagcuggaaccuca

SEQ ID NO: 2485418 - RNA, 19 nt, Homo sapiens
  misc_RNA (1)...(19): siRNA sense strand
cggaaauggaggaagagga

SEQ ID NO: 2485419 - RNA, 19 nt, Homo sapiens
  misc_RNA (1)...(19): siRNA sense strand
aggaagaggaggaagagga

SEQ ID NO: 2485420 - RNA, 19 nt, Homo sapiens
  misc_RNA (1)...(19): siRNA sense strand
ggaggaaggaggagcagca

SEQ ID NO: 2485421 - RNA, 19 nt, Homo sapiens
  misc_RNA (1)...(19): siRNA sense strand
acgaagagguguuugagga

SEQ ID NO: 2485422 - RNA, 19 nt, Homo sapiens
  misc_RNA (1)...(19): siRNA sense strand
gggagcaccucgaaggcuu

SEQ ID NO: 2485423 - RNA, 19 nt, Homo sapiens
  misc_RNA (1)...(19): siRNA sense strand
aaauggaggaagaggagga

SEQ ID NO: 2485424 - RNA, 19 nt, Homo sapiens
  misc_RNA (1)...(19): siRNA sense strand
gguucgaggagguguacuu

SEQ ID NO: 2485425 - RNA, 19 nt, Homo sapiens
  misc_RNA (1)...(19): siRNA sense strand
aagaggaggaagaggagca

SEQ ID NO: 2485426 - RNA, 19 nt, Homo sapiens
  misc_RNA (1)...(19): siRNA sense strand
ccaaauacaccgauggccu

SEQ ID NO: 2485427 - RNA, 19 nt, Homo sapiens
  misc_RNA (1)...(19): siRNA sense strand
aggaggaagaggagcagga

SEQ ID NO: 2485428 - RNA, 19 nt, Homo sapiens
  misc_RNA (1)...(19): siRNA sense strand
agaauuuccuugugccuga

SEQ ID NO: 2485429 - RNA, 19 nt, Homo sapiens
  misc_RNA (1)...(19): siRNA sense strand
ggaaauggaggaagaggag

SEQ ID NO: 2485430 - RNA, 19 nt, Homo sapiens
  misc_RNA (1)...(19): siRNA sense strand
aaugaacguuugugcguca

SEQ ID NO: 2485431 - RNA, 19 nt, Homo sapiens
  misc_RNA (1)...(19): siRNA sense strand
ggcaagaaccggaggcagu

SEQ ID NO: 2485432 - RNA, 19 nt, Homo sapiens
  misc_RNA (1)...(19): siRNA sense strand
gcagugugccagaugggaa

SEQ ID NO: 2485433 - RNA, 19 nt, Homo sapiens
  misc_RNA (1)...(19): siRNA sense strand
ggauggucagcgacagcua

SEQ ID NO: 2485434 - RNA, 19 nt, Homo sapiens
  misc_RNA (1)...(19): siRNA sense strand
ggcaagaaccggaggcagu

SEQ ID NO: 2485435 - RNA, 19 nt, Homo sapiens
  misc_RNA (1)...(19): siRNA sense strand
gcagugugccagaugggaa

SEQ ID NO: 2485436 - RNA, 19 nt, Homo sapiens
  misc_RNA (1)...(19): siRNA sense strand
ggauggucagcgacagcua

SEQ ID NO: 2485437 - RNA, 19 nt, Homo sapiens
  misc_RNA (1)...(19): siRNA sense strand
ggcaagaaccggaggcagu

SEQ ID NO: 2485438 - RNA, 19 nt, Homo sapiens
  misc_RNA (1)...(19): siRNA sense strand
ggauggucagcgacagcua

SEQ ID NO: 2485439 - RNA, 19 nt, Homo sapiens
  misc_RNA (1)...(19): siRNA sense strand
aggaugaggacgaggauga

SEQ ID NO: 2485440 - RNA, 19 nt, Homo sapiens
  misc_RNA (1)...(19): siRNA sense strand
agagcaaacaggagagaca

SEQ ID NO: 2485441 - RNA, 19 nt, Homo sapiens
  misc_RNA (1)...(19): siRNA sense strand
gauuauugaacgagauaca

SEQ ID NO: 2485442 - RNA, 19 nt, Homo sapiens
  misc_RNA (1)...(19): siRNA sense strand
acaaggaggaugaggacga

SEQ ID NO: 2485443 - RNA, 19 nt, Homo sapiens
  misc_RNA (1)...(19): siRNA sense strand
gagcccaggaagagagaca

SEQ ID NO: 2485444 - RNA, 19 nt, Homo sapiens
  misc_RNA (1)...(19): siRNA sense strand
gauucagucuucagggaga

SEQ ID NO: 2485445 - RNA, 19 nt, Homo sapiens
  misc_RNA (1)...(19): siRNA sense strand
uagcaagacugcaggccau

SEQ ID NO: 2485446 - RNA, 19 nt, Homo sapiens
  misc_RNA (1)...(19): siRNA sense strand
ggaggauagcugaagccaa

SEQ ID NO: 2485447 - RNA, 19 nt, Homo sapiens
  misc_RNA (1)...(19): siRNA sense strand
caugaagagaacauagcaa

SEQ ID NO: 2485448 - RNA, 19 nt, Homo sapiens
  misc_RNA (1)...(19): siRNA sense strand
gcaucuuugcccaggaaau

SEQ ID NO: 2485449 - RNA, 19 nt, Homo sapiens
  misc_RNA (1)...(19): siRNA sense strand
aggaggacaaggaggauga

SEQ ID NO: 2485450 - RNA, 19 nt, Homo sapiens
  misc_RNA (1)...(19): siRNA sense strand
ccaaagagagccaggccca

SEQ ID NO: 2485451 - RNA, 19 nt, Homo sapiens
  misc_RNA (1)...(19): siRNA sense strand
gaggauagcugaagccaag

SEQ ID NO: 2485452 - RNA, 19 nt, Homo sapiens
  misc_RNA (1)...(19): siRNA sense strand
aaggaaaagcccugaagaa

SEQ ID NO: 2485453 - RNA, 19 nt, Homo sapiens
  misc_RNA (1)...(19): siRNA sense strand
agacuauccaugaagagaa

SEQ ID NO: 2485454 - RNA, 19 nt, Homo sapiens
  misc_RNA (1)...(19): siRNA sense strand
cagaaagaauggcugcaca

SEQ ID NO: 2485455 - RNA, 19 nt, Homo sapiens
  misc_RNA (1)...(19): siRNA sense strand
agaaagaauggcugcacau

SEQ ID NO: 2485456 - RNA, 19 nt, Homo sapiens
  misc_RNA (1)...(19): siRNA sense strand
ccacaaggguccuggagug

SEQ ID NO: 2485457 - RNA, 19 nt, Homo sapiens
  misc_RNA (1)...(19): siRNA sense strand
cuaagauuauugaacgaga

SEQ ID NO: 2485458 - RNA, 19 nt, Homo sapiens
  misc_RNA (1)...(19): siRNA sense strand
auguggugauguuggacaa

SEQ ID NO: 2485459 - RNA, 19 nt, Homo sapiens
  misc_RNA (1)...(19): siRNA sense strand
aguuggugaagaaaggaaa

SEQ ID NO: 2485460 - RNA, 19 nt, Homo sapiens
  misc_RNA (1)...(19): siRNA sense strand
cagccacacgcaagagcaa

SEQ ID NO: 2485461 - RNA, 19 nt, Homo sapiens
  misc_RNA (1)...(19): siRNA sense strand
gagaggaggcagagagagc

SEQ ID NO: 2485462 - RNA, 19 nt, Homo sapiens
  misc_RNA (1)...(19): siRNA sense strand
uggagaggaggcagagaga

SEQ ID NO: 2485463 - RNA, 19 nt, Homo sapiens
  misc_RNA (1)...(19): siRNA sense strand
gccagugagcccaggaaga

SEQ ID NO: 2485464 - RNA, 19 nt, Homo sapiens
  misc_RNA (1)...(19): siRNA sense strand
gcaacaucugguaagagaa

SEQ ID NO: 2485465 - RNA, 19 nt, Homo sapiens
  misc_RNA (1)...(19): siRNA sense strand
ggcaaggaggauagcugaa

SEQ ID NO: 2485466 - RNA, 19 nt, Homo sapiens
  misc_RNA (1)...(19): siRNA sense strand
ggaagagagacaagcugga

SEQ ID NO: 2485467 - RNA, 19 nt, Homo sapiens
  misc_RNA (1)...(19): siRNA sense strand
aggacaaggaggaugagga

SEQ ID NO: 2485468 - RNA, 19 nt, Homo sapiens
  misc_RNA (1)...(19): siRNA sense strand
cugggcagccugugggauu

SEQ ID NO: 2485469 - RNA, 19 nt, Homo sapiens
  misc_RNA (1)...(19): siRNA sense strand
cgcaagagcaaacaggaga

SEQ ID NO: 2485470 - RNA, 19 nt, Homo sapiens
  misc_RNA (1)...(19): siRNA sense strand
gcgguuaccuuuacaggga

SEQ ID NO: 2485471 - RNA, 19 nt, Homo sapiens
  misc_RNA (1)...(19): siRNA sense strand
augccaacuuccuggauca

SEQ ID NO: 2485472 - RNA, 19 nt, Homo sapiens
  misc_RNA (1)...(19): siRNA sense strand
gaacauagcaagacugcag

SEQ ID NO: 2485473 - RNA, 19 nt, Homo sapiens
  misc_RNA (1)...(19): siRNA sense strand
ggacaaggaggaugaggac

SEQ ID NO: 2485474 - RNA, 19 nt, Homo sapiens
  misc_RNA (1)...(19): siRNA sense strand
cagucuucagggagaacua

SEQ ID NO: 2485475 - RNA, 19 nt, Homo sapiens
  misc_RNA (1)...(19): siRNA sense strand
aggcagagagagcggggua

SEQ ID NO: 2485476 - RNA, 19 nt, Homo sapiens
  misc_RNA (1)...(19): siRNA sense strand
ccaugaaacuacuucgugu

SEQ ID NO: 2485477 - RNA, 19 nt, Homo sapiens
  misc_RNA (1)...(19): siRNA sense strand
gggaaaaguuauagaaaca

SEQ ID NO: 2485478 - RNA, 19 nt, Homo sapiens
  misc_RNA (1)...(19): siRNA sense strand
aguuauagaaacagggaaa

SEQ ID NO: 2485479 - RNA, 19 nt, Homo sapiens
  misc_RNA (1)...(19): siRNA sense strand
gcacaaaggaagccgggaa

SEQ ID NO: 2485480 - RNA, 19 nt, Homo sapiens
  misc_RNA (1)...(19): siRNA sense strand
gcaacaugacagaggacaa

SEQ ID NO: 2485481 - RNA, 19 nt, Homo sapiens
  misc_RNA (1)...(19): siRNA sense strand
aggccaagcuauaagaaau

SEQ ID NO: 2485482 - RNA, 19 nt, Homo sapiens
  misc_RNA (1)...(19): siRNA sense strand
aggacaaggccaagcuaua

SEQ ID NO: 2485483 - RNA, 19 nt, Homo sapiens
  misc_RNA (1)...(19): siRNA sense strand
cugugaaaauggaggcaaa

SEQ ID NO: 2485484 - RNA, 19 nt, Homo sapiens
  misc_RNA (1)...(19): siRNA sense strand
gucugaaagugaaggagua

SEQ ID NO: 2485485 - RNA, 19 nt, Homo sapiens
  misc_RNA (1)...(19): siRNA sense strand
gaguaauccugcacggaga

SEQ ID NO: 2485486 - RNA, 19 nt, Homo sapiens
  misc_RNA (1)...(19): siRNA sense strand
agguauagcagcucagauu

SEQ ID NO: 2485487 - RNA, 19 nt, Homo sapiens
  misc_RNA (1)...(19): siRNA sense strand
gagaaggacagcaaggaga

SEQ ID NO: 2485488 - RNA, 19 nt, Homo sapiens
  misc_RNA (1)...(19): siRNA sense strand
gggauguggcuacgauaua

SEQ ID NO: 2485489 - RNA, 19 nt, Homo sapiens
  misc_RNA (1)...(19): siRNA sense strand
ccacagacuucuuggcagu

SEQ ID NO: 2485490 - RNA, 19 nt, Homo sapiens
  misc_RNA (1)...(19): siRNA sense strand
ccggcuaugccaagauaaa

SEQ ID NO: 2485491 - RNA, 19 nt, Homo sapiens
  misc_RNA (1)...(19): siRNA sense strand
ggaaacuagcgcugacauu

SEQ ID NO: 2485492 - RNA, 19 nt, Homo sapiens
  misc_RNA (1)...(19): siRNA sense strand
uucaaaggcugcauggaaa

SEQ ID NO: 2485493 - RNA, 19 nt, Homo sapiens
  misc_RNA (1)...(19): siRNA sense strand
gaggaaagagcaaagguca

SEQ ID NO: 2485494 - RNA, 19 nt, Homo sapiens
  misc_RNA (1)...(19): siRNA sense strand
ggaacauggccaauggaca

SEQ ID NO: 2485495 - RNA, 19 nt, Homo sapiens
  misc_RNA (1)...(19): siRNA sense strand
guuuaaacuuaggaagcaa

SEQ ID NO: 2485496 - RNA, 19 nt, Homo sapiens
  misc_RNA (1)...(19): siRNA sense strand
gcaacaaaugccagagacu

SEQ ID NO: 2485497 - RNA, 19 nt, Homo sapiens
  misc_RNA (1)...(19): siRNA sense strand
ucagaaacaagaagaugaa

SEQ ID NO: 2485498 - RNA, 19 nt, Homo sapiens
  misc_RNA (1)...(19): siRNA sense strand
ccguaccaauggagaguuu

SEQ ID NO: 2485499 - RNA, 19 nt, Homo sapiens
  misc_RNA (1)...(19): siRNA sense strand
cagaccaagaugagccaaa

SEQ ID NO: 2485500 - RNA, 19 nt, Homo sapiens
  misc_RNA (1)...(19): siRNA sense strand
acgaaguggcacaaaggaa

SEQ ID NO: 2485501 - RNA, 19 nt, Homo sapiens
  misc_RNA (1)...(19): siRNA sense strand
agacaaacgccucggcuca

SEQ ID NO: 2485502 - RNA, 19 nt, Homo sapiens
  misc_RNA (1)...(19): siRNA sense strand
cgucauugcuguggugauu

SEQ ID NO: 2485503 - RNA, 19 nt, Homo sapiens
  misc_RNA (1)...(19): siRNA sense strand
gggagaaacuggaaacccu

SEQ ID NO: 2485504 - RNA, 19 nt, Homo sapiens
  misc_RNA (1)...(19): siRNA sense strand
ggacgaucaacuuguaaau

SEQ ID NO: 2485505 - RNA, 19 nt, Homo sapiens
  misc_RNA (1)...(19): siRNA sense strand
caggaaguuugcuggauga

SEQ ID NO: 2485506 - RNA, 19 nt, Homo sapiens
  misc_RNA (1)...(19): siRNA sense strand
ggaagaaauuagagcccuc

SEQ ID NO: 2485507 - RNA, 19 nt, Homo sapiens
  misc_RNA (1)...(19): siRNA sense strand
cugaaaguuuacugcaaca

SEQ ID NO: 2485508 - RNA, 19 nt, Homo sapiens
  misc_RNA (1)...(19): siRNA sense strand
gggucacugcagagaggaa

SEQ ID NO: 2485509 - RNA, 19 nt, Homo sapiens
  misc_RNA (1)...(19): siRNA sense strand
uggaaagcaucaacuacaa

SEQ ID NO: 2485510 - RNA, 19 nt, Homo sapiens
  misc_RNA (1)...(19): siRNA sense strand
cgucaacauuacugaucuu

SEQ ID NO: 2485511 - RNA, 19 nt, Homo sapiens
  misc_RNA (1)...(19): siRNA sense strand
augaauaacucaagucacu

SEQ ID NO: 2485512 - RNA, 19 nt, Homo sapiens
  misc_RNA (1)...(19): siRNA sense strand
cuacagcgacacagggaga

SEQ ID NO: 2485513 - RNA, 19 nt, Homo sapiens
  misc_RNA (1)...(19): siRNA sense strand
ggauuggaauggagaaggu

SEQ ID NO: 2485514 - RNA, 19 nt, Homo sapiens
  misc_RNA (1)...(19): siRNA sense strand
cgauauaacuuucaggcac

SEQ ID NO: 2485515 - RNA, 19 nt, Homo sapiens
  misc_RNA (1)...(19): siRNA sense strand
agaccauugaugaaagcaa

SEQ ID NO: 2485516 - RNA, 19 nt, Homo sapiens
  misc_RNA (1)...(19): siRNA sense strand
uggaacaaacugugaaaau

SEQ ID NO: 2485517 - RNA, 19 nt, Homo sapiens
  misc_RNA (1)...(19): siRNA sense strand
ugaccaagagauucacaaa

SEQ ID NO: 2485518 - RNA, 19 nt, Homo sapiens
  misc_RNA (1)...(19): siRNA sense strand
ggauucagccagugcggau

SEQ ID NO: 2485519 - RNA, 19 nt, Homo sapiens
  misc_RNA (1)...(19): siRNA sense strand
gcuauaagaaauggaguca

SEQ ID NO: 2485520 - RNA, 19 nt, Homo sapiens
  misc_RNA (1)...(19): siRNA sense strand
ccaauggagaguuugacua

SEQ ID NO: 2485521 - RNA, 19 nt, Homo sapiens
  misc_RNA (1)...(19): siRNA sense strand
uuucaaaggcugcauggaa

SEQ ID NO: 2485522 - RNA, 19 nt, Homo sapiens
  misc_RNA (1)...(19): siRNA sense strand
aagccaacgagaagcacua

SEQ ID NO: 2485523 - RNA, 19 nt, Homo sapiens
  misc_RNA (1)...(19): siRNA sense strand
uccauauaauccaggacaa

SEQ ID NO: 2485524 - RNA, 19 nt, Homo sapiens
  misc_RNA (1)...(19): siRNA sense strand
auuuauacgaaguggcaca

SEQ ID NO: 2485525 - RNA, 19 nt, Homo sapiens
  misc_RNA (1)...(19): siRNA sense strand
ugaaaauaugggaaaggaa

SEQ ID NO: 2485526 - RNA, 19 nt, Homo sapiens
  misc_RNA (1)...(19): siRNA sense strand
ggagaaacuggaaacccua

SEQ ID NO: 2485527 - RNA, 19 nt, Homo sapiens
  misc_RNA (1)...(19): siRNA sense strand
cuacaaacaccuaggacag

SEQ ID NO: 2485528 - RNA, 19 nt, Homo sapiens
  misc_RNA (1)...(19): siRNA sense strand
cugcagagaggaaugucaa

SEQ ID NO: 2485529 - RNA, 19 nt, Homo sapiens
  misc_RNA (1)...(19): siRNA sense strand
agaaauggagucaacagaa

SEQ ID NO: 2485530 - RNA, 19 nt, Homo sapiens
  misc_RNA (1)...(19): siRNA sense strand
ucugaaagugaaggaguaa

SEQ ID NO: 2485531 - RNA, 19 nt, Homo sapiens
  misc_RNA (1)...(19): siRNA sense strand
cuccagcaguagaaagaau

SEQ ID NO: 2485532 - RNA, 19 nt, Homo sapiens
  misc_RNA (1)...(19): siRNA sense strand
cugaaagcaaagugggugu

SEQ ID NO: 2485533 - RNA, 19 nt, Homo sapiens
  misc_RNA (1)...(19): siRNA sense strand
gcaaagccaacgagaagca

SEQ ID NO: 2485534 - RNA, 19 nt, Homo sapiens
  misc_RNA (1)...(19): siRNA sense strand
guaacugcgacgcggacua

SEQ ID NO: 2485535 - RNA, 19 nt, Homo sapiens
  misc_RNA (1)...(19): siRNA sense strand
gaagaagggauguggcuac

SEQ ID NO: 2485536 - RNA, 19 nt, Homo sapiens
  misc_RNA (1)...(19): siRNA sense strand
aaauugaccaagagauuca

SEQ ID NO: 2485537 - RNA, 19 nt, Homo sapiens
  misc_RNA (1)...(19): siRNA sense strand
cuggaaacccuaucaucaa

SEQ ID NO: 2485538 - RNA, 19 nt, Homo sapiens
  misc_RNA (1)...(19): siRNA sense strand
gagauaaccuuuggaggca

SEQ ID NO: 2485539 - RNA, 19 nt, Homo sapiens
  misc_RNA (1)...(19): siRNA sense strand
gcaaaguggguguucacau

SEQ ID NO: 2485540 - RNA, 19 nt, Homo sapiens
  misc_RNA (1)...(19): siRNA sense strand
aaaugggccaguagagauu

SEQ ID NO: 2485541 - RNA, 19 nt, Homo sapiens
  misc_RNA (1)...(19): siRNA sense strand
cccgagagccauacaauau

SEQ ID NO: 2485542 - RNA, 19 nt, Homo sapiens
  misc_RNA (1)...(19): siRNA sense strand
ugaaagaugucauugccuu

SEQ ID NO: 2485543 - RNA, 19 nt, Homo sapiens
  misc_RNA (1)...(19): siRNA sense strand
gaaguuugcuggaugacca

SEQ ID NO: 2485544 - RNA, 19 nt, Homo sapiens
  misc_RNA (1)...(19): siRNA sense strand
cggaaaagcucgaggacuc

SEQ ID NO: 2485545 - RNA, 19 nt, Homo sapiens
  misc_RNA (1)...(19): siRNA sense strand
ggacaaacuagaccggcua

SEQ ID NO: 2485546 - RNA, 19 nt, Homo sapiens
  misc_RNA (1)...(19): siRNA sense strand
aggacaagaacaagggcuu

SEQ ID NO: 2485547 - RNA, 19 nt, Homo sapiens
  misc_RNA (1)...(19): siRNA sense strand
ggagaagauucgugggcug

SEQ ID NO: 2485548 - RNA, 19 nt, Homo sapiens
  misc_RNA (1)...(19): siRNA sense strand
agaaccugguggugaucaa

SEQ ID NO: 2485549 - RNA, 19 nt, Homo sapiens
  misc_RNA (1)...(19): siRNA sense strand
ccuucuagugugaugaaau

SEQ ID NO: 2485550 - RNA, 19 nt, Homo sapiens
  misc_RNA (1)...(19): siRNA sense strand
acgauguuguggagaagau

SEQ ID NO: 2485551 - RNA, 19 nt, Homo sapiens
  misc_RNA (1)...(19): siRNA sense strand
ggagaaacgauguugugga

SEQ ID NO: 2485552 - RNA, 19 nt, Homo sapiens
  misc_RNA (1)...(19): siRNA sense strand
gggacauccuagacagaac

SEQ ID NO: 2485553 - RNA, 19 nt, Homo sapiens
  misc_RNA (1)...(19): siRNA sense strand
gcgcugagcaggaacgguu

SEQ ID NO: 2485554 - RNA, 19 nt, Homo sapiens
  misc_RNA (1)...(19): siRNA sense strand
cccaaaggcaugaacucaa

SEQ ID NO: 2485555 - RNA, 19 nt, Homo sapiens
  misc_RNA (1)...(19): siRNA sense strand
aggcaugaacucaacagaa

SEQ ID NO: 2485556 - RNA, 19 nt, Homo sapiens
  misc_RNA (1)...(19): siRNA sense strand
ccagcuggaaacugacaaa

SEQ ID NO: 2485557 - RNA, 19 nt, Homo sapiens
  misc_RNA (1)...(19): siRNA sense strand
gugggaagccaguggaaag

SEQ ID NO: 2485558 - RNA, 19 nt, Homo sapiens
  misc_RNA (1)...(19): siRNA sense strand
gggaccaaggagacagaca

SEQ ID NO: 2485559 - RNA, 19 nt, Homo sapiens
  misc_RNA (1)...(19): siRNA sense strand
caugagaauggcauagaga

SEQ ID NO: 2485560 - RNA, 19 nt, Homo sapiens
  misc_RNA (1)...(19): siRNA sense strand
cgggagaaauggaucuacu

SEQ ID NO: 2485561 - RNA, 19 nt, Homo sapiens
  misc_RNA (1)...(19): siRNA sense strand
aggacaaggaggagaggaa

SEQ ID NO: 2485562 - RNA, 19 nt, Homo sapiens
  misc_RNA (1)...(19): siRNA sense strand
aaagggagcuagaggguca

SEQ ID NO: 2485563 - RNA, 19 nt, Homo sapiens
  misc_RNA (1)...(19): siRNA sense strand
ugaaacaacagaagaaaca

SEQ ID NO: 2485564 - RNA, 19 nt, Homo sapiens
  misc_RNA (1)...(19): siRNA sense strand
cuuugaaacaacagaagaa

SEQ ID NO: 2485565 - RNA, 19 nt, Homo sapiens
  misc_RNA (1)...(19): siRNA sense strand
agcugaagcacgagaacaa

SEQ ID NO: 2485566 - RNA, 19 nt, Homo sapiens
  misc_RNA (1)...(19): siRNA sense strand
agaagaagccggauggguu

SEQ ID NO: 2485567 - RNA, 19 nt, Homo sapiens
  misc_RNA (1)...(19): siRNA sense strand
guaaaggagcugcaggaga

SEQ ID NO: 2485568 - RNA, 19 nt, Homo sapiens
  misc_RNA (1)...(19): siRNA sense strand
gaagaagaguccaaggauc

SEQ ID NO: 2485569 - RNA, 19 nt, Homo sapiens
  misc_RNA (1)...(19): siRNA sense strand
gaagaagaaaagaaagcaa

SEQ ID NO: 2485570 - RNA, 19 nt, Homo sapiens
  misc_RNA (1)...(19): siRNA sense strand
acagaagaaacaaguggaa

SEQ ID NO: 2485571 - RNA, 19 nt, Homo sapiens
  misc_RNA (1)...(19): siRNA sense strand
gcgacuuggaggagcugaa

SEQ ID NO: 2485572 - RNA, 19 nt, Homo sapiens
  misc_RNA (1)...(19): siRNA sense strand
aguuggagcagcaaguaaa

SEQ ID NO: 2485573 - RNA, 19 nt, Homo sapiens
  misc_RNA (1)...(19): siRNA sense strand
gcuggaagaagaaaagaaa

SEQ ID NO: 2485574 - RNA, 19 nt, Homo sapiens
  misc_RNA (1)...(19): siRNA sense strand
aguugaaggagucgcuuaa

SEQ ID NO: 2485575 - RNA, 19 nt, Homo sapiens
  misc_RNA (1)...(19): siRNA sense strand
aggagaggcuucaggagca

SEQ ID NO: 2485576 - RNA, 19 nt, Homo sapiens
  misc_RNA (1)...(19): siRNA sense strand
agauacugcugaaaggaca

SEQ ID NO: 2485577 - RNA, 19 nt, Homo sapiens
  misc_RNA (1)...(19): siRNA sense strand
uggaggagcugaagcacga

SEQ ID NO: 2485578 - RNA, 19 nt, Homo sapiens
  misc_RNA (1)...(19): siRNA sense strand
uggagagaguggcaggaga

SEQ ID NO: 2485579 - RNA, 19 nt, Homo sapiens
  misc_RNA (1)...(19): siRNA sense strand
caguuggagcagcaaguaa

SEQ ID NO: 2485580 - RNA, 19 nt, Homo sapiens
  misc_RNA (1)...(19): siRNA sense strand
aggaggagaggaaggugaa

SEQ ID NO: 2485581 - RNA, 19 nt, Homo sapiens
  misc_RNA (1)...(19): siRNA sense strand
ccgccacacagaagaagaa

SEQ ID NO: 2485582 - RNA, 19 nt, Homo sapiens
  misc_RNA (1)...(19): siRNA sense strand
cgagaaggagccagaggca

SEQ ID NO: 2485583 - RNA, 19 nt, Homo sapiens
  misc_RNA (1)...(19): siRNA sense strand
cugaaugacaccaucaaau

SEQ ID NO: 2485584 - RNA, 19 nt, Homo sapiens
  misc_RNA (1)...(19): siRNA sense strand
caguugaaggagucgcuua

SEQ ID NO: 2485585 - RNA, 19 nt, Homo sapiens
  misc_RNA (1)...(19): siRNA sense strand
ucuccugaaccgugggcaa

SEQ ID NO: 2485586 - RNA, 19 nt, Homo sapiens
  misc_RNA (1)...(19): siRNA sense strand
aaguaaaggagcugcagga

SEQ ID NO: 2485587 - RNA, 19 nt, Homo sapiens
  misc_RNA (1)...(19): siRNA sense strand
acuuugaagaagaguccaa

SEQ ID NO: 2485588 - RNA, 19 nt, Homo sapiens
  misc_RNA (1)...(19): siRNA sense strand
auccaguaccggagagaga

SEQ ID NO: 2485589 - RNA, 19 nt, Homo sapiens
  misc_RNA (1)...(19): siRNA sense strand
gggcaaaaggagaggcuuc

SEQ ID NO: 2485590 - RNA, 19 nt, Homo sapiens
  misc_RNA (1)...(19): siRNA sense strand
ugagaaacagaaagcugaa

SEQ ID NO: 2485591 - RNA, 19 nt, Homo sapiens
  misc_RNA (1)...(19): siRNA sense strand
gcaugauacgcaucgggua

SEQ ID NO: 2485592 - RNA, 19 nt, Homo sapiens
  misc_RNA (1)...(19): siRNA sense strand
caggagaggcuucgggaac

SEQ ID NO: 2485593 - RNA, 19 nt, Homo sapiens
  misc_RNA (1)...(19): siRNA sense strand
guccugaacucgaggucca

SEQ ID NO: 2485594 - RNA, 19 nt, Homo sapiens
  misc_RNA (1)...(19): siRNA sense strand
ccagcuggagagagaucaa

SEQ ID NO: 2485595 - RNA, 19 nt, Homo sapiens
  misc_RNA (1)...(19): siRNA sense strand
gaagaagcaugauacgcau

SEQ ID NO: 2485596 - RNA, 19 nt, Homo sapiens
  misc_RNA (1)...(19): siRNA sense strand
acagaaagcugaaagggag

SEQ ID NO: 2485597 - RNA, 19 nt, Homo sapiens
  misc_RNA (1)...(19): siRNA sense strand
ggguagaggagcuggagag

SEQ ID NO: 2485598 - RNA, 19 nt, Homo sapiens
  misc_RNA (1)...(19): siRNA sense strand
aggcucagguggaaaacaa

SEQ ID NO: 2485599 - RNA, 19 nt, Homo sapiens
  misc_RNA (1)...(19): siRNA sense strand
cuucaggagcagcaggaga

SEQ ID NO: 2485600 - RNA, 19 nt, Homo sapiens
  misc_RNA (1)...(19): siRNA sense strand
gcuuggcugccgagaagaa

SEQ ID NO: 2485601 - RNA, 19 nt, Homo sapiens
  misc_RNA (1)...(19): siRNA sense strand
cugaacaaauaaaaggaga

SEQ ID NO: 2485602 - RNA, 19 nt, Homo sapiens
  misc_RNA (1)...(19): siRNA sense strand
agaagaagcaugauacgca

SEQ ID NO: 2485603 - RNA, 19 nt, Homo sapiens
  misc_RNA (1)...(19): siRNA sense strand
uagaggagcuggagaggag

SEQ ID NO: 2485604 - RNA, 19 nt, Homo sapiens
  misc_RNA (1)...(19): siRNA sense strand
aaggaggagaggaagguga

SEQ ID NO: 2485605 - RNA, 19 nt, Homo sapiens
  misc_RNA (1)...(19): siRNA sense strand
gugacacaguugaaggagu

SEQ ID NO: 2485606 - RNA, 19 nt, Homo sapiens
  misc_RNA (1)...(19): siRNA sense strand
gcaggagaggcuucgggaa

SEQ ID NO: 2485607 - RNA, 19 nt, Homo sapiens
  misc_RNA (1)...(19): siRNA sense strand
agcugaagcacgagaacaa

SEQ ID NO: 2485608 - RNA, 19 nt, Homo sapiens
  misc_RNA (1)...(19): siRNA sense strand
agaagaagccggauggguu

SEQ ID NO: 2485609 - RNA, 19 nt, Homo sapiens
  misc_RNA (1)...(19): siRNA sense strand
guaaaggagcugcaggaga

SEQ ID NO: 2485610 - RNA, 19 nt, Homo sapiens
  misc_RNA (1)...(19): siRNA sense strand
gaagaagaguccaaggauc

SEQ ID NO: 2485611 - RNA, 19 nt, Homo sapiens
  misc_RNA (1)...(19): siRNA sense strand
gcgacuuggaggagcugaa

SEQ ID NO: 2485612 - RNA, 19 nt, Homo sapiens
  misc_RNA (1)...(19): siRNA sense strand
aguuggagcagcaaguaaa

SEQ ID NO: 2485613 - RNA, 19 nt, Homo sapiens
  misc_RNA (1)...(19): siRNA sense strand
aguugaaggagucgcuuaa

SEQ ID NO: 2485614 - RNA, 19 nt, Homo sapiens
  misc_RNA (1)...(19): siRNA sense strand
aggagaggcuucaggagca

SEQ ID NO: 2485615 - RNA, 19 nt, Homo sapiens
  misc_RNA (1)...(19): siRNA sense strand
agauacugcugaaaggaca

SEQ ID NO: 2485616 - RNA, 19 nt, Homo sapiens
  misc_RNA (1)...(19): siRNA sense strand
uggaggagcugaagcacga

SEQ ID NO: 2485617 - RNA, 19 nt, Homo sapiens
  misc_RNA (1)...(19): siRNA sense strand
uggagagaguggcaggaga

SEQ ID NO: 2485618 - RNA, 19 nt, Homo sapiens
  misc_RNA (1)...(19): siRNA sense strand
caguuggagcagcaaguaa

SEQ ID NO: 2485619 - RNA, 19 nt, Homo sapiens
  misc_RNA (1)...(19): siRNA sense strand
aggaggagaggaaggugaa

SEQ ID NO: 2485620 - RNA, 19 nt, Homo sapiens
  misc_RNA (1)...(19): siRNA sense strand
ccgccacacagaagaagaa

SEQ ID NO: 2485621 - RNA, 19 nt, Homo sapiens
  misc_RNA (1)...(19): siRNA sense strand
caguugaaggagucgcuua

SEQ ID NO: 2485622 - RNA, 19 nt, Homo sapiens
  misc_RNA (1)...(19): siRNA sense strand
ucuccugaaccgugggcaa

SEQ ID NO: 2485623 - RNA, 19 nt, Homo sapiens
  misc_RNA (1)...(19): siRNA sense strand
aaguaaaggagcugcagga

SEQ ID NO: 2485624 - RNA, 19 nt, Homo sapiens
  misc_RNA (1)...(19): siRNA sense strand
acuuugaagaagaguccaa

SEQ ID NO: 2485625 - RNA, 19 nt, Homo sapiens
  misc_RNA (1)...(19): siRNA sense strand
auccaguaccggagagaga

SEQ ID NO: 2485626 - RNA, 19 nt, Homo sapiens
  misc_RNA (1)...(19): siRNA sense strand
gggcaaaaggagaggcuuc

SEQ ID NO: 2485627 - RNA, 19 nt, Homo sapiens
  misc_RNA (1)...(19): siRNA sense strand
gcaugauacgcaucgggua

SEQ ID NO: 2485628 - RNA, 19 nt, Homo sapiens
  misc_RNA (1)...(19): siRNA sense strand
caggagaggcuucgggaac

SEQ ID NO: 2485629 - RNA, 19 nt, Homo sapiens
  misc_RNA (1)...(19): siRNA sense strand
ccagcuggagagagaucaa

SEQ ID NO: 2485630 - RNA, 19 nt, Homo sapiens
  misc_RNA (1)...(19): siRNA sense strand
gaagaagcaugauacgcau

SEQ ID NO: 2485631 - RNA, 19 nt, Homo sapiens
  misc_RNA (1)...(19): siRNA sense strand
ggguagaggagcuggagag

SEQ ID NO: 2485632 - RNA, 19 nt, Homo sapiens
  misc_RNA (1)...(19): siRNA sense strand
aggcucagguggaaaacaa

SEQ ID NO: 2485633 - RNA, 19 nt, Homo sapiens
  misc_RNA (1)...(19): siRNA sense strand
cuucaggagcagcaggaga

SEQ ID NO: 2485634 - RNA, 19 nt, Homo sapiens
  misc_RNA (1)...(19): siRNA sense strand
gcuuggcugccgagaagaa

SEQ ID NO: 2485635 - RNA, 19 nt, Homo sapiens
  misc_RNA (1)...(19): siRNA sense strand
cugaacaaauaaaaggaga

SEQ ID NO: 2485636 - RNA, 19 nt, Homo sapiens
  misc_RNA (1)...(19): siRNA sense strand
agaagaagcaugauacgca

SEQ ID NO: 2485637 - RNA, 19 nt, Homo sapiens
  misc_RNA (1)...(19): siRNA sense strand
uagaggagcuggagaggag

SEQ ID NO: 2485638 - RNA, 19 nt, Homo sapiens
  misc_RNA (1)...(19): siRNA sense strand
gugacacaguugaaggagu

SEQ ID NO: 2485639 - RNA, 19 nt, Homo sapiens
  misc_RNA (1)...(19): siRNA sense strand
gcaggagaggcuucgggaa

SEQ ID NO: 2485640 - RNA, 19 nt, Homo sapiens
  misc_RNA (1)...(19): siRNA sense strand
aaagggagcuagaggguca

SEQ ID NO: 2485641 - RNA, 19 nt, Homo sapiens
  misc_RNA (1)...(19): siRNA sense strand
ugaaacaacagaagaaaca

SEQ ID NO: 2485642 - RNA, 19 nt, Homo sapiens
  misc_RNA (1)...(19): siRNA sense strand
cuuugaaacaacagaagaa

SEQ ID NO: 2485643 - RNA, 19 nt, Homo sapiens
  misc_RNA (1)...(19): siRNA sense strand
agcugaagcacgagaacaa

SEQ ID NO: 2485644 - RNA, 19 nt, Homo sapiens
  misc_RNA (1)...(19): siRNA sense strand
agaagaagccggauggguu

SEQ ID NO: 2485645 - RNA, 19 nt, Homo sapiens
  misc_RNA (1)...(19): siRNA sense strand
guaaaggagcugcaggaga

SEQ ID NO: 2485646 - RNA, 19 nt, Homo sapiens
  misc_RNA (1)...(19): siRNA sense strand
gaagaagaguccaaggauc

SEQ ID NO: 2485647 - RNA, 19 nt, Homo sapiens
  misc_RNA (1)...(19): siRNA sense strand
gaagaagaaaagaaagcaa

SEQ ID NO: 2485648 - RNA, 19 nt, Homo sapiens
  misc_RNA (1)...(19): siRNA sense strand
acagaagaaacaaguggaa

SEQ ID NO: 2485649 - RNA, 19 nt, Homo sapiens
  misc_RNA (1)...(19): siRNA sense strand
gcgacuuggaggagcugaa

SEQ ID NO: 2485650 - RNA, 19 nt, Homo sapiens
  misc_RNA (1)...(19): siRNA sense strand
aguuggagcagcaaguaaa

SEQ ID NO: 2485651 - RNA, 19 nt, Homo sapiens
  misc_RNA (1)...(19): siRNA sense strand
gcuggaagaagaaaagaaa

SEQ ID NO: 2485652 - RNA, 19 nt, Homo sapiens
  misc_RNA (1)...(19): siRNA sense strand
aguugaaggagucgcuuaa

SEQ ID NO: 2485653 - RNA, 19 nt, Homo sapiens
  misc_RNA (1)...(19): siRNA sense strand
aggagaggcuucaggagca

SEQ ID NO: 2485654 - RNA, 19 nt, Homo sapiens
  misc_RNA (1)...(19): siRNA sense strand
agauacugcugaaaggaca

SEQ ID NO: 2485655 - RNA, 19 nt, Homo sapiens
  misc_RNA (1)...(19): siRNA sense strand
uggaggagcugaagcacga

SEQ ID NO: 2485656 - RNA, 19 nt, Homo sapiens
  misc_RNA (1)...(19): siRNA sense strand
uggagagaguggcaggaga

SEQ ID NO: 2485657 - RNA, 19 nt, Homo sapiens
  misc_RNA (1)...(19): siRNA sense strand
caguuggagcagcaaguaa

SEQ ID NO: 2485658 - RNA, 19 nt, Homo sapiens
  misc_RNA (1)...(19): siRNA sense strand
aggaggagaggaaggugaa

SEQ ID NO: 2485659 - RNA, 19 nt, Homo sapiens
  misc_RNA (1)...(19): siRNA sense strand
ccgccacacagaagaagaa

SEQ ID NO: 2485660 - RNA, 19 nt, Homo sapiens
  misc_RNA (1)...(19): siRNA sense strand
cugaaugacaccaucaaau

SEQ ID NO: 2485661 - RNA, 19 nt, Homo sapiens
  misc_RNA (1)...(19): siRNA sense strand
caguugaaggagucgcuua

SEQ ID NO: 2485662 - RNA, 19 nt, Homo sapiens
  misc_RNA (1)...(19): siRNA sense strand
ucuccugaaccgugggcaa

SEQ ID NO: 2485663 - RNA, 19 nt, Homo sapiens
  misc_RNA (1)...(19): siRNA sense strand
aaguaaaggagcugcagga

SEQ ID NO: 2485664 - RNA, 19 nt, Homo sapiens
  misc_RNA (1)...(19): siRNA sense strand
acuuugaagaagaguccaa

SEQ ID NO: 2485665 - RNA, 19 nt, Homo sapiens
  misc_RNA (1)...(19): siRNA sense strand
auccaguaccggagagaga

SEQ ID NO: 2485666 - RNA, 19 nt, Homo sapiens
  misc_RNA (1)...(19): siRNA sense strand
gggcaaaaggagaggcuuc

SEQ ID NO: 2485667 - RNA, 19 nt, Homo sapiens
  misc_RNA (1)...(19): siRNA sense strand
ugagaaacagaaagcugaa

SEQ ID NO: 2485668 - RNA, 19 nt, Homo sapiens
  misc_RNA (1)...(19): siRNA sense strand
gcaugauacgcaucgggua

SEQ ID NO: 2485669 - RNA, 19 nt, Homo sapiens
  misc_RNA (1)...(19): siRNA sense strand
caggagaggcuucgggaac

SEQ ID NO: 2485670 - RNA, 19 nt, Homo sapiens
  misc_RNA (1)...(19): siRNA sense strand
guccugaacucgaggucca

SEQ ID NO: 2485671 - RNA, 19 nt, Homo sapiens
  misc_RNA (1)...(19): siRNA sense strand
ccagcuggagagagaucaa

SEQ ID NO: 2485672 - RNA, 19 nt, Homo sapiens
  misc_RNA (1)...(19): siRNA sense strand
gaagaagcaugauacgcau

SEQ ID NO: 2485673 - RNA, 19 nt, Homo sapiens
  misc_RNA (1)...(19): siRNA sense strand
acagaaagcugaaagggag

SEQ ID NO: 2485674 - RNA, 19 nt, Homo sapiens
  misc_RNA (1)...(19): siRNA sense strand
ggguagaggagcuggagag

SEQ ID NO: 2485675 - RNA, 19 nt, Homo sapiens
  misc_RNA (1)...(19): siRNA sense strand
aggcucagguggaaaacaa

SEQ ID NO: 2485676 - RNA, 19 nt, Homo sapiens
  misc_RNA (1)...(19): siRNA sense strand
cuucaggagcagcaggaga

SEQ ID NO: 2485677 - RNA, 19 nt, Homo sapiens
  misc_RNA (1)...(19): siRNA sense strand
gcuuggcugccgagaagaa

SEQ ID NO: 2485678 - RNA, 19 nt, Homo sapiens
  misc_RNA (1)...(19): siRNA sense strand
cugaacaaauaaaaggaga

SEQ ID NO: 2485679 - RNA, 19 nt, Homo sapiens
  misc_RNA (1)...(19): siRNA sense strand
agaagaagcaugauacgca

SEQ ID NO: 2485680 - RNA, 19 nt, Homo sapiens
  misc_RNA (1)...(19): siRNA sense strand
uagaggagcuggagaggag

SEQ ID NO: 2485681 - RNA, 19 nt, Homo sapiens
  misc_RNA (1)...(19): siRNA sense strand
gugacacaguugaaggagu

SEQ ID NO: 2485682 - RNA, 19 nt, Homo sapiens
  misc_RNA (1)...(19): siRNA sense strand
gcaggagaggcuucgggaa

SEQ ID NO: 2485683 - RNA, 19 nt, Homo sapiens
  misc_RNA (1)...(19): siRNA sense strand
aagagugguucgaaggcaa

SEQ ID NO: 2485684 - RNA, 19 nt, Homo sapiens
  misc_RNA (1)...(19): siRNA sense strand
ggucauugccagcgguuca

SEQ ID NO: 2485685 - RNA, 19 nt, Homo sapiens
  misc_RNA (1)...(19): siRNA sense strand
cggguacauuccaggcaaa

SEQ ID NO: 2485686 - RNA, 19 nt, Homo sapiens
  misc_RNA (1)...(19): siRNA sense strand
ccacauaacgaucagguca

SEQ ID NO: 2485687 - RNA, 19 nt, Homo sapiens
  misc_RNA (1)...(19): siRNA sense strand
ccauaaucauagaggcaag

SEQ ID NO: 2485688 - RNA, 19 nt, Homo sapiens
  misc_RNA (1)...(19): siRNA sense strand
aggcaagaaugcagaccca

SEQ ID NO: 2485689 - RNA, 19 nt, Homo sapiens
  misc_RNA (1)...(19): siRNA sense strand
gagugguacgacagagcaa

SEQ ID NO: 2485690 - RNA, 19 nt, Homo sapiens
  misc_RNA (1)...(19): siRNA sense strand
aagacaagaaagugagagu

SEQ ID NO: 2485691 - RNA, 19 nt, Homo sapiens
  misc_RNA (1)...(19): siRNA sense strand
cuuccaaagacaagaaagu

SEQ ID NO: 2485692 - RNA, 19 nt, Homo sapiens
  misc_RNA (1)...(19): siRNA sense strand
agagaaagugugaaccuau

SEQ ID NO: 2485693 - RNA, 19 nt, Homo sapiens
  misc_RNA (1)...(19): siRNA sense strand
cugcaaacaagaagugcga

SEQ ID NO: 2485694 - RNA, 19 nt, Homo sapiens
  misc_RNA (1)...(19): siRNA sense strand
gcagaagagugguucgaag

SEQ ID NO: 2485695 - RNA, 19 nt, Homo sapiens
  misc_RNA (1)...(19): siRNA sense strand
gcaagacccaugagagcca

SEQ ID NO: 2485696 - RNA, 19 nt, Homo sapiens
  misc_RNA (1)...(19): siRNA sense strand
agagauuguugcugagaag

SEQ ID NO: 2485697 - RNA, 19 nt, Homo sapiens
  misc_RNA (1)...(19): siRNA sense strand
cugagaaggagaaagcaca

SEQ ID NO: 2485698 - RNA, 19 nt, Homo sapiens
  misc_RNA (1)...(19): siRNA sense strand
ucucgugugaccugggaua

SEQ ID NO: 2485699 - RNA, 19 nt, Homo sapiens
  misc_RNA (1)...(19): siRNA sense strand
gaaagcacaugaaggagca

SEQ ID NO: 2485700 - RNA, 19 nt, Homo sapiens
  misc_RNA (1)...(19): siRNA sense strand
agacacaaucugcaaucaa

SEQ ID NO: 2485701 - RNA, 19 nt, Homo sapiens
  misc_RNA (1)...(19): siRNA sense strand
gaaugugggaacaggggaa

SEQ ID NO: 2485702 - RNA, 19 nt, Homo sapiens
  misc_RNA (1)...(19): siRNA sense strand
uccaaagacaagaaaguga

SEQ ID NO: 2485703 - RNA, 19 nt, Homo sapiens
  misc_RNA (1)...(19): siRNA sense strand
ucagaggacugcacgguca

SEQ ID NO: 2485704 - RNA, 19 nt, Homo sapiens
  misc_RNA (1)...(19): siRNA sense strand
gagcaagacccaugagagc

SEQ ID NO: 2485705 - RNA, 19 nt, Homo sapiens
  misc_RNA (1)...(19): siRNA sense strand
cucagagagggauggguua

SEQ ID NO: 2485706 - RNA, 19 nt, Homo sapiens
  misc_RNA (1)...(19): siRNA sense strand
ccaaguuagaacagcagau

SEQ ID NO: 2485707 - RNA, 19 nt, Homo sapiens
  misc_RNA (1)...(19): siRNA sense strand
uuagaacagcagauggcaa

SEQ ID NO: 2485708 - RNA, 19 nt, Homo sapiens
  misc_RNA (1)...(19): siRNA sense strand
ugaucgucuucgagaguuu

SEQ ID NO: 2485709 - RNA, 19 nt, Homo sapiens
  misc_RNA (1)...(19): siRNA sense strand
gugaacaccaugaagguca

SEQ ID NO: 2485710 - RNA, 19 nt, Homo sapiens
  misc_RNA (1)...(19): siRNA sense strand
ugaucgucuucgagaguuu

SEQ ID NO: 2485711 - RNA, 19 nt, Homo sapiens
  misc_RNA (1)...(19): siRNA sense strand
gugaacaccaugaagguca

SEQ ID NO: 2485712 - RNA, 19 nt, Homo sapiens
  misc_RNA (1)...(19): siRNA sense strand
gucagaaggaugagaacau

SEQ ID NO: 2485713 - RNA, 19 nt, Homo sapiens
  misc_RNA (1)...(19): siRNA sense strand
uuagcaagaaggaggguau

SEQ ID NO: 2485714 - RNA, 19 nt, Homo sapiens
  misc_RNA (1)...(19): siRNA sense strand
acauuaacaaggauggcua

SEQ ID NO: 2485715 - RNA, 19 nt, Homo sapiens
  misc_RNA (1)...(19): siRNA sense strand
guggagagguucuucgaga

SEQ ID NO: 2485716 - RNA, 19 nt, Homo sapiens
  misc_RNA (1)...(19): siRNA sense strand
ccuuugaugcggacgggaa

SEQ ID NO: 2485717 - RNA, 19 nt, Homo sapiens
  misc_RNA (1)...(19): siRNA sense strand
ccauccacuuugaggacuu

SEQ ID NO: 2485718 - RNA, 19 nt, Homo sapiens
  misc_RNA (1)...(19): siRNA sense strand
gaggguaucaaguggcaga

SEQ ID NO: 2485719 - RNA, 19 nt, Homo sapiens
  misc_RNA (1)...(19): siRNA sense strand
cuacaggggcuuuaagaau

SEQ ID NO: 2485720 - RNA, 19 nt, Homo sapiens
  misc_RNA (1)...(19): siRNA sense strand
aagaggagaugcuggccau

SEQ ID NO: 2485721 - RNA, 19 nt, Homo sapiens
  misc_RNA (1)...(19): siRNA sense strand
ucgagaaaauggaccggaa

SEQ ID NO: 2485722 - RNA, 19 nt, Homo sapiens
  misc_RNA (1)...(19): siRNA sense strand
gaggagaacuucaagcaga

SEQ ID NO: 2485723 - RNA, 19 nt, Homo sapiens
  misc_RNA (1)...(19): siRNA sense strand
aaaccaaauucacgcgcaa

SEQ ID NO: 2485724 - RNA, 19 nt, Homo sapiens
  misc_RNA (1)...(19): siRNA sense strand
ucuaugacaugaugggcaa

SEQ ID NO: 2485725 - RNA, 19 nt, Homo sapiens
  misc_RNA (1)...(19): siRNA sense strand
aggagaacuucaagcagau

SEQ ID NO: 2485726 - RNA, 19 nt, Homo sapiens
  misc_RNA (1)...(19): siRNA sense strand
cugcaggagcaaaccaaau

SEQ ID NO: 2485727 - RNA, 19 nt, Homo sapiens
  misc_RNA (1)...(19): siRNA sense strand
gaggagaacuucaagcaga

SEQ ID NO: 2485728 - RNA, 19 nt, Homo sapiens
  misc_RNA (1)...(19): siRNA sense strand
aaaccaaauucacgcgcaa

SEQ ID NO: 2485729 - RNA, 19 nt, Homo sapiens
  misc_RNA (1)...(19): siRNA sense strand
ucuaugacaugaugggcaa

SEQ ID NO: 2485730 - RNA, 19 nt, Homo sapiens
  misc_RNA (1)...(19): siRNA sense strand
aggagaacuucaagcagau

SEQ ID NO: 2485731 - RNA, 19 nt, Homo sapiens
  misc_RNA (1)...(19): siRNA sense strand
cugcaggagcaaaccaaau

SEQ ID NO: 2485732 - RNA, 19 nt, Homo sapiens
  misc_RNA (1)...(19): siRNA sense strand
gaggagaacuucaagcaga

SEQ ID NO: 2485733 - RNA, 19 nt, Homo sapiens
  misc_RNA (1)...(19): siRNA sense strand
aaaccaaauucacgcgcaa

SEQ ID NO: 2485734 - RNA, 19 nt, Homo sapiens
  misc_RNA (1)...(19): siRNA sense strand
ucuaugacaugaugggcaa

SEQ ID NO: 2485735 - RNA, 19 nt, Homo sapiens
  misc_RNA (1)...(19): siRNA sense strand
aggagaacuucaagcagau

SEQ ID NO: 2485736 - RNA, 19 nt, Homo sapiens
  misc_RNA (1)...(19): siRNA sense strand
cugcaggagcaaaccaaau

SEQ ID NO: 2485737 - RNA, 19 nt, Homo sapiens
  misc_RNA (1)...(19): siRNA sense strand
gaggagaacuucaagcaga

SEQ ID NO: 2485738 - RNA, 19 nt, Homo sapiens
  misc_RNA (1)...(19): siRNA sense strand
aaaccaaauucacgcgcaa

SEQ ID NO: 2485739 - RNA, 19 nt, Homo sapiens
  misc_RNA (1)...(19): siRNA sense strand
ucuaugacaugaugggcaa

SEQ ID NO: 2485740 - RNA, 19 nt, Homo sapiens
  misc_RNA (1)...(19): siRNA sense strand
aggagaacuucaagcagau

SEQ ID NO: 2485741 - RNA, 19 nt, Homo sapiens
  misc_RNA (1)...(19): siRNA sense strand
cugcaggagcaaaccaaau

SEQ ID NO: 2485742 - RNA, 19 nt, Homo sapiens
  misc_RNA (1)...(19): siRNA sense strand
gaggagaacuucaagcaga

SEQ ID NO: 2485743 - RNA, 19 nt, Homo sapiens
  misc_RNA (1)...(19): siRNA sense strand
aaaccaaauucacgcgcaa

SEQ ID NO: 2485744 - RNA, 19 nt, Homo sapiens
  misc_RNA (1)...(19): siRNA sense strand
ucuaugacaugaugggcaa

SEQ ID NO: 2485745 - RNA, 19 nt, Homo sapiens
  misc_RNA (1)...(19): siRNA sense strand
aggagaacuucaagcagau

SEQ ID NO: 2485746 - RNA, 19 nt, Homo sapiens
  misc_RNA (1)...(19): siRNA sense strand
cugcaggagcaaaccaaau

SEQ ID NO: 2485747 - RNA, 19 nt, Homo sapiens
  misc_RNA (1)...(19): siRNA sense strand
gaggagaacuucaagcaga

SEQ ID NO: 2485748 - RNA, 19 nt, Homo sapiens
  misc_RNA (1)...(19): siRNA sense strand
aaaccaaauucacgcgcaa

SEQ ID NO: 2485749 - RNA, 19 nt, Homo sapiens
  misc_RNA (1)...(19): siRNA sense strand
ucuaugacaugaugggcaa

SEQ ID NO: 2485750 - RNA, 19 nt, Homo sapiens
  misc_RNA (1)...(19): siRNA sense strand
aggagaacuucaagcagau

SEQ ID NO: 2485751 - RNA, 19 nt, Homo sapiens
  misc_RNA (1)...(19): siRNA sense strand
cugcaggagcaaaccaaau

SEQ ID NO: 2485752 - RNA, 19 nt, Homo sapiens
  misc_RNA (1)...(19): siRNA sense strand
gaggagaacuucaagcaga

SEQ ID NO: 2485753 - RNA, 19 nt, Homo sapiens
  misc_RNA (1)...(19): siRNA sense strand
aaaccaaauucacgcgcaa

SEQ ID NO: 2485754 - RNA, 19 nt, Homo sapiens
  misc_RNA (1)...(19): siRNA sense strand
ucuaugacaugaugggcaa

SEQ ID NO: 2485755 - RNA, 19 nt, Homo sapiens
  misc_RNA (1)...(19): siRNA sense strand
aggagaacuucaagcagau

SEQ ID NO: 2485756 - RNA, 19 nt, Homo sapiens
  misc_RNA (1)...(19): siRNA sense strand
cugcaggagcaaaccaaau

SEQ ID NO: 2485757 - RNA, 19 nt, Homo sapiens
  misc_RNA (1)...(19): siRNA sense strand
aaaccaaauucacgcgcaa

SEQ ID NO: 2485758 - RNA, 19 nt, Homo sapiens
  misc_RNA (1)...(19): siRNA sense strand
cugcaggagcaaaccaaau

SEQ ID NO: 2485759 - RNA, 19 nt, Homo sapiens
  misc_RNA (1)...(19): siRNA sense strand
gggagagagugaagggaca

SEQ ID NO: 2485760 - RNA, 19 nt, Homo sapiens
  misc_RNA (1)...(19): siRNA sense strand
ccaggauggcaguggauga

SEQ ID NO: 2485761 - RNA, 19 nt, Homo sapiens
  misc_RNA (1)...(19): siRNA sense strand
cuccaaagaucaaggccau

SEQ ID NO: 2485762 - RNA, 19 nt, Homo sapiens
  misc_RNA (1)...(19): siRNA sense strand
acgaaaucugcuuuggaaa

SEQ ID NO: 2485763 - RNA, 19 nt, Homo sapiens
  misc_RNA (1)...(19): siRNA sense strand
gagugaagggacacgggaa

SEQ ID NO: 2485764 - RNA, 19 nt, Homo sapiens
  misc_RNA (1)...(19): siRNA sense strand
agauugaccugcagacaca

SEQ ID NO: 2485765 - RNA, 19 nt, Homo sapiens
  misc_RNA (1)...(19): siRNA sense strand
aagaagaagcaucgagacu

SEQ ID NO: 2485766 - RNA, 19 nt, Homo sapiens
  misc_RNA (1)...(19): siRNA sense strand
acacaguacagcacgaaau

SEQ ID NO: 2485767 - RNA, 19 nt, Homo sapiens
  misc_RNA (1)...(19): siRNA sense strand
ggagaagcaucaugugcca

SEQ ID NO: 2485768 - RNA, 19 nt, Homo sapiens
  misc_RNA (1)...(19): siRNA sense strand
aggacaugcaagagaucau

SEQ ID NO: 2485769 - RNA, 19 nt, Homo sapiens
  misc_RNA (1)...(19): siRNA sense strand
cugcaacuccaaagaucaa

SEQ ID NO: 2485770 - RNA, 19 nt, Homo sapiens
  misc_RNA (1)...(19): siRNA sense strand
ccauaacccaggagaccau

SEQ ID NO: 2485771 - RNA, 19 nt, Homo sapiens
  misc_RNA (1)...(19): siRNA sense strand
cgggaagaaucaaagucga

SEQ ID NO: 2485772 - RNA, 19 nt, Homo sapiens
  misc_RNA (1)...(19): siRNA sense strand
accaagugcugcugggcau

SEQ ID NO: 2485773 - RNA, 19 nt, Homo sapiens
  misc_RNA (1)...(19): siRNA sense strand
caggagaccaucaacggaa

SEQ ID NO: 2485774 - RNA, 19 nt, Homo sapiens
  misc_RNA (1)...(19): siRNA sense strand
aguucuuugucaagugaau

SEQ ID NO: 2485775 - RNA, 19 nt, Homo sapiens
  misc_RNA (1)...(19): siRNA sense strand
gggagagagugaagggaca

SEQ ID NO: 2485776 - RNA, 19 nt, Homo sapiens
  misc_RNA (1)...(19): siRNA sense strand
cuccaaagaucaaggccau

SEQ ID NO: 2485777 - RNA, 19 nt, Homo sapiens
  misc_RNA (1)...(19): siRNA sense strand
acgaaaucugcuuuggaaa

SEQ ID NO: 2485778 - RNA, 19 nt, Homo sapiens
  misc_RNA (1)...(19): siRNA sense strand
gagugaagggacacgggaa

SEQ ID NO: 2485779 - RNA, 19 nt, Homo sapiens
  misc_RNA (1)...(19): siRNA sense strand
agauugaccugcagacaca

SEQ ID NO: 2485780 - RNA, 19 nt, Homo sapiens
  misc_RNA (1)...(19): siRNA sense strand
aagaagaagcaucgagacu

SEQ ID NO: 2485781 - RNA, 19 nt, Homo sapiens
  misc_RNA (1)...(19): siRNA sense strand
acacaguacagcacgaaau

SEQ ID NO: 2485782 - RNA, 19 nt, Homo sapiens
  misc_RNA (1)...(19): siRNA sense strand
ggagaagcaucaugugcca

SEQ ID NO: 2485783 - RNA, 19 nt, Homo sapiens
  misc_RNA (1)...(19): siRNA sense strand
aggacaugcaagagaucau

SEQ ID NO: 2485784 - RNA, 19 nt, Homo sapiens
  misc_RNA (1)...(19): siRNA sense strand
cugcaacuccaaagaucaa

SEQ ID NO: 2485785 - RNA, 19 nt, Homo sapiens
  misc_RNA (1)...(19): siRNA sense strand
ccauaacccaggagaccau

SEQ ID NO: 2485786 - RNA, 19 nt, Homo sapiens
  misc_RNA (1)...(19): siRNA sense strand
cgggaagaaucaaagucga

SEQ ID NO: 2485787 - RNA, 19 nt, Homo sapiens
  misc_RNA (1)...(19): siRNA sense strand
accaagugcugcugggcau

SEQ ID NO: 2485788 - RNA, 19 nt, Homo sapiens
  misc_RNA (1)...(19): siRNA sense strand
caggagaccaucaacggaa

SEQ ID NO: 2485789 - RNA, 19 nt, Homo sapiens
  misc_RNA (1)...(19): siRNA sense strand
aguucuuugucaagugaau

SEQ ID NO: 2485790 - RNA, 19 nt, Homo sapiens
  misc_RNA (1)...(19): siRNA sense strand
agugaaagaaagugacaaa

SEQ ID NO: 2485791 - RNA, 19 nt, Homo sapiens
  misc_RNA (1)...(19): siRNA sense strand
gaagaaacaucaaaggaga

SEQ ID NO: 2485792 - RNA, 19 nt, Homo sapiens
  misc_RNA (1)...(19): siRNA sense strand
agaggaaggccgagagaga

SEQ ID NO: 2485793 - RNA, 19 nt, Homo sapiens
  misc_RNA (1)...(19): siRNA sense strand
cuuuaaggauucagaguca

SEQ ID NO: 2485794 - RNA, 19 nt, Homo sapiens
  misc_RNA (1)...(19): siRNA sense strand
gagaugagcuggcgggagu

SEQ ID NO: 2485795 - RNA, 19 nt, Homo sapiens
  misc_RNA (1)...(19): siRNA sense strand
caauaacagaagcaggaaa

SEQ ID NO: 2485796 - RNA, 19 nt, Homo sapiens
  misc_RNA (1)...(19): siRNA sense strand
ccacagacuacguugaaau

SEQ ID NO: 2485797 - RNA, 19 nt, Homo sapiens
  misc_RNA (1)...(19): siRNA sense strand
gguuaaugaaggagaaauc

SEQ ID NO: 2485798 - RNA, 19 nt, Homo sapiens
  misc_RNA (1)...(19): siRNA sense strand
agcaaaacccaaagagaaa

SEQ ID NO: 2485799 - RNA, 19 nt, Homo sapiens
  misc_RNA (1)...(19): siRNA sense strand
gaugagaaggaauggaaaa

SEQ ID NO: 2485800 - RNA, 19 nt, Homo sapiens
  misc_RNA (1)...(19): siRNA sense strand
agaacauggugaagagagu

SEQ ID NO: 2485801 - RNA, 19 nt, Homo sapiens
  misc_RNA (1)...(19): siRNA sense strand
ugacaaacuaguugcaaca

SEQ ID NO: 2485802 - RNA, 19 nt, Homo sapiens
  misc_RNA (1)...(19): siRNA sense strand
ggccaaacaacuagcaaaa

SEQ ID NO: 2485803 - RNA, 19 nt, Homo sapiens
  misc_RNA (1)...(19): siRNA sense strand
aaaucugggaacugggaaa

SEQ ID NO: 2485804 - RNA, 19 nt, Homo sapiens
  misc_RNA (1)...(19): siRNA sense strand
aagaaacaucaaaggagaa

SEQ ID NO: 2485805 - RNA, 19 nt, Homo sapiens
  misc_RNA (1)...(19): siRNA sense strand
ccaaggaauaucagaagau

SEQ ID NO: 2485806 - RNA, 19 nt, Homo sapiens
  misc_RNA (1)...(19): siRNA sense strand
ggauguagguggaggaugg

SEQ ID NO: 2485807 - RNA, 19 nt, Homo sapiens
  misc_RNA (1)...(19): siRNA sense strand
cguugcaagcugagaugaa

SEQ ID NO: 2485808 - RNA, 19 nt, Homo sapiens
  misc_RNA (1)...(19): siRNA sense strand
caguaaucucagaaaguga

SEQ ID NO: 2485809 - RNA, 19 nt, Homo sapiens
  misc_RNA (1)...(19): siRNA sense strand
ggcagaacagccaaagaaa

SEQ ID NO: 2485810 - RNA, 19 nt, Homo sapiens
  misc_RNA (1)...(19): siRNA sense strand
acaaacagaacauggugaa

SEQ ID NO: 2485811 - RNA, 19 nt, Homo sapiens
  misc_RNA (1)...(19): siRNA sense strand
gaggauggcuggaaggaag

SEQ ID NO: 2485812 - RNA, 19 nt, Homo sapiens
  misc_RNA (1)...(19): siRNA sense strand
gcccaaagaaacacaaaca

SEQ ID NO: 2485813 - RNA, 19 nt, Homo sapiens
  misc_RNA (1)...(19): siRNA sense strand
aaauagagcagaagugcga

SEQ ID NO: 2485814 - RNA, 19 nt, Homo sapiens
  misc_RNA (1)...(19): siRNA sense strand
ggaaagaggaaggccgaga

SEQ ID NO: 2485815 - RNA, 19 nt, Homo sapiens
  misc_RNA (1)...(19): siRNA sense strand
uggccaaacaacuagcaaa

SEQ ID NO: 2485816 - RNA, 19 nt, Homo sapiens
  misc_RNA (1)...(19): siRNA sense strand
uagcaaaacccaaagagaa

SEQ ID NO: 2485817 - RNA, 19 nt, Homo sapiens
  misc_RNA (1)...(19): siRNA sense strand
agaugagaaggaauggaaa

SEQ ID NO: 2485818 - RNA, 19 nt, Homo sapiens
  misc_RNA (1)...(19): siRNA sense strand
gaucaauuuucuuguggaa

SEQ ID NO: 2485819 - RNA, 19 nt, Homo sapiens
  misc_RNA (1)...(19): siRNA sense strand
ccagguuggcaguggcaau

SEQ ID NO: 2485820 - RNA, 19 nt, Homo sapiens
  misc_RNA (1)...(19): siRNA sense strand
ggaaaacuggaaagaggaa

SEQ ID NO: 2485821 - RNA, 19 nt, Homo sapiens
  misc_RNA (1)...(19): siRNA sense strand
uggcgggagucaugauauu

SEQ ID NO: 2485822 - RNA, 19 nt, Homo sapiens
  misc_RNA (1)...(19): siRNA sense strand
guucaguuccaguggcuau

SEQ ID NO: 2485823 - RNA, 19 nt, Homo sapiens
  misc_RNA (1)...(19): siRNA sense strand
ccaaagaaacacaaacacu

SEQ ID NO: 2485824 - RNA, 19 nt, Homo sapiens
  misc_RNA (1)...(19): siRNA sense strand
uggacuuaguagaaauaga

SEQ ID NO: 2485825 - RNA, 19 nt, Homo sapiens
  misc_RNA (1)...(19): siRNA sense strand
aggaaacagucgugcuagu

SEQ ID NO: 2485826 - RNA, 19 nt, Homo sapiens
  misc_RNA (1)...(19): siRNA sense strand
acuuggacuuaguagaaau

SEQ ID NO: 2485827 - RNA, 19 nt, Homo sapiens
  misc_RNA (1)...(19): siRNA sense strand
cuaucaaggugaaacagau

SEQ ID NO: 2485828 - RNA, 19 nt, Homo sapiens
  misc_RNA (1)...(19): siRNA sense strand
uuacgaaacgauugcagaa

SEQ ID NO: 2485829 - RNA, 19 nt, Homo sapiens
  misc_RNA (1)...(19): siRNA sense strand
acgaaacgauugcagaaaa

SEQ ID NO: 2485830 - RNA, 19 nt, Homo sapiens
  misc_RNA (1)...(19): siRNA sense strand
caaugaugcaauaacagaa

SEQ ID NO: 2485831 - RNA, 19 nt, Homo sapiens
  misc_RNA (1)...(19): siRNA sense strand
aaacaucaaaggagaacga

SEQ ID NO: 2485832 - RNA, 19 nt, Homo sapiens
  misc_RNA (1)...(19): siRNA sense strand
gcuuugaagaggaauuuau

SEQ ID NO: 2485833 - RNA, 19 nt, Homo sapiens
  misc_RNA (1)...(19): siRNA sense strand
acuaguugcaacaaguaaa

SEQ ID NO: 2485834 - RNA, 19 nt, Homo sapiens
  misc_RNA (1)...(19): siRNA sense strand
cuacaagacaaacagaaca

SEQ ID NO: 2485835 - RNA, 19 nt, Homo sapiens
  misc_RNA (1)...(19): siRNA sense strand
gcuggagcccaaagaaaca

SEQ ID NO: 2485836 - RNA, 19 nt, Homo sapiens
  misc_RNA (1)...(19): siRNA sense strand
uggagcagcaagugcaauu

SEQ ID NO: 2485837 - RNA, 19 nt, Homo sapiens
  misc_RNA (1)...(19): siRNA sense strand
gacgguuaaugaaggagaa

SEQ ID NO: 2485838 - RNA, 19 nt, Homo sapiens
  misc_RNA (1)...(19): siRNA sense strand
cuaccaaggaccagcaacu

SEQ ID NO: 2485839 - RNA, 19 nt, Homo sapiens
  misc_RNA (1)...(19): siRNA sense strand
ccaucauuguuggagauua

SEQ ID NO: 2485840 - RNA, 19 nt, Homo sapiens
  misc_RNA (1)...(19): siRNA sense strand
ggaagaaacaucaaaggag

SEQ ID NO: 2485841 - RNA, 19 nt, Homo sapiens
  misc_RNA (1)...(19): siRNA sense strand
ggaaguucaccaaggccau

SEQ ID NO: 2485842 - RNA, 19 nt, Homo sapiens
  misc_RNA (1)...(19): siRNA sense strand
ugcugaaccuggaaauaau

SEQ ID NO: 2485843 - RNA, 19 nt, Homo sapiens
  misc_RNA (1)...(19): siRNA sense strand
gugacaaacuaguugcaac

SEQ ID NO: 2485844 - RNA, 19 nt, Homo sapiens
  misc_RNA (1)...(19): siRNA sense strand
uggcuaucaaggugaaaca

SEQ ID NO: 2485845 - RNA, 19 nt, Homo sapiens
  misc_RNA (1)...(19): siRNA sense strand
agauaauauuggaggugaa

SEQ ID NO: 2485846 - RNA, 19 nt, Homo sapiens
  misc_RNA (1)...(19): siRNA sense strand
acaagaaauacaaggaaga

SEQ ID NO: 2485847 - RNA, 19 nt, Homo sapiens
  misc_RNA (1)...(19): siRNA sense strand
aggaacaaaccuuggaaau

SEQ ID NO: 2485848 - RNA, 19 nt, Homo sapiens
  misc_RNA (1)...(19): siRNA sense strand
uggaaagauugugaagaaa

SEQ ID NO: 2485849 - RNA, 19 nt, Homo sapiens
  misc_RNA (1)...(19): siRNA sense strand
cugaagaacuguaggcauc

SEQ ID NO: 2485850 - RNA, 19 nt, Homo sapiens
  misc_RNA (1)...(19): siRNA sense strand
gugaagaaacacagucaau

SEQ ID NO: 2485851 - RNA, 19 nt, Homo sapiens
  misc_RNA (1)...(19): siRNA sense strand
auguaguggcucagauaaa

SEQ ID NO: 2485852 - RNA, 19 nt, Homo sapiens
  misc_RNA (1)...(19): siRNA sense strand
agcaagugucucagauaaa

SEQ ID NO: 2485853 - RNA, 19 nt, Homo sapiens
  misc_RNA (1)...(19): siRNA sense strand
ggcagaauguaguggcuca

SEQ ID NO: 2485854 - RNA, 19 nt, Homo sapiens
  misc_RNA (1)...(19): siRNA sense strand
guaaacugucugaggacuu

SEQ ID NO: 2485855 - RNA, 19 nt, Homo sapiens
  misc_RNA (1)...(19): siRNA sense strand
acauauugcaacagaagau

SEQ ID NO: 2485856 - RNA, 19 nt, Homo sapiens
  misc_RNA (1)...(19): siRNA sense strand
uuggaggugaagaggguaa

SEQ ID NO: 2485857 - RNA, 19 nt, Homo sapiens
  misc_RNA (1)...(19): siRNA sense strand
uucaauuggaagagguuaa

SEQ ID NO: 2485858 - RNA, 19 nt, Homo sapiens
  misc_RNA (1)...(19): siRNA sense strand
gguggaggauucacgggaa

SEQ ID NO: 2485859 - RNA, 19 nt, Homo sapiens
  misc_RNA (1)...(19): siRNA sense strand
acgaugaacauguuagaca

SEQ ID NO: 2485860 - RNA, 19 nt, Homo sapiens
  misc_RNA (1)...(19): siRNA sense strand
ccguuggccuguuggauga

SEQ ID NO: 2485861 - RNA, 19 nt, Homo sapiens
  misc_RNA (1)...(19): siRNA sense strand
cuuacuacauauugcaaca

SEQ ID NO: 2485862 - RNA, 19 nt, Homo sapiens
  misc_RNA (1)...(19): siRNA sense strand
cuaaggaacuugaugucca

SEQ ID NO: 2485863 - RNA, 19 nt, Homo sapiens
  misc_RNA (1)...(19): siRNA sense strand
ugacaugugacaaugaaau

SEQ ID NO: 2485864 - RNA, 19 nt, Homo sapiens
  misc_RNA (1)...(19): siRNA sense strand
ccugaagaacuguaggcau

SEQ ID NO: 2485865 - RNA, 19 nt, Homo sapiens
  misc_RNA (1)...(19): siRNA sense strand
cagcuguacuugagauuuu

SEQ ID NO: 2485866 - RNA, 19 nt, Homo sapiens
  misc_RNA (1)...(19): siRNA sense strand
ggugaagaggguaacauga

SEQ ID NO: 2485867 - RNA, 19 nt, Homo sapiens
  misc_RNA (1)...(19): siRNA sense strand
aaacacagucaauggcaga

SEQ ID NO: 2485868 - RNA, 19 nt, Homo sapiens
  misc_RNA (1)...(19): siRNA sense strand
cuuggaaugugcuaaggaa

SEQ ID NO: 2485869 - RNA, 19 nt, Homo sapiens
  misc_RNA (1)...(19): siRNA sense strand
ucuacacagugaagugcaa

SEQ ID NO: 2485870 - RNA, 19 nt, Homo sapiens
  misc_RNA (1)...(19): siRNA sense strand
caaaaguuggagugaauau

SEQ ID NO: 2485871 - RNA, 19 nt, Homo sapiens
  misc_RNA (1)...(19): siRNA sense strand
gagcugaaugugggagauu

SEQ ID NO: 2485872 - RNA, 19 nt, Homo sapiens
  misc_RNA (1)...(19): siRNA sense strand
uggaaugugcuaaggaacu

SEQ ID NO: 2485873 - RNA, 19 nt, Homo sapiens
  misc_RNA (1)...(19): siRNA sense strand
guuagacauugguggagga

SEQ ID NO: 2485874 - RNA, 19 nt, Homo sapiens
  misc_RNA (1)...(19): siRNA sense strand
agaagauaauauuggaggu

SEQ ID NO: 2485875 - RNA, 19 nt, Homo sapiens
  misc_RNA (1)...(19): siRNA sense strand
augcaagaugcuggaauua

SEQ ID NO: 2485876 - RNA, 19 nt, Homo sapiens
  misc_RNA (1)...(19): siRNA sense strand
agauaauauuggaggugaa

SEQ ID NO: 2485877 - RNA, 19 nt, Homo sapiens
  misc_RNA (1)...(19): siRNA sense strand
acaagaaauacaaggaaga

SEQ ID NO: 2485878 - RNA, 19 nt, Homo sapiens
  misc_RNA (1)...(19): siRNA sense strand
aggaacaaaccuuggaaau

SEQ ID NO: 2485879 - RNA, 19 nt, Homo sapiens
  misc_RNA (1)...(19): siRNA sense strand
uggaaagauugugaagaaa

SEQ ID NO: 2485880 - RNA, 19 nt, Homo sapiens
  misc_RNA (1)...(19): siRNA sense strand
cugaagaacuguaggcauc

SEQ ID NO: 2485881 - RNA, 19 nt, Homo sapiens
  misc_RNA (1)...(19): siRNA sense strand
gugaagaaacacagucaau

SEQ ID NO: 2485882 - RNA, 19 nt, Homo sapiens
  misc_RNA (1)...(19): siRNA sense strand
auguaguggcucagauaaa

SEQ ID NO: 2485883 - RNA, 19 nt, Homo sapiens
  misc_RNA (1)...(19): siRNA sense strand
agcaagugucucagauaaa

SEQ ID NO: 2485884 - RNA, 19 nt, Homo sapiens
  misc_RNA (1)...(19): siRNA sense strand
ggcagaauguaguggcuca

SEQ ID NO: 2485885 - RNA, 19 nt, Homo sapiens
  misc_RNA (1)...(19): siRNA sense strand
guaaacugucugaggacuu

SEQ ID NO: 2485886 - RNA, 19 nt, Homo sapiens
  misc_RNA (1)...(19): siRNA sense strand
acauauugcaacagaagau

SEQ ID NO: 2485887 - RNA, 19 nt, Homo sapiens
  misc_RNA (1)...(19): siRNA sense strand
uuggaggugaagaggguaa

SEQ ID NO: 2485888 - RNA, 19 nt, Homo sapiens
  misc_RNA (1)...(19): siRNA sense strand
uucaauuggaagagguuaa

SEQ ID NO: 2485889 - RNA, 19 nt, Homo sapiens
  misc_RNA (1)...(19): siRNA sense strand
gguggaggauucacgggaa

SEQ ID NO: 2485890 - RNA, 19 nt, Homo sapiens
  misc_RNA (1)...(19): siRNA sense strand
acgaugaacauguuagaca

SEQ ID NO: 2485891 - RNA, 19 nt, Homo sapiens
  misc_RNA (1)...(19): siRNA sense strand
ccguuggccuguuggauga

SEQ ID NO: 2485892 - RNA, 19 nt, Homo sapiens
  misc_RNA (1)...(19): siRNA sense strand
cuuacuacauauugcaaca

SEQ ID NO: 2485893 - RNA, 19 nt, Homo sapiens
  misc_RNA (1)...(19): siRNA sense strand
cuaaggaacuugaugucca

SEQ ID NO: 2485894 - RNA, 19 nt, Homo sapiens
  misc_RNA (1)...(19): siRNA sense strand
ugacaugugacaaugaaau

SEQ ID NO: 2485895 - RNA, 19 nt, Homo sapiens
  misc_RNA (1)...(19): siRNA sense strand
ccugaagaacuguaggcau

SEQ ID NO: 2485896 - RNA, 19 nt, Homo sapiens
  misc_RNA (1)...(19): siRNA sense strand
cagcuguacuugagauuuu

SEQ ID NO: 2485897 - RNA, 19 nt, Homo sapiens
  misc_RNA (1)...(19): siRNA sense strand
ggugaagaggguaacauga

SEQ ID NO: 2485898 - RNA, 19 nt, Homo sapiens
  misc_RNA (1)...(19): siRNA sense strand
aaacacagucaauggcaga

SEQ ID NO: 2485899 - RNA, 19 nt, Homo sapiens
  misc_RNA (1)...(19): siRNA sense strand
cuuggaaugugcuaaggaa

SEQ ID NO: 2485900 - RNA, 19 nt, Homo sapiens
  misc_RNA (1)...(19): siRNA sense strand
ucuacacagugaagugcaa

SEQ ID NO: 2485901 - RNA, 19 nt, Homo sapiens
  misc_RNA (1)...(19): siRNA sense strand
caaaaguuggagugaauau

SEQ ID NO: 2485902 - RNA, 19 nt, Homo sapiens
  misc_RNA (1)...(19): siRNA sense strand
gagcugaaugugggagauu

SEQ ID NO: 2485903 - RNA, 19 nt, Homo sapiens
  misc_RNA (1)...(19): siRNA sense strand
uggaaugugcuaaggaacu

SEQ ID NO: 2485904 - RNA, 19 nt, Homo sapiens
  misc_RNA (1)...(19): siRNA sense strand
guuagacauugguggagga

SEQ ID NO: 2485905 - RNA, 19 nt, Homo sapiens
  misc_RNA (1)...(19): siRNA sense strand
agaagauaauauuggaggu

SEQ ID NO: 2485906 - RNA, 19 nt, Homo sapiens
  misc_RNA (1)...(19): siRNA sense strand
augcaagaugcuggaauua

SEQ ID NO: 2485907 - RNA, 19 nt, Homo sapiens
  misc_RNA (1)...(19): siRNA sense strand
gugccgaggaggaggaaga

SEQ ID NO: 2485908 - RNA, 19 nt, Homo sapiens
  misc_RNA (1)...(19): siRNA sense strand
ccgaggaggaggaagaaaa

SEQ ID NO: 2485909 - RNA, 19 nt, Homo sapiens
  misc_RNA (1)...(19): siRNA sense strand
gcgagacagaagagcagaa

SEQ ID NO: 2485910 - RNA, 19 nt, Homo sapiens
  misc_RNA (1)...(19): siRNA sense strand
ggacaagggcuuugccacu

SEQ ID NO: 2485911 - RNA, 19 nt, Homo sapiens
  misc_RNA (1)...(19): siRNA sense strand
gcgcaggacaagagcgugu

SEQ ID NO: 2485912 - RNA, 19 nt, Homo sapiens
  misc_RNA (1)...(19): siRNA sense strand
cgacgcaugaaguggaaaa

SEQ ID NO: 2485913 - RNA, 19 nt, Homo sapiens
  misc_RNA (1)...(19): siRNA sense strand
acggagaggcagaucaaga

SEQ ID NO: 2485914 - RNA, 19 nt, Homo sapiens
  misc_RNA (1)...(19): siRNA sense strand
ccguggaugcagcggauga

SEQ ID NO: 2485915 - RNA, 19 nt, Homo sapiens
  misc_RNA (1)...(19): siRNA sense strand
gcgagacagaagagcagaa

SEQ ID NO: 2485916 - RNA, 19 nt, Homo sapiens
  misc_RNA (1)...(19): siRNA sense strand
ggacaagggcuuugccacu

SEQ ID NO: 2485917 - RNA, 19 nt, Homo sapiens
  misc_RNA (1)...(19): siRNA sense strand
gcgcaggacaagagcgugu

SEQ ID NO: 2485918 - RNA, 19 nt, Homo sapiens
  misc_RNA (1)...(19): siRNA sense strand
ccguggaugcagcggauga

SEQ ID NO: 2485919 - RNA, 19 nt, Homo sapiens
  misc_RNA (1)...(19): siRNA sense strand
gugccgaggaggaggaaga

SEQ ID NO: 2485920 - RNA, 19 nt, Homo sapiens
  misc_RNA (1)...(19): siRNA sense strand
ccgaggaggaggaagaaaa

SEQ ID NO: 2485921 - RNA, 19 nt, Homo sapiens
  misc_RNA (1)...(19): siRNA sense strand
gcgagacagaagagcagaa

SEQ ID NO: 2485922 - RNA, 19 nt, Homo sapiens
  misc_RNA (1)...(19): siRNA sense strand
ggacaagggcuuugccacu

SEQ ID NO: 2485923 - RNA, 19 nt, Homo sapiens
  misc_RNA (1)...(19): siRNA sense strand
gcgcaggacaagagcgugu

SEQ ID NO: 2485924 - RNA, 19 nt, Homo sapiens
  misc_RNA (1)...(19): siRNA sense strand
cgacgcaugaaguggaaaa

SEQ ID NO: 2485925 - RNA, 19 nt, Homo sapiens
  misc_RNA (1)...(19): siRNA sense strand
acggagaggcagaucaaga

SEQ ID NO: 2485926 - RNA, 19 nt, Homo sapiens
  misc_RNA (1)...(19): siRNA sense strand
ccguggaugcagcggauga

SEQ ID NO: 2485927 - RNA, 19 nt, Homo sapiens
  misc_RNA (1)...(19): siRNA sense strand
aggaagaagcggaggucaa

SEQ ID NO: 2485928 - RNA, 19 nt, Homo sapiens
  misc_RNA (1)...(19): siRNA sense strand
agucagaggaagagagcga

SEQ ID NO: 2485929 - RNA, 19 nt, Homo sapiens
  misc_RNA (1)...(19): siRNA sense strand
aaauagaaauggaagcaga

SEQ ID NO: 2485930 - RNA, 19 nt, Homo sapiens
  misc_RNA (1)...(19): siRNA sense strand
aggaagagagcgagacaga

SEQ ID NO: 2485931 - RNA, 19 nt, Homo sapiens
  misc_RNA (1)...(19): siRNA sense strand
agagaguggccaagaggaa

SEQ ID NO: 2485932 - RNA, 19 nt, Homo sapiens
  misc_RNA (1)...(19): siRNA sense strand
agccaaaggcagagggcga

SEQ ID NO: 2485933 - RNA, 19 nt, Homo sapiens
  misc_RNA (1)...(19): siRNA sense strand
cgaugaggagagugaagaa

SEQ ID NO: 2485934 - RNA, 19 nt, Homo sapiens
  misc_RNA (1)...(19): siRNA sense strand
agggagaaacugaggcaga

SEQ ID NO: 2485935 - RNA, 19 nt, Homo sapiens
  misc_RNA (1)...(19): siRNA sense strand
ggagauagaaagcgaggca

SEQ ID NO: 2485936 - RNA, 19 nt, Homo sapiens
  misc_RNA (1)...(19): siRNA sense strand
aagcagagagaguggccaa

SEQ ID NO: 2485937 - RNA, 19 nt, Homo sapiens
  misc_RNA (1)...(19): siRNA sense strand
aggucaagguggagcagga

SEQ ID NO: 2485938 - RNA, 19 nt, Homo sapiens
  misc_RNA (1)...(19): siRNA sense strand
aggaagagagcgagucaga

SEQ ID NO: 2485939 - RNA, 19 nt, Homo sapiens
  misc_RNA (1)...(19): siRNA sense strand
agagcgagacagaggaaga

SEQ ID NO: 2485940 - RNA, 19 nt, Homo sapiens
  misc_RNA (1)...(19): siRNA sense strand
augaaucagcugagccaaa

SEQ ID NO: 2485941 - RNA, 19 nt, Homo sapiens
  misc_RNA (1)...(19): siRNA sense strand
agagcgagucagaggaaga

SEQ ID NO: 2485942 - RNA, 19 nt, Homo sapiens
  misc_RNA (1)...(19): siRNA sense strand
aaauggaagcagagagagu

SEQ ID NO: 2485943 - RNA, 19 nt, Homo sapiens
  misc_RNA (1)...(19): siRNA sense strand
cagcugagccaaaggcaga

SEQ ID NO: 2485944 - RNA, 19 nt, Homo sapiens
  misc_RNA (1)...(19): siRNA sense strand
caguggugccagugaagaa

SEQ ID NO: 2485945 - RNA, 19 nt, Homo sapiens
  misc_RNA (1)...(19): siRNA sense strand
auuaagaagcaaagacuca

SEQ ID NO: 2485946 - RNA, 19 nt, Homo sapiens
  misc_RNA (1)...(19): siRNA sense strand
agucggaggaagagagcga

SEQ ID NO: 2485947 - RNA, 19 nt, Homo sapiens
  misc_RNA (1)...(19): siRNA sense strand
caaccaagaagaaggggaa

SEQ ID NO: 2485948 - RNA, 19 nt, Homo sapiens
  misc_RNA (1)...(19): siRNA sense strand
ugacugagauacuggcaga

SEQ ID NO: 2485949 - RNA, 19 nt, Homo sapiens
  misc_RNA (1)...(19): siRNA sense strand
gggaagagagugagucgga

SEQ ID NO: 2485950 - RNA, 19 nt, Homo sapiens
  misc_RNA (1)...(19): siRNA sense strand
agagugaggaugagagcga

SEQ ID NO: 2485951 - RNA, 19 nt, Homo sapiens
  misc_RNA (1)...(19): siRNA sense strand
aagcaaagacucaggugga

SEQ ID NO: 2485952 - RNA, 19 nt, Homo sapiens
  misc_RNA (1)...(19): siRNA sense strand
gcgaggaagaaauggagga

SEQ ID NO: 2485953 - RNA, 19 nt, Homo sapiens
  misc_RNA (1)...(19): siRNA sense strand
aagaaaguucagaaaguga

SEQ ID NO: 2485954 - RNA, 19 nt, Homo sapiens
  misc_RNA (1)...(19): siRNA sense strand
agguggagcaggagaggga

SEQ ID NO: 2485955 - RNA, 19 nt, Homo sapiens
  misc_RNA (1)...(19): siRNA sense strand
uguuuauacagcaggaauu

SEQ ID NO: 2485956 - RNA, 19 nt, Homo sapiens
  misc_RNA (1)...(19): siRNA sense strand
agagggagauagaaagcga

SEQ ID NO: 2485957 - RNA, 19 nt, Homo sapiens
  misc_RNA (1)...(19): siRNA sense strand
aggcaggggaagagaguga

SEQ ID NO: 2485958 - RNA, 19 nt, Homo sapiens
  misc_RNA (1)...(19): siRNA sense strand
aggaugagcaagaaagcga

SEQ ID NO: 2485959 - RNA, 19 nt, Homo sapiens
  misc_RNA (1)...(19): siRNA sense strand
agaggaagagagugaggau

SEQ ID NO: 2485960 - RNA, 19 nt, Homo sapiens
  misc_RNA (1)...(19): siRNA sense strand
acagcaggaauuuaagaaa

SEQ ID NO: 2485961 - RNA, 19 nt, Homo sapiens
  misc_RNA (1)...(19): siRNA sense strand
ggagcaggagagggagaua

SEQ ID NO: 2485962 - RNA, 19 nt, Homo sapiens
  misc_RNA (1)...(19): siRNA sense strand
agagcgaugaggagaguga

SEQ ID NO: 2485963 - RNA, 19 nt, Homo sapiens
  misc_RNA (1)...(19): siRNA sense strand
agaggaagagagcgagaca

SEQ ID NO: 2485964 - RNA, 19 nt, Homo sapiens
  misc_RNA (1)...(19): siRNA sense strand
aggcagagggcgaugagga

SEQ ID NO: 2485965 - RNA, 19 nt, Homo sapiens
  misc_RNA (1)...(19): siRNA sense strand
ugaucgaauugguggaaag

SEQ ID NO: 2485966 - RNA, 19 nt, Homo sapiens
  misc_RNA (1)...(19): siRNA sense strand
aagcggaggucaaggugga

SEQ ID NO: 2485967 - RNA, 19 nt, Homo sapiens
  misc_RNA (1)...(19): siRNA sense strand
guggagcaggagagggaga

SEQ ID NO: 2485968 - RNA, 19 nt, Homo sapiens
  misc_RNA (1)...(19): siRNA sense strand
aagaaauggaggaugagca

SEQ ID NO: 2485969 - RNA, 19 nt, Homo sapiens
  misc_RNA (1)...(19): siRNA sense strand
gcaagaaagcgaggccgaa

SEQ ID NO: 2485970 - RNA, 19 nt, Homo sapiens
  misc_RNA (1)...(19): siRNA sense strand
ggaaggaagaagcggaggu

SEQ ID NO: 2485971 - RNA, 19 nt, Homo sapiens
  misc_RNA (1)...(19): siRNA sense strand
ccgaauacguccacggcuc

SEQ ID NO: 2485972 - RNA, 19 nt, Homo sapiens
  misc_RNA (1)...(19): siRNA sense strand
agaaauagaaauggaagca

SEQ ID NO: 2485973 - RNA, 19 nt, Homo sapiens
  misc_RNA (1)...(19): siRNA sense strand
agcucagacccuaaaguaa

SEQ ID NO: 2485974 - RNA, 19 nt, Homo sapiens
  misc_RNA (1)...(19): siRNA sense strand
aagacagcgaggaagaaau

SEQ ID NO: 2485975 - RNA, 19 nt, Homo sapiens
  misc_RNA (1)...(19): siRNA sense strand
ggagggagaaacugaggca

SEQ ID NO: 2485976 - RNA, 19 nt, Homo sapiens
  misc_RNA (1)...(19): siRNA sense strand
agaaagugaauuugaccca

SEQ ID NO: 2485977 - RNA, 19 nt, Homo sapiens
  misc_RNA (1)...(19): siRNA sense strand
ucagaggaagagagcgaga

SEQ ID NO: 2485978 - RNA, 19 nt, Homo sapiens
  misc_RNA (1)...(19): siRNA sense strand
gggcuugauuugaguaccu

SEQ ID NO: 2485979 - RNA, 19 nt, Homo sapiens
  misc_RNA (1)...(19): siRNA sense strand
agcaggaauuuaagaaagu

SEQ ID NO: 2485980 - RNA, 19 nt, Homo sapiens
  misc_RNA (1)...(19): siRNA sense strand
cugagauacuggcagacau

SEQ ID NO: 2485981 - RNA, 19 nt, Homo sapiens
  misc_RNA (1)...(19): siRNA sense strand
gggacaaagccuagugcca

SEQ ID NO: 2485982 - RNA, 19 nt, Homo sapiens
  misc_RNA (1)...(19): siRNA sense strand
gaagacaguaauugggaga

SEQ ID NO: 2485983 - RNA, 19 nt, Homo sapiens
  misc_RNA (1)...(19): siRNA sense strand
agauggaaagugaggaaga

SEQ ID NO: 2485984 - RNA, 19 nt, Homo sapiens
  misc_RNA (1)...(19): siRNA sense strand
ucugaaaagaagauggaaa

SEQ ID NO: 2485985 - RNA, 19 nt, Homo sapiens
  misc_RNA (1)...(19): siRNA sense strand
acuacuagacagaaaggua

SEQ ID NO: 2485986 - RNA, 19 nt, Homo sapiens
  misc_RNA (1)...(19): siRNA sense strand
caacagagaaacagcgacu

SEQ ID NO: 2485987 - RNA, 19 nt, Homo sapiens
  misc_RNA (1)...(19): siRNA sense strand
acaaguaugauguggcaau

SEQ ID NO: 2485988 - RNA, 19 nt, Homo sapiens
  misc_RNA (1)...(19): siRNA sense strand
cuggagacucuaaggauau

SEQ ID NO: 2485989 - RNA, 19 nt, Homo sapiens
  misc_RNA (1)...(19): siRNA sense strand
cugaaacacaucaaagcaa

SEQ ID NO: 2485990 - RNA, 19 nt, Homo sapiens
  misc_RNA (1)...(19): siRNA sense strand
uaaaagauaaagaggggua

SEQ ID NO: 2485991 - RNA, 19 nt, Homo sapiens
  misc_RNA (1)...(19): siRNA sense strand
aaguauugcuucugggacu

SEQ ID NO: 2485992 - RNA, 19 nt, Homo sapiens
  misc_RNA (1)...(19): siRNA sense strand
cugaaguggaagggacaaa

SEQ ID NO: 2485993 - RNA, 19 nt, Homo sapiens
  misc_RNA (1)...(19): siRNA sense strand
gaaauguacgagagcgcau

SEQ ID NO: 2485994 - RNA, 19 nt, Homo sapiens
  misc_RNA (1)...(19): siRNA sense strand
aagccuagugccacagaaa

SEQ ID NO: 2485995 - RNA, 19 nt, Homo sapiens
  misc_RNA (1)...(19): siRNA sense strand
gacaaagccuagugccaca

SEQ ID NO: 2485996 - RNA, 19 nt, Homo sapiens
  misc_RNA (1)...(19): siRNA sense strand
uaguagaacuggacccuga

SEQ ID NO: 2485997 - RNA, 19 nt, Homo sapiens
  misc_RNA (1)...(19): siRNA sense strand
guaaaugacccucagcgua

SEQ ID NO: 2485998 - RNA, 19 nt, Homo sapiens
  misc_RNA (1)...(19): siRNA sense strand
ccuucaaauuacaguacca

SEQ ID NO: 2485999 - RNA, 19 nt, Homo sapiens
  misc_RNA (1)...(19): siRNA sense strand
guggaagggacaaagccua

SEQ ID NO: 2486000 - RNA, 19 nt, Homo sapiens
  misc_RNA (1)...(19): siRNA sense strand
agcgacuacuagacagaaa

SEQ ID NO: 2486001 - RNA, 19 nt, Homo sapiens
  misc_RNA (1)...(19): siRNA sense strand
guacgagagcgcaucgcaa

SEQ ID NO: 2486002 - RNA, 19 nt, Homo sapiens
  misc_RNA (1)...(19): siRNA sense strand
caaugaagauucuggagac

SEQ ID NO: 2486003 - RNA, 19 nt, Homo sapiens
  misc_RNA (1)...(19): siRNA sense strand
ggcccgucgcacugaaaua

SEQ ID NO: 2486004 - RNA, 19 nt, Homo sapiens
  misc_RNA (1)...(19): siRNA sense strand
agguugacauuguaggaaa

SEQ ID NO: 2486005 - RNA, 19 nt, Homo sapiens
  misc_RNA (1)...(19): siRNA sense strand
gguuaauaauucaugccaa

SEQ ID NO: 2486006 - RNA, 19 nt, Homo sapiens
  misc_RNA (1)...(19): siRNA sense strand
ccaugaugaaauugagaau

SEQ ID NO: 2486007 - RNA, 19 nt, Homo sapiens
  misc_RNA (1)...(19): siRNA sense strand
cuuuaaaacuggauugcaa

SEQ ID NO: 2486008 - RNA, 19 nt, Homo sapiens
  misc_RNA (1)...(19): siRNA sense strand
gagaauuugcagagcacau

SEQ ID NO: 2486009 - RNA, 19 nt, Homo sapiens
  misc_RNA (1)...(19): siRNA sense strand
gaugaauggagaaaagaaa

SEQ ID NO: 2486010 - RNA, 19 nt, Homo sapiens
  misc_RNA (1)...(19): siRNA sense strand
gaguauuaagauauggcua

SEQ ID NO: 2486011 - RNA, 19 nt, Homo sapiens
  misc_RNA (1)...(19): siRNA sense strand
aaauugagaauguggccaa

SEQ ID NO: 2486012 - RNA, 19 nt, Homo sapiens
  misc_RNA (1)...(19): siRNA sense strand
aguuguagaugaauggaga

SEQ ID NO: 2486013 - RNA, 19 nt, Homo sapiens
  misc_RNA (1)...(19): siRNA sense strand
auuugauagagauggguua

SEQ ID NO: 2486014 - RNA, 19 nt, Homo sapiens
  misc_RNA (1)...(19): siRNA sense strand
aggaaauauucaagcuacu

SEQ ID NO: 2486015 - RNA, 19 nt, Homo sapiens
  misc_RNA (1)...(19): siRNA sense strand
cugaacauaguguggauau

SEQ ID NO: 2486016 - RNA, 19 nt, Homo sapiens
  misc_RNA (1)...(19): siRNA sense strand
aaaugaagugucugaugaa

SEQ ID NO: 2486017 - RNA, 19 nt, Homo sapiens
  misc_RNA (1)...(19): siRNA sense strand
ugauucgagaagaaggaua

SEQ ID NO: 2486018 - RNA, 19 nt, Homo sapiens
  misc_RNA (1)...(19): siRNA sense strand
uuauguaucaggagaccaa

SEQ ID NO: 2486019 - RNA, 19 nt, Homo sapiens
  misc_RNA (1)...(19): siRNA sense strand
uuguagaugaauggagaaa

SEQ ID NO: 2486020 - RNA, 19 nt, Homo sapiens
  misc_RNA (1)...(19): siRNA sense strand
augaagugucugaugaaga

SEQ ID NO: 2486021 - RNA, 19 nt, Homo sapiens
  misc_RNA (1)...(19): siRNA sense strand
uugcagaaaugauucgaga

SEQ ID NO: 2486022 - RNA, 19 nt, Homo sapiens
  misc_RNA (1)...(19): siRNA sense strand
guggauauugauuggccua

SEQ ID NO: 2486023 - RNA, 19 nt, Homo sapiens
  misc_RNA (1)...(19): siRNA sense strand
uugcaauauugauggaugu

SEQ ID NO: 2486024 - RNA, 19 nt, Homo sapiens
  misc_RNA (1)...(19): siRNA sense strand
ccgagaauuugcagagcac

SEQ ID NO: 2486025 - RNA, 19 nt, Homo sapiens
  misc_RNA (1)...(19): siRNA sense strand
gacaagacugggauggaga

SEQ ID NO: 2486026 - RNA, 19 nt, Homo sapiens
  misc_RNA (1)...(19): siRNA sense strand
uuggcaaagagaagcuuaa

SEQ ID NO: 2486027 - RNA, 19 nt, Homo sapiens
  misc_RNA (1)...(19): siRNA sense strand
gcaaaauggaagucagugu

SEQ ID NO: 2486028 - RNA, 19 nt, Homo sapiens
  misc_RNA (1)...(19): siRNA sense strand
ucagaggaacauugggaaa

SEQ ID NO: 2486029 - RNA, 19 nt, Homo sapiens
  misc_RNA (1)...(19): siRNA sense strand
gggaauaagaagaacuguu

SEQ ID NO: 2486030 - RNA, 19 nt, Homo sapiens
  misc_RNA (1)...(19): siRNA sense strand
caucucaggcauugguaaa

SEQ ID NO: 2486031 - RNA, 19 nt, Homo sapiens
  misc_RNA (1)...(19): siRNA sense strand
aggcauugguaaagggauc

SEQ ID NO: 2486032 - RNA, 19 nt, Homo sapiens
  misc_RNA (1)...(19): siRNA sense strand
ggauagcugaguuggaaau

SEQ ID NO: 2486033 - RNA, 19 nt, Homo sapiens
  misc_RNA (1)...(19): siRNA sense strand
cuggagaagaucacugaaa

SEQ ID NO: 2486034 - RNA, 19 nt, Homo sapiens
  misc_RNA (1)...(19): siRNA sense strand
cuuuggaaucagaggaaca

SEQ ID NO: 2486035 - RNA, 19 nt, Homo sapiens
  misc_RNA (1)...(19): siRNA sense strand
uuggagacaucgaaggaau

SEQ ID NO: 2486036 - RNA, 19 nt, Homo sapiens
  misc_RNA (1)...(19): siRNA sense strand
uaaggaaacuuuaugguga

SEQ ID NO: 2486037 - RNA, 19 nt, Homo sapiens
  misc_RNA (1)...(19): siRNA sense strand
ccauagcccugguuggcaa

SEQ ID NO: 2486038 - RNA, 19 nt, Homo sapiens
  misc_RNA (1)...(19): siRNA sense strand
caggcgauuucuugggcaa

SEQ ID NO: 2486039 - RNA, 19 nt, Homo sapiens
  misc_RNA (1)...(19): siRNA sense strand
uugauaugcccgagcacaa

SEQ ID NO: 2486040 - RNA, 19 nt, Homo sapiens
  misc_RNA (1)...(19): siRNA sense strand
cgucuuaaaugauggugga

SEQ ID NO: 2486041 - RNA, 19 nt, Homo sapiens
  misc_RNA (1)...(19): siRNA sense strand
uggcaauuugggaggaaca

SEQ ID NO: 2486042 - RNA, 19 nt, Homo sapiens
  misc_RNA (1)...(19): siRNA sense strand
agugauagaguuugcaaga

SEQ ID NO: 2486043 - RNA, 19 nt, Homo sapiens
  misc_RNA (1)...(19): siRNA sense strand
gagacugggaauaagaaga

SEQ ID NO: 2486044 - RNA, 19 nt, Homo sapiens
  misc_RNA (1)...(19): siRNA sense strand
cagugcuaccggagaacaa

SEQ ID NO: 2486045 - RNA, 19 nt, Homo sapiens
  misc_RNA (1)...(19): siRNA sense strand
ggaacaaugagacugggaa

SEQ ID NO: 2486046 - RNA, 19 nt, Homo sapiens
  misc_RNA (1)...(19): siRNA sense strand
ggugauuaccuggggaaaa

SEQ ID NO: 2486047 - RNA, 19 nt, Homo sapiens
  misc_RNA (1)...(19): siRNA sense strand
aggcgaaaagagagaauuu

SEQ ID NO: 2486048 - RNA, 19 nt, Homo sapiens
  misc_RNA (1)...(19): siRNA sense strand
aaggaaacuuuauggugau

SEQ ID NO: 2486049 - RNA, 19 nt, Homo sapiens
  misc_RNA (1)...(19): siRNA sense strand
gggaguuugucuugggaug

SEQ ID NO: 2486050 - RNA, 19 nt, Homo sapiens
  misc_RNA (1)...(19): siRNA sense strand
aggauagcugaguuggaaa

SEQ ID NO: 2486051 - RNA, 19 nt, Homo sapiens
  misc_RNA (1)...(19): siRNA sense strand
cggugauucugcaaguaau

SEQ ID NO: 2486052 - RNA, 19 nt, Homo sapiens
  misc_RNA (1)...(19): siRNA sense strand
uagaagaaagacacagaca

SEQ ID NO: 2486053 - RNA, 19 nt, Homo sapiens
  misc_RNA (1)...(19): siRNA sense strand
gguuaugaaucaagccaag

SEQ ID NO: 2486054 - RNA, 19 nt, Homo sapiens
  misc_RNA (1)...(19): siRNA sense strand
gguaaagggaucauugcca

SEQ ID NO: 2486055 - RNA, 19 nt, Homo sapiens
  misc_RNA (1)...(19): siRNA sense strand
aguugaaucugauguacau

SEQ ID NO: 2486056 - RNA, 19 nt, Homo sapiens
  misc_RNA (1)...(19): siRNA sense strand
ggaagauauaucagcaugu

SEQ ID NO: 2486057 - RNA, 19 nt, Homo sapiens
  misc_RNA (1)...(19): siRNA sense strand
ggguuaugaaucaagccaa

SEQ ID NO: 2486058 - RNA, 19 nt, Homo sapiens
  misc_RNA (1)...(19): siRNA sense strand
uaugcaaagcugaugguau

SEQ ID NO: 2486059 - RNA, 19 nt, Homo sapiens
  misc_RNA (1)...(19): siRNA sense strand
agauggccgugaaggagaa

SEQ ID NO: 2486060 - RNA, 19 nt, Homo sapiens
  misc_RNA (1)...(19): siRNA sense strand
ggcuuuggaaucagaggaa

SEQ ID NO: 2486061 - RNA, 19 nt, Homo sapiens
  misc_RNA (1)...(19): siRNA sense strand
gaaagaugcugauuccaca

SEQ ID NO: 2486062 - RNA, 19 nt, Homo sapiens
  misc_RNA (1)...(19): siRNA sense strand
gucaggauguugauggaga

SEQ ID NO: 2486063 - RNA, 19 nt, Homo sapiens
  misc_RNA (1)...(19): siRNA sense strand
ggugauucugcaaguaauu

SEQ ID NO: 2486064 - RNA, 19 nt, Homo sapiens
  misc_RNA (1)...(19): siRNA sense strand
ugggaaaacuccaggcgau

SEQ ID NO: 2486065 - RNA, 19 nt, Homo sapiens
  misc_RNA (1)...(19): siRNA sense strand
agaagaaagacacagacau

SEQ ID NO: 2486066 - RNA, 19 nt, Homo sapiens
  misc_RNA (1)...(19): siRNA sense strand
uccacagaguuuaggccaa

SEQ ID NO: 2486067 - RNA, 19 nt, Homo sapiens
  misc_RNA (1)...(19): siRNA sense strand
gagauggccgugaaggaga

SEQ ID NO: 2486068 - RNA, 19 nt, Homo sapiens
  misc_RNA (1)...(19): siRNA sense strand
uggcagaagcuaugcaaag

SEQ ID NO: 2486069 - RNA, 19 nt, Homo sapiens
  misc_RNA (1)...(19): siRNA sense strand
cagaggaacauugggaaaa

SEQ ID NO: 2486070 - RNA, 19 nt, Homo sapiens
  misc_RNA (1)...(19): siRNA sense strand
uauagaagaaagacacaga

SEQ ID NO: 2486071 - RNA, 19 nt, Homo sapiens
  misc_RNA (1)...(19): siRNA sense strand
ggaaaucauugaacuggca

SEQ ID NO: 2486072 - RNA, 19 nt, Homo sapiens
  misc_RNA (1)...(19): siRNA sense strand
aaaucauugaacuggcaaa

SEQ ID NO: 2486073 - RNA, 19 nt, Homo sapiens
  misc_RNA (1)...(19): siRNA sense strand
ucagaggaacauugggaaa

SEQ ID NO: 2486074 - RNA, 19 nt, Homo sapiens
  misc_RNA (1)...(19): siRNA sense strand
gggaauaagaagaacuguu

SEQ ID NO: 2486075 - RNA, 19 nt, Homo sapiens
  misc_RNA (1)...(19): siRNA sense strand
caucucaggcauugguaaa

SEQ ID NO: 2486076 - RNA, 19 nt, Homo sapiens
  misc_RNA (1)...(19): siRNA sense strand
aggcauugguaaagggauc

SEQ ID NO: 2486077 - RNA, 19 nt, Homo sapiens
  misc_RNA (1)...(19): siRNA sense strand
ggauagcugaguuggaaau

SEQ ID NO: 2486078 - RNA, 19 nt, Homo sapiens
  misc_RNA (1)...(19): siRNA sense strand
cuggagaagaucacugaaa

SEQ ID NO: 2486079 - RNA, 19 nt, Homo sapiens
  misc_RNA (1)...(19): siRNA sense strand
cuuuggaaucagaggaaca

SEQ ID NO: 2486080 - RNA, 19 nt, Homo sapiens
  misc_RNA (1)...(19): siRNA sense strand
uuggagacaucgaaggaau

SEQ ID NO: 2486081 - RNA, 19 nt, Homo sapiens
  misc_RNA (1)...(19): siRNA sense strand
uaaggaaacuuuaugguga

SEQ ID NO: 2486082 - RNA, 19 nt, Homo sapiens
  misc_RNA (1)...(19): siRNA sense strand
ccauagcccugguuggcaa

SEQ ID NO: 2486083 - RNA, 19 nt, Homo sapiens
  misc_RNA (1)...(19): siRNA sense strand
caggcgauuucuugggcaa

SEQ ID NO: 2486084 - RNA, 19 nt, Homo sapiens
  misc_RNA (1)...(19): siRNA sense strand
uugauaugcccgagcacaa

SEQ ID NO: 2486085 - RNA, 19 nt, Homo sapiens
  misc_RNA (1)...(19): siRNA sense strand
cgucuuaaaugauggugga

SEQ ID NO: 2486086 - RNA, 19 nt, Homo sapiens
  misc_RNA (1)...(19): siRNA sense strand
uggcaauuugggaggaaca

SEQ ID NO: 2486087 - RNA, 19 nt, Homo sapiens
  misc_RNA (1)...(19): siRNA sense strand
agugauagaguuugcaaga

SEQ ID NO: 2486088 - RNA, 19 nt, Homo sapiens
  misc_RNA (1)...(19): siRNA sense strand
gagacugggaauaagaaga

SEQ ID NO: 2486089 - RNA, 19 nt, Homo sapiens
  misc_RNA (1)...(19): siRNA sense strand
cagugcuaccggagaacaa

SEQ ID NO: 2486090 - RNA, 19 nt, Homo sapiens
  misc_RNA (1)...(19): siRNA sense strand
ggaacaaugagacugggaa

SEQ ID NO: 2486091 - RNA, 19 nt, Homo sapiens
  misc_RNA (1)...(19): siRNA sense strand
ggugauuaccuggggaaaa

SEQ ID NO: 2486092 - RNA, 19 nt, Homo sapiens
  misc_RNA (1)...(19): siRNA sense strand
aggcgaaaagagagaauuu

SEQ ID NO: 2486093 - RNA, 19 nt, Homo sapiens
  misc_RNA (1)...(19): siRNA sense strand
aaggaaacuuuauggugau

SEQ ID NO: 2486094 - RNA, 19 nt, Homo sapiens
  misc_RNA (1)...(19): siRNA sense strand
gggaguuugucuugggaug

SEQ ID NO: 2486095 - RNA, 19 nt, Homo sapiens
  misc_RNA (1)...(19): siRNA sense strand
aggauagcugaguuggaaa

SEQ ID NO: 2486096 - RNA, 19 nt, Homo sapiens
  misc_RNA (1)...(19): siRNA sense strand
cggugauucugcaaguaau

SEQ ID NO: 2486097 - RNA, 19 nt, Homo sapiens
  misc_RNA (1)...(19): siRNA sense strand
uagaagaaagacacagaca

SEQ ID NO: 2486098 - RNA, 19 nt, Homo sapiens
  misc_RNA (1)...(19): siRNA sense strand
gguuaugaaucaagccaag

SEQ ID NO: 2486099 - RNA, 19 nt, Homo sapiens
  misc_RNA (1)...(19): siRNA sense strand
gguaaagggaucauugcca

SEQ ID NO: 2486100 - RNA, 19 nt, Homo sapiens
  misc_RNA (1)...(19): siRNA sense strand
aguugaaucugauguacau

SEQ ID NO: 2486101 - RNA, 19 nt, Homo sapiens
  misc_RNA (1)...(19): siRNA sense strand
ggaagauauaucagcaugu

SEQ ID NO: 2486102 - RNA, 19 nt, Homo sapiens
  misc_RNA (1)...(19): siRNA sense strand
ggguuaugaaucaagccaa

SEQ ID NO: 2486103 - RNA, 19 nt, Homo sapiens
  misc_RNA (1)...(19): siRNA sense strand
uaugcaaagcugaugguau

SEQ ID NO: 2486104 - RNA, 19 nt, Homo sapiens
  misc_RNA (1)...(19): siRNA sense strand
agauggccgugaaggagaa

SEQ ID NO: 2486105 - RNA, 19 nt, Homo sapiens
  misc_RNA (1)...(19): siRNA sense strand
ggcuuuggaaucagaggaa

SEQ ID NO: 2486106 - RNA, 19 nt, Homo sapiens
  misc_RNA (1)...(19): siRNA sense strand
gaaagaugcugauuccaca

SEQ ID NO: 2486107 - RNA, 19 nt, Homo sapiens
  misc_RNA (1)...(19): siRNA sense strand
gucaggauguugauggaga

SEQ ID NO: 2486108 - RNA, 19 nt, Homo sapiens
  misc_RNA (1)...(19): siRNA sense strand
ggugauucugcaaguaauu

SEQ ID NO: 2486109 - RNA, 19 nt, Homo sapiens
  misc_RNA (1)...(19): siRNA sense strand
ugggaaaacuccaggcgau

SEQ ID NO: 2486110 - RNA, 19 nt, Homo sapiens
  misc_RNA (1)...(19): siRNA sense strand
agaagaaagacacagacau

SEQ ID NO: 2486111 - RNA, 19 nt, Homo sapiens
  misc_RNA (1)...(19): siRNA sense strand
uccacagaguuuaggccaa

SEQ ID NO: 2486112 - RNA, 19 nt, Homo sapiens
  misc_RNA (1)...(19): siRNA sense strand
gagauggccgugaaggaga

SEQ ID NO: 2486113 - RNA, 19 nt, Homo sapiens
  misc_RNA (1)...(19): siRNA sense strand
uggcagaagcuaugcaaag

SEQ ID NO: 2486114 - RNA, 19 nt, Homo sapiens
  misc_RNA (1)...(19): siRNA sense strand
cagaggaacauugggaaaa

SEQ ID NO: 2486115 - RNA, 19 nt, Homo sapiens
  misc_RNA (1)...(19): siRNA sense strand
uauagaagaaagacacaga

SEQ ID NO: 2486116 - RNA, 19 nt, Homo sapiens
  misc_RNA (1)...(19): siRNA sense strand
ggaaaucauugaacuggca

SEQ ID NO: 2486117 - RNA, 19 nt, Homo sapiens
  misc_RNA (1)...(19): siRNA sense strand
aaaucauugaacuggcaaa

SEQ ID NO: 2486118 - RNA, 19 nt, Homo sapiens
  misc_RNA (1)...(19): siRNA sense strand
ggaagaaacaccauggcaa

SEQ ID NO: 2486119 - RNA, 19 nt, Homo sapiens
  misc_RNA (1)...(19): siRNA sense strand
caccauggcaagaggaaca

SEQ ID NO: 2486120 - RNA, 19 nt, Homo sapiens
  misc_RNA (1)...(19): siRNA sense strand
ccagagagcugauggggau

SEQ ID NO: 2486121 - RNA, 19 nt, Homo sapiens
  misc_RNA (1)...(19): siRNA sense strand
gcuccuggaaagagugaau

SEQ ID NO: 2486122 - RNA, 19 nt, Homo sapiens
  misc_RNA (1)...(19): siRNA sense strand
aggggaaacacgaaacaua

SEQ ID NO: 2486123 - RNA, 19 nt, Homo sapiens
  misc_RNA (1)...(19): siRNA sense strand
gaagaaacaccauggcaag

SEQ ID NO: 2486124 - RNA, 19 nt, Homo sapiens
  misc_RNA (1)...(19): siRNA sense strand
ggaagaaacaccauggcaa

SEQ ID NO: 2486125 - RNA, 19 nt, Homo sapiens
  misc_RNA (1)...(19): siRNA sense strand
caccauggcaagaggaaca

SEQ ID NO: 2486126 - RNA, 19 nt, Homo sapiens
  misc_RNA (1)...(19): siRNA sense strand
ccagagagcugauggggau

SEQ ID NO: 2486127 - RNA, 19 nt, Homo sapiens
  misc_RNA (1)...(19): siRNA sense strand
gcuccuggaaagagugaau

SEQ ID NO: 2486128 - RNA, 19 nt, Homo sapiens
  misc_RNA (1)...(19): siRNA sense strand
aggggaaacacgaaacaua

SEQ ID NO: 2486129 - RNA, 19 nt, Homo sapiens
  misc_RNA (1)...(19): siRNA sense strand
gaagaaacaccauggcaag

SEQ ID NO: 2486130 - RNA, 19 nt, Homo sapiens
  misc_RNA (1)...(19): siRNA sense strand
ucugagaaagagugggaaa

SEQ ID NO: 2486131 - RNA, 19 nt, Homo sapiens
  misc_RNA (1)...(19): siRNA sense strand
agaugaaagccucggagaa

SEQ ID NO: 2486132 - RNA, 19 nt, Homo sapiens
  misc_RNA (1)...(19): siRNA sense strand
agagaaaguaugaggccau

SEQ ID NO: 2486133 - RNA, 19 nt, Homo sapiens
  misc_RNA (1)...(19): siRNA sense strand
guguauaugaagagaaagu

SEQ ID NO: 2486134 - RNA, 19 nt, Homo sapiens
  misc_RNA (1)...(19): siRNA sense strand
ggaaaugauucgaagggag

SEQ ID NO: 2486135 - RNA, 19 nt, Homo sapiens
  misc_RNA (1)...(19): siRNA sense strand
cucaaauaccagagaagau

SEQ ID NO: 2486136 - RNA, 19 nt, Homo sapiens
  misc_RNA (1)...(19): siRNA sense strand
ucggcaggcuccagggaau

SEQ ID NO: 2486137 - RNA, 19 nt, Homo sapiens
  misc_RNA (1)...(19): siRNA sense strand
gaaaugauucgaagggagu

SEQ ID NO: 2486138 - RNA, 19 nt, Homo sapiens
  misc_RNA (1)...(19): siRNA sense strand
guaauaaacgggucgcaga

SEQ ID NO: 2486139 - RNA, 19 nt, Homo sapiens
  misc_RNA (1)...(19): siRNA sense strand
gagagaaagcaacugguga

SEQ ID NO: 2486140 - RNA, 19 nt, Homo sapiens
  misc_RNA (1)...(19): siRNA sense strand
agccagcagaggaaggaaa

SEQ ID NO: 2486141 - RNA, 19 nt, Homo sapiens
  misc_RNA (1)...(19): siRNA sense strand
acuaaauaccucugagaag

SEQ ID NO: 2486142 - RNA, 19 nt, Homo sapiens
  misc_RNA (1)...(19): siRNA sense strand
auaccagagaagaugcaaa

SEQ ID NO: 2486143 - RNA, 19 nt, Homo sapiens
  misc_RNA (1)...(19): siRNA sense strand
guacggagaccuaggguug

SEQ ID NO: 2486144 - RNA, 19 nt, Homo sapiens
  misc_RNA (1)...(19): siRNA sense strand
cugagaaagagugggaaaa

SEQ ID NO: 2486145 - RNA, 19 nt, Homo sapiens
  misc_RNA (1)...(19): siRNA sense strand
ccgaagaucacgcccgaga

SEQ ID NO: 2486146 - RNA, 19 nt, Homo sapiens
  misc_RNA (1)...(19): siRNA sense strand
ccgagaagccagcagagga

SEQ ID NO: 2486147 - RNA, 19 nt, Homo sapiens
  misc_RNA (1)...(19): siRNA sense strand
ccacagaacaaugggaaac

SEQ ID NO: 2486148 - RNA, 19 nt, Homo sapiens
  misc_RNA (1)...(19): siRNA sense strand
aaacaugccuggacccaca

SEQ ID NO: 2486149 - RNA, 19 nt, Homo sapiens
  misc_RNA (1)...(19): siRNA sense strand
aaguaugaggccaugacua

SEQ ID NO: 2486150 - RNA, 19 nt, Homo sapiens
  misc_RNA (1)...(19): siRNA sense strand
ggaaggaaaugauucgaag

SEQ ID NO: 2486151 - RNA, 19 nt, Homo sapiens
  misc_RNA (1)...(19): siRNA sense strand
ucugagaaagagugggaaa

SEQ ID NO: 2486152 - RNA, 19 nt, Homo sapiens
  misc_RNA (1)...(19): siRNA sense strand
agaugaaagccucggagaa

SEQ ID NO: 2486153 - RNA, 19 nt, Homo sapiens
  misc_RNA (1)...(19): siRNA sense strand
agagaaaguaugaggccau

SEQ ID NO: 2486154 - RNA, 19 nt, Homo sapiens
  misc_RNA (1)...(19): siRNA sense strand
guguauaugaagagaaagu

SEQ ID NO: 2486155 - RNA, 19 nt, Homo sapiens
  misc_RNA (1)...(19): siRNA sense strand
ggaaaugauucgaagggag

SEQ ID NO: 2486156 - RNA, 19 nt, Homo sapiens
  misc_RNA (1)...(19): siRNA sense strand
cucaaauaccagagaagau

SEQ ID NO: 2486157 - RNA, 19 nt, Homo sapiens
  misc_RNA (1)...(19): siRNA sense strand
ucggcaggcuccagggaau

SEQ ID NO: 2486158 - RNA, 19 nt, Homo sapiens
  misc_RNA (1)...(19): siRNA sense strand
gaaaugauucgaagggagu

SEQ ID NO: 2486159 - RNA, 19 nt, Homo sapiens
  misc_RNA (1)...(19): siRNA sense strand
guaauaaacgggucgcaga

SEQ ID NO: 2486160 - RNA, 19 nt, Homo sapiens
  misc_RNA (1)...(19): siRNA sense strand
gagagaaagcaacugguga

SEQ ID NO: 2486161 - RNA, 19 nt, Homo sapiens
  misc_RNA (1)...(19): siRNA sense strand
agccagcagaggaaggaaa

SEQ ID NO: 2486162 - RNA, 19 nt, Homo sapiens
  misc_RNA (1)...(19): siRNA sense strand
acuaaauaccucugagaag

SEQ ID NO: 2486163 - RNA, 19 nt, Homo sapiens
  misc_RNA (1)...(19): siRNA sense strand
auaccagagaagaugcaaa

SEQ ID NO: 2486164 - RNA, 19 nt, Homo sapiens
  misc_RNA (1)...(19): siRNA sense strand
guacggagaccuaggguug

SEQ ID NO: 2486165 - RNA, 19 nt, Homo sapiens
  misc_RNA (1)...(19): siRNA sense strand
cugagaaagagugggaaaa

SEQ ID NO: 2486166 - RNA, 19 nt, Homo sapiens
  misc_RNA (1)...(19): siRNA sense strand
ccgaagaucacgcccgaga

SEQ ID NO: 2486167 - RNA, 19 nt, Homo sapiens
  misc_RNA (1)...(19): siRNA sense strand
ccgagaagccagcagagga

SEQ ID NO: 2486168 - RNA, 19 nt, Homo sapiens
  misc_RNA (1)...(19): siRNA sense strand
ccacagaacaaugggaaac

SEQ ID NO: 2486169 - RNA, 19 nt, Homo sapiens
  misc_RNA (1)...(19): siRNA sense strand
aaacaugccuggacccaca

SEQ ID NO: 2486170 - RNA, 19 nt, Homo sapiens
  misc_RNA (1)...(19): siRNA sense strand
aaguaugaggccaugacua

SEQ ID NO: 2486171 - RNA, 19 nt, Homo sapiens
  misc_RNA (1)...(19): siRNA sense strand
ggaaggaaaugauucgaag

SEQ ID NO: 2486172 - RNA, 19 nt, Homo sapiens
  misc_RNA (1)...(19): siRNA sense strand
ggucagauguugaaggcca

SEQ ID NO: 2486173 - RNA, 19 nt, Homo sapiens
  misc_RNA (1)...(19): siRNA sense strand
aggaaggauggcagagaca

SEQ ID NO: 2486174 - RNA, 19 nt, Homo sapiens
  misc_RNA (1)...(19): siRNA sense strand
agacauugaaucagaaacu

SEQ ID NO: 2486175 - RNA, 19 nt, Homo sapiens
  misc_RNA (1)...(19): siRNA sense strand
ugagccaagaagugugaaa

SEQ ID NO: 2486176 - RNA, 19 nt, Homo sapiens
  misc_RNA (1)...(19): siRNA sense strand
ggucagauguugaaggcca

SEQ ID NO: 2486177 - RNA, 19 nt, Homo sapiens
  misc_RNA (1)...(19): siRNA sense strand
aggaaggauggcagagaca

SEQ ID NO: 2486178 - RNA, 19 nt, Homo sapiens
  misc_RNA (1)...(19): siRNA sense strand
agacauugaaucagaaacu

SEQ ID NO: 2486179 - RNA, 19 nt, Homo sapiens
  misc_RNA (1)...(19): siRNA sense strand
ugagccaagaagugugaaa

SEQ ID NO: 2486180 - RNA, 19 nt, Homo sapiens
  misc_RNA (1)...(19): siRNA sense strand
uggcacuaaccgagaauga

SEQ ID NO: 2486181 - RNA, 19 nt, Homo sapiens
  misc_RNA (1)...(19): siRNA sense strand
ccagaaaguucgucgaguc

SEQ ID NO: 2486182 - RNA, 19 nt, Homo sapiens
  misc_RNA (1)...(19): siRNA sense strand
ccggagaccaugagcucuu

SEQ ID NO: 2486183 - RNA, 19 nt, Homo sapiens
  misc_RNA (1)...(19): siRNA sense strand
cgcugagcccugaggagua

SEQ ID NO: 2486184 - RNA, 19 nt, Homo sapiens
  misc_RNA (1)...(19): siRNA sense strand
guacaaagccaaagaggag

SEQ ID NO: 2486185 - RNA, 19 nt, Homo sapiens
  misc_RNA (1)...(19): siRNA sense strand
gggccaaguacgugaugga

SEQ ID NO: 2486186 - RNA, 19 nt, Homo sapiens
  misc_RNA (1)...(19): siRNA sense strand
uuguagauucugaggauga

SEQ ID NO: 2486187 - RNA, 19 nt, Homo sapiens
  misc_RNA (1)...(19): siRNA sense strand
ccaaagaggaggaggcacc

SEQ ID NO: 2486188 - RNA, 19 nt, Homo sapiens
  misc_RNA (1)...(19): siRNA sense strand
auucugaggaugacggaga

SEQ ID NO: 2486189 - RNA, 19 nt, Homo sapiens
  misc_RNA (1)...(19): siRNA sense strand
cagagaagcucaaaccgga

SEQ ID NO: 2486190 - RNA, 19 nt, Homo sapiens
  misc_RNA (1)...(19): siRNA sense strand
gcuuagaaacaaugggcag

SEQ ID NO: 2486191 - RNA, 19 nt, Homo sapiens
  misc_RNA (1)...(19): siRNA sense strand
aguacaaagccaaagagga

SEQ ID NO: 2486192 - RNA, 19 nt, Homo sapiens
  misc_RNA (1)...(19): siRNA sense strand
gagaagcacaggaagcuca

SEQ ID NO: 2486193 - RNA, 19 nt, Homo sapiens
  misc_RNA (1)...(19): siRNA sense strand
gagaagaggaagcuggaga

SEQ ID NO: 2486194 - RNA, 19 nt, Homo sapiens
  misc_RNA (1)...(19): siRNA sense strand
aaaagaagcucauggccaa

SEQ ID NO: 2486195 - RNA, 19 nt, Homo sapiens
  misc_RNA (1)...(19): siRNA sense strand
ccaagaaauacugggaaga

SEQ ID NO: 2486196 - RNA, 19 nt, Homo sapiens
  misc_RNA (1)...(19): siRNA sense strand
cggagcuggagaagaggaa

SEQ ID NO: 2486197 - RNA, 19 nt, Homo sapiens
  misc_RNA (1)...(19): siRNA sense strand
agcaugaugaugugagcua

SEQ ID NO: 2486198 - RNA, 19 nt, Homo sapiens
  misc_RNA (1)...(19): siRNA sense strand
gaagaagauccucggggaa

SEQ ID NO: 2486199 - RNA, 19 nt, Homo sapiens
  misc_RNA (1)...(19): siRNA sense strand
acgcuuugccuuccggaaa

SEQ ID NO: 2486200 - RNA, 19 nt, Homo sapiens
  misc_RNA (1)...(19): siRNA sense strand
ugaccagaucauugacuau

SEQ ID NO: 2486201 - RNA, 19 nt, Homo sapiens
  misc_RNA (1)...(19): siRNA sense strand
cggaaaguccugggugaca

SEQ ID NO: 2486202 - RNA, 19 nt, Homo sapiens
  misc_RNA (1)...(19): siRNA sense strand
gccucaaguuccugggacu

SEQ ID NO: 2486203 - RNA, 19 nt, Homo sapiens
  misc_RNA (1)...(19): siRNA sense strand
augaagauguugaucggaa

SEQ ID NO: 2486204 - RNA, 19 nt, Homo sapiens
  misc_RNA (1)...(19): siRNA sense strand
acguagagguggugcugca

SEQ ID NO: 2486205 - RNA, 19 nt, Homo sapiens
  misc_RNA (1)...(19): siRNA sense strand
aggagaaauaaucagcaaa

SEQ ID NO: 2486206 - RNA, 19 nt, Homo sapiens
  misc_RNA (1)...(19): siRNA sense strand
auuaugaagagcugaagaa

SEQ ID NO: 2486207 - RNA, 19 nt, Homo sapiens
  misc_RNA (1)...(19): siRNA sense strand
cuugaagauuaaaggccuu

SEQ ID NO: 2486208 - RNA, 19 nt, Homo sapiens
  misc_RNA (1)...(19): siRNA sense strand
ggaucuaguaggagacaaa

SEQ ID NO: 2486209 - RNA, 19 nt, Homo sapiens
  misc_RNA (1)...(19): siRNA sense strand
agaaaauggcggaaggaaa

SEQ ID NO: 2486210 - RNA, 19 nt, Homo sapiens
  misc_RNA (1)...(19): siRNA sense strand
ucuuaaaagcugaaggaaa

SEQ ID NO: 2486211 - RNA, 19 nt, Homo sapiens
  misc_RNA (1)...(19): siRNA sense strand
gcgagcaaauagagauaau

SEQ ID NO: 2486212 - RNA, 19 nt, Homo sapiens
  misc_RNA (1)...(19): siRNA sense strand
augcaggaauccagguaaa

SEQ ID NO: 2486213 - RNA, 19 nt, Homo sapiens
  misc_RNA (1)...(19): siRNA sense strand
ggaacaacugcgagcaaau

SEQ ID NO: 2486214 - RNA, 19 nt, Homo sapiens
  misc_RNA (1)...(19): siRNA sense strand
acagaagagccauggagaa

SEQ ID NO: 2486215 - RNA, 19 nt, Homo sapiens
  misc_RNA (1)...(19): siRNA sense strand
cugcgagcaaauagagaua

SEQ ID NO: 2486216 - RNA, 19 nt, Homo sapiens
  misc_RNA (1)...(19): siRNA sense strand
uggaacaguuagaaaguca

SEQ ID NO: 2486217 - RNA, 19 nt, Homo sapiens
  misc_RNA (1)...(19): siRNA sense strand
uguaugaaacccagaggaa

SEQ ID NO: 2486218 - RNA, 19 nt, Homo sapiens
  misc_RNA (1)...(19): siRNA sense strand
gggaagucacagagcucua

SEQ ID NO: 2486219 - RNA, 19 nt, Homo sapiens
  misc_RNA (1)...(19): siRNA sense strand
ccugugacaaagugaauaa

SEQ ID NO: 2486220 - RNA, 19 nt, Homo sapiens
  misc_RNA (1)...(19): siRNA sense strand
gcagcaaaugagacacaaa

SEQ ID NO: 2486221 - RNA, 19 nt, Homo sapiens
  misc_RNA (1)...(19): siRNA sense strand
uagcaggaagugaaaguaa

SEQ ID NO: 2486222 - RNA, 19 nt, Homo sapiens
  misc_RNA (1)...(19): siRNA sense strand
cuuuauaucuuacaggcaa

SEQ ID NO: 2486223 - RNA, 19 nt, Homo sapiens
  misc_RNA (1)...(19): siRNA sense strand
cagcuggaacaguuagaaa

SEQ ID NO: 2486224 - RNA, 19 nt, Homo sapiens
  misc_RNA (1)...(19): siRNA sense strand
cugcuuuguugauuggaaa

SEQ ID NO: 2486225 - RNA, 19 nt, Homo sapiens
  misc_RNA (1)...(19): siRNA sense strand
cggugaugaggcaaagaaa

SEQ ID NO: 2486226 - RNA, 19 nt, Homo sapiens
  misc_RNA (1)...(19): siRNA sense strand
agaagcaagugcagauaca

SEQ ID NO: 2486227 - RNA, 19 nt, Homo sapiens
  misc_RNA (1)...(19): siRNA sense strand
gugaugaggcaaagaaaau

SEQ ID NO: 2486228 - RNA, 19 nt, Homo sapiens
  misc_RNA (1)...(19): siRNA sense strand
cuggaagaaugcugcguuu

SEQ ID NO: 2486229 - RNA, 19 nt, Homo sapiens
  misc_RNA (1)...(19): siRNA sense strand
uuguauagcaggaagugaa

SEQ ID NO: 2486230 - RNA, 19 nt, Homo sapiens
  misc_RNA (1)...(19): siRNA sense strand
caucaaugucagugucuau

SEQ ID NO: 2486231 - RNA, 19 nt, Homo sapiens
  misc_RNA (1)...(19): siRNA sense strand
ugguagaagcuaacaauga

SEQ ID NO: 2486232 - RNA, 19 nt, Homo sapiens
  misc_RNA (1)...(19): siRNA sense strand
cuaccuaaaugcagcuaga

SEQ ID NO: 2486233 - RNA, 19 nt, Homo sapiens
  misc_RNA (1)...(19): siRNA sense strand
caggcauacuggagacaca

SEQ ID NO: 2486234 - RNA, 19 nt, Homo sapiens
  misc_RNA (1)...(19): siRNA sense strand
ucugaaagcaugcaggaau

SEQ ID NO: 2486235 - RNA, 19 nt, Homo sapiens
  misc_RNA (1)...(19): siRNA sense strand
acaaugaacauaugguaga

SEQ ID NO: 2486236 - RNA, 19 nt, Homo sapiens
  misc_RNA (1)...(19): siRNA sense strand
guucaauagguguguugua

SEQ ID NO: 2486237 - RNA, 19 nt, Homo sapiens
  misc_RNA (1)...(19): siRNA sense strand
caguaauuguauagcagga

SEQ ID NO: 2486238 - RNA, 19 nt, Homo sapiens
  misc_RNA (1)...(19): siRNA sense strand
uaugaaacccagaggaagu

SEQ ID NO: 2486239 - RNA, 19 nt, Homo sapiens
  misc_RNA (1)...(19): siRNA sense strand
aagcuaugcuauucaguau

SEQ ID NO: 2486240 - RNA, 19 nt, Homo sapiens
  misc_RNA (1)...(19): siRNA sense strand
gugcugaugucaagggacu

SEQ ID NO: 2486241 - RNA, 19 nt, Homo sapiens
  misc_RNA (1)...(19): siRNA sense strand
guuuauucguuguguuuga

SEQ ID NO: 2486242 - RNA, 19 nt, Homo sapiens
  misc_RNA (1)...(19): siRNA sense strand
aauuacagcacuuggaaca

SEQ ID NO: 2486243 - RNA, 19 nt, Homo sapiens
  misc_RNA (1)...(19): siRNA sense strand
gcagagaagcauaaacagu

SEQ ID NO: 2486244 - RNA, 19 nt, Homo sapiens
  misc_RNA (1)...(19): siRNA sense strand
ggcauauauuugugcugua

SEQ ID NO: 2486245 - RNA, 19 nt, Homo sapiens
  misc_RNA (1)...(19): siRNA sense strand
cugaaagcaugcaggaauc

SEQ ID NO: 2486246 - RNA, 19 nt, Homo sapiens
  misc_RNA (1)...(19): siRNA sense strand
cugcaaaggaggcauauga

SEQ ID NO: 2486247 - RNA, 19 nt, Homo sapiens
  misc_RNA (1)...(19): siRNA sense strand
ggugaugaggcaaagaaaa

SEQ ID NO: 2486248 - RNA, 19 nt, Homo sapiens
  misc_RNA (1)...(19): siRNA sense strand
cauaaaagucagaguucau

SEQ ID NO: 2486249 - RNA, 19 nt, Homo sapiens
  misc_RNA (1)...(19): siRNA sense strand
aaaggaggcauaugaacaa

SEQ ID NO: 2486250 - RNA, 19 nt, Homo sapiens
  misc_RNA (1)...(19): siRNA sense strand
ccuucggugaugaggcaaa

SEQ ID NO: 2486251 - RNA, 19 nt, Homo sapiens
  misc_RNA (1)...(19): siRNA sense strand
ugccaaaggacaaguugaa

SEQ ID NO: 2486252 - RNA, 19 nt, Homo sapiens
  misc_RNA (1)...(19): siRNA sense strand
aaggaaaaguggagucuga

SEQ ID NO: 2486253 - RNA, 19 nt, Homo sapiens
  misc_RNA (1)...(19): siRNA sense strand
uagccuugauugacuguaa

SEQ ID NO: 2486254 - RNA, 19 nt, Homo sapiens
  misc_RNA (1)...(19): siRNA sense strand
aggaccuaaugaagaacaa

SEQ ID NO: 2486255 - RNA, 19 nt, Homo sapiens
  misc_RNA (1)...(19): siRNA sense strand
uuaagaaggcgaaugaaca

SEQ ID NO: 2486256 - RNA, 19 nt, Homo sapiens
  misc_RNA (1)...(19): siRNA sense strand
caggcugacuacuggaaga

SEQ ID NO: 2486257 - RNA, 19 nt, Homo sapiens
  misc_RNA (1)...(19): siRNA sense strand
auauggaucuaguaggaga

SEQ ID NO: 2486258 - RNA, 19 nt, Homo sapiens
  misc_RNA (1)...(19): siRNA sense strand
ccaaauacgcacaauacca

SEQ ID NO: 2486259 - RNA, 19 nt, Homo sapiens
  misc_RNA (1)...(19): siRNA sense strand
ucaugaagauggcgccaga

SEQ ID NO: 2486260 - RNA, 19 nt, Homo sapiens
  misc_RNA (1)...(19): siRNA sense strand
agugaagaggagucuguua

SEQ ID NO: 2486261 - RNA, 19 nt, Homo sapiens
  misc_RNA (1)...(19): siRNA sense strand
uacuggaaccugugacaaa

SEQ ID NO: 2486262 - RNA, 19 nt, Homo sapiens
  misc_RNA (1)...(19): siRNA sense strand
guuugacaccacagaaauu

SEQ ID NO: 2486263 - RNA, 19 nt, Homo sapiens
  misc_RNA (1)...(19): siRNA sense strand
cacagaaauuacagcacuu

SEQ ID NO: 2486264 - RNA, 19 nt, Homo sapiens
  misc_RNA (1)...(19): siRNA sense strand
uguauagcaggaagugaaa

SEQ ID NO: 2486265 - RNA, 19 nt, Homo sapiens
  misc_RNA (1)...(19): siRNA sense strand
caacuuuugcagacagaaa

SEQ ID NO: 2486266 - RNA, 19 nt, Homo sapiens
  misc_RNA (1)...(19): siRNA sense strand
aaaggaaagcuaugcuauu

SEQ ID NO: 2486267 - RNA, 19 nt, Homo sapiens
  misc_RNA (1)...(19): siRNA sense strand
agaaagucaguuugucuua

SEQ ID NO: 2486268 - RNA, 19 nt, Homo sapiens
  misc_RNA (1)...(19): siRNA sense strand
uggcguugugaaagcaaua

SEQ ID NO: 2486269 - RNA, 19 nt, Homo sapiens
  misc_RNA (1)...(19): siRNA sense strand
ggaaaguucaggaugccuu

SEQ ID NO: 2486270 - RNA, 19 nt, Homo sapiens
  misc_RNA (1)...(19): siRNA sense strand
ggaucuaguaggagacaaa

SEQ ID NO: 2486271 - RNA, 19 nt, Homo sapiens
  misc_RNA (1)...(19): siRNA sense strand
agaaaauggcggaaggaaa

SEQ ID NO: 2486272 - RNA, 19 nt, Homo sapiens
  misc_RNA (1)...(19): siRNA sense strand
ucuuaaaagcugaaggaaa

SEQ ID NO: 2486273 - RNA, 19 nt, Homo sapiens
  misc_RNA (1)...(19): siRNA sense strand
gcgagcaaauagagauaau

SEQ ID NO: 2486274 - RNA, 19 nt, Homo sapiens
  misc_RNA (1)...(19): siRNA sense strand
augcaggaauccagguaaa

SEQ ID NO: 2486275 - RNA, 19 nt, Homo sapiens
  misc_RNA (1)...(19): siRNA sense strand
ggaacaacugcgagcaaau

SEQ ID NO: 2486276 - RNA, 19 nt, Homo sapiens
  misc_RNA (1)...(19): siRNA sense strand
acagaagagccauggagaa

SEQ ID NO: 2486277 - RNA, 19 nt, Homo sapiens
  misc_RNA (1)...(19): siRNA sense strand
cugcgagcaaauagagaua

SEQ ID NO: 2486278 - RNA, 19 nt, Homo sapiens
  misc_RNA (1)...(19): siRNA sense strand
uggaacaguuagaaaguca

SEQ ID NO: 2486279 - RNA, 19 nt, Homo sapiens
  misc_RNA (1)...(19): siRNA sense strand
uguaugaaacccagaggaa

SEQ ID NO: 2486280 - RNA, 19 nt, Homo sapiens
  misc_RNA (1)...(19): siRNA sense strand
gggaagucacagagcucua

SEQ ID NO: 2486281 - RNA, 19 nt, Homo sapiens
  misc_RNA (1)...(19): siRNA sense strand
ccugugacaaagugaauaa

SEQ ID NO: 2486282 - RNA, 19 nt, Homo sapiens
  misc_RNA (1)...(19): siRNA sense strand
gcagcaaaugagacacaaa

SEQ ID NO: 2486283 - RNA, 19 nt, Homo sapiens
  misc_RNA (1)...(19): siRNA sense strand
uagcaggaagugaaaguaa

SEQ ID NO: 2486284 - RNA, 19 nt, Homo sapiens
  misc_RNA (1)...(19): siRNA sense strand
cuuuauaucuuacaggcaa

SEQ ID NO: 2486285 - RNA, 19 nt, Homo sapiens
  misc_RNA (1)...(19): siRNA sense strand
cagcuggaacaguuagaaa

SEQ ID NO: 2486286 - RNA, 19 nt, Homo sapiens
  misc_RNA (1)...(19): siRNA sense strand
cugcuuuguugauuggaaa

SEQ ID NO: 2486287 - RNA, 19 nt, Homo sapiens
  misc_RNA (1)...(19): siRNA sense strand
cggugaugaggcaaagaaa

SEQ ID NO: 2486288 - RNA, 19 nt, Homo sapiens
  misc_RNA (1)...(19): siRNA sense strand
agaagcaagugcagauaca

SEQ ID NO: 2486289 - RNA, 19 nt, Homo sapiens
  misc_RNA (1)...(19): siRNA sense strand
gugaugaggcaaagaaaau

SEQ ID NO: 2486290 - RNA, 19 nt, Homo sapiens
  misc_RNA (1)...(19): siRNA sense strand
cuggaagaaugcugcguuu

SEQ ID NO: 2486291 - RNA, 19 nt, Homo sapiens
  misc_RNA (1)...(19): siRNA sense strand
uuguauagcaggaagugaa

SEQ ID NO: 2486292 - RNA, 19 nt, Homo sapiens
  misc_RNA (1)...(19): siRNA sense strand
caucaaugucagugucuau

SEQ ID NO: 2486293 - RNA, 19 nt, Homo sapiens
  misc_RNA (1)...(19): siRNA sense strand
ugguagaagcuaacaauga

SEQ ID NO: 2486294 - RNA, 19 nt, Homo sapiens
  misc_RNA (1)...(19): siRNA sense strand
cuaccuaaaugcagcuaga

SEQ ID NO: 2486295 - RNA, 19 nt, Homo sapiens
  misc_RNA (1)...(19): siRNA sense strand
caggcauacuggagacaca

SEQ ID NO: 2486296 - RNA, 19 nt, Homo sapiens
  misc_RNA (1)...(19): siRNA sense strand
ucugaaagcaugcaggaau

SEQ ID NO: 2486297 - RNA, 19 nt, Homo sapiens
  misc_RNA (1)...(19): siRNA sense strand
acaaugaacauaugguaga

SEQ ID NO: 2486298 - RNA, 19 nt, Homo sapiens
  misc_RNA (1)...(19): siRNA sense strand
guucaauagguguguugua

SEQ ID NO: 2486299 - RNA, 19 nt, Homo sapiens
  misc_RNA (1)...(19): siRNA sense strand
caguaauuguauagcagga

SEQ ID NO: 2486300 - RNA, 19 nt, Homo sapiens
  misc_RNA (1)...(19): siRNA sense strand
uaugaaacccagaggaagu

SEQ ID NO: 2486301 - RNA, 19 nt, Homo sapiens
  misc_RNA (1)...(19): siRNA sense strand
aagcuaugcuauucaguau

SEQ ID NO: 2486302 - RNA, 19 nt, Homo sapiens
  misc_RNA (1)...(19): siRNA sense strand
gugcugaugucaagggacu

SEQ ID NO: 2486303 - RNA, 19 nt, Homo sapiens
  misc_RNA (1)...(19): siRNA sense strand
guuuauucguuguguuuga

SEQ ID NO: 2486304 - RNA, 19 nt, Homo sapiens
  misc_RNA (1)...(19): siRNA sense strand
aauuacagcacuuggaaca

SEQ ID NO: 2486305 - RNA, 19 nt, Homo sapiens
  misc_RNA (1)...(19): siRNA sense strand
gcagagaagcauaaacagu

SEQ ID NO: 2486306 - RNA, 19 nt, Homo sapiens
  misc_RNA (1)...(19): siRNA sense strand
ggcauauauuugugcugua

SEQ ID NO: 2486307 - RNA, 19 nt, Homo sapiens
  misc_RNA (1)...(19): siRNA sense strand
cugaaagcaugcaggaauc

SEQ ID NO: 2486308 - RNA, 19 nt, Homo sapiens
  misc_RNA (1)...(19): siRNA sense strand
cugcaaaggaggcauauga

SEQ ID NO: 2486309 - RNA, 19 nt, Homo sapiens
  misc_RNA (1)...(19): siRNA sense strand
ggugaugaggcaaagaaaa

SEQ ID NO: 2486310 - RNA, 19 nt, Homo sapiens
  misc_RNA (1)...(19): siRNA sense strand
cauaaaagucagaguucau

SEQ ID NO: 2486311 - RNA, 19 nt, Homo sapiens
  misc_RNA (1)...(19): siRNA sense strand
aaaggaggcauaugaacaa

SEQ ID NO: 2486312 - RNA, 19 nt, Homo sapiens
  misc_RNA (1)...(19): siRNA sense strand
ccuucggugaugaggcaaa

SEQ ID NO: 2486313 - RNA, 19 nt, Homo sapiens
  misc_RNA (1)...(19): siRNA sense strand
ugccaaaggacaaguugaa

SEQ ID NO: 2486314 - RNA, 19 nt, Homo sapiens
  misc_RNA (1)...(19): siRNA sense strand
aaggaaaaguggagucuga

SEQ ID NO: 2486315 - RNA, 19 nt, Homo sapiens
  misc_RNA (1)...(19): siRNA sense strand
uagccuugauugacuguaa

SEQ ID NO: 2486316 - RNA, 19 nt, Homo sapiens
  misc_RNA (1)...(19): siRNA sense strand
aggaccuaaugaagaacaa

SEQ ID NO: 2486317 - RNA, 19 nt, Homo sapiens
  misc_RNA (1)...(19): siRNA sense strand
uuaagaaggcgaaugaaca

SEQ ID NO: 2486318 - RNA, 19 nt, Homo sapiens
  misc_RNA (1)...(19): siRNA sense strand
caggcugacuacuggaaga

SEQ ID NO: 2486319 - RNA, 19 nt, Homo sapiens
  misc_RNA (1)...(19): siRNA sense strand
auauggaucuaguaggaga

SEQ ID NO: 2486320 - RNA, 19 nt, Homo sapiens
  misc_RNA (1)...(19): siRNA sense strand
ccaaauacgcacaauacca

SEQ ID NO: 2486321 - RNA, 19 nt, Homo sapiens
  misc_RNA (1)...(19): siRNA sense strand
ucaugaagauggcgccaga

SEQ ID NO: 2486322 - RNA, 19 nt, Homo sapiens
  misc_RNA (1)...(19): siRNA sense strand
agugaagaggagucuguua

SEQ ID NO: 2486323 - RNA, 19 nt, Homo sapiens
  misc_RNA (1)...(19): siRNA sense strand
uacuggaaccugugacaaa

SEQ ID NO: 2486324 - RNA, 19 nt, Homo sapiens
  misc_RNA (1)...(19): siRNA sense strand
guuugacaccacagaaauu

SEQ ID NO: 2486325 - RNA, 19 nt, Homo sapiens
  misc_RNA (1)...(19): siRNA sense strand
cacagaaauuacagcacuu

SEQ ID NO: 2486326 - RNA, 19 nt, Homo sapiens
  misc_RNA (1)...(19): siRNA sense strand
uguauagcaggaagugaaa

SEQ ID NO: 2486327 - RNA, 19 nt, Homo sapiens
  misc_RNA (1)...(19): siRNA sense strand
caacuuuugcagacagaaa

SEQ ID NO: 2486328 - RNA, 19 nt, Homo sapiens
  misc_RNA (1)...(19): siRNA sense strand
aaaggaaagcuaugcuauu

SEQ ID NO: 2486329 - RNA, 19 nt, Homo sapiens
  misc_RNA (1)...(19): siRNA sense strand
agaaagucaguuugucuua

SEQ ID NO: 2486330 - RNA, 19 nt, Homo sapiens
  misc_RNA (1)...(19): siRNA sense strand
uggcguugugaaagcaaua

SEQ ID NO: 2486331 - RNA, 19 nt, Homo sapiens
  misc_RNA (1)...(19): siRNA sense strand
ggaaaguucaggaugccuu

SEQ ID NO: 2486332 - RNA, 19 nt, Homo sapiens
  misc_RNA (1)...(19): siRNA sense strand
ggaucuaguaggagacaaa

SEQ ID NO: 2486333 - RNA, 19 nt, Homo sapiens
  misc_RNA (1)...(19): siRNA sense strand
agaaaauggcggaaggaaa

SEQ ID NO: 2486334 - RNA, 19 nt, Homo sapiens
  misc_RNA (1)...(19): siRNA sense strand
ucuuaaaagcugaaggaaa

SEQ ID NO: 2486335 - RNA, 19 nt, Homo sapiens
  misc_RNA (1)...(19): siRNA sense strand
gcgagcaaauagagauaau

SEQ ID NO: 2486336 - RNA, 19 nt, Homo sapiens
  misc_RNA (1)...(19): siRNA sense strand
augcaggaauccagguaaa

SEQ ID NO: 2486337 - RNA, 19 nt, Homo sapiens
  misc_RNA (1)...(19): siRNA sense strand
ggaacaacugcgagcaaau

SEQ ID NO: 2486338 - RNA, 19 nt, Homo sapiens
  misc_RNA (1)...(19): siRNA sense strand
acagaagagccauggagaa

SEQ ID NO: 2486339 - RNA, 19 nt, Homo sapiens
  misc_RNA (1)...(19): siRNA sense strand
cugcgagcaaauagagaua

SEQ ID NO: 2486340 - RNA, 19 nt, Homo sapiens
  misc_RNA (1)...(19): siRNA sense strand
uggaacaguuagaaaguca

SEQ ID NO: 2486341 - RNA, 19 nt, Homo sapiens
  misc_RNA (1)...(19): siRNA sense strand
uguaugaaacccagaggaa

SEQ ID NO: 2486342 - RNA, 19 nt, Homo sapiens
  misc_RNA (1)...(19): siRNA sense strand
gggaagucacagagcucua

SEQ ID NO: 2486343 - RNA, 19 nt, Homo sapiens
  misc_RNA (1)...(19): siRNA sense strand
ccugugacaaagugaauaa

SEQ ID NO: 2486344 - RNA, 19 nt, Homo sapiens
  misc_RNA (1)...(19): siRNA sense strand
gcagcaaaugagacacaaa

SEQ ID NO: 2486345 - RNA, 19 nt, Homo sapiens
  misc_RNA (1)...(19): siRNA sense strand
uagcaggaagugaaaguaa

SEQ ID NO: 2486346 - RNA, 19 nt, Homo sapiens
  misc_RNA (1)...(19): siRNA sense strand
cuuuauaucuuacaggcaa

SEQ ID NO: 2486347 - RNA, 19 nt, Homo sapiens
  misc_RNA (1)...(19): siRNA sense strand
cagcuggaacaguuagaaa

SEQ ID NO: 2486348 - RNA, 19 nt, Homo sapiens
  misc_RNA (1)...(19): siRNA sense strand
cugcuuuguugauuggaaa

SEQ ID NO: 2486349 - RNA, 19 nt, Homo sapiens
  misc_RNA (1)...(19): siRNA sense strand
cggugaugaggcaaagaaa

SEQ ID NO: 2486350 - RNA, 19 nt, Homo sapiens
  misc_RNA (1)...(19): siRNA sense strand
agaagcaagugcagauaca

SEQ ID NO: 2486351 - RNA, 19 nt, Homo sapiens
  misc_RNA (1)...(19): siRNA sense strand
gugaugaggcaaagaaaau

SEQ ID NO: 2486352 - RNA, 19 nt, Homo sapiens
  misc_RNA (1)...(19): siRNA sense strand
cuggaagaaugcugcguuu

SEQ ID NO: 2486353 - RNA, 19 nt, Homo sapiens
  misc_RNA (1)...(19): siRNA sense strand
uuguauagcaggaagugaa

SEQ ID NO: 2486354 - RNA, 19 nt, Homo sapiens
  misc_RNA (1)...(19): siRNA sense strand
caucaaugucagugucuau

SEQ ID NO: 2486355 - RNA, 19 nt, Homo sapiens
  misc_RNA (1)...(19): siRNA sense strand
ugguagaagcuaacaauga

SEQ ID NO: 2486356 - RNA, 19 nt, Homo sapiens
  misc_RNA (1)...(19): siRNA sense strand
cuaccuaaaugcagcuaga

SEQ ID NO: 2486357 - RNA, 19 nt, Homo sapiens
  misc_RNA (1)...(19): siRNA sense strand
caggcauacuggagacaca

SEQ ID NO: 2486358 - RNA, 19 nt, Homo sapiens
  misc_RNA (1)...(19): siRNA sense strand
ucugaaagcaugcaggaau

SEQ ID NO: 2486359 - RNA, 19 nt, Homo sapiens
  misc_RNA (1)...(19): siRNA sense strand
acaaugaacauaugguaga

SEQ ID NO: 2486360 - RNA, 19 nt, Homo sapiens
  misc_RNA (1)...(19): siRNA sense strand
guucaauagguguguugua

SEQ ID NO: 2486361 - RNA, 19 nt, Homo sapiens
  misc_RNA (1)...(19): siRNA sense strand
caguaauuguauagcagga

SEQ ID NO: 2486362 - RNA, 19 nt, Homo sapiens
  misc_RNA (1)...(19): siRNA sense strand
uaugaaacccagaggaagu

SEQ ID NO: 2486363 - RNA, 19 nt, Homo sapiens
  misc_RNA (1)...(19): siRNA sense strand
aagcuaugcuauucaguau

SEQ ID NO: 2486364 - RNA, 19 nt, Homo sapiens
  misc_RNA (1)...(19): siRNA sense strand
gugcugaugucaagggacu

SEQ ID NO: 2486365 - RNA, 19 nt, Homo sapiens
  misc_RNA (1)...(19): siRNA sense strand
guuuauucguuguguuuga

SEQ ID NO: 2486366 - RNA, 19 nt, Homo sapiens
  misc_RNA (1)...(19): siRNA sense strand
aauuacagcacuuggaaca

SEQ ID NO: 2486367 - RNA, 19 nt, Homo sapiens
  misc_RNA (1)...(19): siRNA sense strand
gcagagaagcauaaacagu

SEQ ID NO: 2486368 - RNA, 19 nt, Homo sapiens
  misc_RNA (1)...(19): siRNA sense strand
ggcauauauuugugcugua

SEQ ID NO: 2486369 - RNA, 19 nt, Homo sapiens
  misc_RNA (1)...(19): siRNA sense strand
cugaaagcaugcaggaauc

SEQ ID NO: 2486370 - RNA, 19 nt, Homo sapiens
  misc_RNA (1)...(19): siRNA sense strand
cugcaaaggaggcauauga

SEQ ID NO: 2486371 - RNA, 19 nt, Homo sapiens
  misc_RNA (1)...(19): siRNA sense strand
ggugaugaggcaaagaaaa

SEQ ID NO: 2486372 - RNA, 19 nt, Homo sapiens
  misc_RNA (1)...(19): siRNA sense strand
cauaaaagucagaguucau

SEQ ID NO: 2486373 - RNA, 19 nt, Homo sapiens
  misc_RNA (1)...(19): siRNA sense strand
aaaggaggcauaugaacaa

SEQ ID NO: 2486374 - RNA, 19 nt, Homo sapiens
  misc_RNA (1)...(19): siRNA sense strand
ccuucggugaugaggcaaa

SEQ ID NO: 2486375 - RNA, 19 nt, Homo sapiens
  misc_RNA (1)...(19): siRNA sense strand
ugccaaaggacaaguugaa

SEQ ID NO: 2486376 - RNA, 19 nt, Homo sapiens
  misc_RNA (1)...(19): siRNA sense strand
aaggaaaaguggagucuga

SEQ ID NO: 2486377 - RNA, 19 nt, Homo sapiens
  misc_RNA (1)...(19): siRNA sense strand
uagccuugauugacuguaa

SEQ ID NO: 2486378 - RNA, 19 nt, Homo sapiens
  misc_RNA (1)...(19): siRNA sense strand
aggaccuaaugaagaacaa

SEQ ID NO: 2486379 - RNA, 19 nt, Homo sapiens
  misc_RNA (1)...(19): siRNA sense strand
uuaagaaggcgaaugaaca

SEQ ID NO: 2486380 - RNA, 19 nt, Homo sapiens
  misc_RNA (1)...(19): siRNA sense strand
caggcugacuacuggaaga

SEQ ID NO: 2486381 - RNA, 19 nt, Homo sapiens
  misc_RNA (1)...(19): siRNA sense strand
auauggaucuaguaggaga

SEQ ID NO: 2486382 - RNA, 19 nt, Homo sapiens
  misc_RNA (1)...(19): siRNA sense strand
ccaaauacgcacaauacca

SEQ ID NO: 2486383 - RNA, 19 nt, Homo sapiens
  misc_RNA (1)...(19): siRNA sense strand
ucaugaagauggcgccaga

SEQ ID NO: 2486384 - RNA, 19 nt, Homo sapiens
  misc_RNA (1)...(19): siRNA sense strand
agugaagaggagucuguua

SEQ ID NO: 2486385 - RNA, 19 nt, Homo sapiens
  misc_RNA (1)...(19): siRNA sense strand
uacuggaaccugugacaaa

SEQ ID NO: 2486386 - RNA, 19 nt, Homo sapiens
  misc_RNA (1)...(19): siRNA sense strand
guuugacaccacagaaauu

SEQ ID NO: 2486387 - RNA, 19 nt, Homo sapiens
  misc_RNA (1)...(19): siRNA sense strand
cacagaaauuacagcacuu

SEQ ID NO: 2486388 - RNA, 19 nt, Homo sapiens
  misc_RNA (1)...(19): siRNA sense strand
uguauagcaggaagugaaa

SEQ ID NO: 2486389 - RNA, 19 nt, Homo sapiens
  misc_RNA (1)...(19): siRNA sense strand
caacuuuugcagacagaaa

SEQ ID NO: 2486390 - RNA, 19 nt, Homo sapiens
  misc_RNA (1)...(19): siRNA sense strand
aaaggaaagcuaugcuauu

SEQ ID NO: 2486391 - RNA, 19 nt, Homo sapiens
  misc_RNA (1)...(19): siRNA sense strand
agaaagucaguuugucuua

SEQ ID NO: 2486392 - RNA, 19 nt, Homo sapiens
  misc_RNA (1)...(19): siRNA sense strand
uggcguugugaaagcaaua

SEQ ID NO: 2486393 - RNA, 19 nt, Homo sapiens
  misc_RNA (1)...(19): siRNA sense strand
ggaaaguucaggaugccuu

SEQ ID NO: 2486394 - RNA, 19 nt, Homo sapiens
  misc_RNA (1)...(19): siRNA sense strand
cgacagaacuccaagcaga

SEQ ID NO: 2486395 - RNA, 19 nt, Homo sapiens
  misc_RNA (1)...(19): siRNA sense strand
gagagagcugcgaggacaa

SEQ ID NO: 2486396 - RNA, 19 nt, Homo sapiens
  misc_RNA (1)...(19): siRNA sense strand
agaaggaccagaaggccaa

SEQ ID NO: 2486397 - RNA, 19 nt, Homo sapiens
  misc_RNA (1)...(19): siRNA sense strand
ggagagagcugcgaggaca

SEQ ID NO: 2486398 - RNA, 19 nt, Homo sapiens
  misc_RNA (1)...(19): siRNA sense strand
cagaagaacagcugugcca

SEQ ID NO: 2486399 - RNA, 19 nt, Homo sapiens
  misc_RNA (1)...(19): siRNA sense strand
aguacaagaaggaccagaa

SEQ ID NO: 2486400 - RNA, 19 nt, Homo sapiens
  misc_RNA (1)...(19): siRNA sense strand
aggacuguuuggaggcuau

SEQ ID NO: 2486401 - RNA, 19 nt, Homo sapiens
  misc_RNA (1)...(19): siRNA sense strand
ggaugaaagagucucgaca

SEQ ID NO: 2486402 - RNA, 19 nt, Homo sapiens
  misc_RNA (1)...(19): siRNA sense strand
cuacggacacuuacggcua

SEQ ID NO: 2486403 - RNA, 19 nt, Homo sapiens
  misc_RNA (1)...(19): siRNA sense strand
accagaaggccaagggcau

SEQ ID NO: 2486404 - RNA, 19 nt, Homo sapiens
  misc_RNA (1)...(19): siRNA sense strand
aagaaggaccagaaggcca

SEQ ID NO: 2486405 - RNA, 19 nt, Homo sapiens
  misc_RNA (1)...(19): siRNA sense strand
gcuucuagcuccucagcca

SEQ ID NO: 2486406 - RNA, 19 nt, Homo sapiens
  misc_RNA (1)...(19): siRNA sense strand
acacagaucucucggccca

SEQ ID NO: 2486407 - RNA, 19 nt, Homo sapiens
  misc_RNA (1)...(19): siRNA sense strand
gaguaauuggugagaguga

SEQ ID NO: 2486408 - RNA, 19 nt, Homo sapiens
  misc_RNA (1)...(19): siRNA sense strand
acgaguaauuggugagagu

SEQ ID NO: 2486409 - RNA, 19 nt, Homo sapiens
  misc_RNA (1)...(19): siRNA sense strand
gauacaaacauguggagca

SEQ ID NO: 2486410 - RNA, 19 nt, Homo sapiens
  misc_RNA (1)...(19): siRNA sense strand
acaucaaagcagaagaaaa

SEQ ID NO: 2486411 - RNA, 19 nt, Homo sapiens
  misc_RNA (1)...(19): siRNA sense strand
agcuauacgaacaaagaaa

SEQ ID NO: 2486412 - RNA, 19 nt, Homo sapiens
  misc_RNA (1)...(19): siRNA sense strand
aggaauugaucuugacagu

SEQ ID NO: 2486413 - RNA, 19 nt, Homo sapiens
  misc_RNA (1)...(19): siRNA sense strand
cagucgaugaugugaagaa

SEQ ID NO: 2486414 - RNA, 19 nt, Homo sapiens
  misc_RNA (1)...(19): siRNA sense strand
gggaugagaugcagcgaug

SEQ ID NO: 2486415 - RNA, 19 nt, Homo sapiens
  misc_RNA (1)...(19): siRNA sense strand
acacagaugaagaagggau

SEQ ID NO: 2486416 - RNA, 19 nt, Homo sapiens
  misc_RNA (1)...(19): siRNA sense strand
agagcugagaguagcauua

SEQ ID NO: 2486417 - RNA, 19 nt, Homo sapiens
  misc_RNA (1)...(19): siRNA sense strand
cgagcaggcgagaaggaau

SEQ ID NO: 2486418 - RNA, 19 nt, Homo sapiens
  misc_RNA (1)...(19): siRNA sense strand
guaauuggugagagugaca

SEQ ID NO: 2486419 - RNA, 19 nt, Homo sapiens
  misc_RNA (1)...(19): siRNA sense strand
acgguuacagucaggguua

SEQ ID NO: 2486420 - RNA, 19 nt, Homo sapiens
  misc_RNA (1)...(19): siRNA sense strand
gguuacagucaggguuaaa

SEQ ID NO: 2486421 - RNA, 19 nt, Homo sapiens
  misc_RNA (1)...(19): siRNA sense strand
agucgaugaugugaagaaa

SEQ ID NO: 2486422 - RNA, 19 nt, Homo sapiens
  misc_RNA (1)...(19): siRNA sense strand
cuuaaaugacaaugaccuu

SEQ ID NO: 2486423 - RNA, 19 nt, Homo sapiens
  misc_RNA (1)...(19): siRNA sense strand
aguggagaaaagaggaaua

SEQ ID NO: 2486424 - RNA, 19 nt, Homo sapiens
  misc_RNA (1)...(19): siRNA sense strand
aggugaaccacgugaaugu

SEQ ID NO: 2486425 - RNA, 19 nt, Homo sapiens
  misc_RNA (1)...(19): siRNA sense strand
guguucaauacgaguaauu

SEQ ID NO: 2486426 - RNA, 19 nt, Homo sapiens
  misc_RNA (1)...(19): siRNA sense strand
augcacgaggagagaagaa

SEQ ID NO: 2486427 - RNA, 19 nt, Homo sapiens
  misc_RNA (1)...(19): siRNA sense strand
gagaugcagcgaugggaca

SEQ ID NO: 2486428 - RNA, 19 nt, Homo sapiens
  misc_RNA (1)...(19): siRNA sense strand
cgaauaugcacgaggagag

SEQ ID NO: 2486429 - RNA, 19 nt, Homo sapiens
  misc_RNA (1)...(19): siRNA sense strand
uggcauggacaguacgaca

SEQ ID NO: 2486430 - RNA, 19 nt, Homo sapiens
  misc_RNA (1)...(19): siRNA sense strand
gaccaaguauaucaggcua

SEQ ID NO: 2486431 - RNA, 19 nt, Homo sapiens
  misc_RNA (1)...(19): siRNA sense strand
agugaauuacuuugccuua

SEQ ID NO: 2486432 - RNA, 19 nt, Homo sapiens
  misc_RNA (1)...(19): siRNA sense strand
acagaagcuauacgaacaa

SEQ ID NO: 2486433 - RNA, 19 nt, Homo sapiens
  misc_RNA (1)...(19): siRNA sense strand
cgguuacagucaggguuaa

SEQ ID NO: 2486434 - RNA, 19 nt, Homo sapiens
  misc_RNA (1)...(19): siRNA sense strand
cggaaaacacggagaauau

SEQ ID NO: 2486435 - RNA, 19 nt, Homo sapiens
  misc_RNA (1)...(19): siRNA sense strand
gcaucaacgacgaggucau

SEQ ID NO: 2486436 - RNA, 19 nt, Homo sapiens
  misc_RNA (1)...(19): siRNA sense strand
guacauggaagaaggcaca

SEQ ID NO: 2486437 - RNA, 19 nt, Homo sapiens
  misc_RNA (1)...(19): siRNA sense strand
cuuugcaggucgggagaaa

SEQ ID NO: 2486438 - RNA, 19 nt, Homo sapiens
  misc_RNA (1)...(19): siRNA sense strand
cuguguggccucagaauau

SEQ ID NO: 2486439 - RNA, 19 nt, Homo sapiens
  misc_RNA (1)...(19): siRNA sense strand
cggccuucgucaucagcaa

SEQ ID NO: 2486440 - RNA, 19 nt, Homo sapiens
  misc_RNA (1)...(19): siRNA sense strand
ucuccuugguggugggcuu

SEQ ID NO: 2486441 - RNA, 19 nt, Homo sapiens
  misc_RNA (1)...(19): siRNA sense strand
agaucaauuuggugacgga

SEQ ID NO: 2486442 - RNA, 19 nt, Homo sapiens
  misc_RNA (1)...(19): siRNA sense strand
ccggagaucaauuugguga

SEQ ID NO: 2486443 - RNA, 19 nt, Homo sapiens
  misc_RNA (1)...(19): siRNA sense strand
aguacauguuggugagaaa

SEQ ID NO: 2486444 - RNA, 19 nt, Homo sapiens
  misc_RNA (1)...(19): siRNA sense strand
uggaggaggaggaggaaga

SEQ ID NO: 2486445 - RNA, 19 nt, Homo sapiens
  misc_RNA (1)...(19): siRNA sense strand
ggaagaccguggauggcua

SEQ ID NO: 2486446 - RNA, 19 nt, Homo sapiens
  misc_RNA (1)...(19): siRNA sense strand
aggaagaggauaaguacau

SEQ ID NO: 2486447 - RNA, 19 nt, Homo sapiens
  misc_RNA (1)...(19): siRNA sense strand
ggaagaaauuacagaggag

SEQ ID NO: 2486448 - RNA, 19 nt, Homo sapiens
  misc_RNA (1)...(19): siRNA sense strand
gagaaacccugaacggaga

SEQ ID NO: 2486449 - RNA, 19 nt, Homo sapiens
  misc_RNA (1)...(19): siRNA sense strand
ccauggaggaggaggagga

SEQ ID NO: 2486450 - RNA, 19 nt, Homo sapiens
  misc_RNA (1)...(19): siRNA sense strand
gauaaguacauguugguga

SEQ ID NO: 2486451 - RNA, 19 nt, Homo sapiens
  misc_RNA (1)...(19): siRNA sense strand
ccgccagcccucagagaau

SEQ ID NO: 2486452 - RNA, 19 nt, Homo sapiens
  misc_RNA (1)...(19): siRNA sense strand
aggaggaguuggagaacgu

SEQ ID NO: 2486453 - RNA, 19 nt, Homo sapiens
  misc_RNA (1)...(19): siRNA sense strand
auaucauggcuuugggaau

SEQ ID NO: 2486454 - RNA, 19 nt, Homo sapiens
  misc_RNA (1)...(19): siRNA sense strand
aagaaauuacagaggagga

SEQ ID NO: 2486455 - RNA, 19 nt, Homo sapiens
  misc_RNA (1)...(19): siRNA sense strand
cgagauggacggugugcga

SEQ ID NO: 2486456 - RNA, 19 nt, Homo sapiens
  misc_RNA (1)...(19): siRNA sense strand
gagaagauauauaaccguu

SEQ ID NO: 2486457 - RNA, 19 nt, Homo sapiens
  misc_RNA (1)...(19): siRNA sense strand
ggguguugcuuccaggaga

SEQ ID NO: 2486458 - RNA, 19 nt, Homo sapiens
  misc_RNA (1)...(19): siRNA sense strand
gcagcgagauggacggugu

SEQ ID NO: 2486459 - RNA, 19 nt, Homo sapiens
  misc_RNA (1)...(19): siRNA sense strand
gaggaagaggauaaguaca

SEQ ID NO: 2486460 - RNA, 19 nt, Homo sapiens
  misc_RNA (1)...(19): siRNA sense strand
ucagaagaugaaaguggaa

SEQ ID NO: 2486461 - RNA, 19 nt, Homo sapiens
  misc_RNA (1)...(19): siRNA sense strand
ggugaagaggucagggaug

SEQ ID NO: 2486462 - RNA, 19 nt, Homo sapiens
  misc_RNA (1)...(19): siRNA sense strand
cugaaacaggaauuugaaa

SEQ ID NO: 2486463 - RNA, 19 nt, Homo sapiens
  misc_RNA (1)...(19): siRNA sense strand
uggaagaaauuacagagga

SEQ ID NO: 2486464 - RNA, 19 nt, Homo sapiens
  misc_RNA (1)...(19): siRNA sense strand
aggaggaggaggaagagga

SEQ ID NO: 2486465 - RNA, 19 nt, Homo sapiens
  misc_RNA (1)...(19): siRNA sense strand
uuggugagaaagaggaaga

SEQ ID NO: 2486466 - RNA, 19 nt, Homo sapiens
  misc_RNA (1)...(19): siRNA sense strand
aguacauguuggugagaaa

SEQ ID NO: 2486467 - RNA, 19 nt, Homo sapiens
  misc_RNA (1)...(19): siRNA sense strand
uggaggaggaggaggaaga

SEQ ID NO: 2486468 - RNA, 19 nt, Homo sapiens
  misc_RNA (1)...(19): siRNA sense strand
ggaagaccguggauggcua

SEQ ID NO: 2486469 - RNA, 19 nt, Homo sapiens
  misc_RNA (1)...(19): siRNA sense strand
aggaagaggauaaguacau

SEQ ID NO: 2486470 - RNA, 19 nt, Homo sapiens
  misc_RNA (1)...(19): siRNA sense strand
ggaagaaauuacagaggag

SEQ ID NO: 2486471 - RNA, 19 nt, Homo sapiens
  misc_RNA (1)...(19): siRNA sense strand
gagaaacccugaacggaga

SEQ ID NO: 2486472 - RNA, 19 nt, Homo sapiens
  misc_RNA (1)...(19): siRNA sense strand
ccauggaggaggaggagga

SEQ ID NO: 2486473 - RNA, 19 nt, Homo sapiens
  misc_RNA (1)...(19): siRNA sense strand
gauaaguacauguugguga

SEQ ID NO: 2486474 - RNA, 19 nt, Homo sapiens
  misc_RNA (1)...(19): siRNA sense strand
ccgccagcccucagagaau

SEQ ID NO: 2486475 - RNA, 19 nt, Homo sapiens
  misc_RNA (1)...(19): siRNA sense strand
aggaggaguuggagaacgu

SEQ ID NO: 2486476 - RNA, 19 nt, Homo sapiens
  misc_RNA (1)...(19): siRNA sense strand
auaucauggcuuugggaau

SEQ ID NO: 2486477 - RNA, 19 nt, Homo sapiens
  misc_RNA (1)...(19): siRNA sense strand
aagaaauuacagaggagga

SEQ ID NO: 2486478 - RNA, 19 nt, Homo sapiens
  misc_RNA (1)...(19): siRNA sense strand
cgagauggacggugugcga

SEQ ID NO: 2486479 - RNA, 19 nt, Homo sapiens
  misc_RNA (1)...(19): siRNA sense strand
gagaagauauauaaccguu

SEQ ID NO: 2486480 - RNA, 19 nt, Homo sapiens
  misc_RNA (1)...(19): siRNA sense strand
ggguguugcuuccaggaga

SEQ ID NO: 2486481 - RNA, 19 nt, Homo sapiens
  misc_RNA (1)...(19): siRNA sense strand
gcagcgagauggacggugu

SEQ ID NO: 2486482 - RNA, 19 nt, Homo sapiens
  misc_RNA (1)...(19): siRNA sense strand
gaggaagaggauaaguaca

SEQ ID NO: 2486483 - RNA, 19 nt, Homo sapiens
  misc_RNA (1)...(19): siRNA sense strand
ucagaagaugaaaguggaa

SEQ ID NO: 2486484 - RNA, 19 nt, Homo sapiens
  misc_RNA (1)...(19): siRNA sense strand
ggugaagaggucagggaug

SEQ ID NO: 2486485 - RNA, 19 nt, Homo sapiens
  misc_RNA (1)...(19): siRNA sense strand
cugaaacaggaauuugaaa

SEQ ID NO: 2486486 - RNA, 19 nt, Homo sapiens
  misc_RNA (1)...(19): siRNA sense strand
uggaagaaauuacagagga

SEQ ID NO: 2486487 - RNA, 19 nt, Homo sapiens
  misc_RNA (1)...(19): siRNA sense strand
aggaggaggaggaagagga

SEQ ID NO: 2486488 - RNA, 19 nt, Homo sapiens
  misc_RNA (1)...(19): siRNA sense strand
uuggugagaaagaggaaga

SEQ ID NO: 2486489 - RNA, 19 nt, Homo sapiens
  misc_RNA (1)...(19): siRNA sense strand
agaagaaacucaaggguca

SEQ ID NO: 2486490 - RNA, 19 nt, Homo sapiens
  misc_RNA (1)...(19): siRNA sense strand
acacagaacuggacagcac

SEQ ID NO: 2486491 - RNA, 19 nt, Homo sapiens
  misc_RNA (1)...(19): siRNA sense strand
ccacagaguugaaggaugg

SEQ ID NO: 2486492 - RNA, 19 nt, Homo sapiens
  misc_RNA (1)...(19): siRNA sense strand
gguucaaguuugcugggau

SEQ ID NO: 2486493 - RNA, 19 nt, Homo sapiens
  misc_RNA (1)...(19): siRNA sense strand
agccauuguagcaaagaua

SEQ ID NO: 2486494 - RNA, 19 nt, Homo sapiens
  misc_RNA (1)...(19): siRNA sense strand
cggacaugguggagcuucu

SEQ ID NO: 2486495 - RNA, 19 nt, Homo sapiens
  misc_RNA (1)...(19): siRNA sense strand
ugucggagucagagguuca

SEQ ID NO: 2486496 - RNA, 19 nt, Homo sapiens
  misc_RNA (1)...(19): siRNA sense strand
gcuauguggcagagcacga

SEQ ID NO: 2486497 - RNA, 19 nt, Homo sapiens
  misc_RNA (1)...(19): siRNA sense strand
cuacaaggcgggaagccau

SEQ ID NO: 2486498 - RNA, 19 nt, Homo sapiens
  misc_RNA (1)...(19): siRNA sense strand
ccucacagucacagccauu

SEQ ID NO: 2486499 - RNA, 19 nt, Homo sapiens
  misc_RNA (1)...(19): siRNA sense strand
cagaguugaaggauggaca

SEQ ID NO: 2486500 - RNA, 19 nt, Homo sapiens
  misc_RNA (1)...(19): siRNA sense strand
guucaaguuugcugggaug

SEQ ID NO: 2486501 - RNA, 19 nt, Homo sapiens
  misc_RNA (1)...(19): siRNA sense strand
agacgguggccgaggugau

SEQ ID NO: 2486502 - RNA, 19 nt, Homo sapiens
  misc_RNA (1)...(19): siRNA sense strand
caguaaaacguccaacaaa

SEQ ID NO: 2486503 - RNA, 19 nt, Homo sapiens
  misc_RNA (1)...(19): siRNA sense strand
agaagaaacucaaggguca

SEQ ID NO: 2486504 - RNA, 19 nt, Homo sapiens
  misc_RNA (1)...(19): siRNA sense strand
acacagaacuggacagcac

SEQ ID NO: 2486505 - RNA, 19 nt, Homo sapiens
  misc_RNA (1)...(19): siRNA sense strand
ccacagaguugaaggaugg

SEQ ID NO: 2486506 - RNA, 19 nt, Homo sapiens
  misc_RNA (1)...(19): siRNA sense strand
gguucaaguuugcugggau

SEQ ID NO: 2486507 - RNA, 19 nt, Homo sapiens
  misc_RNA (1)...(19): siRNA sense strand
agccauuguagcaaagaua

SEQ ID NO: 2486508 - RNA, 19 nt, Homo sapiens
  misc_RNA (1)...(19): siRNA sense strand
cggacaugguggagcuucu

SEQ ID NO: 2486509 - RNA, 19 nt, Homo sapiens
  misc_RNA (1)...(19): siRNA sense strand
ugucggagucagagguuca

SEQ ID NO: 2486510 - RNA, 19 nt, Homo sapiens
  misc_RNA (1)...(19): siRNA sense strand
gcuauguggcagagcacga

SEQ ID NO: 2486511 - RNA, 19 nt, Homo sapiens
  misc_RNA (1)...(19): siRNA sense strand
cuacaaggcgggaagccau

SEQ ID NO: 2486512 - RNA, 19 nt, Homo sapiens
  misc_RNA (1)...(19): siRNA sense strand
ccucacagucacagccauu

SEQ ID NO: 2486513 - RNA, 19 nt, Homo sapiens
  misc_RNA (1)...(19): siRNA sense strand
cagaguugaaggauggaca

SEQ ID NO: 2486514 - RNA, 19 nt, Homo sapiens
  misc_RNA (1)...(19): siRNA sense strand
guucaaguuugcugggaug

SEQ ID NO: 2486515 - RNA, 19 nt, Homo sapiens
  misc_RNA (1)...(19): siRNA sense strand
agacgguggccgaggugau

SEQ ID NO: 2486516 - RNA, 19 nt, Homo sapiens
  misc_RNA (1)...(19): siRNA sense strand
caguaaaacguccaacaaa

SEQ ID NO: 2486517 - RNA, 19 nt, Homo sapiens
  misc_RNA (1)...(19): siRNA sense strand
gggaaaggccagagguauu

SEQ ID NO: 2486518 - RNA, 19 nt, Homo sapiens
  misc_RNA (1)...(19): siRNA sense strand
aaacagaggagcagguaaa

SEQ ID NO: 2486519 - RNA, 19 nt, Homo sapiens
  misc_RNA (1)...(19): siRNA sense strand
aggaagaagaggaggaaaa

SEQ ID NO: 2486520 - RNA, 19 nt, Homo sapiens
  misc_RNA (1)...(19): siRNA sense strand
aggaaaacgaggaggaaaa

SEQ ID NO: 2486521 - RNA, 19 nt, Homo sapiens
  misc_RNA (1)...(19): siRNA sense strand
ugagaugggccuagggaaa

SEQ ID NO: 2486522 - RNA, 19 nt, Homo sapiens
  misc_RNA (1)...(19): siRNA sense strand
acuaacaucucaagggaaa

SEQ ID NO: 2486523 - RNA, 19 nt, Homo sapiens
  misc_RNA (1)...(19): siRNA sense strand
aggaagaagaagaagacaa

SEQ ID NO: 2486524 - RNA, 19 nt, Homo sapiens
  misc_RNA (1)...(19): siRNA sense strand
acagagacgcccagggaaa

SEQ ID NO: 2486525 - RNA, 19 nt, Homo sapiens
  misc_RNA (1)...(19): siRNA sense strand
cagaagaggaagaagaaga

SEQ ID NO: 2486526 - RNA, 19 nt, Homo sapiens
  misc_RNA (1)...(19): siRNA sense strand
cuuagaagcaggaggagua

SEQ ID NO: 2486527 - RNA, 19 nt, Homo sapiens
  misc_RNA (1)...(19): siRNA sense strand
cgugggagcuagaggaaga

SEQ ID NO: 2486528 - RNA, 19 nt, Homo sapiens
  misc_RNA (1)...(19): siRNA sense strand
aggaaaugaaaguggguuu

SEQ ID NO: 2486529 - RNA, 19 nt, Homo sapiens
  misc_RNA (1)...(19): siRNA sense strand
cguuuaaagugaagcauga

SEQ ID NO: 2486530 - RNA, 19 nt, Homo sapiens
  misc_RNA (1)...(19): siRNA sense strand
gaugaaaccaagaaaggaa

SEQ ID NO: 2486531 - RNA, 19 nt, Homo sapiens
  misc_RNA (1)...(19): siRNA sense strand
ugaaagaugauguggaaaa

SEQ ID NO: 2486532 - RNA, 19 nt, Homo sapiens
  misc_RNA (1)...(19): siRNA sense strand
guauacugcugaagaggaa

SEQ ID NO: 2486533 - RNA, 19 nt, Homo sapiens
  misc_RNA (1)...(19): siRNA sense strand
gcaaagaaugaaaaggaaa

SEQ ID NO: 2486534 - RNA, 19 nt, Homo sapiens
  misc_RNA (1)...(19): siRNA sense strand
ucgagaaacccaaggcuua

SEQ ID NO: 2486535 - RNA, 19 nt, Homo sapiens
  misc_RNA (1)...(19): siRNA sense strand
acagagagcccaagccaaa

SEQ ID NO: 2486536 - RNA, 19 nt, Homo sapiens
  misc_RNA (1)...(19): siRNA sense strand
gaggaaacgagaaccgaaa

SEQ ID NO: 2486537 - RNA, 19 nt, Homo sapiens
  misc_RNA (1)...(19): siRNA sense strand
gugccauccucgagaagaa

SEQ ID NO: 2486538 - RNA, 19 nt, Homo sapiens
  misc_RNA (1)...(19): siRNA sense strand
acgaagaaccaguugcuaa

SEQ ID NO: 2486539 - RNA, 19 nt, Homo sapiens
  misc_RNA (1)...(19): siRNA sense strand
ucacaaaggaugaacaaaa

SEQ ID NO: 2486540 - RNA, 19 nt, Homo sapiens
  misc_RNA (1)...(19): siRNA sense strand
cgaagaaggccaaggagca

SEQ ID NO: 2486541 - RNA, 19 nt, Homo sapiens
  misc_RNA (1)...(19): siRNA sense strand
gggcaaagaaggcacggaa

SEQ ID NO: 2486542 - RNA, 19 nt, Homo sapiens
  misc_RNA (1)...(19): siRNA sense strand
aagacaaugcugaggacaa

SEQ ID NO: 2486543 - RNA, 19 nt, Homo sapiens
  misc_RNA (1)...(19): siRNA sense strand
cuguaaagaaccuggaaaa

SEQ ID NO: 2486544 - RNA, 19 nt, Homo sapiens
  misc_RNA (1)...(19): siRNA sense strand
ggacagagaugaaugccau

SEQ ID NO: 2486545 - RNA, 19 nt, Homo sapiens
  misc_RNA (1)...(19): siRNA sense strand
gcauugaacuguuacggaa

SEQ ID NO: 2486546 - RNA, 19 nt, Homo sapiens
  misc_RNA (1)...(19): siRNA sense strand
acacuuuagcugaggacaa

SEQ ID NO: 2486547 - RNA, 19 nt, Homo sapiens
  misc_RNA (1)...(19): siRNA sense strand
aagaagaaacggaagaaaa

SEQ ID NO: 2486548 - RNA, 19 nt, Homo sapiens
  misc_RNA (1)...(19): siRNA sense strand
agacauggauuuugagaau

SEQ ID NO: 2486549 - RNA, 19 nt, Homo sapiens
  misc_RNA (1)...(19): siRNA sense strand
gggcaucacaggagacauu

SEQ ID NO: 2486550 - RNA, 19 nt, Homo sapiens
  misc_RNA (1)...(19): siRNA sense strand
augaaaugguguacagaga

SEQ ID NO: 2486551 - RNA, 19 nt, Homo sapiens
  misc_RNA (1)...(19): siRNA sense strand
ccuuaauggaugaagaaga

SEQ ID NO: 2486552 - RNA, 19 nt, Homo sapiens
  misc_RNA (1)...(19): siRNA sense strand
gugaagaagaaacggaaga

SEQ ID NO: 2486553 - RNA, 19 nt, Homo sapiens
  misc_RNA (1)...(19): siRNA sense strand
ccaaggaggccaaagagaa

SEQ ID NO: 2486554 - RNA, 19 nt, Homo sapiens
  misc_RNA (1)...(19): siRNA sense strand
ccgcuuucuuggaggaauu

SEQ ID NO: 2486555 - RNA, 19 nt, Homo sapiens
  misc_RNA (1)...(19): siRNA sense strand
cuuaauggaugaagaagau

SEQ ID NO: 2486556 - RNA, 19 nt, Homo sapiens
  misc_RNA (1)...(19): siRNA sense strand
caacaggugaagaggucaa

SEQ ID NO: 2486557 - RNA, 19 nt, Homo sapiens
  misc_RNA (1)...(19): siRNA sense strand
acacagauaaagaagacaa

SEQ ID NO: 2486558 - RNA, 19 nt, Homo sapiens
  misc_RNA (1)...(19): siRNA sense strand
gccaaaggaccgcgugaua

SEQ ID NO: 2486559 - RNA, 19 nt, Homo sapiens
  misc_RNA (1)...(19): siRNA sense strand
gagccuauucuucgagaua

SEQ ID NO: 2486560 - RNA, 19 nt, Homo sapiens
  misc_RNA (1)...(19): siRNA sense strand
aagagaagcaguugucaaa

SEQ ID NO: 2486561 - RNA, 19 nt, Homo sapiens
  misc_RNA (1)...(19): siRNA sense strand
gcgaguauaagaacaguaa

SEQ ID NO: 2486562 - RNA, 19 nt, Homo sapiens
  misc_RNA (1)...(19): siRNA sense strand
aguuugagguggagaggga

SEQ ID NO: 2486563 - RNA, 19 nt, Homo sapiens
  misc_RNA (1)...(19): siRNA sense strand
gaucaagcgauuuaggaau

SEQ ID NO: 2486564 - RNA, 19 nt, Homo sapiens
  misc_RNA (1)...(19): siRNA sense strand
caccaaggaugcagaaaca

SEQ ID NO: 2486565 - RNA, 19 nt, Homo sapiens
  misc_RNA (1)...(19): siRNA sense strand
acacugaagcaaagaauga

SEQ ID NO: 2486566 - RNA, 19 nt, Homo sapiens
  misc_RNA (1)...(19): siRNA sense strand
cgaagaaccaguugcuaau

SEQ ID NO: 2486567 - RNA, 19 nt, Homo sapiens
  misc_RNA (1)...(19): siRNA sense strand
gcccaaaagagguggacua

SEQ ID NO: 2486568 - RNA, 19 nt, Homo sapiens
  misc_RNA (1)...(19): siRNA sense strand
caaacaucauugagaagau

SEQ ID NO: 2486569 - RNA, 19 nt, Homo sapiens
  misc_RNA (1)...(19): siRNA sense strand
ggaauuuggagaucugaaa

SEQ ID NO: 2486570 - RNA, 19 nt, Homo sapiens
  misc_RNA (1)...(19): siRNA sense strand
gggcaaaucagcacaacau

SEQ ID NO: 2486571 - RNA, 19 nt, Homo sapiens
  misc_RNA (1)...(19): siRNA sense strand
aguagaaagcagagaugau

SEQ ID NO: 2486572 - RNA, 19 nt, Homo sapiens
  misc_RNA (1)...(19): siRNA sense strand
gcaaagggaagcaaggaca

SEQ ID NO: 2486573 - RNA, 19 nt, Homo sapiens
  misc_RNA (1)...(19): siRNA sense strand
ucaauggagcagaggagaa

SEQ ID NO: 2486574 - RNA, 19 nt, Homo sapiens
  misc_RNA (1)...(19): siRNA sense strand
ucgacauccuagaagauua

SEQ ID NO: 2486575 - RNA, 19 nt, Homo sapiens
  misc_RNA (1)...(19): siRNA sense strand
ugaugauggcuauaagaaa

SEQ ID NO: 2486576 - RNA, 19 nt, Homo sapiens
  misc_RNA (1)...(19): siRNA sense strand
gaagcuuagagguggcaaa

SEQ ID NO: 2486577 - RNA, 19 nt, Homo sapiens
  misc_RNA (1)...(19): siRNA sense strand
ugguaggacuucagaacau

SEQ ID NO: 2486578 - RNA, 19 nt, Homo sapiens
  misc_RNA (1)...(19): siRNA sense strand
aagcugaaauacugggaga

SEQ ID NO: 2486579 - RNA, 19 nt, Homo sapiens
  misc_RNA (1)...(19): siRNA sense strand
gcuuagagguggcaaacca

SEQ ID NO: 2486580 - RNA, 19 nt, Homo sapiens
  misc_RNA (1)...(19): siRNA sense strand
cuuagaaguuccuggcuuu

SEQ ID NO: 2486581 - RNA, 19 nt, Homo sapiens
  misc_RNA (1)...(19): siRNA sense strand
acaauaaacaggauggaga

SEQ ID NO: 2486582 - RNA, 19 nt, Homo sapiens
  misc_RNA (1)...(19): siRNA sense strand
gugcagaaauacuggggaa

SEQ ID NO: 2486583 - RNA, 19 nt, Homo sapiens
  misc_RNA (1)...(19): siRNA sense strand
acaacaaaauucagggaga

SEQ ID NO: 2486584 - RNA, 19 nt, Homo sapiens
  misc_RNA (1)...(19): siRNA sense strand
ccaguaggcaagauggcaa

SEQ ID NO: 2486585 - RNA, 19 nt, Homo sapiens
  misc_RNA (1)...(19): siRNA sense strand
ucgaaaugaccgcaaggaa

SEQ ID NO: 2486586 - RNA, 19 nt, Homo sapiens
  misc_RNA (1)...(19): siRNA sense strand
agggaaaccagauggaguu

SEQ ID NO: 2486587 - RNA, 19 nt, Homo sapiens
  misc_RNA (1)...(19): siRNA sense strand
ggaucgaguggaagaaaau

SEQ ID NO: 2486588 - RNA, 19 nt, Homo sapiens
  misc_RNA (1)...(19): siRNA sense strand
aggaaauugaugagauugu

SEQ ID NO: 2486589 - RNA, 19 nt, Homo sapiens
  misc_RNA (1)...(19): siRNA sense strand
ggagaaaguuacaagaacc

SEQ ID NO: 2486590 - RNA, 19 nt, Homo sapiens
  misc_RNA (1)...(19): siRNA sense strand
aggcuguaccaguaggcaa

SEQ ID NO: 2486591 - RNA, 19 nt, Homo sapiens
  misc_RNA (1)...(19): siRNA sense strand
aauaaacaggauggagaaa

SEQ ID NO: 2486592 - RNA, 19 nt, Homo sapiens
  misc_RNA (1)...(19): siRNA sense strand
ccccagugguacaggaauu

SEQ ID NO: 2486593 - RNA, 19 nt, Homo sapiens
  misc_RNA (1)...(19): siRNA sense strand
aggaucgaguggaagaaaa

SEQ ID NO: 2486594 - RNA, 19 nt, Homo sapiens
  misc_RNA (1)...(19): siRNA sense strand
cagggaaaccagauggagu

SEQ ID NO: 2486595 - RNA, 19 nt, Homo sapiens
  misc_RNA (1)...(19): siRNA sense strand
guuacaagaacccagggaa

SEQ ID NO: 2486596 - RNA, 19 nt, Homo sapiens
  misc_RNA (1)...(19): siRNA sense strand
gcgagaaggaagagggaga

SEQ ID NO: 2486597 - RNA, 19 nt, Homo sapiens
  misc_RNA (1)...(19): siRNA sense strand
ggaagaagcuuguacguga

SEQ ID NO: 2486598 - RNA, 19 nt, Homo sapiens
  misc_RNA (1)...(19): siRNA sense strand
gcuccaaagaggaacgaaa

SEQ ID NO: 2486599 - RNA, 19 nt, Homo sapiens
  misc_RNA (1)...(19): siRNA sense strand
auacaaagacagauagcaa

SEQ ID NO: 2486600 - RNA, 19 nt, Homo sapiens
  misc_RNA (1)...(19): siRNA sense strand
agaaacagcuugagaggga

SEQ ID NO: 2486601 - RNA, 19 nt, Homo sapiens
  misc_RNA (1)...(19): siRNA sense strand
guauaacagaagagaacua

SEQ ID NO: 2486602 - RNA, 19 nt, Homo sapiens
  misc_RNA (1)...(19): siRNA sense strand
agauuaaggagaaggagaa

SEQ ID NO: 2486603 - RNA, 19 nt, Homo sapiens
  misc_RNA (1)...(19): siRNA sense strand
gagaugaagaugaaggaau

SEQ ID NO: 2486604 - RNA, 19 nt, Homo sapiens
  misc_RNA (1)...(19): siRNA sense strand
ccacaauaccagugcuaau

SEQ ID NO: 2486605 - RNA, 19 nt, Homo sapiens
  misc_RNA (1)...(19): siRNA sense strand
ggaaucagauaguggccua

SEQ ID NO: 2486606 - RNA, 19 nt, Homo sapiens
  misc_RNA (1)...(19): siRNA sense strand
ccaaacagcuggaagcaga

SEQ ID NO: 2486607 - RNA, 19 nt, Homo sapiens
  misc_RNA (1)...(19): siRNA sense strand
caauaaaugagguggagau

SEQ ID NO: 2486608 - RNA, 19 nt, Homo sapiens
  misc_RNA (1)...(19): siRNA sense strand
uuaacaaagccaaaggaaa

SEQ ID NO: 2486609 - RNA, 19 nt, Homo sapiens
  misc_RNA (1)...(19): siRNA sense strand
gaguauaacagaagagaac

SEQ ID NO: 2486610 - RNA, 19 nt, Homo sapiens
  misc_RNA (1)...(19): siRNA sense strand
ggccaagaucuuaggagaa

SEQ ID NO: 2486611 - RNA, 19 nt, Homo sapiens
  misc_RNA (1)...(19): siRNA sense strand
agcaagaagagcaaagaaa

SEQ ID NO: 2486612 - RNA, 19 nt, Homo sapiens
  misc_RNA (1)...(19): siRNA sense strand
aagacaaggagaaagauaa

SEQ ID NO: 2486613 - RNA, 19 nt, Homo sapiens
  misc_RNA (1)...(19): siRNA sense strand
uguuagaaggcuuggaauu

SEQ ID NO: 2486614 - RNA, 19 nt, Homo sapiens
  misc_RNA (1)...(19): siRNA sense strand
ggauaaaagugaaaagaac

SEQ ID NO: 2486615 - RNA, 19 nt, Homo sapiens
  misc_RNA (1)...(19): siRNA sense strand
cagcaaggucaaugaguca

SEQ ID NO: 2486616 - RNA, 19 nt, Homo sapiens
  misc_RNA (1)...(19): siRNA sense strand
aaagacaaggagaaagaua

SEQ ID NO: 2486617 - RNA, 19 nt, Homo sapiens
  misc_RNA (1)...(19): siRNA sense strand
aagaagaagaugagcaguu

SEQ ID NO: 2486618 - RNA, 19 nt, Homo sapiens
  misc_RNA (1)...(19): siRNA sense strand
uaaagaagacauauggcaa

SEQ ID NO: 2486619 - RNA, 19 nt, Homo sapiens
  misc_RNA (1)...(19): siRNA sense strand
acaaugaaguggagcagga

SEQ ID NO: 2486620 - RNA, 19 nt, Homo sapiens
  misc_RNA (1)...(19): siRNA sense strand
uggaagagaaggagaugau

SEQ ID NO: 2486621 - RNA, 19 nt, Homo sapiens
  misc_RNA (1)...(19): siRNA sense strand
aggaagauuugaaacggaa

SEQ ID NO: 2486622 - RNA, 19 nt, Homo sapiens
  misc_RNA (1)...(19): siRNA sense strand
cgucagaaguaucagcaga

SEQ ID NO: 2486623 - RNA, 19 nt, Homo sapiens
  misc_RNA (1)...(19): siRNA sense strand
guaaagaagaagaugagca

SEQ ID NO: 2486624 - RNA, 19 nt, Homo sapiens
  misc_RNA (1)...(19): siRNA sense strand
gcacaugaggagaaagguu

SEQ ID NO: 2486625 - RNA, 19 nt, Homo sapiens
  misc_RNA (1)...(19): siRNA sense strand
ugggagacuuugagauuga

SEQ ID NO: 2486626 - RNA, 19 nt, Homo sapiens
  misc_RNA (1)...(19): siRNA sense strand
agagcaaagaaaaggaaaa

SEQ ID NO: 2486627 - RNA, 19 nt, Homo sapiens
  misc_RNA (1)...(19): siRNA sense strand
uuaaggagaaggagaaaga

SEQ ID NO: 2486628 - RNA, 19 nt, Homo sapiens
  misc_RNA (1)...(19): siRNA sense strand
gucaaugagucaacagaau

SEQ ID NO: 2486629 - RNA, 19 nt, Homo sapiens
  misc_RNA (1)...(19): siRNA sense strand
uggccaagaucuuaggaga

SEQ ID NO: 2486630 - RNA, 19 nt, Homo sapiens
  misc_RNA (1)...(19): siRNA sense strand
cagcagagggugaagagau

SEQ ID NO: 2486631 - RNA, 19 nt, Homo sapiens
  misc_RNA (1)...(19): siRNA sense strand
uggagauccuucaggguuu

SEQ ID NO: 2486632 - RNA, 19 nt, Homo sapiens
  misc_RNA (1)...(19): siRNA sense strand
gauuaaggagaaggagaaa

SEQ ID NO: 2486633 - RNA, 19 nt, Homo sapiens
  misc_RNA (1)...(19): siRNA sense strand
aaggagaaggagaaagauu

SEQ ID NO: 2486634 - RNA, 19 nt, Homo sapiens
  misc_RNA (1)...(19): siRNA sense strand
cagcaaaguggcaaguuau

SEQ ID NO: 2486635 - RNA, 19 nt, Homo sapiens
  misc_RNA (1)...(19): siRNA sense strand
cuagugagaaugaggaaga

SEQ ID NO: 2486636 - RNA, 19 nt, Homo sapiens
  misc_RNA (1)...(19): siRNA sense strand
gugagaaugaggaagaaaa

SEQ ID NO: 2486637 - RNA, 19 nt, Homo sapiens
  misc_RNA (1)...(19): siRNA sense strand
ggguuuggugaguggaaau

SEQ ID NO: 2486638 - RNA, 19 nt, Homo sapiens
  misc_RNA (1)...(19): siRNA sense strand
acaaggagaaagauaagaa

SEQ ID NO: 2486639 - RNA, 19 nt, Homo sapiens
  misc_RNA (1)...(19): siRNA sense strand
caugaaugaaggacaacua

SEQ ID NO: 2486640 - RNA, 19 nt, Homo sapiens
  misc_RNA (1)...(19): siRNA sense strand
ggaacgaaacagcuggauu

SEQ ID NO: 2486641 - RNA, 19 nt, Homo sapiens
  misc_RNA (1)...(19): siRNA sense strand
acuuugagauugaguccaa

SEQ ID NO: 2486642 - RNA, 19 nt, Homo sapiens
  misc_RNA (1)...(19): siRNA sense strand
gagucuuggagucggauaa

SEQ ID NO: 2486643 - RNA, 19 nt, Homo sapiens
  misc_RNA (1)...(19): siRNA sense strand
uggcaaguuuugugggcaa

SEQ ID NO: 2486644 - RNA, 19 nt, Homo sapiens
  misc_RNA (1)...(19): siRNA sense strand
cagcaggaagguugaaaga

SEQ ID NO: 2486645 - RNA, 19 nt, Homo sapiens
  misc_RNA (1)...(19): siRNA sense strand
gaaaagaaaauguuggaca

SEQ ID NO: 2486646 - RNA, 19 nt, Homo sapiens
  misc_RNA (1)...(19): siRNA sense strand
aggagaacggaaucagaua

SEQ ID NO: 2486647 - RNA, 19 nt, Homo sapiens
  misc_RNA (1)...(19): siRNA sense strand
aaggacaacuacugggaga

SEQ ID NO: 2486648 - RNA, 19 nt, Homo sapiens
  misc_RNA (1)...(19): siRNA sense strand
agaggauucuggagcggaa

SEQ ID NO: 2486649 - RNA, 19 nt, Homo sapiens
  misc_RNA (1)...(19): siRNA sense strand
gcuuguacgugaugggagu

SEQ ID NO: 2486650 - RNA, 19 nt, Homo sapiens
  misc_RNA (1)...(19): siRNA sense strand
aagauuaaggagaaggaga

SEQ ID NO: 2486651 - RNA, 19 nt, Homo sapiens
  misc_RNA (1)...(19): siRNA sense strand
ucugaauggaagaguggaa

SEQ ID NO: 2486652 - RNA, 19 nt, Homo sapiens
  misc_RNA (1)...(19): siRNA sense strand
agaagcugauugugagaga

SEQ ID NO: 2486653 - RNA, 19 nt, Homo sapiens
  misc_RNA (1)...(19): siRNA sense strand
agagggagaugauggccaa

SEQ ID NO: 2486654 - RNA, 19 nt, Homo sapiens
  misc_RNA (1)...(19): siRNA sense strand
aaaagaaagauguggucaa

SEQ ID NO: 2486655 - RNA, 19 nt, Homo sapiens
  misc_RNA (1)...(19): siRNA sense strand
gugagaaugcagaacguuu

SEQ ID NO: 2486656 - RNA, 19 nt, Homo sapiens
  misc_RNA (1)...(19): siRNA sense strand
gcgagaaggaagagggaga

SEQ ID NO: 2486657 - RNA, 19 nt, Homo sapiens
  misc_RNA (1)...(19): siRNA sense strand
ggaagaagcuuguacguga

SEQ ID NO: 2486658 - RNA, 19 nt, Homo sapiens
  misc_RNA (1)...(19): siRNA sense strand
gcuccaaagaggaacgaaa

SEQ ID NO: 2486659 - RNA, 19 nt, Homo sapiens
  misc_RNA (1)...(19): siRNA sense strand
auacaaagacagauagcaa

SEQ ID NO: 2486660 - RNA, 19 nt, Homo sapiens
  misc_RNA (1)...(19): siRNA sense strand
agaaacagcuugagaggga

SEQ ID NO: 2486661 - RNA, 19 nt, Homo sapiens
  misc_RNA (1)...(19): siRNA sense strand
guauaacagaagagaacua

SEQ ID NO: 2486662 - RNA, 19 nt, Homo sapiens
  misc_RNA (1)...(19): siRNA sense strand
agauuaaggagaaggagaa

SEQ ID NO: 2486663 - RNA, 19 nt, Homo sapiens
  misc_RNA (1)...(19): siRNA sense strand
gagaugaagaugaaggaau

SEQ ID NO: 2486664 - RNA, 19 nt, Homo sapiens
  misc_RNA (1)...(19): siRNA sense strand
ccacaauaccagugcuaau

SEQ ID NO: 2486665 - RNA, 19 nt, Homo sapiens
  misc_RNA (1)...(19): siRNA sense strand
ggaaucagauaguggccua

SEQ ID NO: 2486666 - RNA, 19 nt, Homo sapiens
  misc_RNA (1)...(19): siRNA sense strand
ccaaacagcuggaagcaga

SEQ ID NO: 2486667 - RNA, 19 nt, Homo sapiens
  misc_RNA (1)...(19): siRNA sense strand
caauaaaugagguggagau

SEQ ID NO: 2486668 - RNA, 19 nt, Homo sapiens
  misc_RNA (1)...(19): siRNA sense strand
uuaacaaagccaaaggaaa

SEQ ID NO: 2486669 - RNA, 19 nt, Homo sapiens
  misc_RNA (1)...(19): siRNA sense strand
gaguauaacagaagagaac

SEQ ID NO: 2486670 - RNA, 19 nt, Homo sapiens
  misc_RNA (1)...(19): siRNA sense strand
ggccaagaucuuaggagaa

SEQ ID NO: 2486671 - RNA, 19 nt, Homo sapiens
  misc_RNA (1)...(19): siRNA sense strand
agcaagaagagcaaagaaa

SEQ ID NO: 2486672 - RNA, 19 nt, Homo sapiens
  misc_RNA (1)...(19): siRNA sense strand
aagacaaggagaaagauaa

SEQ ID NO: 2486673 - RNA, 19 nt, Homo sapiens
  misc_RNA (1)...(19): siRNA sense strand
uguuagaaggcuuggaauu

SEQ ID NO: 2486674 - RNA, 19 nt, Homo sapiens
  misc_RNA (1)...(19): siRNA sense strand
ggauaaaagugaaaagaac

SEQ ID NO: 2486675 - RNA, 19 nt, Homo sapiens
  misc_RNA (1)...(19): siRNA sense strand
cagcaaggucaaugaguca

SEQ ID NO: 2486676 - RNA, 19 nt, Homo sapiens
  misc_RNA (1)...(19): siRNA sense strand
aaagacaaggagaaagaua

SEQ ID NO: 2486677 - RNA, 19 nt, Homo sapiens
  misc_RNA (1)...(19): siRNA sense strand
aagaagaagaugagcaguu

SEQ ID NO: 2486678 - RNA, 19 nt, Homo sapiens
  misc_RNA (1)...(19): siRNA sense strand
uaaagaagacauauggcaa

SEQ ID NO: 2486679 - RNA, 19 nt, Homo sapiens
  misc_RNA (1)...(19): siRNA sense strand
acaaugaaguggagcagga

SEQ ID NO: 2486680 - RNA, 19 nt, Homo sapiens
  misc_RNA (1)...(19): siRNA sense strand
uggaagagaaggagaugau

SEQ ID NO: 2486681 - RNA, 19 nt, Homo sapiens
  misc_RNA (1)...(19): siRNA sense strand
aggaagauuugaaacggaa

SEQ ID NO: 2486682 - RNA, 19 nt, Homo sapiens
  misc_RNA (1)...(19): siRNA sense strand
cgucagaaguaucagcaga

SEQ ID NO: 2486683 - RNA, 19 nt, Homo sapiens
  misc_RNA (1)...(19): siRNA sense strand
guaaagaagaagaugagca

SEQ ID NO: 2486684 - RNA, 19 nt, Homo sapiens
  misc_RNA (1)...(19): siRNA sense strand
gcacaugaggagaaagguu

SEQ ID NO: 2486685 - RNA, 19 nt, Homo sapiens
  misc_RNA (1)...(19): siRNA sense strand
ugggagacuuugagauuga

SEQ ID NO: 2486686 - RNA, 19 nt, Homo sapiens
  misc_RNA (1)...(19): siRNA sense strand
agagcaaagaaaaggaaaa

SEQ ID NO: 2486687 - RNA, 19 nt, Homo sapiens
  misc_RNA (1)...(19): siRNA sense strand
uuaaggagaaggagaaaga

SEQ ID NO: 2486688 - RNA, 19 nt, Homo sapiens
  misc_RNA (1)...(19): siRNA sense strand
gucaaugagucaacagaau

SEQ ID NO: 2486689 - RNA, 19 nt, Homo sapiens
  misc_RNA (1)...(19): siRNA sense strand
uggccaagaucuuaggaga

SEQ ID NO: 2486690 - RNA, 19 nt, Homo sapiens
  misc_RNA (1)...(19): siRNA sense strand
cagcagagggugaagagau

SEQ ID NO: 2486691 - RNA, 19 nt, Homo sapiens
  misc_RNA (1)...(19): siRNA sense strand
uggagauccuucaggguuu

SEQ ID NO: 2486692 - RNA, 19 nt, Homo sapiens
  misc_RNA (1)...(19): siRNA sense strand
gauuaaggagaaggagaaa

SEQ ID NO: 2486693 - RNA, 19 nt, Homo sapiens
  misc_RNA (1)...(19): siRNA sense strand
aaggagaaggagaaagauu

SEQ ID NO: 2486694 - RNA, 19 nt, Homo sapiens
  misc_RNA (1)...(19): siRNA sense strand
cagcaaaguggcaaguuau

SEQ ID NO: 2486695 - RNA, 19 nt, Homo sapiens
  misc_RNA (1)...(19): siRNA sense strand
cuagugagaaugaggaaga

SEQ ID NO: 2486696 - RNA, 19 nt, Homo sapiens
  misc_RNA (1)...(19): siRNA sense strand
gugagaaugaggaagaaaa

SEQ ID NO: 2486697 - RNA, 19 nt, Homo sapiens
  misc_RNA (1)...(19): siRNA sense strand
ggguuuggugaguggaaau

SEQ ID NO: 2486698 - RNA, 19 nt, Homo sapiens
  misc_RNA (1)...(19): siRNA sense strand
acaaggagaaagauaagaa

SEQ ID NO: 2486699 - RNA, 19 nt, Homo sapiens
  misc_RNA (1)...(19): siRNA sense strand
caugaaugaaggacaacua

SEQ ID NO: 2486700 - RNA, 19 nt, Homo sapiens
  misc_RNA (1)...(19): siRNA sense strand
ggaacgaaacagcuggauu

SEQ ID NO: 2486701 - RNA, 19 nt, Homo sapiens
  misc_RNA (1)...(19): siRNA sense strand
acuuugagauugaguccaa

SEQ ID NO: 2486702 - RNA, 19 nt, Homo sapiens
  misc_RNA (1)...(19): siRNA sense strand
gagucuuggagucggauaa

SEQ ID NO: 2486703 - RNA, 19 nt, Homo sapiens
  misc_RNA (1)...(19): siRNA sense strand
uggcaaguuuugugggcaa

SEQ ID NO: 2486704 - RNA, 19 nt, Homo sapiens
  misc_RNA (1)...(19): siRNA sense strand
cagcaggaagguugaaaga

SEQ ID NO: 2486705 - RNA, 19 nt, Homo sapiens
  misc_RNA (1)...(19): siRNA sense strand
gaaaagaaaauguuggaca

SEQ ID NO: 2486706 - RNA, 19 nt, Homo sapiens
  misc_RNA (1)...(19): siRNA sense strand
aggagaacggaaucagaua

SEQ ID NO: 2486707 - RNA, 19 nt, Homo sapiens
  misc_RNA (1)...(19): siRNA sense strand
aaggacaacuacugggaga

SEQ ID NO: 2486708 - RNA, 19 nt, Homo sapiens
  misc_RNA (1)...(19): siRNA sense strand
agaggauucuggagcggaa

SEQ ID NO: 2486709 - RNA, 19 nt, Homo sapiens
  misc_RNA (1)...(19): siRNA sense strand
gcuuguacgugaugggagu

SEQ ID NO: 2486710 - RNA, 19 nt, Homo sapiens
  misc_RNA (1)...(19): siRNA sense strand
aagauuaaggagaaggaga

SEQ ID NO: 2486711 - RNA, 19 nt, Homo sapiens
  misc_RNA (1)...(19): siRNA sense strand
ucugaauggaagaguggaa

SEQ ID NO: 2486712 - RNA, 19 nt, Homo sapiens
  misc_RNA (1)...(19): siRNA sense strand
agaagcugauugugagaga

SEQ ID NO: 2486713 - RNA, 19 nt, Homo sapiens
  misc_RNA (1)...(19): siRNA sense strand
agagggagaugauggccaa

SEQ ID NO: 2486714 - RNA, 19 nt, Homo sapiens
  misc_RNA (1)...(19): siRNA sense strand
aaaagaaagauguggucaa

SEQ ID NO: 2486715 - RNA, 19 nt, Homo sapiens
  misc_RNA (1)...(19): siRNA sense strand
gugagaaugcagaacguuu

SEQ ID NO: 2486716 - RNA, 19 nt, Homo sapiens
  misc_RNA (1)...(19): siRNA sense strand
gcgagaaggaagagggaga

SEQ ID NO: 2486717 - RNA, 19 nt, Homo sapiens
  misc_RNA (1)...(19): siRNA sense strand
ggaagaagcuuguacguga

SEQ ID NO: 2486718 - RNA, 19 nt, Homo sapiens
  misc_RNA (1)...(19): siRNA sense strand
gcuccaaagaggaacgaaa

SEQ ID NO: 2486719 - RNA, 19 nt, Homo sapiens
  misc_RNA (1)...(19): siRNA sense strand
auacaaagacagauagcaa

SEQ ID NO: 2486720 - RNA, 19 nt, Homo sapiens
  misc_RNA (1)...(19): siRNA sense strand
agaaacagcuugagaggga

SEQ ID NO: 2486721 - RNA, 19 nt, Homo sapiens
  misc_RNA (1)...(19): siRNA sense strand
agauuaaggagaaggagaa

SEQ ID NO: 2486722 - RNA, 19 nt, Homo sapiens
  misc_RNA (1)...(19): siRNA sense strand
gagaugaagaugaaggaau

SEQ ID NO: 2486723 - RNA, 19 nt, Homo sapiens
  misc_RNA (1)...(19): siRNA sense strand
ggaaucagauaguggccua

SEQ ID NO: 2486724 - RNA, 19 nt, Homo sapiens
  misc_RNA (1)...(19): siRNA sense strand
ccaaacagcuggaagcaga

SEQ ID NO: 2486725 - RNA, 19 nt, Homo sapiens
  misc_RNA (1)...(19): siRNA sense strand
caauaaaugagguggagau

SEQ ID NO: 2486726 - RNA, 19 nt, Homo sapiens
  misc_RNA (1)...(19): siRNA sense strand
uuaacaaagccaaaggaaa

SEQ ID NO: 2486727 - RNA, 19 nt, Homo sapiens
  misc_RNA (1)...(19): siRNA sense strand
ggccaagaucuuaggagaa

SEQ ID NO: 2486728 - RNA, 19 nt, Homo sapiens
  misc_RNA (1)...(19): siRNA sense strand
agcaagaagagcaaagaaa

SEQ ID NO: 2486729 - RNA, 19 nt, Homo sapiens
  misc_RNA (1)...(19): siRNA sense strand
aagacaaggagaaagauaa

SEQ ID NO: 2486730 - RNA, 19 nt, Homo sapiens
  misc_RNA (1)...(19): siRNA sense strand
uguuagaaggcuuggaauu

SEQ ID NO: 2486731 - RNA, 19 nt, Homo sapiens
  misc_RNA (1)...(19): siRNA sense strand
ggauaaaagugaaaagaac

SEQ ID NO: 2486732 - RNA, 19 nt, Homo sapiens
  misc_RNA (1)...(19): siRNA sense strand
cagcaaggucaaugaguca

SEQ ID NO: 2486733 - RNA, 19 nt, Homo sapiens
  misc_RNA (1)...(19): siRNA sense strand
aaagacaaggagaaagaua

SEQ ID NO: 2486734 - RNA, 19 nt, Homo sapiens
  misc_RNA (1)...(19): siRNA sense strand
aagaagaagaugagcaguu

SEQ ID NO: 2486735 - RNA, 19 nt, Homo sapiens
  misc_RNA (1)...(19): siRNA sense strand
uaaagaagacauauggcaa

SEQ ID NO: 2486736 - RNA, 19 nt, Homo sapiens
  misc_RNA (1)...(19): siRNA sense strand
acaaugaaguggagcagga

SEQ ID NO: 2486737 - RNA, 19 nt, Homo sapiens
  misc_RNA (1)...(19): siRNA sense strand
uggaagagaaggagaugau

SEQ ID NO: 2486738 - RNA, 19 nt, Homo sapiens
  misc_RNA (1)...(19): siRNA sense strand
aggaagauuugaaacggaa

SEQ ID NO: 2486739 - RNA, 19 nt, Homo sapiens
  misc_RNA (1)...(19): siRNA sense strand
cgucagaaguaucagcaga

SEQ ID NO: 2486740 - RNA, 19 nt, Homo sapiens
  misc_RNA (1)...(19): siRNA sense strand
guaaagaagaagaugagca

SEQ ID NO: 2486741 - RNA, 19 nt, Homo sapiens
  misc_RNA (1)...(19): siRNA sense strand
gcacaugaggagaaagguu

SEQ ID NO: 2486742 - RNA, 19 nt, Homo sapiens
  misc_RNA (1)...(19): siRNA sense strand
ugggagacuuugagauuga

SEQ ID NO: 2486743 - RNA, 19 nt, Homo sapiens
  misc_RNA (1)...(19): siRNA sense strand
agagcaaagaaaaggaaaa

SEQ ID NO: 2486744 - RNA, 19 nt, Homo sapiens
  misc_RNA (1)...(19): siRNA sense strand
gucaaugagucaacagaau

SEQ ID NO: 2486745 - RNA, 19 nt, Homo sapiens
  misc_RNA (1)...(19): siRNA sense strand
uuaaggagaaggagaaaga

SEQ ID NO: 2486746 - RNA, 19 nt, Homo sapiens
  misc_RNA (1)...(19): siRNA sense strand
uggccaagaucuuaggaga

SEQ ID NO: 2486747 - RNA, 19 nt, Homo sapiens
  misc_RNA (1)...(19): siRNA sense strand
cagcagagggugaagagau

SEQ ID NO: 2486748 - RNA, 19 nt, Homo sapiens
  misc_RNA (1)...(19): siRNA sense strand
uggagauccuucaggguuu

SEQ ID NO: 2486749 - RNA, 19 nt, Homo sapiens
  misc_RNA (1)...(19): siRNA sense strand
gauuaaggagaaggagaaa

SEQ ID NO: 2486750 - RNA, 19 nt, Homo sapiens
  misc_RNA (1)...(19): siRNA sense strand
cagcaaaguggcaaguuau

SEQ ID NO: 2486751 - RNA, 19 nt, Homo sapiens
  misc_RNA (1)...(19): siRNA sense strand
cuagugagaaugaggaaga

SEQ ID NO: 2486752 - RNA, 19 nt, Homo sapiens
  misc_RNA (1)...(19): siRNA sense strand
gugagaaugaggaagaaaa

SEQ ID NO: 2486753 - RNA, 19 nt, Homo sapiens
  misc_RNA (1)...(19): siRNA sense strand
ggguuuggugaguggaaau

SEQ ID NO: 2486754 - RNA, 19 nt, Homo sapiens
  misc_RNA (1)...(19): siRNA sense strand
aaggagaaggagaaagauu

SEQ ID NO: 2486755 - RNA, 19 nt, Homo sapiens
  misc_RNA (1)...(19): siRNA sense strand
caugaaugaaggacaacua

SEQ ID NO: 2486756 - RNA, 19 nt, Homo sapiens
  misc_RNA (1)...(19): siRNA sense strand
acaaggagaaagauaagaa

SEQ ID NO: 2486757 - RNA, 19 nt, Homo sapiens
  misc_RNA (1)...(19): siRNA sense strand
ggaacgaaacagcuggauu

SEQ ID NO: 2486758 - RNA, 19 nt, Homo sapiens
  misc_RNA (1)...(19): siRNA sense strand
acuuugagauugaguccaa

SEQ ID NO: 2486759 - RNA, 19 nt, Homo sapiens
  misc_RNA (1)...(19): siRNA sense strand
gagucuuggagucggauaa

SEQ ID NO: 2486760 - RNA, 19 nt, Homo sapiens
  misc_RNA (1)...(19): siRNA sense strand
uggcaaguuuugugggcaa

SEQ ID NO: 2486761 - RNA, 19 nt, Homo sapiens
  misc_RNA (1)...(19): siRNA sense strand
cagcaggaagguugaaaga

SEQ ID NO: 2486762 - RNA, 19 nt, Homo sapiens
  misc_RNA (1)...(19): siRNA sense strand
gaaaagaaaauguuggaca

SEQ ID NO: 2486763 - RNA, 19 nt, Homo sapiens
  misc_RNA (1)...(19): siRNA sense strand
aggagaacggaaucagaua

SEQ ID NO: 2486764 - RNA, 19 nt, Homo sapiens
  misc_RNA (1)...(19): siRNA sense strand
aaggacaacuacugggaga

SEQ ID NO: 2486765 - RNA, 19 nt, Homo sapiens
  misc_RNA (1)...(19): siRNA sense strand
agaggauucuggagcggaa

SEQ ID NO: 2486766 - RNA, 19 nt, Homo sapiens
  misc_RNA (1)...(19): siRNA sense strand
gcuuguacgugaugggagu

SEQ ID NO: 2486767 - RNA, 19 nt, Homo sapiens
  misc_RNA (1)...(19): siRNA sense strand
agaagcugauugugagaga

SEQ ID NO: 2486768 - RNA, 19 nt, Homo sapiens
  misc_RNA (1)...(19): siRNA sense strand
aagauuaaggagaaggaga

SEQ ID NO: 2486769 - RNA, 19 nt, Homo sapiens
  misc_RNA (1)...(19): siRNA sense strand
agagggagaugauggccaa

SEQ ID NO: 2486770 - RNA, 19 nt, Homo sapiens
  misc_RNA (1)...(19): siRNA sense strand
aaaagaaagauguggucaa

SEQ ID NO: 2486771 - RNA, 19 nt, Homo sapiens
  misc_RNA (1)...(19): siRNA sense strand
gugagaaugcagaacguuu

SEQ ID NO: 2486772 - RNA, 19 nt, Homo sapiens
  misc_RNA (1)...(19): siRNA sense strand
aaguaucagcagaggguga

SEQ ID NO: 2486773 - RNA, 19 nt, Homo sapiens
  misc_RNA (1)...(19): siRNA sense strand
ggucaaugagucaacagaa

SEQ ID NO: 2486774 - RNA, 19 nt, Homo sapiens
  misc_RNA (1)...(19): siRNA sense strand
auauaugaguugaugcaga

SEQ ID NO: 2486775 - RNA, 19 nt, Homo sapiens
  misc_RNA (1)...(19): siRNA sense strand
augaaguggagcaggaaga

SEQ ID NO: 2486776 - RNA, 19 nt, Homo sapiens
  misc_RNA (1)...(19): siRNA sense strand
agacugaaauagaaggcaa

SEQ ID NO: 2486777 - RNA, 19 nt, Homo sapiens
  misc_RNA (1)...(19): siRNA sense strand
ggauaaugauguugccaga

SEQ ID NO: 2486778 - RNA, 19 nt, Homo sapiens
  misc_RNA (1)...(19): siRNA sense strand
ggaugaugaccaugggauu

SEQ ID NO: 2486779 - RNA, 19 nt, Homo sapiens
  misc_RNA (1)...(19): siRNA sense strand
gcggaauugcacaaggaaa

SEQ ID NO: 2486780 - RNA, 19 nt, Homo sapiens
  misc_RNA (1)...(19): siRNA sense strand
gcaagaaauacaaacgcua

SEQ ID NO: 2486781 - RNA, 19 nt, Homo sapiens
  misc_RNA (1)...(19): siRNA sense strand
cagaaaagccucagagcau

SEQ ID NO: 2486782 - RNA, 19 nt, Homo sapiens
  misc_RNA (1)...(19): siRNA sense strand
cuaaaaggcgcgagagaau

SEQ ID NO: 2486783 - RNA, 19 nt, Homo sapiens
  misc_RNA (1)...(19): siRNA sense strand
uguccaugauugaggaaga

SEQ ID NO: 2486784 - RNA, 19 nt, Homo sapiens
  misc_RNA (1)...(19): siRNA sense strand
gcgcaaagagagaagggca

SEQ ID NO: 2486785 - RNA, 19 nt, Homo sapiens
  misc_RNA (1)...(19): siRNA sense strand
ggagacaacuauagugcca

SEQ ID NO: 2486786 - RNA, 19 nt, Homo sapiens
  misc_RNA (1)...(19): siRNA sense strand
cagcaggaagccagggcaa

SEQ ID NO: 2486787 - RNA, 19 nt, Homo sapiens
  misc_RNA (1)...(19): siRNA sense strand
agaaagaacaaauggccau

SEQ ID NO: 2486788 - RNA, 19 nt, Homo sapiens
  misc_RNA (1)...(19): siRNA sense strand
gggauggagcagagcaaca

SEQ ID NO: 2486789 - RNA, 19 nt, Homo sapiens
  misc_RNA (1)...(19): siRNA sense strand
cggguuaaucgaagaaaga

SEQ ID NO: 2486790 - RNA, 19 nt, Homo sapiens
  misc_RNA (1)...(19): siRNA sense strand
aaauagaaggcaagcgaca

SEQ ID NO: 2486791 - RNA, 19 nt, Homo sapiens
  misc_RNA (1)...(19): siRNA sense strand
gaggaugauaucuggcuaa

SEQ ID NO: 2486792 - RNA, 19 nt, Homo sapiens
  misc_RNA (1)...(19): siRNA sense strand
acgcagagccccaggacaa

SEQ ID NO: 2486793 - RNA, 19 nt, Homo sapiens
  misc_RNA (1)...(19): siRNA sense strand
augacgagcaugagaaaga

SEQ ID NO: 2486794 - RNA, 19 nt, Homo sapiens
  misc_RNA (1)...(19): siRNA sense strand
uggaagacuaugagacaca

SEQ ID NO: 2486795 - RNA, 19 nt, Homo sapiens
  misc_RNA (1)...(19): siRNA sense strand
ggaaaauagagaaagucaa

SEQ ID NO: 2486796 - RNA, 19 nt, Homo sapiens
  misc_RNA (1)...(19): siRNA sense strand
cggaauugcacaaggaaag

SEQ ID NO: 2486797 - RNA, 19 nt, Homo sapiens
  misc_RNA (1)...(19): siRNA sense strand
aagaggagcugaagaggca

SEQ ID NO: 2486798 - RNA, 19 nt, Homo sapiens
  misc_RNA (1)...(19): siRNA sense strand
cugaagaggcagagacaag

SEQ ID NO: 2486799 - RNA, 19 nt, Homo sapiens
  misc_RNA (1)...(19): siRNA sense strand
agaaagaacaauacugcau

SEQ ID NO: 2486800 - RNA, 19 nt, Homo sapiens
  misc_RNA (1)...(19): siRNA sense strand
cauggaagacuaugagaca

SEQ ID NO: 2486801 - RNA, 19 nt, Homo sapiens
  misc_RNA (1)...(19): siRNA sense strand
augaggugcuagaggccaa

SEQ ID NO: 2486802 - RNA, 19 nt, Homo sapiens
  misc_RNA (1)...(19): siRNA sense strand
gcagaggcagaaagaacaa

SEQ ID NO: 2486803 - RNA, 19 nt, Homo sapiens
  misc_RNA (1)...(19): siRNA sense strand
cagggauggagcagagcaa

SEQ ID NO: 2486804 - RNA, 19 nt, Homo sapiens
  misc_RNA (1)...(19): siRNA sense strand
uggcagaggcagaaagaac

SEQ ID NO: 2486805 - RNA, 19 nt, Homo sapiens
  misc_RNA (1)...(19): siRNA sense strand
gauaucugccaaagagcaa

SEQ ID NO: 2486806 - RNA, 19 nt, Homo sapiens
  misc_RNA (1)...(19): siRNA sense strand
gugccuuccaugaggacaa

SEQ ID NO: 2486807 - RNA, 19 nt, Homo sapiens
  misc_RNA (1)...(19): siRNA sense strand
gcaugauugacaaagcaaa

SEQ ID NO: 2486808 - RNA, 19 nt, Homo sapiens
  misc_RNA (1)...(19): siRNA sense strand
cgauuaacauggaggagac

SEQ ID NO: 2486809 - RNA, 19 nt, Homo sapiens
  misc_RNA (1)...(19): siRNA sense strand
gggaaaauagagaaaguca

SEQ ID NO: 2486810 - RNA, 19 nt, Homo sapiens
  misc_RNA (1)...(19): siRNA sense strand
augccaaccaggaggaaga

SEQ ID NO: 2486811 - RNA, 19 nt, Homo sapiens
  misc_RNA (1)...(19): siRNA sense strand
gcuagaaagugaagagucc

SEQ ID NO: 2486812 - RNA, 19 nt, Homo sapiens
  misc_RNA (1)...(19): siRNA sense strand
cgagcaugagaaagaacaa

SEQ ID NO: 2486813 - RNA, 19 nt, Homo sapiens
  misc_RNA (1)...(19): siRNA sense strand
ugaaauagaaggcaagcga

SEQ ID NO: 2486814 - RNA, 19 nt, Homo sapiens
  misc_RNA (1)...(19): siRNA sense strand
aagcagggaucuaugccaa

SEQ ID NO: 2486815 - RNA, 19 nt, Homo sapiens
  misc_RNA (1)...(19): siRNA sense strand
cggauggagaugcaguaaa

SEQ ID NO: 2486816 - RNA, 19 nt, Homo sapiens
  misc_RNA (1)...(19): siRNA sense strand
acaaagcaaaggaggacau

SEQ ID NO: 2486817 - RNA, 19 nt, Homo sapiens
  misc_RNA (1)...(19): siRNA sense strand
cucagagggccgaggagaa

SEQ ID NO: 2486818 - RNA, 19 nt, Homo sapiens
  misc_RNA (1)...(19): siRNA sense strand
aagcugagguccaggaaac

SEQ ID NO: 2486819 - RNA, 19 nt, Homo sapiens
  misc_RNA (1)...(19): siRNA sense strand
ccaaccaggaggaagaaga

SEQ ID NO: 2486820 - RNA, 19 nt, Homo sapiens
  misc_RNA (1)...(19): siRNA sense strand
aggaaagggaagaggagcu

SEQ ID NO: 2486821 - RNA, 19 nt, Homo sapiens
  misc_RNA (1)...(19): siRNA sense strand
caaggagcgcaaagagaga

SEQ ID NO: 2486822 - RNA, 19 nt, Homo sapiens
  misc_RNA (1)...(19): siRNA sense strand
aauacaaacgcuagaaagu

SEQ ID NO: 2486823 - RNA, 19 nt, Homo sapiens
  misc_RNA (1)...(19): siRNA sense strand
ccaagcucuuugaggauga

SEQ ID NO: 2486824 - RNA, 19 nt, Homo sapiens
  misc_RNA (1)...(19): siRNA sense strand
aagcaaaggaggacauugu

SEQ ID NO: 2486825 - RNA, 19 nt, Homo sapiens
  misc_RNA (1)...(19): siRNA sense strand
aaaucauccuagagaaacu

SEQ ID NO: 2486826 - RNA, 19 nt, Homo sapiens
  misc_RNA (1)...(19): siRNA sense strand
cagccagaacccacugaaa

SEQ ID NO: 2486827 - RNA, 19 nt, Homo sapiens
  misc_RNA (1)...(19): siRNA sense strand
cagaaagaacaaauggcca

SEQ ID NO: 2486828 - RNA, 19 nt, Homo sapiens
  misc_RNA (1)...(19): siRNA sense strand
agcaugagaaagaacaaua

SEQ ID NO: 2486829 - RNA, 19 nt, Homo sapiens
  misc_RNA (1)...(19): siRNA sense strand
cagggaaaauagagaaagu

SEQ ID NO: 2486830 - RNA, 19 nt, Homo sapiens
  misc_RNA (1)...(19): siRNA sense strand
aggagaugcuggagcugga

SEQ ID NO: 2486831 - RNA, 19 nt, Homo sapiens
  misc_RNA (1)...(19): siRNA sense strand
agacugaaauagaaggcaa

SEQ ID NO: 2486832 - RNA, 19 nt, Homo sapiens
  misc_RNA (1)...(19): siRNA sense strand
ggauaaugauguugccaga

SEQ ID NO: 2486833 - RNA, 19 nt, Homo sapiens
  misc_RNA (1)...(19): siRNA sense strand
ggaugaugaccaugggauu

SEQ ID NO: 2486834 - RNA, 19 nt, Homo sapiens
  misc_RNA (1)...(19): siRNA sense strand
gcggaauugcacaaggaaa

SEQ ID NO: 2486835 - RNA, 19 nt, Homo sapiens
  misc_RNA (1)...(19): siRNA sense strand
gcaagaaauacaaacgcua

SEQ ID NO: 2486836 - RNA, 19 nt, Homo sapiens
  misc_RNA (1)...(19): siRNA sense strand
cagaaaagccucagagcau

SEQ ID NO: 2486837 - RNA, 19 nt, Homo sapiens
  misc_RNA (1)...(19): siRNA sense strand
cuaaaaggcgcgagagaau

SEQ ID NO: 2486838 - RNA, 19 nt, Homo sapiens
  misc_RNA (1)...(19): siRNA sense strand
uguccaugauugaggaaga

SEQ ID NO: 2486839 - RNA, 19 nt, Homo sapiens
  misc_RNA (1)...(19): siRNA sense strand
gcgcaaagagagaagggca

SEQ ID NO: 2486840 - RNA, 19 nt, Homo sapiens
  misc_RNA (1)...(19): siRNA sense strand
ggagacaacuauagugcca

SEQ ID NO: 2486841 - RNA, 19 nt, Homo sapiens
  misc_RNA (1)...(19): siRNA sense strand
cagcaggaagccagggcaa

SEQ ID NO: 2486842 - RNA, 19 nt, Homo sapiens
  misc_RNA (1)...(19): siRNA sense strand
agaaagaacaaauggccau

SEQ ID NO: 2486843 - RNA, 19 nt, Homo sapiens
  misc_RNA (1)...(19): siRNA sense strand
gggauggagcagagcaaca

SEQ ID NO: 2486844 - RNA, 19 nt, Homo sapiens
  misc_RNA (1)...(19): siRNA sense strand
cggguuaaucgaagaaaga

SEQ ID NO: 2486845 - RNA, 19 nt, Homo sapiens
  misc_RNA (1)...(19): siRNA sense strand
aaauagaaggcaagcgaca

SEQ ID NO: 2486846 - RNA, 19 nt, Homo sapiens
  misc_RNA (1)...(19): siRNA sense strand
gaggaugauaucuggcuaa

SEQ ID NO: 2486847 - RNA, 19 nt, Homo sapiens
  misc_RNA (1)...(19): siRNA sense strand
acgcagagccccaggacaa

SEQ ID NO: 2486848 - RNA, 19 nt, Homo sapiens
  misc_RNA (1)...(19): siRNA sense strand
augacgagcaugagaaaga

SEQ ID NO: 2486849 - RNA, 19 nt, Homo sapiens
  misc_RNA (1)...(19): siRNA sense strand
uggaagacuaugagacaca

SEQ ID NO: 2486850 - RNA, 19 nt, Homo sapiens
  misc_RNA (1)...(19): siRNA sense strand
ggaaaauagagaaagucaa

SEQ ID NO: 2486851 - RNA, 19 nt, Homo sapiens
  misc_RNA (1)...(19): siRNA sense strand
cggaauugcacaaggaaag

SEQ ID NO: 2486852 - RNA, 19 nt, Homo sapiens
  misc_RNA (1)...(19): siRNA sense strand
aagaggagcugaagaggca

SEQ ID NO: 2486853 - RNA, 19 nt, Homo sapiens
  misc_RNA (1)...(19): siRNA sense strand
cugaagaggcagagacaag

SEQ ID NO: 2486854 - RNA, 19 nt, Homo sapiens
  misc_RNA (1)...(19): siRNA sense strand
agaaagaacaauacugcau

SEQ ID NO: 2486855 - RNA, 19 nt, Homo sapiens
  misc_RNA (1)...(19): siRNA sense strand
cauggaagacuaugagaca

SEQ ID NO: 2486856 - RNA, 19 nt, Homo sapiens
  misc_RNA (1)...(19): siRNA sense strand
augaggugcuagaggccaa

SEQ ID NO: 2486857 - RNA, 19 nt, Homo sapiens
  misc_RNA (1)...(19): siRNA sense strand
gcagaggcagaaagaacaa

SEQ ID NO: 2486858 - RNA, 19 nt, Homo sapiens
  misc_RNA (1)...(19): siRNA sense strand
cagggauggagcagagcaa

SEQ ID NO: 2486859 - RNA, 19 nt, Homo sapiens
  misc_RNA (1)...(19): siRNA sense strand
uggcagaggcagaaagaac

SEQ ID NO: 2486860 - RNA, 19 nt, Homo sapiens
  misc_RNA (1)...(19): siRNA sense strand
gauaucugccaaagagcaa

SEQ ID NO: 2486861 - RNA, 19 nt, Homo sapiens
  misc_RNA (1)...(19): siRNA sense strand
gugccuuccaugaggacaa

SEQ ID NO: 2486862 - RNA, 19 nt, Homo sapiens
  misc_RNA (1)...(19): siRNA sense strand
gcaugauugacaaagcaaa

SEQ ID NO: 2486863 - RNA, 19 nt, Homo sapiens
  misc_RNA (1)...(19): siRNA sense strand
cgauuaacauggaggagac

SEQ ID NO: 2486864 - RNA, 19 nt, Homo sapiens
  misc_RNA (1)...(19): siRNA sense strand
gggaaaauagagaaaguca

SEQ ID NO: 2486865 - RNA, 19 nt, Homo sapiens
  misc_RNA (1)...(19): siRNA sense strand
augccaaccaggaggaaga

SEQ ID NO: 2486866 - RNA, 19 nt, Homo sapiens
  misc_RNA (1)...(19): siRNA sense strand
gcuagaaagugaagagucc

SEQ ID NO: 2486867 - RNA, 19 nt, Homo sapiens
  misc_RNA (1)...(19): siRNA sense strand
cgagcaugagaaagaacaa

SEQ ID NO: 2486868 - RNA, 19 nt, Homo sapiens
  misc_RNA (1)...(19): siRNA sense strand
ugaaauagaaggcaagcga

SEQ ID NO: 2486869 - RNA, 19 nt, Homo sapiens
  misc_RNA (1)...(19): siRNA sense strand
aagcagggaucuaugccaa

SEQ ID NO: 2486870 - RNA, 19 nt, Homo sapiens
  misc_RNA (1)...(19): siRNA sense strand
cggauggagaugcaguaaa

SEQ ID NO: 2486871 - RNA, 19 nt, Homo sapiens
  misc_RNA (1)...(19): siRNA sense strand
acaaagcaaaggaggacau

SEQ ID NO: 2486872 - RNA, 19 nt, Homo sapiens
  misc_RNA (1)...(19): siRNA sense strand
cucagagggccgaggagaa

SEQ ID NO: 2486873 - RNA, 19 nt, Homo sapiens
  misc_RNA (1)...(19): siRNA sense strand
aagcugagguccaggaaac

SEQ ID NO: 2486874 - RNA, 19 nt, Homo sapiens
  misc_RNA (1)...(19): siRNA sense strand
ccaaccaggaggaagaaga

SEQ ID NO: 2486875 - RNA, 19 nt, Homo sapiens
  misc_RNA (1)...(19): siRNA sense strand
aggaaagggaagaggagcu

SEQ ID NO: 2486876 - RNA, 19 nt, Homo sapiens
  misc_RNA (1)...(19): siRNA sense strand
caaggagcgcaaagagaga

SEQ ID NO: 2486877 - RNA, 19 nt, Homo sapiens
  misc_RNA (1)...(19): siRNA sense strand
aauacaaacgcuagaaagu

SEQ ID NO: 2486878 - RNA, 19 nt, Homo sapiens
  misc_RNA (1)...(19): siRNA sense strand
ccaagcucuuugaggauga

SEQ ID NO: 2486879 - RNA, 19 nt, Homo sapiens
  misc_RNA (1)...(19): siRNA sense strand
aagcaaaggaggacauugu

SEQ ID NO: 2486880 - RNA, 19 nt, Homo sapiens
  misc_RNA (1)...(19): siRNA sense strand
aaaucauccuagagaaacu

SEQ ID NO: 2486881 - RNA, 19 nt, Homo sapiens
  misc_RNA (1)...(19): siRNA sense strand
cagccagaacccacugaaa

SEQ ID NO: 2486882 - RNA, 19 nt, Homo sapiens
  misc_RNA (1)...(19): siRNA sense strand
cagaaagaacaaauggcca

SEQ ID NO: 2486883 - RNA, 19 nt, Homo sapiens
  misc_RNA (1)...(19): siRNA sense strand
agcaugagaaagaacaaua

SEQ ID NO: 2486884 - RNA, 19 nt, Homo sapiens
  misc_RNA (1)...(19): siRNA sense strand
cagggaaaauagagaaagu

SEQ ID NO: 2486885 - RNA, 19 nt, Homo sapiens
  misc_RNA (1)...(19): siRNA sense strand
aggagaugcuggagcugga

SEQ ID NO: 2486886 - RNA, 19 nt, Homo sapiens
  misc_RNA (1)...(19): siRNA sense strand
cugccagcuucgugggcua

SEQ ID NO: 2486887 - RNA, 19 nt, Homo sapiens
  misc_RNA (1)...(19): siRNA sense strand
ucgaggaggccguggucau

SEQ ID NO: 2486888 - RNA, 19 nt, Homo sapiens
  misc_RNA (1)...(19): siRNA sense strand
ucgaggaggccguggucau

SEQ ID NO: 2486889 - RNA, 19 nt, Homo sapiens
  misc_RNA (1)...(19): siRNA sense strand
agguaaaggaagaaggcga

SEQ ID NO: 2486890 - RNA, 19 nt, Homo sapiens
  misc_RNA (1)...(19): siRNA sense strand
ccagauggcaggaaggaga

SEQ ID NO: 2486891 - RNA, 19 nt, Homo sapiens
  misc_RNA (1)...(19): siRNA sense strand
gguaaaggaagaaggcgau

SEQ ID NO: 2486892 - RNA, 19 nt, Homo sapiens
  misc_RNA (1)...(19): siRNA sense strand
acaucugcccugaaagaaa

SEQ ID NO: 2486893 - RNA, 19 nt, Homo sapiens
  misc_RNA (1)...(19): siRNA sense strand
ccaaagggugggagcacau

SEQ ID NO: 2486894 - RNA, 19 nt, Homo sapiens
  misc_RNA (1)...(19): siRNA sense strand
aggcucaggaaguggaaau

SEQ ID NO: 2486895 - RNA, 19 nt, Homo sapiens
  misc_RNA (1)...(19): siRNA sense strand
gaacagcaccucaggagca

SEQ ID NO: 2486896 - RNA, 19 nt, Homo sapiens
  misc_RNA (1)...(19): siRNA sense strand
uggaaauggccucagguca

SEQ ID NO: 2486897 - RNA, 19 nt, Homo sapiens
  misc_RNA (1)...(19): siRNA sense strand
ugaccaaagaggaagccau

SEQ ID NO: 2486898 - RNA, 19 nt, Homo sapiens
  misc_RNA (1)...(19): siRNA sense strand
gcauggagcccaagagcag

SEQ ID NO: 2486899 - RNA, 19 nt, Homo sapiens
  misc_RNA (1)...(19): siRNA sense strand
ccucuauaaaggacugauu

SEQ ID NO: 2486900 - RNA, 19 nt, Homo sapiens
  misc_RNA (1)...(19): siRNA sense strand
uggacagauugcuggaguu

SEQ ID NO: 2486901 - RNA, 19 nt, Homo sapiens
  misc_RNA (1)...(19): siRNA sense strand
agguaaaggaagaaggcga

SEQ ID NO: 2486902 - RNA, 19 nt, Homo sapiens
  misc_RNA (1)...(19): siRNA sense strand
gguaaaggaagaaggcgau

SEQ ID NO: 2486903 - RNA, 19 nt, Homo sapiens
  misc_RNA (1)...(19): siRNA sense strand
uggacagauugcuggaguu

SEQ ID NO: 2486904 - RNA, 19 nt, Homo sapiens
  misc_RNA (1)...(19): siRNA sense strand
agguaaaggaagaaggcga

SEQ ID NO: 2486905 - RNA, 19 nt, Homo sapiens
  misc_RNA (1)...(19): siRNA sense strand
ccagauggcaggaaggaga

SEQ ID NO: 2486906 - RNA, 19 nt, Homo sapiens
  misc_RNA (1)...(19): siRNA sense strand
gguaaaggaagaaggcgau

SEQ ID NO: 2486907 - RNA, 19 nt, Homo sapiens
  misc_RNA (1)...(19): siRNA sense strand
acaucugcccugaaagaaa

SEQ ID NO: 2486908 - RNA, 19 nt, Homo sapiens
  misc_RNA (1)...(19): siRNA sense strand
ccaaagggugggagcacau

SEQ ID NO: 2486909 - RNA, 19 nt, Homo sapiens
  misc_RNA (1)...(19): siRNA sense strand
aggcucaggaaguggaaau

SEQ ID NO: 2486910 - RNA, 19 nt, Homo sapiens
  misc_RNA (1)...(19): siRNA sense strand
gaacagcaccucaggagca

SEQ ID NO: 2486911 - RNA, 19 nt, Homo sapiens
  misc_RNA (1)...(19): siRNA sense strand
uggaaauggccucagguca

SEQ ID NO: 2486912 - RNA, 19 nt, Homo sapiens
  misc_RNA (1)...(19): siRNA sense strand
ugaccaaagaggaagccau

SEQ ID NO: 2486913 - RNA, 19 nt, Homo sapiens
  misc_RNA (1)...(19): siRNA sense strand
gcauggagcccaagagcag

SEQ ID NO: 2486914 - RNA, 19 nt, Homo sapiens
  misc_RNA (1)...(19): siRNA sense strand
ccucuauaaaggacugauu

SEQ ID NO: 2486915 - RNA, 19 nt, Homo sapiens
  misc_RNA (1)...(19): siRNA sense strand
uggacagauugcuggaguu

SEQ ID NO: 2486916 - RNA, 19 nt, Homo sapiens
  misc_RNA (1)...(19): siRNA sense strand
agguaaaggaagaaggcga

SEQ ID NO: 2486917 - RNA, 19 nt, Homo sapiens
  misc_RNA (1)...(19): siRNA sense strand
gguaaaggaagaaggcgau

SEQ ID NO: 2486918 - RNA, 19 nt, Homo sapiens
  misc_RNA (1)...(19): siRNA sense strand
gaacagcaccucaggagca

SEQ ID NO: 2486919 - RNA, 19 nt, Homo sapiens
  misc_RNA (1)...(19): siRNA sense strand
ccucuauaaaggacugauu

SEQ ID NO: 2486920 - RNA, 19 nt, Homo sapiens
  misc_RNA (1)...(19): siRNA sense strand
uggacagauugcuggaguu

SEQ ID NO: 2486921 - RNA, 19 nt, Homo sapiens
  misc_RNA (1)...(19): siRNA sense strand
agguaaaggaagaaggcga

SEQ ID NO: 2486922 - RNA, 19 nt, Homo sapiens
  misc_RNA (1)...(19): siRNA sense strand
ccagauggcaggaaggaga

SEQ ID NO: 2486923 - RNA, 19 nt, Homo sapiens
  misc_RNA (1)...(19): siRNA sense strand
gguaaaggaagaaggcgau

SEQ ID NO: 2486924 - RNA, 19 nt, Homo sapiens
  misc_RNA (1)...(19): siRNA sense strand
acaucugcccugaaagaaa

SEQ ID NO: 2486925 - RNA, 19 nt, Homo sapiens
  misc_RNA (1)...(19): siRNA sense strand
ccaaagggugggagcacau

SEQ ID NO: 2486926 - RNA, 19 nt, Homo sapiens
  misc_RNA (1)...(19): siRNA sense strand
aggcucaggaaguggaaau

SEQ ID NO: 2486927 - RNA, 19 nt, Homo sapiens
  misc_RNA (1)...(19): siRNA sense strand
cagugguggcugcgugaaa

SEQ ID NO: 2486928 - RNA, 19 nt, Homo sapiens
  misc_RNA (1)...(19): siRNA sense strand
cguuauagucagacauuuu

SEQ ID NO: 2486929 - RNA, 19 nt, Homo sapiens
  misc_RNA (1)...(19): siRNA sense strand
gaacagcaccucaggagca

SEQ ID NO: 2486930 - RNA, 19 nt, Homo sapiens
  misc_RNA (1)...(19): siRNA sense strand
uggaaauggccucagguca

SEQ ID NO: 2486931 - RNA, 19 nt, Homo sapiens
  misc_RNA (1)...(19): siRNA sense strand
ugaccaaagaggaagccau

SEQ ID NO: 2486932 - RNA, 19 nt, Homo sapiens
  misc_RNA (1)...(19): siRNA sense strand
gcauggagcccaagagcag

SEQ ID NO: 2486933 - RNA, 19 nt, Homo sapiens
  misc_RNA (1)...(19): siRNA sense strand
cgugaaagggagcgacacu

SEQ ID NO: 2486934 - RNA, 19 nt, Homo sapiens
  misc_RNA (1)...(19): siRNA sense strand
ccucuauaaaggacugauu

SEQ ID NO: 2486935 - RNA, 19 nt, Homo sapiens
  misc_RNA (1)...(19): siRNA sense strand
uggacagauugcuggaguu

SEQ ID NO: 2486936 - RNA, 19 nt, Homo sapiens
  misc_RNA (1)...(19): siRNA sense strand
cagaagacacagaggacaa

SEQ ID NO: 2486937 - RNA, 19 nt, Homo sapiens
  misc_RNA (1)...(19): siRNA sense strand
gcaaaagcucuaagggaua

SEQ ID NO: 2486938 - RNA, 19 nt, Homo sapiens
  misc_RNA (1)...(19): siRNA sense strand
cuacaaacccaguggagau

SEQ ID NO: 2486939 - RNA, 19 nt, Homo sapiens
  misc_RNA (1)...(19): siRNA sense strand
cgaacuugucauagauuua

SEQ ID NO: 2486940 - RNA, 19 nt, Homo sapiens
  misc_RNA (1)...(19): siRNA sense strand
aggaacaaugacagaaaua

SEQ ID NO: 2486941 - RNA, 19 nt, Homo sapiens
  misc_RNA (1)...(19): siRNA sense strand
acaggauguuguagguaaa

SEQ ID NO: 2486942 - RNA, 19 nt, Homo sapiens
  misc_RNA (1)...(19): siRNA sense strand
ccauaaaggauaaacugaa

SEQ ID NO: 2486943 - RNA, 19 nt, Homo sapiens
  misc_RNA (1)...(19): siRNA sense strand
agguuuacguggagaacau

SEQ ID NO: 2486944 - RNA, 19 nt, Homo sapiens
  misc_RNA (1)...(19): siRNA sense strand
ugacaagaccauagagagu

SEQ ID NO: 2486945 - RNA, 19 nt, Homo sapiens
  misc_RNA (1)...(19): siRNA sense strand
cagcaagagcucuccgaaa

SEQ ID NO: 2486946 - RNA, 19 nt, Homo sapiens
  misc_RNA (1)...(19): siRNA sense strand
agauuaaagaggagcugaa

SEQ ID NO: 2486947 - RNA, 19 nt, Homo sapiens
  misc_RNA (1)...(19): siRNA sense strand
uggcugaagaggaaauaaa

SEQ ID NO: 2486948 - RNA, 19 nt, Homo sapiens
  misc_RNA (1)...(19): siRNA sense strand
aaggauaaacugaagggaa

SEQ ID NO: 2486949 - RNA, 19 nt, Homo sapiens
  misc_RNA (1)...(19): siRNA sense strand
ggauaagagcacagcuuca

SEQ ID NO: 2486950 - RNA, 19 nt, Homo sapiens
  misc_RNA (1)...(19): siRNA sense strand
gcaaaaugauggaugcaau

SEQ ID NO: 2486951 - RNA, 19 nt, Homo sapiens
  misc_RNA (1)...(19): siRNA sense strand
uggaugagaccaagaagaa

SEQ ID NO: 2486952 - RNA, 19 nt, Homo sapiens
  misc_RNA (1)...(19): siRNA sense strand
cagaacaggaggugguaga

SEQ ID NO: 2486953 - RNA, 19 nt, Homo sapiens
  misc_RNA (1)...(19): siRNA sense strand
aggaggugguagagggcau

SEQ ID NO: 2486954 - RNA, 19 nt, Homo sapiens
  misc_RNA (1)...(19): siRNA sense strand
ugguagagggcauggauau

SEQ ID NO: 2486955 - RNA, 19 nt, Homo sapiens
  misc_RNA (1)...(19): siRNA sense strand
gaaaauuacaguagcagaa

SEQ ID NO: 2486956 - RNA, 19 nt, Homo sapiens
  misc_RNA (1)...(19): siRNA sense strand
caucaaaaucugugaacau

SEQ ID NO: 2486957 - RNA, 19 nt, Homo sapiens
  misc_RNA (1)...(19): siRNA sense strand
agagagaacagcccagaaa

SEQ ID NO: 2486958 - RNA, 19 nt, Homo sapiens
  misc_RNA (1)...(19): siRNA sense strand
uagcgaaaguagucaucaa

SEQ ID NO: 2486959 - RNA, 19 nt, Homo sapiens
  misc_RNA (1)...(19): siRNA sense strand
gggccaaacugaagggguu

SEQ ID NO: 2486960 - RNA, 19 nt, Homo sapiens
  misc_RNA (1)...(19): siRNA sense strand
aaaggaacaaugacagaaa

SEQ ID NO: 2486961 - RNA, 19 nt, Homo sapiens
  misc_RNA (1)...(19): siRNA sense strand
cacaggaagcccagugaaa

SEQ ID NO: 2486962 - RNA, 19 nt, Homo sapiens
  misc_RNA (1)...(19): siRNA sense strand
agaguaaagccaugacaau

SEQ ID NO: 2486963 - RNA, 19 nt, Homo sapiens
  misc_RNA (1)...(19): siRNA sense strand
cgaaaguagucaucaaaau

SEQ ID NO: 2486964 - RNA, 19 nt, Homo sapiens
  misc_RNA (1)...(19): siRNA sense strand
ggaaaagaugagacggauu

SEQ ID NO: 2486965 - RNA, 19 nt, Homo sapiens
  misc_RNA (1)...(19): siRNA sense strand
gaugaugagcagaagucua

SEQ ID NO: 2486966 - RNA, 19 nt, Homo sapiens
  misc_RNA (1)...(19): siRNA sense strand
cuggagcagucaaggacaa

SEQ ID NO: 2486967 - RNA, 19 nt, Homo sapiens
  misc_RNA (1)...(19): siRNA sense strand
ggaucgagauagagaagcu

SEQ ID NO: 2486968 - RNA, 19 nt, Homo sapiens
  misc_RNA (1)...(19): siRNA sense strand
cagaaugcaucgagaccca

SEQ ID NO: 2486969 - RNA, 19 nt, Homo sapiens
  misc_RNA (1)...(19): siRNA sense strand
uaguagcgauagugaguau

SEQ ID NO: 2486970 - RNA, 19 nt, Homo sapiens
  misc_RNA (1)...(19): siRNA sense strand
ggcugaggaucgagauaga

SEQ ID NO: 2486971 - RNA, 19 nt, Homo sapiens
  misc_RNA (1)...(19): siRNA sense strand
ccgcaggacacaucaacaa

SEQ ID NO: 2486972 - RNA, 19 nt, Homo sapiens
  misc_RNA (1)...(19): siRNA sense strand
gcugaugcaaaguggauuu

SEQ ID NO: 2486973 - RNA, 19 nt, Homo sapiens
  misc_RNA (1)...(19): siRNA sense strand
aagucagauaguagcgaua

SEQ ID NO: 2486974 - RNA, 19 nt, Homo sapiens
  misc_RNA (1)...(19): siRNA sense strand
gcugaggugaacacagaaa

SEQ ID NO: 2486975 - RNA, 19 nt, Homo sapiens
  misc_RNA (1)...(19): siRNA sense strand
agucuaagaacgagccaga

SEQ ID NO: 2486976 - RNA, 19 nt, Homo sapiens
  misc_RNA (1)...(19): siRNA sense strand
caaaaugauggaugcaaua

SEQ ID NO: 2486977 - RNA, 19 nt, Homo sapiens
  misc_RNA (1)...(19): siRNA sense strand
aagcacaauagcugagauu

SEQ ID NO: 2486978 - RNA, 19 nt, Homo sapiens
  misc_RNA (1)...(19): siRNA sense strand
aaguauguccagaauguua

SEQ ID NO: 2486979 - RNA, 19 nt, Homo sapiens
  misc_RNA (1)...(19): siRNA sense strand
caaucagcaccuucagaaa

SEQ ID NO: 2486980 - RNA, 19 nt, Homo sapiens
  misc_RNA (1)...(19): siRNA sense strand
gccaaguacacuagcaaaa

SEQ ID NO: 2486981 - RNA, 19 nt, Homo sapiens
  misc_RNA (1)...(19): siRNA sense strand
gugaacaugagaugaauga

SEQ ID NO: 2486982 - RNA, 19 nt, Homo sapiens
  misc_RNA (1)...(19): siRNA sense strand
ggauaaacugaagggaaaa

SEQ ID NO: 2486983 - RNA, 19 nt, Homo sapiens
  misc_RNA (1)...(19): siRNA sense strand
agauuuaggagaagaccau

SEQ ID NO: 2486984 - RNA, 19 nt, Homo sapiens
  misc_RNA (1)...(19): siRNA sense strand
ccaaagaaccaucucccaa

SEQ ID NO: 2486985 - RNA, 19 nt, Homo sapiens
  misc_RNA (1)...(19): siRNA sense strand
aggcgguggaugagaccaa

SEQ ID NO: 2486986 - RNA, 19 nt, Homo sapiens
  misc_RNA (1)...(19): siRNA sense strand
aagcggaugcugaggugaa

SEQ ID NO: 2486987 - RNA, 19 nt, Homo sapiens
  misc_RNA (1)...(19): siRNA sense strand
cagaguaaagccaugacaa

SEQ ID NO: 2486988 - RNA, 19 nt, Homo sapiens
  misc_RNA (1)...(19): siRNA sense strand
augaugagcagaagucuaa

SEQ ID NO: 2486989 - RNA, 19 nt, Homo sapiens
  misc_RNA (1)...(19): siRNA sense strand
caggauggacggaaugauu

SEQ ID NO: 2486990 - RNA, 19 nt, Homo sapiens
  misc_RNA (1)...(19): siRNA sense strand
gcuccuaucacgacgaaaa

SEQ ID NO: 2486991 - RNA, 19 nt, Homo sapiens
  misc_RNA (1)...(19): siRNA sense strand
ccgaaaugaaacacaacuu

SEQ ID NO: 2486992 - RNA, 19 nt, Homo sapiens
  misc_RNA (1)...(19): siRNA sense strand
aaugaaacagccagggaca

SEQ ID NO: 2486993 - RNA, 19 nt, Homo sapiens
  misc_RNA (1)...(19): siRNA sense strand
ggaacagcacccugacuau

SEQ ID NO: 2486994 - RNA, 19 nt, Homo sapiens
  misc_RNA (1)...(19): siRNA sense strand
ucugugaacaugagaugaa

SEQ ID NO: 2486995 - RNA, 19 nt, Homo sapiens
  misc_RNA (1)...(19): siRNA sense strand
cagaagacacagaggacaa

SEQ ID NO: 2486996 - RNA, 19 nt, Homo sapiens
  misc_RNA (1)...(19): siRNA sense strand
gcaaaagcucuaagggaua

SEQ ID NO: 2486997 - RNA, 19 nt, Homo sapiens
  misc_RNA (1)...(19): siRNA sense strand
cuacaaacccaguggagau

SEQ ID NO: 2486998 - RNA, 19 nt, Homo sapiens
  misc_RNA (1)...(19): siRNA sense strand
cgaacuugucauagauuua

SEQ ID NO: 2486999 - RNA, 19 nt, Homo sapiens
  misc_RNA (1)...(19): siRNA sense strand
aggaacaaugacagaaaua

SEQ ID NO: 2487000 - RNA, 19 nt, Homo sapiens
  misc_RNA (1)...(19): siRNA sense strand
acaggauguuguagguaaa

SEQ ID NO: 2487001 - RNA, 19 nt, Homo sapiens
  misc_RNA (1)...(19): siRNA sense strand
ccauaaaggauaaacugaa

SEQ ID NO: 2487002 - RNA, 19 nt, Homo sapiens
  misc_RNA (1)...(19): siRNA sense strand
agguuuacguggagaacau

SEQ ID NO: 2487003 - RNA, 19 nt, Homo sapiens
  misc_RNA (1)...(19): siRNA sense strand
ugacaagaccauagagagu

SEQ ID NO: 2487004 - RNA, 19 nt, Homo sapiens
  misc_RNA (1)...(19): siRNA sense strand
cagcaagagcucuccgaaa

SEQ ID NO: 2487005 - RNA, 19 nt, Homo sapiens
  misc_RNA (1)...(19): siRNA sense strand
agauuaaagaggagcugaa

SEQ ID NO: 2487006 - RNA, 19 nt, Homo sapiens
  misc_RNA (1)...(19): siRNA sense strand
uggcugaagaggaaauaaa

SEQ ID NO: 2487007 - RNA, 19 nt, Homo sapiens
  misc_RNA (1)...(19): siRNA sense strand
aaggauaaacugaagggaa

SEQ ID NO: 2487008 - RNA, 19 nt, Homo sapiens
  misc_RNA (1)...(19): siRNA sense strand
ggauaagagcacagcuuca

SEQ ID NO: 2487009 - RNA, 19 nt, Homo sapiens
  misc_RNA (1)...(19): siRNA sense strand
gcaaaaugauggaugcaau

SEQ ID NO: 2487010 - RNA, 19 nt, Homo sapiens
  misc_RNA (1)...(19): siRNA sense strand
uggaugagaccaagaagaa

SEQ ID NO: 2487011 - RNA, 19 nt, Homo sapiens
  misc_RNA (1)...(19): siRNA sense strand
cagaacaggaggugguaga

SEQ ID NO: 2487012 - RNA, 19 nt, Homo sapiens
  misc_RNA (1)...(19): siRNA sense strand
aggaggugguagagggcau

SEQ ID NO: 2487013 - RNA, 19 nt, Homo sapiens
  misc_RNA (1)...(19): siRNA sense strand
ugguagagggcauggauau

SEQ ID NO: 2487014 - RNA, 19 nt, Homo sapiens
  misc_RNA (1)...(19): siRNA sense strand
gaaaauuacaguagcagaa

SEQ ID NO: 2487015 - RNA, 19 nt, Homo sapiens
  misc_RNA (1)...(19): siRNA sense strand
caucaaaaucugugaacau

SEQ ID NO: 2487016 - RNA, 19 nt, Homo sapiens
  misc_RNA (1)...(19): siRNA sense strand
agagagaacagcccagaaa

SEQ ID NO: 2487017 - RNA, 19 nt, Homo sapiens
  misc_RNA (1)...(19): siRNA sense strand
uagcgaaaguagucaucaa

SEQ ID NO: 2487018 - RNA, 19 nt, Homo sapiens
  misc_RNA (1)...(19): siRNA sense strand
gggccaaacugaagggguu

SEQ ID NO: 2487019 - RNA, 19 nt, Homo sapiens
  misc_RNA (1)...(19): siRNA sense strand
aaaggaacaaugacagaaa

SEQ ID NO: 2487020 - RNA, 19 nt, Homo sapiens
  misc_RNA (1)...(19): siRNA sense strand
cacaggaagcccagugaaa

SEQ ID NO: 2487021 - RNA, 19 nt, Homo sapiens
  misc_RNA (1)...(19): siRNA sense strand
agaguaaagccaugacaau

SEQ ID NO: 2487022 - RNA, 19 nt, Homo sapiens
  misc_RNA (1)...(19): siRNA sense strand
cgaaaguagucaucaaaau

SEQ ID NO: 2487023 - RNA, 19 nt, Homo sapiens
  misc_RNA (1)...(19): siRNA sense strand
ggaaaagaugagacggauu

SEQ ID NO: 2487024 - RNA, 19 nt, Homo sapiens
  misc_RNA (1)...(19): siRNA sense strand
gaugaugagcagaagucua

SEQ ID NO: 2487025 - RNA, 19 nt, Homo sapiens
  misc_RNA (1)...(19): siRNA sense strand
cuggagcagucaaggacaa

SEQ ID NO: 2487026 - RNA, 19 nt, Homo sapiens
  misc_RNA (1)...(19): siRNA sense strand
ggaucgagauagagaagcu

SEQ ID NO: 2487027 - RNA, 19 nt, Homo sapiens
  misc_RNA (1)...(19): siRNA sense strand
cagaaugcaucgagaccca

SEQ ID NO: 2487028 - RNA, 19 nt, Homo sapiens
  misc_RNA (1)...(19): siRNA sense strand
uaguagcgauagugaguau

SEQ ID NO: 2487029 - RNA, 19 nt, Homo sapiens
  misc_RNA (1)...(19): siRNA sense strand
ggcugaggaucgagauaga

SEQ ID NO: 2487030 - RNA, 19 nt, Homo sapiens
  misc_RNA (1)...(19): siRNA sense strand
ccgcaggacacaucaacaa

SEQ ID NO: 2487031 - RNA, 19 nt, Homo sapiens
  misc_RNA (1)...(19): siRNA sense strand
gcugaugcaaaguggauuu

SEQ ID NO: 2487032 - RNA, 19 nt, Homo sapiens
  misc_RNA (1)...(19): siRNA sense strand
aagucagauaguagcgaua

SEQ ID NO: 2487033 - RNA, 19 nt, Homo sapiens
  misc_RNA (1)...(19): siRNA sense strand
gcugaggugaacacagaaa

SEQ ID NO: 2487034 - RNA, 19 nt, Homo sapiens
  misc_RNA (1)...(19): siRNA sense strand
agucuaagaacgagccaga

SEQ ID NO: 2487035 - RNA, 19 nt, Homo sapiens
  misc_RNA (1)...(19): siRNA sense strand
caaaaugauggaugcaaua

SEQ ID NO: 2487036 - RNA, 19 nt, Homo sapiens
  misc_RNA (1)...(19): siRNA sense strand
aagcacaauagcugagauu

SEQ ID NO: 2487037 - RNA, 19 nt, Homo sapiens
  misc_RNA (1)...(19): siRNA sense strand
aaguauguccagaauguua

SEQ ID NO: 2487038 - RNA, 19 nt, Homo sapiens
  misc_RNA (1)...(19): siRNA sense strand
caaucagcaccuucagaaa

SEQ ID NO: 2487039 - RNA, 19 nt, Homo sapiens
  misc_RNA (1)...(19): siRNA sense strand
gccaaguacacuagcaaaa

SEQ ID NO: 2487040 - RNA, 19 nt, Homo sapiens
  misc_RNA (1)...(19): siRNA sense strand
gugaacaugagaugaauga

SEQ ID NO: 2487041 - RNA, 19 nt, Homo sapiens
  misc_RNA (1)...(19): siRNA sense strand
ggauaaacugaagggaaaa

SEQ ID NO: 2487042 - RNA, 19 nt, Homo sapiens
  misc_RNA (1)...(19): siRNA sense strand
agauuuaggagaagaccau

SEQ ID NO: 2487043 - RNA, 19 nt, Homo sapiens
  misc_RNA (1)...(19): siRNA sense strand
ccaaagaaccaucucccaa

SEQ ID NO: 2487044 - RNA, 19 nt, Homo sapiens
  misc_RNA (1)...(19): siRNA sense strand
aggcgguggaugagaccaa

SEQ ID NO: 2487045 - RNA, 19 nt, Homo sapiens
  misc_RNA (1)...(19): siRNA sense strand
aagcggaugcugaggugaa

SEQ ID NO: 2487046 - RNA, 19 nt, Homo sapiens
  misc_RNA (1)...(19): siRNA sense strand
cagaguaaagccaugacaa

SEQ ID NO: 2487047 - RNA, 19 nt, Homo sapiens
  misc_RNA (1)...(19): siRNA sense strand
augaugagcagaagucuaa

SEQ ID NO: 2487048 - RNA, 19 nt, Homo sapiens
  misc_RNA (1)...(19): siRNA sense strand
caggauggacggaaugauu

SEQ ID NO: 2487049 - RNA, 19 nt, Homo sapiens
  misc_RNA (1)...(19): siRNA sense strand
gcuccuaucacgacgaaaa

SEQ ID NO: 2487050 - RNA, 19 nt, Homo sapiens
  misc_RNA (1)...(19): siRNA sense strand
ccgaaaugaaacacaacuu

SEQ ID NO: 2487051 - RNA, 19 nt, Homo sapiens
  misc_RNA (1)...(19): siRNA sense strand
aaugaaacagccagggaca

SEQ ID NO: 2487052 - RNA, 19 nt, Homo sapiens
  misc_RNA (1)...(19): siRNA sense strand
ggaacagcacccugacuau

SEQ ID NO: 2487053 - RNA, 19 nt, Homo sapiens
  misc_RNA (1)...(19): siRNA sense strand
ucugugaacaugagaugaa

SEQ ID NO: 2487054 - RNA, 19 nt, Homo sapiens
  misc_RNA (1)...(19): siRNA sense strand
cagaagacacagaggacaa

SEQ ID NO: 2487055 - RNA, 19 nt, Homo sapiens
  misc_RNA (1)...(19): siRNA sense strand
gcaaaagcucuaagggaua

SEQ ID NO: 2487056 - RNA, 19 nt, Homo sapiens
  misc_RNA (1)...(19): siRNA sense strand
cuacaaacccaguggagau

SEQ ID NO: 2487057 - RNA, 19 nt, Homo sapiens
  misc_RNA (1)...(19): siRNA sense strand
cgaacuugucauagauuua

SEQ ID NO: 2487058 - RNA, 19 nt, Homo sapiens
  misc_RNA (1)...(19): siRNA sense strand
aggaacaaugacagaaaua

SEQ ID NO: 2487059 - RNA, 19 nt, Homo sapiens
  misc_RNA (1)...(19): siRNA sense strand
acaggauguuguagguaaa

SEQ ID NO: 2487060 - RNA, 19 nt, Homo sapiens
  misc_RNA (1)...(19): siRNA sense strand
ccauaaaggauaaacugaa

SEQ ID NO: 2487061 - RNA, 19 nt, Homo sapiens
  misc_RNA (1)...(19): siRNA sense strand
agguuuacguggagaacau

SEQ ID NO: 2487062 - RNA, 19 nt, Homo sapiens
  misc_RNA (1)...(19): siRNA sense strand
ugacaagaccauagagagu

SEQ ID NO: 2487063 - RNA, 19 nt, Homo sapiens
  misc_RNA (1)...(19): siRNA sense strand
cagcaagagcucuccgaaa

SEQ ID NO: 2487064 - RNA, 19 nt, Homo sapiens
  misc_RNA (1)...(19): siRNA sense strand
agauuaaagaggagcugaa

SEQ ID NO: 2487065 - RNA, 19 nt, Homo sapiens
  misc_RNA (1)...(19): siRNA sense strand
uggcugaagaggaaauaaa

SEQ ID NO: 2487066 - RNA, 19 nt, Homo sapiens
  misc_RNA (1)...(19): siRNA sense strand
aaggauaaacugaagggaa

SEQ ID NO: 2487067 - RNA, 19 nt, Homo sapiens
  misc_RNA (1)...(19): siRNA sense strand
ggauaagagcacagcuuca

SEQ ID NO: 2487068 - RNA, 19 nt, Homo sapiens
  misc_RNA (1)...(19): siRNA sense strand
gcaaaaugauggaugcaau

SEQ ID NO: 2487069 - RNA, 19 nt, Homo sapiens
  misc_RNA (1)...(19): siRNA sense strand
uggaugagaccaagaagaa

SEQ ID NO: 2487070 - RNA, 19 nt, Homo sapiens
  misc_RNA (1)...(19): siRNA sense strand
cagaacaggaggugguaga

SEQ ID NO: 2487071 - RNA, 19 nt, Homo sapiens
  misc_RNA (1)...(19): siRNA sense strand
aggaggugguagagggcau

SEQ ID NO: 2487072 - RNA, 19 nt, Homo sapiens
  misc_RNA (1)...(19): siRNA sense strand
ugguagagggcauggauau

SEQ ID NO: 2487073 - RNA, 19 nt, Homo sapiens
  misc_RNA (1)...(19): siRNA sense strand
gaaaauuacaguagcagaa

SEQ ID NO: 2487074 - RNA, 19 nt, Homo sapiens
  misc_RNA (1)...(19): siRNA sense strand
caucaaaaucugugaacau

SEQ ID NO: 2487075 - RNA, 19 nt, Homo sapiens
  misc_RNA (1)...(19): siRNA sense strand
agagagaacagcccagaaa

SEQ ID NO: 2487076 - RNA, 19 nt, Homo sapiens
  misc_RNA (1)...(19): siRNA sense strand
uagcgaaaguagucaucaa

SEQ ID NO: 2487077 - RNA, 19 nt, Homo sapiens
  misc_RNA (1)...(19): siRNA sense strand
gggccaaacugaagggguu

SEQ ID NO: 2487078 - RNA, 19 nt, Homo sapiens
  misc_RNA (1)...(19): siRNA sense strand
aaaggaacaaugacagaaa

SEQ ID NO: 2487079 - RNA, 19 nt, Homo sapiens
  misc_RNA (1)...(19): siRNA sense strand
cacaggaagcccagugaaa

SEQ ID NO: 2487080 - RNA, 19 nt, Homo sapiens
  misc_RNA (1)...(19): siRNA sense strand
agaguaaagccaugacaau

SEQ ID NO: 2487081 - RNA, 19 nt, Homo sapiens
  misc_RNA (1)...(19): siRNA sense strand
cgaaaguagucaucaaaau

SEQ ID NO: 2487082 - RNA, 19 nt, Homo sapiens
  misc_RNA (1)...(19): siRNA sense strand
ggaaaagaugagacggauu

SEQ ID NO: 2487083 - RNA, 19 nt, Homo sapiens
  misc_RNA (1)...(19): siRNA sense strand
gaugaugagcagaagucua

SEQ ID NO: 2487084 - RNA, 19 nt, Homo sapiens
  misc_RNA (1)...(19): siRNA sense strand
cuggagcagucaaggacaa

SEQ ID NO: 2487085 - RNA, 19 nt, Homo sapiens
  misc_RNA (1)...(19): siRNA sense strand
ggaucgagauagagaagcu

SEQ ID NO: 2487086 - RNA, 19 nt, Homo sapiens
  misc_RNA (1)...(19): siRNA sense strand
cagaaugcaucgagaccca

SEQ ID NO: 2487087 - RNA, 19 nt, Homo sapiens
  misc_RNA (1)...(19): siRNA sense strand
uaguagcgauagugaguau

SEQ ID NO: 2487088 - RNA, 19 nt, Homo sapiens
  misc_RNA (1)...(19): siRNA sense strand
ggcugaggaucgagauaga

SEQ ID NO: 2487089 - RNA, 19 nt, Homo sapiens
  misc_RNA (1)...(19): siRNA sense strand
ccgcaggacacaucaacaa

SEQ ID NO: 2487090 - RNA, 19 nt, Homo sapiens
  misc_RNA (1)...(19): siRNA sense strand
gcugaugcaaaguggauuu

SEQ ID NO: 2487091 - RNA, 19 nt, Homo sapiens
  misc_RNA (1)...(19): siRNA sense strand
aagucagauaguagcgaua

SEQ ID NO: 2487092 - RNA, 19 nt, Homo sapiens
  misc_RNA (1)...(19): siRNA sense strand
gcugaggugaacacagaaa

SEQ ID NO: 2487093 - RNA, 19 nt, Homo sapiens
  misc_RNA (1)...(19): siRNA sense strand
agucuaagaacgagccaga

SEQ ID NO: 2487094 - RNA, 19 nt, Homo sapiens
  misc_RNA (1)...(19): siRNA sense strand
caaaaugauggaugcaaua

SEQ ID NO: 2487095 - RNA, 19 nt, Homo sapiens
  misc_RNA (1)...(19): siRNA sense strand
aagcacaauagcugagauu

SEQ ID NO: 2487096 - RNA, 19 nt, Homo sapiens
  misc_RNA (1)...(19): siRNA sense strand
aaguauguccagaauguua

SEQ ID NO: 2487097 - RNA, 19 nt, Homo sapiens
  misc_RNA (1)...(19): siRNA sense strand
caaucagcaccuucagaaa

SEQ ID NO: 2487098 - RNA, 19 nt, Homo sapiens
  misc_RNA (1)...(19): siRNA sense strand
gccaaguacacuagcaaaa

SEQ ID NO: 2487099 - RNA, 19 nt, Homo sapiens
  misc_RNA (1)...(19): siRNA sense strand
gugaacaugagaugaauga

SEQ ID NO: 2487100 - RNA, 19 nt, Homo sapiens
  misc_RNA (1)...(19): siRNA sense strand
ggauaaacugaagggaaaa

SEQ ID NO: 2487101 - RNA, 19 nt, Homo sapiens
  misc_RNA (1)...(19): siRNA sense strand
agauuuaggagaagaccau

SEQ ID NO: 2487102 - RNA, 19 nt, Homo sapiens
  misc_RNA (1)...(19): siRNA sense strand
ccaaagaaccaucucccaa

SEQ ID NO: 2487103 - RNA, 19 nt, Homo sapiens
  misc_RNA (1)...(19): siRNA sense strand
aggcgguggaugagaccaa

SEQ ID NO: 2487104 - RNA, 19 nt, Homo sapiens
  misc_RNA (1)...(19): siRNA sense strand
aagcggaugcugaggugaa

SEQ ID NO: 2487105 - RNA, 19 nt, Homo sapiens
  misc_RNA (1)...(19): siRNA sense strand
cagaguaaagccaugacaa

SEQ ID NO: 2487106 - RNA, 19 nt, Homo sapiens
  misc_RNA (1)...(19): siRNA sense strand
augaugagcagaagucuaa

SEQ ID NO: 2487107 - RNA, 19 nt, Homo sapiens
  misc_RNA (1)...(19): siRNA sense strand
caggauggacggaaugauu

SEQ ID NO: 2487108 - RNA, 19 nt, Homo sapiens
  misc_RNA (1)...(19): siRNA sense strand
gcuccuaucacgacgaaaa

SEQ ID NO: 2487109 - RNA, 19 nt, Homo sapiens
  misc_RNA (1)...(19): siRNA sense strand
ccgaaaugaaacacaacuu

SEQ ID NO: 2487110 - RNA, 19 nt, Homo sapiens
  misc_RNA (1)...(19): siRNA sense strand
aaugaaacagccagggaca

SEQ ID NO: 2487111 - RNA, 19 nt, Homo sapiens
  misc_RNA (1)...(19): siRNA sense strand
ggaacagcacccugacuau

SEQ ID NO: 2487112 - RNA, 19 nt, Homo sapiens
  misc_RNA (1)...(19): siRNA sense strand
ucugugaacaugagaugaa

SEQ ID NO: 2487113 - RNA, 19 nt, Homo sapiens
  misc_RNA (1)...(19): siRNA sense strand
ggaagaaagggcagacuua

SEQ ID NO: 2487114 - RNA, 19 nt, Homo sapiens
  misc_RNA (1)...(19): siRNA sense strand
ccaauaagaacaaaggcau

SEQ ID NO: 2487115 - RNA, 19 nt, Homo sapiens
  misc_RNA (1)...(19): siRNA sense strand
gaggauacacugauggagu

SEQ ID NO: 2487116 - RNA, 19 nt, Homo sapiens
  misc_RNA (1)...(19): siRNA sense strand
cugauggaguauuuggaga

SEQ ID NO: 2487117 - RNA, 19 nt, Homo sapiens
  misc_RNA (1)...(19): siRNA sense strand
gccaauaagaacaaaggca

SEQ ID NO: 2487118 - RNA, 19 nt, Homo sapiens
  misc_RNA (1)...(19): siRNA sense strand
caauaagaacaaaggcauc

SEQ ID NO: 2487119 - RNA, 19 nt, Homo sapiens
  misc_RNA (1)...(19): siRNA sense strand
uugagaaaggcaagaagau

SEQ ID NO: 2487120 - RNA, 19 nt, Homo sapiens
  misc_RNA (1)...(19): siRNA sense strand
gaagaaggaagaaagggca

SEQ ID NO: 2487121 - RNA, 19 nt, Homo sapiens
  misc_RNA (1)...(19): siRNA sense strand
ccacauaggugccaggacu

SEQ ID NO: 2487122 - RNA, 19 nt, Homo sapiens
  misc_RNA (1)...(19): siRNA sense strand
acacccaaccaguaggaaa

SEQ ID NO: 2487123 - RNA, 19 nt, Homo sapiens
  misc_RNA (1)...(19): siRNA sense strand
gagcugaagcacugggcca

SEQ ID NO: 2487124 - RNA, 19 nt, Homo sapiens
  misc_RNA (1)...(19): siRNA sense strand
aguagaaugugaaguggca

SEQ ID NO: 2487125 - RNA, 19 nt, Homo sapiens
  misc_RNA (1)...(19): siRNA sense strand
gguccagugcagaggucau

SEQ ID NO: 2487126 - RNA, 19 nt, Homo sapiens
  misc_RNA (1)...(19): siRNA sense strand
gguuacaguagaaugugaa

SEQ ID NO: 2487127 - RNA, 19 nt, Homo sapiens
  misc_RNA (1)...(19): siRNA sense strand
gcagagaagcguuccacga

SEQ ID NO: 2487128 - RNA, 19 nt, Homo sapiens
  misc_RNA (1)...(19): siRNA sense strand
uagaaugugaaguggcaga

SEQ ID NO: 2487129 - RNA, 19 nt, Homo sapiens
  misc_RNA (1)...(19): siRNA sense strand
gagcugaguuggcgagggu

SEQ ID NO: 2487130 - RNA, 19 nt, Homo sapiens
  misc_RNA (1)...(19): siRNA sense strand
ccacaugguugccaaggga

SEQ ID NO: 2487131 - RNA, 19 nt, Homo sapiens
  misc_RNA (1)...(19): siRNA sense strand
aguaggaaacagaggguug

SEQ ID NO: 2487132 - RNA, 19 nt, Homo sapiens
  misc_RNA (1)...(19): siRNA sense strand
uugccaagggaguguggua

SEQ ID NO: 2487133 - RNA, 19 nt, Homo sapiens
  misc_RNA (1)...(19): siRNA sense strand
cacugaggcuggaggagga

SEQ ID NO: 2487134 - RNA, 19 nt, Homo sapiens
  misc_RNA (1)...(19): siRNA sense strand
cagcacugaccauggugaa

SEQ ID NO: 2487135 - RNA, 19 nt, Homo sapiens
  misc_RNA (1)...(19): siRNA sense strand
agggaaagcccaaggacaa

SEQ ID NO: 2487136 - RNA, 19 nt, Homo sapiens
  misc_RNA (1)...(19): siRNA sense strand
ccgaagaggaggaggacga

SEQ ID NO: 2487137 - RNA, 19 nt, Homo sapiens
  misc_RNA (1)...(19): siRNA sense strand
aggaaagguacgagaucaa

SEQ ID NO: 2487138 - RNA, 19 nt, Homo sapiens
  misc_RNA (1)...(19): siRNA sense strand
ggaaaagagcugagugaca

SEQ ID NO: 2487139 - RNA, 19 nt, Homo sapiens
  misc_RNA (1)...(19): siRNA sense strand
gugcagaauaugagggcca

SEQ ID NO: 2487140 - RNA, 19 nt, Homo sapiens
  misc_RNA (1)...(19): siRNA sense strand
gguucaaggaagaggcuga

SEQ ID NO: 2487141 - RNA, 19 nt, Homo sapiens
  misc_RNA (1)...(19): siRNA sense strand
acgucaagaucguggccaa

SEQ ID NO: 2487142 - RNA, 19 nt, Homo sapiens
  misc_RNA (1)...(19): siRNA sense strand
uggacaaggcagaggacau

SEQ ID NO: 2487143 - RNA, 19 nt, Homo sapiens
  misc_RNA (1)...(19): siRNA sense strand
cccaagaaacugaagggaa

SEQ ID NO: 2487144 - RNA, 19 nt, Homo sapiens
  misc_RNA (1)...(19): siRNA sense strand
ucaaagaccugcugagcca

SEQ ID NO: 2487145 - RNA, 19 nt, Homo sapiens
  misc_RNA (1)...(19): siRNA sense strand
gagaagcaccugaaggaga

SEQ ID NO: 2487146 - RNA, 19 nt, Homo sapiens
  misc_RNA (1)...(19): siRNA sense strand
agauguacgaggagcacua

SEQ ID NO: 2487147 - RNA, 19 nt, Homo sapiens
  misc_RNA (1)...(19): siRNA sense strand
ucaccaagcuggagcggca

SEQ ID NO: 2487148 - RNA, 19 nt, Homo sapiens
  misc_RNA (1)...(19): siRNA sense strand
acaagaugguggagugcca

SEQ ID NO: 2487149 - RNA, 19 nt, Homo sapiens
  misc_RNA (1)...(19): siRNA sense strand
ccgugaggaaggaggauga

SEQ ID NO: 2487150 - RNA, 19 nt, Homo sapiens
  misc_RNA (1)...(19): siRNA sense strand
cgucugagagagugaccua

SEQ ID NO: 2487151 - RNA, 19 nt, Homo sapiens
  misc_RNA (1)...(19): siRNA sense strand
gggacaagaugguggagug

SEQ ID NO: 2487152 - RNA, 19 nt, Homo sapiens
  misc_RNA (1)...(19): siRNA sense strand
acauaaagaaggagcugca

SEQ ID NO: 2487153 - RNA, 19 nt, Homo sapiens
  misc_RNA (1)...(19): siRNA sense strand
gcacaggucacuuggcuga

SEQ ID NO: 2487154 - RNA, 19 nt, Homo sapiens
  misc_RNA (1)...(19): siRNA sense strand
aggaagaggcugagaugcu

SEQ ID NO: 2487155 - RNA, 19 nt, Homo sapiens
  misc_RNA (1)...(19): siRNA sense strand
aguccagcgccaagggcaa

SEQ ID NO: 2487156 - RNA, 19 nt, Homo sapiens
  misc_RNA (1)...(19): siRNA sense strand
ccaucuugaacgugugcaa

SEQ ID NO: 2487157 - RNA, 19 nt, Homo sapiens
  misc_RNA (1)...(19): siRNA sense strand
ucucggagcugcagagcca

SEQ ID NO: 2487158 - RNA, 19 nt, Homo sapiens
  misc_RNA (1)...(19): siRNA sense strand
gcauugugcuggugacgga

SEQ ID NO: 2487159 - RNA, 19 nt, Homo sapiens
  misc_RNA (1)...(19): siRNA sense strand
aaaacaaggaggaaaggua

SEQ ID NO: 2487160 - RNA, 19 nt, Homo sapiens
  misc_RNA (1)...(19): siRNA sense strand
ugacagagauggaaggcag

SEQ ID NO: 2487161 - RNA, 19 nt, Homo sapiens
  misc_RNA (1)...(19): siRNA sense strand
gauucuuccacgagaguga

SEQ ID NO: 2487162 - RNA, 19 nt, Homo sapiens
  misc_RNA (1)...(19): siRNA sense strand
gcaacaacaagaaggguac

SEQ ID NO: 2487163 - RNA, 19 nt, Homo sapiens
  misc_RNA (1)...(19): siRNA sense strand
ugcacaagcugguggacga

SEQ ID NO: 2487164 - RNA, 19 nt, Homo sapiens
  misc_RNA (1)...(19): siRNA sense strand
aggaggacgacgaggacga

SEQ ID NO: 2487165 - RNA, 19 nt, Homo sapiens
  misc_RNA (1)...(19): siRNA sense strand
ccgagauguacgaggagca

SEQ ID NO: 2487166 - RNA, 19 nt, Homo sapiens
  misc_RNA (1)...(19): siRNA sense strand
gagcaggccucacaggaca

SEQ ID NO: 2487167 - RNA, 19 nt, Homo sapiens
  misc_RNA (1)...(19): siRNA sense strand
agaccugaaaugugacaau

SEQ ID NO: 2487168 - RNA, 19 nt, Homo sapiens
  misc_RNA (1)...(19): siRNA sense strand
cuacaucagcagcgacaau

SEQ ID NO: 2487169 - RNA, 19 nt, Homo sapiens
  misc_RNA (1)...(19): siRNA sense strand
gggaaagcccaaggacaau

SEQ ID NO: 2487170 - RNA, 19 nt, Homo sapiens
  misc_RNA (1)...(19): siRNA sense strand
ugguggagaagcuggagaa

SEQ ID NO: 2487171 - RNA, 19 nt, Homo sapiens
  misc_RNA (1)...(19): siRNA sense strand
cggcccagaucuaccgcaa

SEQ ID NO: 2487172 - RNA, 19 nt, Homo sapiens
  misc_RNA (1)...(19): siRNA sense strand
cuggaaaagagcugaguga

SEQ ID NO: 2487173 - RNA, 19 nt, Homo sapiens
  misc_RNA (1)...(19): siRNA sense strand
gccaaaagugugauaggua

SEQ ID NO: 2487174 - RNA, 19 nt, Homo sapiens
  misc_RNA (1)...(19): siRNA sense strand
ggggaguguaucugcaaaa

SEQ ID NO: 2487175 - RNA, 19 nt, Homo sapiens
  misc_RNA (1)...(19): siRNA sense strand
gggacgcacccgaugaaau

SEQ ID NO: 2487176 - RNA, 19 nt, Homo sapiens
  misc_RNA (1)...(19): siRNA sense strand
gggaaacguucaucgagca

SEQ ID NO: 2487177 - RNA, 19 nt, Homo sapiens
  misc_RNA (1)...(19): siRNA sense strand
accuauaagucuaguagca

SEQ ID NO: 2487178 - RNA, 19 nt, Homo sapiens
  misc_RNA (1)...(19): siRNA sense strand
agcaacaacaagaagggua

SEQ ID NO: 2487179 - RNA, 19 nt, Homo sapiens
  misc_RNA (1)...(19): siRNA sense strand
ucaaggugaugaagcccaa

SEQ ID NO: 2487180 - RNA, 19 nt, Homo sapiens
  misc_RNA (1)...(19): siRNA sense strand
ugaugaagcccaagguucu

SEQ ID NO: 2487181 - RNA, 19 nt, Homo sapiens
  misc_RNA (1)...(19): siRNA sense strand
ugaugucacuucuggaaaa

SEQ ID NO: 2487182 - RNA, 19 nt, Homo sapiens
  misc_RNA (1)...(19): siRNA sense strand
ccaucaagagccuggacga

SEQ ID NO: 2487183 - RNA, 19 nt, Homo sapiens
  misc_RNA (1)...(19): siRNA sense strand
gugaacaacagcaacaaca

SEQ ID NO: 2487184 - RNA, 19 nt, Homo sapiens
  misc_RNA (1)...(19): siRNA sense strand
ugaacaacagcaacaacaa

SEQ ID NO: 2487185 - RNA, 19 nt, Homo sapiens
  misc_RNA (1)...(19): siRNA sense strand
cgucuaugccuuugggaug

SEQ ID NO: 2487186 - RNA, 19 nt, Homo sapiens
  misc_RNA (1)...(19): siRNA sense strand
aagggaaagcccaaggaca

SEQ ID NO: 2487187 - RNA, 19 nt, Homo sapiens
  misc_RNA (1)...(19): siRNA sense strand
gguggagaagcuggagaaa

SEQ ID NO: 2487188 - RNA, 19 nt, Homo sapiens
  misc_RNA (1)...(19): siRNA sense strand
ccacccaacgucugagaga

SEQ ID NO: 2487189 - RNA, 19 nt, Homo sapiens
  misc_RNA (1)...(19): siRNA sense strand
ccaacgucugagagaguga

SEQ ID NO: 2487190 - RNA, 19 nt, Homo sapiens
  misc_RNA (1)...(19): siRNA sense strand
caggugaacaacagcaaca

SEQ ID NO: 2487191 - RNA, 19 nt, Homo sapiens
  misc_RNA (1)...(19): siRNA sense strand
cugcaggaccggaagcuca

SEQ ID NO: 2487192 - RNA, 19 nt, Homo sapiens
  misc_RNA (1)...(19): siRNA sense strand
gaacacagcaguagguccu

SEQ ID NO: 2487193 - RNA, 19 nt, Homo sapiens
  misc_RNA (1)...(19): siRNA sense strand
gacgaguggacgagcaaga

SEQ ID NO: 2487194 - RNA, 19 nt, Homo sapiens
  misc_RNA (1)...(19): siRNA sense strand
gggaugugcaugcuggaga

SEQ ID NO: 2487195 - RNA, 19 nt, Homo sapiens
  misc_RNA (1)...(19): siRNA sense strand
gguggaagaccccaagaaa

SEQ ID NO: 2487196 - RNA, 19 nt, Homo sapiens
  misc_RNA (1)...(19): siRNA sense strand
caggaguaugcuaggcuau

SEQ ID NO: 2487197 - RNA, 19 nt, Homo sapiens
  misc_RNA (1)...(19): siRNA sense strand
ggaaacguccagagcagca

SEQ ID NO: 2487198 - RNA, 19 nt, Homo sapiens
  misc_RNA (1)...(19): siRNA sense strand
ggaaggcagugcagaccca

SEQ ID NO: 2487199 - RNA, 19 nt, Homo sapiens
  misc_RNA (1)...(19): siRNA sense strand
ccuuguaguugaagagaau

SEQ ID NO: 2487200 - RNA, 19 nt, Homo sapiens
  misc_RNA (1)...(19): siRNA sense strand
ugaaaugcaaggagguaaa

SEQ ID NO: 2487201 - RNA, 19 nt, Homo sapiens
  misc_RNA (1)...(19): siRNA sense strand
caagauaaaccaagcaaaa

SEQ ID NO: 2487202 - RNA, 19 nt, Homo sapiens
  misc_RNA (1)...(19): siRNA sense strand
uuaagaagguauuggacau

SEQ ID NO: 2487203 - RNA, 19 nt, Homo sapiens
  misc_RNA (1)...(19): siRNA sense strand
gcacaagguuauuggcacu

SEQ ID NO: 2487204 - RNA, 19 nt, Homo sapiens
  misc_RNA (1)...(19): siRNA sense strand
ugaugaaaauccagacaaa

SEQ ID NO: 2487205 - RNA, 19 nt, Homo sapiens
  misc_RNA (1)...(19): siRNA sense strand
aguagagcaucaagagcaa

SEQ ID NO: 2487206 - RNA, 19 nt, Homo sapiens
  misc_RNA (1)...(19): siRNA sense strand
gggaaaggcggaaugaaca

SEQ ID NO: 2487207 - RNA, 19 nt, Homo sapiens
  misc_RNA (1)...(19): siRNA sense strand
ccuucaaagcagucagcaa

SEQ ID NO: 2487208 - RNA, 19 nt, Homo sapiens
  misc_RNA (1)...(19): siRNA sense strand
uuaauugggaugagagcaa

SEQ ID NO: 2487209 - RNA, 19 nt, Homo sapiens
  misc_RNA (1)...(19): siRNA sense strand
gguucaagaagcuggaaaa

SEQ ID NO: 2487210 - RNA, 19 nt, Homo sapiens
  misc_RNA (1)...(19): siRNA sense strand
agauggagucaguggaaga

SEQ ID NO: 2487211 - RNA, 19 nt, Homo sapiens
  misc_RNA (1)...(19): siRNA sense strand
aaggcugauuguagaguua

SEQ ID NO: 2487212 - RNA, 19 nt, Homo sapiens
  misc_RNA (1)...(19): siRNA sense strand
cauaagagagacagaagau

SEQ ID NO: 2487213 - RNA, 19 nt, Homo sapiens
  misc_RNA (1)...(19): siRNA sense strand
ggguggaguuauucgaaaa

SEQ ID NO: 2487214 - RNA, 19 nt, Homo sapiens
  misc_RNA (1)...(19): siRNA sense strand
gcucaagaaaucaguguca

SEQ ID NO: 2487215 - RNA, 19 nt, Homo sapiens
  misc_RNA (1)...(19): siRNA sense strand
ccuuauaguuaauugggau

SEQ ID NO: 2487216 - RNA, 19 nt, Homo sapiens
  misc_RNA (1)...(19): siRNA sense strand
ccagaggagauuaagacua

SEQ ID NO: 2487217 - RNA, 19 nt, Homo sapiens
  misc_RNA (1)...(19): siRNA sense strand
ccaaaagaaaacuggcuaa

SEQ ID NO: 2487218 - RNA, 19 nt, Homo sapiens
  misc_RNA (1)...(19): siRNA sense strand
cgcauauuaaugaggauaa

SEQ ID NO: 2487219 - RNA, 19 nt, Homo sapiens
  misc_RNA (1)...(19): siRNA sense strand
caguugaugacuuuagaaa

SEQ ID NO: 2487220 - RNA, 19 nt, Homo sapiens
  misc_RNA (1)...(19): siRNA sense strand
uuugaaaugagcaaggaaa

SEQ ID NO: 2487221 - RNA, 19 nt, Homo sapiens
  misc_RNA (1)...(19): siRNA sense strand
cugaaaugcaaggagguaa

SEQ ID NO: 2487222 - RNA, 19 nt, Homo sapiens
  misc_RNA (1)...(19): siRNA sense strand
guauuggacauaagagaga

SEQ ID NO: 2487223 - RNA, 19 nt, Homo sapiens
  misc_RNA (1)...(19): siRNA sense strand
ucaagaaaucagugucaau

SEQ ID NO: 2487224 - RNA, 19 nt, Homo sapiens
  misc_RNA (1)...(19): siRNA sense strand
cagauugaaacaagaguga

SEQ ID NO: 2487225 - RNA, 19 nt, Homo sapiens
  misc_RNA (1)...(19): siRNA sense strand
cauuggaagaggaaggaca

SEQ ID NO: 2487226 - RNA, 19 nt, Homo sapiens
  misc_RNA (1)...(19): siRNA sense strand
caagagugguucuggggaa

SEQ ID NO: 2487227 - RNA, 19 nt, Homo sapiens
  misc_RNA (1)...(19): siRNA sense strand
ugauguacacacuaagaua

SEQ ID NO: 2487228 - RNA, 19 nt, Homo sapiens
  misc_RNA (1)...(19): siRNA sense strand
aggaaguaaugacgcauau

SEQ ID NO: 2487229 - RNA, 19 nt, Homo sapiens
  misc_RNA (1)...(19): siRNA sense strand
uuguagaguuauuggacca

SEQ ID NO: 2487230 - RNA, 19 nt, Homo sapiens
  misc_RNA (1)...(19): siRNA sense strand
ccaauuaugaagccagaau

SEQ ID NO: 2487231 - RNA, 19 nt, Homo sapiens
  misc_RNA (1)...(19): siRNA sense strand
gagcuuuaucaaacugaaa

SEQ ID NO: 2487232 - RNA, 19 nt, Homo sapiens
  misc_RNA (1)...(19): siRNA sense strand
ucucagauuaagaagguau

SEQ ID NO: 2487233 - RNA, 19 nt, Homo sapiens
  misc_RNA (1)...(19): siRNA sense strand
uuguaaagauggagucagu

SEQ ID NO: 2487234 - RNA, 19 nt, Homo sapiens
  misc_RNA (1)...(19): siRNA sense strand
agaaaacggcacaagguua

SEQ ID NO: 2487235 - RNA, 19 nt, Homo sapiens
  misc_RNA (1)...(19): siRNA sense strand
gaguagagcaucaagagca

SEQ ID NO: 2487236 - RNA, 19 nt, Homo sapiens
  misc_RNA (1)...(19): siRNA sense strand
agguauuggacauaagaga

SEQ ID NO: 2487237 - RNA, 19 nt, Homo sapiens
  misc_RNA (1)...(19): siRNA sense strand
gagacagaagauugccaua

SEQ ID NO: 2487238 - RNA, 19 nt, Homo sapiens
  misc_RNA (1)...(19): siRNA sense strand
caccaacagagcaggcaaa

SEQ ID NO: 2487239 - RNA, 19 nt, Homo sapiens
  misc_RNA (1)...(19): siRNA sense strand
uggagucaguggaagaauu

SEQ ID NO: 2487240 - RNA, 19 nt, Homo sapiens
  misc_RNA (1)...(19): siRNA sense strand
cuuuacuggauuuaggaaa

SEQ ID NO: 2487241 - RNA, 19 nt, Homo sapiens
  misc_RNA (1)...(19): siRNA sense strand
auggaagaaaugacugaaa

SEQ ID NO: 2487242 - RNA, 19 nt, Homo sapiens
  misc_RNA (1)...(19): siRNA sense strand
cgacgucguuuaaaagaaa

SEQ ID NO: 2487243 - RNA, 19 nt, Homo sapiens
  misc_RNA (1)...(19): siRNA sense strand
cuggagaaacuauguauuu

SEQ ID NO: 2487244 - RNA, 19 nt, Homo sapiens
  misc_RNA (1)...(19): siRNA sense strand
caaaagcauuggugacauu

SEQ ID NO: 2487245 - RNA, 19 nt, Homo sapiens
  misc_RNA (1)...(19): siRNA sense strand
caucaucauuagcagguau

SEQ ID NO: 2487246 - RNA, 19 nt, Homo sapiens
  misc_RNA (1)...(19): siRNA sense strand
ugacauugguccaucacau

SEQ ID NO: 2487247 - RNA, 19 nt, Homo sapiens
  misc_RNA (1)...(19): siRNA sense strand
ucaagauaaaccaagcaaa

SEQ ID NO: 2487248 - RNA, 19 nt, Homo sapiens
  misc_RNA (1)...(19): siRNA sense strand
agacagaagauugccauaa

SEQ ID NO: 2487249 - RNA, 19 nt, Homo sapiens
  misc_RNA (1)...(19): siRNA sense strand
gagugauauugguucaaga

SEQ ID NO: 2487250 - RNA, 19 nt, Homo sapiens
  misc_RNA (1)...(19): siRNA sense strand
ggaaggacaacguggugga

SEQ ID NO: 2487251 - RNA, 19 nt, Homo sapiens
  misc_RNA (1)...(19): siRNA sense strand
uagagcaucaagagcaaua

SEQ ID NO: 2487252 - RNA, 19 nt, Homo sapiens
  misc_RNA (1)...(19): siRNA sense strand
ugaaggaaguaaugacgca

SEQ ID NO: 2487253 - RNA, 19 nt, Homo sapiens
  misc_RNA (1)...(19): siRNA sense strand
aggacaacgugguggaccu

SEQ ID NO: 2487254 - RNA, 19 nt, Homo sapiens
  misc_RNA (1)...(19): siRNA sense strand
ggcaaauacuccugagcuc

SEQ ID NO: 2487255 - RNA, 19 nt, Homo sapiens
  misc_RNA (1)...(19): siRNA sense strand
gaagcauacagcugaugaa

SEQ ID NO: 2487256 - RNA, 19 nt, Homo sapiens
  misc_RNA (1)...(19): siRNA sense strand
ggauaaauugcuugagaca

SEQ ID NO: 2487257 - RNA, 19 nt, Homo sapiens
  misc_RNA (1)...(19): siRNA sense strand
gugaaagaucugaaaggua

SEQ ID NO: 2487258 - RNA, 19 nt, Homo sapiens
  misc_RNA (1)...(19): siRNA sense strand
ugacaggaacaaaggaauu

SEQ ID NO: 2487259 - RNA, 19 nt, Homo sapiens
  misc_RNA (1)...(19): siRNA sense strand
aauguaaggcaaagacaaa

SEQ ID NO: 2487260 - RNA, 19 nt, Homo sapiens
  misc_RNA (1)...(19): siRNA sense strand
ccuaaauaucgcagaacau

SEQ ID NO: 2487261 - RNA, 19 nt, Homo sapiens
  misc_RNA (1)...(19): siRNA sense strand
uggaauuuaugcaggauau

SEQ ID NO: 2487262 - RNA, 19 nt, Homo sapiens
  misc_RNA (1)...(19): siRNA sense strand
agaaguauuaggucggaaa

SEQ ID NO: 2487263 - RNA, 19 nt, Homo sapiens
  misc_RNA (1)...(19): siRNA sense strand
gaucaaagaauguaaggca

SEQ ID NO: 2487264 - RNA, 19 nt, Homo sapiens
  misc_RNA (1)...(19): siRNA sense strand
ucgcagaaggacuuagaaa

SEQ ID NO: 2487265 - RNA, 19 nt, Homo sapiens
  misc_RNA (1)...(19): siRNA sense strand
gcaccaagccugaugcaga

SEQ ID NO: 2487266 - RNA, 19 nt, Homo sapiens
  misc_RNA (1)...(19): siRNA sense strand
gugauuaugaugugguuau

SEQ ID NO: 2487267 - RNA, 19 nt, Homo sapiens
  misc_RNA (1)...(19): siRNA sense strand
ggaucuugauaaugauaca

SEQ ID NO: 2487268 - RNA, 19 nt, Homo sapiens
  misc_RNA (1)...(19): siRNA sense strand
guacauucuucgaagcaca

SEQ ID NO: 2487269 - RNA, 19 nt, Homo sapiens
  misc_RNA (1)...(19): siRNA sense strand
ugaaguagaaacaaggauu

SEQ ID NO: 2487270 - RNA, 19 nt, Homo sapiens
  misc_RNA (1)...(19): siRNA sense strand
cuguguggguugaugaaau

SEQ ID NO: 2487271 - RNA, 19 nt, Homo sapiens
  misc_RNA (1)...(19): siRNA sense strand
aggcuaacaagaagaguga

SEQ ID NO: 2487272 - RNA, 19 nt, Homo sapiens
  misc_RNA (1)...(19): siRNA sense strand
cugguaucuuauagagaau

SEQ ID NO: 2487273 - RNA, 19 nt, Homo sapiens
  misc_RNA (1)...(19): siRNA sense strand
agaagcagauggaacggaa

SEQ ID NO: 2487274 - RNA, 19 nt, Homo sapiens
  misc_RNA (1)...(19): siRNA sense strand
guauuaggucggaaagaca

SEQ ID NO: 2487275 - RNA, 19 nt, Homo sapiens
  misc_RNA (1)...(19): siRNA sense strand
aggcagauuccacuagaaa

SEQ ID NO: 2487276 - RNA, 19 nt, Homo sapiens
  misc_RNA (1)...(19): siRNA sense strand
cgcagaaggacuuagaaau

SEQ ID NO: 2487277 - RNA, 19 nt, Homo sapiens
  misc_RNA (1)...(19): siRNA sense strand
accuaaagagacaggcuaa

SEQ ID NO: 2487278 - RNA, 19 nt, Homo sapiens
  misc_RNA (1)...(19): siRNA sense strand
aucaaagaauguaaggcaa

SEQ ID NO: 2487279 - RNA, 19 nt, Homo sapiens
  misc_RNA (1)...(19): siRNA sense strand
agaaaaugauucaggaagu

SEQ ID NO: 2487280 - RNA, 19 nt, Homo sapiens
  misc_RNA (1)...(19): siRNA sense strand
ggacauaauugccuccuga

SEQ ID NO: 2487281 - RNA, 19 nt, Homo sapiens
  misc_RNA (1)...(19): siRNA sense strand
cggaaagacaaggcagauu

SEQ ID NO: 2487282 - RNA, 19 nt, Homo sapiens
  misc_RNA (1)...(19): siRNA sense strand
ccauguuggaucuugauaa

SEQ ID NO: 2487283 - RNA, 19 nt, Homo sapiens
  misc_RNA (1)...(19): siRNA sense strand
acacauuguuucaagaagu

SEQ ID NO: 2487284 - RNA, 19 nt, Homo sapiens
  misc_RNA (1)...(19): siRNA sense strand
gguaucuuauagagaauca

SEQ ID NO: 2487285 - RNA, 19 nt, Homo sapiens
  misc_RNA (1)...(19): siRNA sense strand
gaagcagauggaacggaaa

SEQ ID NO: 2487286 - RNA, 19 nt, Homo sapiens
  misc_RNA (1)...(19): siRNA sense strand
gcugggaggugaagugcga

SEQ ID NO: 2487287 - RNA, 19 nt, Homo sapiens
  misc_RNA (1)...(19): siRNA sense strand
cuuccuaaauaucgcagaa

SEQ ID NO: 2487288 - RNA, 19 nt, Homo sapiens
  misc_RNA (1)...(19): siRNA sense strand
aagucaggccagauugaaa

SEQ ID NO: 2487289 - RNA, 19 nt, Homo sapiens
  misc_RNA (1)...(19): siRNA sense strand
ccugaugcagauauagaua

SEQ ID NO: 2487290 - RNA, 19 nt, Homo sapiens
  misc_RNA (1)...(19): siRNA sense strand
uaaaagaagcacuggugaa

SEQ ID NO: 2487291 - RNA, 19 nt, Homo sapiens
  misc_RNA (1)...(19): siRNA sense strand
aauaguaugucgaguggga

SEQ ID NO: 2487292 - RNA, 19 nt, Homo sapiens
  misc_RNA (1)...(19): siRNA sense strand
ucgagugggacaagccaaa

SEQ ID NO: 2487293 - RNA, 19 nt, Homo sapiens
  misc_RNA (1)...(19): siRNA sense strand
uggaaugagugcugauuuu

SEQ ID NO: 2487294 - RNA, 19 nt, Homo sapiens
  misc_RNA (1)...(19): siRNA sense strand
cucuccaaaugaagggaua

SEQ ID NO: 2487295 - RNA, 19 nt, Homo sapiens
  misc_RNA (1)...(19): siRNA sense strand
cugccuaacuucuggaaac

SEQ ID NO: 2487296 - RNA, 19 nt, Homo sapiens
  misc_RNA (1)...(19): siRNA sense strand
auggaugucugcaaguaaa

SEQ ID NO: 2487297 - RNA, 19 nt, Homo sapiens
  misc_RNA (1)...(19): siRNA sense strand
ccaccgaccucauaggcuu

SEQ ID NO: 2487298 - RNA, 19 nt, Homo sapiens
  misc_RNA (1)...(19): siRNA sense strand
aggcaaagacaaaaugauu

SEQ ID NO: 2487299 - RNA, 19 nt, Homo sapiens
  misc_RNA (1)...(19): siRNA sense strand
ccuaaguaauugcugcuau

SEQ ID NO: 2487300 - RNA, 19 nt, Homo sapiens
  misc_RNA (1)...(19): siRNA sense strand
cgacacguggagauacaaa

SEQ ID NO: 2487301 - RNA, 19 nt, Homo sapiens
  misc_RNA (1)...(19): siRNA sense strand
guugacugcccuugaaauu

SEQ ID NO: 2487302 - RNA, 19 nt, Homo sapiens
  misc_RNA (1)...(19): siRNA sense strand
ccgaaagcaagucaaguuu

SEQ ID NO: 2487303 - RNA, 19 nt, Homo sapiens
  misc_RNA (1)...(19): siRNA sense strand
ggaauauucaaaaggguga

SEQ ID NO: 2487304 - RNA, 19 nt, Homo sapiens
  misc_RNA (1)...(19): siRNA sense strand
gacgacacguggagauaca

SEQ ID NO: 2487305 - RNA, 19 nt, Homo sapiens
  misc_RNA (1)...(19): siRNA sense strand
gcggaagaaauaaagagau

SEQ ID NO: 2487306 - RNA, 19 nt, Homo sapiens
  misc_RNA (1)...(19): siRNA sense strand
ccucauugaaagaacuaga

SEQ ID NO: 2487307 - RNA, 19 nt, Homo sapiens
  misc_RNA (1)...(19): siRNA sense strand
cauugaaagaacuagauca

SEQ ID NO: 2487308 - RNA, 19 nt, Homo sapiens
  misc_RNA (1)...(19): siRNA sense strand
cugacaggaacaaaggaau

SEQ ID NO: 2487309 - RNA, 19 nt, Homo sapiens
  misc_RNA (1)...(19): siRNA sense strand
gagaaucacucaaacacca

SEQ ID NO: 2487310 - RNA, 19 nt, Homo sapiens
  misc_RNA (1)...(19): siRNA sense strand
ggauugaggugcagcccaa

SEQ ID NO: 2487311 - RNA, 19 nt, Homo sapiens
  misc_RNA (1)...(19): siRNA sense strand
uuucggaaucagaggauaa

SEQ ID NO: 2487312 - RNA, 19 nt, Homo sapiens
  misc_RNA (1)...(19): siRNA sense strand
cggaaaggagagacggaca

SEQ ID NO: 2487313 - RNA, 19 nt, Homo sapiens
  misc_RNA (1)...(19): siRNA sense strand
cugcauggcuacuuggaga

SEQ ID NO: 2487314 - RNA, 19 nt, Homo sapiens
  misc_RNA (1)...(19): siRNA sense strand
cugcaggacuccaagguca

SEQ ID NO: 2487315 - RNA, 19 nt, Homo sapiens
  misc_RNA (1)...(19): siRNA sense strand
ucugcaacgggaagagaaa

SEQ ID NO: 2487316 - RNA, 19 nt, Homo sapiens
  misc_RNA (1)...(19): siRNA sense strand
gaggaagaacacacgggua

SEQ ID NO: 2487317 - RNA, 19 nt, Homo sapiens
  misc_RNA (1)...(19): siRNA sense strand
auggcuacuuggagaauga

SEQ ID NO: 2487318 - RNA, 19 nt, Homo sapiens
  misc_RNA (1)...(19): siRNA sense strand
aggaagaacacacggguac

SEQ ID NO: 2487319 - RNA, 19 nt, Homo sapiens
  misc_RNA (1)...(19): siRNA sense strand
cugggagauggaagcgaaa

SEQ ID NO: 2487320 - RNA, 19 nt, Homo sapiens
  misc_RNA (1)...(19): siRNA sense strand
gagaagcagagcacggaca

SEQ ID NO: 2487321 - RNA, 19 nt, Homo sapiens
  misc_RNA (1)...(19): siRNA sense strand
cggaaucagaggauaacca

SEQ ID NO: 2487322 - RNA, 19 nt, Homo sapiens
  misc_RNA (1)...(19): siRNA sense strand
ggauugaggugcagcccaa

SEQ ID NO: 2487323 - RNA, 19 nt, Homo sapiens
  misc_RNA (1)...(19): siRNA sense strand
uuucggaaucagaggauaa

SEQ ID NO: 2487324 - RNA, 19 nt, Homo sapiens
  misc_RNA (1)...(19): siRNA sense strand
cggaaaggagagacggaca

SEQ ID NO: 2487325 - RNA, 19 nt, Homo sapiens
  misc_RNA (1)...(19): siRNA sense strand
cugcauggcuacuuggaga

SEQ ID NO: 2487326 - RNA, 19 nt, Homo sapiens
  misc_RNA (1)...(19): siRNA sense strand
cugcaggacuccaagguca

SEQ ID NO: 2487327 - RNA, 19 nt, Homo sapiens
  misc_RNA (1)...(19): siRNA sense strand
ucugcaacgggaagagaaa

SEQ ID NO: 2487328 - RNA, 19 nt, Homo sapiens
  misc_RNA (1)...(19): siRNA sense strand
gaggaagaacacacgggua

SEQ ID NO: 2487329 - RNA, 19 nt, Homo sapiens
  misc_RNA (1)...(19): siRNA sense strand
auggcuacuuggagaauga

SEQ ID NO: 2487330 - RNA, 19 nt, Homo sapiens
  misc_RNA (1)...(19): siRNA sense strand
aggaagaacacacggguac

SEQ ID NO: 2487331 - RNA, 19 nt, Homo sapiens
  misc_RNA (1)...(19): siRNA sense strand
cugggagauggaagcgaaa

SEQ ID NO: 2487332 - RNA, 19 nt, Homo sapiens
  misc_RNA (1)...(19): siRNA sense strand
gagaagcagagcacggaca

SEQ ID NO: 2487333 - RNA, 19 nt, Homo sapiens
  misc_RNA (1)...(19): siRNA sense strand
cggaaucagaggauaacca

SEQ ID NO: 2487334 - RNA, 19 nt, Homo sapiens
  misc_RNA (1)...(19): siRNA sense strand
uuucggaaucagaggauaa

SEQ ID NO: 2487335 - RNA, 19 nt, Homo sapiens
  misc_RNA (1)...(19): siRNA sense strand
cggaaaggagagacggaca

SEQ ID NO: 2487336 - RNA, 19 nt, Homo sapiens
  misc_RNA (1)...(19): siRNA sense strand
cugcaggacuccaagguca

SEQ ID NO: 2487337 - RNA, 19 nt, Homo sapiens
  misc_RNA (1)...(19): siRNA sense strand
ucugcaacgggaagagaaa

SEQ ID NO: 2487338 - RNA, 19 nt, Homo sapiens
  misc_RNA (1)...(19): siRNA sense strand
gaggaagaacacacgggua

SEQ ID NO: 2487339 - RNA, 19 nt, Homo sapiens
  misc_RNA (1)...(19): siRNA sense strand
aggaagaacacacggguac

SEQ ID NO: 2487340 - RNA, 19 nt, Homo sapiens
  misc_RNA (1)...(19): siRNA sense strand
cugggagauggaagcgaaa

SEQ ID NO: 2487341 - RNA, 19 nt, Homo sapiens
  misc_RNA (1)...(19): siRNA sense strand
gagaagcagagcacggaca

SEQ ID NO: 2487342 - RNA, 19 nt, Homo sapiens
  misc_RNA (1)...(19): siRNA sense strand
cggaaucagaggauaacca

SEQ ID NO: 2487343 - RNA, 19 nt, Homo sapiens
  misc_RNA (1)...(19): siRNA sense strand
ggauugaggugcagcccaa

SEQ ID NO: 2487344 - RNA, 19 nt, Homo sapiens
  misc_RNA (1)...(19): siRNA sense strand
uuucggaaucagaggauaa

SEQ ID NO: 2487345 - RNA, 19 nt, Homo sapiens
  misc_RNA (1)...(19): siRNA sense strand
cggaaaggagagacggaca

SEQ ID NO: 2487346 - RNA, 19 nt, Homo sapiens
  misc_RNA (1)...(19): siRNA sense strand
cugcauggcuacuuggaga

SEQ ID NO: 2487347 - RNA, 19 nt, Homo sapiens
  misc_RNA (1)...(19): siRNA sense strand
cugcaggacuccaagguca

SEQ ID NO: 2487348 - RNA, 19 nt, Homo sapiens
  misc_RNA (1)...(19): siRNA sense strand
ucugcaacgggaagagaaa

SEQ ID NO: 2487349 - RNA, 19 nt, Homo sapiens
  misc_RNA (1)...(19): siRNA sense strand
gaggaagaacacacgggua

SEQ ID NO: 2487350 - RNA, 19 nt, Homo sapiens
  misc_RNA (1)...(19): siRNA sense strand
auggcuacuuggagaauga

SEQ ID NO: 2487351 - RNA, 19 nt, Homo sapiens
  misc_RNA (1)...(19): siRNA sense strand
aggaagaacacacggguac

SEQ ID NO: 2487352 - RNA, 19 nt, Homo sapiens
  misc_RNA (1)...(19): siRNA sense strand
cugggagauggaagcgaaa

SEQ ID NO: 2487353 - RNA, 19 nt, Homo sapiens
  misc_RNA (1)...(19): siRNA sense strand
gagaagcagagcacggaca

SEQ ID NO: 2487354 - RNA, 19 nt, Homo sapiens
  misc_RNA (1)...(19): siRNA sense strand
cggaaucagaggauaacca

SEQ ID NO: 2487355 - RNA, 19 nt, Homo sapiens
  misc_RNA (1)...(19): siRNA sense strand
ggauugaggugcagcccaa

SEQ ID NO: 2487356 - RNA, 19 nt, Homo sapiens
  misc_RNA (1)...(19): siRNA sense strand
uuucggaaucagaggauaa

SEQ ID NO: 2487357 - RNA, 19 nt, Homo sapiens
  misc_RNA (1)...(19): siRNA sense strand
cggaaaggagagacggaca

SEQ ID NO: 2487358 - RNA, 19 nt, Homo sapiens
  misc_RNA (1)...(19): siRNA sense strand
cugcauggcuacuuggaga

SEQ ID NO: 2487359 - RNA, 19 nt, Homo sapiens
  misc_RNA (1)...(19): siRNA sense strand
cugcaggacuccaagguca

SEQ ID NO: 2487360 - RNA, 19 nt, Homo sapiens
  misc_RNA (1)...(19): siRNA sense strand
ucugcaacgggaagagaaa

SEQ ID NO: 2487361 - RNA, 19 nt, Homo sapiens
  misc_RNA (1)...(19): siRNA sense strand
gaggaagaacacacgggua

SEQ ID NO: 2487362 - RNA, 19 nt, Homo sapiens
  misc_RNA (1)...(19): siRNA sense strand
auggcuacuuggagaauga

SEQ ID NO: 2487363 - RNA, 19 nt, Homo sapiens
  misc_RNA (1)...(19): siRNA sense strand
aggaagaacacacggguac

SEQ ID NO: 2487364 - RNA, 19 nt, Homo sapiens
  misc_RNA (1)...(19): siRNA sense strand
cugggagauggaagcgaaa

SEQ ID NO: 2487365 - RNA, 19 nt, Homo sapiens
  misc_RNA (1)...(19): siRNA sense strand
gagaagcagagcacggaca

SEQ ID NO: 2487366 - RNA, 19 nt, Homo sapiens
  misc_RNA (1)...(19): siRNA sense strand
cggaaucagaggauaacca

SEQ ID NO: 2487367 - RNA, 19 nt, Homo sapiens
  misc_RNA (1)...(19): siRNA sense strand
aaauuuaaacugagggaca

SEQ ID NO: 2487368 - RNA, 19 nt, Homo sapiens
  misc_RNA (1)...(19): siRNA sense strand
gcaaagagggccagcacga

SEQ ID NO: 2487369 - RNA, 19 nt, Homo sapiens
  misc_RNA (1)...(19): siRNA sense strand
gcugaauguaauggauaaa

SEQ ID NO: 2487370 - RNA, 19 nt, Homo sapiens
  misc_RNA (1)...(19): siRNA sense strand
acugcaaguuccaggagaa

SEQ ID NO: 2487371 - RNA, 19 nt, Homo sapiens
  misc_RNA (1)...(19): siRNA sense strand
aggaagggccugagugcca

SEQ ID NO: 2487372 - RNA, 19 nt, Homo sapiens
  misc_RNA (1)...(19): siRNA sense strand
ggucaugaaggaauggcau

SEQ ID NO: 2487373 - RNA, 19 nt, Homo sapiens
  misc_RNA (1)...(19): siRNA sense strand
gucaugaaggaauggcaua

SEQ ID NO: 2487374 - RNA, 19 nt, Homo sapiens
  misc_RNA (1)...(19): siRNA sense strand
gggaagguugugaagacuu

SEQ ID NO: 2487375 - RNA, 19 nt, Homo sapiens
  misc_RNA (1)...(19): siRNA sense strand
acugcaaguuccaggagaa

SEQ ID NO: 2487376 - RNA, 19 nt, Homo sapiens
  misc_RNA (1)...(19): siRNA sense strand
aggaagggccugagugcca

SEQ ID NO: 2487377 - RNA, 19 nt, Homo sapiens
  misc_RNA (1)...(19): siRNA sense strand
ggucaugaaggaauggcau

SEQ ID NO: 2487378 - RNA, 19 nt, Homo sapiens
  misc_RNA (1)...(19): siRNA sense strand
gucaugaaggaauggcaua

SEQ ID NO: 2487379 - RNA, 19 nt, Homo sapiens
  misc_RNA (1)...(19): siRNA sense strand
gggaagguugugaagacuu

SEQ ID NO: 2487380 - RNA, 19 nt, Homo sapiens
  misc_RNA (1)...(19): siRNA sense strand
gugaagaaagccagggaga

SEQ ID NO: 2487381 - RNA, 19 nt, Homo sapiens
  misc_RNA (1)...(19): siRNA sense strand
gagaaauccacauggccaa

SEQ ID NO: 2487382 - RNA, 19 nt, Homo sapiens
  misc_RNA (1)...(19): siRNA sense strand
agacaggccaggaggguga

SEQ ID NO: 2487383 - RNA, 19 nt, Homo sapiens
  misc_RNA (1)...(19): siRNA sense strand
ggacagagcuggugcugag

SEQ ID NO: 2487384 - RNA, 19 nt, Homo sapiens
  misc_RNA (1)...(19): siRNA sense strand
cagccaaggagaagguuca

SEQ ID NO: 2487385 - RNA, 19 nt, Homo sapiens
  misc_RNA (1)...(19): siRNA sense strand
aggagaagguucaagucca

SEQ ID NO: 2487386 - RNA, 19 nt, Homo sapiens
  misc_RNA (1)...(19): siRNA sense strand
aggccaggagggugaagaa

SEQ ID NO: 2487387 - RNA, 19 nt, Homo sapiens
  misc_RNA (1)...(19): siRNA sense strand
cgagaaauccacauggcca

SEQ ID NO: 2487388 - RNA, 19 nt, Homo sapiens
  misc_RNA (1)...(19): siRNA sense strand
agaagaaacgagaaaucca

SEQ ID NO: 2487389 - RNA, 19 nt, Homo sapiens
  misc_RNA (1)...(19): siRNA sense strand
uggagaagccgcagcaacu

SEQ ID NO: 2487390 - RNA, 19 nt, Homo sapiens
  misc_RNA (1)...(19): siRNA sense strand
cagaaaagaucaaggucaa

SEQ ID NO: 2487391 - RNA, 19 nt, Homo sapiens
  misc_RNA (1)...(19): siRNA sense strand
agcuaugaccagagggaaa

SEQ ID NO: 2487392 - RNA, 19 nt, Homo sapiens
  misc_RNA (1)...(19): siRNA sense strand
cuagaagauaugagagaga

SEQ ID NO: 2487393 - RNA, 19 nt, Homo sapiens
  misc_RNA (1)...(19): siRNA sense strand
agauauaccaccagcaaau

SEQ ID NO: 2487394 - RNA, 19 nt, Homo sapiens
  misc_RNA (1)...(19): siRNA sense strand
uaugagagagauugagaaa

SEQ ID NO: 2487395 - RNA, 19 nt, Homo sapiens
  misc_RNA (1)...(19): siRNA sense strand
gccuauagguucaagaaaa

SEQ ID NO: 2487396 - RNA, 19 nt, Homo sapiens
  misc_RNA (1)...(19): siRNA sense strand
aggaaugaguagcagggua

SEQ ID NO: 2487397 - RNA, 19 nt, Homo sapiens
  misc_RNA (1)...(19): siRNA sense strand
agaagauaugagagagauu

SEQ ID NO: 2487398 - RNA, 19 nt, Homo sapiens
  misc_RNA (1)...(19): siRNA sense strand
aggucgaaauaaugggaau

SEQ ID NO: 2487399 - RNA, 19 nt, Homo sapiens
  misc_RNA (1)...(19): siRNA sense strand
aagaaagguaugcuagaaa

SEQ ID NO: 2487400 - RNA, 19 nt, Homo sapiens
  misc_RNA (1)...(19): siRNA sense strand
cgaaauaaugggaauggau

SEQ ID NO: 2487401 - RNA, 19 nt, Homo sapiens
  misc_RNA (1)...(19): siRNA sense strand
uugaguaguaagacggaaa

SEQ ID NO: 2487402 - RNA, 19 nt, Homo sapiens
  misc_RNA (1)...(19): siRNA sense strand
ugguacaauuaaaggguca

SEQ ID NO: 2487403 - RNA, 19 nt, Homo sapiens
  misc_RNA (1)...(19): siRNA sense strand
uaacaaugggcaaggucua

SEQ ID NO: 2487404 - RNA, 19 nt, Homo sapiens
  misc_RNA (1)...(19): siRNA sense strand
auaaacaguacaugggcaa

SEQ ID NO: 2487405 - RNA, 19 nt, Homo sapiens
  misc_RNA (1)...(19): siRNA sense strand
gaaaaugaugucagagauu

SEQ ID NO: 2487406 - RNA, 19 nt, Homo sapiens
  misc_RNA (1)...(19): siRNA sense strand
cccuagaagauaugagaga

SEQ ID NO: 2487407 - RNA, 19 nt, Homo sapiens
  misc_RNA (1)...(19): siRNA sense strand
ugggaaagcaacuggcgaa

SEQ ID NO: 2487408 - RNA, 19 nt, Homo sapiens
  misc_RNA (1)...(19): siRNA sense strand
gcuuuguagaguucagaaa

SEQ ID NO: 2487409 - RNA, 19 nt, Homo sapiens
  misc_RNA (1)...(19): siRNA sense strand
ugaugaagaugcaaggcuu

SEQ ID NO: 2487410 - RNA, 19 nt, Homo sapiens
  misc_RNA (1)...(19): siRNA sense strand
acagaaagacaguggguag

SEQ ID NO: 2487411 - RNA, 19 nt, Homo sapiens
  misc_RNA (1)...(19): siRNA sense strand
cagaaaugaggcugacuau

SEQ ID NO: 2487412 - RNA, 19 nt, Homo sapiens
  misc_RNA (1)...(19): siRNA sense strand
gaaagaucauguaggucga

SEQ ID NO: 2487413 - RNA, 19 nt, Homo sapiens
  misc_RNA (1)...(19): siRNA sense strand
gaacugagucguaggcguu

SEQ ID NO: 2487414 - RNA, 19 nt, Homo sapiens
  misc_RNA (1)...(19): siRNA sense strand
gauucaacgcuauguggaa

SEQ ID NO: 2487415 - RNA, 19 nt, Homo sapiens
  misc_RNA (1)...(19): siRNA sense strand
ggaaaugauacuaaaucca

SEQ ID NO: 2487416 - RNA, 19 nt, Homo sapiens
  misc_RNA (1)...(19): siRNA sense strand
gcagaaaagaucaagguca

SEQ ID NO: 2487417 - RNA, 19 nt, Homo sapiens
  misc_RNA (1)...(19): siRNA sense strand
gggcaaucgcuuuauucaa

SEQ ID NO: 2487418 - RNA, 19 nt, Homo sapiens
  misc_RNA (1)...(19): siRNA sense strand
gugcauuuguugaaagauc

SEQ ID NO: 2487419 - RNA, 19 nt, Homo sapiens
  misc_RNA (1)...(19): siRNA sense strand
ccauaucacuuuuaagcaa

SEQ ID NO: 2487420 - RNA, 19 nt, Homo sapiens
  misc_RNA (1)...(19): siRNA sense strand
ggauauuguggaagauagu

SEQ ID NO: 2487421 - RNA, 19 nt, Homo sapiens
  misc_RNA (1)...(19): siRNA sense strand
agaaagguaugcuagaaaa

SEQ ID NO: 2487422 - RNA, 19 nt, Homo sapiens
  misc_RNA (1)...(19): siRNA sense strand
agguaugcccacaggugaa

SEQ ID NO: 2487423 - RNA, 19 nt, Homo sapiens
  misc_RNA (1)...(19): siRNA sense strand
cggaaaugcagaauaugau

SEQ ID NO: 2487424 - RNA, 19 nt, Homo sapiens
  misc_RNA (1)...(19): siRNA sense strand
ugcaggaggugaagagcau

SEQ ID NO: 2487425 - RNA, 19 nt, Homo sapiens
  misc_RNA (1)...(19): siRNA sense strand
cuuugaaacgaaacagaau

SEQ ID NO: 2487426 - RNA, 19 nt, Homo sapiens
  misc_RNA (1)...(19): siRNA sense strand
cuaagaaagguaugcuaga

SEQ ID NO: 2487427 - RNA, 19 nt, Homo sapiens
  misc_RNA (1)...(19): siRNA sense strand
ggaugaaaaugcuguacau

SEQ ID NO: 2487428 - RNA, 19 nt, Homo sapiens
  misc_RNA (1)...(19): siRNA sense strand
augaagaugaugcacguaa

SEQ ID NO: 2487429 - RNA, 19 nt, Homo sapiens
  misc_RNA (1)...(19): siRNA sense strand
gguagcugcuggaggccau

SEQ ID NO: 2487430 - RNA, 19 nt, Homo sapiens
  misc_RNA (1)...(19): siRNA sense strand
cagagggaaaugauacuaa

SEQ ID NO: 2487431 - RNA, 19 nt, Homo sapiens
  misc_RNA (1)...(19): siRNA sense strand
cgacaguaauuaaagugca

SEQ ID NO: 2487432 - RNA, 19 nt, Homo sapiens
  misc_RNA (1)...(19): siRNA sense strand
caacuuagauauaccacca

SEQ ID NO: 2487433 - RNA, 19 nt, Homo sapiens
  misc_RNA (1)...(19): siRNA sense strand
aggguaaacuugcccacaa

SEQ ID NO: 2487434 - RNA, 19 nt, Homo sapiens
  misc_RNA (1)...(19): siRNA sense strand
gcuuugaaacgaaacagaa

SEQ ID NO: 2487435 - RNA, 19 nt, Homo sapiens
  misc_RNA (1)...(19): siRNA sense strand
gcucaguguguuuaaaaua

SEQ ID NO: 2487436 - RNA, 19 nt, Homo sapiens
  misc_RNA (1)...(19): siRNA sense strand
ggaaguuagcccugccaca

SEQ ID NO: 2487437 - RNA, 19 nt, Homo sapiens
  misc_RNA (1)...(19): siRNA sense strand
cuugaaagggcuaccauuu

SEQ ID NO: 2487438 - RNA, 19 nt, Homo sapiens
  misc_RNA (1)...(19): siRNA sense strand
gcuaccauuugaagcagaa

SEQ ID NO: 2487439 - RNA, 19 nt, Homo sapiens
  misc_RNA (1)...(19): siRNA sense strand
cauuugaagcagaaaacaa

SEQ ID NO: 2487440 - RNA, 19 nt, Homo sapiens
  misc_RNA (1)...(19): siRNA sense strand
gugaacugggugaggcuuu

SEQ ID NO: 2487441 - RNA, 19 nt, Homo sapiens
  misc_RNA (1)...(19): siRNA sense strand
aaacaauuuaagugggcca

SEQ ID NO: 2487442 - RNA, 19 nt, Homo sapiens
  misc_RNA (1)...(19): siRNA sense strand
ucaaguaaucccaggcuca

SEQ ID NO: 2487443 - RNA, 19 nt, Homo sapiens
  misc_RNA (1)...(19): siRNA sense strand
acggaaaugcagaauauga

SEQ ID NO: 2487444 - RNA, 19 nt, Homo sapiens
  misc_RNA (1)...(19): siRNA sense strand
gcaccuaugaauuugaaca

SEQ ID NO: 2487445 - RNA, 19 nt, Homo sapiens
  misc_RNA (1)...(19): siRNA sense strand
uguaguuacccuagaagau

SEQ ID NO: 2487446 - RNA, 19 nt, Homo sapiens
  misc_RNA (1)...(19): siRNA sense strand
agcaauaaccagugcagga

SEQ ID NO: 2487447 - RNA, 19 nt, Homo sapiens
  misc_RNA (1)...(19): siRNA sense strand
uggaaaaugaugucagaga

SEQ ID NO: 2487448 - RNA, 19 nt, Homo sapiens
  misc_RNA (1)...(19): siRNA sense strand
cagugcauuuguugaaaga

SEQ ID NO: 2487449 - RNA, 19 nt, Homo sapiens
  misc_RNA (1)...(19): siRNA sense strand
ugaccagagggaaaugaua

SEQ ID NO: 2487450 - RNA, 19 nt, Homo sapiens
  misc_RNA (1)...(19): siRNA sense strand
ggaugucaacucugccaaa

SEQ ID NO: 2487451 - RNA, 19 nt, Homo sapiens
  misc_RNA (1)...(19): siRNA sense strand
aaacuuaaugggagagaag

SEQ ID NO: 2487452 - RNA, 19 nt, Homo sapiens
  misc_RNA (1)...(19): siRNA sense strand
agcccaacguuuagcucaa

SEQ ID NO: 2487453 - RNA, 19 nt, Homo sapiens
  misc_RNA (1)...(19): siRNA sense strand
caccuaugaauuugaacaa

SEQ ID NO: 2487454 - RNA, 19 nt, Homo sapiens
  misc_RNA (1)...(19): siRNA sense strand
cagaaaagaucaaggucaa

SEQ ID NO: 2487455 - RNA, 19 nt, Homo sapiens
  misc_RNA (1)...(19): siRNA sense strand
agcuaugaccagagggaaa

SEQ ID NO: 2487456 - RNA, 19 nt, Homo sapiens
  misc_RNA (1)...(19): siRNA sense strand
cuagaagauaugagagaga

SEQ ID NO: 2487457 - RNA, 19 nt, Homo sapiens
  misc_RNA (1)...(19): siRNA sense strand
agauauaccaccagcaaau

SEQ ID NO: 2487458 - RNA, 19 nt, Homo sapiens
  misc_RNA (1)...(19): siRNA sense strand
uaugagagagauugagaaa

SEQ ID NO: 2487459 - RNA, 19 nt, Homo sapiens
  misc_RNA (1)...(19): siRNA sense strand
gccuauagguucaagaaaa

SEQ ID NO: 2487460 - RNA, 19 nt, Homo sapiens
  misc_RNA (1)...(19): siRNA sense strand
aggaaugaguagcagggua

SEQ ID NO: 2487461 - RNA, 19 nt, Homo sapiens
  misc_RNA (1)...(19): siRNA sense strand
agaagauaugagagagauu

SEQ ID NO: 2487462 - RNA, 19 nt, Homo sapiens
  misc_RNA (1)...(19): siRNA sense strand
aggucgaaauaaugggaau

SEQ ID NO: 2487463 - RNA, 19 nt, Homo sapiens
  misc_RNA (1)...(19): siRNA sense strand
aagaaagguaugcuagaaa

SEQ ID NO: 2487464 - RNA, 19 nt, Homo sapiens
  misc_RNA (1)...(19): siRNA sense strand
cgaaauaaugggaauggau

SEQ ID NO: 2487465 - RNA, 19 nt, Homo sapiens
  misc_RNA (1)...(19): siRNA sense strand
uugaguaguaagacggaaa

SEQ ID NO: 2487466 - RNA, 19 nt, Homo sapiens
  misc_RNA (1)...(19): siRNA sense strand
ugguacaauuaaaggguca

SEQ ID NO: 2487467 - RNA, 19 nt, Homo sapiens
  misc_RNA (1)...(19): siRNA sense strand
uaacaaugggcaaggucua

SEQ ID NO: 2487468 - RNA, 19 nt, Homo sapiens
  misc_RNA (1)...(19): siRNA sense strand
auaaacaguacaugggcaa

SEQ ID NO: 2487469 - RNA, 19 nt, Homo sapiens
  misc_RNA (1)...(19): siRNA sense strand
gaaaaugaugucagagauu

SEQ ID NO: 2487470 - RNA, 19 nt, Homo sapiens
  misc_RNA (1)...(19): siRNA sense strand
cccuagaagauaugagaga

SEQ ID NO: 2487471 - RNA, 19 nt, Homo sapiens
  misc_RNA (1)...(19): siRNA sense strand
ugggaaagcaacuggcgaa

SEQ ID NO: 2487472 - RNA, 19 nt, Homo sapiens
  misc_RNA (1)...(19): siRNA sense strand
gcuuuguagaguucagaaa

SEQ ID NO: 2487473 - RNA, 19 nt, Homo sapiens
  misc_RNA (1)...(19): siRNA sense strand
ugaugaagaugcaaggcuu

SEQ ID NO: 2487474 - RNA, 19 nt, Homo sapiens
  misc_RNA (1)...(19): siRNA sense strand
acagaaagacaguggguag

SEQ ID NO: 2487475 - RNA, 19 nt, Homo sapiens
  misc_RNA (1)...(19): siRNA sense strand
cagaaaugaggcugacuau

SEQ ID NO: 2487476 - RNA, 19 nt, Homo sapiens
  misc_RNA (1)...(19): siRNA sense strand
gaaagaucauguaggucga

SEQ ID NO: 2487477 - RNA, 19 nt, Homo sapiens
  misc_RNA (1)...(19): siRNA sense strand
gaacugagucguaggcguu

SEQ ID NO: 2487478 - RNA, 19 nt, Homo sapiens
  misc_RNA (1)...(19): siRNA sense strand
gauucaacgcuauguggaa

SEQ ID NO: 2487479 - RNA, 19 nt, Homo sapiens
  misc_RNA (1)...(19): siRNA sense strand
ggaaaugauacuaaaucca

SEQ ID NO: 2487480 - RNA, 19 nt, Homo sapiens
  misc_RNA (1)...(19): siRNA sense strand
gcagaaaagaucaagguca

SEQ ID NO: 2487481 - RNA, 19 nt, Homo sapiens
  misc_RNA (1)...(19): siRNA sense strand
gggcaaucgcuuuauucaa

SEQ ID NO: 2487482 - RNA, 19 nt, Homo sapiens
  misc_RNA (1)...(19): siRNA sense strand
gugcauuuguugaaagauc

SEQ ID NO: 2487483 - RNA, 19 nt, Homo sapiens
  misc_RNA (1)...(19): siRNA sense strand
ccauaucacuuuuaagcaa

SEQ ID NO: 2487484 - RNA, 19 nt, Homo sapiens
  misc_RNA (1)...(19): siRNA sense strand
ggauauuguggaagauagu

SEQ ID NO: 2487485 - RNA, 19 nt, Homo sapiens
  misc_RNA (1)...(19): siRNA sense strand
agaaagguaugcuagaaaa

SEQ ID NO: 2487486 - RNA, 19 nt, Homo sapiens
  misc_RNA (1)...(19): siRNA sense strand
agguaugcccacaggugaa

SEQ ID NO: 2487487 - RNA, 19 nt, Homo sapiens
  misc_RNA (1)...(19): siRNA sense strand
cggaaaugcagaauaugau

SEQ ID NO: 2487488 - RNA, 19 nt, Homo sapiens
  misc_RNA (1)...(19): siRNA sense strand
ugcaggaggugaagagcau

SEQ ID NO: 2487489 - RNA, 19 nt, Homo sapiens
  misc_RNA (1)...(19): siRNA sense strand
cuuugaaacgaaacagaau

SEQ ID NO: 2487490 - RNA, 19 nt, Homo sapiens
  misc_RNA (1)...(19): siRNA sense strand
cuaagaaagguaugcuaga

SEQ ID NO: 2487491 - RNA, 19 nt, Homo sapiens
  misc_RNA (1)...(19): siRNA sense strand
ggaugaaaaugcuguacau

SEQ ID NO: 2487492 - RNA, 19 nt, Homo sapiens
  misc_RNA (1)...(19): siRNA sense strand
augaagaugaugcacguaa

SEQ ID NO: 2487493 - RNA, 19 nt, Homo sapiens
  misc_RNA (1)...(19): siRNA sense strand
gguagcugcuggaggccau

SEQ ID NO: 2487494 - RNA, 19 nt, Homo sapiens
  misc_RNA (1)...(19): siRNA sense strand
cagagggaaaugauacuaa

SEQ ID NO: 2487495 - RNA, 19 nt, Homo sapiens
  misc_RNA (1)...(19): siRNA sense strand
cgacaguaauuaaagugca

SEQ ID NO: 2487496 - RNA, 19 nt, Homo sapiens
  misc_RNA (1)...(19): siRNA sense strand
caacuuagauauaccacca

SEQ ID NO: 2487497 - RNA, 19 nt, Homo sapiens
  misc_RNA (1)...(19): siRNA sense strand
aggguaaacuugcccacaa

SEQ ID NO: 2487498 - RNA, 19 nt, Homo sapiens
  misc_RNA (1)...(19): siRNA sense strand
gcuuugaaacgaaacagaa

SEQ ID NO: 2487499 - RNA, 19 nt, Homo sapiens
  misc_RNA (1)...(19): siRNA sense strand
gcucaguguguuuaaaaua

SEQ ID NO: 2487500 - RNA, 19 nt, Homo sapiens
  misc_RNA (1)...(19): siRNA sense strand
ggaaguuagcccugccaca

SEQ ID NO: 2487501 - RNA, 19 nt, Homo sapiens
  misc_RNA (1)...(19): siRNA sense strand
cuugaaagggcuaccauuu

SEQ ID NO: 2487502 - RNA, 19 nt, Homo sapiens
  misc_RNA (1)...(19): siRNA sense strand
gcuaccauuugaagcagaa

SEQ ID NO: 2487503 - RNA, 19 nt, Homo sapiens
  misc_RNA (1)...(19): siRNA sense strand
cauuugaagcagaaaacaa

SEQ ID NO: 2487504 - RNA, 19 nt, Homo sapiens
  misc_RNA (1)...(19): siRNA sense strand
gugaacugggugaggcuuu

SEQ ID NO: 2487505 - RNA, 19 nt, Homo sapiens
  misc_RNA (1)...(19): siRNA sense strand
aaacaauuuaagugggcca

SEQ ID NO: 2487506 - RNA, 19 nt, Homo sapiens
  misc_RNA (1)...(19): siRNA sense strand
ucaaguaaucccaggcuca

SEQ ID NO: 2487507 - RNA, 19 nt, Homo sapiens
  misc_RNA (1)...(19): siRNA sense strand
acggaaaugcagaauauga

SEQ ID NO: 2487508 - RNA, 19 nt, Homo sapiens
  misc_RNA (1)...(19): siRNA sense strand
gcaccuaugaauuugaaca

SEQ ID NO: 2487509 - RNA, 19 nt, Homo sapiens
  misc_RNA (1)...(19): siRNA sense strand
uguaguuacccuagaagau

SEQ ID NO: 2487510 - RNA, 19 nt, Homo sapiens
  misc_RNA (1)...(19): siRNA sense strand
agcaauaaccagugcagga

SEQ ID NO: 2487511 - RNA, 19 nt, Homo sapiens
  misc_RNA (1)...(19): siRNA sense strand
uggaaaaugaugucagaga

SEQ ID NO: 2487512 - RNA, 19 nt, Homo sapiens
  misc_RNA (1)...(19): siRNA sense strand
cagugcauuuguugaaaga

SEQ ID NO: 2487513 - RNA, 19 nt, Homo sapiens
  misc_RNA (1)...(19): siRNA sense strand
ugaccagagggaaaugaua

SEQ ID NO: 2487514 - RNA, 19 nt, Homo sapiens
  misc_RNA (1)...(19): siRNA sense strand
ggaugucaacucugccaaa

SEQ ID NO: 2487515 - RNA, 19 nt, Homo sapiens
  misc_RNA (1)...(19): siRNA sense strand
aaacuuaaugggagagaag

SEQ ID NO: 2487516 - RNA, 19 nt, Homo sapiens
  misc_RNA (1)...(19): siRNA sense strand
agcccaacguuuagcucaa

SEQ ID NO: 2487517 - RNA, 19 nt, Homo sapiens
  misc_RNA (1)...(19): siRNA sense strand
caccuaugaauuugaacaa

SEQ ID NO: 2487518 - RNA, 19 nt, Homo sapiens
  misc_RNA (1)...(19): siRNA sense strand
ccuaaaagccauaaugaaa

SEQ ID NO: 2487519 - RNA, 19 nt, Homo sapiens
  misc_RNA (1)...(19): siRNA sense strand
ccaaguaacuguugcccaa

SEQ ID NO: 2487520 - RNA, 19 nt, Homo sapiens
  misc_RNA (1)...(19): siRNA sense strand
ggagaaaaucacagaggaa

SEQ ID NO: 2487521 - RNA, 19 nt, Homo sapiens
  misc_RNA (1)...(19): siRNA sense strand
agaaaaucacagaggaaua

SEQ ID NO: 2487522 - RNA, 19 nt, Homo sapiens
  misc_RNA (1)...(19): siRNA sense strand
cuaugaaagaagaaggaau

SEQ ID NO: 2487523 - RNA, 19 nt, Homo sapiens
  misc_RNA (1)...(19): siRNA sense strand
acaaagaggaugaagacau

SEQ ID NO: 2487524 - RNA, 19 nt, Homo sapiens
  misc_RNA (1)...(19): siRNA sense strand
augaugauguggaggaaau

SEQ ID NO: 2487525 - RNA, 19 nt, Homo sapiens
  misc_RNA (1)...(19): siRNA sense strand
ucacagaggaauaggacuu

SEQ ID NO: 2487526 - RNA, 19 nt, Homo sapiens
  misc_RNA (1)...(19): siRNA sense strand
ccuaauggagcgaaagauu

SEQ ID NO: 2487527 - RNA, 19 nt, Homo sapiens
  misc_RNA (1)...(19): siRNA sense strand
gaugaggauaagauggaua

SEQ ID NO: 2487528 - RNA, 19 nt, Homo sapiens
  misc_RNA (1)...(19): siRNA sense strand
acgaaugaguacaacacua

SEQ ID NO: 2487529 - RNA, 19 nt, Homo sapiens
  misc_RNA (1)...(19): siRNA sense strand
cauccuaaaguaugugaaa

SEQ ID NO: 2487530 - RNA, 19 nt, Homo sapiens
  misc_RNA (1)...(19): siRNA sense strand
auauuuaagcacuggacaa

SEQ ID NO: 2487531 - RNA, 19 nt, Homo sapiens
  misc_RNA (1)...(19): siRNA sense strand
auaauaagguugcacggaa

SEQ ID NO: 2487532 - RNA, 19 nt, Homo sapiens
  misc_RNA (1)...(19): siRNA sense strand
agguagcggcuguggacaa

SEQ ID NO: 2487533 - RNA, 19 nt, Homo sapiens
  misc_RNA (1)...(19): siRNA sense strand
uugaagcuguugaggacaa

SEQ ID NO: 2487534 - RNA, 19 nt, Homo sapiens
  misc_RNA (1)...(19): siRNA sense strand
guggaaacuauauggguca

SEQ ID NO: 2487535 - RNA, 19 nt, Homo sapiens
  misc_RNA (1)...(19): siRNA sense strand
guccaaugauagaugaaaa

SEQ ID NO: 2487536 - RNA, 19 nt, Homo sapiens
  misc_RNA (1)...(19): siRNA sense strand
aggaugaagacauagcuaa

SEQ ID NO: 2487537 - RNA, 19 nt, Homo sapiens
  misc_RNA (1)...(19): siRNA sense strand
gccauaaugaaaaggguaa

SEQ ID NO: 2487538 - RNA, 19 nt, Homo sapiens
  misc_RNA (1)...(19): siRNA sense strand
ggagcgaaagauugccuaa

SEQ ID NO: 2487539 - RNA, 19 nt, Homo sapiens
  misc_RNA (1)...(19): siRNA sense strand
guggaggaaauuaagaaau

SEQ ID NO: 2487540 - RNA, 19 nt, Homo sapiens
  misc_RNA (1)...(19): siRNA sense strand
gcccaaagcuauagccuag

SEQ ID NO: 2487541 - RNA, 19 nt, Homo sapiens
  misc_RNA (1)...(19): siRNA sense strand
uggaguggucagaagaauu

SEQ ID NO: 2487542 - RNA, 19 nt, Homo sapiens
  misc_RNA (1)...(19): siRNA sense strand
aguauagauccaacagauu

SEQ ID NO: 2487543 - RNA, 19 nt, Homo sapiens
  misc_RNA (1)...(19): siRNA sense strand
ugaagaaauugauaggaag

SEQ ID NO: 2487544 - RNA, 19 nt, Homo sapiens
  misc_RNA (1)...(19): siRNA sense strand
ggugacaguuccagcucau

SEQ ID NO: 2487545 - RNA, 19 nt, Homo sapiens
  misc_RNA (1)...(19): siRNA sense strand
aaguacgugcugugauuaa

SEQ ID NO: 2487546 - RNA, 19 nt, Homo sapiens
  misc_RNA (1)...(19): siRNA sense strand
augauguggaggaaauuaa

SEQ ID NO: 2487547 - RNA, 19 nt, Homo sapiens
  misc_RNA (1)...(19): siRNA sense strand
agaaauugauaggaagcau

SEQ ID NO: 2487548 - RNA, 19 nt, Homo sapiens
  misc_RNA (1)...(19): siRNA sense strand
gaggaugaagacauagcua

SEQ ID NO: 2487549 - RNA, 19 nt, Homo sapiens
  misc_RNA (1)...(19): siRNA sense strand
aagaacagaaacagcaaca

SEQ ID NO: 2487550 - RNA, 19 nt, Homo sapiens
  misc_RNA (1)...(19): siRNA sense strand
uguggaggaaauuaagaaa

SEQ ID NO: 2487551 - RNA, 19 nt, Homo sapiens
  misc_RNA (1)...(19): siRNA sense strand
ucgagcaagacguggaaaa

SEQ ID NO: 2487552 - RNA, 19 nt, Homo sapiens
  misc_RNA (1)...(19): siRNA sense strand
cucuggaacuauauaacaa

SEQ ID NO: 2487553 - RNA, 19 nt, Homo sapiens
  misc_RNA (1)...(19): siRNA sense strand
gguacgucaucgaacaaaa

SEQ ID NO: 2487554 - RNA, 19 nt, Homo sapiens
  misc_RNA (1)...(19): siRNA sense strand
agacugagguagcggcugu

SEQ ID NO: 2487555 - RNA, 19 nt, Homo sapiens
  misc_RNA (1)...(19): siRNA sense strand
agaaacagcaacacacaga

SEQ ID NO: 2487556 - RNA, 19 nt, Homo sapiens
  misc_RNA (1)...(19): siRNA sense strand
acagcaacacacagaaaca

SEQ ID NO: 2487557 - RNA, 19 nt, Homo sapiens
  misc_RNA (1)...(19): siRNA sense strand
ccaauugguggaaaggaga

SEQ ID NO: 2487558 - RNA, 19 nt, Homo sapiens
  misc_RNA (1)...(19): siRNA sense strand
ugaugaugauguggaggaa

SEQ ID NO: 2487559 - RNA, 19 nt, Homo sapiens
  misc_RNA (1)...(19): siRNA sense strand
gguggaguggucagaagaa

SEQ ID NO: 2487560 - RNA, 19 nt, Homo sapiens
  misc_RNA (1)...(19): siRNA sense strand
gggucagagcauucaccaa

SEQ ID NO: 2487561 - RNA, 19 nt, Homo sapiens
  misc_RNA (1)...(19): siRNA sense strand
acuauaugggucagagcau

SEQ ID NO: 2487562 - RNA, 19 nt, Homo sapiens
  misc_RNA (1)...(19): siRNA sense strand
cuuuaaugguggagugguc

SEQ ID NO: 2487563 - RNA, 19 nt, Homo sapiens
  misc_RNA (1)...(19): siRNA sense strand
aaaacaaagaggaugaaga

SEQ ID NO: 2487564 - RNA, 19 nt, Homo sapiens
  misc_RNA (1)...(19): siRNA sense strand
ggguccaaugauagaugaa

SEQ ID NO: 2487565 - RNA, 19 nt, Homo sapiens
  misc_RNA (1)...(19): siRNA sense strand
gccuaggacccgaucaaau

SEQ ID NO: 2487566 - RNA, 19 nt, Homo sapiens
  misc_RNA (1)...(19): siRNA sense strand
uauaugaaccagaacucua

SEQ ID NO: 2487567 - RNA, 19 nt, Homo sapiens
  misc_RNA (1)...(19): siRNA sense strand
ucuacauaguggagaaaua

SEQ ID NO: 2487568 - RNA, 19 nt, Homo sapiens
  misc_RNA (1)...(19): siRNA sense strand
aguaaaugcagaagacaaa

SEQ ID NO: 2487569 - RNA, 19 nt, Homo sapiens
  misc_RNA (1)...(19): siRNA sense strand
gcaugagauugaagagcua

SEQ ID NO: 2487570 - RNA, 19 nt, Homo sapiens
  misc_RNA (1)...(19): siRNA sense strand
ggaucagguucgugaauau

SEQ ID NO: 2487571 - RNA, 19 nt, Homo sapiens
  misc_RNA (1)...(19): siRNA sense strand
gagaaaaggaugagacaau

SEQ ID NO: 2487572 - RNA, 19 nt, Homo sapiens
  misc_RNA (1)...(19): siRNA sense strand
uggcacagauggaggaaau

SEQ ID NO: 2487573 - RNA, 19 nt, Homo sapiens
  misc_RNA (1)...(19): siRNA sense strand
ggagaaugcuuuaagguca

SEQ ID NO: 2487574 - RNA, 19 nt, Homo sapiens
  misc_RNA (1)...(19): siRNA sense strand
gagugaaagaggaaacaaa

SEQ ID NO: 2487575 - RNA, 19 nt, Homo sapiens
  misc_RNA (1)...(19): siRNA sense strand
cuggaagaaaugaggguua

SEQ ID NO: 2487576 - RNA, 19 nt, Homo sapiens
  misc_RNA (1)...(19): siRNA sense strand
uggugaauuuggagugaaa

SEQ ID NO: 2487577 - RNA, 19 nt, Homo sapiens
  misc_RNA (1)...(19): siRNA sense strand
ccaagaacaauuagaagaa

SEQ ID NO: 2487578 - RNA, 19 nt, Homo sapiens
  misc_RNA (1)...(19): siRNA sense strand
gaugagacaaugagagaau

SEQ ID NO: 2487579 - RNA, 19 nt, Homo sapiens
  misc_RNA (1)...(19): siRNA sense strand
cagaaugaaaugagucaaa

SEQ ID NO: 2487580 - RNA, 19 nt, Homo sapiens
  misc_RNA (1)...(19): siRNA sense strand
agacaguggaugugaaauu

SEQ ID NO: 2487581 - RNA, 19 nt, Homo sapiens
  misc_RNA (1)...(19): siRNA sense strand
gugaaagaggaaacaaaua

SEQ ID NO: 2487582 - RNA, 19 nt, Homo sapiens
  misc_RNA (1)...(19): siRNA sense strand
cgaaacugauauaguacaa

SEQ ID NO: 2487583 - RNA, 19 nt, Homo sapiens
  misc_RNA (1)...(19): siRNA sense strand
acaagaaacaggugaugaa

SEQ ID NO: 2487584 - RNA, 19 nt, Homo sapiens
  misc_RNA (1)...(19): siRNA sense strand
guugaaagaaacugaacaa

SEQ ID NO: 2487585 - RNA, 19 nt, Homo sapiens
  misc_RNA (1)...(19): siRNA sense strand
aggagaacauggaaaggaa

SEQ ID NO: 2487586 - RNA, 19 nt, Homo sapiens
  misc_RNA (1)...(19): siRNA sense strand
caaggaagaacuaggacua

SEQ ID NO: 2487587 - RNA, 19 nt, Homo sapiens
  misc_RNA (1)...(19): siRNA sense strand
auugagauguagagagcua

SEQ ID NO: 2487588 - RNA, 19 nt, Homo sapiens
  misc_RNA (1)...(19): siRNA sense strand
uaguaaagaguuaggagaa

SEQ ID NO: 2487589 - RNA, 19 nt, Homo sapiens
  misc_RNA (1)...(19): siRNA sense strand
aagaagagauuaagagacu

SEQ ID NO: 2487590 - RNA, 19 nt, Homo sapiens
  misc_RNA (1)...(19): siRNA sense strand
ggaacuggaaagugaaauu

SEQ ID NO: 2487591 - RNA, 19 nt, Homo sapiens
  misc_RNA (1)...(19): siRNA sense strand
cugacuaauucuaagcaaa

SEQ ID NO: 2487592 - RNA, 19 nt, Homo sapiens
  misc_RNA (1)...(19): siRNA sense strand
uagcagaaacauuggaaau

SEQ ID NO: 2487593 - RNA, 19 nt, Homo sapiens
  misc_RNA (1)...(19): siRNA sense strand
aaguaaaugcagaagacaa

SEQ ID NO: 2487594 - RNA, 19 nt, Homo sapiens
  misc_RNA (1)...(19): siRNA sense strand
acuugaauuuggagaagaa

SEQ ID NO: 2487595 - RNA, 19 nt, Homo sapiens
  misc_RNA (1)...(19): siRNA sense strand
ccagaaaggaacuagaauu

SEQ ID NO: 2487596 - RNA, 19 nt, Homo sapiens
  misc_RNA (1)...(19): siRNA sense strand
acagaaugauuuaaggcua

SEQ ID NO: 2487597 - RNA, 19 nt, Homo sapiens
  misc_RNA (1)...(19): siRNA sense strand
cccuggaaguugugugaaa

SEQ ID NO: 2487598 - RNA, 19 nt, Homo sapiens
  misc_RNA (1)...(19): siRNA sense strand
ugaaauacucagacaagaa

SEQ ID NO: 2487599 - RNA, 19 nt, Homo sapiens
  misc_RNA (1)...(19): siRNA sense strand
gguaaccaagcgagagaaa

SEQ ID NO: 2487600 - RNA, 19 nt, Homo sapiens
  misc_RNA (1)...(19): siRNA sense strand
aaacaggugaugaaggaaa

SEQ ID NO: 2487601 - RNA, 19 nt, Homo sapiens
  misc_RNA (1)...(19): siRNA sense strand
acaacaagcaagaagagaa

SEQ ID NO: 2487602 - RNA, 19 nt, Homo sapiens
  misc_RNA (1)...(19): siRNA sense strand
agugaaacucugagaaaca

SEQ ID NO: 2487603 - RNA, 19 nt, Homo sapiens
  misc_RNA (1)...(19): siRNA sense strand
cuagugaaacucugagaaa

SEQ ID NO: 2487604 - RNA, 19 nt, Homo sapiens
  misc_RNA (1)...(19): siRNA sense strand
agaaaagaaugcuguguua

SEQ ID NO: 2487605 - RNA, 19 nt, Homo sapiens
  misc_RNA (1)...(19): siRNA sense strand
guucgugaauauauggaaa

SEQ ID NO: 2487606 - RNA, 19 nt, Homo sapiens
  misc_RNA (1)...(19): siRNA sense strand
uagaagaagaaguagcuaa

SEQ ID NO: 2487607 - RNA, 19 nt, Homo sapiens
  misc_RNA (1)...(19): siRNA sense strand
augaagaacaguuggaaga

SEQ ID NO: 2487608 - RNA, 19 nt, Homo sapiens
  misc_RNA (1)...(19): siRNA sense strand
uagcugaacaagaaaguaa

SEQ ID NO: 2487609 - RNA, 19 nt, Homo sapiens
  misc_RNA (1)...(19): siRNA sense strand
cucuugagcuaaaggauaa

SEQ ID NO: 2487610 - RNA, 19 nt, Homo sapiens
  misc_RNA (1)...(19): siRNA sense strand
aagaacaguuggaagauau

SEQ ID NO: 2487611 - RNA, 19 nt, Homo sapiens
  misc_RNA (1)...(19): siRNA sense strand
uugaagagcuaaacagaga

SEQ ID NO: 2487612 - RNA, 19 nt, Homo sapiens
  misc_RNA (1)...(19): siRNA sense strand
ggaacaagaaacacaaaga

SEQ ID NO: 2487613 - RNA, 19 nt, Homo sapiens
  misc_RNA (1)...(19): siRNA sense strand
agacaauagcugaacaaga

SEQ ID NO: 2487614 - RNA, 19 nt, Homo sapiens
  misc_RNA (1)...(19): siRNA sense strand
aagaacagauugugcaaaa

SEQ ID NO: 2487615 - RNA, 19 nt, Homo sapiens
  misc_RNA (1)...(19): siRNA sense strand
ccaagaagaaagauugauu

SEQ ID NO: 2487616 - RNA, 19 nt, Homo sapiens
  misc_RNA (1)...(19): siRNA sense strand
ggagaacauggaaaggaaa

SEQ ID NO: 2487617 - RNA, 19 nt, Homo sapiens
  misc_RNA (1)...(19): siRNA sense strand
aggaacagcuacaagaaga

SEQ ID NO: 2487618 - RNA, 19 nt, Homo sapiens
  misc_RNA (1)...(19): siRNA sense strand
uggagaagaaaguaagcaa

SEQ ID NO: 2487619 - RNA, 19 nt, Homo sapiens
  misc_RNA (1)...(19): siRNA sense strand
gaaucaucacuuagagcaa

SEQ ID NO: 2487620 - RNA, 19 nt, Homo sapiens
  misc_RNA (1)...(19): siRNA sense strand
cuguggaacuggaaaguga

SEQ ID NO: 2487621 - RNA, 19 nt, Homo sapiens
  misc_RNA (1)...(19): siRNA sense strand
acaacaauguauucagcua

SEQ ID NO: 2487622 - RNA, 19 nt, Homo sapiens
  misc_RNA (1)...(19): siRNA sense strand
cugauaaauuacuaggaga

SEQ ID NO: 2487623 - RNA, 19 nt, Homo sapiens
  misc_RNA (1)...(19): siRNA sense strand
acgaauggaacaagaaaca

SEQ ID NO: 2487624 - RNA, 19 nt, Homo sapiens
  misc_RNA (1)...(19): siRNA sense strand
gagaaugcuuuaaggucau

SEQ ID NO: 2487625 - RNA, 19 nt, Homo sapiens
  misc_RNA (1)...(19): siRNA sense strand
aaauccaacuacagugaaa

SEQ ID NO: 2487626 - RNA, 19 nt, Homo sapiens
  misc_RNA (1)...(19): siRNA sense strand
aggaaaagaucaaggaacu

SEQ ID NO: 2487627 - RNA, 19 nt, Homo sapiens
  misc_RNA (1)...(19): siRNA sense strand
gaaacuugaauuuggagaa

SEQ ID NO: 2487628 - RNA, 19 nt, Homo sapiens
  misc_RNA (1)...(19): siRNA sense strand
gagaacauggaaaggaaau

SEQ ID NO: 2487629 - RNA, 19 nt, Homo sapiens
  misc_RNA (1)...(19): siRNA sense strand
ggaagauaugagacaggaa

SEQ ID NO: 2487630 - RNA, 19 nt, Homo sapiens
  misc_RNA (1)...(19): siRNA sense strand
ugaaauuaucacaggauca

SEQ ID NO: 2487631 - RNA, 19 nt, Homo sapiens
  misc_RNA (1)...(19): siRNA sense strand
aguuaaugaauguggcaau

SEQ ID NO: 2487632 - RNA, 19 nt, Homo sapiens
  misc_RNA (1)...(19): siRNA sense strand
ucuacauaguggagaaaua

SEQ ID NO: 2487633 - RNA, 19 nt, Homo sapiens
  misc_RNA (1)...(19): siRNA sense strand
aguaaaugcagaagacaaa

SEQ ID NO: 2487634 - RNA, 19 nt, Homo sapiens
  misc_RNA (1)...(19): siRNA sense strand
gcaugagauugaagagcua

SEQ ID NO: 2487635 - RNA, 19 nt, Homo sapiens
  misc_RNA (1)...(19): siRNA sense strand
ggaucagguucgugaauau

SEQ ID NO: 2487636 - RNA, 19 nt, Homo sapiens
  misc_RNA (1)...(19): siRNA sense strand
gagaaaaggaugagacaau

SEQ ID NO: 2487637 - RNA, 19 nt, Homo sapiens
  misc_RNA (1)...(19): siRNA sense strand
uggcacagauggaggaaau

SEQ ID NO: 2487638 - RNA, 19 nt, Homo sapiens
  misc_RNA (1)...(19): siRNA sense strand
ggagaaugcuuuaagguca

SEQ ID NO: 2487639 - RNA, 19 nt, Homo sapiens
  misc_RNA (1)...(19): siRNA sense strand
gagugaaagaggaaacaaa

SEQ ID NO: 2487640 - RNA, 19 nt, Homo sapiens
  misc_RNA (1)...(19): siRNA sense strand
cuggaagaaaugaggguua

SEQ ID NO: 2487641 - RNA, 19 nt, Homo sapiens
  misc_RNA (1)...(19): siRNA sense strand
uggugaauuuggagugaaa

SEQ ID NO: 2487642 - RNA, 19 nt, Homo sapiens
  misc_RNA (1)...(19): siRNA sense strand
ccaagaacaauuagaagaa

SEQ ID NO: 2487643 - RNA, 19 nt, Homo sapiens
  misc_RNA (1)...(19): siRNA sense strand
gaugagacaaugagagaau

SEQ ID NO: 2487644 - RNA, 19 nt, Homo sapiens
  misc_RNA (1)...(19): siRNA sense strand
cagaaugaaaugagucaaa

SEQ ID NO: 2487645 - RNA, 19 nt, Homo sapiens
  misc_RNA (1)...(19): siRNA sense strand
agacaguggaugugaaauu

SEQ ID NO: 2487646 - RNA, 19 nt, Homo sapiens
  misc_RNA (1)...(19): siRNA sense strand
gugaaagaggaaacaaaua

SEQ ID NO: 2487647 - RNA, 19 nt, Homo sapiens
  misc_RNA (1)...(19): siRNA sense strand
cgaaacugauauaguacaa

SEQ ID NO: 2487648 - RNA, 19 nt, Homo sapiens
  misc_RNA (1)...(19): siRNA sense strand
acaagaaacaggugaugaa

SEQ ID NO: 2487649 - RNA, 19 nt, Homo sapiens
  misc_RNA (1)...(19): siRNA sense strand
guugaaagaaacugaacaa

SEQ ID NO: 2487650 - RNA, 19 nt, Homo sapiens
  misc_RNA (1)...(19): siRNA sense strand
aggagaacauggaaaggaa

SEQ ID NO: 2487651 - RNA, 19 nt, Homo sapiens
  misc_RNA (1)...(19): siRNA sense strand
caaggaagaacuaggacua

SEQ ID NO: 2487652 - RNA, 19 nt, Homo sapiens
  misc_RNA (1)...(19): siRNA sense strand
auugagauguagagagcua

SEQ ID NO: 2487653 - RNA, 19 nt, Homo sapiens
  misc_RNA (1)...(19): siRNA sense strand
uaguaaagaguuaggagaa

SEQ ID NO: 2487654 - RNA, 19 nt, Homo sapiens
  misc_RNA (1)...(19): siRNA sense strand
aagaagagauuaagagacu

SEQ ID NO: 2487655 - RNA, 19 nt, Homo sapiens
  misc_RNA (1)...(19): siRNA sense strand
ggaacuggaaagugaaauu

SEQ ID NO: 2487656 - RNA, 19 nt, Homo sapiens
  misc_RNA (1)...(19): siRNA sense strand
cugacuaauucuaagcaaa

SEQ ID NO: 2487657 - RNA, 19 nt, Homo sapiens
  misc_RNA (1)...(19): siRNA sense strand
uagcagaaacauuggaaau

SEQ ID NO: 2487658 - RNA, 19 nt, Homo sapiens
  misc_RNA (1)...(19): siRNA sense strand
aaguaaaugcagaagacaa

SEQ ID NO: 2487659 - RNA, 19 nt, Homo sapiens
  misc_RNA (1)...(19): siRNA sense strand
acuugaauuuggagaagaa

SEQ ID NO: 2487660 - RNA, 19 nt, Homo sapiens
  misc_RNA (1)...(19): siRNA sense strand
ccagaaaggaacuagaauu

SEQ ID NO: 2487661 - RNA, 19 nt, Homo sapiens
  misc_RNA (1)...(19): siRNA sense strand
acagaaugauuuaaggcua

SEQ ID NO: 2487662 - RNA, 19 nt, Homo sapiens
  misc_RNA (1)...(19): siRNA sense strand
cccuggaaguugugugaaa

SEQ ID NO: 2487663 - RNA, 19 nt, Homo sapiens
  misc_RNA (1)...(19): siRNA sense strand
ugaaauacucagacaagaa

SEQ ID NO: 2487664 - RNA, 19 nt, Homo sapiens
  misc_RNA (1)...(19): siRNA sense strand
gguaaccaagcgagagaaa

SEQ ID NO: 2487665 - RNA, 19 nt, Homo sapiens
  misc_RNA (1)...(19): siRNA sense strand
aaacaggugaugaaggaaa

SEQ ID NO: 2487666 - RNA, 19 nt, Homo sapiens
  misc_RNA (1)...(19): siRNA sense strand
acaacaagcaagaagagaa

SEQ ID NO: 2487667 - RNA, 19 nt, Homo sapiens
  misc_RNA (1)...(19): siRNA sense strand
agugaaacucugagaaaca

SEQ ID NO: 2487668 - RNA, 19 nt, Homo sapiens
  misc_RNA (1)...(19): siRNA sense strand
cuagugaaacucugagaaa

SEQ ID NO: 2487669 - RNA, 19 nt, Homo sapiens
  misc_RNA (1)...(19): siRNA sense strand
agaaaagaaugcuguguua

SEQ ID NO: 2487670 - RNA, 19 nt, Homo sapiens
  misc_RNA (1)...(19): siRNA sense strand
guucgugaauauauggaaa

SEQ ID NO: 2487671 - RNA, 19 nt, Homo sapiens
  misc_RNA (1)...(19): siRNA sense strand
uagaagaagaaguagcuaa

SEQ ID NO: 2487672 - RNA, 19 nt, Homo sapiens
  misc_RNA (1)...(19): siRNA sense strand
augaagaacaguuggaaga

SEQ ID NO: 2487673 - RNA, 19 nt, Homo sapiens
  misc_RNA (1)...(19): siRNA sense strand
uagcugaacaagaaaguaa

SEQ ID NO: 2487674 - RNA, 19 nt, Homo sapiens
  misc_RNA (1)...(19): siRNA sense strand
cucuugagcuaaaggauaa

SEQ ID NO: 2487675 - RNA, 19 nt, Homo sapiens
  misc_RNA (1)...(19): siRNA sense strand
aagaacaguuggaagauau

SEQ ID NO: 2487676 - RNA, 19 nt, Homo sapiens
  misc_RNA (1)...(19): siRNA sense strand
uugaagagcuaaacagaga

SEQ ID NO: 2487677 - RNA, 19 nt, Homo sapiens
  misc_RNA (1)...(19): siRNA sense strand
ggaacaagaaacacaaaga

SEQ ID NO: 2487678 - RNA, 19 nt, Homo sapiens
  misc_RNA (1)...(19): siRNA sense strand
agacaauagcugaacaaga

SEQ ID NO: 2487679 - RNA, 19 nt, Homo sapiens
  misc_RNA (1)...(19): siRNA sense strand
aagaacagauugugcaaaa

SEQ ID NO: 2487680 - RNA, 19 nt, Homo sapiens
  misc_RNA (1)...(19): siRNA sense strand
ccaagaagaaagauugauu

SEQ ID NO: 2487681 - RNA, 19 nt, Homo sapiens
  misc_RNA (1)...(19): siRNA sense strand
ggagaacauggaaaggaaa

SEQ ID NO: 2487682 - RNA, 19 nt, Homo sapiens
  misc_RNA (1)...(19): siRNA sense strand
aggaacagcuacaagaaga

SEQ ID NO: 2487683 - RNA, 19 nt, Homo sapiens
  misc_RNA (1)...(19): siRNA sense strand
uggagaagaaaguaagcaa

SEQ ID NO: 2487684 - RNA, 19 nt, Homo sapiens
  misc_RNA (1)...(19): siRNA sense strand
gaaucaucacuuagagcaa

SEQ ID NO: 2487685 - RNA, 19 nt, Homo sapiens
  misc_RNA (1)...(19): siRNA sense strand
cuguggaacuggaaaguga

SEQ ID NO: 2487686 - RNA, 19 nt, Homo sapiens
  misc_RNA (1)...(19): siRNA sense strand
acaacaauguauucagcua

SEQ ID NO: 2487687 - RNA, 19 nt, Homo sapiens
  misc_RNA (1)...(19): siRNA sense strand
cugauaaauuacuaggaga

SEQ ID NO: 2487688 - RNA, 19 nt, Homo sapiens
  misc_RNA (1)...(19): siRNA sense strand
acgaauggaacaagaaaca

SEQ ID NO: 2487689 - RNA, 19 nt, Homo sapiens
  misc_RNA (1)...(19): siRNA sense strand
gagaaugcuuuaaggucau

SEQ ID NO: 2487690 - RNA, 19 nt, Homo sapiens
  misc_RNA (1)...(19): siRNA sense strand
aaauccaacuacagugaaa

SEQ ID NO: 2487691 - RNA, 19 nt, Homo sapiens
  misc_RNA (1)...(19): siRNA sense strand
aggaaaagaucaaggaacu

SEQ ID NO: 2487692 - RNA, 19 nt, Homo sapiens
  misc_RNA (1)...(19): siRNA sense strand
gaaacuugaauuuggagaa

SEQ ID NO: 2487693 - RNA, 19 nt, Homo sapiens
  misc_RNA (1)...(19): siRNA sense strand
gagaacauggaaaggaaau

SEQ ID NO: 2487694 - RNA, 19 nt, Homo sapiens
  misc_RNA (1)...(19): siRNA sense strand
ggaagauaugagacaggaa

SEQ ID NO: 2487695 - RNA, 19 nt, Homo sapiens
  misc_RNA (1)...(19): siRNA sense strand
ugaaauuaucacaggauca

SEQ ID NO: 2487696 - RNA, 19 nt, Homo sapiens
  misc_RNA (1)...(19): siRNA sense strand
aguuaaugaauguggcaau

SEQ ID NO: 2487697 - RNA, 19 nt, Homo sapiens
  misc_RNA (1)...(19): siRNA sense strand
ucuacauaguggagaaaua

SEQ ID NO: 2487698 - RNA, 19 nt, Homo sapiens
  misc_RNA (1)...(19): siRNA sense strand
aguaaaugcagaagacaaa

SEQ ID NO: 2487699 - RNA, 19 nt, Homo sapiens
  misc_RNA (1)...(19): siRNA sense strand
gcaugagauugaagagcua

SEQ ID NO: 2487700 - RNA, 19 nt, Homo sapiens
  misc_RNA (1)...(19): siRNA sense strand
ggaucagguucgugaauau

SEQ ID NO: 2487701 - RNA, 19 nt, Homo sapiens
  misc_RNA (1)...(19): siRNA sense strand
gagaaaaggaugagacaau

SEQ ID NO: 2487702 - RNA, 19 nt, Homo sapiens
  misc_RNA (1)...(19): siRNA sense strand
uggcacagauggaggaaau

SEQ ID NO: 2487703 - RNA, 19 nt, Homo sapiens
  misc_RNA (1)...(19): siRNA sense strand
ggagaaugcuuuaagguca

SEQ ID NO: 2487704 - RNA, 19 nt, Homo sapiens
  misc_RNA (1)...(19): siRNA sense strand
gagugaaagaggaaacaaa

SEQ ID NO: 2487705 - RNA, 19 nt, Homo sapiens
  misc_RNA (1)...(19): siRNA sense strand
cuggaagaaaugaggguua

SEQ ID NO: 2487706 - RNA, 19 nt, Homo sapiens
  misc_RNA (1)...(19): siRNA sense strand
uggugaauuuggagugaaa

SEQ ID NO: 2487707 - RNA, 19 nt, Homo sapiens
  misc_RNA (1)...(19): siRNA sense strand
ccaagaacaauuagaagaa

SEQ ID NO: 2487708 - RNA, 19 nt, Homo sapiens
  misc_RNA (1)...(19): siRNA sense strand
gaugagacaaugagagaau

SEQ ID NO: 2487709 - RNA, 19 nt, Homo sapiens
  misc_RNA (1)...(19): siRNA sense strand
cagaaugaaaugagucaaa

SEQ ID NO: 2487710 - RNA, 19 nt, Homo sapiens
  misc_RNA (1)...(19): siRNA sense strand
agacaguggaugugaaauu

SEQ ID NO: 2487711 - RNA, 19 nt, Homo sapiens
  misc_RNA (1)...(19): siRNA sense strand
gugaaagaggaaacaaaua

SEQ ID NO: 2487712 - RNA, 19 nt, Homo sapiens
  misc_RNA (1)...(19): siRNA sense strand
cgaaacugauauaguacaa

SEQ ID NO: 2487713 - RNA, 19 nt, Homo sapiens
  misc_RNA (1)...(19): siRNA sense strand
acaagaaacaggugaugaa

SEQ ID NO: 2487714 - RNA, 19 nt, Homo sapiens
  misc_RNA (1)...(19): siRNA sense strand
guugaaagaaacugaacaa

SEQ ID NO: 2487715 - RNA, 19 nt, Homo sapiens
  misc_RNA (1)...(19): siRNA sense strand
aggagaacauggaaaggaa

SEQ ID NO: 2487716 - RNA, 19 nt, Homo sapiens
  misc_RNA (1)...(19): siRNA sense strand
caaggaagaacuaggacua

SEQ ID NO: 2487717 - RNA, 19 nt, Homo sapiens
  misc_RNA (1)...(19): siRNA sense strand
auugagauguagagagcua

SEQ ID NO: 2487718 - RNA, 19 nt, Homo sapiens
  misc_RNA (1)...(19): siRNA sense strand
uaguaaagaguuaggagaa

SEQ ID NO: 2487719 - RNA, 19 nt, Homo sapiens
  misc_RNA (1)...(19): siRNA sense strand
aagaagagauuaagagacu

SEQ ID NO: 2487720 - RNA, 19 nt, Homo sapiens
  misc_RNA (1)...(19): siRNA sense strand
ggaacuggaaagugaaauu

SEQ ID NO: 2487721 - RNA, 19 nt, Homo sapiens
  misc_RNA (1)...(19): siRNA sense strand
cugacuaauucuaagcaaa

SEQ ID NO: 2487722 - RNA, 19 nt, Homo sapiens
  misc_RNA (1)...(19): siRNA sense strand
uagcagaaacauuggaaau

SEQ ID NO: 2487723 - RNA, 19 nt, Homo sapiens
  misc_RNA (1)...(19): siRNA sense strand
aaguaaaugcagaagacaa

SEQ ID NO: 2487724 - RNA, 19 nt, Homo sapiens
  misc_RNA (1)...(19): siRNA sense strand
acuugaauuuggagaagaa

SEQ ID NO: 2487725 - RNA, 19 nt, Homo sapiens
  misc_RNA (1)...(19): siRNA sense strand
ccagaaaggaacuagaauu

SEQ ID NO: 2487726 - RNA, 19 nt, Homo sapiens
  misc_RNA (1)...(19): siRNA sense strand
acagaaugauuuaaggcua

SEQ ID NO: 2487727 - RNA, 19 nt, Homo sapiens
  misc_RNA (1)...(19): siRNA sense strand
cccuggaaguugugugaaa

SEQ ID NO: 2487728 - RNA, 19 nt, Homo sapiens
  misc_RNA (1)...(19): siRNA sense strand
ugaaauacucagacaagaa

SEQ ID NO: 2487729 - RNA, 19 nt, Homo sapiens
  misc_RNA (1)...(19): siRNA sense strand
gguaaccaagcgagagaaa

SEQ ID NO: 2487730 - RNA, 19 nt, Homo sapiens
  misc_RNA (1)...(19): siRNA sense strand
aaacaggugaugaaggaaa

SEQ ID NO: 2487731 - RNA, 19 nt, Homo sapiens
  misc_RNA (1)...(19): siRNA sense strand
acaacaagcaagaagagaa

SEQ ID NO: 2487732 - RNA, 19 nt, Homo sapiens
  misc_RNA (1)...(19): siRNA sense strand
agugaaacucugagaaaca

SEQ ID NO: 2487733 - RNA, 19 nt, Homo sapiens
  misc_RNA (1)...(19): siRNA sense strand
cuagugaaacucugagaaa

SEQ ID NO: 2487734 - RNA, 19 nt, Homo sapiens
  misc_RNA (1)...(19): siRNA sense strand
agaaaagaaugcuguguua

SEQ ID NO: 2487735 - RNA, 19 nt, Homo sapiens
  misc_RNA (1)...(19): siRNA sense strand
guucgugaauauauggaaa

SEQ ID NO: 2487736 - RNA, 19 nt, Homo sapiens
  misc_RNA (1)...(19): siRNA sense strand
uagaagaagaaguagcuaa

SEQ ID NO: 2487737 - RNA, 19 nt, Homo sapiens
  misc_RNA (1)...(19): siRNA sense strand
augaagaacaguuggaaga

SEQ ID NO: 2487738 - RNA, 19 nt, Homo sapiens
  misc_RNA (1)...(19): siRNA sense strand
uagcugaacaagaaaguaa

SEQ ID NO: 2487739 - RNA, 19 nt, Homo sapiens
  misc_RNA (1)...(19): siRNA sense strand
cucuugagcuaaaggauaa

SEQ ID NO: 2487740 - RNA, 19 nt, Homo sapiens
  misc_RNA (1)...(19): siRNA sense strand
aagaacaguuggaagauau

SEQ ID NO: 2487741 - RNA, 19 nt, Homo sapiens
  misc_RNA (1)...(19): siRNA sense strand
uugaagagcuaaacagaga

SEQ ID NO: 2487742 - RNA, 19 nt, Homo sapiens
  misc_RNA (1)...(19): siRNA sense strand
ggaacaagaaacacaaaga

SEQ ID NO: 2487743 - RNA, 19 nt, Homo sapiens
  misc_RNA (1)...(19): siRNA sense strand
agacaauagcugaacaaga

SEQ ID NO: 2487744 - RNA, 19 nt, Homo sapiens
  misc_RNA (1)...(19): siRNA sense strand
aagaacagauugugcaaaa

SEQ ID NO: 2487745 - RNA, 19 nt, Homo sapiens
  misc_RNA (1)...(19): siRNA sense strand
ccaagaagaaagauugauu

SEQ ID NO: 2487746 - RNA, 19 nt, Homo sapiens
  misc_RNA (1)...(19): siRNA sense strand
ggagaacauggaaaggaaa

SEQ ID NO: 2487747 - RNA, 19 nt, Homo sapiens
  misc_RNA (1)...(19): siRNA sense strand
aggaacagcuacaagaaga

SEQ ID NO: 2487748 - RNA, 19 nt, Homo sapiens
  misc_RNA (1)...(19): siRNA sense strand
uggagaagaaaguaagcaa

SEQ ID NO: 2487749 - RNA, 19 nt, Homo sapiens
  misc_RNA (1)...(19): siRNA sense strand
gaaucaucacuuagagcaa

SEQ ID NO: 2487750 - RNA, 19 nt, Homo sapiens
  misc_RNA (1)...(19): siRNA sense strand
cuguggaacuggaaaguga

SEQ ID NO: 2487751 - RNA, 19 nt, Homo sapiens
  misc_RNA (1)...(19): siRNA sense strand
acaacaauguauucagcua

SEQ ID NO: 2487752 - RNA, 19 nt, Homo sapiens
  misc_RNA (1)...(19): siRNA sense strand
cugauaaauuacuaggaga

SEQ ID NO: 2487753 - RNA, 19 nt, Homo sapiens
  misc_RNA (1)...(19): siRNA sense strand
acgaauggaacaagaaaca

SEQ ID NO: 2487754 - RNA, 19 nt, Homo sapiens
  misc_RNA (1)...(19): siRNA sense strand
gagaaugcuuuaaggucau

SEQ ID NO: 2487755 - RNA, 19 nt, Homo sapiens
  misc_RNA (1)...(19): siRNA sense strand
aaauccaacuacagugaaa

SEQ ID NO: 2487756 - RNA, 19 nt, Homo sapiens
  misc_RNA (1)...(19): siRNA sense strand
aggaaaagaucaaggaacu

SEQ ID NO: 2487757 - RNA, 19 nt, Homo sapiens
  misc_RNA (1)...(19): siRNA sense strand
gaaacuugaauuuggagaa

SEQ ID NO: 2487758 - RNA, 19 nt, Homo sapiens
  misc_RNA (1)...(19): siRNA sense strand
gagaacauggaaaggaaau

SEQ ID NO: 2487759 - RNA, 19 nt, Homo sapiens
  misc_RNA (1)...(19): siRNA sense strand
ggaagauaugagacaggaa

SEQ ID NO: 2487760 - RNA, 19 nt, Homo sapiens
  misc_RNA (1)...(19): siRNA sense strand
ugaaauuaucacaggauca

SEQ ID NO: 2487761 - RNA, 19 nt, Homo sapiens
  misc_RNA (1)...(19): siRNA sense strand
aguuaaugaauguggcaau

SEQ ID NO: 2487762 - RNA, 19 nt, Homo sapiens
  misc_RNA (1)...(19): siRNA sense strand
ucuacauaguggagaaaua

SEQ ID NO: 2487763 - RNA, 19 nt, Homo sapiens
  misc_RNA (1)...(19): siRNA sense strand
aguaaaugcagaagacaaa

SEQ ID NO: 2487764 - RNA, 19 nt, Homo sapiens
  misc_RNA (1)...(19): siRNA sense strand
gcaugagauugaagagcua

SEQ ID NO: 2487765 - RNA, 19 nt, Homo sapiens
  misc_RNA (1)...(19): siRNA sense strand
ggaucagguucgugaauau

SEQ ID NO: 2487766 - RNA, 19 nt, Homo sapiens
  misc_RNA (1)...(19): siRNA sense strand
gagaaaaggaugagacaau

SEQ ID NO: 2487767 - RNA, 19 nt, Homo sapiens
  misc_RNA (1)...(19): siRNA sense strand
uggcacagauggaggaaau

SEQ ID NO: 2487768 - RNA, 19 nt, Homo sapiens
  misc_RNA (1)...(19): siRNA sense strand
ggagaaugcuuuaagguca

SEQ ID NO: 2487769 - RNA, 19 nt, Homo sapiens
  misc_RNA (1)...(19): siRNA sense strand
gagugaaagaggaaacaaa

SEQ ID NO: 2487770 - RNA, 19 nt, Homo sapiens
  misc_RNA (1)...(19): siRNA sense strand
cuggaagaaaugaggguua

SEQ ID NO: 2487771 - RNA, 19 nt, Homo sapiens
  misc_RNA (1)...(19): siRNA sense strand
uggugaauuuggagugaaa

SEQ ID NO: 2487772 - RNA, 19 nt, Homo sapiens
  misc_RNA (1)...(19): siRNA sense strand
ccaagaacaauuagaagaa

SEQ ID NO: 2487773 - RNA, 19 nt, Homo sapiens
  misc_RNA (1)...(19): siRNA sense strand
gaugagacaaugagagaau

SEQ ID NO: 2487774 - RNA, 19 nt, Homo sapiens
  misc_RNA (1)...(19): siRNA sense strand
cagaaugaaaugagucaaa

SEQ ID NO: 2487775 - RNA, 19 nt, Homo sapiens
  misc_RNA (1)...(19): siRNA sense strand
agacaguggaugugaaauu

SEQ ID NO: 2487776 - RNA, 19 nt, Homo sapiens
  misc_RNA (1)...(19): siRNA sense strand
gugaaagaggaaacaaaua

SEQ ID NO: 2487777 - RNA, 19 nt, Homo sapiens
  misc_RNA (1)...(19): siRNA sense strand
cgaaacugauauaguacaa

SEQ ID NO: 2487778 - RNA, 19 nt, Homo sapiens
  misc_RNA (1)...(19): siRNA sense strand
acaagaaacaggugaugaa

SEQ ID NO: 2487779 - RNA, 19 nt, Homo sapiens
  misc_RNA (1)...(19): siRNA sense strand
guugaaagaaacugaacaa

SEQ ID NO: 2487780 - RNA, 19 nt, Homo sapiens
  misc_RNA (1)...(19): siRNA sense strand
aggagaacauggaaaggaa

SEQ ID NO: 2487781 - RNA, 19 nt, Homo sapiens
  misc_RNA (1)...(19): siRNA sense strand
caaggaagaacuaggacua

SEQ ID NO: 2487782 - RNA, 19 nt, Homo sapiens
  misc_RNA (1)...(19): siRNA sense strand
auugagauguagagagcua

SEQ ID NO: 2487783 - RNA, 19 nt, Homo sapiens
  misc_RNA (1)...(19): siRNA sense strand
uaguaaagaguuaggagaa

SEQ ID NO: 2487784 - RNA, 19 nt, Homo sapiens
  misc_RNA (1)...(19): siRNA sense strand
aagaagagauuaagagacu

SEQ ID NO: 2487785 - RNA, 19 nt, Homo sapiens
  misc_RNA (1)...(19): siRNA sense strand
ggaacuggaaagugaaauu

SEQ ID NO: 2487786 - RNA, 19 nt, Homo sapiens
  misc_RNA (1)...(19): siRNA sense strand
cugacuaauucuaagcaaa

SEQ ID NO: 2487787 - RNA, 19 nt, Homo sapiens
  misc_RNA (1)...(19): siRNA sense strand
uagcagaaacauuggaaau

SEQ ID NO: 2487788 - RNA, 19 nt, Homo sapiens
  misc_RNA (1)...(19): siRNA sense strand
aaguaaaugcagaagacaa

SEQ ID NO: 2487789 - RNA, 19 nt, Homo sapiens
  misc_RNA (1)...(19): siRNA sense strand
acuugaauuuggagaagaa

SEQ ID NO: 2487790 - RNA, 19 nt, Homo sapiens
  misc_RNA (1)...(19): siRNA sense strand
ccagaaaggaacuagaauu

SEQ ID NO: 2487791 - RNA, 19 nt, Homo sapiens
  misc_RNA (1)...(19): siRNA sense strand
acagaaugauuuaaggcua

SEQ ID NO: 2487792 - RNA, 19 nt, Homo sapiens
  misc_RNA (1)...(19): siRNA sense strand
cccuggaaguugugugaaa

SEQ ID NO: 2487793 - RNA, 19 nt, Homo sapiens
  misc_RNA (1)...(19): siRNA sense strand
ugaaauacucagacaagaa

SEQ ID NO: 2487794 - RNA, 19 nt, Homo sapiens
  misc_RNA (1)...(19): siRNA sense strand
gguaaccaagcgagagaaa

SEQ ID NO: 2487795 - RNA, 19 nt, Homo sapiens
  misc_RNA (1)...(19): siRNA sense strand
aaacaggugaugaaggaaa

SEQ ID NO: 2487796 - RNA, 19 nt, Homo sapiens
  misc_RNA (1)...(19): siRNA sense strand
acaacaagcaagaagagaa

SEQ ID NO: 2487797 - RNA, 19 nt, Homo sapiens
  misc_RNA (1)...(19): siRNA sense strand
agugaaacucugagaaaca

SEQ ID NO: 2487798 - RNA, 19 nt, Homo sapiens
  misc_RNA (1)...(19): siRNA sense strand
cuagugaaacucugagaaa

SEQ ID NO: 2487799 - RNA, 19 nt, Homo sapiens
  misc_RNA (1)...(19): siRNA sense strand
agaaaagaaugcuguguua

SEQ ID NO: 2487800 - RNA, 19 nt, Homo sapiens
  misc_RNA (1)...(19): siRNA sense strand
guucgugaauauauggaaa

SEQ ID NO: 2487801 - RNA, 19 nt, Homo sapiens
  misc_RNA (1)...(19): siRNA sense strand
uagaagaagaaguagcuaa

SEQ ID NO: 2487802 - RNA, 19 nt, Homo sapiens
  misc_RNA (1)...(19): siRNA sense strand
augaagaacaguuggaaga

SEQ ID NO: 2487803 - RNA, 19 nt, Homo sapiens
  misc_RNA (1)...(19): siRNA sense strand
uagcugaacaagaaaguaa

SEQ ID NO: 2487804 - RNA, 19 nt, Homo sapiens
  misc_RNA (1)...(19): siRNA sense strand
cucuugagcuaaaggauaa

SEQ ID NO: 2487805 - RNA, 19 nt, Homo sapiens
  misc_RNA (1)...(19): siRNA sense strand
aagaacaguuggaagauau

SEQ ID NO: 2487806 - RNA, 19 nt, Homo sapiens
  misc_RNA (1)...(19): siRNA sense strand
uugaagagcuaaacagaga

SEQ ID NO: 2487807 - RNA, 19 nt, Homo sapiens
  misc_RNA (1)...(19): siRNA sense strand
ggaacaagaaacacaaaga

SEQ ID NO: 2487808 - RNA, 19 nt, Homo sapiens
  misc_RNA (1)...(19): siRNA sense strand
agacaauagcugaacaaga

SEQ ID NO: 2487809 - RNA, 19 nt, Homo sapiens
  misc_RNA (1)...(19): siRNA sense strand
aagaacagauugugcaaaa

SEQ ID NO: 2487810 - RNA, 19 nt, Homo sapiens
  misc_RNA (1)...(19): siRNA sense strand
ccaagaagaaagauugauu

SEQ ID NO: 2487811 - RNA, 19 nt, Homo sapiens
  misc_RNA (1)...(19): siRNA sense strand
ggagaacauggaaaggaaa

SEQ ID NO: 2487812 - RNA, 19 nt, Homo sapiens
  misc_RNA (1)...(19): siRNA sense strand
aggaacagcuacaagaaga

SEQ ID NO: 2487813 - RNA, 19 nt, Homo sapiens
  misc_RNA (1)...(19): siRNA sense strand
uggagaagaaaguaagcaa

SEQ ID NO: 2487814 - RNA, 19 nt, Homo sapiens
  misc_RNA (1)...(19): siRNA sense strand
gaaucaucacuuagagcaa

SEQ ID NO: 2487815 - RNA, 19 nt, Homo sapiens
  misc_RNA (1)...(19): siRNA sense strand
cuguggaacuggaaaguga

SEQ ID NO: 2487816 - RNA, 19 nt, Homo sapiens
  misc_RNA (1)...(19): siRNA sense strand
acaacaauguauucagcua

SEQ ID NO: 2487817 - RNA, 19 nt, Homo sapiens
  misc_RNA (1)...(19): siRNA sense strand
cugauaaauuacuaggaga

SEQ ID NO: 2487818 - RNA, 19 nt, Homo sapiens
  misc_RNA (1)...(19): siRNA sense strand
acgaauggaacaagaaaca

SEQ ID NO: 2487819 - RNA, 19 nt, Homo sapiens
  misc_RNA (1)...(19): siRNA sense strand
gagaaugcuuuaaggucau

SEQ ID NO: 2487820 - RNA, 19 nt, Homo sapiens
  misc_RNA (1)...(19): siRNA sense strand
aaauccaacuacagugaaa

SEQ ID NO: 2487821 - RNA, 19 nt, Homo sapiens
  misc_RNA (1)...(19): siRNA sense strand
aggaaaagaucaaggaacu

SEQ ID NO: 2487822 - RNA, 19 nt, Homo sapiens
  misc_RNA (1)...(19): siRNA sense strand
gaaacuugaauuuggagaa

SEQ ID NO: 2487823 - RNA, 19 nt, Homo sapiens
  misc_RNA (1)...(19): siRNA sense strand
gagaacauggaaaggaaau

SEQ ID NO: 2487824 - RNA, 19 nt, Homo sapiens
  misc_RNA (1)...(19): siRNA sense strand
ggaagauaugagacaggaa

SEQ ID NO: 2487825 - RNA, 19 nt, Homo sapiens
  misc_RNA (1)...(19): siRNA sense strand
ugaaauuaucacaggauca

SEQ ID NO: 2487826 - RNA, 19 nt, Homo sapiens
  misc_RNA (1)...(19): siRNA sense strand
aguuaaugaauguggcaau

SEQ ID NO: 2487827 - RNA, 19 nt, Homo sapiens
  misc_RNA (1)...(19): siRNA sense strand
agucagagcccaagggaaa

SEQ ID NO: 2487828 - RNA, 19 nt, Homo sapiens
  misc_RNA (1)...(19): siRNA sense strand
agacaaagucaaaggaaga

SEQ ID NO: 2487829 - RNA, 19 nt, Homo sapiens
  misc_RNA (1)...(19): siRNA sense strand
aaacagaauucaaaggaga

SEQ ID NO: 2487830 - RNA, 19 nt, Homo sapiens
  misc_RNA (1)...(19): siRNA sense strand
uggguaaagacaugagaaa

SEQ ID NO: 2487831 - RNA, 19 nt, Homo sapiens
  misc_RNA (1)...(19): siRNA sense strand
uggaaacagcagugaagaa

SEQ ID NO: 2487832 - RNA, 19 nt, Homo sapiens
  misc_RNA (1)...(19): siRNA sense strand
agucaaaggaagaucaaga

SEQ ID NO: 2487833 - RNA, 19 nt, Homo sapiens
  misc_RNA (1)...(19): siRNA sense strand
ccaacgaacuggagcucau

SEQ ID NO: 2487834 - RNA, 19 nt, Homo sapiens
  misc_RNA (1)...(19): siRNA sense strand
cagcaaucauacagaggau

SEQ ID NO: 2487835 - RNA, 19 nt, Homo sapiens
  misc_RNA (1)...(19): siRNA sense strand
agaccaaugcagauguaaa

SEQ ID NO: 2487836 - RNA, 19 nt, Homo sapiens
  misc_RNA (1)...(19): siRNA sense strand
cagaagugaaagauaacaa

SEQ ID NO: 2487837 - RNA, 19 nt, Homo sapiens
  misc_RNA (1)...(19): siRNA sense strand
gggaguaucugcugcguca

SEQ ID NO: 2487838 - RNA, 19 nt, Homo sapiens
  misc_RNA (1)...(19): siRNA sense strand
ucacuaugcacuugaacaa

SEQ ID NO: 2487839 - RNA, 19 nt, Homo sapiens
  misc_RNA (1)...(19): siRNA sense strand
aaggauuguugauggaauu

SEQ ID NO: 2487840 - RNA, 19 nt, Homo sapiens
  misc_RNA (1)...(19): siRNA sense strand
ggguaaagacaugagaaau

SEQ ID NO: 2487841 - RNA, 19 nt, Homo sapiens
  misc_RNA (1)...(19): siRNA sense strand
acgccuugguguuuggaaa

SEQ ID NO: 2487842 - RNA, 19 nt, Homo sapiens
  misc_RNA (1)...(19): siRNA sense strand
cucacaaauucguggaaga

SEQ ID NO: 2487843 - RNA, 19 nt, Homo sapiens
  misc_RNA (1)...(19): siRNA sense strand
gggaggaagaggaggcagu

SEQ ID NO: 2487844 - RNA, 19 nt, Homo sapiens
  misc_RNA (1)...(19): siRNA sense strand
caacauugacucaggaagu

SEQ ID NO: 2487845 - RNA, 19 nt, Homo sapiens
  misc_RNA (1)...(19): siRNA sense strand
gcuggcuauucuugggaaa

SEQ ID NO: 2487846 - RNA, 19 nt, Homo sapiens
  misc_RNA (1)...(19): siRNA sense strand
cuucaugaguugggaaaga

SEQ ID NO: 2487847 - RNA, 19 nt, Homo sapiens
  misc_RNA (1)...(19): siRNA sense strand
agaucagagcccagaauuu

SEQ ID NO: 2487848 - RNA, 19 nt, Homo sapiens
  misc_RNA (1)...(19): siRNA sense strand
gauuacuccagaagauaaa

SEQ ID NO: 2487849 - RNA, 19 nt, Homo sapiens
  misc_RNA (1)...(19): siRNA sense strand
ucaaagcagaggagaccaa

SEQ ID NO: 2487850 - RNA, 19 nt, Homo sapiens
  misc_RNA (1)...(19): siRNA sense strand
caaggauuguugauggaau

SEQ ID NO: 2487851 - RNA, 19 nt, Homo sapiens
  misc_RNA (1)...(19): siRNA sense strand
ccuuacaacguuugcuuua

SEQ ID NO: 2487852 - RNA, 19 nt, Homo sapiens
  misc_RNA (1)...(19): siRNA sense strand
gcuaauacagaugcagaaa

SEQ ID NO: 2487853 - RNA, 19 nt, Homo sapiens
  misc_RNA (1)...(19): siRNA sense strand
auggaauugaagauggaaa

SEQ ID NO: 2487854 - RNA, 19 nt, Homo sapiens
  misc_RNA (1)...(19): siRNA sense strand
ggucagucaacaauggaau

SEQ ID NO: 2487855 - RNA, 19 nt, Homo sapiens
  misc_RNA (1)...(19): siRNA sense strand
gggauuuaauuggagcaaa

SEQ ID NO: 2487856 - RNA, 19 nt, Homo sapiens
  misc_RNA (1)...(19): siRNA sense strand
uuguggaagaugaggaaga

SEQ ID NO: 2487857 - RNA, 19 nt, Homo sapiens
  misc_RNA (1)...(19): siRNA sense strand
aagaugaggaagaggagga

SEQ ID NO: 2487858 - RNA, 19 nt, Homo sapiens
  misc_RNA (1)...(19): siRNA sense strand
aaaggaaagagaagaacuu

SEQ ID NO: 2487859 - RNA, 19 nt, Homo sapiens
  misc_RNA (1)...(19): siRNA sense strand
gagaccaagcagcagauaa

SEQ ID NO: 2487860 - RNA, 19 nt, Homo sapiens
  misc_RNA (1)...(19): siRNA sense strand
ugucacaagcacagcagaa

SEQ ID NO: 2487861 - RNA, 19 nt, Homo sapiens
  misc_RNA (1)...(19): siRNA sense strand
gcguguaucugguacguca

SEQ ID NO: 2487862 - RNA, 19 nt, Homo sapiens
  misc_RNA (1)...(19): siRNA sense strand
ucugguacgucauuggaaa

SEQ ID NO: 2487863 - RNA, 19 nt, Homo sapiens
  misc_RNA (1)...(19): siRNA sense strand
accaagugaucaagaccaa

SEQ ID NO: 2487864 - RNA, 19 nt, Homo sapiens
  misc_RNA (1)...(19): siRNA sense strand
aguaauaucaccucagaca

SEQ ID NO: 2487865 - RNA, 19 nt, Homo sapiens
  misc_RNA (1)...(19): siRNA sense strand
aaauggagagggaagacaa

SEQ ID NO: 2487866 - RNA, 19 nt, Homo sapiens
  misc_RNA (1)...(19): siRNA sense strand
aagaagguuggaagcaaua

SEQ ID NO: 2487867 - RNA, 19 nt, Homo sapiens
  misc_RNA (1)...(19): siRNA sense strand
aggaaagagaagaacuuga

SEQ ID NO: 2487868 - RNA, 19 nt, Homo sapiens
  misc_RNA (1)...(19): siRNA sense strand
acagcagaagugaaagaua

SEQ ID NO: 2487869 - RNA, 19 nt, Homo sapiens
  misc_RNA (1)...(19): siRNA sense strand
ugacauugcaguggagauu

SEQ ID NO: 2487870 - RNA, 19 nt, Homo sapiens
  misc_RNA (1)...(19): siRNA sense strand
cugcagacagugaacuuua

SEQ ID NO: 2487871 - RNA, 19 nt, Homo sapiens
  misc_RNA (1)...(19): siRNA sense strand
agauuacuccagaagauaa

SEQ ID NO: 2487872 - RNA, 19 nt, Homo sapiens
  misc_RNA (1)...(19): siRNA sense strand
gugggaaguugguuggcuu

SEQ ID NO: 2487873 - RNA, 19 nt, Homo sapiens
  misc_RNA (1)...(19): siRNA sense strand
uuaaggaccaagugaucaa

SEQ ID NO: 2487874 - RNA, 19 nt, Homo sapiens
  misc_RNA (1)...(19): siRNA sense strand
cuaccugggcuuaagcuua

SEQ ID NO: 2487875 - RNA, 19 nt, Homo sapiens
  misc_RNA (1)...(19): siRNA sense strand
gcaaaauccugcagacagu

SEQ ID NO: 2487876 - RNA, 19 nt, Homo sapiens
  misc_RNA (1)...(19): siRNA sense strand
cuuggaaccaggaaggaau

SEQ ID NO: 2487877 - RNA, 19 nt, Homo sapiens
  misc_RNA (1)...(19): siRNA sense strand
ugcagaaguuagaccgcua

SEQ ID NO: 2487878 - RNA, 19 nt, Homo sapiens
  misc_RNA (1)...(19): siRNA sense strand
caaccuggucagucaacaa

SEQ ID NO: 2487879 - RNA, 19 nt, Homo sapiens
  misc_RNA (1)...(19): siRNA sense strand
cauuguggaagaugaggaa

SEQ ID NO: 2487880 - RNA, 19 nt, Homo sapiens
  misc_RNA (1)...(19): siRNA sense strand
aagacaaagucaaaggaag

SEQ ID NO: 2487881 - RNA, 19 nt, Homo sapiens
  misc_RNA (1)...(19): siRNA sense strand
gcaccugcaaagaagagaa

SEQ ID NO: 2487882 - RNA, 19 nt, Homo sapiens
  misc_RNA (1)...(19): siRNA sense strand
gcaaagaagagaaaagaac

SEQ ID NO: 2487883 - RNA, 19 nt, Homo sapiens
  misc_RNA (1)...(19): siRNA sense strand
ggcuucaugaguugggaaa

SEQ ID NO: 2487884 - RNA, 19 nt, Homo sapiens
  misc_RNA (1)...(19): siRNA sense strand
cagcaugaccucacauaca

SEQ ID NO: 2487885 - RNA, 19 nt, Homo sapiens
  misc_RNA (1)...(19): siRNA sense strand
ccaaugcccagguggcuaa

SEQ ID NO: 2487886 - RNA, 19 nt, Homo sapiens
  misc_RNA (1)...(19): siRNA sense strand
gaagguuggaagcaauaaa

SEQ ID NO: 2487887 - RNA, 19 nt, Homo sapiens
  misc_RNA (1)...(19): siRNA sense strand
cugcgagcuugcuggauuu

SEQ ID NO: 2487888 - RNA, 19 nt, Homo sapiens
  misc_RNA (1)...(19): siRNA sense strand
cagcacacucagaugguca

SEQ ID NO: 2487889 - RNA, 19 nt, Homo sapiens
  misc_RNA (1)...(19): siRNA sense strand
cagcacacucagaugguca

SEQ ID NO: 2487890 - RNA, 19 nt, Homo sapiens
  misc_RNA (1)...(19): siRNA sense strand
cagcacacucagaugguca

SEQ ID NO: 2487891 - RNA, 19 nt, Homo sapiens
  misc_RNA (1)...(19): siRNA sense strand
cagcacacucagaugguca

SEQ ID NO: 2487892 - RNA, 19 nt, Homo sapiens
  misc_RNA (1)...(19): siRNA sense strand
cagcacacucagaugguca

SEQ ID NO: 2487893 - RNA, 19 nt, Homo sapiens
  misc_RNA (1)...(19): siRNA sense strand
agagagagcuacaggccaa

SEQ ID NO: 2487894 - RNA, 19 nt, Homo sapiens
  misc_RNA (1)...(19): siRNA sense strand
aggaagaagaaaugaaaca

SEQ ID NO: 2487895 - RNA, 19 nt, Homo sapiens
  misc_RNA (1)...(19): siRNA sense strand
guacaaauauggaggaccu

SEQ ID NO: 2487896 - RNA, 19 nt, Homo sapiens
  misc_RNA (1)...(19): siRNA sense strand
gggaaguauggaugaggua

SEQ ID NO: 2487897 - RNA, 19 nt, Homo sapiens
  misc_RNA (1)...(19): siRNA sense strand
ggaaacuggaauuggaaaa

SEQ ID NO: 2487898 - RNA, 19 nt, Homo sapiens
  misc_RNA (1)...(19): siRNA sense strand
agaggaaggaagaagaaau

SEQ ID NO: 2487899 - RNA, 19 nt, Homo sapiens
  misc_RNA (1)...(19): siRNA sense strand
uuuguaaagcugcgggaaa

SEQ ID NO: 2487900 - RNA, 19 nt, Homo sapiens
  misc_RNA (1)...(19): siRNA sense strand
gggaaacuggaauuggaaa

SEQ ID NO: 2487901 - RNA, 19 nt, Homo sapiens
  misc_RNA (1)...(19): siRNA sense strand
ugagugaauuggucagcaa

SEQ ID NO: 2487902 - RNA, 19 nt, Homo sapiens
  misc_RNA (1)...(19): siRNA sense strand
uuguaaagcugcgggaaau

SEQ ID NO: 2487903 - RNA, 19 nt, Homo sapiens
  misc_RNA (1)...(19): siRNA sense strand
acauaugaacuccaggaaa

SEQ ID NO: 2487904 - RNA, 19 nt, Homo sapiens
  misc_RNA (1)...(19): siRNA sense strand
auugaaagaagcugagaga

SEQ ID NO: 2487905 - RNA, 19 nt, Homo sapiens
  misc_RNA (1)...(19): siRNA sense strand
aacuuaaagcucagacaua

SEQ ID NO: 2487906 - RNA, 19 nt, Homo sapiens
  misc_RNA (1)...(19): siRNA sense strand
ccuuaagagacuucaccaa

SEQ ID NO: 2487907 - RNA, 19 nt, Homo sapiens
  misc_RNA (1)...(19): siRNA sense strand
caccaagaagagagaauga

SEQ ID NO: 2487908 - RNA, 19 nt, Homo sapiens
  misc_RNA (1)...(19): siRNA sense strand
aguuuaagaucaagcucau

SEQ ID NO: 2487909 - RNA, 19 nt, Homo sapiens
  misc_RNA (1)...(19): siRNA sense strand
ccauauugaaagaagcuga

SEQ ID NO: 2487910 - RNA, 19 nt, Homo sapiens
  misc_RNA (1)...(19): siRNA sense strand
ggguguuguacaaguggaa

SEQ ID NO: 2487911 - RNA, 19 nt, Homo sapiens
  misc_RNA (1)...(19): siRNA sense strand
agguaaaagucggaaacaa

SEQ ID NO: 2487912 - RNA, 19 nt, Homo sapiens
  misc_RNA (1)...(19): siRNA sense strand
guguuguacaaguggaaaa

SEQ ID NO: 2487913 - RNA, 19 nt, Homo sapiens
  misc_RNA (1)...(19): siRNA sense strand
gcagcgaguaaaggagaaa

SEQ ID NO: 2487914 - RNA, 19 nt, Homo sapiens
  misc_RNA (1)...(19): siRNA sense strand
ucggaaacaagauggucaa

SEQ ID NO: 2487915 - RNA, 19 nt, Homo sapiens
  misc_RNA (1)...(19): siRNA sense strand
uugugaauacagugggauu

SEQ ID NO: 2487916 - RNA, 19 nt, Homo sapiens
  misc_RNA (1)...(19): siRNA sense strand
acacuauugcuaaggucaa

SEQ ID NO: 2487917 - RNA, 19 nt, Homo sapiens
  misc_RNA (1)...(19): siRNA sense strand
augaacuccaggaaaguaa

SEQ ID NO: 2487918 - RNA, 19 nt, Homo sapiens
  misc_RNA (1)...(19): siRNA sense strand
aggagaaagaagccauauu

SEQ ID NO: 2487919 - RNA, 19 nt, Homo sapiens
  misc_RNA (1)...(19): siRNA sense strand
gaacugaagauuaagcguu

SEQ ID NO: 2487920 - RNA, 19 nt, Homo sapiens
  misc_RNA (1)...(19): siRNA sense strand
cgaguaaaggagaaagaag

SEQ ID NO: 2487921 - RNA, 19 nt, Homo sapiens
  misc_RNA (1)...(19): siRNA sense strand
aggccaaauuugagcaccu

SEQ ID NO: 2487922 - RNA, 19 nt, Homo sapiens
  misc_RNA (1)...(19): siRNA sense strand
ggccuaucuccaagaagaa

SEQ ID NO: 2487923 - RNA, 19 nt, Homo sapiens
  misc_RNA (1)...(19): siRNA sense strand
aggaaaugggcuuuacaga

SEQ ID NO: 2487924 - RNA, 19 nt, Homo sapiens
  misc_RNA (1)...(19): siRNA sense strand
gguaaaagucggaaacaag

SEQ ID NO: 2487925 - RNA, 19 nt, Homo sapiens
  misc_RNA (1)...(19): siRNA sense strand
cagaggaaggaagaagaaa

SEQ ID NO: 2487926 - RNA, 19 nt, Homo sapiens
  misc_RNA (1)...(19): siRNA sense strand
gcaaccugaggaaggacaa

SEQ ID NO: 2487927 - RNA, 19 nt, Homo sapiens
  misc_RNA (1)...(19): siRNA sense strand
guacaaguggaaaaugaaa

SEQ ID NO: 2487928 - RNA, 19 nt, Homo sapiens
  misc_RNA (1)...(19): siRNA sense strand
gaguaaaggagaaagaagc

SEQ ID NO: 2487929 - RNA, 19 nt, Homo sapiens
  misc_RNA (1)...(19): siRNA sense strand
ccgagauauuucacagcca

SEQ ID NO: 2487930 - RNA, 19 nt, Homo sapiens
  misc_RNA (1)...(19): siRNA sense strand
agagagagcuacaggccaa

SEQ ID NO: 2487931 - RNA, 19 nt, Homo sapiens
  misc_RNA (1)...(19): siRNA sense strand
aggaagaagaaaugaaaca

SEQ ID NO: 2487932 - RNA, 19 nt, Homo sapiens
  misc_RNA (1)...(19): siRNA sense strand
guacaaauauggaggaccu

SEQ ID NO: 2487933 - RNA, 19 nt, Homo sapiens
  misc_RNA (1)...(19): siRNA sense strand
gggaaguauggaugaggua

SEQ ID NO: 2487934 - RNA, 19 nt, Homo sapiens
  misc_RNA (1)...(19): siRNA sense strand
ggaaacuggaauuggaaaa

SEQ ID NO: 2487935 - RNA, 19 nt, Homo sapiens
  misc_RNA (1)...(19): siRNA sense strand
agaggaaggaagaagaaau

SEQ ID NO: 2487936 - RNA, 19 nt, Homo sapiens
  misc_RNA (1)...(19): siRNA sense strand
uuuguaaagcugcgggaaa

SEQ ID NO: 2487937 - RNA, 19 nt, Homo sapiens
  misc_RNA (1)...(19): siRNA sense strand
gggaaacuggaauuggaaa

SEQ ID NO: 2487938 - RNA, 19 nt, Homo sapiens
  misc_RNA (1)...(19): siRNA sense strand
ugagugaauuggucagcaa

SEQ ID NO: 2487939 - RNA, 19 nt, Homo sapiens
  misc_RNA (1)...(19): siRNA sense strand
uuguaaagcugcgggaaau

SEQ ID NO: 2487940 - RNA, 19 nt, Homo sapiens
  misc_RNA (1)...(19): siRNA sense strand
acauaugaacuccaggaaa

SEQ ID NO: 2487941 - RNA, 19 nt, Homo sapiens
  misc_RNA (1)...(19): siRNA sense strand
auugaaagaagcugagaga

SEQ ID NO: 2487942 - RNA, 19 nt, Homo sapiens
  misc_RNA (1)...(19): siRNA sense strand
aacuuaaagcucagacaua

SEQ ID NO: 2487943 - RNA, 19 nt, Homo sapiens
  misc_RNA (1)...(19): siRNA sense strand
ccuuaagagacuucaccaa

SEQ ID NO: 2487944 - RNA, 19 nt, Homo sapiens
  misc_RNA (1)...(19): siRNA sense strand
caccaagaagagagaauga

SEQ ID NO: 2487945 - RNA, 19 nt, Homo sapiens
  misc_RNA (1)...(19): siRNA sense strand
aguuuaagaucaagcucau

SEQ ID NO: 2487946 - RNA, 19 nt, Homo sapiens
  misc_RNA (1)...(19): siRNA sense strand
ccauauugaaagaagcuga

SEQ ID NO: 2487947 - RNA, 19 nt, Homo sapiens
  misc_RNA (1)...(19): siRNA sense strand
ggguguuguacaaguggaa

SEQ ID NO: 2487948 - RNA, 19 nt, Homo sapiens
  misc_RNA (1)...(19): siRNA sense strand
agguaaaagucggaaacaa

SEQ ID NO: 2487949 - RNA, 19 nt, Homo sapiens
  misc_RNA (1)...(19): siRNA sense strand
guguuguacaaguggaaaa

SEQ ID NO: 2487950 - RNA, 19 nt, Homo sapiens
  misc_RNA (1)...(19): siRNA sense strand
gcagcgaguaaaggagaaa

SEQ ID NO: 2487951 - RNA, 19 nt, Homo sapiens
  misc_RNA (1)...(19): siRNA sense strand
ucggaaacaagauggucaa

SEQ ID NO: 2487952 - RNA, 19 nt, Homo sapiens
  misc_RNA (1)...(19): siRNA sense strand
uugugaauacagugggauu

SEQ ID NO: 2487953 - RNA, 19 nt, Homo sapiens
  misc_RNA (1)...(19): siRNA sense strand
acacuauugcuaaggucaa

SEQ ID NO: 2487954 - RNA, 19 nt, Homo sapiens
  misc_RNA (1)...(19): siRNA sense strand
augaacuccaggaaaguaa

SEQ ID NO: 2487955 - RNA, 19 nt, Homo sapiens
  misc_RNA (1)...(19): siRNA sense strand
aggagaaagaagccauauu

SEQ ID NO: 2487956 - RNA, 19 nt, Homo sapiens
  misc_RNA (1)...(19): siRNA sense strand
gaacugaagauuaagcguu

SEQ ID NO: 2487957 - RNA, 19 nt, Homo sapiens
  misc_RNA (1)...(19): siRNA sense strand
cgaguaaaggagaaagaag

SEQ ID NO: 2487958 - RNA, 19 nt, Homo sapiens
  misc_RNA (1)...(19): siRNA sense strand
aggccaaauuugagcaccu

SEQ ID NO: 2487959 - RNA, 19 nt, Homo sapiens
  misc_RNA (1)...(19): siRNA sense strand
ggccuaucuccaagaagaa

SEQ ID NO: 2487960 - RNA, 19 nt, Homo sapiens
  misc_RNA (1)...(19): siRNA sense strand
aggaaaugggcuuuacaga

SEQ ID NO: 2487961 - RNA, 19 nt, Homo sapiens
  misc_RNA (1)...(19): siRNA sense strand
gguaaaagucggaaacaag

SEQ ID NO: 2487962 - RNA, 19 nt, Homo sapiens
  misc_RNA (1)...(19): siRNA sense strand
cagaggaaggaagaagaaa

SEQ ID NO: 2487963 - RNA, 19 nt, Homo sapiens
  misc_RNA (1)...(19): siRNA sense strand
gcaaccugaggaaggacaa

SEQ ID NO: 2487964 - RNA, 19 nt, Homo sapiens
  misc_RNA (1)...(19): siRNA sense strand
guacaaguggaaaaugaaa

SEQ ID NO: 2487965 - RNA, 19 nt, Homo sapiens
  misc_RNA (1)...(19): siRNA sense strand
gaguaaaggagaaagaagc

SEQ ID NO: 2487966 - RNA, 19 nt, Homo sapiens
  misc_RNA (1)...(19): siRNA sense strand
ccgagauauuucacagcca

SEQ ID NO: 2487967 - RNA, 19 nt, Homo sapiens
  misc_RNA (1)...(19): siRNA sense strand
gugcaugccuaaagggcua

SEQ ID NO: 2487968 - RNA, 19 nt, Homo sapiens
  misc_RNA (1)...(19): siRNA sense strand
acaagaaggaauuggagaa

SEQ ID NO: 2487969 - RNA, 19 nt, Homo sapiens
  misc_RNA (1)...(19): siRNA sense strand
gcauguugguggagaagau

SEQ ID NO: 2487970 - RNA, 19 nt, Homo sapiens
  misc_RNA (1)...(19): siRNA sense strand
aguaacaaucgcuggguaa

SEQ ID NO: 2487971 - RNA, 19 nt, Homo sapiens
  misc_RNA (1)...(19): siRNA sense strand
ggcacgaaguuuaggaaaa

SEQ ID NO: 2487972 - RNA, 19 nt, Homo sapiens
  misc_RNA (1)...(19): siRNA sense strand
guaaauucguagaaggcuu

SEQ ID NO: 2487973 - RNA, 19 nt, Homo sapiens
  misc_RNA (1)...(19): siRNA sense strand
ggaacuuggccauggagaa

SEQ ID NO: 2487974 - RNA, 19 nt, Homo sapiens
  misc_RNA (1)...(19): siRNA sense strand
gggagaaauauaugcaaga

SEQ ID NO: 2487975 - RNA, 19 nt, Homo sapiens
  misc_RNA (1)...(19): siRNA sense strand
auucaggacaugaggcaua

SEQ ID NO: 2487976 - RNA, 19 nt, Homo sapiens
  misc_RNA (1)...(19): siRNA sense strand
uuggagaagcugugaacaa

SEQ ID NO: 2487977 - RNA, 19 nt, Homo sapiens
  misc_RNA (1)...(19): siRNA sense strand
aggcagaacuaagggacua

SEQ ID NO: 2487978 - RNA, 19 nt, Homo sapiens
  misc_RNA (1)...(19): siRNA sense strand
ugaccagauucuagauaau

SEQ ID NO: 2487979 - RNA, 19 nt, Homo sapiens
  misc_RNA (1)...(19): siRNA sense strand
augaguuacugaagggcaa

SEQ ID NO: 2487980 - RNA, 19 nt, Homo sapiens
  misc_RNA (1)...(19): siRNA sense strand
gacaacgacuugagggaga

SEQ ID NO: 2487981 - RNA, 19 nt, Homo sapiens
  misc_RNA (1)...(19): siRNA sense strand
acgacuugagggagaaaua

SEQ ID NO: 2487982 - RNA, 19 nt, Homo sapiens
  misc_RNA (1)...(19): siRNA sense strand
cagaaaucauccugcaaaa

SEQ ID NO: 2487983 - RNA, 19 nt, Homo sapiens
  misc_RNA (1)...(19): siRNA sense strand
gaaugaagacaaagcgcau

SEQ ID NO: 2487984 - RNA, 19 nt, Homo sapiens
  misc_RNA (1)...(19): siRNA sense strand
aggacagagaagagaaaca

SEQ ID NO: 2487985 - RNA, 19 nt, Homo sapiens
  misc_RNA (1)...(19): siRNA sense strand
gaaaugaaaucacaggaca

SEQ ID NO: 2487986 - RNA, 19 nt, Homo sapiens
  misc_RNA (1)...(19): siRNA sense strand
cguagaaggcuuauuaaaa

SEQ ID NO: 2487987 - RNA, 19 nt, Homo sapiens
  misc_RNA (1)...(19): siRNA sense strand
cggcaaugucuguacuaau

SEQ ID NO: 2487988 - RNA, 19 nt, Homo sapiens
  misc_RNA (1)...(19): siRNA sense strand
ggagaagaugggacaugaa

SEQ ID NO: 2487989 - RNA, 19 nt, Homo sapiens
  misc_RNA (1)...(19): siRNA sense strand
cgaagaagaaagagagcag

SEQ ID NO: 2487990 - RNA, 19 nt, Homo sapiens
  misc_RNA (1)...(19): siRNA sense strand
cagaguccuuugagaagaa

SEQ ID NO: 2487991 - RNA, 19 nt, Homo sapiens
  misc_RNA (1)...(19): siRNA sense strand
cggugaacauguugugcau

SEQ ID NO: 2487992 - RNA, 19 nt, Homo sapiens
  misc_RNA (1)...(19): siRNA sense strand
ucaccggccuggaggagaa

SEQ ID NO: 2487993 - RNA, 19 nt, Homo sapiens
  misc_RNA (1)...(19): siRNA sense strand
gcugggagacacaggagua

SEQ ID NO: 2487994 - RNA, 19 nt, Homo sapiens
  misc_RNA (1)...(19): siRNA sense strand
caucagcauguaugaguua

SEQ ID NO: 2487995 - RNA, 19 nt, Homo sapiens
  misc_RNA (1)...(19): siRNA sense strand
gcaaauaugagcagggguu

SEQ ID NO: 2487996 - RNA, 19 nt, Homo sapiens
  misc_RNA (1)...(19): siRNA sense strand
ccaagaacucucugagguu

SEQ ID NO: 2487997 - RNA, 19 nt, Homo sapiens
  misc_RNA (1)...(19): siRNA sense strand
aaaugaaaucacaggacau

SEQ ID NO: 2487998 - RNA, 19 nt, Homo sapiens
  misc_RNA (1)...(19): siRNA sense strand
uuuugaaacuccagcgaua

SEQ ID NO: 2487999 - RNA, 19 nt, Homo sapiens
  misc_RNA (1)...(19): siRNA sense strand
gauacaacuccuaugauau

SEQ ID NO: 2488000 - RNA, 19 nt, Homo sapiens
  misc_RNA (1)...(19): siRNA sense strand
acacaggaguaaugcagau

SEQ ID NO: 2488001 - RNA, 19 nt, Homo sapiens
  misc_RNA (1)...(19): siRNA sense strand
augggagccuggagagaau

SEQ ID NO: 2488002 - RNA, 19 nt, Homo sapiens
  misc_RNA (1)...(19): siRNA sense strand
ggcagauacaagaaggaau

SEQ ID NO: 2488003 - RNA, 19 nt, Homo sapiens
  misc_RNA (1)...(19): siRNA sense strand
agaaggaauuggagaagcu

SEQ ID NO: 2488004 - RNA, 19 nt, Homo sapiens
  misc_RNA (1)...(19): siRNA sense strand
agagaaagugguugcuuau

SEQ ID NO: 2488005 - RNA, 19 nt, Homo sapiens
  misc_RNA (1)...(19): siRNA sense strand
ugcacaacgcugagcauua

SEQ ID NO: 2488006 - RNA, 19 nt, Homo sapiens
  misc_RNA (1)...(19): siRNA sense strand
auucaaaacaugagugaga

SEQ ID NO: 2488007 - RNA, 19 nt, Homo sapiens
  misc_RNA (1)...(19): siRNA sense strand
acucaggacuguuagccaa

SEQ ID NO: 2488008 - RNA, 19 nt, Homo sapiens
  misc_RNA (1)...(19): siRNA sense strand
ucaggacagagaagagaaa

SEQ ID NO: 2488009 - RNA, 19 nt, Homo sapiens
  misc_RNA (1)...(19): siRNA sense strand
gagaagagaaacaagagca

SEQ ID NO: 2488010 - RNA, 19 nt, Homo sapiens
  misc_RNA (1)...(19): siRNA sense strand
aagaagaaagagagcaguu

SEQ ID NO: 2488011 - RNA, 19 nt, Homo sapiens
  misc_RNA (1)...(19): siRNA sense strand
ggaccagaaagaagaaaau

SEQ ID NO: 2488012 - RNA, 19 nt, Homo sapiens
  misc_RNA (1)...(19): siRNA sense strand
cuugaaagcuauauccaca

SEQ ID NO: 2488013 - RNA, 19 nt, Homo sapiens
  misc_RNA (1)...(19): siRNA sense strand
cguauaggucagugaucau

SEQ ID NO: 2488014 - RNA, 19 nt, Homo sapiens
  misc_RNA (1)...(19): siRNA sense strand
ggggaaaggcauugaugau

SEQ ID NO: 2488015 - RNA, 19 nt, Homo sapiens
  misc_RNA (1)...(19): siRNA sense strand
ggacaugaggcauauucaa

SEQ ID NO: 2488016 - RNA, 19 nt, Homo sapiens
  misc_RNA (1)...(19): siRNA sense strand
cgagcucgggcguggauaa

SEQ ID NO: 2488017 - RNA, 19 nt, Homo sapiens
  misc_RNA (1)...(19): siRNA sense strand
agagaauucuuauuggaga

SEQ ID NO: 2488018 - RNA, 19 nt, Homo sapiens
  misc_RNA (1)...(19): siRNA sense strand
cugaccagauucuagauaa

SEQ ID NO: 2488019 - RNA, 19 nt, Homo sapiens
  misc_RNA (1)...(19): siRNA sense strand
aguauggacucauuggcaa

SEQ ID NO: 2488020 - RNA, 19 nt, Homo sapiens
  misc_RNA (1)...(19): siRNA sense strand
ucaauugagcagagacuga

SEQ ID NO: 2488021 - RNA, 19 nt, Homo sapiens
  misc_RNA (1)...(19): siRNA sense strand
ucguagaaggcuuauuaaa

SEQ ID NO: 2488022 - RNA, 19 nt, Homo sapiens
  misc_RNA (1)...(19): siRNA sense strand
caguaacaaucgcugggua

SEQ ID NO: 2488023 - RNA, 19 nt, Homo sapiens
  misc_RNA (1)...(19): siRNA sense strand
gacuugagggagaaauaua

SEQ ID NO: 2488024 - RNA, 19 nt, Homo sapiens
  misc_RNA (1)...(19): siRNA sense strand
cagugagaguaccagcaaa

SEQ ID NO: 2488025 - RNA, 19 nt, Homo sapiens
  misc_RNA (1)...(19): siRNA sense strand
cugaccagccugagccuua

SEQ ID NO: 2488026 - RNA, 19 nt, Homo sapiens
  misc_RNA (1)...(19): siRNA sense strand
gagcaaugcaauaaucaca

SEQ ID NO: 2488027 - RNA, 19 nt, Homo sapiens
  misc_RNA (1)...(19): siRNA sense strand
uaucaggagagcugggaga

SEQ ID NO: 2488028 - RNA, 19 nt, Homo sapiens
  misc_RNA (1)...(19): siRNA sense strand
gaaauauaugcaagaggca

SEQ ID NO: 2488029 - RNA, 19 nt, Homo sapiens
  misc_RNA (1)...(19): siRNA sense strand
acagagaagagaaacaaga

SEQ ID NO: 2488030 - RNA, 19 nt, Homo sapiens
  misc_RNA (1)...(19): siRNA sense strand
gcgaaaauuacgagaagaa

SEQ ID NO: 2488031 - RNA, 19 nt, Homo sapiens
  misc_RNA (1)...(19): siRNA sense strand
gguuaaucacaauggccaa

SEQ ID NO: 2488032 - RNA, 19 nt, Homo sapiens
  misc_RNA (1)...(19): siRNA sense strand
uguuauugcaagagacuuu

SEQ ID NO: 2488033 - RNA, 19 nt, Homo sapiens
  misc_RNA (1)...(19): siRNA sense strand
gcaugagcaaauagagaca

SEQ ID NO: 2488034 - RNA, 19 nt, Homo sapiens
  misc_RNA (1)...(19): siRNA sense strand
uugaggaacaagagaaaca

SEQ ID NO: 2488035 - RNA, 19 nt, Homo sapiens
  misc_RNA (1)...(19): siRNA sense strand
aagaaggagcuuuaggaga

SEQ ID NO: 2488036 - RNA, 19 nt, Homo sapiens
  misc_RNA (1)...(19): siRNA sense strand
aggcugaacucgauggaac

SEQ ID NO: 2488037 - RNA, 19 nt, Homo sapiens
  misc_RNA (1)...(19): siRNA sense strand
cgagaagaaagaaaacaaa

SEQ ID NO: 2488038 - RNA, 19 nt, Homo sapiens
  misc_RNA (1)...(19): siRNA sense strand
caagagacuuugaugccuu

SEQ ID NO: 2488039 - RNA, 19 nt, Homo sapiens
  misc_RNA (1)...(19): siRNA sense strand
aagaaagagcugaacgagu

SEQ ID NO: 2488040 - RNA, 19 nt, Homo sapiens
  misc_RNA (1)...(19): siRNA sense strand
acgagaagaaagaaaacaa

SEQ ID NO: 2488041 - RNA, 19 nt, Homo sapiens
  misc_RNA (1)...(19): siRNA sense strand
acuugagccucuuggugaa

SEQ ID NO: 2488042 - RNA, 19 nt, Homo sapiens
  misc_RNA (1)...(19): siRNA sense strand
aaauagagacacaaggcca

SEQ ID NO: 2488043 - RNA, 19 nt, Homo sapiens
  misc_RNA (1)...(19): siRNA sense strand
aggaacaagagaaacaaga

SEQ ID NO: 2488044 - RNA, 19 nt, Homo sapiens
  misc_RNA (1)...(19): siRNA sense strand
agaaagagcugaacgagug

SEQ ID NO: 2488045 - RNA, 19 nt, Homo sapiens
  misc_RNA (1)...(19): siRNA sense strand
augagcaaauagagacaca

SEQ ID NO: 2488046 - RNA, 19 nt, Homo sapiens
  misc_RNA (1)...(19): siRNA sense strand
uaaaauggagcaugagcaa

SEQ ID NO: 2488047 - RNA, 19 nt, Homo sapiens
  misc_RNA (1)...(19): siRNA sense strand
ugaaggaaaacuugaaaga

SEQ ID NO: 2488048 - RNA, 19 nt, Homo sapiens
  misc_RNA (1)...(19): siRNA sense strand
aggcauuaacacagcaguu

SEQ ID NO: 2488049 - RNA, 19 nt, Homo sapiens
  misc_RNA (1)...(19): siRNA sense strand
ggaaaacuugaaagagaga

SEQ ID NO: 2488050 - RNA, 19 nt, Homo sapiens
  misc_RNA (1)...(19): siRNA sense strand
uggugaaacacaucauaau

SEQ ID NO: 2488051 - RNA, 19 nt, Homo sapiens
  misc_RNA (1)...(19): siRNA sense strand
gcgaaaauuacgagaagaa

SEQ ID NO: 2488052 - RNA, 19 nt, Homo sapiens
  misc_RNA (1)...(19): siRNA sense strand
gguuaaucacaauggccaa

SEQ ID NO: 2488053 - RNA, 19 nt, Homo sapiens
  misc_RNA (1)...(19): siRNA sense strand
uguuauugcaagagacuuu

SEQ ID NO: 2488054 - RNA, 19 nt, Homo sapiens
  misc_RNA (1)...(19): siRNA sense strand
gcaugagcaaauagagaca

SEQ ID NO: 2488055 - RNA, 19 nt, Homo sapiens
  misc_RNA (1)...(19): siRNA sense strand
uugaggaacaagagaaaca

SEQ ID NO: 2488056 - RNA, 19 nt, Homo sapiens
  misc_RNA (1)...(19): siRNA sense strand
aagaaggagcuuuaggaga

SEQ ID NO: 2488057 - RNA, 19 nt, Homo sapiens
  misc_RNA (1)...(19): siRNA sense strand
aggcugaacucgauggaac

SEQ ID NO: 2488058 - RNA, 19 nt, Homo sapiens
  misc_RNA (1)...(19): siRNA sense strand
cgagaagaaagaaaacaaa

SEQ ID NO: 2488059 - RNA, 19 nt, Homo sapiens
  misc_RNA (1)...(19): siRNA sense strand
caagagacuuugaugccuu

SEQ ID NO: 2488060 - RNA, 19 nt, Homo sapiens
  misc_RNA (1)...(19): siRNA sense strand
aagaaagagcugaacgagu

SEQ ID NO: 2488061 - RNA, 19 nt, Homo sapiens
  misc_RNA (1)...(19): siRNA sense strand
acgagaagaaagaaaacaa

SEQ ID NO: 2488062 - RNA, 19 nt, Homo sapiens
  misc_RNA (1)...(19): siRNA sense strand
acuugagccucuuggugaa

SEQ ID NO: 2488063 - RNA, 19 nt, Homo sapiens
  misc_RNA (1)...(19): siRNA sense strand
aaauagagacacaaggcca

SEQ ID NO: 2488064 - RNA, 19 nt, Homo sapiens
  misc_RNA (1)...(19): siRNA sense strand
aggaacaagagaaacaaga

SEQ ID NO: 2488065 - RNA, 19 nt, Homo sapiens
  misc_RNA (1)...(19): siRNA sense strand
agaaagagcugaacgagug

SEQ ID NO: 2488066 - RNA, 19 nt, Homo sapiens
  misc_RNA (1)...(19): siRNA sense strand
augagcaaauagagacaca

SEQ ID NO: 2488067 - RNA, 19 nt, Homo sapiens
  misc_RNA (1)...(19): siRNA sense strand
uaaaauggagcaugagcaa

SEQ ID NO: 2488068 - RNA, 19 nt, Homo sapiens
  misc_RNA (1)...(19): siRNA sense strand
ugaaggaaaacuugaaaga

SEQ ID NO: 2488069 - RNA, 19 nt, Homo sapiens
  misc_RNA (1)...(19): siRNA sense strand
aggcauuaacacagcaguu

SEQ ID NO: 2488070 - RNA, 19 nt, Homo sapiens
  misc_RNA (1)...(19): siRNA sense strand
ggaaaacuugaaagagaga

SEQ ID NO: 2488071 - RNA, 19 nt, Homo sapiens
  misc_RNA (1)...(19): siRNA sense strand
uggugaaacacaucauaau

SEQ ID NO: 2488072 - RNA, 19 nt, Homo sapiens
  misc_RNA (1)...(19): siRNA sense strand
augaagaggcuuugggaga

SEQ ID NO: 2488073 - RNA, 19 nt, Homo sapiens
  misc_RNA (1)...(19): siRNA sense strand
ugauaaucguccugggcau

SEQ ID NO: 2488074 - RNA, 19 nt, Homo sapiens
  misc_RNA (1)...(19): siRNA sense strand
gcagugauccugugcgcua

SEQ ID NO: 2488075 - RNA, 19 nt, Homo sapiens
  misc_RNA (1)...(19): siRNA sense strand
aggcuuugggagaggagaa

SEQ ID NO: 2488076 - RNA, 19 nt, Homo sapiens
  misc_RNA (1)...(19): siRNA sense strand
cagaagagucagcgcuaca

SEQ ID NO: 2488077 - RNA, 19 nt, Homo sapiens
  misc_RNA (1)...(19): siRNA sense strand
aggagaacuaccuggagua

SEQ ID NO: 2488078 - RNA, 19 nt, Homo sapiens
  misc_RNA (1)...(19): siRNA sense strand
gagcauguggucaggguca

SEQ ID NO: 2488079 - RNA, 19 nt, Homo sapiens
  misc_RNA (1)...(19): siRNA sense strand
ggcagaagagucagcgcua

SEQ ID NO: 2488080 - RNA, 19 nt, Homo sapiens
  misc_RNA (1)...(19): siRNA sense strand
aggagaggcaccagggcuu

SEQ ID NO: 2488081 - RNA, 19 nt, Homo sapiens
  misc_RNA (1)...(19): siRNA sense strand
agugggugcaggagaacua

SEQ ID NO: 2488082 - RNA, 19 nt, Homo sapiens
  misc_RNA (1)...(19): siRNA sense strand
cagcaaagccucugagugc

SEQ ID NO: 2488083 - RNA, 19 nt, Homo sapiens
  misc_RNA (1)...(19): siRNA sense strand
gcuacaaggcugaggaagg

SEQ ID NO: 2488084 - RNA, 19 nt, Homo sapiens
  misc_RNA (1)...(19): siRNA sense strand
augugaaaguccuggagca

SEQ ID NO: 2488085 - RNA, 19 nt, Homo sapiens
  misc_RNA (1)...(19): siRNA sense strand
caaauuaaggagccgguca

SEQ ID NO: 2488086 - RNA, 19 nt, Homo sapiens
  misc_RNA (1)...(19): siRNA sense strand
ggcagaaaugcuugagagu

SEQ ID NO: 2488087 - RNA, 19 nt, Homo sapiens
  misc_RNA (1)...(19): siRNA sense strand
ggcaagaagaggagagaau

SEQ ID NO: 2488088 - RNA, 19 nt, Homo sapiens
  misc_RNA (1)...(19): siRNA sense strand
ugauaauauaggagaggaa

SEQ ID NO: 2488089 - RNA, 19 nt, Homo sapiens
  misc_RNA (1)...(19): siRNA sense strand
cgauguuaccauugugaaa

SEQ ID NO: 2488090 - RNA, 19 nt, Homo sapiens
  misc_RNA (1)...(19): siRNA sense strand
agagaaggcaaguggaaaa

SEQ ID NO: 2488091 - RNA, 19 nt, Homo sapiens
  misc_RNA (1)...(19): siRNA sense strand
ggaaagggaagaauggaca

SEQ ID NO: 2488092 - RNA, 19 nt, Homo sapiens
  misc_RNA (1)...(19): siRNA sense strand
gagacagauacuagauauu

SEQ ID NO: 2488093 - RNA, 19 nt, Homo sapiens
  misc_RNA (1)...(19): siRNA sense strand
cagaacgaccaaagccaaa

SEQ ID NO: 2488094 - RNA, 19 nt, Homo sapiens
  misc_RNA (1)...(19): siRNA sense strand
aacugaaagcagaguauua

SEQ ID NO: 2488095 - RNA, 19 nt, Homo sapiens
  misc_RNA (1)...(19): siRNA sense strand
gagaaugaauuguagucca

SEQ ID NO: 2488096 - RNA, 19 nt, Homo sapiens
  misc_RNA (1)...(19): siRNA sense strand
auaauauaggagaggaaga

SEQ ID NO: 2488097 - RNA, 19 nt, Homo sapiens
  misc_RNA (1)...(19): siRNA sense strand
cagacagacugcagaggca

SEQ ID NO: 2488098 - RNA, 19 nt, Homo sapiens
  misc_RNA (1)...(19): siRNA sense strand
cgaccaaagccaaacacau

SEQ ID NO: 2488099 - RNA, 19 nt, Homo sapiens
  misc_RNA (1)...(19): siRNA sense strand
agucauuauugcaaaggau

SEQ ID NO: 2488100 - RNA, 19 nt, Homo sapiens
  misc_RNA (1)...(19): siRNA sense strand
caaaggaugaaguggcaca

SEQ ID NO: 2488101 - RNA, 19 nt, Homo sapiens
  misc_RNA (1)...(19): siRNA sense strand
cuaacugaaagcagaguau

SEQ ID NO: 2488102 - RNA, 19 nt, Homo sapiens
  misc_RNA (1)...(19): siRNA sense strand
aaauaaacgccuuggugga

SEQ ID NO: 2488103 - RNA, 19 nt, Homo sapiens
  misc_RNA (1)...(19): siRNA sense strand
gaaagauuguguaccguga

SEQ ID NO: 2488104 - RNA, 19 nt, Homo sapiens
  misc_RNA (1)...(19): siRNA sense strand
aagaauggacagaagcuau

SEQ ID NO: 2488105 - RNA, 19 nt, Homo sapiens
  misc_RNA (1)...(19): siRNA sense strand
uggcaagauguauaugaua

SEQ ID NO: 2488106 - RNA, 19 nt, Homo sapiens
  misc_RNA (1)...(19): siRNA sense strand
gacuacuguuauagagaga

SEQ ID NO: 2488107 - RNA, 19 nt, Homo sapiens
  misc_RNA (1)...(19): siRNA sense strand
agaaucuaaugcuggacaa

SEQ ID NO: 2488108 - RNA, 19 nt, Homo sapiens
  misc_RNA (1)...(19): siRNA sense strand
ccagaugaugcaaaagaaa

SEQ ID NO: 2488109 - RNA, 19 nt, Homo sapiens
  misc_RNA (1)...(19): siRNA sense strand
acuacuagguaaaggcacu

SEQ ID NO: 2488110 - RNA, 19 nt, Homo sapiens
  misc_RNA (1)...(19): siRNA sense strand
gaaucuaaugcuggacaaa

SEQ ID NO: 2488111 - RNA, 19 nt, Homo sapiens
  misc_RNA (1)...(19): siRNA sense strand
aucuaaugcuggacaaaga

SEQ ID NO: 2488112 - RNA, 19 nt, Homo sapiens
  misc_RNA (1)...(19): siRNA sense strand
agaagaggagagaaugaau

SEQ ID NO: 2488113 - RNA, 19 nt, Homo sapiens
  misc_RNA (1)...(19): siRNA sense strand
cugaaagcagaguauuaaa

SEQ ID NO: 2488114 - RNA, 19 nt, Homo sapiens
  misc_RNA (1)...(19): siRNA sense strand
gcagaguauuaaagaacac

SEQ ID NO: 2488115 - RNA, 19 nt, Homo sapiens
  misc_RNA (1)...(19): siRNA sense strand
ucagaagaggggagaauau

SEQ ID NO: 2488116 - RNA, 19 nt, Homo sapiens
  misc_RNA (1)...(19): siRNA sense strand
gauauaaagagaaaccuca

SEQ ID NO: 2488117 - RNA, 19 nt, Homo sapiens
  misc_RNA (1)...(19): siRNA sense strand
guucagaagaggggagaau

SEQ ID NO: 2488118 - RNA, 19 nt, Homo sapiens
  misc_RNA (1)...(19): siRNA sense strand
uaggagaggaagagaugga

SEQ ID NO: 2488119 - RNA, 19 nt, Homo sapiens
  misc_RNA (1)...(19): siRNA sense strand
aagcagaguauuaaagaac

SEQ ID NO: 2488120 - RNA, 19 nt, Homo sapiens
  misc_RNA (1)...(19): siRNA sense strand
cuguggcacuccagaauau

SEQ ID NO: 2488121 - RNA, 19 nt, Homo sapiens
  misc_RNA (1)...(19): siRNA sense strand
agauaaugacuauggccga

SEQ ID NO: 2488122 - RNA, 19 nt, Homo sapiens
  misc_RNA (1)...(19): siRNA sense strand
gugaaagaagguuggguuc

SEQ ID NO: 2488123 - RNA, 19 nt, Homo sapiens
  misc_RNA (1)...(19): siRNA sense strand
agggaagaauggacagaag

SEQ ID NO: 2488124 - RNA, 19 nt, Homo sapiens
  misc_RNA (1)...(19): siRNA sense strand
ugugaaagaagguuggguu

SEQ ID NO: 2488125 - RNA, 19 nt, Homo sapiens
  misc_RNA (1)...(19): siRNA sense strand
ccaacuucacaaauugaua

SEQ ID NO: 2488126 - RNA, 19 nt, Homo sapiens
  misc_RNA (1)...(19): siRNA sense strand
cuuucagggcucuugauaa

SEQ ID NO: 2488127 - RNA, 19 nt, Homo sapiens
  misc_RNA (1)...(19): siRNA sense strand
ggcaagaagaggagagaau

SEQ ID NO: 2488128 - RNA, 19 nt, Homo sapiens
  misc_RNA (1)...(19): siRNA sense strand
ugauaauauaggagaggaa

SEQ ID NO: 2488129 - RNA, 19 nt, Homo sapiens
  misc_RNA (1)...(19): siRNA sense strand
cgauguuaccauugugaaa

SEQ ID NO: 2488130 - RNA, 19 nt, Homo sapiens
  misc_RNA (1)...(19): siRNA sense strand
agagaaggcaaguggaaaa

SEQ ID NO: 2488131 - RNA, 19 nt, Homo sapiens
  misc_RNA (1)...(19): siRNA sense strand
ggaaagggaagaauggaca

SEQ ID NO: 2488132 - RNA, 19 nt, Homo sapiens
  misc_RNA (1)...(19): siRNA sense strand
gagacagauacuagauauu

SEQ ID NO: 2488133 - RNA, 19 nt, Homo sapiens
  misc_RNA (1)...(19): siRNA sense strand
cagaacgaccaaagccaaa

SEQ ID NO: 2488134 - RNA, 19 nt, Homo sapiens
  misc_RNA (1)...(19): siRNA sense strand
aacugaaagcagaguauua

SEQ ID NO: 2488135 - RNA, 19 nt, Homo sapiens
  misc_RNA (1)...(19): siRNA sense strand
gagaaugaauuguagucca

SEQ ID NO: 2488136 - RNA, 19 nt, Homo sapiens
  misc_RNA (1)...(19): siRNA sense strand
auaauauaggagaggaaga

SEQ ID NO: 2488137 - RNA, 19 nt, Homo sapiens
  misc_RNA (1)...(19): siRNA sense strand
cagacagacugcagaggca

SEQ ID NO: 2488138 - RNA, 19 nt, Homo sapiens
  misc_RNA (1)...(19): siRNA sense strand
cgaccaaagccaaacacau

SEQ ID NO: 2488139 - RNA, 19 nt, Homo sapiens
  misc_RNA (1)...(19): siRNA sense strand
agucauuauugcaaaggau

SEQ ID NO: 2488140 - RNA, 19 nt, Homo sapiens
  misc_RNA (1)...(19): siRNA sense strand
caaaggaugaaguggcaca

SEQ ID NO: 2488141 - RNA, 19 nt, Homo sapiens
  misc_RNA (1)...(19): siRNA sense strand
cuaacugaaagcagaguau

SEQ ID NO: 2488142 - RNA, 19 nt, Homo sapiens
  misc_RNA (1)...(19): siRNA sense strand
aaauaaacgccuuggugga

SEQ ID NO: 2488143 - RNA, 19 nt, Homo sapiens
  misc_RNA (1)...(19): siRNA sense strand
gaaagauuguguaccguga

SEQ ID NO: 2488144 - RNA, 19 nt, Homo sapiens
  misc_RNA (1)...(19): siRNA sense strand
aagaauggacagaagcuau

SEQ ID NO: 2488145 - RNA, 19 nt, Homo sapiens
  misc_RNA (1)...(19): siRNA sense strand
uggcaagauguauaugaua

SEQ ID NO: 2488146 - RNA, 19 nt, Homo sapiens
  misc_RNA (1)...(19): siRNA sense strand
gacuacuguuauagagaga

SEQ ID NO: 2488147 - RNA, 19 nt, Homo sapiens
  misc_RNA (1)...(19): siRNA sense strand
agaaucuaaugcuggacaa

SEQ ID NO: 2488148 - RNA, 19 nt, Homo sapiens
  misc_RNA (1)...(19): siRNA sense strand
ccagaugaugcaaaagaaa

SEQ ID NO: 2488149 - RNA, 19 nt, Homo sapiens
  misc_RNA (1)...(19): siRNA sense strand
acuacuagguaaaggcacu

SEQ ID NO: 2488150 - RNA, 19 nt, Homo sapiens
  misc_RNA (1)...(19): siRNA sense strand
gaaucuaaugcuggacaaa

SEQ ID NO: 2488151 - RNA, 19 nt, Homo sapiens
  misc_RNA (1)...(19): siRNA sense strand
aucuaaugcuggacaaaga

SEQ ID NO: 2488152 - RNA, 19 nt, Homo sapiens
  misc_RNA (1)...(19): siRNA sense strand
agaagaggagagaaugaau

SEQ ID NO: 2488153 - RNA, 19 nt, Homo sapiens
  misc_RNA (1)...(19): siRNA sense strand
cugaaagcagaguauuaaa

SEQ ID NO: 2488154 - RNA, 19 nt, Homo sapiens
  misc_RNA (1)...(19): siRNA sense strand
gcagaguauuaaagaacac

SEQ ID NO: 2488155 - RNA, 19 nt, Homo sapiens
  misc_RNA (1)...(19): siRNA sense strand
ucagaagaggggagaauau

SEQ ID NO: 2488156 - RNA, 19 nt, Homo sapiens
  misc_RNA (1)...(19): siRNA sense strand
gauauaaagagaaaccuca

SEQ ID NO: 2488157 - RNA, 19 nt, Homo sapiens
  misc_RNA (1)...(19): siRNA sense strand
guucagaagaggggagaau

SEQ ID NO: 2488158 - RNA, 19 nt, Homo sapiens
  misc_RNA (1)...(19): siRNA sense strand
uaggagaggaagagaugga

SEQ ID NO: 2488159 - RNA, 19 nt, Homo sapiens
  misc_RNA (1)...(19): siRNA sense strand
aagcagaguauuaaagaac

SEQ ID NO: 2488160 - RNA, 19 nt, Homo sapiens
  misc_RNA (1)...(19): siRNA sense strand
cuguggcacuccagaauau

SEQ ID NO: 2488161 - RNA, 19 nt, Homo sapiens
  misc_RNA (1)...(19): siRNA sense strand
agauaaugacuauggccga

SEQ ID NO: 2488162 - RNA, 19 nt, Homo sapiens
  misc_RNA (1)...(19): siRNA sense strand
gugaaagaagguuggguuc

SEQ ID NO: 2488163 - RNA, 19 nt, Homo sapiens
  misc_RNA (1)...(19): siRNA sense strand
agggaagaauggacagaag

SEQ ID NO: 2488164 - RNA, 19 nt, Homo sapiens
  misc_RNA (1)...(19): siRNA sense strand
ugugaaagaagguuggguu

SEQ ID NO: 2488165 - RNA, 19 nt, Homo sapiens
  misc_RNA (1)...(19): siRNA sense strand
ccaacuucacaaauugaua

SEQ ID NO: 2488166 - RNA, 19 nt, Homo sapiens
  misc_RNA (1)...(19): siRNA sense strand
cuuucagggcucuugauaa

SEQ ID NO: 2488167 - RNA, 19 nt, Homo sapiens
  misc_RNA (1)...(19): siRNA sense strand
aggaagaggaggaggaaaa

SEQ ID NO: 2488168 - RNA, 19 nt, Homo sapiens
  misc_RNA (1)...(19): siRNA sense strand
ggauugaagugaaagccaa

SEQ ID NO: 2488169 - RNA, 19 nt, Homo sapiens
  misc_RNA (1)...(19): siRNA sense strand
ccaaggaggaagaggagga

SEQ ID NO: 2488170 - RNA, 19 nt, Homo sapiens
  misc_RNA (1)...(19): siRNA sense strand
gauugaagugaaagccaaa

SEQ ID NO: 2488171 - RNA, 19 nt, Homo sapiens
  misc_RNA (1)...(19): siRNA sense strand
gcauugaagaggaguggau

SEQ ID NO: 2488172 - RNA, 19 nt, Homo sapiens
  misc_RNA (1)...(19): siRNA sense strand
gaagaggaguggauggguu

SEQ ID NO: 2488173 - RNA, 19 nt, Homo sapiens
  misc_RNA (1)...(19): siRNA sense strand
agaugcacuuagaggacua

SEQ ID NO: 2488174 - RNA, 19 nt, Homo sapiens
  misc_RNA (1)...(19): siRNA sense strand
gcaaauucgaaaaggggua

SEQ ID NO: 2488175 - RNA, 19 nt, Homo sapiens
  misc_RNA (1)...(19): siRNA sense strand
ccuacuuggagaagaaauu

SEQ ID NO: 2488176 - RNA, 19 nt, Homo sapiens
  misc_RNA (1)...(19): siRNA sense strand
aagugaaagccaaagcuaa

SEQ ID NO: 2488177 - RNA, 19 nt, Homo sapiens
  misc_RNA (1)...(19): siRNA sense strand
acagaaaguacgugagaag

SEQ ID NO: 2488178 - RNA, 19 nt, Homo sapiens
  misc_RNA (1)...(19): siRNA sense strand
agaaaguacgugagaagca

SEQ ID NO: 2488179 - RNA, 19 nt, Homo sapiens
  misc_RNA (1)...(19): siRNA sense strand
gcaagaucucucagcaaau

SEQ ID NO: 2488180 - RNA, 19 nt, Homo sapiens
  misc_RNA (1)...(19): siRNA sense strand
ugcaaagggccauggacua

SEQ ID NO: 2488181 - RNA, 19 nt, Homo sapiens
  misc_RNA (1)...(19): siRNA sense strand
cugaaacagcagauggaga

SEQ ID NO: 2488182 - RNA, 19 nt, Homo sapiens
  misc_RNA (1)...(19): siRNA sense strand
aggauguggacuugaagaa

SEQ ID NO: 2488183 - RNA, 19 nt, Homo sapiens
  misc_RNA (1)...(19): siRNA sense strand
aggaggaagaggaggagga

SEQ ID NO: 2488184 - RNA, 19 nt, Homo sapiens
  misc_RNA (1)...(19): siRNA sense strand
gcaacaaugaccugggcga

SEQ ID NO: 2488185 - RNA, 19 nt, Homo sapiens
  misc_RNA (1)...(19): siRNA sense strand
auguggagauccuggguuu

SEQ ID NO: 2488186 - RNA, 19 nt, Homo sapiens
  misc_RNA (1)...(19): siRNA sense strand
auguggacuugaagaaauu

SEQ ID NO: 2488187 - RNA, 19 nt, Homo sapiens
  misc_RNA (1)...(19): siRNA sense strand
aggcagaccauguggaucu

SEQ ID NO: 2488188 - RNA, 19 nt, Homo sapiens
  misc_RNA (1)...(19): siRNA sense strand
caaacuacucugugaggga

SEQ ID NO: 2488189 - RNA, 19 nt, Homo sapiens
  misc_RNA (1)...(19): siRNA sense strand
gaggaagaggaggaggaaa

SEQ ID NO: 2488190 - RNA, 19 nt, Homo sapiens
  misc_RNA (1)...(19): siRNA sense strand
gugcaaagggccauggacu

SEQ ID NO: 2488191 - RNA, 19 nt, Homo sapiens
  misc_RNA (1)...(19): siRNA sense strand
gaucaacaggagagaccuu

SEQ ID NO: 2488192 - RNA, 19 nt, Homo sapiens
  misc_RNA (1)...(19): siRNA sense strand
ccaaaaggaaagaguacuu

SEQ ID NO: 2488193 - RNA, 19 nt, Homo sapiens
  misc_RNA (1)...(19): siRNA sense strand
uggaauuagacaacugcaa

SEQ ID NO: 2488194 - RNA, 19 nt, Homo sapiens
  misc_RNA (1)...(19): siRNA sense strand
ccgaagugggguucagaua

SEQ ID NO: 2488195 - RNA, 19 nt, Homo sapiens
  misc_RNA (1)...(19): siRNA sense strand
ggaagaugauguuggacug

SEQ ID NO: 2488196 - RNA, 19 nt, Homo sapiens
  misc_RNA (1)...(19): siRNA sense strand
cgcuaaugaucgacuucaa

SEQ ID NO: 2488197 - RNA, 19 nt, Homo sapiens
  misc_RNA (1)...(19): siRNA sense strand
cguuagaaacacuucaaga

SEQ ID NO: 2488198 - RNA, 19 nt, Homo sapiens
  misc_RNA (1)...(19): siRNA sense strand
uguacgagaugcaggagga

SEQ ID NO: 2488199 - RNA, 19 nt, Homo sapiens
  misc_RNA (1)...(19): siRNA sense strand
aagaggaguggauggguuu

SEQ ID NO: 2488200 - RNA, 19 nt, Homo sapiens
  misc_RNA (1)...(19): siRNA sense strand
acgagaugcaggaggagga

SEQ ID NO: 2488201 - RNA, 19 nt, Homo sapiens
  misc_RNA (1)...(19): siRNA sense strand
agaugcaggaggaggacuu

SEQ ID NO: 2488202 - RNA, 19 nt, Homo sapiens
  misc_RNA (1)...(19): siRNA sense strand
ccaccagaauggaccacau

SEQ ID NO: 2488203 - RNA, 19 nt, Homo sapiens
  misc_RNA (1)...(19): siRNA sense strand
gugcauugaagacaggaau

SEQ ID NO: 2488204 - RNA, 19 nt, Homo sapiens
  misc_RNA (1)...(19): siRNA sense strand
cagcagauggagaguggca

SEQ ID NO: 2488205 - RNA, 19 nt, Homo sapiens
  misc_RNA (1)...(19): siRNA sense strand
accguaagaaguacagaaa

SEQ ID NO: 2488206 - RNA, 19 nt, Homo sapiens
  misc_RNA (1)...(19): siRNA sense strand
cagagaaggcagaccaugu

SEQ ID NO: 2488207 - RNA, 19 nt, Homo sapiens
  misc_RNA (1)...(19): siRNA sense strand
ggcggcagggauugggaaa

SEQ ID NO: 2488208 - RNA, 19 nt, Homo sapiens
  misc_RNA (1)...(19): siRNA sense strand
agacagagaaggcagacca

SEQ ID NO: 2488209 - RNA, 19 nt, Homo sapiens
  misc_RNA (1)...(19): siRNA sense strand
acugcaagcuucagguguu

SEQ ID NO: 2488210 - RNA, 19 nt, Homo sapiens
  misc_RNA (1)...(19): siRNA sense strand
aggaagaugauguuggacu

SEQ ID NO: 2488211 - RNA, 19 nt, Homo sapiens
  misc_RNA (1)...(19): siRNA sense strand
gugacaguccuucuggaaa

SEQ ID NO: 2488212 - RNA, 19 nt, Homo sapiens
  misc_RNA (1)...(19): siRNA sense strand
agcuucagguguuggaauu

SEQ ID NO: 2488213 - RNA, 19 nt, Homo sapiens
  misc_RNA (1)...(19): siRNA sense strand
aggaagaggaggaggaaaa

SEQ ID NO: 2488214 - RNA, 19 nt, Homo sapiens
  misc_RNA (1)...(19): siRNA sense strand
ggauugaagugaaagccaa

SEQ ID NO: 2488215 - RNA, 19 nt, Homo sapiens
  misc_RNA (1)...(19): siRNA sense strand
ccaaggaggaagaggagga

SEQ ID NO: 2488216 - RNA, 19 nt, Homo sapiens
  misc_RNA (1)...(19): siRNA sense strand
gauugaagugaaagccaaa

SEQ ID NO: 2488217 - RNA, 19 nt, Homo sapiens
  misc_RNA (1)...(19): siRNA sense strand
gcauugaagaggaguggau

SEQ ID NO: 2488218 - RNA, 19 nt, Homo sapiens
  misc_RNA (1)...(19): siRNA sense strand
gaagaggaguggauggguu

SEQ ID NO: 2488219 - RNA, 19 nt, Homo sapiens
  misc_RNA (1)...(19): siRNA sense strand
agaugcacuuagaggacua

SEQ ID NO: 2488220 - RNA, 19 nt, Homo sapiens
  misc_RNA (1)...(19): siRNA sense strand
gcaaauucgaaaaggggua

SEQ ID NO: 2488221 - RNA, 19 nt, Homo sapiens
  misc_RNA (1)...(19): siRNA sense strand
ccuacuuggagaagaaauu

SEQ ID NO: 2488222 - RNA, 19 nt, Homo sapiens
  misc_RNA (1)...(19): siRNA sense strand
aagugaaagccaaagcuaa

SEQ ID NO: 2488223 - RNA, 19 nt, Homo sapiens
  misc_RNA (1)...(19): siRNA sense strand
acagaaaguacgugagaag

SEQ ID NO: 2488224 - RNA, 19 nt, Homo sapiens
  misc_RNA (1)...(19): siRNA sense strand
agaaaguacgugagaagca

SEQ ID NO: 2488225 - RNA, 19 nt, Homo sapiens
  misc_RNA (1)...(19): siRNA sense strand
gcaagaucucucagcaaau

SEQ ID NO: 2488226 - RNA, 19 nt, Homo sapiens
  misc_RNA (1)...(19): siRNA sense strand
ugcaaagggccauggacua

SEQ ID NO: 2488227 - RNA, 19 nt, Homo sapiens
  misc_RNA (1)...(19): siRNA sense strand
cugaaacagcagauggaga

SEQ ID NO: 2488228 - RNA, 19 nt, Homo sapiens
  misc_RNA (1)...(19): siRNA sense strand
aggauguggacuugaagaa

SEQ ID NO: 2488229 - RNA, 19 nt, Homo sapiens
  misc_RNA (1)...(19): siRNA sense strand
aggaggaagaggaggagga

SEQ ID NO: 2488230 - RNA, 19 nt, Homo sapiens
  misc_RNA (1)...(19): siRNA sense strand
gcaacaaugaccugggcga

SEQ ID NO: 2488231 - RNA, 19 nt, Homo sapiens
  misc_RNA (1)...(19): siRNA sense strand
auguggagauccuggguuu

SEQ ID NO: 2488232 - RNA, 19 nt, Homo sapiens
  misc_RNA (1)...(19): siRNA sense strand
auguggacuugaagaaauu

SEQ ID NO: 2488233 - RNA, 19 nt, Homo sapiens
  misc_RNA (1)...(19): siRNA sense strand
aggcagaccauguggaucu

SEQ ID NO: 2488234 - RNA, 19 nt, Homo sapiens
  misc_RNA (1)...(19): siRNA sense strand
caaacuacucugugaggga

SEQ ID NO: 2488235 - RNA, 19 nt, Homo sapiens
  misc_RNA (1)...(19): siRNA sense strand
gaggaagaggaggaggaaa

SEQ ID NO: 2488236 - RNA, 19 nt, Homo sapiens
  misc_RNA (1)...(19): siRNA sense strand
gugcaaagggccauggacu

SEQ ID NO: 2488237 - RNA, 19 nt, Homo sapiens
  misc_RNA (1)...(19): siRNA sense strand
gaucaacaggagagaccuu

SEQ ID NO: 2488238 - RNA, 19 nt, Homo sapiens
  misc_RNA (1)...(19): siRNA sense strand
ccaaaaggaaagaguacuu

SEQ ID NO: 2488239 - RNA, 19 nt, Homo sapiens
  misc_RNA (1)...(19): siRNA sense strand
uggaauuagacaacugcaa

SEQ ID NO: 2488240 - RNA, 19 nt, Homo sapiens
  misc_RNA (1)...(19): siRNA sense strand
ccgaagugggguucagaua

SEQ ID NO: 2488241 - RNA, 19 nt, Homo sapiens
  misc_RNA (1)...(19): siRNA sense strand
ggaagaugauguuggacug

SEQ ID NO: 2488242 - RNA, 19 nt, Homo sapiens
  misc_RNA (1)...(19): siRNA sense strand
cgcuaaugaucgacuucaa

SEQ ID NO: 2488243 - RNA, 19 nt, Homo sapiens
  misc_RNA (1)...(19): siRNA sense strand
cguuagaaacacuucaaga

SEQ ID NO: 2488244 - RNA, 19 nt, Homo sapiens
  misc_RNA (1)...(19): siRNA sense strand
uguacgagaugcaggagga

SEQ ID NO: 2488245 - RNA, 19 nt, Homo sapiens
  misc_RNA (1)...(19): siRNA sense strand
aagaggaguggauggguuu

SEQ ID NO: 2488246 - RNA, 19 nt, Homo sapiens
  misc_RNA (1)...(19): siRNA sense strand
acgagaugcaggaggagga

SEQ ID NO: 2488247 - RNA, 19 nt, Homo sapiens
  misc_RNA (1)...(19): siRNA sense strand
agaugcaggaggaggacuu

SEQ ID NO: 2488248 - RNA, 19 nt, Homo sapiens
  misc_RNA (1)...(19): siRNA sense strand
ccaccagaauggaccacau

SEQ ID NO: 2488249 - RNA, 19 nt, Homo sapiens
  misc_RNA (1)...(19): siRNA sense strand
gugcauugaagacaggaau

SEQ ID NO: 2488250 - RNA, 19 nt, Homo sapiens
  misc_RNA (1)...(19): siRNA sense strand
cagcagauggagaguggca

SEQ ID NO: 2488251 - RNA, 19 nt, Homo sapiens
  misc_RNA (1)...(19): siRNA sense strand
accguaagaaguacagaaa

SEQ ID NO: 2488252 - RNA, 19 nt, Homo sapiens
  misc_RNA (1)...(19): siRNA sense strand
cagagaaggcagaccaugu

SEQ ID NO: 2488253 - RNA, 19 nt, Homo sapiens
  misc_RNA (1)...(19): siRNA sense strand
ggcggcagggauugggaaa

SEQ ID NO: 2488254 - RNA, 19 nt, Homo sapiens
  misc_RNA (1)...(19): siRNA sense strand
agacagagaaggcagacca

SEQ ID NO: 2488255 - RNA, 19 nt, Homo sapiens
  misc_RNA (1)...(19): siRNA sense strand
acugcaagcuucagguguu

SEQ ID NO: 2488256 - RNA, 19 nt, Homo sapiens
  misc_RNA (1)...(19): siRNA sense strand
aggaagaugauguuggacu

SEQ ID NO: 2488257 - RNA, 19 nt, Homo sapiens
  misc_RNA (1)...(19): siRNA sense strand
gugacaguccuucuggaaa

SEQ ID NO: 2488258 - RNA, 19 nt, Homo sapiens
  misc_RNA (1)...(19): siRNA sense strand
agcuucagguguuggaauu

SEQ ID NO: 2488259 - RNA, 19 nt, Homo sapiens
  misc_RNA (1)...(19): siRNA sense strand
gcaugcaggagaagcgcaa

SEQ ID NO: 2488260 - RNA, 19 nt, Homo sapiens
  misc_RNA (1)...(19): siRNA sense strand
gaagaagaucagacagcga

SEQ ID NO: 2488261 - RNA, 19 nt, Homo sapiens
  misc_RNA (1)...(19): siRNA sense strand
caaccuggucaccgagcaa

SEQ ID NO: 2488262 - RNA, 19 nt, Homo sapiens
  misc_RNA (1)...(19): siRNA sense strand
aguacuucaucuacggaau

SEQ ID NO: 2488263 - RNA, 19 nt, Homo sapiens
  misc_RNA (1)...(19): siRNA sense strand
cugcugggaggaagggaau

SEQ ID NO: 2488264 - RNA, 19 nt, Homo sapiens
  misc_RNA (1)...(19): siRNA sense strand
gcaugcaggagaagcgcaa

SEQ ID NO: 2488265 - RNA, 19 nt, Homo sapiens
  misc_RNA (1)...(19): siRNA sense strand
gaagaagaucagacagcga

SEQ ID NO: 2488266 - RNA, 19 nt, Homo sapiens
  misc_RNA (1)...(19): siRNA sense strand
caaccuggucaccgagcaa

SEQ ID NO: 2488267 - RNA, 19 nt, Homo sapiens
  misc_RNA (1)...(19): siRNA sense strand
aguacuucaucuacggaau

SEQ ID NO: 2488268 - RNA, 19 nt, Homo sapiens
  misc_RNA (1)...(19): siRNA sense strand
cugcugggaggaagggaau

SEQ ID NO: 2488269 - RNA, 19 nt, Homo sapiens
  misc_RNA (1)...(19): siRNA sense strand
gggcauugauuucagggaa

SEQ ID NO: 2488270 - RNA, 19 nt, Homo sapiens
  misc_RNA (1)...(19): siRNA sense strand
ucgcagagaaauauggaau

SEQ ID NO: 2488271 - RNA, 19 nt, Homo sapiens
  misc_RNA (1)...(19): siRNA sense strand
ugaaagaggaggaagccau

SEQ ID NO: 2488272 - RNA, 19 nt, Homo sapiens
  misc_RNA (1)...(19): siRNA sense strand
ggaucaguuaagugaagaa

SEQ ID NO: 2488273 - RNA, 19 nt, Homo sapiens
  misc_RNA (1)...(19): siRNA sense strand
gaguagugaaagaggagga

SEQ ID NO: 2488274 - RNA, 19 nt, Homo sapiens
  misc_RNA (1)...(19): siRNA sense strand
accagagaguagugaaaga

SEQ ID NO: 2488275 - RNA, 19 nt, Homo sapiens
  misc_RNA (1)...(19): siRNA sense strand
cugaaggaguggugcgauc

SEQ ID NO: 2488276 - RNA, 19 nt, Homo sapiens
  misc_RNA (1)...(19): siRNA sense strand
agagugaucuggaggacca

SEQ ID NO: 2488277 - RNA, 19 nt, Homo sapiens
  misc_RNA (1)...(19): siRNA sense strand
ggucaugccucuacggauc

SEQ ID NO: 2488278 - RNA, 19 nt, Homo sapiens
  misc_RNA (1)...(19): siRNA sense strand
ugaucugacaaaugagcaa

SEQ ID NO: 2488279 - RNA, 19 nt, Homo sapiens
  misc_RNA (1)...(19): siRNA sense strand
agggaagaccaguguacuu

SEQ ID NO: 2488280 - RNA, 19 nt, Homo sapiens
  misc_RNA (1)...(19): siRNA sense strand
uggaacgguguguggacaa

SEQ ID NO: 2488281 - RNA, 19 nt, Homo sapiens
  misc_RNA (1)...(19): siRNA sense strand
agagaguagugaaagagga

SEQ ID NO: 2488282 - RNA, 19 nt, Homo sapiens
  misc_RNA (1)...(19): siRNA sense strand
gggacaaacauaagccaag

SEQ ID NO: 2488283 - RNA, 19 nt, Homo sapiens
  misc_RNA (1)...(19): siRNA sense strand
gggcauugauuucagggaa

SEQ ID NO: 2488284 - RNA, 19 nt, Homo sapiens
  misc_RNA (1)...(19): siRNA sense strand
ucgcagagaaauauggaau

SEQ ID NO: 2488285 - RNA, 19 nt, Homo sapiens
  misc_RNA (1)...(19): siRNA sense strand
ugaaagaggaggaagccau

SEQ ID NO: 2488286 - RNA, 19 nt, Homo sapiens
  misc_RNA (1)...(19): siRNA sense strand
ggaucaguuaagugaagaa

SEQ ID NO: 2488287 - RNA, 19 nt, Homo sapiens
  misc_RNA (1)...(19): siRNA sense strand
gaguagugaaagaggagga

SEQ ID NO: 2488288 - RNA, 19 nt, Homo sapiens
  misc_RNA (1)...(19): siRNA sense strand
accagagaguagugaaaga

SEQ ID NO: 2488289 - RNA, 19 nt, Homo sapiens
  misc_RNA (1)...(19): siRNA sense strand
cugaaggaguggugcgauc

SEQ ID NO: 2488290 - RNA, 19 nt, Homo sapiens
  misc_RNA (1)...(19): siRNA sense strand
agagugaucuggaggacca

SEQ ID NO: 2488291 - RNA, 19 nt, Homo sapiens
  misc_RNA (1)...(19): siRNA sense strand
ggucaugccucuacggauc

SEQ ID NO: 2488292 - RNA, 19 nt, Homo sapiens
  misc_RNA (1)...(19): siRNA sense strand
ugaucugacaaaugagcaa

SEQ ID NO: 2488293 - RNA, 19 nt, Homo sapiens
  misc_RNA (1)...(19): siRNA sense strand
agggaagaccaguguacuu

SEQ ID NO: 2488294 - RNA, 19 nt, Homo sapiens
  misc_RNA (1)...(19): siRNA sense strand
uggaacgguguguggacaa

SEQ ID NO: 2488295 - RNA, 19 nt, Homo sapiens
  misc_RNA (1)...(19): siRNA sense strand
agagaguagugaaagagga

SEQ ID NO: 2488296 - RNA, 19 nt, Homo sapiens
  misc_RNA (1)...(19): siRNA sense strand
gggacaaacauaagccaag

SEQ ID NO: 2488297 - RNA, 19 nt, Homo sapiens
  misc_RNA (1)...(19): siRNA sense strand
gggcauugauuucagggaa

SEQ ID NO: 2488298 - RNA, 19 nt, Homo sapiens
  misc_RNA (1)...(19): siRNA sense strand
ucgcagagaaauauggaau

SEQ ID NO: 2488299 - RNA, 19 nt, Homo sapiens
  misc_RNA (1)...(19): siRNA sense strand
ugaaagaggaggaagccau

SEQ ID NO: 2488300 - RNA, 19 nt, Homo sapiens
  misc_RNA (1)...(19): siRNA sense strand
ggaucaguuaagugaagaa

SEQ ID NO: 2488301 - RNA, 19 nt, Homo sapiens
  misc_RNA (1)...(19): siRNA sense strand
gaguagugaaagaggagga

SEQ ID NO: 2488302 - RNA, 19 nt, Homo sapiens
  misc_RNA (1)...(19): siRNA sense strand
accagagaguagugaaaga

SEQ ID NO: 2488303 - RNA, 19 nt, Homo sapiens
  misc_RNA (1)...(19): siRNA sense strand
cugaaggaguggugcgauc

SEQ ID NO: 2488304 - RNA, 19 nt, Homo sapiens
  misc_RNA (1)...(19): siRNA sense strand
agagugaucuggaggacca

SEQ ID NO: 2488305 - RNA, 19 nt, Homo sapiens
  misc_RNA (1)...(19): siRNA sense strand
ggucaugccucuacggauc

SEQ ID NO: 2488306 - RNA, 19 nt, Homo sapiens
  misc_RNA (1)...(19): siRNA sense strand
ugaucugacaaaugagcaa

SEQ ID NO: 2488307 - RNA, 19 nt, Homo sapiens
  misc_RNA (1)...(19): siRNA sense strand
agggaagaccaguguacuu

SEQ ID NO: 2488308 - RNA, 19 nt, Homo sapiens
  misc_RNA (1)...(19): siRNA sense strand
uggaacgguguguggacaa

SEQ ID NO: 2488309 - RNA, 19 nt, Homo sapiens
  misc_RNA (1)...(19): siRNA sense strand
agagaguagugaaagagga

SEQ ID NO: 2488310 - RNA, 19 nt, Homo sapiens
  misc_RNA (1)...(19): siRNA sense strand
gggacaaacauaagccaag

SEQ ID NO: 2488311 - RNA, 19 nt, Homo sapiens
  misc_RNA (1)...(19): siRNA sense strand
gggcauugauuucagggaa

SEQ ID NO: 2488312 - RNA, 19 nt, Homo sapiens
  misc_RNA (1)...(19): siRNA sense strand
ucgcagagaaauauggaau

SEQ ID NO: 2488313 - RNA, 19 nt, Homo sapiens
  misc_RNA (1)...(19): siRNA sense strand
ugaaagaggaggaagccau

SEQ ID NO: 2488314 - RNA, 19 nt, Homo sapiens
  misc_RNA (1)...(19): siRNA sense strand
ggaucaguuaagugaagaa

SEQ ID NO: 2488315 - RNA, 19 nt, Homo sapiens
  misc_RNA (1)...(19): siRNA sense strand
gaguagugaaagaggagga

SEQ ID NO: 2488316 - RNA, 19 nt, Homo sapiens
  misc_RNA (1)...(19): siRNA sense strand
accagagaguagugaaaga

SEQ ID NO: 2488317 - RNA, 19 nt, Homo sapiens
  misc_RNA (1)...(19): siRNA sense strand
cugaaggaguggugcgauc

SEQ ID NO: 2488318 - RNA, 19 nt, Homo sapiens
  misc_RNA (1)...(19): siRNA sense strand
agagugaucuggaggacca

SEQ ID NO: 2488319 - RNA, 19 nt, Homo sapiens
  misc_RNA (1)...(19): siRNA sense strand
ggucaugccucuacggauc

SEQ ID NO: 2488320 - RNA, 19 nt, Homo sapiens
  misc_RNA (1)...(19): siRNA sense strand
ugaucugacaaaugagcaa

SEQ ID NO: 2488321 - RNA, 19 nt, Homo sapiens
  misc_RNA (1)...(19): siRNA sense strand
agggaagaccaguguacuu

SEQ ID NO: 2488322 - RNA, 19 nt, Homo sapiens
  misc_RNA (1)...(19): siRNA sense strand
uggaacgguguguggacaa

SEQ ID NO: 2488323 - RNA, 19 nt, Homo sapiens
  misc_RNA (1)...(19): siRNA sense strand
agagaguagugaaagagga

SEQ ID NO: 2488324 - RNA, 19 nt, Homo sapiens
  misc_RNA (1)...(19): siRNA sense strand
gggacaaacauaagccaag

SEQ ID NO: 2488325 - RNA, 19 nt, Homo sapiens
  misc_RNA (1)...(19): siRNA sense strand
uggaagacgaugaggugca

SEQ ID NO: 2488326 - RNA, 19 nt, Homo sapiens
  misc_RNA (1)...(19): siRNA sense strand
ccuugauggugguuggcau

SEQ ID NO: 2488327 - RNA, 19 nt, Homo sapiens
  misc_RNA (1)...(19): siRNA sense strand
ccacagcaugguauggcaa

SEQ ID NO: 2488328 - RNA, 19 nt, Homo sapiens
  misc_RNA (1)...(19): siRNA sense strand
uggcaauagaaucguucaa

SEQ ID NO: 2488329 - RNA, 19 nt, Homo sapiens
  misc_RNA (1)...(19): siRNA sense strand
gugcagaagaugaggaugg

SEQ ID NO: 2488330 - RNA, 19 nt, Homo sapiens
  misc_RNA (1)...(19): siRNA sense strand
aagacgaugaggugcagaa

SEQ ID NO: 2488331 - RNA, 19 nt, Homo sapiens
  misc_RNA (1)...(19): siRNA sense strand
acaacaaagaagugcacaa

SEQ ID NO: 2488332 - RNA, 19 nt, Homo sapiens
  misc_RNA (1)...(19): siRNA sense strand
gcaaugaggagaagcgcau

SEQ ID NO: 2488333 - RNA, 19 nt, Homo sapiens
  misc_RNA (1)...(19): siRNA sense strand
gagaauaagaggacccaca

SEQ ID NO: 2488334 - RNA, 19 nt, Homo sapiens
  misc_RNA (1)...(19): siRNA sense strand
gagcagaugaugcgcgaga

SEQ ID NO: 2488335 - RNA, 19 nt, Homo sapiens
  misc_RNA (1)...(19): siRNA sense strand
agauaaagagccaggagca

SEQ ID NO: 2488336 - RNA, 19 nt, Homo sapiens
  misc_RNA (1)...(19): siRNA sense strand
gccaaauacaacuggaaaa

SEQ ID NO: 2488337 - RNA, 19 nt, Homo sapiens
  misc_RNA (1)...(19): siRNA sense strand
gggcuaaggaggagcugga

SEQ ID NO: 2488338 - RNA, 19 nt, Homo sapiens
  misc_RNA (1)...(19): siRNA sense strand
aggcgguggaucagauaaa

SEQ ID NO: 2488339 - RNA, 19 nt, Homo sapiens
  misc_RNA (1)...(19): siRNA sense strand
gagugauggaccagcacaa

SEQ ID NO: 2488340 - RNA, 19 nt, Homo sapiens
  misc_RNA (1)...(19): siRNA sense strand
ggaaucaacuauuucgaga

SEQ ID NO: 2488341 - RNA, 19 nt, Homo sapiens
  misc_RNA (1)...(19): siRNA sense strand
cagagaagaacgagcgugu

SEQ ID NO: 2488342 - RNA, 19 nt, Homo sapiens
  misc_RNA (1)...(19): siRNA sense strand
aggagaagcaucagaagca

SEQ ID NO: 2488343 - RNA, 19 nt, Homo sapiens
  misc_RNA (1)...(19): siRNA sense strand
aggcccgagaugagaauaa

SEQ ID NO: 2488344 - RNA, 19 nt, Homo sapiens
  misc_RNA (1)...(19): siRNA sense strand
gggccaaguucuacccuga

SEQ ID NO: 2488345 - RNA, 19 nt, Homo sapiens
  misc_RNA (1)...(19): siRNA sense strand
agcuggaggaggagaggaa

SEQ ID NO: 2488346 - RNA, 19 nt, Homo sapiens
  misc_RNA (1)...(19): siRNA sense strand
aggagagcuugcaggauga

SEQ ID NO: 2488347 - RNA, 19 nt, Homo sapiens
  misc_RNA (1)...(19): siRNA sense strand
ggaugaaguugaagagugg

SEQ ID NO: 2488348 - RNA, 19 nt, Homo sapiens
  misc_RNA (1)...(19): siRNA sense strand
agaagcagcuggagcggca

SEQ ID NO: 2488349 - RNA, 19 nt, Homo sapiens
  misc_RNA (1)...(19): siRNA sense strand
gacuaugaggagaagacaa

SEQ ID NO: 2488350 - RNA, 19 nt, Homo sapiens
  misc_RNA (1)...(19): siRNA sense strand
agcuggaaacagagaagaa

SEQ ID NO: 2488351 - RNA, 19 nt, Homo sapiens
  misc_RNA (1)...(19): siRNA sense strand
cuggaaacagagaagaaaa

SEQ ID NO: 2488352 - RNA, 19 nt, Homo sapiens
  misc_RNA (1)...(19): siRNA sense strand
cucaaagagugauggacca

SEQ ID NO: 2488353 - RNA, 19 nt, Homo sapiens
  misc_RNA (1)...(19): siRNA sense strand
gcuaaggaggagcuggaga

SEQ ID NO: 2488354 - RNA, 19 nt, Homo sapiens
  misc_RNA (1)...(19): siRNA sense strand
cgagaugagaauaagagga

SEQ ID NO: 2488355 - RNA, 19 nt, Homo sapiens
  misc_RNA (1)...(19): siRNA sense strand
agaugaugcgcgagaagga

SEQ ID NO: 2488356 - RNA, 19 nt, Homo sapiens
  misc_RNA (1)...(19): siRNA sense strand
cagccaaauacaacuggaa

SEQ ID NO: 2488357 - RNA, 19 nt, Homo sapiens
  misc_RNA (1)...(19): siRNA sense strand
cagaauacacugccaagau

SEQ ID NO: 2488358 - RNA, 19 nt, Homo sapiens
  misc_RNA (1)...(19): siRNA sense strand
gguaaagacuaucggccuc

SEQ ID NO: 2488359 - RNA, 19 nt, Homo sapiens
  misc_RNA (1)...(19): siRNA sense strand
agccaaauacaacuggaaa

SEQ ID NO: 2488360 - RNA, 19 nt, Homo sapiens
  misc_RNA (1)...(19): siRNA sense strand
uggaucagauaaagagcca

SEQ ID NO: 2488361 - RNA, 19 nt, Homo sapiens
  misc_RNA (1)...(19): siRNA sense strand
guugaagaguggcagcaca

SEQ ID NO: 2488362 - RNA, 19 nt, Homo sapiens
  misc_RNA (1)...(19): siRNA sense strand
agaccaaggaggagcugca

SEQ ID NO: 2488363 - RNA, 19 nt, Homo sapiens
  misc_RNA (1)...(19): siRNA sense strand
caggagagcuugcaggaug

SEQ ID NO: 2488364 - RNA, 19 nt, Homo sapiens
  misc_RNA (1)...(19): siRNA sense strand
caggaggucaggaaggaga

SEQ ID NO: 2488365 - RNA, 19 nt, Homo sapiens
  misc_RNA (1)...(19): siRNA sense strand
gaugauaaguuaaccccaa

SEQ ID NO: 2488366 - RNA, 19 nt, Homo sapiens
  misc_RNA (1)...(19): siRNA sense strand
uggagugaaaucaggaaca

SEQ ID NO: 2488367 - RNA, 19 nt, Homo sapiens
  misc_RNA (1)...(19): siRNA sense strand
agaauacacugccaagauu

SEQ ID NO: 2488368 - RNA, 19 nt, Homo sapiens
  misc_RNA (1)...(19): siRNA sense strand
ccacacuuaaggagaacau

SEQ ID NO: 2488369 - RNA, 19 nt, Homo sapiens
  misc_RNA (1)...(19): siRNA sense strand
cuauagcagcuguggaaau

SEQ ID NO: 2488370 - RNA, 19 nt, Homo sapiens
  misc_RNA (1)...(19): siRNA sense strand
gggacagaugcucgguuaa

SEQ ID NO: 2488371 - RNA, 19 nt, Homo sapiens
  misc_RNA (1)...(19): siRNA sense strand
gcuucuucuccuuggcaua

SEQ ID NO: 2488372 - RNA, 19 nt, Homo sapiens
  misc_RNA (1)...(19): siRNA sense strand
aaucaaaagaagaggaaag

SEQ ID NO: 2488373 - RNA, 19 nt, Homo sapiens
  misc_RNA (1)...(19): siRNA sense strand
cuaacagugaccuggaauu

SEQ ID NO: 2488374 - RNA, 19 nt, Homo sapiens
  misc_RNA (1)...(19): siRNA sense strand
ggaggcuguuaaugggaca

SEQ ID NO: 2488375 - RNA, 19 nt, Homo sapiens
  misc_RNA (1)...(19): siRNA sense strand
augggaauccugagcggua

SEQ ID NO: 2488376 - RNA, 19 nt, Homo sapiens
  misc_RNA (1)...(19): siRNA sense strand
gcucauaaagugguggaga

SEQ ID NO: 2488377 - RNA, 19 nt, Homo sapiens
  misc_RNA (1)...(19): siRNA sense strand
cuauagcagcuguggaaau

SEQ ID NO: 2488378 - RNA, 19 nt, Homo sapiens
  misc_RNA (1)...(19): siRNA sense strand
gggacagaugcucgguuaa

SEQ ID NO: 2488379 - RNA, 19 nt, Homo sapiens
  misc_RNA (1)...(19): siRNA sense strand
gcuucuucuccuuggcaua

SEQ ID NO: 2488380 - RNA, 19 nt, Homo sapiens
  misc_RNA (1)...(19): siRNA sense strand
aaucaaaagaagaggaaag

SEQ ID NO: 2488381 - RNA, 19 nt, Homo sapiens
  misc_RNA (1)...(19): siRNA sense strand
cuaacagugaccuggaauu

SEQ ID NO: 2488382 - RNA, 19 nt, Homo sapiens
  misc_RNA (1)...(19): siRNA sense strand
ggaggcuguuaaugggaca

SEQ ID NO: 2488383 - RNA, 19 nt, Homo sapiens
  misc_RNA (1)...(19): siRNA sense strand
augggaauccugagcggua

SEQ ID NO: 2488384 - RNA, 19 nt, Homo sapiens
  misc_RNA (1)...(19): siRNA sense strand
gcucauaaagugguggaga

SEQ ID NO: 2488385 - RNA, 19 nt, Homo sapiens
  misc_RNA (1)...(19): siRNA sense strand
ugucgaaugaggaacgaaa

SEQ ID NO: 2488386 - RNA, 19 nt, Homo sapiens
  misc_RNA (1)...(19): siRNA sense strand
agacccaguacgagagcaa

SEQ ID NO: 2488387 - RNA, 19 nt, Homo sapiens
  misc_RNA (1)...(19): siRNA sense strand
agaaggaguuggaggcugu

SEQ ID NO: 2488388 - RNA, 19 nt, Homo sapiens
  misc_RNA (1)...(19): siRNA sense strand
ccgagaaggccuacagcga

SEQ ID NO: 2488389 - RNA, 19 nt, Homo sapiens
  misc_RNA (1)...(19): siRNA sense strand
agaagauagagaaggaguu

SEQ ID NO: 2488390 - RNA, 19 nt, Homo sapiens
  misc_RNA (1)...(19): siRNA sense strand
gagaagauagagaaggagu

SEQ ID NO: 2488391 - RNA, 19 nt, Homo sapiens
  misc_RNA (1)...(19): siRNA sense strand
aucaagaauugcagcgaga

SEQ ID NO: 2488392 - RNA, 19 nt, Homo sapiens
  misc_RNA (1)...(19): siRNA sense strand
agacaucugcagacggcaa

SEQ ID NO: 2488393 - RNA, 19 nt, Homo sapiens
  misc_RNA (1)...(19): siRNA sense strand
cagacggcaaugagaagaa

SEQ ID NO: 2488394 - RNA, 19 nt, Homo sapiens
  misc_RNA (1)...(19): siRNA sense strand
uggauaacuaccugaucaa

SEQ ID NO: 2488395 - RNA, 19 nt, Homo sapiens
  misc_RNA (1)...(19): siRNA sense strand
gagaaggccuacagcgaag

SEQ ID NO: 2488396 - RNA, 19 nt, Homo sapiens
  misc_RNA (1)...(19): siRNA sense strand
ccagaacgccccagagcaa

SEQ ID NO: 2488397 - RNA, 19 nt, Homo sapiens
  misc_RNA (1)...(19): siRNA sense strand
cugcagacggcaaugagaa

SEQ ID NO: 2488398 - RNA, 19 nt, Homo sapiens
  misc_RNA (1)...(19): siRNA sense strand
aaugagaagaagauugaga

SEQ ID NO: 2488399 - RNA, 19 nt, Homo sapiens
  misc_RNA (1)...(19): siRNA sense strand
agaacgugacagagcugaa

SEQ ID NO: 2488400 - RNA, 19 nt, Homo sapiens
  misc_RNA (1)...(19): siRNA sense strand
cgagaaggccuacagcgaa

SEQ ID NO: 2488401 - RNA, 19 nt, Homo sapiens
  misc_RNA (1)...(19): siRNA sense strand
cgaucuuccuggaggguca

SEQ ID NO: 2488402 - RNA, 19 nt, Homo sapiens
  misc_RNA (1)...(19): siRNA sense strand
acgaaaagaaauuggagaa

SEQ ID NO: 2488403 - RNA, 19 nt, Homo sapiens
  misc_RNA (1)...(19): siRNA sense strand
cgaaaagaaauuggagaaa

SEQ ID NO: 2488404 - RNA, 19 nt, Homo sapiens
  misc_RNA (1)...(19): siRNA sense strand
guuaaagcuuaccgggaga

SEQ ID NO: 2488405 - RNA, 19 nt, Homo sapiens
  misc_RNA (1)...(19): siRNA sense strand
ucuccaaugaagaucgaaa

SEQ ID NO: 2488406 - RNA, 19 nt, Homo sapiens
  misc_RNA (1)...(19): siRNA sense strand
ugauggaaacgaaaagaaa

SEQ ID NO: 2488407 - RNA, 19 nt, Homo sapiens
  misc_RNA (1)...(19): siRNA sense strand
aggaugaagaagcaggaga

SEQ ID NO: 2488408 - RNA, 19 nt, Homo sapiens
  misc_RNA (1)...(19): siRNA sense strand
aagaagcaggagaaggcaa

SEQ ID NO: 2488409 - RNA, 19 nt, Homo sapiens
  misc_RNA (1)...(19): siRNA sense strand
gcaaagagcagaugcaacc

SEQ ID NO: 2488410 - RNA, 19 nt, Homo sapiens
  misc_RNA (1)...(19): siRNA sense strand
aggaagaguaugaagaaga

SEQ ID NO: 2488411 - RNA, 19 nt, Homo sapiens
  misc_RNA (1)...(19): siRNA sense strand
agaagaaagccaacgacaa

SEQ ID NO: 2488412 - RNA, 19 nt, Homo sapiens
  misc_RNA (1)...(19): siRNA sense strand
ccaagguggugcugggaga

SEQ ID NO: 2488413 - RNA, 19 nt, Homo sapiens
  misc_RNA (1)...(19): siRNA sense strand
acaggaugguggagaaaca

SEQ ID NO: 2488414 - RNA, 19 nt, Homo sapiens
  misc_RNA (1)...(19): siRNA sense strand
aguaugaagaagagccuua

SEQ ID NO: 2488415 - RNA, 19 nt, Homo sapiens
  misc_RNA (1)...(19): siRNA sense strand
aaucauauccagauggcaa

SEQ ID NO: 2488416 - RNA, 19 nt, Homo sapiens
  misc_RNA (1)...(19): siRNA sense strand
uggugaaaguauugaaguu

SEQ ID NO: 2488417 - RNA, 19 nt, Homo sapiens
  misc_RNA (1)...(19): siRNA sense strand
acacagaaacggagaucca

SEQ ID NO: 2488418 - RNA, 19 nt, Homo sapiens
  misc_RNA (1)...(19): siRNA sense strand
agcugaaagacuuggauua

SEQ ID NO: 2488419 - RNA, 19 nt, Homo sapiens
  misc_RNA (1)...(19): siRNA sense strand
gcucauacccucaucggaa

SEQ ID NO: 2488420 - RNA, 19 nt, Homo sapiens
  misc_RNA (1)...(19): siRNA sense strand
augacaggaugguggagaa

SEQ ID NO: 2488421 - RNA, 19 nt, Homo sapiens
  misc_RNA (1)...(19): siRNA sense strand
gaguaucagcaguggugaa

SEQ ID NO: 2488422 - RNA, 19 nt, Homo sapiens
  misc_RNA (1)...(19): siRNA sense strand
ggaaggagagcgaugguca

SEQ ID NO: 2488423 - RNA, 19 nt, Homo sapiens
  misc_RNA (1)...(19): siRNA sense strand
uggagaaacaagaaagcau

SEQ ID NO: 2488424 - RNA, 19 nt, Homo sapiens
  misc_RNA (1)...(19): siRNA sense strand
ugaucaagauggagcagga

SEQ ID NO: 2488425 - RNA, 19 nt, Homo sapiens
  misc_RNA (1)...(19): siRNA sense strand
guuaauuaguguugguucu

SEQ ID NO: 2488426 - RNA, 19 nt, Homo sapiens
  misc_RNA (1)...(19): siRNA sense strand
ugggagaugaggaguacaa

SEQ ID NO: 2488427 - RNA, 19 nt, Homo sapiens
  misc_RNA (1)...(19): siRNA sense strand
aguacaaggaaguggaagu

SEQ ID NO: 2488428 - RNA, 19 nt, Homo sapiens
  misc_RNA (1)...(19): siRNA sense strand
aggaaguggaagugacuga

SEQ ID NO: 2488429 - RNA, 19 nt, Homo sapiens
  misc_RNA (1)...(19): siRNA sense strand
cagaagaaagccaacgaca

SEQ ID NO: 2488430 - RNA, 19 nt, Homo sapiens
  misc_RNA (1)...(19): siRNA sense strand
ccugaugacuuuaaggcca

SEQ ID NO: 2488431 - RNA, 19 nt, Homo sapiens
  misc_RNA (1)...(19): siRNA sense strand
gacaagaaguugaagaccu

SEQ ID NO: 2488432 - RNA, 19 nt, Homo sapiens
  misc_RNA (1)...(19): siRNA sense strand
ugacaggaugguggagaaa

SEQ ID NO: 2488433 - RNA, 19 nt, Homo sapiens
  misc_RNA (1)...(19): siRNA sense strand
cuggugagauggagcacau

SEQ ID NO: 2488434 - RNA, 19 nt, Homo sapiens
  misc_RNA (1)...(19): siRNA sense strand
ggagcaaagcagucagcca

SEQ ID NO: 2488435 - RNA, 19 nt, Homo sapiens
  misc_RNA (1)...(19): siRNA sense strand
cagaacugggugagacaga

SEQ ID NO: 2488436 - RNA, 19 nt, Homo sapiens
  misc_RNA (1)...(19): siRNA sense strand
aagaggaagaguaugaaga

SEQ ID NO: 2488437 - RNA, 19 nt, Homo sapiens
  misc_RNA (1)...(19): siRNA sense strand
aguugaagaccuuggagga

SEQ ID NO: 2488438 - RNA, 19 nt, Homo sapiens
  misc_RNA (1)...(19): siRNA sense strand
ccaucagcgaggacaguau

SEQ ID NO: 2488439 - RNA, 19 nt, Homo sapiens
  misc_RNA (1)...(19): siRNA sense strand
guauugggaaggagagcga

SEQ ID NO: 2488440 - RNA, 19 nt, Homo sapiens
  misc_RNA (1)...(19): siRNA sense strand
aggcaauugagaaagccaa

SEQ ID NO: 2488441 - RNA, 19 nt, Homo sapiens
  misc_RNA (1)...(19): siRNA sense strand
gggccaaguuuucgaggga

SEQ ID NO: 2488442 - RNA, 19 nt, Homo sapiens
  misc_RNA (1)...(19): siRNA sense strand
ccauuaaugaagaagaauc

SEQ ID NO: 2488443 - RNA, 19 nt, Homo sapiens
  misc_RNA (1)...(19): siRNA sense strand
aagaagaaucauauccaga

SEQ ID NO: 2488444 - RNA, 19 nt, Homo sapiens
  misc_RNA (1)...(19): siRNA sense strand
cuggacaacuacucagaca

SEQ ID NO: 2488445 - RNA, 19 nt, Homo sapiens
  misc_RNA (1)...(19): siRNA sense strand
ugccugagguuguggaaaa

SEQ ID NO: 2488446 - RNA, 19 nt, Homo sapiens
  misc_RNA (1)...(19): siRNA sense strand
ccauauaauuccagaccac

SEQ ID NO: 2488447 - RNA, 19 nt, Homo sapiens
  misc_RNA (1)...(19): siRNA sense strand
cugcaggguuuguggcugu

SEQ ID NO: 2488448 - RNA, 19 nt, Homo sapiens
  misc_RNA (1)...(19): siRNA sense strand
auauaauuccagaccacaa

SEQ ID NO: 2488449 - RNA, 19 nt, Homo sapiens
  misc_RNA (1)...(19): siRNA sense strand
aagaugagauuaugccuga

SEQ ID NO: 2488450 - RNA, 19 nt, Homo sapiens
  misc_RNA (1)...(19): siRNA sense strand
agauuaugccugagguugu

SEQ ID NO: 2488451 - RNA, 19 nt, Homo sapiens
  misc_RNA (1)...(19): siRNA sense strand
caggagaaucagugugucu

SEQ ID NO: 2488452 - RNA, 19 nt, Homo sapiens
  misc_RNA (1)...(19): siRNA sense strand
ugccugagguuguggaaaa

SEQ ID NO: 2488453 - RNA, 19 nt, Homo sapiens
  misc_RNA (1)...(19): siRNA sense strand
ccauauaauuccagaccac

SEQ ID NO: 2488454 - RNA, 19 nt, Homo sapiens
  misc_RNA (1)...(19): siRNA sense strand
cugcaggguuuguggcugu

SEQ ID NO: 2488455 - RNA, 19 nt, Homo sapiens
  misc_RNA (1)...(19): siRNA sense strand
auauaauuccagaccacaa

SEQ ID NO: 2488456 - RNA, 19 nt, Homo sapiens
  misc_RNA (1)...(19): siRNA sense strand
aagaugagauuaugccuga

SEQ ID NO: 2488457 - RNA, 19 nt, Homo sapiens
  misc_RNA (1)...(19): siRNA sense strand
agauuaugccugagguugu

SEQ ID NO: 2488458 - RNA, 19 nt, Homo sapiens
  misc_RNA (1)...(19): siRNA sense strand
caggagaaucagugugucu

SEQ ID NO: 2488459 - RNA, 19 nt, Homo sapiens
  misc_RNA (1)...(19): siRNA sense strand
ugagaagauaacagugaaa

SEQ ID NO: 2488460 - RNA, 19 nt, Homo sapiens
  misc_RNA (1)...(19): siRNA sense strand
agaagauaacagugaaaca

SEQ ID NO: 2488461 - RNA, 19 nt, Homo sapiens
  misc_RNA (1)...(19): siRNA sense strand
caccacgcgcugagagaaa

SEQ ID NO: 2488462 - RNA, 19 nt, Homo sapiens
  misc_RNA (1)...(19): siRNA sense strand
cauacaguguucuggaaaa

SEQ ID NO: 2488463 - RNA, 19 nt, Homo sapiens
  misc_RNA (1)...(19): siRNA sense strand
augcaauggauguagaaaa

SEQ ID NO: 2488464 - RNA, 19 nt, Homo sapiens
  misc_RNA (1)...(19): siRNA sense strand
guaccaagaguuucuauua

SEQ ID NO: 2488465 - RNA, 19 nt, Homo sapiens
  misc_RNA (1)...(19): siRNA sense strand
cgugcauguaguagcuaaa

SEQ ID NO: 2488466 - RNA, 19 nt, Homo sapiens
  misc_RNA (1)...(19): siRNA sense strand
cauagaagggacagggucu

SEQ ID NO: 2488467 - RNA, 19 nt, Homo sapiens
  misc_RNA (1)...(19): siRNA sense strand
ugcaauggauguagaaaau

SEQ ID NO: 2488468 - RNA, 19 nt, Homo sapiens
  misc_RNA (1)...(19): siRNA sense strand
gaaacagcguuaucgccua

SEQ ID NO: 2488469 - RNA, 19 nt, Homo sapiens
  misc_RNA (1)...(19): siRNA sense strand
acacacaguuacuugccaa

SEQ ID NO: 2488470 - RNA, 19 nt, Homo sapiens
  misc_RNA (1)...(19): siRNA sense strand
cauuccaaauucaaggcua

SEQ ID NO: 2488471 - RNA, 19 nt, Homo sapiens
  misc_RNA (1)...(19): siRNA sense strand
agaaaagaacguugaacca

SEQ ID NO: 2488472 - RNA, 19 nt, Homo sapiens
  misc_RNA (1)...(19): siRNA sense strand
aauucaaggcuacgauauu

SEQ ID NO: 2488473 - RNA, 19 nt, Homo sapiens
  misc_RNA (1)...(19): siRNA sense strand
cuccuaaagaaauagcaaa

SEQ ID NO: 2488474 - RNA, 19 nt, Homo sapiens
  misc_RNA (1)...(19): siRNA sense strand
ugagaagauaacagugaaa

SEQ ID NO: 2488475 - RNA, 19 nt, Homo sapiens
  misc_RNA (1)...(19): siRNA sense strand
agaagauaacagugaaaca

SEQ ID NO: 2488476 - RNA, 19 nt, Homo sapiens
  misc_RNA (1)...(19): siRNA sense strand
caccacgcgcugagagaaa

SEQ ID NO: 2488477 - RNA, 19 nt, Homo sapiens
  misc_RNA (1)...(19): siRNA sense strand
cauacaguguucuggaaaa

SEQ ID NO: 2488478 - RNA, 19 nt, Homo sapiens
  misc_RNA (1)...(19): siRNA sense strand
augcaauggauguagaaaa

SEQ ID NO: 2488479 - RNA, 19 nt, Homo sapiens
  misc_RNA (1)...(19): siRNA sense strand
guaccaagaguuucuauua

SEQ ID NO: 2488480 - RNA, 19 nt, Homo sapiens
  misc_RNA (1)...(19): siRNA sense strand
cgugcauguaguagcuaaa

SEQ ID NO: 2488481 - RNA, 19 nt, Homo sapiens
  misc_RNA (1)...(19): siRNA sense strand
cauagaagggacagggucu

SEQ ID NO: 2488482 - RNA, 19 nt, Homo sapiens
  misc_RNA (1)...(19): siRNA sense strand
ugcaauggauguagaaaau

SEQ ID NO: 2488483 - RNA, 19 nt, Homo sapiens
  misc_RNA (1)...(19): siRNA sense strand
gaaacagcguuaucgccua

SEQ ID NO: 2488484 - RNA, 19 nt, Homo sapiens
  misc_RNA (1)...(19): siRNA sense strand
acacacaguuacuugccaa

SEQ ID NO: 2488485 - RNA, 19 nt, Homo sapiens
  misc_RNA (1)...(19): siRNA sense strand
cauuccaaauucaaggcua

SEQ ID NO: 2488486 - RNA, 19 nt, Homo sapiens
  misc_RNA (1)...(19): siRNA sense strand
agaaaagaacguugaacca

SEQ ID NO: 2488487 - RNA, 19 nt, Homo sapiens
  misc_RNA (1)...(19): siRNA sense strand
aauucaaggcuacgauauu

SEQ ID NO: 2488488 - RNA, 19 nt, Homo sapiens
  misc_RNA (1)...(19): siRNA sense strand
cuccuaaagaaauagcaaa

SEQ ID NO: 2488489 - RNA, 19 nt, Homo sapiens
  misc_RNA (1)...(19): siRNA sense strand
ugagaagauaacagugaaa

SEQ ID NO: 2488490 - RNA, 19 nt, Homo sapiens
  misc_RNA (1)...(19): siRNA sense strand
agaagauaacagugaaaca

SEQ ID NO: 2488491 - RNA, 19 nt, Homo sapiens
  misc_RNA (1)...(19): siRNA sense strand
caccacgcgcugagagaaa

SEQ ID NO: 2488492 - RNA, 19 nt, Homo sapiens
  misc_RNA (1)...(19): siRNA sense strand
cauacaguguucuggaaaa

SEQ ID NO: 2488493 - RNA, 19 nt, Homo sapiens
  misc_RNA (1)...(19): siRNA sense strand
augcaauggauguagaaaa

SEQ ID NO: 2488494 - RNA, 19 nt, Homo sapiens
  misc_RNA (1)...(19): siRNA sense strand
guaccaagaguuucuauua

SEQ ID NO: 2488495 - RNA, 19 nt, Homo sapiens
  misc_RNA (1)...(19): siRNA sense strand
cgugcauguaguagcuaaa

SEQ ID NO: 2488496 - RNA, 19 nt, Homo sapiens
  misc_RNA (1)...(19): siRNA sense strand
cauagaagggacagggucu

SEQ ID NO: 2488497 - RNA, 19 nt, Homo sapiens
  misc_RNA (1)...(19): siRNA sense strand
ugcaauggauguagaaaau

SEQ ID NO: 2488498 - RNA, 19 nt, Homo sapiens
  misc_RNA (1)...(19): siRNA sense strand
gaaacagcguuaucgccua

SEQ ID NO: 2488499 - RNA, 19 nt, Homo sapiens
  misc_RNA (1)...(19): siRNA sense strand
acacacaguuacuugccaa

SEQ ID NO: 2488500 - RNA, 19 nt, Homo sapiens
  misc_RNA (1)...(19): siRNA sense strand
cauuccaaauucaaggcua

SEQ ID NO: 2488501 - RNA, 19 nt, Homo sapiens
  misc_RNA (1)...(19): siRNA sense strand
agaaaagaacguugaacca

SEQ ID NO: 2488502 - RNA, 19 nt, Homo sapiens
  misc_RNA (1)...(19): siRNA sense strand
aauucaaggcuacgauauu

SEQ ID NO: 2488503 - RNA, 19 nt, Homo sapiens
  misc_RNA (1)...(19): siRNA sense strand
cuccuaaagaaauagcaaa

SEQ ID NO: 2488504 - RNA, 19 nt, Homo sapiens
  misc_RNA (1)...(19): siRNA sense strand
caccacgcgcugagagaaa

SEQ ID NO: 2488505 - RNA, 19 nt, Homo sapiens
  misc_RNA (1)...(19): siRNA sense strand
acacacaguuacuugccaa

SEQ ID NO: 2488506 - RNA, 19 nt, Homo sapiens
  misc_RNA (1)...(19): siRNA sense strand
caccacgcgcugagagaaa

SEQ ID NO: 2488507 - RNA, 19 nt, Homo sapiens
  misc_RNA (1)...(19): siRNA sense strand
acacacaguuacuugccaa

SEQ ID NO: 2488508 - RNA, 19 nt, Homo sapiens
  misc_RNA (1)...(19): siRNA sense strand
caccacgcgcugagagaaa

SEQ ID NO: 2488509 - RNA, 19 nt, Homo sapiens
  misc_RNA (1)...(19): siRNA sense strand
guaccaagaguuucuauua

SEQ ID NO: 2488510 - RNA, 19 nt, Homo sapiens
  misc_RNA (1)...(19): siRNA sense strand
acacacaguuacuugccaa

SEQ ID NO: 2488511 - RNA, 19 nt, Homo sapiens
  misc_RNA (1)...(19): siRNA sense strand
cauuccaaauucaaggcua

SEQ ID NO: 2488512 - RNA, 19 nt, Homo sapiens
  misc_RNA (1)...(19): siRNA sense strand
aauucaaggcuacgauauu

SEQ ID NO: 2488513 - RNA, 19 nt, Homo sapiens
  misc_RNA (1)...(19): siRNA sense strand
gaaugaagaagaagggaca

SEQ ID NO: 2488514 - RNA, 19 nt, Homo sapiens
  misc_RNA (1)...(19): siRNA sense strand
gcuugaaagguuugaggaa

SEQ ID NO: 2488515 - RNA, 19 nt, Homo sapiens
  misc_RNA (1)...(19): siRNA sense strand
ggacuauucagaagggcaa

SEQ ID NO: 2488516 - RNA, 19 nt, Homo sapiens
  misc_RNA (1)...(19): siRNA sense strand
gagaauauacagagggucu

SEQ ID NO: 2488517 - RNA, 19 nt, Homo sapiens
  misc_RNA (1)...(19): siRNA sense strand
aggagcagccucagaacaa

SEQ ID NO: 2488518 - RNA, 19 nt, Homo sapiens
  misc_RNA (1)...(19): siRNA sense strand
acaaaggagcccagagacu

SEQ ID NO: 2488519 - RNA, 19 nt, Homo sapiens
  misc_RNA (1)...(19): siRNA sense strand
cagcaaaaccucuugggaa

SEQ ID NO: 2488520 - RNA, 19 nt, Homo sapiens
  misc_RNA (1)...(19): siRNA sense strand
agacgaagcuacuugacga

SEQ ID NO: 2488521 - RNA, 19 nt, Homo sapiens
  misc_RNA (1)...(19): siRNA sense strand
cgauugucaucaggagaaa

SEQ ID NO: 2488522 - RNA, 19 nt, Homo sapiens
  misc_RNA (1)...(19): siRNA sense strand
gagagaauauacagagggu

SEQ ID NO: 2488523 - RNA, 19 nt, Homo sapiens
  misc_RNA (1)...(19): siRNA sense strand
acgaagacucagcugcaaa

SEQ ID NO: 2488524 - RNA, 19 nt, Homo sapiens
  misc_RNA (1)...(19): siRNA sense strand
aagccaaggaagacgauga

SEQ ID NO: 2488525 - RNA, 19 nt, Homo sapiens
  misc_RNA (1)...(19): siRNA sense strand
ugcaaaugguucugcugaa

SEQ ID NO: 2488526 - RNA, 19 nt, Homo sapiens
  misc_RNA (1)...(19): siRNA sense strand
ggaacaucaucaaggcacu

SEQ ID NO: 2488527 - RNA, 19 nt, Homo sapiens
  misc_RNA (1)...(19): siRNA sense strand
gcggcagcccaaucagaaa

SEQ ID NO: 2488528 - RNA, 19 nt, Homo sapiens
  misc_RNA (1)...(19): siRNA sense strand
cagcuuggcaggaggagca

SEQ ID NO: 2488529 - RNA, 19 nt, Homo sapiens
  misc_RNA (1)...(19): siRNA sense strand
aagaagggacacagggcca

SEQ ID NO: 2488530 - RNA, 19 nt, Homo sapiens
  misc_RNA (1)...(19): siRNA sense strand
cagaacaaagugagacagu

SEQ ID NO: 2488531 - RNA, 19 nt, Homo sapiens
  misc_RNA (1)...(19): siRNA sense strand
ccaucaugagugagaacca

SEQ ID NO: 2488532 - RNA, 19 nt, Homo sapiens
  misc_RNA (1)...(19): siRNA sense strand
acgauugucaucaggagaa

SEQ ID NO: 2488533 - RNA, 19 nt, Homo sapiens
  misc_RNA (1)...(19): siRNA sense strand
gggacuauucagaagggca

SEQ ID NO: 2488534 - RNA, 19 nt, Homo sapiens
  misc_RNA (1)...(19): siRNA sense strand
gaaucgugcuucagaccca

SEQ ID NO: 2488535 - RNA, 19 nt, Homo sapiens
  misc_RNA (1)...(19): siRNA sense strand
ccuccaucaggcagagaau

SEQ ID NO: 2488536 - RNA, 19 nt, Homo sapiens
  misc_RNA (1)...(19): siRNA sense strand
gaaugaagaagaagggaca

SEQ ID NO: 2488537 - RNA, 19 nt, Homo sapiens
  misc_RNA (1)...(19): siRNA sense strand
gcuugaaagguuugaggaa

SEQ ID NO: 2488538 - RNA, 19 nt, Homo sapiens
  misc_RNA (1)...(19): siRNA sense strand
ggacuauucagaagggcaa

SEQ ID NO: 2488539 - RNA, 19 nt, Homo sapiens
  misc_RNA (1)...(19): siRNA sense strand
gagaauauacagagggucu

SEQ ID NO: 2488540 - RNA, 19 nt, Homo sapiens
  misc_RNA (1)...(19): siRNA sense strand
ggaagacacagcagggaga

SEQ ID NO: 2488541 - RNA, 19 nt, Homo sapiens
  misc_RNA (1)...(19): siRNA sense strand
acaaaggagcccagagacu

SEQ ID NO: 2488542 - RNA, 19 nt, Homo sapiens
  misc_RNA (1)...(19): siRNA sense strand
cagcaaaaccucuugggaa

SEQ ID NO: 2488543 - RNA, 19 nt, Homo sapiens
  misc_RNA (1)...(19): siRNA sense strand
gggagaagcccuagugccu

SEQ ID NO: 2488544 - RNA, 19 nt, Homo sapiens
  misc_RNA (1)...(19): siRNA sense strand
agacgaagcuacuugacga

SEQ ID NO: 2488545 - RNA, 19 nt, Homo sapiens
  misc_RNA (1)...(19): siRNA sense strand
cgagagagcugcugccacu

SEQ ID NO: 2488546 - RNA, 19 nt, Homo sapiens
  misc_RNA (1)...(19): siRNA sense strand
gagagaauauacagagggu

SEQ ID NO: 2488547 - RNA, 19 nt, Homo sapiens
  misc_RNA (1)...(19): siRNA sense strand
acgaagacucagcugcaaa

SEQ ID NO: 2488548 - RNA, 19 nt, Homo sapiens
  misc_RNA (1)...(19): siRNA sense strand
aagccaaggaagacgauga

SEQ ID NO: 2488549 - RNA, 19 nt, Homo sapiens
  misc_RNA (1)...(19): siRNA sense strand
ugcaaaugguucugcugaa

SEQ ID NO: 2488550 - RNA, 19 nt, Homo sapiens
  misc_RNA (1)...(19): siRNA sense strand
gcggcagcccaaucagaaa

SEQ ID NO: 2488551 - RNA, 19 nt, Homo sapiens
  misc_RNA (1)...(19): siRNA sense strand
cagcuuggcaggaggagca

SEQ ID NO: 2488552 - RNA, 19 nt, Homo sapiens
  misc_RNA (1)...(19): siRNA sense strand
aagaagggacacagggcca

SEQ ID NO: 2488553 - RNA, 19 nt, Homo sapiens
  misc_RNA (1)...(19): siRNA sense strand
ccaucaugagugagaacca

SEQ ID NO: 2488554 - RNA, 19 nt, Homo sapiens
  misc_RNA (1)...(19): siRNA sense strand
gggacuauucagaagggca

SEQ ID NO: 2488555 - RNA, 19 nt, Homo sapiens
  misc_RNA (1)...(19): siRNA sense strand
gaaucgugcuucagaccca

SEQ ID NO: 2488556 - RNA, 19 nt, Homo sapiens
  misc_RNA (1)...(19): siRNA sense strand
ccuccaucaggcagagaau

SEQ ID NO: 2488557 - RNA, 19 nt, Homo sapiens
  misc_RNA (1)...(19): siRNA sense strand
acaaggagccugugggcau

SEQ ID NO: 2488558 - RNA, 19 nt, Homo sapiens
  misc_RNA (1)...(19): siRNA sense strand
agguggagcugcugcggaa

SEQ ID NO: 2488559 - RNA, 19 nt, Homo sapiens
  misc_RNA (1)...(19): siRNA sense strand
ucaucaaagacaaggugaa

SEQ ID NO: 2488560 - RNA, 19 nt, Homo sapiens
  misc_RNA (1)...(19): siRNA sense strand
acuccugggccaaggcaua

SEQ ID NO: 2488561 - RNA, 19 nt, Homo sapiens
  misc_RNA (1)...(19): siRNA sense strand
gcgacaucgagaaggccaa

SEQ ID NO: 2488562 - RNA, 19 nt, Homo sapiens
  misc_RNA (1)...(19): siRNA sense strand
gggccaggaagacggagaa

SEQ ID NO: 2488563 - RNA, 19 nt, Homo sapiens
  misc_RNA (1)...(19): siRNA sense strand
cccaagaagcugcgguuca

SEQ ID NO: 2488564 - RNA, 19 nt, Homo sapiens
  misc_RNA (1)...(19): siRNA sense strand
acuacaggaucuacggaca

SEQ ID NO: 2488565 - RNA, 19 nt, Homo sapiens
  misc_RNA (1)...(19): siRNA sense strand
guaccacagugacgggaca

SEQ ID NO: 2488566 - RNA, 19 nt, Homo sapiens
  misc_RNA (1)...(19): siRNA sense strand
uugucaaggccauggauga

SEQ ID NO: 2488567 - RNA, 19 nt, Homo sapiens
  misc_RNA (1)...(19): siRNA sense strand
gcaacuucagcaagaccaa

SEQ ID NO: 2488568 - RNA, 19 nt, Homo sapiens
  misc_RNA (1)...(19): siRNA sense strand
cuggagaagaucuggaacu

SEQ ID NO: 2488569 - RNA, 19 nt, Homo sapiens
  misc_RNA (1)...(19): siRNA sense strand
gcaucaugauccaggaccu

SEQ ID NO: 2488570 - RNA, 19 nt, Homo sapiens
  misc_RNA (1)...(19): siRNA sense strand
acaaggagccugugggcau

SEQ ID NO: 2488571 - RNA, 19 nt, Homo sapiens
  misc_RNA (1)...(19): siRNA sense strand
agguggagcugcugcggaa

SEQ ID NO: 2488572 - RNA, 19 nt, Homo sapiens
  misc_RNA (1)...(19): siRNA sense strand
ucaucaaagacaaggugaa

SEQ ID NO: 2488573 - RNA, 19 nt, Homo sapiens
  misc_RNA (1)...(19): siRNA sense strand
acuccugggccaaggcaua

SEQ ID NO: 2488574 - RNA, 19 nt, Homo sapiens
  misc_RNA (1)...(19): siRNA sense strand
gcgacaucgagaaggccaa

SEQ ID NO: 2488575 - RNA, 19 nt, Homo sapiens
  misc_RNA (1)...(19): siRNA sense strand
gggccaggaagacggagaa

SEQ ID NO: 2488576 - RNA, 19 nt, Homo sapiens
  misc_RNA (1)...(19): siRNA sense strand
cccaagaagcugcgguuca

SEQ ID NO: 2488577 - RNA, 19 nt, Homo sapiens
  misc_RNA (1)...(19): siRNA sense strand
acuacaggaucuacggaca

SEQ ID NO: 2488578 - RNA, 19 nt, Homo sapiens
  misc_RNA (1)...(19): siRNA sense strand
guaccacagugacgggaca

SEQ ID NO: 2488579 - RNA, 19 nt, Homo sapiens
  misc_RNA (1)...(19): siRNA sense strand
uugucaaggccauggauga

SEQ ID NO: 2488580 - RNA, 19 nt, Homo sapiens
  misc_RNA (1)...(19): siRNA sense strand
gcaacuucagcaagaccaa

SEQ ID NO: 2488581 - RNA, 19 nt, Homo sapiens
  misc_RNA (1)...(19): siRNA sense strand
cuggagaagaucuggaacu

SEQ ID NO: 2488582 - RNA, 19 nt, Homo sapiens
  misc_RNA (1)...(19): siRNA sense strand
gcaucaugauccaggaccu

SEQ ID NO: 2488583 - RNA, 19 nt, Homo sapiens
  misc_RNA (1)...(19): siRNA sense strand
acaaggagccugugggcau

SEQ ID NO: 2488584 - RNA, 19 nt, Homo sapiens
  misc_RNA (1)...(19): siRNA sense strand
agguggagcugcugcggaa

SEQ ID NO: 2488585 - RNA, 19 nt, Homo sapiens
  misc_RNA (1)...(19): siRNA sense strand
ucgaggaccuggugagcau

SEQ ID NO: 2488586 - RNA, 19 nt, Homo sapiens
  misc_RNA (1)...(19): siRNA sense strand
ucaucaaagacaaggugaa

SEQ ID NO: 2488587 - RNA, 19 nt, Homo sapiens
  misc_RNA (1)...(19): siRNA sense strand
acuccugggccaaggcaua

SEQ ID NO: 2488588 - RNA, 19 nt, Homo sapiens
  misc_RNA (1)...(19): siRNA sense strand
gcgacaucgagaaggccaa

SEQ ID NO: 2488589 - RNA, 19 nt, Homo sapiens
  misc_RNA (1)...(19): siRNA sense strand
gggccaggaagacggagaa

SEQ ID NO: 2488590 - RNA, 19 nt, Homo sapiens
  misc_RNA (1)...(19): siRNA sense strand
cccaagaagcugcgguuca

SEQ ID NO: 2488591 - RNA, 19 nt, Homo sapiens
  misc_RNA (1)...(19): siRNA sense strand
acuacaggaucuacggaca

SEQ ID NO: 2488592 - RNA, 19 nt, Homo sapiens
  misc_RNA (1)...(19): siRNA sense strand
guaccacagugacgggaca

SEQ ID NO: 2488593 - RNA, 19 nt, Homo sapiens
  misc_RNA (1)...(19): siRNA sense strand
uugucaaggccauggauga

SEQ ID NO: 2488594 - RNA, 19 nt, Homo sapiens
  misc_RNA (1)...(19): siRNA sense strand
gcaacuucagcaagaccaa

SEQ ID NO: 2488595 - RNA, 19 nt, Homo sapiens
  misc_RNA (1)...(19): siRNA sense strand
cuggagaagaucuggaacu

SEQ ID NO: 2488596 - RNA, 19 nt, Homo sapiens
  misc_RNA (1)...(19): siRNA sense strand
gcaucaugauccaggaccu

SEQ ID NO: 2488597 - RNA, 19 nt, Homo sapiens
  misc_RNA (1)...(19): siRNA sense strand
acucaagaaugaagaggca

SEQ ID NO: 2488598 - RNA, 19 nt, Homo sapiens
  misc_RNA (1)...(19): siRNA sense strand
cagcugaauacuaugacaa

SEQ ID NO: 2488599 - RNA, 19 nt, Homo sapiens
  misc_RNA (1)...(19): siRNA sense strand
cagaaaguuuauauggguu

SEQ ID NO: 2488600 - RNA, 19 nt, Homo sapiens
  misc_RNA (1)...(19): siRNA sense strand
acucaaugacucuggcuau

SEQ ID NO: 2488601 - RNA, 19 nt, Homo sapiens
  misc_RNA (1)...(19): siRNA sense strand
ugaugaaaccugaucccaa

SEQ ID NO: 2488602 - RNA, 19 nt, Homo sapiens
  misc_RNA (1)...(19): siRNA sense strand
cugcaaagcaauguggaau

SEQ ID NO: 2488603 - RNA, 19 nt, Homo sapiens
  misc_RNA (1)...(19): siRNA sense strand
acauguucuuaaaggguca

SEQ ID NO: 2488604 - RNA, 19 nt, Homo sapiens
  misc_RNA (1)...(19): siRNA sense strand
uuaccuucaauguggguua

SEQ ID NO: 2488605 - RNA, 19 nt, Homo sapiens
  misc_RNA (1)...(19): siRNA sense strand
agagauggugcuggaguaa

SEQ ID NO: 2488606 - RNA, 19 nt, Homo sapiens
  misc_RNA (1)...(19): siRNA sense strand
gaggaaaauagcagcugaa

SEQ ID NO: 2488607 - RNA, 19 nt, Homo sapiens
  misc_RNA (1)...(19): siRNA sense strand
acugcaaagcaauguggaa

SEQ ID NO: 2488608 - RNA, 19 nt, Homo sapiens
  misc_RNA (1)...(19): siRNA sense strand
aaggagagauggugcugga

SEQ ID NO: 2488609 - RNA, 19 nt, Homo sapiens
  misc_RNA (1)...(19): siRNA sense strand
acucaagaaugaagaggca

SEQ ID NO: 2488610 - RNA, 19 nt, Homo sapiens
  misc_RNA (1)...(19): siRNA sense strand
cagcugaauacuaugacaa

SEQ ID NO: 2488611 - RNA, 19 nt, Homo sapiens
  misc_RNA (1)...(19): siRNA sense strand
cagaaaguuuauauggguu

SEQ ID NO: 2488612 - RNA, 19 nt, Homo sapiens
  misc_RNA (1)...(19): siRNA sense strand
acucaaugacucuggcuau

SEQ ID NO: 2488613 - RNA, 19 nt, Homo sapiens
  misc_RNA (1)...(19): siRNA sense strand
ugaugaaaccugaucccaa

SEQ ID NO: 2488614 - RNA, 19 nt, Homo sapiens
  misc_RNA (1)...(19): siRNA sense strand
cugcaaagcaauguggaau

SEQ ID NO: 2488615 - RNA, 19 nt, Homo sapiens
  misc_RNA (1)...(19): siRNA sense strand
acauguucuuaaaggguca

SEQ ID NO: 2488616 - RNA, 19 nt, Homo sapiens
  misc_RNA (1)...(19): siRNA sense strand
uuaccuucaauguggguua

SEQ ID NO: 2488617 - RNA, 19 nt, Homo sapiens
  misc_RNA (1)...(19): siRNA sense strand
agagauggugcuggaguaa

SEQ ID NO: 2488618 - RNA, 19 nt, Homo sapiens
  misc_RNA (1)...(19): siRNA sense strand
gaggaaaauagcagcugaa

SEQ ID NO: 2488619 - RNA, 19 nt, Homo sapiens
  misc_RNA (1)...(19): siRNA sense strand
acugcaaagcaauguggaa

SEQ ID NO: 2488620 - RNA, 19 nt, Homo sapiens
  misc_RNA (1)...(19): siRNA sense strand
aaggagagauggugcugga

SEQ ID NO: 2488621 - RNA, 19 nt, Homo sapiens
  misc_RNA (1)...(19): siRNA sense strand
ucucagaggugcaggccaa

SEQ ID NO: 2488622 - RNA, 19 nt, Homo sapiens
  misc_RNA (1)...(19): siRNA sense strand
gagaaugagaggugggaug

SEQ ID NO: 2488623 - RNA, 19 nt, Homo sapiens
  misc_RNA (1)...(19): siRNA sense strand
aggcagacgagcugaugaa

SEQ ID NO: 2488624 - RNA, 19 nt, Homo sapiens
  misc_RNA (1)...(19): siRNA sense strand
uggccaagaagaagaucua

SEQ ID NO: 2488625 - RNA, 19 nt, Homo sapiens
  misc_RNA (1)...(19): siRNA sense strand
gggacgugaugcagaacca

SEQ ID NO: 2488626 - RNA, 19 nt, Homo sapiens
  misc_RNA (1)...(19): siRNA sense strand
ccaaaggguaccuggacga

SEQ ID NO: 2488627 - RNA, 19 nt, Homo sapiens
  misc_RNA (1)...(19): siRNA sense strand
gcaaacagagugagcccuu

SEQ ID NO: 2488628 - RNA, 19 nt, Homo sapiens
  misc_RNA (1)...(19): siRNA sense strand
acaaugugguccugggcca

SEQ ID NO: 2488629 - RNA, 19 nt, Homo sapiens
  misc_RNA (1)...(19): siRNA sense strand
uggagaagcccaagcccau

SEQ ID NO: 2488630 - RNA, 19 nt, Homo sapiens
  misc_RNA (1)...(19): siRNA sense strand
gugaccuggccaagaagaa

SEQ ID NO: 2488631 - RNA, 19 nt, Homo sapiens
  misc_RNA (1)...(19): siRNA sense strand
aggagauggugcagaaccu

SEQ ID NO: 2488632 - RNA, 19 nt, Homo sapiens
  misc_RNA (1)...(19): siRNA sense strand
ccaacaaagaccaccgcaa

SEQ ID NO: 2488633 - RNA, 19 nt, Homo sapiens
  misc_RNA (1)...(19): siRNA sense strand
gcaccagaagugugagaac

SEQ ID NO: 2488634 - RNA, 19 nt, Homo sapiens
  misc_RNA (1)...(19): siRNA sense strand
ucaagggguucgagugcaa

SEQ ID NO: 2488635 - RNA, 19 nt, Homo sapiens
  misc_RNA (1)...(19): siRNA sense strand
ccaacaaagaccaccgcaa

SEQ ID NO: 2488636 - RNA, 19 nt, Homo sapiens
  misc_RNA (1)...(19): siRNA sense strand
gcaccagaagugugagaac

SEQ ID NO: 2488637 - RNA, 19 nt, Homo sapiens
  misc_RNA (1)...(19): siRNA sense strand
ucaagggguucgagugcaa

SEQ ID NO: 2488638 - RNA, 19 nt, Homo sapiens
  misc_RNA (1)...(19): siRNA sense strand
gcuucaaauuacagggaau

SEQ ID NO: 2488639 - RNA, 19 nt, Homo sapiens
  misc_RNA (1)...(19): siRNA sense strand
agauaggcuuagagagaga

SEQ ID NO: 2488640 - RNA, 19 nt, Homo sapiens
  misc_RNA (1)...(19): siRNA sense strand
gggaggaagccguagugaa

SEQ ID NO: 2488641 - RNA, 19 nt, Homo sapiens
  misc_RNA (1)...(19): siRNA sense strand
gcggcuuaguauugaagaa

SEQ ID NO: 2488642 - RNA, 19 nt, Homo sapiens
  misc_RNA (1)...(19): siRNA sense strand
gcucagggacucugcgcaa

SEQ ID NO: 2488643 - RNA, 19 nt, Homo sapiens
  misc_RNA (1)...(19): siRNA sense strand
cugaauuaaugcuugagaa

SEQ ID NO: 2488644 - RNA, 19 nt, Homo sapiens
  misc_RNA (1)...(19): siRNA sense strand
ccaugagaacuuacagcaa

SEQ ID NO: 2488645 - RNA, 19 nt, Homo sapiens
  misc_RNA (1)...(19): siRNA sense strand
cagacagggagcuuggaaa

SEQ ID NO: 2488646 - RNA, 19 nt, Homo sapiens
  misc_RNA (1)...(19): siRNA sense strand
acaaagacccagaguucau

SEQ ID NO: 2488647 - RNA, 19 nt, Homo sapiens
  misc_RNA (1)...(19): siRNA sense strand
ugguagaacucgaagugga

SEQ ID NO: 2488648 - RNA, 19 nt, Homo sapiens
  misc_RNA (1)...(19): siRNA sense strand
gcuccuggaaugacugaaa

SEQ ID NO: 2488649 - RNA, 19 nt, Homo sapiens
  misc_RNA (1)...(19): siRNA sense strand
ggggagugauggaccguua

SEQ ID NO: 2488650 - RNA, 19 nt, Homo sapiens
  misc_RNA (1)...(19): siRNA sense strand
cgaauugagcaguggaauc

SEQ ID NO: 2488651 - RNA, 19 nt, Homo sapiens
  misc_RNA (1)...(19): siRNA sense strand
agacuugcacgaagagauu

SEQ ID NO: 2488652 - RNA, 19 nt, Homo sapiens
  misc_RNA (1)...(19): siRNA sense strand
cugcaauuccacaagcuaa

SEQ ID NO: 2488653 - RNA, 19 nt, Homo sapiens
  misc_RNA (1)...(19): siRNA sense strand
gcauuugauuaaacagcau

SEQ ID NO: 2488654 - RNA, 19 nt, Homo sapiens
  misc_RNA (1)...(19): siRNA sense strand
ggacaguguuuccagcaga

SEQ ID NO: 2488655 - RNA, 19 nt, Homo sapiens
  misc_RNA (1)...(19): siRNA sense strand
aggcagaagcagcgucaga

SEQ ID NO: 2488656 - RNA, 19 nt, Homo sapiens
  misc_RNA (1)...(19): siRNA sense strand
gcucagauuuagcccaaaa

SEQ ID NO: 2488657 - RNA, 19 nt, Homo sapiens
  misc_RNA (1)...(19): siRNA sense strand
aggaagccguagugaaaau

SEQ ID NO: 2488658 - RNA, 19 nt, Homo sapiens
  misc_RNA (1)...(19): siRNA sense strand
aagcagucccuuaagagaa

SEQ ID NO: 2488659 - RNA, 19 nt, Homo sapiens
  misc_RNA (1)...(19): siRNA sense strand
cgaaaaggauaaugauucu

SEQ ID NO: 2488660 - RNA, 19 nt, Homo sapiens
  misc_RNA (1)...(19): siRNA sense strand
aauccaucucucugaauua

SEQ ID NO: 2488661 - RNA, 19 nt, Homo sapiens
  misc_RNA (1)...(19): siRNA sense strand
cagaagaugaagaagauag

SEQ ID NO: 2488662 - RNA, 19 nt, Homo sapiens
  misc_RNA (1)...(19): siRNA sense strand
uuauauaaacugggaccaa

SEQ ID NO: 2488663 - RNA, 19 nt, Homo sapiens
  misc_RNA (1)...(19): siRNA sense strand
agaugaagaagauaggcuu

SEQ ID NO: 2488664 - RNA, 19 nt, Homo sapiens
  misc_RNA (1)...(19): siRNA sense strand
caguggaaucacaacuuua

SEQ ID NO: 2488665 - RNA, 19 nt, Homo sapiens
  misc_RNA (1)...(19): siRNA sense strand
cuaaauaggacuuucccuu

SEQ ID NO: 2488666 - RNA, 19 nt, Homo sapiens
  misc_RNA (1)...(19): siRNA sense strand
ucuucaaggagaaaucaaa

SEQ ID NO: 2488667 - RNA, 19 nt, Homo sapiens
  misc_RNA (1)...(19): siRNA sense strand
gcuucaaauuacagggaau

SEQ ID NO: 2488668 - RNA, 19 nt, Homo sapiens
  misc_RNA (1)...(19): siRNA sense strand
agauaggcuuagagagaga

SEQ ID NO: 2488669 - RNA, 19 nt, Homo sapiens
  misc_RNA (1)...(19): siRNA sense strand
gggaggaagccguagugaa

SEQ ID NO: 2488670 - RNA, 19 nt, Homo sapiens
  misc_RNA (1)...(19): siRNA sense strand
gcggcuuaguauugaagaa

SEQ ID NO: 2488671 - RNA, 19 nt, Homo sapiens
  misc_RNA (1)...(19): siRNA sense strand
gcucagggacucugcgcaa

SEQ ID NO: 2488672 - RNA, 19 nt, Homo sapiens
  misc_RNA (1)...(19): siRNA sense strand
cugaauuaaugcuugagaa

SEQ ID NO: 2488673 - RNA, 19 nt, Homo sapiens
  misc_RNA (1)...(19): siRNA sense strand
ccaugagaacuuacagcaa

SEQ ID NO: 2488674 - RNA, 19 nt, Homo sapiens
  misc_RNA (1)...(19): siRNA sense strand
cagacagggagcuuggaaa

SEQ ID NO: 2488675 - RNA, 19 nt, Homo sapiens
  misc_RNA (1)...(19): siRNA sense strand
acaaagacccagaguucau

SEQ ID NO: 2488676 - RNA, 19 nt, Homo sapiens
  misc_RNA (1)...(19): siRNA sense strand
ugguagaacucgaagugga

SEQ ID NO: 2488677 - RNA, 19 nt, Homo sapiens
  misc_RNA (1)...(19): siRNA sense strand
gcuccuggaaugacugaaa

SEQ ID NO: 2488678 - RNA, 19 nt, Homo sapiens
  misc_RNA (1)...(19): siRNA sense strand
ggggagugauggaccguua

SEQ ID NO: 2488679 - RNA, 19 nt, Homo sapiens
  misc_RNA (1)...(19): siRNA sense strand
cgaauugagcaguggaauc

SEQ ID NO: 2488680 - RNA, 19 nt, Homo sapiens
  misc_RNA (1)...(19): siRNA sense strand
agacuugcacgaagagauu

SEQ ID NO: 2488681 - RNA, 19 nt, Homo sapiens
  misc_RNA (1)...(19): siRNA sense strand
cugcaauuccacaagcuaa

SEQ ID NO: 2488682 - RNA, 19 nt, Homo sapiens
  misc_RNA (1)...(19): siRNA sense strand
gcauuugauuaaacagcau

SEQ ID NO: 2488683 - RNA, 19 nt, Homo sapiens
  misc_RNA (1)...(19): siRNA sense strand
ggacaguguuuccagcaga

SEQ ID NO: 2488684 - RNA, 19 nt, Homo sapiens
  misc_RNA (1)...(19): siRNA sense strand
aggcagaagcagcgucaga

SEQ ID NO: 2488685 - RNA, 19 nt, Homo sapiens
  misc_RNA (1)...(19): siRNA sense strand
gcucagauuuagcccaaaa

SEQ ID NO: 2488686 - RNA, 19 nt, Homo sapiens
  misc_RNA (1)...(19): siRNA sense strand
aggaagccguagugaaaau

SEQ ID NO: 2488687 - RNA, 19 nt, Homo sapiens
  misc_RNA (1)...(19): siRNA sense strand
aagcagucccuuaagagaa

SEQ ID NO: 2488688 - RNA, 19 nt, Homo sapiens
  misc_RNA (1)...(19): siRNA sense strand
cgaaaaggauaaugauucu

SEQ ID NO: 2488689 - RNA, 19 nt, Homo sapiens
  misc_RNA (1)...(19): siRNA sense strand
aauccaucucucugaauua

SEQ ID NO: 2488690 - RNA, 19 nt, Homo sapiens
  misc_RNA (1)...(19): siRNA sense strand
cagaagaugaagaagauag

SEQ ID NO: 2488691 - RNA, 19 nt, Homo sapiens
  misc_RNA (1)...(19): siRNA sense strand
uuauauaaacugggaccaa

SEQ ID NO: 2488692 - RNA, 19 nt, Homo sapiens
  misc_RNA (1)...(19): siRNA sense strand
agaugaagaagauaggcuu

SEQ ID NO: 2488693 - RNA, 19 nt, Homo sapiens
  misc_RNA (1)...(19): siRNA sense strand
caguggaaucacaacuuua

SEQ ID NO: 2488694 - RNA, 19 nt, Homo sapiens
  misc_RNA (1)...(19): siRNA sense strand
cuaaauaggacuuucccuu

SEQ ID NO: 2488695 - RNA, 19 nt, Homo sapiens
  misc_RNA (1)...(19): siRNA sense strand
ucuucaaggagaaaucaaa

SEQ ID NO: 2488696 - RNA, 19 nt, Homo sapiens
  misc_RNA (1)...(19): siRNA sense strand
ucuuaaaaccuuacggaaa

SEQ ID NO: 2488697 - RNA, 19 nt, Homo sapiens
  misc_RNA (1)...(19): siRNA sense strand
cugcaaaacagaagucaaa

SEQ ID NO: 2488698 - RNA, 19 nt, Homo sapiens
  misc_RNA (1)...(19): siRNA sense strand
agccagauguggaaggaca

SEQ ID NO: 2488699 - RNA, 19 nt, Homo sapiens
  misc_RNA (1)...(19): siRNA sense strand
guugggaggcagaagggaa

SEQ ID NO: 2488700 - RNA, 19 nt, Homo sapiens
  misc_RNA (1)...(19): siRNA sense strand
ccaaacaaaaugaaggauu

SEQ ID NO: 2488701 - RNA, 19 nt, Homo sapiens
  misc_RNA (1)...(19): siRNA sense strand
cguccauaguugaucuaau

SEQ ID NO: 2488702 - RNA, 19 nt, Homo sapiens
  misc_RNA (1)...(19): siRNA sense strand
ucaagauggaggugagagu

SEQ ID NO: 2488703 - RNA, 19 nt, Homo sapiens
  misc_RNA (1)...(19): siRNA sense strand
cacucaaaugguagguuua

SEQ ID NO: 2488704 - RNA, 19 nt, Homo sapiens
  misc_RNA (1)...(19): siRNA sense strand
gcgagagccugauggguac

SEQ ID NO: 2488705 - RNA, 19 nt, Homo sapiens
  misc_RNA (1)...(19): siRNA sense strand
aagauggaggugagaguca

SEQ ID NO: 2488706 - RNA, 19 nt, Homo sapiens
  misc_RNA (1)...(19): siRNA sense strand
aggugagagucaaggccuu

SEQ ID NO: 2488707 - RNA, 19 nt, Homo sapiens
  misc_RNA (1)...(19): siRNA sense strand
aguuuaugacucagugcaa

SEQ ID NO: 2488708 - RNA, 19 nt, Homo sapiens
  misc_RNA (1)...(19): siRNA sense strand
gagcauucaaucagggacu

SEQ ID NO: 2488709 - RNA, 19 nt, Homo sapiens
  misc_RNA (1)...(19): siRNA sense strand
agcgagagccugaugggua

SEQ ID NO: 2488710 - RNA, 19 nt, Homo sapiens
  misc_RNA (1)...(19): siRNA sense strand
aggaugagagucagguaga

SEQ ID NO: 2488711 - RNA, 19 nt, Homo sapiens
  misc_RNA (1)...(19): siRNA sense strand
aaacagaagucaaaaggca

SEQ ID NO: 2488712 - RNA, 19 nt, Homo sapiens
  misc_RNA (1)...(19): siRNA sense strand
caguauaccagaauagacu

SEQ ID NO: 2488713 - RNA, 19 nt, Homo sapiens
  misc_RNA (1)...(19): siRNA sense strand
uuucaugguaguacaacaa

SEQ ID NO: 2488714 - RNA, 19 nt, Homo sapiens
  misc_RNA (1)...(19): siRNA sense strand
caaaggaacuucaguggac

SEQ ID NO: 2488715 - RNA, 19 nt, Homo sapiens
  misc_RNA (1)...(19): siRNA sense strand
uggaagaagaggaagauau

SEQ ID NO: 2488716 - RNA, 19 nt, Homo sapiens
  misc_RNA (1)...(19): siRNA sense strand
cuguaguaaucaugaacaa

SEQ ID NO: 2488717 - RNA, 19 nt, Homo sapiens
  misc_RNA (1)...(19): siRNA sense strand
gcauggauguggauggaga

SEQ ID NO: 2488718 - RNA, 19 nt, Homo sapiens
  misc_RNA (1)...(19): siRNA sense strand
ugaacaaacucuaagcaga

SEQ ID NO: 2488719 - RNA, 19 nt, Homo sapiens
  misc_RNA (1)...(19): siRNA sense strand
cucuagaacaggaggauuu

SEQ ID NO: 2488720 - RNA, 19 nt, Homo sapiens
  misc_RNA (1)...(19): siRNA sense strand
gggagagaagacaggauuu

SEQ ID NO: 2488721 - RNA, 19 nt, Homo sapiens
  misc_RNA (1)...(19): siRNA sense strand
ccauguaugagcuggagua

SEQ ID NO: 2488722 - RNA, 19 nt, Homo sapiens
  misc_RNA (1)...(19): siRNA sense strand
cugaagaagacaaaaggaa

SEQ ID NO: 2488723 - RNA, 19 nt, Homo sapiens
  misc_RNA (1)...(19): siRNA sense strand
aaagaaaccuggaacacca

SEQ ID NO: 2488724 - RNA, 19 nt, Homo sapiens
  misc_RNA (1)...(19): siRNA sense strand
caauacagaaagagggaag

SEQ ID NO: 2488725 - RNA, 19 nt, Homo sapiens
  misc_RNA (1)...(19): siRNA sense strand
ugcaagccuuccagagaaa

SEQ ID NO: 2488726 - RNA, 19 nt, Homo sapiens
  misc_RNA (1)...(19): siRNA sense strand
agaacagaaagcagacauu

SEQ ID NO: 2488727 - RNA, 19 nt, Homo sapiens
  misc_RNA (1)...(19): siRNA sense strand
agaaaagaaaccuggaaca

SEQ ID NO: 2488728 - RNA, 19 nt, Homo sapiens
  misc_RNA (1)...(19): siRNA sense strand
ccucugaauuuggaaacaa

SEQ ID NO: 2488729 - RNA, 19 nt, Homo sapiens
  misc_RNA (1)...(19): siRNA sense strand
ugaagaagacaaaaggaau

SEQ ID NO: 2488730 - RNA, 19 nt, Homo sapiens
  misc_RNA (1)...(19): siRNA sense strand
gguuugccgcugaggagua

SEQ ID NO: 2488731 - RNA, 19 nt, Homo sapiens
  misc_RNA (1)...(19): siRNA sense strand
gcgccauuguccauaaaca

SEQ ID NO: 2488732 - RNA, 19 nt, Homo sapiens
  misc_RNA (1)...(19): siRNA sense strand
ccauaaacauuccacgguu

SEQ ID NO: 2488733 - RNA, 19 nt, Homo sapiens
  misc_RNA (1)...(19): siRNA sense strand
auacagaaagagggaagaa

SEQ ID NO: 2488734 - RNA, 19 nt, Homo sapiens
  misc_RNA (1)...(19): siRNA sense strand
aagaaugagcuaugcagau

SEQ ID NO: 2488735 - RNA, 19 nt, Homo sapiens
  misc_RNA (1)...(19): siRNA sense strand
gaccaugaacagagagauc

SEQ ID NO: 2488736 - RNA, 19 nt, Homo sapiens
  misc_RNA (1)...(19): siRNA sense strand
uugaagaacagaaagcaga

SEQ ID NO: 2488737 - RNA, 19 nt, Homo sapiens
  misc_RNA (1)...(19): siRNA sense strand
aaaauuacuucgacagaga

SEQ ID NO: 2488738 - RNA, 19 nt, Homo sapiens
  misc_RNA (1)...(19): siRNA sense strand
cuucgacagagauaagaaa

SEQ ID NO: 2488739 - RNA, 19 nt, Homo sapiens
  misc_RNA (1)...(19): siRNA sense strand
cugaaagaugcuccagaau

SEQ ID NO: 2488740 - RNA, 19 nt, Homo sapiens
  misc_RNA (1)...(19): siRNA sense strand
gaagaaugagcuaugcaga

SEQ ID NO: 2488741 - RNA, 19 nt, Homo sapiens
  misc_RNA (1)...(19): siRNA sense strand
ggauguggauggagacggu

SEQ ID NO: 2488742 - RNA, 19 nt, Homo sapiens
  misc_RNA (1)...(19): siRNA sense strand
ucuaugaggagcaguguga

SEQ ID NO: 2488743 - RNA, 19 nt, Homo sapiens
  misc_RNA (1)...(19): siRNA sense strand
aauauuaagugcaagccuu

SEQ ID NO: 2488744 - RNA, 19 nt, Homo sapiens
  misc_RNA (1)...(19): siRNA sense strand
aauuacuucgacagagaua

SEQ ID NO: 2488745 - RNA, 19 nt, Homo sapiens
  misc_RNA (1)...(19): siRNA sense strand
ccaugggaauugagcccuu

SEQ ID NO: 2488746 - RNA, 19 nt, Homo sapiens
  misc_RNA (1)...(19): siRNA sense strand
uggaagaagaggaagauau

SEQ ID NO: 2488747 - RNA, 19 nt, Homo sapiens
  misc_RNA (1)...(19): siRNA sense strand
cuguaguaaucaugaacaa

SEQ ID NO: 2488748 - RNA, 19 nt, Homo sapiens
  misc_RNA (1)...(19): siRNA sense strand
gcauggauguggauggaga

SEQ ID NO: 2488749 - RNA, 19 nt, Homo sapiens
  misc_RNA (1)...(19): siRNA sense strand
ugaacaaacucuaagcaga

SEQ ID NO: 2488750 - RNA, 19 nt, Homo sapiens
  misc_RNA (1)...(19): siRNA sense strand
cucuagaacaggaggauuu

SEQ ID NO: 2488751 - RNA, 19 nt, Homo sapiens
  misc_RNA (1)...(19): siRNA sense strand
gggagagaagacaggauuu

SEQ ID NO: 2488752 - RNA, 19 nt, Homo sapiens
  misc_RNA (1)...(19): siRNA sense strand
ccauguaugagcuggagua

SEQ ID NO: 2488753 - RNA, 19 nt, Homo sapiens
  misc_RNA (1)...(19): siRNA sense strand
cugaagaagacaaaaggaa

SEQ ID NO: 2488754 - RNA, 19 nt, Homo sapiens
  misc_RNA (1)...(19): siRNA sense strand
aaagaaaccuggaacacca

SEQ ID NO: 2488755 - RNA, 19 nt, Homo sapiens
  misc_RNA (1)...(19): siRNA sense strand
caauacagaaagagggaag

SEQ ID NO: 2488756 - RNA, 19 nt, Homo sapiens
  misc_RNA (1)...(19): siRNA sense strand
ugcaagccuuccagagaaa

SEQ ID NO: 2488757 - RNA, 19 nt, Homo sapiens
  misc_RNA (1)...(19): siRNA sense strand
agaacagaaagcagacauu

SEQ ID NO: 2488758 - RNA, 19 nt, Homo sapiens
  misc_RNA (1)...(19): siRNA sense strand
agaaaagaaaccuggaaca

SEQ ID NO: 2488759 - RNA, 19 nt, Homo sapiens
  misc_RNA (1)...(19): siRNA sense strand
ccucugaauuuggaaacaa

SEQ ID NO: 2488760 - RNA, 19 nt, Homo sapiens
  misc_RNA (1)...(19): siRNA sense strand
ugaagaagacaaaaggaau

SEQ ID NO: 2488761 - RNA, 19 nt, Homo sapiens
  misc_RNA (1)...(19): siRNA sense strand
gguuugccgcugaggagua

SEQ ID NO: 2488762 - RNA, 19 nt, Homo sapiens
  misc_RNA (1)...(19): siRNA sense strand
gcgccauuguccauaaaca

SEQ ID NO: 2488763 - RNA, 19 nt, Homo sapiens
  misc_RNA (1)...(19): siRNA sense strand
ccauaaacauuccacgguu

SEQ ID NO: 2488764 - RNA, 19 nt, Homo sapiens
  misc_RNA (1)...(19): siRNA sense strand
auacagaaagagggaagaa

SEQ ID NO: 2488765 - RNA, 19 nt, Homo sapiens
  misc_RNA (1)...(19): siRNA sense strand
aagaaugagcuaugcagau

SEQ ID NO: 2488766 - RNA, 19 nt, Homo sapiens
  misc_RNA (1)...(19): siRNA sense strand
gaccaugaacagagagauc

SEQ ID NO: 2488767 - RNA, 19 nt, Homo sapiens
  misc_RNA (1)...(19): siRNA sense strand
uugaagaacagaaagcaga

SEQ ID NO: 2488768 - RNA, 19 nt, Homo sapiens
  misc_RNA (1)...(19): siRNA sense strand
aaaauuacuucgacagaga

SEQ ID NO: 2488769 - RNA, 19 nt, Homo sapiens
  misc_RNA (1)...(19): siRNA sense strand
cuucgacagagauaagaaa

SEQ ID NO: 2488770 - RNA, 19 nt, Homo sapiens
  misc_RNA (1)...(19): siRNA sense strand
cugaaagaugcuccagaau

SEQ ID NO: 2488771 - RNA, 19 nt, Homo sapiens
  misc_RNA (1)...(19): siRNA sense strand
gaagaaugagcuaugcaga

SEQ ID NO: 2488772 - RNA, 19 nt, Homo sapiens
  misc_RNA (1)...(19): siRNA sense strand
ggauguggauggagacggu

SEQ ID NO: 2488773 - RNA, 19 nt, Homo sapiens
  misc_RNA (1)...(19): siRNA sense strand
ucuaugaggagcaguguga

SEQ ID NO: 2488774 - RNA, 19 nt, Homo sapiens
  misc_RNA (1)...(19): siRNA sense strand
aauauuaagugcaagccuu

SEQ ID NO: 2488775 - RNA, 19 nt, Homo sapiens
  misc_RNA (1)...(19): siRNA sense strand
aauuacuucgacagagaua

SEQ ID NO: 2488776 - RNA, 19 nt, Homo sapiens
  misc_RNA (1)...(19): siRNA sense strand
ccaugggaauugagcccuu

SEQ ID NO: 2488777 - RNA, 19 nt, Homo sapiens
  misc_RNA (1)...(19): siRNA sense strand
gcaggaagaucauggagca

SEQ ID NO: 2488778 - RNA, 19 nt, Homo sapiens
  misc_RNA (1)...(19): siRNA sense strand
uggaaaaugcugaaggaca

SEQ ID NO: 2488779 - RNA, 19 nt, Homo sapiens
  misc_RNA (1)...(19): siRNA sense strand
ggaaaaugcugaaggacag

SEQ ID NO: 2488780 - RNA, 19 nt, Homo sapiens
  misc_RNA (1)...(19): siRNA sense strand
agaaaugcggcaagcucaa

SEQ ID NO: 2488781 - RNA, 19 nt, Homo sapiens
  misc_RNA (1)...(19): siRNA sense strand
ucuccaagaggcugggcaa

SEQ ID NO: 2488782 - RNA, 19 nt, Homo sapiens
  misc_RNA (1)...(19): siRNA sense strand
ccuccaagggcuccagcaa

SEQ ID NO: 2488783 - RNA, 19 nt, Homo sapiens
  misc_RNA (1)...(19): siRNA sense strand
acuacagcuucaagaacau

SEQ ID NO: 2488784 - RNA, 19 nt, Homo sapiens
  misc_RNA (1)...(19): siRNA sense strand
gcuucaagaacaucaccaa

SEQ ID NO: 2488785 - RNA, 19 nt, Homo sapiens
  misc_RNA (1)...(19): siRNA sense strand
gagcgagccucuacgacga

SEQ ID NO: 2488786 - RNA, 19 nt, Homo sapiens
  misc_RNA (1)...(19): siRNA sense strand
cagcagaggaggaggagga

SEQ ID NO: 2488787 - RNA, 19 nt, Homo sapiens
  misc_RNA (1)...(19): siRNA sense strand
cagaggaggaggaggacga

SEQ ID NO: 2488788 - RNA, 19 nt, Homo sapiens
  misc_RNA (1)...(19): siRNA sense strand
acacaaagccaaugggcag

SEQ ID NO: 2488789 - RNA, 19 nt, Homo sapiens
  misc_RNA (1)...(19): siRNA sense strand
ccucaaaagaaacgcggua

SEQ ID NO: 2488790 - RNA, 19 nt, Homo sapiens
  misc_RNA (1)...(19): siRNA sense strand
cggcagucgcuggagauua

SEQ ID NO: 2488791 - RNA, 19 nt, Homo sapiens
  misc_RNA (1)...(19): siRNA sense strand
agguguugcuggaguagga

SEQ ID NO: 2488792 - RNA, 19 nt, Homo sapiens
  misc_RNA (1)...(19): siRNA sense strand
cagcagaggaggaggagga

SEQ ID NO: 2488793 - RNA, 19 nt, Homo sapiens
  misc_RNA (1)...(19): siRNA sense strand
cagaggaggaggaggacga

SEQ ID NO: 2488794 - RNA, 19 nt, Homo sapiens
  misc_RNA (1)...(19): siRNA sense strand
acacaaagccaaugggcag

SEQ ID NO: 2488795 - RNA, 19 nt, Homo sapiens
  misc_RNA (1)...(19): siRNA sense strand
ccucaaaagaaacgcggua

SEQ ID NO: 2488796 - RNA, 19 nt, Homo sapiens
  misc_RNA (1)...(19): siRNA sense strand
cggcagucgcuggagauua

SEQ ID NO: 2488797 - RNA, 19 nt, Homo sapiens
  misc_RNA (1)...(19): siRNA sense strand
agguguugcuggaguagga

SEQ ID NO: 2488798 - RNA, 19 nt, Homo sapiens
  misc_RNA (1)...(19): siRNA sense strand
cuguagaauuagaauggua

SEQ ID NO: 2488799 - RNA, 19 nt, Homo sapiens
  misc_RNA (1)...(19): siRNA sense strand
cagacaacuuuaaaggcaa

SEQ ID NO: 2488800 - RNA, 19 nt, Homo sapiens
  misc_RNA (1)...(19): siRNA sense strand
aagaagagcucauugccaa

SEQ ID NO: 2488801 - RNA, 19 nt, Homo sapiens
  misc_RNA (1)...(19): siRNA sense strand
auguggaggugcuguguaa

SEQ ID NO: 2488802 - RNA, 19 nt, Homo sapiens
  misc_RNA (1)...(19): siRNA sense strand
acgagauccuuauggaaau

SEQ ID NO: 2488803 - RNA, 19 nt, Homo sapiens
  misc_RNA (1)...(19): siRNA sense strand
gcucaaagaaucuggugca

SEQ ID NO: 2488804 - RNA, 19 nt, Homo sapiens
  misc_RNA (1)...(19): siRNA sense strand
aaggaaacccaguggcuuu

SEQ ID NO: 2488805 - RNA, 19 nt, Homo sapiens
  misc_RNA (1)...(19): siRNA sense strand
uugcaagaccagacaguau

SEQ ID NO: 2488806 - RNA, 19 nt, Homo sapiens
  misc_RNA (1)...(19): siRNA sense strand
gcagaauaucuaggagcaa

SEQ ID NO: 2488807 - RNA, 19 nt, Homo sapiens
  misc_RNA (1)...(19): siRNA sense strand
ggaaaaugugaacuagaaa

SEQ ID NO: 2488808 - RNA, 19 nt, Homo sapiens
  misc_RNA (1)...(19): siRNA sense strand
caguauguucgaagaccaa

SEQ ID NO: 2488809 - RNA, 19 nt, Homo sapiens
  misc_RNA (1)...(19): siRNA sense strand
cuacaaaagaagagcucau

SEQ ID NO: 2488810 - RNA, 19 nt, Homo sapiens
  misc_RNA (1)...(19): siRNA sense strand
acauaauggcgaauuggua

SEQ ID NO: 2488811 - RNA, 19 nt, Homo sapiens
  misc_RNA (1)...(19): siRNA sense strand
acaaguucugauagugaaa

SEQ ID NO: 2488812 - RNA, 19 nt, Homo sapiens
  misc_RNA (1)...(19): siRNA sense strand
cuucaugggaauaaacauu

SEQ ID NO: 2488813 - RNA, 19 nt, Homo sapiens
  misc_RNA (1)...(19): siRNA sense strand
aggaaaaugugaacuagaa

SEQ ID NO: 2488814 - RNA, 19 nt, Homo sapiens
  misc_RNA (1)...(19): siRNA sense strand
gcuucugcgucaugguauu

SEQ ID NO: 2488815 - RNA, 19 nt, Homo sapiens
  misc_RNA (1)...(19): siRNA sense strand
cuguacaagaagggauaaa

SEQ ID NO: 2488816 - RNA, 19 nt, Homo sapiens
  misc_RNA (1)...(19): siRNA sense strand
aaaccgguauguagggaga

SEQ ID NO: 2488817 - RNA, 19 nt, Homo sapiens
  misc_RNA (1)...(19): siRNA sense strand
guuaagacaacuugguguu

SEQ ID NO: 2488818 - RNA, 19 nt, Homo sapiens
  misc_RNA (1)...(19): siRNA sense strand
ucaaagaaucuggugcaaa

SEQ ID NO: 2488819 - RNA, 19 nt, Homo sapiens
  misc_RNA (1)...(19): siRNA sense strand
auaauggcgaauugguaaa

SEQ ID NO: 2488820 - RNA, 19 nt, Homo sapiens
  misc_RNA (1)...(19): siRNA sense strand
gugcaagauauuaccguga

SEQ ID NO: 2488821 - RNA, 19 nt, Homo sapiens
  misc_RNA (1)...(19): siRNA sense strand
ugccaauaaaccagaauuu

SEQ ID NO: 2488822 - RNA, 19 nt, Homo sapiens
  misc_RNA (1)...(19): siRNA sense strand
agggaaugggucuuguaaa

SEQ ID NO: 2488823 - RNA, 19 nt, Homo sapiens
  misc_RNA (1)...(19): siRNA sense strand
ugguaaaugcugcucgauu

SEQ ID NO: 2488824 - RNA, 19 nt, Homo sapiens
  misc_RNA (1)...(19): siRNA sense strand
agguaugccaccacaggaa

SEQ ID NO: 2488825 - RNA, 19 nt, Homo sapiens
  misc_RNA (1)...(19): siRNA sense strand
augcauuggucgucuuauu

SEQ ID NO: 2488826 - RNA, 19 nt, Homo sapiens
  misc_RNA (1)...(19): siRNA sense strand
cgauauuaugauccaagaa

SEQ ID NO: 2488827 - RNA, 19 nt, Homo sapiens
  misc_RNA (1)...(19): siRNA sense strand
uggaaauggucuggaaugu

SEQ ID NO: 2488828 - RNA, 19 nt, Homo sapiens
  misc_RNA (1)...(19): siRNA sense strand
gugcaaaagagguacacau

SEQ ID NO: 2488829 - RNA, 19 nt, Homo sapiens
  misc_RNA (1)...(19): siRNA sense strand
gcugcucgauuaaggaaaa

SEQ ID NO: 2488830 - RNA, 19 nt, Homo sapiens
  misc_RNA (1)...(19): siRNA sense strand
caaacaugagguuaagaca

SEQ ID NO: 2488831 - RNA, 19 nt, Homo sapiens
  misc_RNA (1)...(19): siRNA sense strand
gguuaagacaacuuggugu

SEQ ID NO: 2488832 - RNA, 19 nt, Homo sapiens
  misc_RNA (1)...(19): siRNA sense strand
cugcauaugaaguggaaga

SEQ ID NO: 2488833 - RNA, 19 nt, Homo sapiens
  misc_RNA (1)...(19): siRNA sense strand
ccaaggagauagugcggau

SEQ ID NO: 2488834 - RNA, 19 nt, Homo sapiens
  misc_RNA (1)...(19): siRNA sense strand
ccagaauggcugaggagca

SEQ ID NO: 2488835 - RNA, 19 nt, Homo sapiens
  misc_RNA (1)...(19): siRNA sense strand
gcguggaggaguugguaga

SEQ ID NO: 2488836 - RNA, 19 nt, Homo sapiens
  misc_RNA (1)...(19): siRNA sense strand
aggaagagcagaggaggaa

SEQ ID NO: 2488837 - RNA, 19 nt, Homo sapiens
  misc_RNA (1)...(19): siRNA sense strand
cgaacagauuucaacaaaa

SEQ ID NO: 2488838 - RNA, 19 nt, Homo sapiens
  misc_RNA (1)...(19): siRNA sense strand
ucuuggaguuugagaaaau

SEQ ID NO: 2488839 - RNA, 19 nt, Homo sapiens
  misc_RNA (1)...(19): siRNA sense strand
gcagauuccggaugggaga

SEQ ID NO: 2488840 - RNA, 19 nt, Homo sapiens
  misc_RNA (1)...(19): siRNA sense strand
acuucaagacgcagaauga

SEQ ID NO: 2488841 - RNA, 19 nt, Homo sapiens
  misc_RNA (1)...(19): siRNA sense strand
ggaugggagagcugugcaa

SEQ ID NO: 2488842 - RNA, 19 nt, Homo sapiens
  misc_RNA (1)...(19): siRNA sense strand
gugcaaaguggccgaggau

SEQ ID NO: 2488843 - RNA, 19 nt, Homo sapiens
  misc_RNA (1)...(19): siRNA sense strand
aaggaagagcagaggagga

SEQ ID NO: 2488844 - RNA, 19 nt, Homo sapiens
  misc_RNA (1)...(19): siRNA sense strand
gagcacgagcagacggaca

SEQ ID NO: 2488845 - RNA, 19 nt, Homo sapiens
  misc_RNA (1)...(19): siRNA sense strand
ugguagaguugcuggugga

SEQ ID NO: 2488846 - RNA, 19 nt, Homo sapiens
  misc_RNA (1)...(19): siRNA sense strand
ugggcgagacuguggagaa

SEQ ID NO: 2488847 - RNA, 19 nt, Homo sapiens
  misc_RNA (1)...(19): siRNA sense strand
cugcagagagccaggacca

SEQ ID NO: 2488848 - RNA, 19 nt, Homo sapiens
  misc_RNA (1)...(19): siRNA sense strand
ccaaggagauggugccucu

SEQ ID NO: 2488849 - RNA, 19 nt, Homo sapiens
  misc_RNA (1)...(19): siRNA sense strand
cugacuuccucaugcacaa

SEQ ID NO: 2488850 - RNA, 19 nt, Homo sapiens
  misc_RNA (1)...(19): siRNA sense strand
ugaccguggccgaggacuu

SEQ ID NO: 2488851 - RNA, 19 nt, Homo sapiens
  misc_RNA (1)...(19): siRNA sense strand
ccuggagauagaaggguuu

SEQ ID NO: 2488852 - RNA, 19 nt, Homo sapiens
  misc_RNA (1)...(19): siRNA sense strand
auuugaagaagucgaggaa

SEQ ID NO: 2488853 - RNA, 19 nt, Homo sapiens
  misc_RNA (1)...(19): siRNA sense strand
ccaaggagagcgaacgcau

SEQ ID NO: 2488854 - RNA, 19 nt, Homo sapiens
  misc_RNA (1)...(19): siRNA sense strand
acuucuuccuggagauaga

SEQ ID NO: 2488855 - RNA, 19 nt, Homo sapiens
  misc_RNA (1)...(19): siRNA sense strand
ggaagagcagaggaggaaa

SEQ ID NO: 2488856 - RNA, 19 nt, Homo sapiens
  misc_RNA (1)...(19): siRNA sense strand
uggaaaucacugucuacaa

SEQ ID NO: 2488857 - RNA, 19 nt, Homo sapiens
  misc_RNA (1)...(19): siRNA sense strand
cugaugaaggccuuguuaa

SEQ ID NO: 2488858 - RNA, 19 nt, Homo sapiens
  misc_RNA (1)...(19): siRNA sense strand
aguacacagaggaggccua

SEQ ID NO: 2488859 - RNA, 19 nt, Homo sapiens
  misc_RNA (1)...(19): siRNA sense strand
ccaaagacaacaaggacug

SEQ ID NO: 2488860 - RNA, 19 nt, Homo sapiens
  misc_RNA (1)...(19): siRNA sense strand
ggacugaauggaagacgca

SEQ ID NO: 2488861 - RNA, 19 nt, Homo sapiens
  misc_RNA (1)...(19): siRNA sense strand
gguugaaacaagagagaga

SEQ ID NO: 2488862 - RNA, 19 nt, Homo sapiens
  misc_RNA (1)...(19): siRNA sense strand
uggagaaagaagagaacaa

SEQ ID NO: 2488863 - RNA, 19 nt, Homo sapiens
  misc_RNA (1)...(19): siRNA sense strand
uggcagaauucuagcaaau

SEQ ID NO: 2488864 - RNA, 19 nt, Homo sapiens
  misc_RNA (1)...(19): siRNA sense strand
gagaaaacccagagccaaa

SEQ ID NO: 2488865 - RNA, 19 nt, Homo sapiens
  misc_RNA (1)...(19): siRNA sense strand
ggacaagaagcuggagaaa

SEQ ID NO: 2488866 - RNA, 19 nt, Homo sapiens
  misc_RNA (1)...(19): siRNA sense strand
cgaucauccuccagacaaa

SEQ ID NO: 2488867 - RNA, 19 nt, Homo sapiens
  misc_RNA (1)...(19): siRNA sense strand
cugcagagccugaaggaga

SEQ ID NO: 2488868 - RNA, 19 nt, Homo sapiens
  misc_RNA (1)...(19): siRNA sense strand
gguuaaggcggcucagaaa

SEQ ID NO: 2488869 - RNA, 19 nt, Homo sapiens
  misc_RNA (1)...(19): siRNA sense strand
cgacuaaagcaccuggaaa

SEQ ID NO: 2488870 - RNA, 19 nt, Homo sapiens
  misc_RNA (1)...(19): siRNA sense strand
ccuaaugaaaggacugaaa

SEQ ID NO: 2488871 - RNA, 19 nt, Homo sapiens
  misc_RNA (1)...(19): siRNA sense strand
gcuuuaaaccucuggaaaa

SEQ ID NO: 2488872 - RNA, 19 nt, Homo sapiens
  misc_RNA (1)...(19): siRNA sense strand
aagcggaguuccagggcua

SEQ ID NO: 2488873 - RNA, 19 nt, Homo sapiens
  misc_RNA (1)...(19): siRNA sense strand
cgggauuggccaugaguuu

SEQ ID NO: 2488874 - RNA, 19 nt, Homo sapiens
  misc_RNA (1)...(19): siRNA sense strand
guucaagggaagaggaagu

SEQ ID NO: 2488875 - RNA, 19 nt, Homo sapiens
  misc_RNA (1)...(19): siRNA sense strand
aaaccaaaauguagaggaa

SEQ ID NO: 2488876 - RNA, 19 nt, Homo sapiens
  misc_RNA (1)...(19): siRNA sense strand
gugaauaaagaggaagaaa

SEQ ID NO: 2488877 - RNA, 19 nt, Homo sapiens
  misc_RNA (1)...(19): siRNA sense strand
gcuucaacucccagaacaa

SEQ ID NO: 2488878 - RNA, 19 nt, Homo sapiens
  misc_RNA (1)...(19): siRNA sense strand
aagucaaguucaugggaga

SEQ ID NO: 2488879 - RNA, 19 nt, Homo sapiens
  misc_RNA (1)...(19): siRNA sense strand
cugaaaguagagagaagaa

SEQ ID NO: 2488880 - RNA, 19 nt, Homo sapiens
  misc_RNA (1)...(19): siRNA sense strand
cagaguaacagaagcgaga

SEQ ID NO: 2488881 - RNA, 19 nt, Homo sapiens
  misc_RNA (1)...(19): siRNA sense strand
cuauugaaccugugaugaa

SEQ ID NO: 2488882 - RNA, 19 nt, Homo sapiens
  misc_RNA (1)...(19): siRNA sense strand
cagcugaagaagugucuaa

SEQ ID NO: 2488883 - RNA, 19 nt, Homo sapiens
  misc_RNA (1)...(19): siRNA sense strand
aagaagagaacaagagguu

SEQ ID NO: 2488884 - RNA, 19 nt, Homo sapiens
  misc_RNA (1)...(19): siRNA sense strand
aggugugaauaaagaggaa

SEQ ID NO: 2488885 - RNA, 19 nt, Homo sapiens
  misc_RNA (1)...(19): siRNA sense strand
gcugagacauccaaggaga

SEQ ID NO: 2488886 - RNA, 19 nt, Homo sapiens
  misc_RNA (1)...(19): siRNA sense strand
aggaaagguugaaacaaga

SEQ ID NO: 2488887 - RNA, 19 nt, Homo sapiens
  misc_RNA (1)...(19): siRNA sense strand
guaacaaguaguucagcua

SEQ ID NO: 2488888 - RNA, 19 nt, Homo sapiens
  misc_RNA (1)...(19): siRNA sense strand
ugucacagcccgcaagaaa

SEQ ID NO: 2488889 - RNA, 19 nt, Homo sapiens
  misc_RNA (1)...(19): siRNA sense strand
gguuaaaagucaaguucau

SEQ ID NO: 2488890 - RNA, 19 nt, Homo sapiens
  misc_RNA (1)...(19): siRNA sense strand
gugugaauaaagaggaaga

SEQ ID NO: 2488891 - RNA, 19 nt, Homo sapiens
  misc_RNA (1)...(19): siRNA sense strand
ccugagaaggagagguaca

SEQ ID NO: 2488892 - RNA, 19 nt, Homo sapiens
  misc_RNA (1)...(19): siRNA sense strand
gaacucugguuuugggaaa

SEQ ID NO: 2488893 - RNA, 19 nt, Homo sapiens
  misc_RNA (1)...(19): siRNA sense strand
gggcugaagaggaaagguu

SEQ ID NO: 2488894 - RNA, 19 nt, Homo sapiens
  misc_RNA (1)...(19): siRNA sense strand
gagaaagaagagaacaaga

SEQ ID NO: 2488895 - RNA, 19 nt, Homo sapiens
  misc_RNA (1)...(19): siRNA sense strand
cugcuugaccagagagaca

SEQ ID NO: 2488896 - RNA, 19 nt, Homo sapiens
  misc_RNA (1)...(19): siRNA sense strand
cauccuaagagaaguacaa

SEQ ID NO: 2488897 - RNA, 19 nt, Homo sapiens
  misc_RNA (1)...(19): siRNA sense strand
uggcagaggaggacgugua

SEQ ID NO: 2488898 - RNA, 19 nt, Homo sapiens
  misc_RNA (1)...(19): siRNA sense strand
uggacaagaagcuggagaa

SEQ ID NO: 2488899 - RNA, 19 nt, Homo sapiens
  misc_RNA (1)...(19): siRNA sense strand
auaaagaggaagaaacuga

SEQ ID NO: 2488900 - RNA, 19 nt, Homo sapiens
  misc_RNA (1)...(19): siRNA sense strand
ugauggaguuugugaggga

SEQ ID NO: 2488901 - RNA, 19 nt, Homo sapiens
  misc_RNA (1)...(19): siRNA sense strand
gaaagugaccacauggcua

SEQ ID NO: 2488902 - RNA, 19 nt, Homo sapiens
  misc_RNA (1)...(19): siRNA sense strand
gcuagaaagaaggggaaaa

SEQ ID NO: 2488903 - RNA, 19 nt, Homo sapiens
  misc_RNA (1)...(19): siRNA sense strand
ggacugaccagguggacca

SEQ ID NO: 2488904 - RNA, 19 nt, Homo sapiens
  misc_RNA (1)...(19): siRNA sense strand
aaaugaagagugaggacau

SEQ ID NO: 2488905 - RNA, 19 nt, Homo sapiens
  misc_RNA (1)...(19): siRNA sense strand
accaaaauguagaggaaga

SEQ ID NO: 2488906 - RNA, 19 nt, Homo sapiens
  misc_RNA (1)...(19): siRNA sense strand
agacauccaaggagaagua

SEQ ID NO: 2488907 - RNA, 19 nt, Homo sapiens
  misc_RNA (1)...(19): siRNA sense strand
ggacaaaacaguaccuuau

SEQ ID NO: 2488908 - RNA, 19 nt, Homo sapiens
  misc_RNA (1)...(19): siRNA sense strand
agacauccuaagagaagua

SEQ ID NO: 2488909 - RNA, 19 nt, Homo sapiens
  misc_RNA (1)...(19): siRNA sense strand
gaagggagcaggagaggca

SEQ ID NO: 2488910 - RNA, 19 nt, Homo sapiens
  misc_RNA (1)...(19): siRNA sense strand
ugaaaggacugaaaaggaa

SEQ ID NO: 2488911 - RNA, 19 nt, Homo sapiens
  misc_RNA (1)...(19): siRNA sense strand
cggccuugcugcagcucaa

SEQ ID NO: 2488912 - RNA, 19 nt, Homo sapiens
  misc_RNA (1)...(19): siRNA sense strand
gcugggaaacacaggauuu

SEQ ID NO: 2488913 - RNA, 19 nt, Homo sapiens
  misc_RNA (1)...(19): siRNA sense strand
agaaugcaguagagacaga

SEQ ID NO: 2488914 - RNA, 19 nt, Homo sapiens
  misc_RNA (1)...(19): siRNA sense strand
ccacagagugacaugauga

SEQ ID NO: 2488915 - RNA, 19 nt, Homo sapiens
  misc_RNA (1)...(19): siRNA sense strand
gauccggaguucaagggaa

SEQ ID NO: 2488916 - RNA, 19 nt, Homo sapiens
  misc_RNA (1)...(19): siRNA sense strand
cuacagcgguggagggaag

SEQ ID NO: 2488917 - RNA, 19 nt, Homo sapiens
  misc_RNA (1)...(19): siRNA sense strand
ugagaaggaaguagaagau

SEQ ID NO: 2488918 - RNA, 19 nt, Homo sapiens
  misc_RNA (1)...(19): siRNA sense strand
uugcuaaagugcagcgcau

SEQ ID NO: 2488919 - RNA, 19 nt, Homo sapiens
  misc_RNA (1)...(19): siRNA sense strand
ggggaaaaguuugcauaaa

SEQ ID NO: 2488920 - RNA, 19 nt, Homo sapiens
  misc_RNA (1)...(19): siRNA sense strand
ccaggaagucgguguuuau

SEQ ID NO: 2488921 - RNA, 19 nt, Homo sapiens
  misc_RNA (1)...(19): siRNA sense strand
gagcgaagggagcaggaga

SEQ ID NO: 2488922 - RNA, 19 nt, Homo sapiens
  misc_RNA (1)...(19): siRNA sense strand
agaugaaggcucaguggau

SEQ ID NO: 2488923 - RNA, 19 nt, Homo sapiens
  misc_RNA (1)...(19): siRNA sense strand
gaguucaagggaagaggaa

SEQ ID NO: 2488924 - RNA, 19 nt, Homo sapiens
  misc_RNA (1)...(19): siRNA sense strand
ugaauaaagaggaagaaac

SEQ ID NO: 2488925 - RNA, 19 nt, Homo sapiens
  misc_RNA (1)...(19): siRNA sense strand
aggaagaaacugaaaguag

SEQ ID NO: 2488926 - RNA, 19 nt, Homo sapiens
  misc_RNA (1)...(19): siRNA sense strand
gagagguacaugcgggaga

SEQ ID NO: 2488927 - RNA, 19 nt, Homo sapiens
  misc_RNA (1)...(19): siRNA sense strand
gcugaagaggaaagguuga

SEQ ID NO: 2488928 - RNA, 19 nt, Homo sapiens
  misc_RNA (1)...(19): siRNA sense strand
gaacaagccagguugcaga

SEQ ID NO: 2488929 - RNA, 19 nt, Homo sapiens
  misc_RNA (1)...(19): siRNA sense strand
gaagaggagcacagagugu

SEQ ID NO: 2488930 - RNA, 19 nt, Homo sapiens
  misc_RNA (1)...(19): siRNA sense strand
uggcacaggaagaaaauaa

SEQ ID NO: 2488931 - RNA, 19 nt, Homo sapiens
  misc_RNA (1)...(19): siRNA sense strand
agggagacauccuaagaga

SEQ ID NO: 2488932 - RNA, 19 nt, Homo sapiens
  misc_RNA (1)...(19): siRNA sense strand
ugaagaagugucuaaggaa

SEQ ID NO: 2488933 - RNA, 19 nt, Homo sapiens
  misc_RNA (1)...(19): siRNA sense strand
gagcaugggugguaaagua

SEQ ID NO: 2488934 - RNA, 19 nt, Homo sapiens
  misc_RNA (1)...(19): siRNA sense strand
gcgaaaacgugaagagcga

SEQ ID NO: 2488935 - RNA, 19 nt, Homo sapiens
  misc_RNA (1)...(19): siRNA sense strand
aggaagacuuaaaggcaga

SEQ ID NO: 2488936 - RNA, 19 nt, Homo sapiens
  misc_RNA (1)...(19): siRNA sense strand
gcgagagaucaaagaaaga

SEQ ID NO: 2488937 - RNA, 19 nt, Homo sapiens
  misc_RNA (1)...(19): siRNA sense strand
caguaaauugucagccaaa

SEQ ID NO: 2488938 - RNA, 19 nt, Homo sapiens
  misc_RNA (1)...(19): siRNA sense strand
ugucaaaauaccagagcaa

SEQ ID NO: 2488939 - RNA, 19 nt, Homo sapiens
  misc_RNA (1)...(19): siRNA sense strand
ggagagcaugggugguaaa

SEQ ID NO: 2488940 - RNA, 19 nt, Homo sapiens
  misc_RNA (1)...(19): siRNA sense strand
gagaagagcaugagagagc

SEQ ID NO: 2488941 - RNA, 19 nt, Homo sapiens
  misc_RNA (1)...(19): siRNA sense strand
cggagauaacggaggagau

SEQ ID NO: 2488942 - RNA, 19 nt, Homo sapiens
  misc_RNA (1)...(19): siRNA sense strand
ccgcaaagugaacgagcuu

SEQ ID NO: 2488943 - RNA, 19 nt, Homo sapiens
  misc_RNA (1)...(19): siRNA sense strand
agaaaugggagaugaaaau

SEQ ID NO: 2488944 - RNA, 19 nt, Homo sapiens
  misc_RNA (1)...(19): siRNA sense strand
acagaaaauugcagaacau

SEQ ID NO: 2488945 - RNA, 19 nt, Homo sapiens
  misc_RNA (1)...(19): siRNA sense strand
gagagaucaaagaaagaau

SEQ ID NO: 2488946 - RNA, 19 nt, Homo sapiens
  misc_RNA (1)...(19): siRNA sense strand
aagaaaugggagaugaaaa

SEQ ID NO: 2488947 - RNA, 19 nt, Homo sapiens
  misc_RNA (1)...(19): siRNA sense strand
uugcagaacaucggagaaa

SEQ ID NO: 2488948 - RNA, 19 nt, Homo sapiens
  misc_RNA (1)...(19): siRNA sense strand
aagaaagaauagaacgagu

SEQ ID NO: 2488949 - RNA, 19 nt, Homo sapiens
  misc_RNA (1)...(19): siRNA sense strand
ucgagaagagcaugagaga

SEQ ID NO: 2488950 - RNA, 19 nt, Homo sapiens
  misc_RNA (1)...(19): siRNA sense strand
aagaaaauaccaaggaaga

SEQ ID NO: 2488951 - RNA, 19 nt, Homo sapiens
  misc_RNA (1)...(19): siRNA sense strand
ugaaauucuuagugaucca

SEQ ID NO: 2488952 - RNA, 19 nt, Homo sapiens
  misc_RNA (1)...(19): siRNA sense strand
ggaggaagacuuaaaggca

SEQ ID NO: 2488953 - RNA, 19 nt, Homo sapiens
  misc_RNA (1)...(19): siRNA sense strand
aggaaagugaucuagaaau

SEQ ID NO: 2488954 - RNA, 19 nt, Homo sapiens
  misc_RNA (1)...(19): siRNA sense strand
agauaacggaggagaugau

SEQ ID NO: 2488955 - RNA, 19 nt, Homo sapiens
  misc_RNA (1)...(19): siRNA sense strand
ucuuagugauccagagguu

SEQ ID NO: 2488956 - RNA, 19 nt, Homo sapiens
  misc_RNA (1)...(19): siRNA sense strand
agguggaggaagacuuaaa

SEQ ID NO: 2488957 - RNA, 19 nt, Homo sapiens
  misc_RNA (1)...(19): siRNA sense strand
agaugaaaaugcggagaua

SEQ ID NO: 2488958 - RNA, 19 nt, Homo sapiens
  misc_RNA (1)...(19): siRNA sense strand
ggaagaagccagacgacag

SEQ ID NO: 2488959 - RNA, 19 nt, Homo sapiens
  misc_RNA (1)...(19): siRNA sense strand
cggagaaaguaugagcgaa

SEQ ID NO: 2488960 - RNA, 19 nt, Homo sapiens
  misc_RNA (1)...(19): siRNA sense strand
guuaagaaggcucgagaag

SEQ ID NO: 2488961 - RNA, 19 nt, Homo sapiens
  misc_RNA (1)...(19): siRNA sense strand
ccugcuacucagaaagcua

SEQ ID NO: 2488962 - RNA, 19 nt, Homo sapiens
  misc_RNA (1)...(19): siRNA sense strand
aagugaggaaagugaucua

SEQ ID NO: 2488963 - RNA, 19 nt, Homo sapiens
  misc_RNA (1)...(19): siRNA sense strand
gugacagagccauugaaau

SEQ ID NO: 2488964 - RNA, 19 nt, Homo sapiens
  misc_RNA (1)...(19): siRNA sense strand
agaacaucggagaaaguau

SEQ ID NO: 2488965 - RNA, 19 nt, Homo sapiens
  misc_RNA (1)...(19): siRNA sense strand
aggaaugccuggaauggga

SEQ ID NO: 2488966 - RNA, 19 nt, Homo sapiens
  misc_RNA (1)...(19): siRNA sense strand
acgugaagagcgagagauc

SEQ ID NO: 2488967 - RNA, 19 nt, Homo sapiens
  misc_RNA (1)...(19): siRNA sense strand
cuuaaaggcagacgaacca

SEQ ID NO: 2488968 - RNA, 19 nt, Homo sapiens
  misc_RNA (1)...(19): siRNA sense strand
agcccuaaaugauggugaa

SEQ ID NO: 2488969 - RNA, 19 nt, Homo sapiens
  misc_RNA (1)...(19): siRNA sense strand
guggagagcauggguggua

SEQ ID NO: 2488970 - RNA, 19 nt, Homo sapiens
  misc_RNA (1)...(19): siRNA sense strand
gcugauacccgaagcgaca

SEQ ID NO: 2488971 - RNA, 19 nt, Homo sapiens
  misc_RNA (1)...(19): siRNA sense strand
cagcccagacagagaguga

SEQ ID NO: 2488972 - RNA, 19 nt, Homo sapiens
  misc_RNA (1)...(19): siRNA sense strand
ccagacagagagugagcca

SEQ ID NO: 2488973 - RNA, 19 nt, Homo sapiens
  misc_RNA (1)...(19): siRNA sense strand
gcugauacccgaagcgaca

SEQ ID NO: 2488974 - RNA, 19 nt, Homo sapiens
  misc_RNA (1)...(19): siRNA sense strand
cagcccagacagagaguga

SEQ ID NO: 2488975 - RNA, 19 nt, Homo sapiens
  misc_RNA (1)...(19): siRNA sense strand
ccagacagagagugagcca

SEQ ID NO: 2488976 - RNA, 19 nt, Homo sapiens
  misc_RNA (1)...(19): siRNA sense strand
aaagaaagguggugcagga

SEQ ID NO: 2488977 - RNA, 19 nt, Homo sapiens
  misc_RNA (1)...(19): siRNA sense strand
gucuuaaaccagagagcua

SEQ ID NO: 2488978 - RNA, 19 nt, Homo sapiens
  misc_RNA (1)...(19): siRNA sense strand
cuaaagguggaaagcguaa

SEQ ID NO: 2488979 - RNA, 19 nt, Homo sapiens
  misc_RNA (1)...(19): siRNA sense strand
agguggugcaggaggcaaa

SEQ ID NO: 2488980 - RNA, 19 nt, Homo sapiens
  misc_RNA (1)...(19): siRNA sense strand
gggacaguaaugagcacaa

SEQ ID NO: 2488981 - RNA, 19 nt, Homo sapiens
  misc_RNA (1)...(19): siRNA sense strand
cgaaggagauggaggucgu

SEQ ID NO: 2488982 - RNA, 19 nt, Homo sapiens
  misc_RNA (1)...(19): siRNA sense strand
guuuauugcuagagcuguu

SEQ ID NO: 2488983 - RNA, 19 nt, Homo sapiens
  misc_RNA (1)...(19): siRNA sense strand
gaacauugccuuaaggaac

SEQ ID NO: 2488984 - RNA, 19 nt, Homo sapiens
  misc_RNA (1)...(19): siRNA sense strand
ccaaaugaaaagagguuau

SEQ ID NO: 2488985 - RNA, 19 nt, Homo sapiens
  misc_RNA (1)...(19): siRNA sense strand
caaacaacucagagaucuu

SEQ ID NO: 2488986 - RNA, 19 nt, Homo sapiens
  misc_RNA (1)...(19): siRNA sense strand
augaaauuccggacauuaa

SEQ ID NO: 2488987 - RNA, 19 nt, Homo sapiens
  misc_RNA (1)...(19): siRNA sense strand
ugucaaucaccuuguuaaa

SEQ ID NO: 2488988 - RNA, 19 nt, Homo sapiens
  misc_RNA (1)...(19): siRNA sense strand
uggaaagcguaaagauagu

SEQ ID NO: 2488989 - RNA, 19 nt, Homo sapiens
  misc_RNA (1)...(19): siRNA sense strand
aaagagguuaugagagaau

SEQ ID NO: 2488990 - RNA, 19 nt, Homo sapiens
  misc_RNA (1)...(19): siRNA sense strand
aggagguggaugugaaaga

SEQ ID NO: 2488991 - RNA, 19 nt, Homo sapiens
  misc_RNA (1)...(19): siRNA sense strand
cgcccuuagaaguggauua

SEQ ID NO: 2488992 - RNA, 19 nt, Homo sapiens
  misc_RNA (1)...(19): siRNA sense strand
ugcuagagcuguuggagau

SEQ ID NO: 2488993 - RNA, 19 nt, Homo sapiens
  misc_RNA (1)...(19): siRNA sense strand
augaaagggcauuugagaa

SEQ ID NO: 2488994 - RNA, 19 nt, Homo sapiens
  misc_RNA (1)...(19): siRNA sense strand
ugaaaugaaaaguggagua

SEQ ID NO: 2488995 - RNA, 19 nt, Homo sapiens
  misc_RNA (1)...(19): siRNA sense strand
ccauuaacgaagcuagaau

SEQ ID NO: 2488996 - RNA, 19 nt, Homo sapiens
  misc_RNA (1)...(19): siRNA sense strand
ccuuagcauuggaggggaa

SEQ ID NO: 2488997 - RNA, 19 nt, Homo sapiens
  misc_RNA (1)...(19): siRNA sense strand
gaguaugucuaaaggugga

SEQ ID NO: 2488998 - RNA, 19 nt, Homo sapiens
  misc_RNA (1)...(19): siRNA sense strand
gcguaaagauagugugugg

SEQ ID NO: 2488999 - RNA, 19 nt, Homo sapiens
  misc_RNA (1)...(19): siRNA sense strand
ggauacuccuagagcacca

SEQ ID NO: 2489000 - RNA, 19 nt, Homo sapiens
  misc_RNA (1)...(19): siRNA sense strand
gucuaaagguggaaagcgu

SEQ ID NO: 2489001 - RNA, 19 nt, Homo sapiens
  misc_RNA (1)...(19): siRNA sense strand
aaggcuagucauagagaga

SEQ ID NO: 2489002 - RNA, 19 nt, Homo sapiens
  misc_RNA (1)...(19): siRNA sense strand
ggucagcgacagugggagu

SEQ ID NO: 2489003 - RNA, 19 nt, Homo sapiens
  misc_RNA (1)...(19): siRNA sense strand
agcagauacugaauguaaa

SEQ ID NO: 2489004 - RNA, 19 nt, Homo sapiens
  misc_RNA (1)...(19): siRNA sense strand
ggggaaggcuagucauaga

SEQ ID NO: 2489005 - RNA, 19 nt, Homo sapiens
  misc_RNA (1)...(19): siRNA sense strand
ccaaccaguccaaagggaa

SEQ ID NO: 2489006 - RNA, 19 nt, Homo sapiens
  misc_RNA (1)...(19): siRNA sense strand
augaugaugaccaggagaa

SEQ ID NO: 2489007 - RNA, 19 nt, Homo sapiens
  misc_RNA (1)...(19): siRNA sense strand
ccuuaaggaacuggaagua

SEQ ID NO: 2489008 - RNA, 19 nt, Homo sapiens
  misc_RNA (1)...(19): siRNA sense strand
aaugaaaaguggaguacca

SEQ ID NO: 2489009 - RNA, 19 nt, Homo sapiens
  misc_RNA (1)...(19): siRNA sense strand
ugagaagacuuuaacacca

SEQ ID NO: 2489010 - RNA, 19 nt, Homo sapiens
  misc_RNA (1)...(19): siRNA sense strand
gggccaguuuauugcuaga

SEQ ID NO: 2489011 - RNA, 19 nt, Homo sapiens
  misc_RNA (1)...(19): siRNA sense strand
agagguuaugagagaauuu

SEQ ID NO: 2489012 - RNA, 19 nt, Homo sapiens
  misc_RNA (1)...(19): siRNA sense strand
acucugugcuggagcgguu

SEQ ID NO: 2489013 - RNA, 19 nt, Homo sapiens
  misc_RNA (1)...(19): siRNA sense strand
gguuuguagaagaauguuu

SEQ ID NO: 2489014 - RNA, 19 nt, Homo sapiens
  misc_RNA (1)...(19): siRNA sense strand
gagacauaucugaagcuga

SEQ ID NO: 2489015 - RNA, 19 nt, Homo sapiens
  misc_RNA (1)...(19): siRNA sense strand
ugaagaaaaugcugggacu

SEQ ID NO: 2489016 - RNA, 19 nt, Homo sapiens
  misc_RNA (1)...(19): siRNA sense strand
aagcuagaauuaaugccaa

SEQ ID NO: 2489017 - RNA, 19 nt, Homo sapiens
  misc_RNA (1)...(19): siRNA sense strand
ggcuagucauagagagaug

SEQ ID NO: 2489018 - RNA, 19 nt, Homo sapiens
  misc_RNA (1)...(19): siRNA sense strand
cugaauuagcacuggauac

SEQ ID NO: 2489019 - RNA, 19 nt, Homo sapiens
  misc_RNA (1)...(19): siRNA sense strand
ugaacauugccuuaaggaa

SEQ ID NO: 2489020 - RNA, 19 nt, Homo sapiens
  misc_RNA (1)...(19): siRNA sense strand
ccauuacuguagaccaaau

SEQ ID NO: 2489021 - RNA, 19 nt, Homo sapiens
  misc_RNA (1)...(19): siRNA sense strand
aaagaaagguggugcagga

SEQ ID NO: 2489022 - RNA, 19 nt, Homo sapiens
  misc_RNA (1)...(19): siRNA sense strand
gucuuaaaccagagagcua

SEQ ID NO: 2489023 - RNA, 19 nt, Homo sapiens
  misc_RNA (1)...(19): siRNA sense strand
cuaaagguggaaagcguaa

SEQ ID NO: 2489024 - RNA, 19 nt, Homo sapiens
  misc_RNA (1)...(19): siRNA sense strand
agguggugcaggaggcaaa

SEQ ID NO: 2489025 - RNA, 19 nt, Homo sapiens
  misc_RNA (1)...(19): siRNA sense strand
gggacaguaaugagcacaa

SEQ ID NO: 2489026 - RNA, 19 nt, Homo sapiens
  misc_RNA (1)...(19): siRNA sense strand
cgaaggagauggaggucgu

SEQ ID NO: 2489027 - RNA, 19 nt, Homo sapiens
  misc_RNA (1)...(19): siRNA sense strand
guuuauugcuagagcuguu

SEQ ID NO: 2489028 - RNA, 19 nt, Homo sapiens
  misc_RNA (1)...(19): siRNA sense strand
gaacauugccuuaaggaac

SEQ ID NO: 2489029 - RNA, 19 nt, Homo sapiens
  misc_RNA (1)...(19): siRNA sense strand
ccaaaugaaaagagguuau

SEQ ID NO: 2489030 - RNA, 19 nt, Homo sapiens
  misc_RNA (1)...(19): siRNA sense strand
caaacaacucagagaucuu

SEQ ID NO: 2489031 - RNA, 19 nt, Homo sapiens
  misc_RNA (1)...(19): siRNA sense strand
augaaauuccggacauuaa

SEQ ID NO: 2489032 - RNA, 19 nt, Homo sapiens
  misc_RNA (1)...(19): siRNA sense strand
ugucaaucaccuuguuaaa

SEQ ID NO: 2489033 - RNA, 19 nt, Homo sapiens
  misc_RNA (1)...(19): siRNA sense strand
uggaaagcguaaagauagu

SEQ ID NO: 2489034 - RNA, 19 nt, Homo sapiens
  misc_RNA (1)...(19): siRNA sense strand
aaagagguuaugagagaau

SEQ ID NO: 2489035 - RNA, 19 nt, Homo sapiens
  misc_RNA (1)...(19): siRNA sense strand
aggagguggaugugaaaga

SEQ ID NO: 2489036 - RNA, 19 nt, Homo sapiens
  misc_RNA (1)...(19): siRNA sense strand
cgcccuuagaaguggauua

SEQ ID NO: 2489037 - RNA, 19 nt, Homo sapiens
  misc_RNA (1)...(19): siRNA sense strand
ugcuagagcuguuggagau

SEQ ID NO: 2489038 - RNA, 19 nt, Homo sapiens
  misc_RNA (1)...(19): siRNA sense strand
augaaagggcauuugagaa

SEQ ID NO: 2489039 - RNA, 19 nt, Homo sapiens
  misc_RNA (1)...(19): siRNA sense strand
ugaaaugaaaaguggagua

SEQ ID NO: 2489040 - RNA, 19 nt, Homo sapiens
  misc_RNA (1)...(19): siRNA sense strand
ccauuaacgaagcuagaau

SEQ ID NO: 2489041 - RNA, 19 nt, Homo sapiens
  misc_RNA (1)...(19): siRNA sense strand
ccuuagcauuggaggggaa

SEQ ID NO: 2489042 - RNA, 19 nt, Homo sapiens
  misc_RNA (1)...(19): siRNA sense strand
gaguaugucuaaaggugga

SEQ ID NO: 2489043 - RNA, 19 nt, Homo sapiens
  misc_RNA (1)...(19): siRNA sense strand
gcguaaagauagugugugg

SEQ ID NO: 2489044 - RNA, 19 nt, Homo sapiens
  misc_RNA (1)...(19): siRNA sense strand
ggauacuccuagagcacca

SEQ ID NO: 2489045 - RNA, 19 nt, Homo sapiens
  misc_RNA (1)...(19): siRNA sense strand
gucuaaagguggaaagcgu

SEQ ID NO: 2489046 - RNA, 19 nt, Homo sapiens
  misc_RNA (1)...(19): siRNA sense strand
aaggcuagucauagagaga

SEQ ID NO: 2489047 - RNA, 19 nt, Homo sapiens
  misc_RNA (1)...(19): siRNA sense strand
ggucagcgacagugggagu

SEQ ID NO: 2489048 - RNA, 19 nt, Homo sapiens
  misc_RNA (1)...(19): siRNA sense strand
ggggaaggcuagucauaga

SEQ ID NO: 2489049 - RNA, 19 nt, Homo sapiens
  misc_RNA (1)...(19): siRNA sense strand
ccaaccaguccaaagggaa

SEQ ID NO: 2489050 - RNA, 19 nt, Homo sapiens
  misc_RNA (1)...(19): siRNA sense strand
augaugaugaccaggagaa

SEQ ID NO: 2489051 - RNA, 19 nt, Homo sapiens
  misc_RNA (1)...(19): siRNA sense strand
ccuuaaggaacuggaagua

SEQ ID NO: 2489052 - RNA, 19 nt, Homo sapiens
  misc_RNA (1)...(19): siRNA sense strand
aaugaaaaguggaguacca

SEQ ID NO: 2489053 - RNA, 19 nt, Homo sapiens
  misc_RNA (1)...(19): siRNA sense strand
ugagaagacuuuaacacca

SEQ ID NO: 2489054 - RNA, 19 nt, Homo sapiens
  misc_RNA (1)...(19): siRNA sense strand
gggccaguuuauugcuaga

SEQ ID NO: 2489055 - RNA, 19 nt, Homo sapiens
  misc_RNA (1)...(19): siRNA sense strand
agagguuaugagagaauuu

SEQ ID NO: 2489056 - RNA, 19 nt, Homo sapiens
  misc_RNA (1)...(19): siRNA sense strand
acucugugcuggagcgguu

SEQ ID NO: 2489057 - RNA, 19 nt, Homo sapiens
  misc_RNA (1)...(19): siRNA sense strand
gguuuguagaagaauguuu

SEQ ID NO: 2489058 - RNA, 19 nt, Homo sapiens
  misc_RNA (1)...(19): siRNA sense strand
gagacauaucugaagcuga

SEQ ID NO: 2489059 - RNA, 19 nt, Homo sapiens
  misc_RNA (1)...(19): siRNA sense strand
ugaagaaaaugcugggacu

SEQ ID NO: 2489060 - RNA, 19 nt, Homo sapiens
  misc_RNA (1)...(19): siRNA sense strand
aagcuagaauuaaugccaa

SEQ ID NO: 2489061 - RNA, 19 nt, Homo sapiens
  misc_RNA (1)...(19): siRNA sense strand
ggcuagucauagagagaug

SEQ ID NO: 2489062 - RNA, 19 nt, Homo sapiens
  misc_RNA (1)...(19): siRNA sense strand
cugaauuagcacuggauac

SEQ ID NO: 2489063 - RNA, 19 nt, Homo sapiens
  misc_RNA (1)...(19): siRNA sense strand
ugaacauugccuuaaggaa

SEQ ID NO: 2489064 - RNA, 19 nt, Homo sapiens
  misc_RNA (1)...(19): siRNA sense strand
ccauuacuguagaccaaau

SEQ ID NO: 2489065 - RNA, 19 nt, Homo sapiens
  misc_RNA (1)...(19): siRNA sense strand
gugaaagaggaaaggauua

SEQ ID NO: 2489066 - RNA, 19 nt, Homo sapiens
  misc_RNA (1)...(19): siRNA sense strand
acaaacagcuucagggcua

SEQ ID NO: 2489067 - RNA, 19 nt, Homo sapiens
  misc_RNA (1)...(19): siRNA sense strand
ccugaagaaauaagagaaa

SEQ ID NO: 2489068 - RNA, 19 nt, Homo sapiens
  misc_RNA (1)...(19): siRNA sense strand
gugcaauaguggagaaagu

SEQ ID NO: 2489069 - RNA, 19 nt, Homo sapiens
  misc_RNA (1)...(19): siRNA sense strand
ggagggaagcugugggauu

SEQ ID NO: 2489070 - RNA, 19 nt, Homo sapiens
  misc_RNA (1)...(19): siRNA sense strand
guaauaaagaacaggaaca

SEQ ID NO: 2489071 - RNA, 19 nt, Homo sapiens
  misc_RNA (1)...(19): siRNA sense strand
ggcucaaggaccagagaaa

SEQ ID NO: 2489072 - RNA, 19 nt, Homo sapiens
  misc_RNA (1)...(19): siRNA sense strand
gagcuaauaccguggacaa

SEQ ID NO: 2489073 - RNA, 19 nt, Homo sapiens
  misc_RNA (1)...(19): siRNA sense strand
ggguaaacauucaggaucu

SEQ ID NO: 2489074 - RNA, 19 nt, Homo sapiens
  misc_RNA (1)...(19): siRNA sense strand
gcugauagugaaagaggaa

SEQ ID NO: 2489075 - RNA, 19 nt, Homo sapiens
  misc_RNA (1)...(19): siRNA sense strand
ugauaaggaaagugaagaa

SEQ ID NO: 2489076 - RNA, 19 nt, Homo sapiens
  misc_RNA (1)...(19): siRNA sense strand
uguggaggguggagcgaaa

SEQ ID NO: 2489077 - RNA, 19 nt, Homo sapiens
  misc_RNA (1)...(19): siRNA sense strand
ccaagaaaaugcugaggaa

SEQ ID NO: 2489078 - RNA, 19 nt, Homo sapiens
  misc_RNA (1)...(19): siRNA sense strand
ucuuaauguaugagggauu

SEQ ID NO: 2489079 - RNA, 19 nt, Homo sapiens
  misc_RNA (1)...(19): siRNA sense strand
caaagaacagucagagaau

SEQ ID NO: 2489080 - RNA, 19 nt, Homo sapiens
  misc_RNA (1)...(19): siRNA sense strand
cgggagauuuccaggauga

SEQ ID NO: 2489081 - RNA, 19 nt, Homo sapiens
  misc_RNA (1)...(19): siRNA sense strand
cuggauagcaugagacuuu

SEQ ID NO: 2489082 - RNA, 19 nt, Homo sapiens
  misc_RNA (1)...(19): siRNA sense strand
aaacggagucugaggaaaa

SEQ ID NO: 2489083 - RNA, 19 nt, Homo sapiens
  misc_RNA (1)...(19): siRNA sense strand
gugauaacuacauggcaua

SEQ ID NO: 2489084 - RNA, 19 nt, Homo sapiens
  misc_RNA (1)...(19): siRNA sense strand
cugcaaugacugagaaguu

SEQ ID NO: 2489085 - RNA, 19 nt, Homo sapiens
  misc_RNA (1)...(19): siRNA sense strand
guacacagucauuggucaa

SEQ ID NO: 2489086 - RNA, 19 nt, Homo sapiens
  misc_RNA (1)...(19): siRNA sense strand
auaaagaacgacagaccaa

SEQ ID NO: 2489087 - RNA, 19 nt, Homo sapiens
  misc_RNA (1)...(19): siRNA sense strand
ugauugaaauugagagugu

SEQ ID NO: 2489088 - RNA, 19 nt, Homo sapiens
  misc_RNA (1)...(19): siRNA sense strand
agaccaagacaaagcagaa

SEQ ID NO: 2489089 - RNA, 19 nt, Homo sapiens
  misc_RNA (1)...(19): siRNA sense strand
cuccauagugauaaggaaa

SEQ ID NO: 2489090 - RNA, 19 nt, Homo sapiens
  misc_RNA (1)...(19): siRNA sense strand
gggaagaaggccuagacau

SEQ ID NO: 2489091 - RNA, 19 nt, Homo sapiens
  misc_RNA (1)...(19): siRNA sense strand
ggaagaagaggcuggcaca

SEQ ID NO: 2489092 - RNA, 19 nt, Homo sapiens
  misc_RNA (1)...(19): siRNA sense strand
gcauguuggucuuuggaga

SEQ ID NO: 2489093 - RNA, 19 nt, Homo sapiens
  misc_RNA (1)...(19): siRNA sense strand
ccguaauaaagaacaggaa

SEQ ID NO: 2489094 - RNA, 19 nt, Homo sapiens
  misc_RNA (1)...(19): siRNA sense strand
gagaaguuaaacaugguua

SEQ ID NO: 2489095 - RNA, 19 nt, Homo sapiens
  misc_RNA (1)...(19): siRNA sense strand
uggaauaugaagaugauga

SEQ ID NO: 2489096 - RNA, 19 nt, Homo sapiens
  misc_RNA (1)...(19): siRNA sense strand
uggaauucauacaccaaua

SEQ ID NO: 2489097 - RNA, 19 nt, Homo sapiens
  misc_RNA (1)...(19): siRNA sense strand
uggagaaucugguggcuca

SEQ ID NO: 2489098 - RNA, 19 nt, Homo sapiens
  misc_RNA (1)...(19): siRNA sense strand
ggucuuuggagaugaaaca

SEQ ID NO: 2489099 - RNA, 19 nt, Homo sapiens
  misc_RNA (1)...(19): siRNA sense strand
agaacauggcucagaugaa

SEQ ID NO: 2489100 - RNA, 19 nt, Homo sapiens
  misc_RNA (1)...(19): siRNA sense strand
caaaaguaugugauggaaa

SEQ ID NO: 2489101 - RNA, 19 nt, Homo sapiens
  misc_RNA (1)...(19): siRNA sense strand
agaaagucauguuugguau

SEQ ID NO: 2489102 - RNA, 19 nt, Homo sapiens
  misc_RNA (1)...(19): siRNA sense strand
agugaaagaggaaaggauu

SEQ ID NO: 2489103 - RNA, 19 nt, Homo sapiens
  misc_RNA (1)...(19): siRNA sense strand
aggaacacaucuucagcaa

SEQ ID NO: 2489104 - RNA, 19 nt, Homo sapiens
  misc_RNA (1)...(19): siRNA sense strand
gaacaaagaaucaugguac

SEQ ID NO: 2489105 - RNA, 19 nt, Homo sapiens
  misc_RNA (1)...(19): siRNA sense strand
aaacauuaucacaguggua

SEQ ID NO: 2489106 - RNA, 19 nt, Homo sapiens
  misc_RNA (1)...(19): siRNA sense strand
cuggaaugugcuauggaua

SEQ ID NO: 2489107 - RNA, 19 nt, Homo sapiens
  misc_RNA (1)...(19): siRNA sense strand
uggaaugugcuauggauau

SEQ ID NO: 2489108 - RNA, 19 nt, Homo sapiens
  misc_RNA (1)...(19): siRNA sense strand
ccuggagauuuauggagaa

SEQ ID NO: 2489109 - RNA, 19 nt, Homo sapiens
  misc_RNA (1)...(19): siRNA sense strand
gggaauauacuggagaaau

SEQ ID NO: 2489110 - RNA, 19 nt, Homo sapiens
  misc_RNA (1)...(19): siRNA sense strand
cugccagggccguaauaaa

SEQ ID NO: 2489111 - RNA, 19 nt, Homo sapiens
  misc_RNA (1)...(19): siRNA sense strand
uggagaaaguguugauuuu

SEQ ID NO: 2489112 - RNA, 19 nt, Homo sapiens
  misc_RNA (1)...(19): siRNA sense strand
gagcgaaagcagcugaaaa

SEQ ID NO: 2489113 - RNA, 19 nt, Homo sapiens
  misc_RNA (1)...(19): siRNA sense strand
ccugauguuugaagaccaa

SEQ ID NO: 2489114 - RNA, 19 nt, Homo sapiens
  misc_RNA (1)...(19): siRNA sense strand
augaagaucuugaagcuga

SEQ ID NO: 2489115 - RNA, 19 nt, Homo sapiens
  misc_RNA (1)...(19): siRNA sense strand
agaaauugcaucugcuuau

SEQ ID NO: 2489116 - RNA, 19 nt, Homo sapiens
  misc_RNA (1)...(19): siRNA sense strand
ugugauaacuacauggcau

SEQ ID NO: 2489117 - RNA, 19 nt, Homo sapiens
  misc_RNA (1)...(19): siRNA sense strand
ccugauguuuguugauauu

SEQ ID NO: 2489118 - RNA, 19 nt, Homo sapiens
  misc_RNA (1)...(19): siRNA sense strand
gggacaacuuuuacaaauu

SEQ ID NO: 2489119 - RNA, 19 nt, Homo sapiens
  misc_RNA (1)...(19): siRNA sense strand
ucacaggauuauugccauu

SEQ ID NO: 2489120 - RNA, 19 nt, Homo sapiens
  misc_RNA (1)...(19): siRNA sense strand
agaaaaugacaaagccuua

SEQ ID NO: 2489121 - RNA, 19 nt, Homo sapiens
  misc_RNA (1)...(19): siRNA sense strand
gcuacaaaggugugugguu

SEQ ID NO: 2489122 - RNA, 19 nt, Homo sapiens
  misc_RNA (1)...(19): siRNA sense strand
cuggagaaaugcuggcuga

SEQ ID NO: 2489123 - RNA, 19 nt, Homo sapiens
  misc_RNA (1)...(19): siRNA sense strand
ggagaaagguguagggaug

SEQ ID NO: 2489124 - RNA, 19 nt, Homo sapiens
  misc_RNA (1)...(19): siRNA sense strand
gugaagauggugagaaaga

SEQ ID NO: 2489125 - RNA, 19 nt, Homo sapiens
  misc_RNA (1)...(19): siRNA sense strand
cagauuaagagauggagaa

SEQ ID NO: 2489126 - RNA, 19 nt, Homo sapiens
  misc_RNA (1)...(19): siRNA sense strand
acuuguagaugaagaagaa

SEQ ID NO: 2489127 - RNA, 19 nt, Homo sapiens
  misc_RNA (1)...(19): siRNA sense strand
gagaagaugcaauggcaau

SEQ ID NO: 2489128 - RNA, 19 nt, Homo sapiens
  misc_RNA (1)...(19): siRNA sense strand
aaccgaagguaaagaacaa

SEQ ID NO: 2489129 - RNA, 19 nt, Homo sapiens
  misc_RNA (1)...(19): siRNA sense strand
uggacaagaucgaggaacu

SEQ ID NO: 2489130 - RNA, 19 nt, Homo sapiens
  misc_RNA (1)...(19): siRNA sense strand
gaguucaaccgaagguaaa

SEQ ID NO: 2489131 - RNA, 19 nt, Homo sapiens
  misc_RNA (1)...(19): siRNA sense strand
acagugaguaugagagaau

SEQ ID NO: 2489132 - RNA, 19 nt, Homo sapiens
  misc_RNA (1)...(19): siRNA sense strand
gucaaagugaugagaacaa

SEQ ID NO: 2489133 - RNA, 19 nt, Homo sapiens
  misc_RNA (1)...(19): siRNA sense strand
agacaagagaagaugcaau

SEQ ID NO: 2489134 - RNA, 19 nt, Homo sapiens
  misc_RNA (1)...(19): siRNA sense strand
caacauaucaauggagcaa

SEQ ID NO: 2489135 - RNA, 19 nt, Homo sapiens
  misc_RNA (1)...(19): siRNA sense strand
aaagaaucuccaagugaua

SEQ ID NO: 2489136 - RNA, 19 nt, Homo sapiens
  misc_RNA (1)...(19): siRNA sense strand
cugcaaggaccuagacaca

SEQ ID NO: 2489137 - RNA, 19 nt, Homo sapiens
  misc_RNA (1)...(19): siRNA sense strand
aaggaaagccagaucagaa

SEQ ID NO: 2489138 - RNA, 19 nt, Homo sapiens
  misc_RNA (1)...(19): siRNA sense strand
cagaagacugagaguucaa

SEQ ID NO: 2489139 - RNA, 19 nt, Homo sapiens
  misc_RNA (1)...(19): siRNA sense strand
agauuaagagauggagaaa

SEQ ID NO: 2489140 - RNA, 19 nt, Homo sapiens
  misc_RNA (1)...(19): siRNA sense strand
ccauggaagucguucucaa

SEQ ID NO: 2489141 - RNA, 19 nt, Homo sapiens
  misc_RNA (1)...(19): siRNA sense strand
aaaucugggugcuggaaau

SEQ ID NO: 2489142 - RNA, 19 nt, Homo sapiens
  misc_RNA (1)...(19): siRNA sense strand
cagcguuaguauuuggcaa

SEQ ID NO: 2489143 - RNA, 19 nt, Homo sapiens
  misc_RNA (1)...(19): siRNA sense strand
cagcuuaaaaggaggagaa

SEQ ID NO: 2489144 - RNA, 19 nt, Homo sapiens
  misc_RNA (1)...(19): siRNA sense strand
gaagauggugagaaagaca

SEQ ID NO: 2489145 - RNA, 19 nt, Homo sapiens
  misc_RNA (1)...(19): siRNA sense strand
agagcuuggacgugugaua

SEQ ID NO: 2489146 - RNA, 19 nt, Homo sapiens
  misc_RNA (1)...(19): siRNA sense strand
cagaaaggcagaguggaaa

SEQ ID NO: 2489147 - RNA, 19 nt, Homo sapiens
  misc_RNA (1)...(19): siRNA sense strand
cauuuaucccagaaguaua

SEQ ID NO: 2489148 - RNA, 19 nt, Homo sapiens
  misc_RNA (1)...(19): siRNA sense strand
agggaugauugggaagaaa

SEQ ID NO: 2489149 - RNA, 19 nt, Homo sapiens
  misc_RNA (1)...(19): siRNA sense strand
aggcacuuuagaagagaua

SEQ ID NO: 2489150 - RNA, 19 nt, Homo sapiens
  misc_RNA (1)...(19): siRNA sense strand
ggauuaugaagaugacaga

SEQ ID NO: 2489151 - RNA, 19 nt, Homo sapiens
  misc_RNA (1)...(19): siRNA sense strand
ugacagugaguaugagaga

SEQ ID NO: 2489152 - RNA, 19 nt, Homo sapiens
  misc_RNA (1)...(19): siRNA sense strand
ugagaaagacacaaaggau

SEQ ID NO: 2489153 - RNA, 19 nt, Homo sapiens
  misc_RNA (1)...(19): siRNA sense strand
gcacuuuagaagagauagu

SEQ ID NO: 2489154 - RNA, 19 nt, Homo sapiens
  misc_RNA (1)...(19): siRNA sense strand
auacaaucccagaugagua

SEQ ID NO: 2489155 - RNA, 19 nt, Homo sapiens
  misc_RNA (1)...(19): siRNA sense strand
augcagaccaggccaguaa

SEQ ID NO: 2489156 - RNA, 19 nt, Homo sapiens
  misc_RNA (1)...(19): siRNA sense strand
gacucuuaccgaaggguua

SEQ ID NO: 2489157 - RNA, 19 nt, Homo sapiens
  misc_RNA (1)...(19): siRNA sense strand
uggucaaagugaugagaac

SEQ ID NO: 2489158 - RNA, 19 nt, Homo sapiens
  misc_RNA (1)...(19): siRNA sense strand
acagaauggauuaugaaga

SEQ ID NO: 2489159 - RNA, 19 nt, Homo sapiens
  misc_RNA (1)...(19): siRNA sense strand
agagaaguccggugaagau

SEQ ID NO: 2489160 - RNA, 19 nt, Homo sapiens
  misc_RNA (1)...(19): siRNA sense strand
ccaacaaagauacaaguga

SEQ ID NO: 2489161 - RNA, 19 nt, Homo sapiens
  misc_RNA (1)...(19): siRNA sense strand
gugaaaacgcagaugguca

SEQ ID NO: 2489162 - RNA, 19 nt, Homo sapiens
  misc_RNA (1)...(19): siRNA sense strand
ugcuagagacuuagaugaa

SEQ ID NO: 2489163 - RNA, 19 nt, Homo sapiens
  misc_RNA (1)...(19): siRNA sense strand
gggaugauugggaagaaaa

SEQ ID NO: 2489164 - RNA, 19 nt, Homo sapiens
  misc_RNA (1)...(19): siRNA sense strand
ugcugagccuuaugggaaa

SEQ ID NO: 2489165 - RNA, 19 nt, Homo sapiens
  misc_RNA (1)...(19): siRNA sense strand
gagaaagacacaaaggaug

SEQ ID NO: 2489166 - RNA, 19 nt, Homo sapiens
  misc_RNA (1)...(19): siRNA sense strand
gugaugagaacaaggacga

SEQ ID NO: 2489167 - RNA, 19 nt, Homo sapiens
  misc_RNA (1)...(19): siRNA sense strand
cgcagacagaagaaggaaa

SEQ ID NO: 2489168 - RNA, 19 nt, Homo sapiens
  misc_RNA (1)...(19): siRNA sense strand
gauggagacaagagaagau

SEQ ID NO: 2489169 - RNA, 19 nt, Homo sapiens
  misc_RNA (1)...(19): siRNA sense strand
acgaagcagcguuggaaaa

SEQ ID NO: 2489170 - RNA, 19 nt, Homo sapiens
  misc_RNA (1)...(19): siRNA sense strand
cuugaaaucuacccagaau

SEQ ID NO: 2489171 - RNA, 19 nt, Homo sapiens
  misc_RNA (1)...(19): siRNA sense strand
ggacaagaucgaggaacuu

SEQ ID NO: 2489172 - RNA, 19 nt, Homo sapiens
  misc_RNA (1)...(19): siRNA sense strand
ugacaaugauacaggacac

SEQ ID NO: 2489173 - RNA, 19 nt, Homo sapiens
  misc_RNA (1)...(19): siRNA sense strand
ugacagauuaagagaugga

SEQ ID NO: 2489174 - RNA, 19 nt, Homo sapiens
  misc_RNA (1)...(19): siRNA sense strand
cuaauaaggaguggaguca

SEQ ID NO: 2489175 - RNA, 19 nt, Homo sapiens
  misc_RNA (1)...(19): siRNA sense strand
ggaccuagacacaugcaga

SEQ ID NO: 2489176 - RNA, 19 nt, Homo sapiens
  misc_RNA (1)...(19): siRNA sense strand
agagaagaugcaauggcaa

SEQ ID NO: 2489177 - RNA, 19 nt, Homo sapiens
  misc_RNA (1)...(19): siRNA sense strand
ccuaauaugcuucuugaau

SEQ ID NO: 2489178 - RNA, 19 nt, Homo sapiens
  misc_RNA (1)...(19): siRNA sense strand
acauaucaauggagcaagu

SEQ ID NO: 2489179 - RNA, 19 nt, Homo sapiens
  misc_RNA (1)...(19): siRNA sense strand
augcaauggcaaugguuga

SEQ ID NO: 2489180 - RNA, 19 nt, Homo sapiens
  misc_RNA (1)...(19): siRNA sense strand
cgaagguaaagaacaagaa

SEQ ID NO: 2489181 - RNA, 19 nt, Homo sapiens
  misc_RNA (1)...(19): siRNA sense strand
aaggaggagaacugaagaa

SEQ ID NO: 2489182 - RNA, 19 nt, Homo sapiens
  misc_RNA (1)...(19): siRNA sense strand
gguugaccugucugagaaa

SEQ ID NO: 2489183 - RNA, 19 nt, Homo sapiens
  misc_RNA (1)...(19): siRNA sense strand
caaccgaagguaaagaaca

SEQ ID NO: 2489184 - RNA, 19 nt, Homo sapiens
  misc_RNA (1)...(19): siRNA sense strand
acuccugaaucaagggaua

SEQ ID NO: 2489185 - RNA, 19 nt, Homo sapiens
  misc_RNA (1)...(19): siRNA sense strand
cugaagaagagaaugaauu

SEQ ID NO: 2489186 - RNA, 19 nt, Homo sapiens
  misc_RNA (1)...(19): siRNA sense strand
uagugaagguggaggagga

SEQ ID NO: 2489187 - RNA, 19 nt, Homo sapiens
  misc_RNA (1)...(19): siRNA sense strand
cugcuaaguaggaagagua

SEQ ID NO: 2489188 - RNA, 19 nt, Homo sapiens
  misc_RNA (1)...(19): siRNA sense strand
aggaggaagaugaagaaga

SEQ ID NO: 2489189 - RNA, 19 nt, Homo sapiens
  misc_RNA (1)...(19): siRNA sense strand
aagaagagaaauaggcuca

SEQ ID NO: 2489190 - RNA, 19 nt, Homo sapiens
  misc_RNA (1)...(19): siRNA sense strand
ugaagguggaggaggaaga

SEQ ID NO: 2489191 - RNA, 19 nt, Homo sapiens
  misc_RNA (1)...(19): siRNA sense strand
cgaugagagcacugauauu

SEQ ID NO: 2489192 - RNA, 19 nt, Homo sapiens
  misc_RNA (1)...(19): siRNA sense strand
cugaaaaugcaggggaaaa

SEQ ID NO: 2489193 - RNA, 19 nt, Homo sapiens
  misc_RNA (1)...(19): siRNA sense strand
ggaagaugaagaagaccau

SEQ ID NO: 2489194 - RNA, 19 nt, Homo sapiens
  misc_RNA (1)...(19): siRNA sense strand
aagaaacaaaguagaguca

SEQ ID NO: 2489195 - RNA, 19 nt, Homo sapiens
  misc_RNA (1)...(19): siRNA sense strand
cgguauagacuuugcaauc

SEQ ID NO: 2489196 - RNA, 19 nt, Homo sapiens
  misc_RNA (1)...(19): siRNA sense strand
aguauugagcagaguauau

SEQ ID NO: 2489197 - RNA, 19 nt, Homo sapiens
  misc_RNA (1)...(19): siRNA sense strand
uggaggaggaagaugaaga

SEQ ID NO: 2489198 - RNA, 19 nt, Homo sapiens
  misc_RNA (1)...(19): siRNA sense strand
aggaaagaaacaaaguaga

SEQ ID NO: 2489199 - RNA, 19 nt, Homo sapiens
  misc_RNA (1)...(19): siRNA sense strand
ggguaacaaaauuggcaua

SEQ ID NO: 2489200 - RNA, 19 nt, Homo sapiens
  misc_RNA (1)...(19): siRNA sense strand
guggcaagcaagacuuaaa

SEQ ID NO: 2489201 - RNA, 19 nt, Homo sapiens
  misc_RNA (1)...(19): siRNA sense strand
acuuggagccugaagaaga

SEQ ID NO: 2489202 - RNA, 19 nt, Homo sapiens
  misc_RNA (1)...(19): siRNA sense strand
agguggaggaggaagauga

SEQ ID NO: 2489203 - RNA, 19 nt, Homo sapiens
  misc_RNA (1)...(19): siRNA sense strand
aggaagaugaagaagacca

SEQ ID NO: 2489204 - RNA, 19 nt, Homo sapiens
  misc_RNA (1)...(19): siRNA sense strand
aagagaaauaggcucaaua

SEQ ID NO: 2489205 - RNA, 19 nt, Homo sapiens
  misc_RNA (1)...(19): siRNA sense strand
uagaguggcaaaagagaaa

SEQ ID NO: 2489206 - RNA, 19 nt, Homo sapiens
  misc_RNA (1)...(19): siRNA sense strand
agccugaagaagagaauga

SEQ ID NO: 2489207 - RNA, 19 nt, Homo sapiens
  misc_RNA (1)...(19): siRNA sense strand
cccaggagauggaaggcau

SEQ ID NO: 2489208 - RNA, 19 nt, Homo sapiens
  misc_RNA (1)...(19): siRNA sense strand
cggaagagaaauuugaauc

SEQ ID NO: 2489209 - RNA, 19 nt, Homo sapiens
  misc_RNA (1)...(19): siRNA sense strand
ccugaagaagagaaugaau

SEQ ID NO: 2489210 - RNA, 19 nt, Homo sapiens
  misc_RNA (1)...(19): siRNA sense strand
uggaaggaacuuaugaaca

SEQ ID NO: 2489211 - RNA, 19 nt, Homo sapiens
  misc_RNA (1)...(19): siRNA sense strand
ugaacauauucuaggauuc

SEQ ID NO: 2489212 - RNA, 19 nt, Homo sapiens
  misc_RNA (1)...(19): siRNA sense strand
uaugaaugagagagccuua

SEQ ID NO: 2489213 - RNA, 19 nt, Homo sapiens
  misc_RNA (1)...(19): siRNA sense strand
ccucuuagugauaauacaa

SEQ ID NO: 2489214 - RNA, 19 nt, Homo sapiens
  misc_RNA (1)...(19): siRNA sense strand
aauuucaagugauggaaca

SEQ ID NO: 2489215 - RNA, 19 nt, Homo sapiens
  misc_RNA (1)...(19): siRNA sense strand
aagcaaucucauuuggcaa

SEQ ID NO: 2489216 - RNA, 19 nt, Homo sapiens
  misc_RNA (1)...(19): siRNA sense strand
uggaaggcaucgugauagu

SEQ ID NO: 2489217 - RNA, 19 nt, Homo sapiens
  misc_RNA (1)...(19): siRNA sense strand
ugauagugaagguggagga

SEQ ID NO: 2489218 - RNA, 19 nt, Homo sapiens
  misc_RNA (1)...(19): siRNA sense strand
caaaagagaaaauggcuca

SEQ ID NO: 2489219 - RNA, 19 nt, Homo sapiens
  misc_RNA (1)...(19): siRNA sense strand
aagaugaagaagaccauuu

SEQ ID NO: 2489220 - RNA, 19 nt, Homo sapiens
  misc_RNA (1)...(19): siRNA sense strand
caucauucacacuaaagaa

SEQ ID NO: 2489221 - RNA, 19 nt, Homo sapiens
  misc_RNA (1)...(19): siRNA sense strand
ccuuauugucaucguauuu

SEQ ID NO: 2489222 - RNA, 19 nt, Homo sapiens
  misc_RNA (1)...(19): siRNA sense strand
gguggaggaggaagaugaa

SEQ ID NO: 2489223 - RNA, 19 nt, Homo sapiens
  misc_RNA (1)...(19): siRNA sense strand
aagugauggaacagcaaau

SEQ ID NO: 2489224 - RNA, 19 nt, Homo sapiens
  misc_RNA (1)...(19): siRNA sense strand
ugcaacacaucgaagagaa

SEQ ID NO: 2489225 - RNA, 19 nt, Homo sapiens
  misc_RNA (1)...(19): siRNA sense strand
cucaauagugcaccagaua

SEQ ID NO: 2489226 - RNA, 19 nt, Homo sapiens
  misc_RNA (1)...(19): siRNA sense strand
ccggaagagaaauuugaau

SEQ ID NO: 2489227 - RNA, 19 nt, Homo sapiens
  misc_RNA (1)...(19): siRNA sense strand
acaucgagguggagagcga

SEQ ID NO: 2489228 - RNA, 19 nt, Homo sapiens
  misc_RNA (1)...(19): siRNA sense strand
acaucgagguggagagcga

SEQ ID NO: 2489229 - RNA, 19 nt, Homo sapiens
  misc_RNA (1)...(19): siRNA sense strand
acaucgagguggagagcga

SEQ ID NO: 2489230 - RNA, 19 nt, Homo sapiens
  misc_RNA (1)...(19): siRNA sense strand
acaucgagguggagagcga

SEQ ID NO: 2489231 - RNA, 19 nt, Homo sapiens
  misc_RNA (1)...(19): siRNA sense strand
acaucgagguggagagcga

SEQ ID NO: 2489232 - RNA, 19 nt, Homo sapiens
  misc_RNA (1)...(19): siRNA sense strand
acaucgagguggagagcga

SEQ ID NO: 2489233 - RNA, 19 nt, Homo sapiens
  misc_RNA (1)...(19): siRNA sense strand
augcagaauuugugaagaa

SEQ ID NO: 2489234 - RNA, 19 nt, Homo sapiens
  misc_RNA (1)...(19): siRNA sense strand
uggcagaacugguugggaa

SEQ ID NO: 2489235 - RNA, 19 nt, Homo sapiens
  misc_RNA (1)...(19): siRNA sense strand
agucaaggagugauagaaa

SEQ ID NO: 2489236 - RNA, 19 nt, Homo sapiens
  misc_RNA (1)...(19): siRNA sense strand
cagcuauaaaucagaguaa

SEQ ID NO: 2489237 - RNA, 19 nt, Homo sapiens
  misc_RNA (1)...(19): siRNA sense strand
caacaguagaagggagaaa

SEQ ID NO: 2489238 - RNA, 19 nt, Homo sapiens
  misc_RNA (1)...(19): siRNA sense strand
guuacaaucaggaggaauu

SEQ ID NO: 2489239 - RNA, 19 nt, Homo sapiens
  misc_RNA (1)...(19): siRNA sense strand
aggcaugacaggaaacaua

SEQ ID NO: 2489240 - RNA, 19 nt, Homo sapiens
  misc_RNA (1)...(19): siRNA sense strand
cuggacagguacaaggaaa

SEQ ID NO: 2489241 - RNA, 19 nt, Homo sapiens
  misc_RNA (1)...(19): siRNA sense strand
gaguaaaucccucggucaa

SEQ ID NO: 2489242 - RNA, 19 nt, Homo sapiens
  misc_RNA (1)...(19): siRNA sense strand
guguauuagcucacaauua

SEQ ID NO: 2489243 - RNA, 19 nt, Homo sapiens
  misc_RNA (1)...(19): siRNA sense strand
ucacauaagaggaaaggau

SEQ ID NO: 2489244 - RNA, 19 nt, Homo sapiens
  misc_RNA (1)...(19): siRNA sense strand
ggugaaaguggaaaagaaa

SEQ ID NO: 2489245 - RNA, 19 nt, Homo sapiens
  misc_RNA (1)...(19): siRNA sense strand
caaagaugaaacugagcua

SEQ ID NO: 2489246 - RNA, 19 nt, Homo sapiens
  misc_RNA (1)...(19): siRNA sense strand
aaucagaagaccaguguau

SEQ ID NO: 2489247 - RNA, 19 nt, Homo sapiens
  misc_RNA (1)...(19): siRNA sense strand
cagcaaggagcgauaggaa

SEQ ID NO: 2489248 - RNA, 19 nt, Homo sapiens
  misc_RNA (1)...(19): siRNA sense strand
acuggaugcuucaaagaaa

SEQ ID NO: 2489249 - RNA, 19 nt, Homo sapiens
  misc_RNA (1)...(19): siRNA sense strand
ccuuaguggcaaagaugaa

SEQ ID NO: 2489250 - RNA, 19 nt, Homo sapiens
  misc_RNA (1)...(19): siRNA sense strand
cauauugaaugaugggaca

SEQ ID NO: 2489251 - RNA, 19 nt, Homo sapiens
  misc_RNA (1)...(19): siRNA sense strand
gacaaauaauacagugaca

SEQ ID NO: 2489252 - RNA, 19 nt, Homo sapiens
  misc_RNA (1)...(19): siRNA sense strand
aaguagucaaggagugaua

SEQ ID NO: 2489253 - RNA, 19 nt, Homo sapiens
  misc_RNA (1)...(19): siRNA sense strand
gagaauuguauuuguguca

SEQ ID NO: 2489254 - RNA, 19 nt, Homo sapiens
  misc_RNA (1)...(19): siRNA sense strand
aagcugaguccaaagauaa

SEQ ID NO: 2489255 - RNA, 19 nt, Homo sapiens
  misc_RNA (1)...(19): siRNA sense strand
uggaugauguaaaggugaa

SEQ ID NO: 2489256 - RNA, 19 nt, Homo sapiens
  misc_RNA (1)...(19): siRNA sense strand
aggugaaaguggaaaagaa

SEQ ID NO: 2489257 - RNA, 19 nt, Homo sapiens
  misc_RNA (1)...(19): siRNA sense strand
cagaauuugugaagaaucu

SEQ ID NO: 2489258 - RNA, 19 nt, Homo sapiens
  misc_RNA (1)...(19): siRNA sense strand
aaauaaaacuggaggccca

SEQ ID NO: 2489259 - RNA, 19 nt, Homo sapiens
  misc_RNA (1)...(19): siRNA sense strand
aauaauacagugacagcua

SEQ ID NO: 2489260 - RNA, 19 nt, Homo sapiens
  misc_RNA (1)...(19): siRNA sense strand
gcuaaugaagagaauggaa

SEQ ID NO: 2489261 - RNA, 19 nt, Homo sapiens
  misc_RNA (1)...(19): siRNA sense strand
gcaaggagcgauaggaaac

SEQ ID NO: 2489262 - RNA, 19 nt, Homo sapiens
  misc_RNA (1)...(19): siRNA sense strand
agagaauggaacaagagaa

SEQ ID NO: 2489263 - RNA, 19 nt, Homo sapiens
  misc_RNA (1)...(19): siRNA sense strand
gcagcuacugacugaauaa

SEQ ID NO: 2489264 - RNA, 19 nt, Homo sapiens
  misc_RNA (1)...(19): siRNA sense strand
augaaguaaugcaguguuu

SEQ ID NO: 2489265 - RNA, 19 nt, Homo sapiens
  misc_RNA (1)...(19): siRNA sense strand
aagcaagauacuacaggua

SEQ ID NO: 2489266 - RNA, 19 nt, Homo sapiens
  misc_RNA (1)...(19): siRNA sense strand
uuucagauggagacaguaa

SEQ ID NO: 2489267 - RNA, 19 nt, Homo sapiens
  misc_RNA (1)...(19): siRNA sense strand
cguccaguguacagugaau

SEQ ID NO: 2489268 - RNA, 19 nt, Homo sapiens
  misc_RNA (1)...(19): siRNA sense strand
gaguguaaaaccagacaaa

SEQ ID NO: 2489269 - RNA, 19 nt, Homo sapiens
  misc_RNA (1)...(19): siRNA sense strand
ggguggauuagauguauua

SEQ ID NO: 2489270 - RNA, 19 nt, Homo sapiens
  misc_RNA (1)...(19): siRNA sense strand
cagaugagcucuuugcaga

SEQ ID NO: 2489271 - RNA, 19 nt, Homo sapiens
  misc_RNA (1)...(19): siRNA sense strand
cagcucuagugauggcaaa

SEQ ID NO: 2489272 - RNA, 19 nt, Homo sapiens
  misc_RNA (1)...(19): siRNA sense strand
uguaaaggugaaaguggaa

SEQ ID NO: 2489273 - RNA, 19 nt, Homo sapiens
  misc_RNA (1)...(19): siRNA sense strand
gagccaugcuuaugaggca

SEQ ID NO: 2489274 - RNA, 19 nt, Homo sapiens
  misc_RNA (1)...(19): siRNA sense strand
aaacagaagcagauggaac

SEQ ID NO: 2489275 - RNA, 19 nt, Homo sapiens
  misc_RNA (1)...(19): siRNA sense strand
gugaagaaucugcuaccaa

SEQ ID NO: 2489276 - RNA, 19 nt, Homo sapiens
  misc_RNA (1)...(19): siRNA sense strand
gggcagagaaccaucuuau

SEQ ID NO: 2489277 - RNA, 19 nt, Homo sapiens
  misc_RNA (1)...(19): siRNA sense strand
ccaaagauaacaaagagau

SEQ ID NO: 2489278 - RNA, 19 nt, Homo sapiens
  misc_RNA (1)...(19): siRNA sense strand
aggaacaggcgaucagauu

SEQ ID NO: 2489279 - RNA, 19 nt, Homo sapiens
  misc_RNA (1)...(19): siRNA sense strand
agcaaggagcgauaggaaa

SEQ ID NO: 2489280 - RNA, 19 nt, Homo sapiens
  misc_RNA (1)...(19): siRNA sense strand
cgaucagauuccauggaca

SEQ ID NO: 2489281 - RNA, 19 nt, Homo sapiens
  misc_RNA (1)...(19): siRNA sense strand
agggagaaaugaugagaag

SEQ ID NO: 2489282 - RNA, 19 nt, Homo sapiens
  misc_RNA (1)...(19): siRNA sense strand
agauguauuaucagagaga

SEQ ID NO: 2489283 - RNA, 19 nt, Homo sapiens
  misc_RNA (1)...(19): siRNA sense strand
cuuccaggcuaaauagauu

SEQ ID NO: 2489284 - RNA, 19 nt, Homo sapiens
  misc_RNA (1)...(19): siRNA sense strand
agccaggaguauacaacaa

SEQ ID NO: 2489285 - RNA, 19 nt, Homo sapiens
  misc_RNA (1)...(19): siRNA sense strand
agacccacuuccaggcuaa

SEQ ID NO: 2489286 - RNA, 19 nt, Homo sapiens
  misc_RNA (1)...(19): siRNA sense strand
gcagaaugucuuccaguau

SEQ ID NO: 2489287 - RNA, 19 nt, Homo sapiens
  misc_RNA (1)...(19): siRNA sense strand
ggaacaagagaaaucaaca

SEQ ID NO: 2489288 - RNA, 19 nt, Homo sapiens
  misc_RNA (1)...(19): siRNA sense strand
aguccaaagauaacaaaga

SEQ ID NO: 2489289 - RNA, 19 nt, Homo sapiens
  misc_RNA (1)...(19): siRNA sense strand
auguaaaggugaaagugga

SEQ ID NO: 2489290 - RNA, 19 nt, Homo sapiens
  misc_RNA (1)...(19): siRNA sense strand
agagagauuuccaccacaa

SEQ ID NO: 2489291 - RNA, 19 nt, Homo sapiens
  misc_RNA (1)...(19): siRNA sense strand
gcaaauuacaccucagcca

SEQ ID NO: 2489292 - RNA, 19 nt, Homo sapiens
  misc_RNA (1)...(19): siRNA sense strand
augcagaauuugugaagaa

SEQ ID NO: 2489293 - RNA, 19 nt, Homo sapiens
  misc_RNA (1)...(19): siRNA sense strand
uggcagaacugguugggaa

SEQ ID NO: 2489294 - RNA, 19 nt, Homo sapiens
  misc_RNA (1)...(19): siRNA sense strand
agucaaggagugauagaaa

SEQ ID NO: 2489295 - RNA, 19 nt, Homo sapiens
  misc_RNA (1)...(19): siRNA sense strand
cagcuauaaaucagaguaa

SEQ ID NO: 2489296 - RNA, 19 nt, Homo sapiens
  misc_RNA (1)...(19): siRNA sense strand
caacaguagaagggagaaa

SEQ ID NO: 2489297 - RNA, 19 nt, Homo sapiens
  misc_RNA (1)...(19): siRNA sense strand
guuacaaucaggaggaauu

SEQ ID NO: 2489298 - RNA, 19 nt, Homo sapiens
  misc_RNA (1)...(19): siRNA sense strand
aggcaugacaggaaacaua

SEQ ID NO: 2489299 - RNA, 19 nt, Homo sapiens
  misc_RNA (1)...(19): siRNA sense strand
cuggacagguacaaggaaa

SEQ ID NO: 2489300 - RNA, 19 nt, Homo sapiens
  misc_RNA (1)...(19): siRNA sense strand
gaguaaaucccucggucaa

SEQ ID NO: 2489301 - RNA, 19 nt, Homo sapiens
  misc_RNA (1)...(19): siRNA sense strand
guguauuagcucacaauua

SEQ ID NO: 2489302 - RNA, 19 nt, Homo sapiens
  misc_RNA (1)...(19): siRNA sense strand
ucacauaagaggaaaggau

SEQ ID NO: 2489303 - RNA, 19 nt, Homo sapiens
  misc_RNA (1)...(19): siRNA sense strand
ggugaaaguggaaaagaaa

SEQ ID NO: 2489304 - RNA, 19 nt, Homo sapiens
  misc_RNA (1)...(19): siRNA sense strand
caaagaugaaacugagcua

SEQ ID NO: 2489305 - RNA, 19 nt, Homo sapiens
  misc_RNA (1)...(19): siRNA sense strand
aaucagaagaccaguguau

SEQ ID NO: 2489306 - RNA, 19 nt, Homo sapiens
  misc_RNA (1)...(19): siRNA sense strand
cagcaaggagcgauaggaa

SEQ ID NO: 2489307 - RNA, 19 nt, Homo sapiens
  misc_RNA (1)...(19): siRNA sense strand
acuggaugcuucaaagaaa

SEQ ID NO: 2489308 - RNA, 19 nt, Homo sapiens
  misc_RNA (1)...(19): siRNA sense strand
ccuuaguggcaaagaugaa

SEQ ID NO: 2489309 - RNA, 19 nt, Homo sapiens
  misc_RNA (1)...(19): siRNA sense strand
cauauugaaugaugggaca

SEQ ID NO: 2489310 - RNA, 19 nt, Homo sapiens
  misc_RNA (1)...(19): siRNA sense strand
gacaaauaauacagugaca

SEQ ID NO: 2489311 - RNA, 19 nt, Homo sapiens
  misc_RNA (1)...(19): siRNA sense strand
aaguagucaaggagugaua

SEQ ID NO: 2489312 - RNA, 19 nt, Homo sapiens
  misc_RNA (1)...(19): siRNA sense strand
gagaauuguauuuguguca

SEQ ID NO: 2489313 - RNA, 19 nt, Homo sapiens
  misc_RNA (1)...(19): siRNA sense strand
aagcugaguccaaagauaa

SEQ ID NO: 2489314 - RNA, 19 nt, Homo sapiens
  misc_RNA (1)...(19): siRNA sense strand
uggaugauguaaaggugaa

SEQ ID NO: 2489315 - RNA, 19 nt, Homo sapiens
  misc_RNA (1)...(19): siRNA sense strand
aggugaaaguggaaaagaa

SEQ ID NO: 2489316 - RNA, 19 nt, Homo sapiens
  misc_RNA (1)...(19): siRNA sense strand
cagaauuugugaagaaucu

SEQ ID NO: 2489317 - RNA, 19 nt, Homo sapiens
  misc_RNA (1)...(19): siRNA sense strand
aaauaaaacuggaggccca

SEQ ID NO: 2489318 - RNA, 19 nt, Homo sapiens
  misc_RNA (1)...(19): siRNA sense strand
aauaauacagugacagcua

SEQ ID NO: 2489319 - RNA, 19 nt, Homo sapiens
  misc_RNA (1)...(19): siRNA sense strand
gcuaaugaagagaauggaa

SEQ ID NO: 2489320 - RNA, 19 nt, Homo sapiens
  misc_RNA (1)...(19): siRNA sense strand
gcaaggagcgauaggaaac

SEQ ID NO: 2489321 - RNA, 19 nt, Homo sapiens
  misc_RNA (1)...(19): siRNA sense strand
agagaauggaacaagagaa

SEQ ID NO: 2489322 - RNA, 19 nt, Homo sapiens
  misc_RNA (1)...(19): siRNA sense strand
augaaguaaugcaguguuu

SEQ ID NO: 2489323 - RNA, 19 nt, Homo sapiens
  misc_RNA (1)...(19): siRNA sense strand
aagcaagauacuacaggua

SEQ ID NO: 2489324 - RNA, 19 nt, Homo sapiens
  misc_RNA (1)...(19): siRNA sense strand
uuucagauggagacaguaa

SEQ ID NO: 2489325 - RNA, 19 nt, Homo sapiens
  misc_RNA (1)...(19): siRNA sense strand
gaguguaaaaccagacaaa

SEQ ID NO: 2489326 - RNA, 19 nt, Homo sapiens
  misc_RNA (1)...(19): siRNA sense strand
ggguggauuagauguauua

SEQ ID NO: 2489327 - RNA, 19 nt, Homo sapiens
  misc_RNA (1)...(19): siRNA sense strand
cagaugagcucuuugcaga

SEQ ID NO: 2489328 - RNA, 19 nt, Homo sapiens
  misc_RNA (1)...(19): siRNA sense strand
cagcucuagugauggcaaa

SEQ ID NO: 2489329 - RNA, 19 nt, Homo sapiens
  misc_RNA (1)...(19): siRNA sense strand
uguaaaggugaaaguggaa

SEQ ID NO: 2489330 - RNA, 19 nt, Homo sapiens
  misc_RNA (1)...(19): siRNA sense strand
gagccaugcuuaugaggca

SEQ ID NO: 2489331 - RNA, 19 nt, Homo sapiens
  misc_RNA (1)...(19): siRNA sense strand
aaacagaagcagauggaac

SEQ ID NO: 2489332 - RNA, 19 nt, Homo sapiens
  misc_RNA (1)...(19): siRNA sense strand
gugaagaaucugcuaccaa

SEQ ID NO: 2489333 - RNA, 19 nt, Homo sapiens
  misc_RNA (1)...(19): siRNA sense strand
gggcagagaaccaucuuau

SEQ ID NO: 2489334 - RNA, 19 nt, Homo sapiens
  misc_RNA (1)...(19): siRNA sense strand
ccaaagauaacaaagagau

SEQ ID NO: 2489335 - RNA, 19 nt, Homo sapiens
  misc_RNA (1)...(19): siRNA sense strand
aggaacaggcgaucagauu

SEQ ID NO: 2489336 - RNA, 19 nt, Homo sapiens
  misc_RNA (1)...(19): siRNA sense strand
agcaaggagcgauaggaaa

SEQ ID NO: 2489337 - RNA, 19 nt, Homo sapiens
  misc_RNA (1)...(19): siRNA sense strand
cgaucagauuccauggaca

SEQ ID NO: 2489338 - RNA, 19 nt, Homo sapiens
  misc_RNA (1)...(19): siRNA sense strand
agggagaaaugaugagaag

SEQ ID NO: 2489339 - RNA, 19 nt, Homo sapiens
  misc_RNA (1)...(19): siRNA sense strand
agauguauuaucagagaga

SEQ ID NO: 2489340 - RNA, 19 nt, Homo sapiens
  misc_RNA (1)...(19): siRNA sense strand
cuuccaggcuaaauagauu

SEQ ID NO: 2489341 - RNA, 19 nt, Homo sapiens
  misc_RNA (1)...(19): siRNA sense strand
agccaggaguauacaacaa

SEQ ID NO: 2489342 - RNA, 19 nt, Homo sapiens
  misc_RNA (1)...(19): siRNA sense strand
agacccacuuccaggcuaa

SEQ ID NO: 2489343 - RNA, 19 nt, Homo sapiens
  misc_RNA (1)...(19): siRNA sense strand
gcagaaugucuuccaguau

SEQ ID NO: 2489344 - RNA, 19 nt, Homo sapiens
  misc_RNA (1)...(19): siRNA sense strand
ggaacaagagaaaucaaca

SEQ ID NO: 2489345 - RNA, 19 nt, Homo sapiens
  misc_RNA (1)...(19): siRNA sense strand
aguccaaagauaacaaaga

SEQ ID NO: 2489346 - RNA, 19 nt, Homo sapiens
  misc_RNA (1)...(19): siRNA sense strand
auguaaaggugaaagugga

SEQ ID NO: 2489347 - RNA, 19 nt, Homo sapiens
  misc_RNA (1)...(19): siRNA sense strand
agagagauuuccaccacaa

SEQ ID NO: 2489348 - RNA, 19 nt, Homo sapiens
  misc_RNA (1)...(19): siRNA sense strand
gcaaauuacaccucagcca

SEQ ID NO: 2489349 - RNA, 19 nt, Homo sapiens
  misc_RNA (1)...(19): siRNA sense strand
cagcuaauacagcagcaaa

SEQ ID NO: 2489350 - RNA, 19 nt, Homo sapiens
  misc_RNA (1)...(19): siRNA sense strand
augcagaauuugugaagaa

SEQ ID NO: 2489351 - RNA, 19 nt, Homo sapiens
  misc_RNA (1)...(19): siRNA sense strand
uggcagaacugguugggaa

SEQ ID NO: 2489352 - RNA, 19 nt, Homo sapiens
  misc_RNA (1)...(19): siRNA sense strand
agucaaggagugauagaaa

SEQ ID NO: 2489353 - RNA, 19 nt, Homo sapiens
  misc_RNA (1)...(19): siRNA sense strand
cagcuauaaaucagaguaa

SEQ ID NO: 2489354 - RNA, 19 nt, Homo sapiens
  misc_RNA (1)...(19): siRNA sense strand
caacaguagaagggagaaa

SEQ ID NO: 2489355 - RNA, 19 nt, Homo sapiens
  misc_RNA (1)...(19): siRNA sense strand
guuacaaucaggaggaauu

SEQ ID NO: 2489356 - RNA, 19 nt, Homo sapiens
  misc_RNA (1)...(19): siRNA sense strand
aggcaugacaggaaacaua

SEQ ID NO: 2489357 - RNA, 19 nt, Homo sapiens
  misc_RNA (1)...(19): siRNA sense strand
cuggacagguacaaggaaa

SEQ ID NO: 2489358 - RNA, 19 nt, Homo sapiens
  misc_RNA (1)...(19): siRNA sense strand
gaguaaaucccucggucaa

SEQ ID NO: 2489359 - RNA, 19 nt, Homo sapiens
  misc_RNA (1)...(19): siRNA sense strand
guguauuagcucacaauua

SEQ ID NO: 2489360 - RNA, 19 nt, Homo sapiens
  misc_RNA (1)...(19): siRNA sense strand
ucacauaagaggaaaggau

SEQ ID NO: 2489361 - RNA, 19 nt, Homo sapiens
  misc_RNA (1)...(19): siRNA sense strand
ggugaaaguggaaaagaaa

SEQ ID NO: 2489362 - RNA, 19 nt, Homo sapiens
  misc_RNA (1)...(19): siRNA sense strand
caaagaugaaacugagcua

SEQ ID NO: 2489363 - RNA, 19 nt, Homo sapiens
  misc_RNA (1)...(19): siRNA sense strand
aaucagaagaccaguguau

SEQ ID NO: 2489364 - RNA, 19 nt, Homo sapiens
  misc_RNA (1)...(19): siRNA sense strand
cagcaaggagcgauaggaa

SEQ ID NO: 2489365 - RNA, 19 nt, Homo sapiens
  misc_RNA (1)...(19): siRNA sense strand
acuggaugcuucaaagaaa

SEQ ID NO: 2489366 - RNA, 19 nt, Homo sapiens
  misc_RNA (1)...(19): siRNA sense strand
ccuuaguggcaaagaugaa

SEQ ID NO: 2489367 - RNA, 19 nt, Homo sapiens
  misc_RNA (1)...(19): siRNA sense strand
cauauugaaugaugggaca

SEQ ID NO: 2489368 - RNA, 19 nt, Homo sapiens
  misc_RNA (1)...(19): siRNA sense strand
gacaaauaauacagugaca

SEQ ID NO: 2489369 - RNA, 19 nt, Homo sapiens
  misc_RNA (1)...(19): siRNA sense strand
aaguagucaaggagugaua

SEQ ID NO: 2489370 - RNA, 19 nt, Homo sapiens
  misc_RNA (1)...(19): siRNA sense strand
gagaauuguauuuguguca

SEQ ID NO: 2489371 - RNA, 19 nt, Homo sapiens
  misc_RNA (1)...(19): siRNA sense strand
aagcugaguccaaagauaa

SEQ ID NO: 2489372 - RNA, 19 nt, Homo sapiens
  misc_RNA (1)...(19): siRNA sense strand
uggaugauguaaaggugaa

SEQ ID NO: 2489373 - RNA, 19 nt, Homo sapiens
  misc_RNA (1)...(19): siRNA sense strand
aggugaaaguggaaaagaa

SEQ ID NO: 2489374 - RNA, 19 nt, Homo sapiens
  misc_RNA (1)...(19): siRNA sense strand
cagaauuugugaagaaucu

SEQ ID NO: 2489375 - RNA, 19 nt, Homo sapiens
  misc_RNA (1)...(19): siRNA sense strand
aaauaaaacuggaggccca

SEQ ID NO: 2489376 - RNA, 19 nt, Homo sapiens
  misc_RNA (1)...(19): siRNA sense strand
aauaauacagugacagcua

SEQ ID NO: 2489377 - RNA, 19 nt, Homo sapiens
  misc_RNA (1)...(19): siRNA sense strand
gcuaaugaagagaauggaa

SEQ ID NO: 2489378 - RNA, 19 nt, Homo sapiens
  misc_RNA (1)...(19): siRNA sense strand
gcaaggagcgauaggaaac

SEQ ID NO: 2489379 - RNA, 19 nt, Homo sapiens
  misc_RNA (1)...(19): siRNA sense strand
agagaauggaacaagagaa

SEQ ID NO: 2489380 - RNA, 19 nt, Homo sapiens
  misc_RNA (1)...(19): siRNA sense strand
gcagcuacugacugaauaa

SEQ ID NO: 2489381 - RNA, 19 nt, Homo sapiens
  misc_RNA (1)...(19): siRNA sense strand
augaaguaaugcaguguuu

SEQ ID NO: 2489382 - RNA, 19 nt, Homo sapiens
  misc_RNA (1)...(19): siRNA sense strand
aagcaagauacuacaggua

SEQ ID NO: 2489383 - RNA, 19 nt, Homo sapiens
  misc_RNA (1)...(19): siRNA sense strand
uuucagauggagacaguaa

SEQ ID NO: 2489384 - RNA, 19 nt, Homo sapiens
  misc_RNA (1)...(19): siRNA sense strand
cguccaguguacagugaau

SEQ ID NO: 2489385 - RNA, 19 nt, Homo sapiens
  misc_RNA (1)...(19): siRNA sense strand
gaguguaaaaccagacaaa

SEQ ID NO: 2489386 - RNA, 19 nt, Homo sapiens
  misc_RNA (1)...(19): siRNA sense strand
ggguggauuagauguauua

SEQ ID NO: 2489387 - RNA, 19 nt, Homo sapiens
  misc_RNA (1)...(19): siRNA sense strand
cagaugagcucuuugcaga

SEQ ID NO: 2489388 - RNA, 19 nt, Homo sapiens
  misc_RNA (1)...(19): siRNA sense strand
cagcucuagugauggcaaa

SEQ ID NO: 2489389 - RNA, 19 nt, Homo sapiens
  misc_RNA (1)...(19): siRNA sense strand
uguaaaggugaaaguggaa

SEQ ID NO: 2489390 - RNA, 19 nt, Homo sapiens
  misc_RNA (1)...(19): siRNA sense strand
gagccaugcuuaugaggca

SEQ ID NO: 2489391 - RNA, 19 nt, Homo sapiens
  misc_RNA (1)...(19): siRNA sense strand
aaacagaagcagauggaac

SEQ ID NO: 2489392 - RNA, 19 nt, Homo sapiens
  misc_RNA (1)...(19): siRNA sense strand
gugaagaaucugcuaccaa

SEQ ID NO: 2489393 - RNA, 19 nt, Homo sapiens
  misc_RNA (1)...(19): siRNA sense strand
gggcagagaaccaucuuau

SEQ ID NO: 2489394 - RNA, 19 nt, Homo sapiens
  misc_RNA (1)...(19): siRNA sense strand
ccaaagauaacaaagagau

SEQ ID NO: 2489395 - RNA, 19 nt, Homo sapiens
  misc_RNA (1)...(19): siRNA sense strand
aggaacaggcgaucagauu

SEQ ID NO: 2489396 - RNA, 19 nt, Homo sapiens
  misc_RNA (1)...(19): siRNA sense strand
agcaaggagcgauaggaaa

SEQ ID NO: 2489397 - RNA, 19 nt, Homo sapiens
  misc_RNA (1)...(19): siRNA sense strand
cgaucagauuccauggaca

SEQ ID NO: 2489398 - RNA, 19 nt, Homo sapiens
  misc_RNA (1)...(19): siRNA sense strand
agggagaaaugaugagaag

SEQ ID NO: 2489399 - RNA, 19 nt, Homo sapiens
  misc_RNA (1)...(19): siRNA sense strand
agauguauuaucagagaga

SEQ ID NO: 2489400 - RNA, 19 nt, Homo sapiens
  misc_RNA (1)...(19): siRNA sense strand
cuuccaggcuaaauagauu

SEQ ID NO: 2489401 - RNA, 19 nt, Homo sapiens
  misc_RNA (1)...(19): siRNA sense strand
agccaggaguauacaacaa

SEQ ID NO: 2489402 - RNA, 19 nt, Homo sapiens
  misc_RNA (1)...(19): siRNA sense strand
agacccacuuccaggcuaa

SEQ ID NO: 2489403 - RNA, 19 nt, Homo sapiens
  misc_RNA (1)...(19): siRNA sense strand
gcagaaugucuuccaguau

SEQ ID NO: 2489404 - RNA, 19 nt, Homo sapiens
  misc_RNA (1)...(19): siRNA sense strand
ggaacaagagaaaucaaca

SEQ ID NO: 2489405 - RNA, 19 nt, Homo sapiens
  misc_RNA (1)...(19): siRNA sense strand
aguccaaagauaacaaaga

SEQ ID NO: 2489406 - RNA, 19 nt, Homo sapiens
  misc_RNA (1)...(19): siRNA sense strand
auguaaaggugaaagugga

SEQ ID NO: 2489407 - RNA, 19 nt, Homo sapiens
  misc_RNA (1)...(19): siRNA sense strand
agagagauuuccaccacaa

SEQ ID NO: 2489408 - RNA, 19 nt, Homo sapiens
  misc_RNA (1)...(19): siRNA sense strand
gcaaauuacaccucagcca

SEQ ID NO: 2489409 - RNA, 19 nt, Homo sapiens
  misc_RNA (1)...(19): siRNA sense strand
ggacaggacuauagcacuc

SEQ ID NO: 2489410 - RNA, 19 nt, Homo sapiens
  misc_RNA (1)...(19): siRNA sense strand
agcagaagauugaggacca

SEQ ID NO: 2489411 - RNA, 19 nt, Homo sapiens
  misc_RNA (1)...(19): siRNA sense strand
ccuuggagacgcugggaga

SEQ ID NO: 2489412 - RNA, 19 nt, Homo sapiens
  misc_RNA (1)...(19): siRNA sense strand
augagauaaagguggcuaa

SEQ ID NO: 2489413 - RNA, 19 nt, Homo sapiens
  misc_RNA (1)...(19): siRNA sense strand
agucacaguugcagccgua

SEQ ID NO: 2489414 - RNA, 19 nt, Homo sapiens
  misc_RNA (1)...(19): siRNA sense strand
cggcagaagcugaaagguc

SEQ ID NO: 2489415 - RNA, 19 nt, Homo sapiens
  misc_RNA (1)...(19): siRNA sense strand
ggcagaagcugaaaggucu

SEQ ID NO: 2489416 - RNA, 19 nt, Homo sapiens
  misc_RNA (1)...(19): siRNA sense strand
aguugggccucauggacaa

SEQ ID NO: 2489417 - RNA, 19 nt, Homo sapiens
  misc_RNA (1)...(19): siRNA sense strand
gagcuaagucccugcacca

SEQ ID NO: 2489418 - RNA, 19 nt, Homo sapiens
  misc_RNA (1)...(19): siRNA sense strand
ggagacgcugggagagaga

SEQ ID NO: 2489419 - RNA, 19 nt, Homo sapiens
  misc_RNA (1)...(19): siRNA sense strand
gaaaggucucagaggagga

SEQ ID NO: 2489420 - RNA, 19 nt, Homo sapiens
  misc_RNA (1)...(19): siRNA sense strand
cugcaaauauggacaggac

SEQ ID NO: 2489421 - RNA, 19 nt, Homo sapiens
  misc_RNA (1)...(19): siRNA sense strand
ggacaggacuauagcacuc

SEQ ID NO: 2489422 - RNA, 19 nt, Homo sapiens
  misc_RNA (1)...(19): siRNA sense strand
agcagaagauugaggacca

SEQ ID NO: 2489423 - RNA, 19 nt, Homo sapiens
  misc_RNA (1)...(19): siRNA sense strand
ccuuggagacgcugggaga

SEQ ID NO: 2489424 - RNA, 19 nt, Homo sapiens
  misc_RNA (1)...(19): siRNA sense strand
augagauaaagguggcuaa

SEQ ID NO: 2489425 - RNA, 19 nt, Homo sapiens
  misc_RNA (1)...(19): siRNA sense strand
agucacaguugcagccgua

SEQ ID NO: 2489426 - RNA, 19 nt, Homo sapiens
  misc_RNA (1)...(19): siRNA sense strand
cggcagaagcugaaagguc

SEQ ID NO: 2489427 - RNA, 19 nt, Homo sapiens
  misc_RNA (1)...(19): siRNA sense strand
ggcagaagcugaaaggucu

SEQ ID NO: 2489428 - RNA, 19 nt, Homo sapiens
  misc_RNA (1)...(19): siRNA sense strand
aguugggccucauggacaa

SEQ ID NO: 2489429 - RNA, 19 nt, Homo sapiens
  misc_RNA (1)...(19): siRNA sense strand
gagcuaagucccugcacca

SEQ ID NO: 2489430 - RNA, 19 nt, Homo sapiens
  misc_RNA (1)...(19): siRNA sense strand
ggagacgcugggagagaga

SEQ ID NO: 2489431 - RNA, 19 nt, Homo sapiens
  misc_RNA (1)...(19): siRNA sense strand
gaaaggucucagaggagga

SEQ ID NO: 2489432 - RNA, 19 nt, Homo sapiens
  misc_RNA (1)...(19): siRNA sense strand
cugcaaauauggacaggac

SEQ ID NO: 2489433 - RNA, 19 nt, Homo sapiens
  misc_RNA (1)...(19): siRNA sense strand
cagaauaagaacacggaga

SEQ ID NO: 2489434 - RNA, 19 nt, Homo sapiens
  misc_RNA (1)...(19): siRNA sense strand
aggaaggagaagaagggaa

SEQ ID NO: 2489435 - RNA, 19 nt, Homo sapiens
  misc_RNA (1)...(19): siRNA sense strand
aggaggaugaggaggagaa

SEQ ID NO: 2489436 - RNA, 19 nt, Homo sapiens
  misc_RNA (1)...(19): siRNA sense strand
ccucggaagaugagcguga

SEQ ID NO: 2489437 - RNA, 19 nt, Homo sapiens
  misc_RNA (1)...(19): siRNA sense strand
gagaagaagggaaagcaca

SEQ ID NO: 2489438 - RNA, 19 nt, Homo sapiens
  misc_RNA (1)...(19): siRNA sense strand
cagcacuggcagaagacaa

SEQ ID NO: 2489439 - RNA, 19 nt, Homo sapiens
  misc_RNA (1)...(19): siRNA sense strand
uggcgggaaggaagagaaa

SEQ ID NO: 2489440 - RNA, 19 nt, Homo sapiens
  misc_RNA (1)...(19): siRNA sense strand
acgaggaugaggaggauga

SEQ ID NO: 2489441 - RNA, 19 nt, Homo sapiens
  misc_RNA (1)...(19): siRNA sense strand
ccgcaacgagcaugagaca

SEQ ID NO: 2489442 - RNA, 19 nt, Homo sapiens
  misc_RNA (1)...(19): siRNA sense strand
cugugugcuacgagacaaa

SEQ ID NO: 2489443 - RNA, 19 nt, Homo sapiens
  misc_RNA (1)...(19): siRNA sense strand
aggaugaggaggagaauag

SEQ ID NO: 2489444 - RNA, 19 nt, Homo sapiens
  misc_RNA (1)...(19): siRNA sense strand
acguugagguccaggaucu

SEQ ID NO: 2489445 - RNA, 19 nt, Homo sapiens
  misc_RNA (1)...(19): siRNA sense strand
augaggaggaugaggagga

SEQ ID NO: 2489446 - RNA, 19 nt, Homo sapiens
  misc_RNA (1)...(19): siRNA sense strand
gggaaggaagagaaagaag

SEQ ID NO: 2489447 - RNA, 19 nt, Homo sapiens
  misc_RNA (1)...(19): siRNA sense strand
gcaggaaguccgucaggga

SEQ ID NO: 2489448 - RNA, 19 nt, Homo sapiens
  misc_RNA (1)...(19): siRNA sense strand
gaggaugggaagaaggugu

SEQ ID NO: 2489449 - RNA, 19 nt, Homo sapiens
  misc_RNA (1)...(19): siRNA sense strand
uggagcagaagcagaagaa

SEQ ID NO: 2489450 - RNA, 19 nt, Homo sapiens
  misc_RNA (1)...(19): siRNA sense strand
gcaugagcuuugacgagga

SEQ ID NO: 2489451 - RNA, 19 nt, Homo sapiens
  misc_RNA (1)...(19): siRNA sense strand
ccagaucauccauggcaau

SEQ ID NO: 2489452 - RNA, 19 nt, Homo sapiens
  misc_RNA (1)...(19): siRNA sense strand
cagaauaagaacacggaga

SEQ ID NO: 2489453 - RNA, 19 nt, Homo sapiens
  misc_RNA (1)...(19): siRNA sense strand
aggaaggagaagaagggaa

SEQ ID NO: 2489454 - RNA, 19 nt, Homo sapiens
  misc_RNA (1)...(19): siRNA sense strand
aggaggaugaggaggagaa

SEQ ID NO: 2489455 - RNA, 19 nt, Homo sapiens
  misc_RNA (1)...(19): siRNA sense strand
ccucggaagaugagcguga

SEQ ID NO: 2489456 - RNA, 19 nt, Homo sapiens
  misc_RNA (1)...(19): siRNA sense strand
gagaagaagggaaagcaca

SEQ ID NO: 2489457 - RNA, 19 nt, Homo sapiens
  misc_RNA (1)...(19): siRNA sense strand
cagcacuggcagaagacaa

SEQ ID NO: 2489458 - RNA, 19 nt, Homo sapiens
  misc_RNA (1)...(19): siRNA sense strand
uggcgggaaggaagagaaa

SEQ ID NO: 2489459 - RNA, 19 nt, Homo sapiens
  misc_RNA (1)...(19): siRNA sense strand
acgaggaugaggaggauga

SEQ ID NO: 2489460 - RNA, 19 nt, Homo sapiens
  misc_RNA (1)...(19): siRNA sense strand
ccgcaacgagcaugagaca

SEQ ID NO: 2489461 - RNA, 19 nt, Homo sapiens
  misc_RNA (1)...(19): siRNA sense strand
cugugugcuacgagacaaa

SEQ ID NO: 2489462 - RNA, 19 nt, Homo sapiens
  misc_RNA (1)...(19): siRNA sense strand
aggaugaggaggagaauag

SEQ ID NO: 2489463 - RNA, 19 nt, Homo sapiens
  misc_RNA (1)...(19): siRNA sense strand
acguugagguccaggaucu

SEQ ID NO: 2489464 - RNA, 19 nt, Homo sapiens
  misc_RNA (1)...(19): siRNA sense strand
augaggaggaugaggagga

SEQ ID NO: 2489465 - RNA, 19 nt, Homo sapiens
  misc_RNA (1)...(19): siRNA sense strand
gggaaggaagagaaagaag

SEQ ID NO: 2489466 - RNA, 19 nt, Homo sapiens
  misc_RNA (1)...(19): siRNA sense strand
gcaggaaguccgucaggga

SEQ ID NO: 2489467 - RNA, 19 nt, Homo sapiens
  misc_RNA (1)...(19): siRNA sense strand
gaggaugggaagaaggugu

SEQ ID NO: 2489468 - RNA, 19 nt, Homo sapiens
  misc_RNA (1)...(19): siRNA sense strand
uggagcagaagcagaagaa

SEQ ID NO: 2489469 - RNA, 19 nt, Homo sapiens
  misc_RNA (1)...(19): siRNA sense strand
gcaugagcuuugacgagga

SEQ ID NO: 2489470 - RNA, 19 nt, Homo sapiens
  misc_RNA (1)...(19): siRNA sense strand
ccagaucauccauggcaau

SEQ ID NO: 2489471 - RNA, 19 nt, Homo sapiens
  misc_RNA (1)...(19): siRNA sense strand
cagcuggaccugugggaga

SEQ ID NO: 2489472 - RNA, 19 nt, Homo sapiens
  misc_RNA (1)...(19): siRNA sense strand
aagagaauggacucagaaa

SEQ ID NO: 2489473 - RNA, 19 nt, Homo sapiens
  misc_RNA (1)...(19): siRNA sense strand
aguaccagauauugcacaa

SEQ ID NO: 2489474 - RNA, 19 nt, Homo sapiens
  misc_RNA (1)...(19): siRNA sense strand
agagaauggacucagaaau

SEQ ID NO: 2489475 - RNA, 19 nt, Homo sapiens
  misc_RNA (1)...(19): siRNA sense strand
auacaacagacaugcaaga

SEQ ID NO: 2489476 - RNA, 19 nt, Homo sapiens
  misc_RNA (1)...(19): siRNA sense strand
gggcgaagcuucaaccaga

SEQ ID NO: 2489477 - RNA, 19 nt, Homo sapiens
  misc_RNA (1)...(19): siRNA sense strand
ggcaagagcuucagcagga

SEQ ID NO: 2489478 - RNA, 19 nt, Homo sapiens
  misc_RNA (1)...(19): siRNA sense strand
gggaaaggauucagucgga

SEQ ID NO: 2489479 - RNA, 19 nt, Homo sapiens
  misc_RNA (1)...(19): siRNA sense strand
ggaaagaggcccuacgugu

SEQ ID NO: 2489480 - RNA, 19 nt, Homo sapiens
  misc_RNA (1)...(19): siRNA sense strand
ugaugaagcaccagagaac

SEQ ID NO: 2489481 - RNA, 19 nt, Homo sapiens
  misc_RNA (1)...(19): siRNA sense strand
uggaaaaccuucagccaga

SEQ ID NO: 2489482 - RNA, 19 nt, Homo sapiens
  misc_RNA (1)...(19): siRNA sense strand
gaggaggaguggaggcaug

SEQ ID NO: 2489483 - RNA, 19 nt, Homo sapiens
  misc_RNA (1)...(19): siRNA sense strand
gcuccaaucucgucaggca

SEQ ID NO: 2489484 - RNA, 19 nt, Homo sapiens
  misc_RNA (1)...(19): siRNA sense strand
gugcccugagugugggaaa

SEQ ID NO: 2489485 - RNA, 19 nt, Homo sapiens
  misc_RNA (1)...(19): siRNA sense strand
cggaagggucugugagcag

SEQ ID NO: 2489486 - RNA, 19 nt, Homo sapiens
  misc_RNA (1)...(19): siRNA sense strand
ccauaugggugccaggugu

SEQ ID NO: 2489487 - RNA, 19 nt, Homo sapiens
  misc_RNA (1)...(19): siRNA sense strand
gaguguggcaagagcuuca

SEQ ID NO: 2489488 - RNA, 19 nt, Homo sapiens
  misc_RNA (1)...(19): siRNA sense strand
ucgauaagaacgagcugaa

SEQ ID NO: 2489489 - RNA, 19 nt, Homo sapiens
  misc_RNA (1)...(19): siRNA sense strand
ggaugaucgauaagaacga

SEQ ID NO: 2489490 - RNA, 19 nt, Homo sapiens
  misc_RNA (1)...(19): siRNA sense strand
acgacauccucauucgaaa

SEQ ID NO: 2489491 - RNA, 19 nt, Homo sapiens
  misc_RNA (1)...(19): siRNA sense strand
gauaaagacaggaguggag

SEQ ID NO: 2489492 - RNA, 19 nt, Homo sapiens
  misc_RNA (1)...(19): siRNA sense strand
gugacaaggauaaaggaca

SEQ ID NO: 2489493 - RNA, 19 nt, Homo sapiens
  misc_RNA (1)...(19): siRNA sense strand
cugaagaaggagaaacuga

SEQ ID NO: 2489494 - RNA, 19 nt, Homo sapiens
  misc_RNA (1)...(19): siRNA sense strand
aggauaaaggacaaaguca

SEQ ID NO: 2489495 - RNA, 19 nt, Homo sapiens
  misc_RNA (1)...(19): siRNA sense strand
ucuacugugacaaggauaa

SEQ ID NO: 2489496 - RNA, 19 nt, Homo sapiens
  misc_RNA (1)...(19): siRNA sense strand
gugacaaggauaaaggaca

SEQ ID NO: 2489497 - RNA, 19 nt, Homo sapiens
  misc_RNA (1)...(19): siRNA sense strand
cugaagaaggagaaacuga

SEQ ID NO: 2489498 - RNA, 19 nt, Homo sapiens
  misc_RNA (1)...(19): siRNA sense strand
aggauaaaggacaaaguca

SEQ ID NO: 2489499 - RNA, 19 nt, Homo sapiens
  misc_RNA (1)...(19): siRNA sense strand
ucuacugugacaaggauaa

SEQ ID NO: 2489500 - RNA, 19 nt, Homo sapiens
  misc_RNA (1)...(19): siRNA sense strand
gugacaaggauaaaggaca

SEQ ID NO: 2489501 - RNA, 19 nt, Homo sapiens
  misc_RNA (1)...(19): siRNA sense strand
cugaagaaggagaaacuga

SEQ ID NO: 2489502 - RNA, 19 nt, Homo sapiens
  misc_RNA (1)...(19): siRNA sense strand
aggauaaaggacaaaguca

SEQ ID NO: 2489503 - RNA, 19 nt, Homo sapiens
  misc_RNA (1)...(19): siRNA sense strand
ucuacugugacaaggauaa

SEQ ID NO: 2489504 - RNA, 19 nt, Homo sapiens
  misc_RNA (1)...(19): siRNA sense strand
gugacaaggauaaaggaca

SEQ ID NO: 2489505 - RNA, 19 nt, Homo sapiens
  misc_RNA (1)...(19): siRNA sense strand
cugaagaaggagaaacuga

SEQ ID NO: 2489506 - RNA, 19 nt, Homo sapiens
  misc_RNA (1)...(19): siRNA sense strand
aggauaaaggacaaaguca

SEQ ID NO: 2489507 - RNA, 19 nt, Homo sapiens
  misc_RNA (1)...(19): siRNA sense strand
ucuacugugacaaggauaa

SEQ ID NO: 2489508 - RNA, 19 nt, Homo sapiens
  misc_RNA (1)...(19): siRNA sense strand
gugacaaggauaaaggaca

SEQ ID NO: 2489509 - RNA, 19 nt, Homo sapiens
  misc_RNA (1)...(19): siRNA sense strand
cugaagaaggagaaacuga

SEQ ID NO: 2489510 - RNA, 19 nt, Homo sapiens
  misc_RNA (1)...(19): siRNA sense strand
aggauaaaggacaaaguca

SEQ ID NO: 2489511 - RNA, 19 nt, Homo sapiens
  misc_RNA (1)...(19): siRNA sense strand
ucuacugugacaaggauaa

SEQ ID NO: 2489512 - RNA, 19 nt, Homo sapiens
  misc_RNA (1)...(19): siRNA sense strand
aagaaauaccagugcaaaa

SEQ ID NO: 2489513 - RNA, 19 nt, Homo sapiens
  misc_RNA (1)...(19): siRNA sense strand
gugaugaagaggaaagacu

SEQ ID NO: 2489514 - RNA, 19 nt, Homo sapiens
  misc_RNA (1)...(19): siRNA sense strand
aagccaaacuacagcgaac

SEQ ID NO: 2489515 - RNA, 19 nt, Homo sapiens
  misc_RNA (1)...(19): siRNA sense strand
ccucacugcaacagagcau

SEQ ID NO: 2489516 - RNA, 19 nt, Homo sapiens
  misc_RNA (1)...(19): siRNA sense strand
ccugguugcuucaaggaca

SEQ ID NO: 2489517 - RNA, 19 nt, Homo sapiens
  misc_RNA (1)...(19): siRNA sense strand
caacagagcauuugcagac

SEQ ID NO: 2489518 - RNA, 19 nt, Homo sapiens
  misc_RNA (1)...(19): siRNA sense strand
guaaagaaauaccagugca

SEQ ID NO: 2489519 - RNA, 19 nt, Homo sapiens
  misc_RNA (1)...(19): siRNA sense strand
guggaggaugcgagcggaa

SEQ ID NO: 2489520 - RNA, 19 nt, Homo sapiens
  misc_RNA (1)...(19): siRNA sense strand
ugccauaccugcaaggaca

SEQ ID NO: 2489521 - RNA, 19 nt, Homo sapiens
  misc_RNA (1)...(19): siRNA sense strand
ccagaugccagcagcccaa

SEQ ID NO: 2489522 - RNA, 19 nt, Homo sapiens
  misc_RNA (1)...(19): siRNA sense strand
guggaggaugcgagcggaa

SEQ ID NO: 2489523 - RNA, 19 nt, Homo sapiens
  misc_RNA (1)...(19): siRNA sense strand
ugccauaccugcaaggaca

SEQ ID NO: 2489524 - RNA, 19 nt, Homo sapiens
  misc_RNA (1)...(19): siRNA sense strand
ccagaugccagcagcccaa

SEQ ID NO: 2489525 - RNA, 19 nt, Homo sapiens
  misc_RNA (1)...(19): siRNA sense strand
guggaggaugcgagcggaa

SEQ ID NO: 2489526 - RNA, 19 nt, Homo sapiens
  misc_RNA (1)...(19): siRNA sense strand
ugccauaccugcaaggaca

SEQ ID NO: 2489527 - RNA, 19 nt, Homo sapiens
  misc_RNA (1)...(19): siRNA sense strand
ccagaugccagcagcccaa

SEQ ID NO: 2489528 - RNA, 19 nt, Homo sapiens
  misc_RNA (1)...(19): siRNA sense strand
agucagaaugccuuggaaa

SEQ ID NO: 2489529 - RNA, 19 nt, Homo sapiens
  misc_RNA (1)...(19): siRNA sense strand
gucagaaugccuuggaaaa

SEQ ID NO: 2489530 - RNA, 19 nt, Homo sapiens
  misc_RNA (1)...(19): siRNA sense strand
caccugacuaggcgggaua

SEQ ID NO: 2489531 - RNA, 19 nt, Homo sapiens
  misc_RNA (1)...(19): siRNA sense strand
aagaagaaccccugacaga

SEQ ID NO: 2489532 - RNA, 19 nt, Homo sapiens
  misc_RNA (1)...(19): siRNA sense strand
cgucaauuccgguacacuu

SEQ ID NO: 2489533 - RNA, 19 nt, Homo sapiens
  misc_RNA (1)...(19): siRNA sense strand
cugaaaaggcuguguaauc

SEQ ID NO: 2489534 - RNA, 19 nt, Homo sapiens
  misc_RNA (1)...(19): siRNA sense strand
ccguaguaguuguggccuu

SEQ ID NO: 2489535 - RNA, 19 nt, Homo sapiens
  misc_RNA (1)...(19): siRNA sense strand
gggaaauaucguugugaag

SEQ ID NO: 2489536 - RNA, 19 nt, Homo sapiens
  misc_RNA (1)...(19): siRNA sense strand
gucaagacaaagaagggaa

SEQ ID NO: 2489537 - RNA, 19 nt, Homo sapiens
  misc_RNA (1)...(19): siRNA sense strand
agauuagaguggaagaaac

SEQ ID NO: 2489538 - RNA, 19 nt, Homo sapiens
  misc_RNA (1)...(19): siRNA sense strand
cgagcugagaugauagauu

SEQ ID NO: 2489539 - RNA, 19 nt, Homo sapiens
  misc_RNA (1)...(19): siRNA sense strand
uggaacugugguagagcua

SEQ ID NO: 2489540 - RNA, 19 nt, Homo sapiens
  misc_RNA (1)...(19): siRNA sense strand
aguuguggccuuagugauu

SEQ ID NO: 2489541 - RNA, 19 nt, Homo sapiens
  misc_RNA (1)...(19): siRNA sense strand
ucaagacaaagaagggaau

SEQ ID NO: 2489542 - RNA, 19 nt, Homo sapiens
  misc_RNA (1)...(19): siRNA sense strand
cguuuguggccuuggugua

SEQ ID NO: 2489543 - RNA, 19 nt, Homo sapiens
  misc_RNA (1)...(19): siRNA sense strand
ccagauuagaguggaagaa

SEQ ID NO: 2489544 - RNA, 19 nt, Homo sapiens
  misc_RNA (1)...(19): siRNA sense strand
cugagaugauagauuucaa

SEQ ID NO: 2489545 - RNA, 19 nt, Homo sapiens
  misc_RNA (1)...(19): siRNA sense strand
gaagaaacugggucggagu

SEQ ID NO: 2489546 - RNA, 19 nt, Homo sapiens
  misc_RNA (1)...(19): siRNA sense strand
gccaaaaccuggaagagga

SEQ ID NO: 2489547 - RNA, 19 nt, Homo sapiens
  misc_RNA (1)...(19): siRNA sense strand
ggaacaaggaggagaacaa

SEQ ID NO: 2489548 - RNA, 19 nt, Homo sapiens
  misc_RNA (1)...(19): siRNA sense strand
ggaagagaccaaaguauaa

SEQ ID NO: 2489549 - RNA, 19 nt, Homo sapiens
  misc_RNA (1)...(19): siRNA sense strand
aggaagagaccaaaguaua

SEQ ID NO: 2489550 - RNA, 19 nt, Homo sapiens
  misc_RNA (1)...(19): siRNA sense strand
gaucacaggaagagaccaa

SEQ ID NO: 2489551 - RNA, 19 nt, Homo sapiens
  misc_RNA (1)...(19): siRNA sense strand
aagcaaagcugaagcagga

SEQ ID NO: 2489552 - RNA, 19 nt, Homo sapiens
  misc_RNA (1)...(19): siRNA sense strand
gcauugagauugaccagaa

SEQ ID NO: 2489553 - RNA, 19 nt, Homo sapiens
  misc_RNA (1)...(19): siRNA sense strand
uguacuaccugaaggagaa

SEQ ID NO: 2489554 - RNA, 19 nt, Homo sapiens
  misc_RNA (1)...(19): siRNA sense strand
acuaaagaucacaggaaga

SEQ ID NO: 2489555 - RNA, 19 nt, Homo sapiens
  misc_RNA (1)...(19): siRNA sense strand
ucaacgaccuggagaacuu

SEQ ID NO: 2489556 - RNA, 19 nt, Homo sapiens
  misc_RNA (1)...(19): siRNA sense strand
ccgggaacaaggaggagaa

SEQ ID NO: 2489557 - RNA, 19 nt, Homo sapiens
  misc_RNA (1)...(19): siRNA sense strand
caggaagagaccaaaguau

SEQ ID NO: 2489558 - RNA, 19 nt, Homo sapiens
  misc_RNA (1)...(19): siRNA sense strand
ucaugaagcagacgggcua

SEQ ID NO: 2489559 - RNA, 19 nt, Homo sapiens
  misc_RNA (1)...(19): siRNA sense strand
ccaccaagccggacuauga

SEQ ID NO: 2489560 - RNA, 19 nt, Homo sapiens
  misc_RNA (1)...(19): siRNA sense strand
cauggagagcauugagauu

SEQ ID NO: 2489561 - RNA, 19 nt, Homo sapiens
  misc_RNA (1)...(19): siRNA sense strand
ucaaggaugucauggcgaa

SEQ ID NO: 2489562 - RNA, 19 nt, Homo sapiens
  misc_RNA (1)...(19): siRNA sense strand
uggagagcauugagauuga

SEQ ID NO: 2489563 - RNA, 19 nt, Homo sapiens
  misc_RNA (1)...(19): siRNA sense strand
aaaucaacgaccuggagaa

SEQ ID NO: 2489564 - RNA, 19 nt, Homo sapiens
  misc_RNA (1)...(19): siRNA sense strand
gcaagaugacaguggcgau

SEQ ID NO: 2489565 - RNA, 19 nt, Homo sapiens
  misc_RNA (1)...(19): siRNA sense strand
gaccagaagcugcaggaga

SEQ ID NO: 2489566 - RNA, 19 nt, Homo sapiens
  misc_RNA (1)...(19): siRNA sense strand
accagaagcugcaggagau

SEQ ID NO: 2489567 - RNA, 19 nt, Homo sapiens
  misc_RNA (1)...(19): siRNA sense strand
uuacuaaagaucacaggaa

SEQ ID NO: 2489568 - RNA, 19 nt, Homo sapiens
  misc_RNA (1)...(19): siRNA sense strand
gcuaccaggcagaaaucaa

SEQ ID NO: 2489569 - RNA, 19 nt, Homo sapiens
  misc_RNA (1)...(19): siRNA sense strand
cuggagaacuugggcgaga

SEQ ID NO: 2489570 - RNA, 19 nt, Homo sapiens
  misc_RNA (1)...(19): siRNA sense strand
ccaacauccugcuggacga

SEQ ID NO: 2489571 - RNA, 19 nt, Homo sapiens
  misc_RNA (1)...(19): siRNA sense strand
caggagaucaugaagcaga

SEQ ID NO: 2489572 - RNA, 19 nt, Homo sapiens
  misc_RNA (1)...(19): siRNA sense strand
aggaggagaacaagcgcau

SEQ ID NO: 2489573 - RNA, 19 nt, Homo sapiens
  misc_RNA (1)...(19): siRNA sense strand
ucaaagacugccuuacuaa

SEQ ID NO: 2489574 - RNA, 19 nt, Homo sapiens
  misc_RNA (1)...(19): siRNA sense strand
uugugaaggcgcuguacua

SEQ ID NO: 2489575 - RNA, 19 nt, Homo sapiens
  misc_RNA (1)...(19): siRNA sense strand
cuguacuaccugaaggaga

SEQ ID NO: 2489576 - RNA, 19 nt, Homo sapiens
  misc_RNA (1)...(19): siRNA sense strand
ccuacaucgugcagugcuu

SEQ ID NO: 2489577 - RNA, 19 nt, Homo sapiens
  misc_RNA (1)...(19): siRNA sense strand
aggcagaaaucaacgaccu

SEQ ID NO: 2489578 - RNA, 19 nt, Homo sapiens
  misc_RNA (1)...(19): siRNA sense strand
ugacaguggcgauugugaa

SEQ ID NO: 2489579 - RNA, 19 nt, Homo sapiens
  misc_RNA (1)...(19): siRNA sense strand
agaaaauggagcuggagaa

SEQ ID NO: 2489580 - RNA, 19 nt, Homo sapiens
  misc_RNA (1)...(19): siRNA sense strand
uggcaguguuuauggugau

SEQ ID NO: 2489581 - RNA, 19 nt, Homo sapiens
  misc_RNA (1)...(19): siRNA sense strand
gaauauuuauggaccgucu

SEQ ID NO: 2489582 - RNA, 19 nt, Homo sapiens
  misc_RNA (1)...(19): siRNA sense strand
gcgggaacauggaggagga

SEQ ID NO: 2489583 - RNA, 19 nt, Homo sapiens
  misc_RNA (1)...(19): siRNA sense strand
aggacaaggagaagcccaa

SEQ ID NO: 2489584 - RNA, 19 nt, Homo sapiens
  misc_RNA (1)...(19): siRNA sense strand
cugcagaucuacuggagca

SEQ ID NO: 2489585 - RNA, 19 nt, Homo sapiens
  misc_RNA (1)...(19): siRNA sense strand
cugaaugacaacugcaaga

SEQ ID NO: 2489586 - RNA, 19 nt, Homo sapiens
  misc_RNA (1)...(19): siRNA sense strand
aggaggagugugagaaguu

SEQ ID NO: 2489587 - RNA, 19 nt, Homo sapiens
  misc_RNA (1)...(19): siRNA sense strand
gagaaguuccucagggacu

SEQ ID NO: 2489588 - RNA, 19 nt, Homo sapiens
  misc_RNA (1)...(19): siRNA sense strand
gcaugaagaaggagcugca

SEQ ID NO: 2489589 - RNA, 19 nt, Homo sapiens
  misc_RNA (1)...(19): siRNA sense strand
ccuuggaggucuugcagga

SEQ ID NO: 2489590 - RNA, 19 nt, Homo sapiens
  misc_RNA (1)...(19): siRNA sense strand
uggucagcgccaagagcaa

SEQ ID NO: 2489591 - RNA, 19 nt, Homo sapiens
  misc_RNA (1)...(19): siRNA sense strand
gcaacaccaugcuggccaa

SEQ ID NO: 2489592 - RNA, 19 nt, Homo sapiens
  misc_RNA (1)...(19): siRNA sense strand
ccauccaggccuuuggcaa

SEQ ID NO: 2489593 - RNA, 19 nt, Homo sapiens
  misc_RNA (1)...(19): siRNA sense strand
ggaacauggaggaggagug

SEQ ID NO: 2489594 - RNA, 19 nt, Homo sapiens
  misc_RNA (1)...(19): siRNA sense strand
ccauauuauccgagagauu

SEQ ID NO: 2489595 - RNA, 19 nt, Homo sapiens
  misc_RNA (1)...(19): siRNA sense strand
cggaagacggccuggucaa

SEQ ID NO: 2489596 - RNA, 19 nt, Homo sapiens
  misc_RNA (1)...(19): siRNA sense strand
uggaagaagucaugcacga

SEQ ID NO: 2489597 - RNA, 19 nt, Homo sapiens
  misc_RNA (1)...(19): siRNA sense strand
cuucagaaaucauccgcaa

SEQ ID NO: 2489598 - RNA, 19 nt, Homo sapiens
  misc_RNA (1)...(19): siRNA sense strand
agaccaacgaugagcucaa

SEQ ID NO: 2489599 - RNA, 19 nt, Homo sapiens
  misc_RNA (1)...(19): siRNA sense strand
cugaaggcgugaaggcuga

SEQ ID NO: 2489600 - RNA, 19 nt, Homo sapiens
  misc_RNA (1)...(19): siRNA sense strand
cggacaaggauggaugaaa

SEQ ID NO: 2489601 - RNA, 19 nt, Homo sapiens
  misc_RNA (1)...(19): siRNA sense strand
gaagaaagccucuacgagu

SEQ ID NO: 2489602 - RNA, 19 nt, Homo sapiens
  misc_RNA (1)...(19): siRNA sense strand
agaucacgcuggaggagau

SEQ ID NO: 2489603 - RNA, 19 nt, Homo sapiens
  misc_RNA (1)...(19): siRNA sense strand
gagugaugauggugauacu

SEQ ID NO: 2489604 - RNA, 19 nt, Homo sapiens
  misc_RNA (1)...(19): siRNA sense strand
augagagaggagucagaua

SEQ ID NO: 2489605 - RNA, 19 nt, Homo sapiens
  misc_RNA (1)...(19): siRNA sense strand
cgcaauauuuacuggacca

SEQ ID NO: 2489606 - RNA, 19 nt, Homo sapiens
  misc_RNA (1)...(19): siRNA sense strand
ccaugagagaggagucaga

SEQ ID NO: 2489607 - RNA, 19 nt, Homo sapiens
  misc_RNA (1)...(19): siRNA sense strand
ccccaaacaaggagaagua

SEQ ID NO: 2489608 - RNA, 19 nt, Homo sapiens
  misc_RNA (1)...(19): siRNA sense strand
gagcucaaaugcaagguga

SEQ ID NO: 2489609 - RNA, 19 nt, Homo sapiens
  misc_RNA (1)...(19): siRNA sense strand
ugauggugauacugaaaca

SEQ ID NO: 2489610 - RNA, 19 nt, Homo sapiens
  misc_RNA (1)...(19): siRNA sense strand
acuucaaugacaucaguaa

SEQ ID NO: 2489611 - RNA, 19 nt, Homo sapiens
  misc_RNA (1)...(19): siRNA sense strand
augaggaguucuucggaca

SEQ ID NO: 2489612 - RNA, 19 nt, Homo sapiens
  misc_RNA (1)...(19): siRNA sense strand
ccuacaaaauagagcacca

SEQ ID NO: 2489613 - RNA, 19 nt, Homo sapiens
  misc_RNA (1)...(19): siRNA sense strand
aaggagaaguaccggagga

SEQ ID NO: 2489614 - RNA, 19 nt, Homo sapiens
  misc_RNA (1)...(19): siRNA sense strand
gcugcaacuccaauggcua

SEQ ID NO: 2489615 - RNA, 19 nt, Homo sapiens
  misc_RNA (1)...(19): siRNA sense strand
gaccagaggaauggagaca

SEQ ID NO: 2489616 - RNA, 19 nt, Homo sapiens
  misc_RNA (1)...(19): siRNA sense strand
ccauauuauccgagagauu

SEQ ID NO: 2489617 - RNA, 19 nt, Homo sapiens
  misc_RNA (1)...(19): siRNA sense strand
cggaagacggccuggucaa

SEQ ID NO: 2489618 - RNA, 19 nt, Homo sapiens
  misc_RNA (1)...(19): siRNA sense strand
uggaagaagucaugcacga

SEQ ID NO: 2489619 - RNA, 19 nt, Homo sapiens
  misc_RNA (1)...(19): siRNA sense strand
cuucagaaaucauccgcaa

SEQ ID NO: 2489620 - RNA, 19 nt, Homo sapiens
  misc_RNA (1)...(19): siRNA sense strand
agaccaacgaugagcucaa

SEQ ID NO: 2489621 - RNA, 19 nt, Homo sapiens
  misc_RNA (1)...(19): siRNA sense strand
cugaaggcgugaaggcuga

SEQ ID NO: 2489622 - RNA, 19 nt, Homo sapiens
  misc_RNA (1)...(19): siRNA sense strand
cggacaaggauggaugaaa

SEQ ID NO: 2489623 - RNA, 19 nt, Homo sapiens
  misc_RNA (1)...(19): siRNA sense strand
gaagaaagccucuacgagu

SEQ ID NO: 2489624 - RNA, 19 nt, Homo sapiens
  misc_RNA (1)...(19): siRNA sense strand
agaucacgcuggaggagau

SEQ ID NO: 2489625 - RNA, 19 nt, Homo sapiens
  misc_RNA (1)...(19): siRNA sense strand
gagugaugauggugauacu

SEQ ID NO: 2489626 - RNA, 19 nt, Homo sapiens
  misc_RNA (1)...(19): siRNA sense strand
augagagaggagucagaua

SEQ ID NO: 2489627 - RNA, 19 nt, Homo sapiens
  misc_RNA (1)...(19): siRNA sense strand
cgcaauauuuacuggacca

SEQ ID NO: 2489628 - RNA, 19 nt, Homo sapiens
  misc_RNA (1)...(19): siRNA sense strand
ccaugagagaggagucaga

SEQ ID NO: 2489629 - RNA, 19 nt, Homo sapiens
  misc_RNA (1)...(19): siRNA sense strand
ccccaaacaaggagaagua

SEQ ID NO: 2489630 - RNA, 19 nt, Homo sapiens
  misc_RNA (1)...(19): siRNA sense strand
gagcucaaaugcaagguga

SEQ ID NO: 2489631 - RNA, 19 nt, Homo sapiens
  misc_RNA (1)...(19): siRNA sense strand
ugauggugauacugaaaca

SEQ ID NO: 2489632 - RNA, 19 nt, Homo sapiens
  misc_RNA (1)...(19): siRNA sense strand
acuucaaugacaucaguaa

SEQ ID NO: 2489633 - RNA, 19 nt, Homo sapiens
  misc_RNA (1)...(19): siRNA sense strand
augaggaguucuucggaca

SEQ ID NO: 2489634 - RNA, 19 nt, Homo sapiens
  misc_RNA (1)...(19): siRNA sense strand
ccuacaaaauagagcacca

SEQ ID NO: 2489635 - RNA, 19 nt, Homo sapiens
  misc_RNA (1)...(19): siRNA sense strand
aaggagaaguaccggagga

SEQ ID NO: 2489636 - RNA, 19 nt, Homo sapiens
  misc_RNA (1)...(19): siRNA sense strand
gaccagaggaauggagaca

SEQ ID NO: 2489637 - RNA, 19 nt, Homo sapiens
  misc_RNA (1)...(19): siRNA sense strand
caauaagaagcgcaggcaa

SEQ ID NO: 2489638 - RNA, 19 nt, Homo sapiens
  misc_RNA (1)...(19): siRNA sense strand
ucaaugaagaugagccgua

SEQ ID NO: 2489639 - RNA, 19 nt, Homo sapiens
  misc_RNA (1)...(19): siRNA sense strand
acuaugagaccguucgcaa

SEQ ID NO: 2489640 - RNA, 19 nt, Homo sapiens
  misc_RNA (1)...(19): siRNA sense strand
caggcaaaucaaugaagau

SEQ ID NO: 2489641 - RNA, 19 nt, Homo sapiens
  misc_RNA (1)...(19): siRNA sense strand
caauaagaagcgcaggcaa

SEQ ID NO: 2489642 - RNA, 19 nt, Homo sapiens
  misc_RNA (1)...(19): siRNA sense strand
ucaaugaagaugagccgua

SEQ ID NO: 2489643 - RNA, 19 nt, Homo sapiens
  misc_RNA (1)...(19): siRNA sense strand
acuaugagaccguucgcaa

SEQ ID NO: 2489644 - RNA, 19 nt, Homo sapiens
  misc_RNA (1)...(19): siRNA sense strand
caggcaaaucaaugaagau

SEQ ID NO: 2489645 - RNA, 19 nt, Homo sapiens
  misc_RNA (1)...(19): siRNA sense strand
aggccuacacagagguaaa

SEQ ID NO: 2489646 - RNA, 19 nt, Homo sapiens
  misc_RNA (1)...(19): siRNA sense strand
caucaacaaugaauggcaa

SEQ ID NO: 2489647 - RNA, 19 nt, Homo sapiens
  misc_RNA (1)...(19): siRNA sense strand
aggaugggcuuaaggccua

SEQ ID NO: 2489648 - RNA, 19 nt, Homo sapiens
  misc_RNA (1)...(19): siRNA sense strand
uguucaaguucaagaagau

SEQ ID NO: 2489649 - RNA, 19 nt, Homo sapiens
  misc_RNA (1)...(19): siRNA sense strand
ucaucaagguguaucggua

SEQ ID NO: 2489650 - RNA, 19 nt, Homo sapiens
  misc_RNA (1)...(19): siRNA sense strand
ucgagagaaccguggagaa

SEQ ID NO: 2489651 - RNA, 19 nt, Homo sapiens
  misc_RNA (1)...(19): siRNA sense strand
agauugaggaggugguuga

SEQ ID NO: 2489652 - RNA, 19 nt, Homo sapiens
  misc_RNA (1)...(19): siRNA sense strand
acacagagguaaagacggu

SEQ ID NO: 2489653 - RNA, 19 nt, Homo sapiens
  misc_RNA (1)...(19): siRNA sense strand
agguaaagacggucaccau

SEQ ID NO: 2489654 - RNA, 19 nt, Homo sapiens
  misc_RNA (1)...(19): siRNA sense strand
auuccaaccucaagagagu

SEQ ID NO: 2489655 - RNA, 19 nt, Homo sapiens
  misc_RNA (1)...(19): siRNA sense strand
gagaauugccaaagaggag

SEQ ID NO: 2489656 - RNA, 19 nt, Homo sapiens
  misc_RNA (1)...(19): siRNA sense strand
cugacaaguggcauggcaa

SEQ ID NO: 2489657 - RNA, 19 nt, Homo sapiens
  misc_RNA (1)...(19): siRNA sense strand
aaagcaaagcagaggaaag

SEQ ID NO: 2489658 - RNA, 19 nt, Homo sapiens
  misc_RNA (1)...(19): siRNA sense strand
ccagaaggagggcgcaaaa

SEQ ID NO: 2489659 - RNA, 19 nt, Homo sapiens
  misc_RNA (1)...(19): siRNA sense strand
ggguuuaaggaaucuggaa

SEQ ID NO: 2489660 - RNA, 19 nt, Homo sapiens
  misc_RNA (1)...(19): siRNA sense strand
cacucgagaccuuggacaa

SEQ ID NO: 2489661 - RNA, 19 nt, Homo sapiens
  misc_RNA (1)...(19): siRNA sense strand
ccuuugagcuggacaccca

SEQ ID NO: 2489662 - RNA, 19 nt, Homo sapiens
  misc_RNA (1)...(19): siRNA sense strand
uggacaaggagcaguuuga

SEQ ID NO: 2489663 - RNA, 19 nt, Homo sapiens
  misc_RNA (1)...(19): siRNA sense strand
cuguucaaguucaagaaga

SEQ ID NO: 2489664 - RNA, 19 nt, Homo sapiens
  misc_RNA (1)...(19): siRNA sense strand
uuuggaggguuuaaggaau

SEQ ID NO: 2489665 - RNA, 19 nt, Homo sapiens
  misc_RNA (1)...(19): siRNA sense strand
agaccuuggacaaugggaa

SEQ ID NO: 2489666 - RNA, 19 nt, Homo sapiens
  misc_RNA (1)...(19): siRNA sense strand
agaacagaaagcaggacaa

SEQ ID NO: 2489667 - RNA, 19 nt, Homo sapiens
  misc_RNA (1)...(19): siRNA sense strand
gggaauccauggagggaag

SEQ ID NO: 2489668 - RNA, 19 nt, Homo sapiens
  misc_RNA (1)...(19): siRNA sense strand
gagaacagaaagcaggaca

SEQ ID NO: 2489669 - RNA, 19 nt, Homo sapiens
  misc_RNA (1)...(19): siRNA sense strand
agauagaugugguacccau

SEQ ID NO: 2489670 - RNA, 19 nt, Homo sapiens
  misc_RNA (1)...(19): siRNA sense strand
agaaaagauagauguggua

SEQ ID NO: 2489671 - RNA, 19 nt, Homo sapiens
  misc_RNA (1)...(19): siRNA sense strand
agaugcaagccuucagaau

SEQ ID NO: 2489672 - RNA, 19 nt, Homo sapiens
  misc_RNA (1)...(19): siRNA sense strand
agaacagaaagcaggacaa

SEQ ID NO: 2489673 - RNA, 19 nt, Homo sapiens
  misc_RNA (1)...(19): siRNA sense strand
gggaauccauggagggaag

SEQ ID NO: 2489674 - RNA, 19 nt, Homo sapiens
  misc_RNA (1)...(19): siRNA sense strand
gagaacagaaagcaggaca

SEQ ID NO: 2489675 - RNA, 19 nt, Homo sapiens
  misc_RNA (1)...(19): siRNA sense strand
agauagaugugguacccau

SEQ ID NO: 2489676 - RNA, 19 nt, Homo sapiens
  misc_RNA (1)...(19): siRNA sense strand
agaaaagauagauguggua

SEQ ID NO: 2489677 - RNA, 19 nt, Homo sapiens
  misc_RNA (1)...(19): siRNA sense strand
agaugcaagccuucagaau

SEQ ID NO: 2489678 - RNA, 19 nt, Homo sapiens
  misc_RNA (1)...(19): siRNA sense strand
agaacagaaagcaggacaa

SEQ ID NO: 2489679 - RNA, 19 nt, Homo sapiens
  misc_RNA (1)...(19): siRNA sense strand
gggaauccauggagggaag

SEQ ID NO: 2489680 - RNA, 19 nt, Homo sapiens
  misc_RNA (1)...(19): siRNA sense strand
gagaacagaaagcaggaca

SEQ ID NO: 2489681 - RNA, 19 nt, Homo sapiens
  misc_RNA (1)...(19): siRNA sense strand
agauagaugugguacccau

SEQ ID NO: 2489682 - RNA, 19 nt, Homo sapiens
  misc_RNA (1)...(19): siRNA sense strand
agaaaagauagauguggua

SEQ ID NO: 2489683 - RNA, 19 nt, Homo sapiens
  misc_RNA (1)...(19): siRNA sense strand
agaugcaagccuucagaau

SEQ ID NO: 2489684 - RNA, 19 nt, Homo sapiens
  misc_RNA (1)...(19): siRNA sense strand
agaacagaaagcaggacaa

SEQ ID NO: 2489685 - RNA, 19 nt, Homo sapiens
  misc_RNA (1)...(19): siRNA sense strand
gggaauccauggagggaag

SEQ ID NO: 2489686 - RNA, 19 nt, Homo sapiens
  misc_RNA (1)...(19): siRNA sense strand
gagaacagaaagcaggaca

SEQ ID NO: 2489687 - RNA, 19 nt, Homo sapiens
  misc_RNA (1)...(19): siRNA sense strand
agauagaugugguacccau

SEQ ID NO: 2489688 - RNA, 19 nt, Homo sapiens
  misc_RNA (1)...(19): siRNA sense strand
agaaaagauagauguggua

SEQ ID NO: 2489689 - RNA, 19 nt, Homo sapiens
  misc_RNA (1)...(19): siRNA sense strand
cgaaaaugucagaaugaau

SEQ ID NO: 2489690 - RNA, 19 nt, Homo sapiens
  misc_RNA (1)...(19): siRNA sense strand
ugaauuugcagaugagcau

SEQ ID NO: 2489691 - RNA, 19 nt, Homo sapiens
  misc_RNA (1)...(19): siRNA sense strand
gggaauggagugagccugu

SEQ ID NO: 2489692 - RNA, 19 nt, Homo sapiens
  misc_RNA (1)...(19): siRNA sense strand
ucagaaaccuggagccaug

SEQ ID NO: 2489693 - RNA, 19 nt, Homo sapiens
  misc_RNA (1)...(19): siRNA sense strand
caguggaggaagugggaca

SEQ ID NO: 2489694 - RNA, 19 nt, Homo sapiens
  misc_RNA (1)...(19): siRNA sense strand
cuggauaagcggaaaggau

SEQ ID NO: 2489695 - RNA, 19 nt, Homo sapiens
  misc_RNA (1)...(19): siRNA sense strand
ggaccaaggagaaggagcu

SEQ ID NO: 2489696 - RNA, 19 nt, Homo sapiens
  misc_RNA (1)...(19): siRNA sense strand
ggaagcaaacaguggucau

SEQ ID NO: 2489697 - RNA, 19 nt, Homo sapiens
  misc_RNA (1)...(19): siRNA sense strand
ucgcagacacggugcucaa

SEQ ID NO: 2489698 - RNA, 19 nt, Homo sapiens
  misc_RNA (1)...(19): siRNA sense strand
ggaggagaggagaggcuga

SEQ ID NO: 2489699 - RNA, 19 nt, Homo sapiens
  misc_RNA (1)...(19): siRNA sense strand
ggcaagaagaagggacgaa

SEQ ID NO: 2489700 - RNA, 19 nt, Homo sapiens
  misc_RNA (1)...(19): siRNA sense strand
gcagaacgugagauggaca

SEQ ID NO: 2489701 - RNA, 19 nt, Homo sapiens
  misc_RNA (1)...(19): siRNA sense strand
agcaaacaguggucaucaa

SEQ ID NO: 2489702 - RNA, 19 nt, Homo sapiens
  misc_RNA (1)...(19): siRNA sense strand
aggaguucgcggaggcaga

SEQ ID NO: 2489703 - RNA, 19 nt, Homo sapiens
  misc_RNA (1)...(19): siRNA sense strand
gcagauugcccgugggaug

SEQ ID NO: 2489704 - RNA, 19 nt, Homo sapiens
  misc_RNA (1)...(19): siRNA sense strand
ggagaaacgucuucgaggu

SEQ ID NO: 2489705 - RNA, 19 nt, Homo sapiens
  misc_RNA (1)...(19): siRNA sense strand
ggacgaagccacaugguac

SEQ ID NO: 2489706 - RNA, 19 nt, Homo sapiens
  misc_RNA (1)...(19): siRNA sense strand
gaggugagcugguggcugu

SEQ ID NO: 2489707 - RNA, 19 nt, Homo sapiens
  misc_RNA (1)...(19): siRNA sense strand
ccgcauggacgaagccaca

SEQ ID NO: 2489708 - RNA, 19 nt, Homo sapiens
  misc_RNA (1)...(19): siRNA sense strand
uggaggaggugaucggcau

SEQ ID NO: 2489709 - RNA, 19 nt, Homo sapiens
  misc_RNA (1)...(19): siRNA sense strand
gcauuggaggcuuuggcaa

SEQ ID NO: 2489710 - RNA, 19 nt, Homo sapiens
  misc_RNA (1)...(19): siRNA sense strand
ccauugagagugacgacau

SEQ ID NO: 2489711 - RNA, 19 nt, Homo sapiens
  misc_RNA (1)...(19): siRNA sense strand
guaccaagacccagcccaa

SEQ ID NO: 2489712 - RNA, 19 nt, Homo sapiens
  misc_RNA (1)...(19): siRNA sense strand
gggacuuggaugagacaau

SEQ ID NO: 2489713 - RNA, 19 nt, Homo sapiens
  misc_RNA (1)...(19): siRNA sense strand
caucaagacugaaggugga

SEQ ID NO: 2489714 - RNA, 19 nt, Homo sapiens
  misc_RNA (1)...(19): siRNA sense strand
uguuauaggagauggugua

SEQ ID NO: 2489715 - RNA, 19 nt, Homo sapiens
  misc_RNA (1)...(19): siRNA sense strand
agaagaacaaggagcaaaa

SEQ ID NO: 2489716 - RNA, 19 nt, Homo sapiens
  misc_RNA (1)...(19): siRNA sense strand
ugguguagaagaagaacaa

SEQ ID NO: 2489717 - RNA, 19 nt, Homo sapiens
  misc_RNA (1)...(19): siRNA sense strand
guguggacuggaugagaaa

SEQ ID NO: 2489718 - RNA, 19 nt, Homo sapiens
  misc_RNA (1)...(19): siRNA sense strand
guauguuguuauaggagau

SEQ ID NO: 2489719 - RNA, 19 nt, Homo sapiens
  misc_RNA (1)...(19): siRNA sense strand
gcuguauggguuaggaauu

SEQ ID NO: 2489720 - RNA, 19 nt, Homo sapiens
  misc_RNA (1)...(19): siRNA sense strand
agaagaagaacaaggagca

SEQ ID NO: 2489721 - RNA, 19 nt, Homo sapiens
  misc_RNA (1)...(19): siRNA sense strand
caggaauauauacaggaaa

SEQ ID NO: 2489722 - RNA, 19 nt, Homo sapiens
  misc_RNA (1)...(19): siRNA sense strand
ccggacaaacugugugaau

SEQ ID NO: 2489723 - RNA, 19 nt, Homo sapiens
  misc_RNA (1)...(19): siRNA sense strand
acagcagaguacagcacaa

SEQ ID NO: 2489724 - RNA, 19 nt, Homo sapiens
  misc_RNA (1)...(19): siRNA sense strand
ggguaaaagagaucuacaa

SEQ ID NO: 2489725 - RNA, 19 nt, Homo sapiens
  misc_RNA (1)...(19): siRNA sense strand
aagaagaacaaggagcaaa

SEQ ID NO: 2489726 - RNA, 19 nt, Homo sapiens
  misc_RNA (1)...(19): siRNA sense strand
gaaaguuggccuuccgcua

SEQ ID NO: 2489727 - RNA, 19 nt, Homo sapiens
  misc_RNA (1)...(19): siRNA sense strand
agaugguguagaagaagaa

SEQ ID NO: 2489728 - RNA, 19 nt, Homo sapiens
  misc_RNA (1)...(19): siRNA sense strand
ucgagguucagaugggaaa

SEQ ID NO: 2489729 - RNA, 19 nt, Homo sapiens
  misc_RNA (1)...(19): siRNA sense strand
gcuaacuuauguuuggcaa

SEQ ID NO: 2489730 - RNA, 19 nt, Homo sapiens
  misc_RNA (1)...(19): siRNA sense strand
cuucagaugauaacggaca

SEQ ID NO: 2489731 - RNA, 19 nt, Homo sapiens
  misc_RNA (1)...(19): siRNA sense strand
gcacauauaacuuuggaac

SEQ ID NO: 2489732 - RNA, 19 nt, Homo sapiens
  misc_RNA (1)...(19): siRNA sense strand
aaacaauuucucagguuca

SEQ ID NO: 2489733 - RNA, 19 nt, Homo sapiens
  misc_RNA (1)...(19): siRNA sense strand
ggaugagaaaguuggccuu

SEQ ID NO: 2489734 - RNA, 19 nt, Homo sapiens
  misc_RNA (1)...(19): siRNA sense strand
aggaaauaauucacucaca

SEQ ID NO: 2489735 - RNA, 19 nt, Homo sapiens
  misc_RNA (1)...(19): siRNA sense strand
aaacagagccaaugagcag

SEQ ID NO: 2489736 - RNA, 19 nt, Homo sapiens
  misc_RNA (1)...(19): siRNA sense strand
agaaagcuguuuugagaga

SEQ ID NO: 2489737 - RNA, 19 nt, Homo sapiens
  misc_RNA (1)...(19): siRNA sense strand
ccgacgggucuuuaaacaa

SEQ ID NO: 2489738 - RNA, 19 nt, Homo sapiens
  misc_RNA (1)...(19): siRNA sense strand
gcacauuauaugaccagca

SEQ ID NO: 2489739 - RNA, 19 nt, Homo sapiens
  misc_RNA (1)...(19): siRNA sense strand
cauuauaugaccagcagca

SEQ ID NO: 2489740 - RNA, 19 nt, Homo sapiens
  misc_RNA (1)...(19): siRNA sense strand
aaauaauguuggaggucug

SEQ ID NO: 2489741 - RNA, 19 nt, Homo sapiens
  misc_RNA (1)...(19): siRNA sense strand
ccuuggaacuggaguaccu

SEQ ID NO: 2489742 - RNA, 19 nt, Homo sapiens
  misc_RNA (1)...(19): siRNA sense strand
gggacuuggaugagacaau

SEQ ID NO: 2489743 - RNA, 19 nt, Homo sapiens
  misc_RNA (1)...(19): siRNA sense strand
caucaagacugaaggugga

SEQ ID NO: 2489744 - RNA, 19 nt, Homo sapiens
  misc_RNA (1)...(19): siRNA sense strand
uguuauaggagauggugua

SEQ ID NO: 2489745 - RNA, 19 nt, Homo sapiens
  misc_RNA (1)...(19): siRNA sense strand
agaagaacaaggagcaaaa

SEQ ID NO: 2489746 - RNA, 19 nt, Homo sapiens
  misc_RNA (1)...(19): siRNA sense strand
ugguguagaagaagaacaa

SEQ ID NO: 2489747 - RNA, 19 nt, Homo sapiens
  misc_RNA (1)...(19): siRNA sense strand
guguggacuggaugagaaa

SEQ ID NO: 2489748 - RNA, 19 nt, Homo sapiens
  misc_RNA (1)...(19): siRNA sense strand
guauguuguuauaggagau

SEQ ID NO: 2489749 - RNA, 19 nt, Homo sapiens
  misc_RNA (1)...(19): siRNA sense strand
gcuguauggguuaggaauu

SEQ ID NO: 2489750 - RNA, 19 nt, Homo sapiens
  misc_RNA (1)...(19): siRNA sense strand
agaagaagaacaaggagca

SEQ ID NO: 2489751 - RNA, 19 nt, Homo sapiens
  misc_RNA (1)...(19): siRNA sense strand
caggaauauauacaggaaa

SEQ ID NO: 2489752 - RNA, 19 nt, Homo sapiens
  misc_RNA (1)...(19): siRNA sense strand
ccggacaaacugugugaau

SEQ ID NO: 2489753 - RNA, 19 nt, Homo sapiens
  misc_RNA (1)...(19): siRNA sense strand
acagcagaguacagcacaa

SEQ ID NO: 2489754 - RNA, 19 nt, Homo sapiens
  misc_RNA (1)...(19): siRNA sense strand
ggguaaaagagaucuacaa

SEQ ID NO: 2489755 - RNA, 19 nt, Homo sapiens
  misc_RNA (1)...(19): siRNA sense strand
aagaagaacaaggagcaaa

SEQ ID NO: 2489756 - RNA, 19 nt, Homo sapiens
  misc_RNA (1)...(19): siRNA sense strand
gaaaguuggccuuccgcua

SEQ ID NO: 2489757 - RNA, 19 nt, Homo sapiens
  misc_RNA (1)...(19): siRNA sense strand
agaugguguagaagaagaa

SEQ ID NO: 2489758 - RNA, 19 nt, Homo sapiens
  misc_RNA (1)...(19): siRNA sense strand
ucgagguucagaugggaaa

SEQ ID NO: 2489759 - RNA, 19 nt, Homo sapiens
  misc_RNA (1)...(19): siRNA sense strand
gcuaacuuauguuuggcaa

SEQ ID NO: 2489760 - RNA, 19 nt, Homo sapiens
  misc_RNA (1)...(19): siRNA sense strand
cuucagaugauaacggaca

SEQ ID NO: 2489761 - RNA, 19 nt, Homo sapiens
  misc_RNA (1)...(19): siRNA sense strand
gcacauauaacuuuggaac

SEQ ID NO: 2489762 - RNA, 19 nt, Homo sapiens
  misc_RNA (1)...(19): siRNA sense strand
aaacaauuucucagguuca

SEQ ID NO: 2489763 - RNA, 19 nt, Homo sapiens
  misc_RNA (1)...(19): siRNA sense strand
ggaugagaaaguuggccuu

SEQ ID NO: 2489764 - RNA, 19 nt, Homo sapiens
  misc_RNA (1)...(19): siRNA sense strand
aggaaauaauucacucaca

SEQ ID NO: 2489765 - RNA, 19 nt, Homo sapiens
  misc_RNA (1)...(19): siRNA sense strand
aaacagagccaaugagcag

SEQ ID NO: 2489766 - RNA, 19 nt, Homo sapiens
  misc_RNA (1)...(19): siRNA sense strand
agaaagcuguuuugagaga

SEQ ID NO: 2489767 - RNA, 19 nt, Homo sapiens
  misc_RNA (1)...(19): siRNA sense strand
ccgacgggucuuuaaacaa

SEQ ID NO: 2489768 - RNA, 19 nt, Homo sapiens
  misc_RNA (1)...(19): siRNA sense strand
gcacauuauaugaccagca

SEQ ID NO: 2489769 - RNA, 19 nt, Homo sapiens
  misc_RNA (1)...(19): siRNA sense strand
cauuauaugaccagcagca

SEQ ID NO: 2489770 - RNA, 19 nt, Homo sapiens
  misc_RNA (1)...(19): siRNA sense strand
aaauaauguuggaggucug

SEQ ID NO: 2489771 - RNA, 19 nt, Homo sapiens
  misc_RNA (1)...(19): siRNA sense strand
ccuuggaacuggaguaccu

SEQ ID NO: 2489772 - RNA, 19 nt, Homo sapiens
  misc_RNA (1)...(19): siRNA sense strand
gggacuuggaugagacaau

SEQ ID NO: 2489773 - RNA, 19 nt, Homo sapiens
  misc_RNA (1)...(19): siRNA sense strand
caucaagacugaaggugga

SEQ ID NO: 2489774 - RNA, 19 nt, Homo sapiens
  misc_RNA (1)...(19): siRNA sense strand
uguuauaggagauggugua

SEQ ID NO: 2489775 - RNA, 19 nt, Homo sapiens
  misc_RNA (1)...(19): siRNA sense strand
agaagaacaaggagcaaaa

SEQ ID NO: 2489776 - RNA, 19 nt, Homo sapiens
  misc_RNA (1)...(19): siRNA sense strand
ugguguagaagaagaacaa

SEQ ID NO: 2489777 - RNA, 19 nt, Homo sapiens
  misc_RNA (1)...(19): siRNA sense strand
guguggacuggaugagaaa

SEQ ID NO: 2489778 - RNA, 19 nt, Homo sapiens
  misc_RNA (1)...(19): siRNA sense strand
guauguuguuauaggagau

SEQ ID NO: 2489779 - RNA, 19 nt, Homo sapiens
  misc_RNA (1)...(19): siRNA sense strand
gcuguauggguuaggaauu

SEQ ID NO: 2489780 - RNA, 19 nt, Homo sapiens
  misc_RNA (1)...(19): siRNA sense strand
agaagaagaacaaggagca

SEQ ID NO: 2489781 - RNA, 19 nt, Homo sapiens
  misc_RNA (1)...(19): siRNA sense strand
caggaauauauacaggaaa

SEQ ID NO: 2489782 - RNA, 19 nt, Homo sapiens
  misc_RNA (1)...(19): siRNA sense strand
ccggacaaacugugugaau

SEQ ID NO: 2489783 - RNA, 19 nt, Homo sapiens
  misc_RNA (1)...(19): siRNA sense strand
acagcagaguacagcacaa

SEQ ID NO: 2489784 - RNA, 19 nt, Homo sapiens
  misc_RNA (1)...(19): siRNA sense strand
ggguaaaagagaucuacaa

SEQ ID NO: 2489785 - RNA, 19 nt, Homo sapiens
  misc_RNA (1)...(19): siRNA sense strand
aagaagaacaaggagcaaa

SEQ ID NO: 2489786 - RNA, 19 nt, Homo sapiens
  misc_RNA (1)...(19): siRNA sense strand
gaaaguuggccuuccgcua

SEQ ID NO: 2489787 - RNA, 19 nt, Homo sapiens
  misc_RNA (1)...(19): siRNA sense strand
agaugguguagaagaagaa

SEQ ID NO: 2489788 - RNA, 19 nt, Homo sapiens
  misc_RNA (1)...(19): siRNA sense strand
ucgagguucagaugggaaa

SEQ ID NO: 2489789 - RNA, 19 nt, Homo sapiens
  misc_RNA (1)...(19): siRNA sense strand
gcuaacuuauguuuggcaa

SEQ ID NO: 2489790 - RNA, 19 nt, Homo sapiens
  misc_RNA (1)...(19): siRNA sense strand
cuucagaugauaacggaca

SEQ ID NO: 2489791 - RNA, 19 nt, Homo sapiens
  misc_RNA (1)...(19): siRNA sense strand
gcacauauaacuuuggaac

SEQ ID NO: 2489792 - RNA, 19 nt, Homo sapiens
  misc_RNA (1)...(19): siRNA sense strand
aaacaauuucucagguuca

SEQ ID NO: 2489793 - RNA, 19 nt, Homo sapiens
  misc_RNA (1)...(19): siRNA sense strand
ggaugagaaaguuggccuu

SEQ ID NO: 2489794 - RNA, 19 nt, Homo sapiens
  misc_RNA (1)...(19): siRNA sense strand
aggaaauaauucacucaca

SEQ ID NO: 2489795 - RNA, 19 nt, Homo sapiens
  misc_RNA (1)...(19): siRNA sense strand
aaacagagccaaugagcag

SEQ ID NO: 2489796 - RNA, 19 nt, Homo sapiens
  misc_RNA (1)...(19): siRNA sense strand
agaaagcuguuuugagaga

SEQ ID NO: 2489797 - RNA, 19 nt, Homo sapiens
  misc_RNA (1)...(19): siRNA sense strand
ccgacgggucuuuaaacaa

SEQ ID NO: 2489798 - RNA, 19 nt, Homo sapiens
  misc_RNA (1)...(19): siRNA sense strand
gcacauuauaugaccagca

SEQ ID NO: 2489799 - RNA, 19 nt, Homo sapiens
  misc_RNA (1)...(19): siRNA sense strand
cauuauaugaccagcagca

SEQ ID NO: 2489800 - RNA, 19 nt, Homo sapiens
  misc_RNA (1)...(19): siRNA sense strand
aaauaauguuggaggucug

SEQ ID NO: 2489801 - RNA, 19 nt, Homo sapiens
  misc_RNA (1)...(19): siRNA sense strand
ccuuggaacuggaguaccu

SEQ ID NO: 2489802 - RNA, 19 nt, Homo sapiens
  misc_RNA (1)...(19): siRNA sense strand
gggacuuggaugagacaau

SEQ ID NO: 2489803 - RNA, 19 nt, Homo sapiens
  misc_RNA (1)...(19): siRNA sense strand
caucaagacugaaggugga

SEQ ID NO: 2489804 - RNA, 19 nt, Homo sapiens
  misc_RNA (1)...(19): siRNA sense strand
uguuauaggagauggugua

SEQ ID NO: 2489805 - RNA, 19 nt, Homo sapiens
  misc_RNA (1)...(19): siRNA sense strand
agaagaacaaggagcaaaa

SEQ ID NO: 2489806 - RNA, 19 nt, Homo sapiens
  misc_RNA (1)...(19): siRNA sense strand
ugguguagaagaagaacaa

SEQ ID NO: 2489807 - RNA, 19 nt, Homo sapiens
  misc_RNA (1)...(19): siRNA sense strand
guguggacuggaugagaaa

SEQ ID NO: 2489808 - RNA, 19 nt, Homo sapiens
  misc_RNA (1)...(19): siRNA sense strand
guauguuguuauaggagau

SEQ ID NO: 2489809 - RNA, 19 nt, Homo sapiens
  misc_RNA (1)...(19): siRNA sense strand
gcuguauggguuaggaauu

SEQ ID NO: 2489810 - RNA, 19 nt, Homo sapiens
  misc_RNA (1)...(19): siRNA sense strand
agaagaagaacaaggagca

SEQ ID NO: 2489811 - RNA, 19 nt, Homo sapiens
  misc_RNA (1)...(19): siRNA sense strand
caggaauauauacaggaaa

SEQ ID NO: 2489812 - RNA, 19 nt, Homo sapiens
  misc_RNA (1)...(19): siRNA sense strand
ccggacaaacugugugaau

SEQ ID NO: 2489813 - RNA, 19 nt, Homo sapiens
  misc_RNA (1)...(19): siRNA sense strand
acagcagaguacagcacaa

SEQ ID NO: 2489814 - RNA, 19 nt, Homo sapiens
  misc_RNA (1)...(19): siRNA sense strand
ggguaaaagagaucuacaa

SEQ ID NO: 2489815 - RNA, 19 nt, Homo sapiens
  misc_RNA (1)...(19): siRNA sense strand
aagaagaacaaggagcaaa

SEQ ID NO: 2489816 - RNA, 19 nt, Homo sapiens
  misc_RNA (1)...(19): siRNA sense strand
gaaaguuggccuuccgcua

SEQ ID NO: 2489817 - RNA, 19 nt, Homo sapiens
  misc_RNA (1)...(19): siRNA sense strand
agaugguguagaagaagaa

SEQ ID NO: 2489818 - RNA, 19 nt, Homo sapiens
  misc_RNA (1)...(19): siRNA sense strand
ucgagguucagaugggaaa

SEQ ID NO: 2489819 - RNA, 19 nt, Homo sapiens
  misc_RNA (1)...(19): siRNA sense strand
gcuaacuuauguuuggcaa

SEQ ID NO: 2489820 - RNA, 19 nt, Homo sapiens
  misc_RNA (1)...(19): siRNA sense strand
cuucagaugauaacggaca

SEQ ID NO: 2489821 - RNA, 19 nt, Homo sapiens
  misc_RNA (1)...(19): siRNA sense strand
gcacauauaacuuuggaac

SEQ ID NO: 2489822 - RNA, 19 nt, Homo sapiens
  misc_RNA (1)...(19): siRNA sense strand
aaacaauuucucagguuca

SEQ ID NO: 2489823 - RNA, 19 nt, Homo sapiens
  misc_RNA (1)...(19): siRNA sense strand
ggaugagaaaguuggccuu

SEQ ID NO: 2489824 - RNA, 19 nt, Homo sapiens
  misc_RNA (1)...(19): siRNA sense strand
aggaaauaauucacucaca

SEQ ID NO: 2489825 - RNA, 19 nt, Homo sapiens
  misc_RNA (1)...(19): siRNA sense strand
agaaagcuguuuugagaga

SEQ ID NO: 2489826 - RNA, 19 nt, Homo sapiens
  misc_RNA (1)...(19): siRNA sense strand
aaacagagccaaugagcag

SEQ ID NO: 2489827 - RNA, 19 nt, Homo sapiens
  misc_RNA (1)...(19): siRNA sense strand
ccgacgggucuuuaaacaa

SEQ ID NO: 2489828 - RNA, 19 nt, Homo sapiens
  misc_RNA (1)...(19): siRNA sense strand
gcacauuauaugaccagca

SEQ ID NO: 2489829 - RNA, 19 nt, Homo sapiens
  misc_RNA (1)...(19): siRNA sense strand
cauuauaugaccagcagca

SEQ ID NO: 2489830 - RNA, 19 nt, Homo sapiens
  misc_RNA (1)...(19): siRNA sense strand
aaauaauguuggaggucug

SEQ ID NO: 2489831 - RNA, 19 nt, Homo sapiens
  misc_RNA (1)...(19): siRNA sense strand
ccuuggaacuggaguaccu

SEQ ID NO: 2489832 - RNA, 19 nt, Homo sapiens
  misc_RNA (1)...(19): siRNA sense strand
gagaagaaguggaggagga

SEQ ID NO: 2489833 - RNA, 19 nt, Homo sapiens
  misc_RNA (1)...(19): siRNA sense strand
gggaguggauauauggcaa

SEQ ID NO: 2489834 - RNA, 19 nt, Homo sapiens
  misc_RNA (1)...(19): siRNA sense strand
aagaaguggaggaggaaca

SEQ ID NO: 2489835 - RNA, 19 nt, Homo sapiens
  misc_RNA (1)...(19): siRNA sense strand
auaugaaucuagaaggcaa

SEQ ID NO: 2489836 - RNA, 19 nt, Homo sapiens
  misc_RNA (1)...(19): siRNA sense strand
ggaauaaauagcaaagcca

SEQ ID NO: 2489837 - RNA, 19 nt, Homo sapiens
  misc_RNA (1)...(19): siRNA sense strand
gaauaaauagcaaagccaa

SEQ ID NO: 2489838 - RNA, 19 nt, Homo sapiens
  misc_RNA (1)...(19): siRNA sense strand
caaacuugggaguggauau

SEQ ID NO: 2489839 - RNA, 19 nt, Homo sapiens
  misc_RNA (1)...(19): siRNA sense strand
auuggaaauacgugacaaa

SEQ ID NO: 2489840 - RNA, 19 nt, Homo sapiens
  misc_RNA (1)...(19): siRNA sense strand
ccuaauaaacccaacggau

SEQ ID NO: 2489841 - RNA, 19 nt, Homo sapiens
  misc_RNA (1)...(19): siRNA sense strand
acuuagaacauguccacaa

SEQ ID NO: 2489842 - RNA, 19 nt, Homo sapiens
  misc_RNA (1)...(19): siRNA sense strand
uguuguaauugguaggcau

SEQ ID NO: 2489843 - RNA, 19 nt, Homo sapiens
  misc_RNA (1)...(19): siRNA sense strand
ugaaauuaauugugagagc

SEQ ID NO: 2489844 - RNA, 19 nt, Homo sapiens
  misc_RNA (1)...(19): siRNA sense strand
uaaugagagaagaagguau

SEQ ID NO: 2489845 - RNA, 19 nt, Homo sapiens
  misc_RNA (1)...(19): siRNA sense strand
cugugaaguacuaaugaau

SEQ ID NO: 2489846 - RNA, 19 nt, Homo sapiens
  misc_RNA (1)...(19): siRNA sense strand
uaugaaucuagaaggcaaa

SEQ ID NO: 2489847 - RNA, 19 nt, Homo sapiens
  misc_RNA (1)...(19): siRNA sense strand
ucggagaagaaguggagga

SEQ ID NO: 2489848 - RNA, 19 nt, Homo sapiens
  misc_RNA (1)...(19): siRNA sense strand
accugaaucuaaugagaga

SEQ ID NO: 2489849 - RNA, 19 nt, Homo sapiens
  misc_RNA (1)...(19): siRNA sense strand
acugaaacuaccaugcuaa

SEQ ID NO: 2489850 - RNA, 19 nt, Homo sapiens
  misc_RNA (1)...(19): siRNA sense strand
ugagagaagaagguauaaa

SEQ ID NO: 2489851 - RNA, 19 nt, Homo sapiens
  misc_RNA (1)...(19): siRNA sense strand
agaagaaguggaggaggaa

SEQ ID NO: 2489852 - RNA, 19 nt, Homo sapiens
  misc_RNA (1)...(19): siRNA sense strand
gaacauguccacaagacca

SEQ ID NO: 2489853 - RNA, 19 nt, Homo sapiens
  misc_RNA (1)...(19): siRNA sense strand
cuaauaaacccaacggaug

SEQ ID NO: 2489854 - RNA, 19 nt, Homo sapiens
  misc_RNA (1)...(19): siRNA sense strand
gagaagaaguggaggagga

SEQ ID NO: 2489855 - RNA, 19 nt, Homo sapiens
  misc_RNA (1)...(19): siRNA sense strand
gggaguggauauauggcaa

SEQ ID NO: 2489856 - RNA, 19 nt, Homo sapiens
  misc_RNA (1)...(19): siRNA sense strand
aagaaguggaggaggaaca

SEQ ID NO: 2489857 - RNA, 19 nt, Homo sapiens
  misc_RNA (1)...(19): siRNA sense strand
auaugaaucuagaaggcaa

SEQ ID NO: 2489858 - RNA, 19 nt, Homo sapiens
  misc_RNA (1)...(19): siRNA sense strand
ggaauaaauagcaaagcca

SEQ ID NO: 2489859 - RNA, 19 nt, Homo sapiens
  misc_RNA (1)...(19): siRNA sense strand
gaauaaauagcaaagccaa

SEQ ID NO: 2489860 - RNA, 19 nt, Homo sapiens
  misc_RNA (1)...(19): siRNA sense strand
caaacuugggaguggauau

SEQ ID NO: 2489861 - RNA, 19 nt, Homo sapiens
  misc_RNA (1)...(19): siRNA sense strand
auuggaaauacgugacaaa

SEQ ID NO: 2489862 - RNA, 19 nt, Homo sapiens
  misc_RNA (1)...(19): siRNA sense strand
ccuaauaaacccaacggau

SEQ ID NO: 2489863 - RNA, 19 nt, Homo sapiens
  misc_RNA (1)...(19): siRNA sense strand
acuuagaacauguccacaa

SEQ ID NO: 2489864 - RNA, 19 nt, Homo sapiens
  misc_RNA (1)...(19): siRNA sense strand
uguuguaauugguaggcau

SEQ ID NO: 2489865 - RNA, 19 nt, Homo sapiens
  misc_RNA (1)...(19): siRNA sense strand
ugaaauuaauugugagagc

SEQ ID NO: 2489866 - RNA, 19 nt, Homo sapiens
  misc_RNA (1)...(19): siRNA sense strand
uaaugagagaagaagguau

SEQ ID NO: 2489867 - RNA, 19 nt, Homo sapiens
  misc_RNA (1)...(19): siRNA sense strand
cugugaaguacuaaugaau

SEQ ID NO: 2489868 - RNA, 19 nt, Homo sapiens
  misc_RNA (1)...(19): siRNA sense strand
uaugaaucuagaaggcaaa

SEQ ID NO: 2489869 - RNA, 19 nt, Homo sapiens
  misc_RNA (1)...(19): siRNA sense strand
ucggagaagaaguggagga

SEQ ID NO: 2489870 - RNA, 19 nt, Homo sapiens
  misc_RNA (1)...(19): siRNA sense strand
accugaaucuaaugagaga

SEQ ID NO: 2489871 - RNA, 19 nt, Homo sapiens
  misc_RNA (1)...(19): siRNA sense strand
acugaaacuaccaugcuaa

SEQ ID NO: 2489872 - RNA, 19 nt, Homo sapiens
  misc_RNA (1)...(19): siRNA sense strand
ugagagaagaagguauaaa

SEQ ID NO: 2489873 - RNA, 19 nt, Homo sapiens
  misc_RNA (1)...(19): siRNA sense strand
agaagaaguggaggaggaa

SEQ ID NO: 2489874 - RNA, 19 nt, Homo sapiens
  misc_RNA (1)...(19): siRNA sense strand
gaacauguccacaagacca

SEQ ID NO: 2489875 - RNA, 19 nt, Homo sapiens
  misc_RNA (1)...(19): siRNA sense strand
cuaauaaacccaacggaug

SEQ ID NO: 2489876 - RNA, 19 nt, Homo sapiens
  misc_RNA (1)...(19): siRNA sense strand
gagaagaaguggaggagga

SEQ ID NO: 2489877 - RNA, 19 nt, Homo sapiens
  misc_RNA (1)...(19): siRNA sense strand
gggaguggauauauggcaa

SEQ ID NO: 2489878 - RNA, 19 nt, Homo sapiens
  misc_RNA (1)...(19): siRNA sense strand
aagaaguggaggaggaaca

SEQ ID NO: 2489879 - RNA, 19 nt, Homo sapiens
  misc_RNA (1)...(19): siRNA sense strand
auaugaaucuagaaggcaa

SEQ ID NO: 2489880 - RNA, 19 nt, Homo sapiens
  misc_RNA (1)...(19): siRNA sense strand
ggaauaaauagcaaagcca

SEQ ID NO: 2489881 - RNA, 19 nt, Homo sapiens
  misc_RNA (1)...(19): siRNA sense strand
gaauaaauagcaaagccaa

SEQ ID NO: 2489882 - RNA, 19 nt, Homo sapiens
  misc_RNA (1)...(19): siRNA sense strand
caaacuugggaguggauau

SEQ ID NO: 2489883 - RNA, 19 nt, Homo sapiens
  misc_RNA (1)...(19): siRNA sense strand
auuggaaauacgugacaaa

SEQ ID NO: 2489884 - RNA, 19 nt, Homo sapiens
  misc_RNA (1)...(19): siRNA sense strand
ccuaauaaacccaacggau

SEQ ID NO: 2489885 - RNA, 19 nt, Homo sapiens
  misc_RNA (1)...(19): siRNA sense strand
acuuagaacauguccacaa

SEQ ID NO: 2489886 - RNA, 19 nt, Homo sapiens
  misc_RNA (1)...(19): siRNA sense strand
uguuguaauugguaggcau

SEQ ID NO: 2489887 - RNA, 19 nt, Homo sapiens
  misc_RNA (1)...(19): siRNA sense strand
ugaaauuaauugugagagc

SEQ ID NO: 2489888 - RNA, 19 nt, Homo sapiens
  misc_RNA (1)...(19): siRNA sense strand
uaaugagagaagaagguau

SEQ ID NO: 2489889 - RNA, 19 nt, Homo sapiens
  misc_RNA (1)...(19): siRNA sense strand
cugugaaguacuaaugaau

SEQ ID NO: 2489890 - RNA, 19 nt, Homo sapiens
  misc_RNA (1)...(19): siRNA sense strand
uaugaaucuagaaggcaaa

SEQ ID NO: 2489891 - RNA, 19 nt, Homo sapiens
  misc_RNA (1)...(19): siRNA sense strand
ucggagaagaaguggagga

SEQ ID NO: 2489892 - RNA, 19 nt, Homo sapiens
  misc_RNA (1)...(19): siRNA sense strand
accugaaucuaaugagaga

SEQ ID NO: 2489893 - RNA, 19 nt, Homo sapiens
  misc_RNA (1)...(19): siRNA sense strand
acugaaacuaccaugcuaa

SEQ ID NO: 2489894 - RNA, 19 nt, Homo sapiens
  misc_RNA (1)...(19): siRNA sense strand
ugagagaagaagguauaaa

SEQ ID NO: 2489895 - RNA, 19 nt, Homo sapiens
  misc_RNA (1)...(19): siRNA sense strand
agaagaaguggaggaggaa

SEQ ID NO: 2489896 - RNA, 19 nt, Homo sapiens
  misc_RNA (1)...(19): siRNA sense strand
gaacauguccacaagacca

SEQ ID NO: 2489897 - RNA, 19 nt, Homo sapiens
  misc_RNA (1)...(19): siRNA sense strand
cuaauaaacccaacggaug

SEQ ID NO: 2489898 - RNA, 19 nt, Homo sapiens
  misc_RNA (1)...(19): siRNA sense strand
gagaagaaguggaggagga

SEQ ID NO: 2489899 - RNA, 19 nt, Homo sapiens
  misc_RNA (1)...(19): siRNA sense strand
gggaguggauauauggcaa

SEQ ID NO: 2489900 - RNA, 19 nt, Homo sapiens
  misc_RNA (1)...(19): siRNA sense strand
aagaaguggaggaggaaca

SEQ ID NO: 2489901 - RNA, 19 nt, Homo sapiens
  misc_RNA (1)...(19): siRNA sense strand
auaugaaucuagaaggcaa

SEQ ID NO: 2489902 - RNA, 19 nt, Homo sapiens
  misc_RNA (1)...(19): siRNA sense strand
ggaauaaauagcaaagcca

SEQ ID NO: 2489903 - RNA, 19 nt, Homo sapiens
  misc_RNA (1)...(19): siRNA sense strand
gaauaaauagcaaagccaa

SEQ ID NO: 2489904 - RNA, 19 nt, Homo sapiens
  misc_RNA (1)...(19): siRNA sense strand
caaacuugggaguggauau

SEQ ID NO: 2489905 - RNA, 19 nt, Homo sapiens
  misc_RNA (1)...(19): siRNA sense strand
auuggaaauacgugacaaa

SEQ ID NO: 2489906 - RNA, 19 nt, Homo sapiens
  misc_RNA (1)...(19): siRNA sense strand
ccuaauaaacccaacggau

SEQ ID NO: 2489907 - RNA, 19 nt, Homo sapiens
  misc_RNA (1)...(19): siRNA sense strand
acuuagaacauguccacaa

SEQ ID NO: 2489908 - RNA, 19 nt, Homo sapiens
  misc_RNA (1)...(19): siRNA sense strand
uguuguaauugguaggcau

SEQ ID NO: 2489909 - RNA, 19 nt, Homo sapiens
  misc_RNA (1)...(19): siRNA sense strand
ugaaauuaauugugagagc

SEQ ID NO: 2489910 - RNA, 19 nt, Homo sapiens
  misc_RNA (1)...(19): siRNA sense strand
uaaugagagaagaagguau

SEQ ID NO: 2489911 - RNA, 19 nt, Homo sapiens
  misc_RNA (1)...(19): siRNA sense strand
cugugaaguacuaaugaau

SEQ ID NO: 2489912 - RNA, 19 nt, Homo sapiens
  misc_RNA (1)...(19): siRNA sense strand
uaugaaucuagaaggcaaa

SEQ ID NO: 2489913 - RNA, 19 nt, Homo sapiens
  misc_RNA (1)...(19): siRNA sense strand
ucggagaagaaguggagga

SEQ ID NO: 2489914 - RNA, 19 nt, Homo sapiens
  misc_RNA (1)...(19): siRNA sense strand
accugaaucuaaugagaga

SEQ ID NO: 2489915 - RNA, 19 nt, Homo sapiens
  misc_RNA (1)...(19): siRNA sense strand
acugaaacuaccaugcuaa

SEQ ID NO: 2489916 - RNA, 19 nt, Homo sapiens
  misc_RNA (1)...(19): siRNA sense strand
ugagagaagaagguauaaa

SEQ ID NO: 2489917 - RNA, 19 nt, Homo sapiens
  misc_RNA (1)...(19): siRNA sense strand
agaagaaguggaggaggaa

SEQ ID NO: 2489918 - RNA, 19 nt, Homo sapiens
  misc_RNA (1)...(19): siRNA sense strand
gaacauguccacaagacca

SEQ ID NO: 2489919 - RNA, 19 nt, Homo sapiens
  misc_RNA (1)...(19): siRNA sense strand
cuaauaaacccaacggaug

SEQ ID NO: 2489920 - RNA, 19 nt, Homo sapiens
  misc_RNA (1)...(19): siRNA sense strand
gagaagaaguggaggagga

SEQ ID NO: 2489921 - RNA, 19 nt, Homo sapiens
  misc_RNA (1)...(19): siRNA sense strand
gggaguggauauauggcaa

SEQ ID NO: 2489922 - RNA, 19 nt, Homo sapiens
  misc_RNA (1)...(19): siRNA sense strand
aagaaguggaggaggaaca

SEQ ID NO: 2489923 - RNA, 19 nt, Homo sapiens
  misc_RNA (1)...(19): siRNA sense strand
auaugaaucuagaaggcaa

SEQ ID NO: 2489924 - RNA, 19 nt, Homo sapiens
  misc_RNA (1)...(19): siRNA sense strand
ggaauaaauagcaaagcca

SEQ ID NO: 2489925 - RNA, 19 nt, Homo sapiens
  misc_RNA (1)...(19): siRNA sense strand
gaauaaauagcaaagccaa

SEQ ID NO: 2489926 - RNA, 19 nt, Homo sapiens
  misc_RNA (1)...(19): siRNA sense strand
caaacuugggaguggauau

SEQ ID NO: 2489927 - RNA, 19 nt, Homo sapiens
  misc_RNA (1)...(19): siRNA sense strand
auuggaaauacgugacaaa

SEQ ID NO: 2489928 - RNA, 19 nt, Homo sapiens
  misc_RNA (1)...(19): siRNA sense strand
ccuaauaaacccaacggau

SEQ ID NO: 2489929 - RNA, 19 nt, Homo sapiens
  misc_RNA (1)...(19): siRNA sense strand
acuuagaacauguccacaa

SEQ ID NO: 2489930 - RNA, 19 nt, Homo sapiens
  misc_RNA (1)...(19): siRNA sense strand
uguuguaauugguaggcau

SEQ ID NO: 2489931 - RNA, 19 nt, Homo sapiens
  misc_RNA (1)...(19): siRNA sense strand
ugaaauuaauugugagagc

SEQ ID NO: 2489932 - RNA, 19 nt, Homo sapiens
  misc_RNA (1)...(19): siRNA sense strand
uaaugagagaagaagguau

SEQ ID NO: 2489933 - RNA, 19 nt, Homo sapiens
  misc_RNA (1)...(19): siRNA sense strand
cugugaaguacuaaugaau

SEQ ID NO: 2489934 - RNA, 19 nt, Homo sapiens
  misc_RNA (1)...(19): siRNA sense strand
uaugaaucuagaaggcaaa

SEQ ID NO: 2489935 - RNA, 19 nt, Homo sapiens
  misc_RNA (1)...(19): siRNA sense strand
ucggagaagaaguggagga

SEQ ID NO: 2489936 - RNA, 19 nt, Homo sapiens
  misc_RNA (1)...(19): siRNA sense strand
accugaaucuaaugagaga

SEQ ID NO: 2489937 - RNA, 19 nt, Homo sapiens
  misc_RNA (1)...(19): siRNA sense strand
acugaaacuaccaugcuaa

SEQ ID NO: 2489938 - RNA, 19 nt, Homo sapiens
  misc_RNA (1)...(19): siRNA sense strand
ugagagaagaagguauaaa

SEQ ID NO: 2489939 - RNA, 19 nt, Homo sapiens
  misc_RNA (1)...(19): siRNA sense strand
agaagaaguggaggaggaa

SEQ ID NO: 2489940 - RNA, 19 nt, Homo sapiens
  misc_RNA (1)...(19): siRNA sense strand
gaacauguccacaagacca

SEQ ID NO: 2489941 - RNA, 19 nt, Homo sapiens
  misc_RNA (1)...(19): siRNA sense strand
cuaauaaacccaacggaug

SEQ ID NO: 2489942 - RNA, 19 nt, Homo sapiens
  misc_RNA (1)...(19): siRNA sense strand
aggcagagaaagugagaga

SEQ ID NO: 2489943 - RNA, 19 nt, Homo sapiens
  misc_RNA (1)...(19): siRNA sense strand
cugcagagggaguggguau

SEQ ID NO: 2489944 - RNA, 19 nt, Homo sapiens
  misc_RNA (1)...(19): siRNA sense strand
agagaaagugagagaccaa

SEQ ID NO: 2489945 - RNA, 19 nt, Homo sapiens
  misc_RNA (1)...(19): siRNA sense strand
cgcuaaugaggcagagaaa

SEQ ID NO: 2489946 - RNA, 19 nt, Homo sapiens
  misc_RNA (1)...(19): siRNA sense strand
gauaauuccugcagaggga

SEQ ID NO: 2489947 - RNA, 19 nt, Homo sapiens
  misc_RNA (1)...(19): siRNA sense strand
ccaagaguucacagaggaa

SEQ ID NO: 2489948 - RNA, 19 nt, Homo sapiens
  misc_RNA (1)...(19): siRNA sense strand
ucaggaaacaggaagggaa

SEQ ID NO: 2489949 - RNA, 19 nt, Homo sapiens
  misc_RNA (1)...(19): siRNA sense strand
cuucagaugcgguggagau

SEQ ID NO: 2489950 - RNA, 19 nt, Homo sapiens
  misc_RNA (1)...(19): siRNA sense strand
cuguguaaaccaaugcaaa

SEQ ID NO: 2489951 - RNA, 19 nt, Homo sapiens
  misc_RNA (1)...(19): siRNA sense strand
cuggcaaugaggucagaua

SEQ ID NO: 2489952 - RNA, 19 nt, Homo sapiens
  misc_RNA (1)...(19): siRNA sense strand
aagugaagacagucagaga

SEQ ID NO: 2489953 - RNA, 19 nt, Homo sapiens
  misc_RNA (1)...(19): siRNA sense strand
agaggagacugcagggacu

SEQ ID NO: 2489954 - RNA, 19 nt, Homo sapiens
  misc_RNA (1)...(19): siRNA sense strand
ggagauaauuccugcagag

SEQ ID NO: 2489955 - RNA, 19 nt, Homo sapiens
  misc_RNA (1)...(19): siRNA sense strand
gaggaagauaucaggaaac

SEQ ID NO: 2489956 - RNA, 19 nt, Homo sapiens
  misc_RNA (1)...(19): siRNA sense strand
agaaagugagagaccaaga

SEQ ID NO: 2489957 - RNA, 19 nt, Homo sapiens
  misc_RNA (1)...(19): siRNA sense strand
gcaaacaauuucuggucac

SEQ ID NO: 2489958 - RNA, 19 nt, Homo sapiens
  misc_RNA (1)...(19): siRNA sense strand
aucaaugggaggagagcuu

SEQ ID NO: 2489959 - RNA, 19 nt, Homo sapiens
  misc_RNA (1)...(19): siRNA sense strand
gcagagaaagugagagacc

SEQ ID NO: 2489960 - RNA, 19 nt, Homo sapiens
  misc_RNA (1)...(19): siRNA sense strand
uuacuaaaguugaaggaga

SEQ ID NO: 2489961 - RNA, 19 nt, Homo sapiens
  misc_RNA (1)...(19): siRNA sense strand
ccauaacauaacagaggaa

SEQ ID NO: 2489962 - RNA, 19 nt, Homo sapiens
  misc_RNA (1)...(19): siRNA sense strand
gaagaagacacauggcaga

SEQ ID NO: 2489963 - RNA, 19 nt, Homo sapiens
  misc_RNA (1)...(19): siRNA sense strand
gcacagaaugcaagccaca

SEQ ID NO: 2489964 - RNA, 19 nt, Homo sapiens
  misc_RNA (1)...(19): siRNA sense strand
auaacauaacagaggaaga

SEQ ID NO: 2489965 - RNA, 19 nt, Homo sapiens
  misc_RNA (1)...(19): siRNA sense strand
acauaacagaggaagaaga

SEQ ID NO: 2489966 - RNA, 19 nt, Homo sapiens
  misc_RNA (1)...(19): siRNA sense strand
accagauccugcaggcaaa

SEQ ID NO: 2489967 - RNA, 19 nt, Homo sapiens
  misc_RNA (1)...(19): siRNA sense strand
cugcaagaggugaagcuga

SEQ ID NO: 2489968 - RNA, 19 nt, Homo sapiens
  misc_RNA (1)...(19): siRNA sense strand
uuauaaagcaauuccguca

SEQ ID NO: 2489969 - RNA, 19 nt, Homo sapiens
  misc_RNA (1)...(19): siRNA sense strand
gggcaaucccaggaagaca

SEQ ID NO: 2489970 - RNA, 19 nt, Homo sapiens
  misc_RNA (1)...(19): siRNA sense strand
acuaaaguugaaggagaaa

SEQ ID NO: 2489971 - RNA, 19 nt, Homo sapiens
  misc_RNA (1)...(19): siRNA sense strand
cgguacaggaggagcguca

SEQ ID NO: 2489972 - RNA, 19 nt, Homo sapiens
  misc_RNA (1)...(19): siRNA sense strand
gcacaguggacaagcgcca

SEQ ID NO: 2489973 - RNA, 19 nt, Homo sapiens
  misc_RNA (1)...(19): siRNA sense strand
gggagaaaguguaugcauc

SEQ ID NO: 2489974 - RNA, 19 nt, Homo sapiens
  misc_RNA (1)...(19): siRNA sense strand
uggacaagcgccagcggaa

SEQ ID NO: 2489975 - RNA, 19 nt, Homo sapiens
  misc_RNA (1)...(19): siRNA sense strand
gugacaugaggauggacaa

SEQ ID NO: 2489976 - RNA, 19 nt, Homo sapiens
  misc_RNA (1)...(19): siRNA sense strand
agaaguacccugagcagca

SEQ ID NO: 2489977 - RNA, 19 nt, Homo sapiens
  misc_RNA (1)...(19): siRNA sense strand
ucuucaagcucauugguga

SEQ ID NO: 2489978 - RNA, 19 nt, Homo sapiens
  misc_RNA (1)...(19): siRNA sense strand
ccacuggcaugaagaggga

SEQ ID NO: 2489979 - RNA, 19 nt, Homo sapiens
  misc_RNA (1)...(19): siRNA sense strand
aggcagagcuugcugugga

SEQ ID NO: 2489980 - RNA, 19 nt, Homo sapiens
  misc_RNA (1)...(19): siRNA sense strand
ccuccuugccucuggauga

SEQ ID NO: 2489981 - RNA, 19 nt, Homo sapiens
  misc_RNA (1)...(19): siRNA sense strand
ugaagagggaggcgguaca

SEQ ID NO: 2489982 - RNA, 19 nt, Homo sapiens
  misc_RNA (1)...(19): siRNA sense strand
gggacagaagcucaggcaa

SEQ ID NO: 2489983 - RNA, 19 nt, Homo sapiens
  misc_RNA (1)...(19): siRNA sense strand
ccaguacaucagagagcaa

SEQ ID NO: 2489984 - RNA, 19 nt, Homo sapiens
  misc_RNA (1)...(19): siRNA sense strand
ggacaagcuucuuaugcga

SEQ ID NO: 2489985 - RNA, 19 nt, Homo sapiens
  misc_RNA (1)...(19): siRNA sense strand
agcccaaggucaaggagau

SEQ ID NO: 2489986 - RNA, 19 nt, Homo sapiens
  misc_RNA (1)...(19): siRNA sense strand
cagcaguuuuccaggacaa

SEQ ID NO: 2489987 - RNA, 19 nt, Homo sapiens
  misc_RNA (1)...(19): siRNA sense strand
ggcagaagcugauggcugu

SEQ ID NO: 2489988 - RNA, 19 nt, Homo sapiens
  misc_RNA (1)...(19): siRNA sense strand
ucuuaaggacugugccauu

SEQ ID NO: 2489989 - RNA, 19 nt, Homo sapiens
  misc_RNA (1)...(19): siRNA sense strand
agugaagagcccaagguca

SEQ ID NO: 2489990 - RNA, 19 nt, Homo sapiens
  misc_RNA (1)...(19): siRNA sense strand
cggcagaagcugauggcug

SEQ ID NO: 2489991 - RNA, 19 nt, Homo sapiens
  misc_RNA (1)...(19): siRNA sense strand
gugcagaggacaagcuucu

SEQ ID NO: 2489992 - RNA, 19 nt, Homo sapiens
  misc_RNA (1)...(19): siRNA sense strand
ucaaggagaugguacggau

SEQ ID NO: 2489993 - RNA, 19 nt, Homo sapiens
  misc_RNA (1)...(19): siRNA sense strand
ccaguacaucagagagcaa

SEQ ID NO: 2489994 - RNA, 19 nt, Homo sapiens
  misc_RNA (1)...(19): siRNA sense strand
ggacaagcuucuuaugcga

SEQ ID NO: 2489995 - RNA, 19 nt, Homo sapiens
  misc_RNA (1)...(19): siRNA sense strand
agcccaaggucaaggagau

SEQ ID NO: 2489996 - RNA, 19 nt, Homo sapiens
  misc_RNA (1)...(19): siRNA sense strand
cagcaguuuuccaggacaa

SEQ ID NO: 2489997 - RNA, 19 nt, Homo sapiens
  misc_RNA (1)...(19): siRNA sense strand
ggcagaagcugauggcugu

SEQ ID NO: 2489998 - RNA, 19 nt, Homo sapiens
  misc_RNA (1)...(19): siRNA sense strand
ucuuaaggacugugccauu

SEQ ID NO: 2489999 - RNA, 19 nt, Homo sapiens
  misc_RNA (1)...(19): siRNA sense strand
agugaagagcccaagguca

SEQ ID NO: 2490000 - RNA, 19 nt, Homo sapiens
  misc_RNA (1)...(19): siRNA sense strand
cggcagaagcugauggcug

SEQ ID NO: 2490001 - RNA, 19 nt, Homo sapiens
  misc_RNA (1)...(19): siRNA sense strand
gugcagaggacaagcuucu

SEQ ID NO: 2490002 - RNA, 19 nt, Homo sapiens
  misc_RNA (1)...(19): siRNA sense strand
ucaaggagaugguacggau

SEQ ID NO: 2490003 - RNA, 19 nt, Homo sapiens
  misc_RNA (1)...(19): siRNA sense strand
guaccaagucccagcccaa

SEQ ID NO: 2490004 - RNA, 19 nt, Homo sapiens
  misc_RNA (1)...(19): siRNA sense strand
gugaauuacuucuucgaca

SEQ ID NO: 2490005 - RNA, 19 nt, Homo sapiens
  misc_RNA (1)...(19): siRNA sense strand
acagaaugucccuggugaa

SEQ ID NO: 2490006 - RNA, 19 nt, Homo sapiens
  misc_RNA (1)...(19): siRNA sense strand
ggaaagaagcccagcaaaa

SEQ ID NO: 2490007 - RNA, 19 nt, Homo sapiens
  misc_RNA (1)...(19): siRNA sense strand
cuauaaaguaccuggaaga

SEQ ID NO: 2490008 - RNA, 19 nt, Homo sapiens
  misc_RNA (1)...(19): siRNA sense strand
cauaauagaaucaagggaa

SEQ ID NO: 2490009 - RNA, 19 nt, Homo sapiens
  misc_RNA (1)...(19): siRNA sense strand
uggaaaaugcugagauuaa

SEQ ID NO: 2490010 - RNA, 19 nt, Homo sapiens
  misc_RNA (1)...(19): siRNA sense strand
gaucgaaaggaaugguuaa

SEQ ID NO: 2490011 - RNA, 19 nt, Homo sapiens
  misc_RNA (1)...(19): siRNA sense strand
auaacagacuauagggaau

SEQ ID NO: 2490012 - RNA, 19 nt, Homo sapiens
  misc_RNA (1)...(19): siRNA sense strand
gcaaaagguuccagaugaa

SEQ ID NO: 2490013 - RNA, 19 nt, Homo sapiens
  misc_RNA (1)...(19): siRNA sense strand
ugugauuaguggugaagua

SEQ ID NO: 2490014 - RNA, 19 nt, Homo sapiens
  misc_RNA (1)...(19): siRNA sense strand
agggaauaccauacagaua

SEQ ID NO: 2490015 - RNA, 19 nt, Homo sapiens
  misc_RNA (1)...(19): siRNA sense strand
uggcagaggcagagagagu

SEQ ID NO: 2490016 - RNA, 19 nt, Homo sapiens
  misc_RNA (1)...(19): siRNA sense strand
gaaacagccaguagagaau

SEQ ID NO: 2490017 - RNA, 19 nt, Homo sapiens
  misc_RNA (1)...(19): siRNA sense strand
ccauagaaaugaaagcaga

SEQ ID NO: 2490018 - RNA, 19 nt, Homo sapiens
  misc_RNA (1)...(19): siRNA sense strand
caguagagaauacaagaaa

SEQ ID NO: 2490019 - RNA, 19 nt, Homo sapiens
  misc_RNA (1)...(19): siRNA sense strand
ccacgaauaaccauagaaa

SEQ ID NO: 2490020 - RNA, 19 nt, Homo sapiens
  misc_RNA (1)...(19): siRNA sense strand
guaaauaacaucaggcguu

SEQ ID NO: 2490021 - RNA, 19 nt, Homo sapiens
  misc_RNA (1)...(19): siRNA sense strand
ucgcuuuaucuuagagaaa

SEQ ID NO: 2490022 - RNA, 19 nt, Homo sapiens
  misc_RNA (1)...(19): siRNA sense strand
acauguauuugaaggacaa

SEQ ID NO: 2490023 - RNA, 19 nt, Homo sapiens
  misc_RNA (1)...(19): siRNA sense strand
ggauauucuaagagacuuu

SEQ ID NO: 2490024 - RNA, 19 nt, Homo sapiens
  misc_RNA (1)...(19): siRNA sense strand
aaaugaaagcagaggcaga

SEQ ID NO: 2490025 - RNA, 19 nt, Homo sapiens
  misc_RNA (1)...(19): siRNA sense strand
caucaaaggaagcuaaaga

SEQ ID NO: 2490026 - RNA, 19 nt, Homo sapiens
  misc_RNA (1)...(19): siRNA sense strand
uggaagagucagaugaaga

SEQ ID NO: 2490027 - RNA, 19 nt, Homo sapiens
  misc_RNA (1)...(19): siRNA sense strand
gguuccagaugaagaagaa

SEQ ID NO: 2490028 - RNA, 19 nt, Homo sapiens
  misc_RNA (1)...(19): siRNA sense strand
ggaaagaagacuuggcuac

SEQ ID NO: 2490029 - RNA, 19 nt, Homo sapiens
  misc_RNA (1)...(19): siRNA sense strand
acgaauaaccauagaaaug

SEQ ID NO: 2490030 - RNA, 19 nt, Homo sapiens
  misc_RNA (1)...(19): siRNA sense strand
gguauuuaaccaaggaaaa

SEQ ID NO: 2490031 - RNA, 19 nt, Homo sapiens
  misc_RNA (1)...(19): siRNA sense strand
agauaggagcagugacgaa

SEQ ID NO: 2490032 - RNA, 19 nt, Homo sapiens
  misc_RNA (1)...(19): siRNA sense strand
gaagaagacagcagcaaaa

SEQ ID NO: 2490033 - RNA, 19 nt, Homo sapiens
  misc_RNA (1)...(19): siRNA sense strand
uuugauggauggagaagaa

SEQ ID NO: 2490034 - RNA, 19 nt, Homo sapiens
  misc_RNA (1)...(19): siRNA sense strand
ggagcagugacgaaaguaa

SEQ ID NO: 2490035 - RNA, 19 nt, Homo sapiens
  misc_RNA (1)...(19): siRNA sense strand
gggugaaguuuaaggccca

SEQ ID NO: 2490036 - RNA, 19 nt, Homo sapiens
  misc_RNA (1)...(19): siRNA sense strand
ucugauaacgagagaucua

SEQ ID NO: 2490037 - RNA, 19 nt, Homo sapiens
  misc_RNA (1)...(19): siRNA sense strand
acaaagaacugaaaccaca

SEQ ID NO: 2490038 - RNA, 19 nt, Homo sapiens
  misc_RNA (1)...(19): siRNA sense strand
ccugauuugucuaaguuua

SEQ ID NO: 2490039 - RNA, 19 nt, Homo sapiens
  misc_RNA (1)...(19): siRNA sense strand
agaaugugacagugaagaa

SEQ ID NO: 2490040 - RNA, 19 nt, Homo sapiens
  misc_RNA (1)...(19): siRNA sense strand
gaagaguggaagaguucua

SEQ ID NO: 2490041 - RNA, 19 nt, Homo sapiens
  misc_RNA (1)...(19): siRNA sense strand
aagaaaaugaagagaguga

SEQ ID NO: 2490042 - RNA, 19 nt, Homo sapiens
  misc_RNA (1)...(19): siRNA sense strand
ugaagaagacagcagcaaa

SEQ ID NO: 2490043 - RNA, 19 nt, Homo sapiens
  misc_RNA (1)...(19): siRNA sense strand
gagaguuggacuacacaaa

SEQ ID NO: 2490044 - RNA, 19 nt, Homo sapiens
  misc_RNA (1)...(19): siRNA sense strand
cguaggcuguuuaaagaaa

SEQ ID NO: 2490045 - RNA, 19 nt, Homo sapiens
  misc_RNA (1)...(19): siRNA sense strand
agagaaaauagauggcaaa

SEQ ID NO: 2490046 - RNA, 19 nt, Homo sapiens
  misc_RNA (1)...(19): siRNA sense strand
ggcauuaacuauagggaag

SEQ ID NO: 2490047 - RNA, 19 nt, Homo sapiens
  misc_RNA (1)...(19): siRNA sense strand
cauaagcagaucauggaaa

SEQ ID NO: 2490048 - RNA, 19 nt, Homo sapiens
  misc_RNA (1)...(19): siRNA sense strand
cugaauuugaagaguggaa

SEQ ID NO: 2490049 - RNA, 19 nt, Homo sapiens
  misc_RNA (1)...(19): siRNA sense strand
cuucuaugguggaugguuu

SEQ ID NO: 2490050 - RNA, 19 nt, Homo sapiens
  misc_RNA (1)...(19): siRNA sense strand
augacaagcgagaaguaaa

SEQ ID NO: 2490051 - RNA, 19 nt, Homo sapiens
  misc_RNA (1)...(19): siRNA sense strand
ccuugaagcugaugauguu

SEQ ID NO: 2490052 - RNA, 19 nt, Homo sapiens
  misc_RNA (1)...(19): siRNA sense strand
aggaaugcuuggugcugaa

SEQ ID NO: 2490053 - RNA, 19 nt, Homo sapiens
  misc_RNA (1)...(19): siRNA sense strand
cuguugaagccaaggaaaa

SEQ ID NO: 2490054 - RNA, 19 nt, Homo sapiens
  misc_RNA (1)...(19): siRNA sense strand
gaaaagagaaccagguaca

SEQ ID NO: 2490055 - RNA, 19 nt, Homo sapiens
  misc_RNA (1)...(19): siRNA sense strand
cauggaggauagaagacaa

SEQ ID NO: 2490056 - RNA, 19 nt, Homo sapiens
  misc_RNA (1)...(19): siRNA sense strand
cauugaaaucucagagcuu

SEQ ID NO: 2490057 - RNA, 19 nt, Homo sapiens
  misc_RNA (1)...(19): siRNA sense strand
uacaagaacuucaagggua

SEQ ID NO: 2490058 - RNA, 19 nt, Homo sapiens
  misc_RNA (1)...(19): siRNA sense strand
agguacaaagacaaagaaa

SEQ ID NO: 2490059 - RNA, 19 nt, Homo sapiens
  misc_RNA (1)...(19): siRNA sense strand
ccagacauacaaagaacaa

SEQ ID NO: 2490060 - RNA, 19 nt, Homo sapiens
  misc_RNA (1)...(19): siRNA sense strand
gugaagaugacugaagaaa

SEQ ID NO: 2490061 - RNA, 19 nt, Homo sapiens
  misc_RNA (1)...(19): siRNA sense strand
agaagaugguguggaacua

SEQ ID NO: 2490062 - RNA, 19 nt, Homo sapiens
  misc_RNA (1)...(19): siRNA sense strand
ccauauggacuuugacuca

SEQ ID NO: 2490063 - RNA, 19 nt, Homo sapiens
  misc_RNA (1)...(19): siRNA sense strand
agugacagguggucgaaau

SEQ ID NO: 2490064 - RNA, 19 nt, Homo sapiens
  misc_RNA (1)...(19): siRNA sense strand
uuguugauguugugaagaa

SEQ ID NO: 2490065 - RNA, 19 nt, Homo sapiens
  misc_RNA (1)...(19): siRNA sense strand
ucaucaagauugugggucu

SEQ ID NO: 2490066 - RNA, 19 nt, Homo sapiens
  misc_RNA (1)...(19): siRNA sense strand
ggagaagaaccuuugccaa

SEQ ID NO: 2490067 - RNA, 19 nt, Homo sapiens
  misc_RNA (1)...(19): siRNA sense strand
uugaagaacuggcuccaaa

SEQ ID NO: 2490068 - RNA, 19 nt, Homo sapiens
  misc_RNA (1)...(19): siRNA sense strand
guucagaaggagggagaaa

SEQ ID NO: 2490069 - RNA, 19 nt, Homo sapiens
  misc_RNA (1)...(19): siRNA sense strand
uggagaugucggagaacaa

SEQ ID NO: 2490070 - RNA, 19 nt, Homo sapiens
  misc_RNA (1)...(19): siRNA sense strand
acggagaagcccucagaaa

SEQ ID NO: 2490071 - RNA, 19 nt, Homo sapiens
  misc_RNA (1)...(19): siRNA sense strand
gcaaagacaccgagagggu

SEQ ID NO: 2490072 - RNA, 19 nt, Homo sapiens
  misc_RNA (1)...(19): siRNA sense strand
ggucagacgggcauggcaa

SEQ ID NO: 2490073 - RNA, 19 nt, Homo sapiens
  misc_RNA (1)...(19): siRNA sense strand
gagaaaaccgugagaggau

SEQ ID NO: 2490074 - RNA, 19 nt, Homo sapiens
  misc_RNA (1)...(19): siRNA sense strand
gggcaucuggagagagaga

SEQ ID NO: 2490075 - RNA, 19 nt, Homo sapiens
  misc_RNA (1)...(19): siRNA sense strand
uguacaacgcuguggguga

SEQ ID NO: 2490076 - RNA, 19 nt, Homo sapiens
  misc_RNA (1)...(19): siRNA sense strand
gcguucagaaggagggaga

SEQ ID NO: 2490077 - RNA, 19 nt, Homo sapiens
  misc_RNA (1)...(19): siRNA sense strand
ggaccaacuacgagaucga

SEQ ID NO: 2490078 - RNA, 19 nt, Homo sapiens
  misc_RNA (1)...(19): siRNA sense strand
ggagaggagugguugcuga

SEQ ID NO: 2490079 - RNA, 19 nt, Homo sapiens
  misc_RNA (1)...(19): siRNA sense strand
gggcauggcaagacgcuga

SEQ ID NO: 2490080 - RNA, 19 nt, Homo sapiens
  misc_RNA (1)...(19): siRNA sense strand
cggaugaggaugucaccaa

SEQ ID NO: 2490081 - RNA, 19 nt, Homo sapiens
  misc_RNA (1)...(19): siRNA sense strand
gcagagagcagcagccuga

SEQ ID NO: 2490082 - RNA, 19 nt, Homo sapiens
  misc_RNA (1)...(19): siRNA sense strand
aggacaagaucaauggcau

SEQ ID NO: 2490083 - RNA, 19 nt, Homo sapiens
  misc_RNA (1)...(19): siRNA sense strand
gcacggugaucgauggcau

SEQ ID NO: 2490084 - RNA, 19 nt, Homo sapiens
  misc_RNA (1)...(19): siRNA sense strand
gggcaaugugcacgcggaa

SEQ ID NO: 2490085 - RNA, 19 nt, Homo sapiens
  misc_RNA (1)...(19): siRNA sense strand
ggccggagaucgaagccaa

SEQ ID NO: 2490086 - RNA, 19 nt, Homo sapiens
  misc_RNA (1)...(19): siRNA sense strand
agaacagcgugaagcucaa

SEQ ID NO: 2490087 - RNA, 19 nt, Homo sapiens
  misc_RNA (1)...(19): siRNA sense strand
cgaguaaccaucagguaca

SEQ ID NO: 2490088 - RNA, 19 nt, Homo sapiens
  misc_RNA (1)...(19): siRNA sense strand
gugcugggcuauaagguga

SEQ ID NO: 2490089 - RNA, 19 nt, Homo sapiens
  misc_RNA (1)...(19): siRNA sense strand
uggcaagagccgggagaga

SEQ ID NO: 2490090 - RNA, 19 nt, Homo sapiens
  misc_RNA (1)...(19): siRNA sense strand
aggugauguauaaggagaa

SEQ ID NO: 2490091 - RNA, 19 nt, Homo sapiens
  misc_RNA (1)...(19): siRNA sense strand
ggacaagaucaauggcauc

SEQ ID NO: 2490092 - RNA, 19 nt, Homo sapiens
  misc_RNA (1)...(19): siRNA sense strand
cggucaacgacuaugguuu

SEQ ID NO: 2490093 - RNA, 19 nt, Homo sapiens
  misc_RNA (1)...(19): siRNA sense strand
cggaacaggaagaggaggu

SEQ ID NO: 2490094 - RNA, 19 nt, Homo sapiens
  misc_RNA (1)...(19): siRNA sense strand
ccguggacgugaaggggaa

SEQ ID NO: 2490095 - RNA, 19 nt, Homo sapiens
  misc_RNA (1)...(19): siRNA sense strand
ccaacgugacccuggagua

SEQ ID NO: 2490096 - RNA, 19 nt, Homo sapiens
  misc_RNA (1)...(19): siRNA sense strand
aggaagaggagguuaccau

SEQ ID NO: 2490097 - RNA, 19 nt, Homo sapiens
  misc_RNA (1)...(19): siRNA sense strand
gugaauguguccugggaag

SEQ ID NO: 2490098 - RNA, 19 nt, Homo sapiens
  misc_RNA (1)...(19): siRNA sense strand
gggaagugacagcgaguac

SEQ ID NO: 2490099 - RNA, 19 nt, Homo sapiens
  misc_RNA (1)...(19): siRNA sense strand
ggguaccaguuuaagaaca

SEQ ID NO: 2490100 - RNA, 19 nt, Homo sapiens
  misc_RNA (1)...(19): siRNA sense strand
gggagggagaggagugguu

SEQ ID NO: 2490101 - RNA, 19 nt, Homo sapiens
  misc_RNA (1)...(19): siRNA sense strand
ggcuauaagaucaaguaca

SEQ ID NO: 2490102 - RNA, 19 nt, Homo sapiens
  misc_RNA (1)...(19): siRNA sense strand
auggcauccuggagggcua

SEQ ID NO: 2490103 - RNA, 19 nt, Homo sapiens
  misc_RNA (1)...(19): siRNA sense strand
cuagaaagauccagacccu

SEQ ID NO: 2490104 - RNA, 19 nt, Homo sapiens
  misc_RNA (1)...(19): siRNA sense strand
gagaacagcgugaagcuca

SEQ ID NO: 2490105 - RNA, 19 nt, Homo sapiens
  misc_RNA (1)...(19): siRNA sense strand
ccaaauacaacgaccucau

SEQ ID NO: 2490106 - RNA, 19 nt, Homo sapiens
  misc_RNA (1)...(19): siRNA sense strand
gcuuugagauggugggguu

SEQ ID NO: 2490107 - RNA, 19 nt, Homo sapiens
  misc_RNA (1)...(19): siRNA sense strand
agauggaauacaaugggaa

SEQ ID NO: 2490108 - RNA, 19 nt, Homo sapiens
  misc_RNA (1)...(19): siRNA sense strand
ggacgugacuugggagcca

SEQ ID NO: 2490109 - RNA, 19 nt, Homo sapiens
  misc_RNA (1)...(19): siRNA sense strand
gcaucagagccaagaccuu

SEQ ID NO: 2490110 - RNA, 19 nt, Homo sapiens
  misc_RNA (1)...(19): siRNA sense strand
cgcaguacgagcuggacaa

SEQ ID NO: 2490111 - RNA, 19 nt, Homo sapiens
  misc_RNA (1)...(19): siRNA sense strand
gccuacagcuacacggaga

SEQ ID NO: 2490112 - RNA, 19 nt, Homo sapiens
  misc_RNA (1)...(19): siRNA sense strand
cggaugcugaugugaacaa

SEQ ID NO: 2490113 - RNA, 19 nt, Homo sapiens
  misc_RNA (1)...(19): siRNA sense strand
acccugaguccgugggcua

SEQ ID NO: 2490114 - RNA, 19 nt, Homo sapiens
  misc_RNA (1)...(19): siRNA sense strand
gggaaaggacaguucagca

SEQ ID NO: 2490115 - RNA, 19 nt, Homo sapiens
  misc_RNA (1)...(19): siRNA sense strand
ugccaagucuggagcccua

SEQ ID NO: 2490116 - RNA, 19 nt, Homo sapiens
  misc_RNA (1)...(19): siRNA sense strand
cuggaggaguggacagagu

SEQ ID NO: 2490117 - RNA, 19 nt, Homo sapiens
  misc_RNA (1)...(19): siRNA sense strand
aagcacaggcgguacgaga

SEQ ID NO: 2490118 - RNA, 19 nt, Homo sapiens
  misc_RNA (1)...(19): siRNA sense strand
ccacaaccucagugaaugu

SEQ ID NO: 2490119 - RNA, 19 nt, Homo sapiens
  misc_RNA (1)...(19): siRNA sense strand
agaugaugagcuuggauga

SEQ ID NO: 2490120 - RNA, 19 nt, Homo sapiens
  misc_RNA (1)...(19): siRNA sense strand
cagacguggucgggagaca

SEQ ID NO: 2490121 - RNA, 19 nt, Homo sapiens
  misc_RNA (1)...(19): siRNA sense strand
aaggugauguauaaggaga

SEQ ID NO: 2490122 - RNA, 19 nt, Homo sapiens
  misc_RNA (1)...(19): siRNA sense strand
auguauaaggagaaggacu

SEQ ID NO: 2490123 - RNA, 19 nt, Homo sapiens
  misc_RNA (1)...(19): siRNA sense strand
cagccagaauggagacauc

SEQ ID NO: 2490124 - RNA, 19 nt, Homo sapiens
  misc_RNA (1)...(19): siRNA sense strand
aagaaguacgccaagaaga

SEQ ID NO: 2490125 - RNA, 19 nt, Homo sapiens
  misc_RNA (1)...(19): siRNA sense strand
ccaucgaggaccuggagga

SEQ ID NO: 2490126 - RNA, 19 nt, Homo sapiens
  misc_RNA (1)...(19): siRNA sense strand
caagauuuauuucugggaa

SEQ ID NO: 2490127 - RNA, 19 nt, Homo sapiens
  misc_RNA (1)...(19): siRNA sense strand
cccuguggcugaaggugaa

SEQ ID NO: 2490128 - RNA, 19 nt, Homo sapiens
  misc_RNA (1)...(19): siRNA sense strand
ugauguauaaggagaagga

SEQ ID NO: 2490129 - RNA, 19 nt, Homo sapiens
  misc_RNA (1)...(19): siRNA sense strand
gagaagcugccgaggccuu

SEQ ID NO: 2490130 - RNA, 19 nt, Homo sapiens
  misc_RNA (1)...(19): siRNA sense strand
aggaaauaacagacaagaa

SEQ ID NO: 2490131 - RNA, 19 nt, Homo sapiens
  misc_RNA (1)...(19): siRNA sense strand
agaaaugaguuguugcaga

SEQ ID NO: 2490132 - RNA, 19 nt, Homo sapiens
  misc_RNA (1)...(19): siRNA sense strand
augaacagagucaaggaaa

SEQ ID NO: 2490133 - RNA, 19 nt, Homo sapiens
  misc_RNA (1)...(19): siRNA sense strand
gaugagaugcugaagacca

SEQ ID NO: 2490134 - RNA, 19 nt, Homo sapiens
  misc_RNA (1)...(19): siRNA sense strand
caggaauuggaaagaauca

SEQ ID NO: 2490135 - RNA, 19 nt, Homo sapiens
  misc_RNA (1)...(19): siRNA sense strand
augagaugcugaagaccau

SEQ ID NO: 2490136 - RNA, 19 nt, Homo sapiens
  misc_RNA (1)...(19): siRNA sense strand
guaaaacaggaauuggaaa

SEQ ID NO: 2490137 - RNA, 19 nt, Homo sapiens
  misc_RNA (1)...(19): siRNA sense strand
guuggauccacuugaacaa

SEQ ID NO: 2490138 - RNA, 19 nt, Homo sapiens
  misc_RNA (1)...(19): siRNA sense strand
aggaaauaacagacaagaa

SEQ ID NO: 2490139 - RNA, 19 nt, Homo sapiens
  misc_RNA (1)...(19): siRNA sense strand
agaaaugaguuguugcaga

SEQ ID NO: 2490140 - RNA, 19 nt, Homo sapiens
  misc_RNA (1)...(19): siRNA sense strand
augaacagagucaaggaaa

SEQ ID NO: 2490141 - RNA, 19 nt, Homo sapiens
  misc_RNA (1)...(19): siRNA sense strand
gaugagaugcugaagacca

SEQ ID NO: 2490142 - RNA, 19 nt, Homo sapiens
  misc_RNA (1)...(19): siRNA sense strand
caggaauuggaaagaauca

SEQ ID NO: 2490143 - RNA, 19 nt, Homo sapiens
  misc_RNA (1)...(19): siRNA sense strand
augagaugcugaagaccau

SEQ ID NO: 2490144 - RNA, 19 nt, Homo sapiens
  misc_RNA (1)...(19): siRNA sense strand
guaaaacaggaauuggaaa

SEQ ID NO: 2490145 - RNA, 19 nt, Homo sapiens
  misc_RNA (1)...(19): siRNA sense strand
guuggauccacuugaacaa

SEQ ID NO: 2490146 - RNA, 19 nt, Homo sapiens
  misc_RNA (1)...(19): siRNA sense strand
ucacggagcucauggccaa

SEQ ID NO: 2490147 - RNA, 19 nt, Homo sapiens
  misc_RNA (1)...(19): siRNA sense strand
augaagaagcugcggcaca

SEQ ID NO: 2490148 - RNA, 19 nt, Homo sapiens
  misc_RNA (1)...(19): siRNA sense strand
gagacaaccuccugcacca

SEQ ID NO: 2490149 - RNA, 19 nt, Homo sapiens
  misc_RNA (1)...(19): siRNA sense strand
agucggagauccaggccau

SEQ ID NO: 2490150 - RNA, 19 nt, Homo sapiens
  misc_RNA (1)...(19): siRNA sense strand
agauccaggccaugaagaa

SEQ ID NO: 2490151 - RNA, 19 nt, Homo sapiens
  misc_RNA (1)...(19): siRNA sense strand
accuggagucgcagaauua

SEQ ID NO: 2490152 - RNA, 19 nt, Homo sapiens
  misc_RNA (1)...(19): siRNA sense strand
gggaaaacacccucugcaa

SEQ ID NO: 2490153 - RNA, 19 nt, Homo sapiens
  misc_RNA (1)...(19): siRNA sense strand
gugcacaagcugaugcuga

SEQ ID NO: 2490154 - RNA, 19 nt, Homo sapiens
  misc_RNA (1)...(19): siRNA sense strand
uuaucaaggaggacgucua

SEQ ID NO: 2490155 - RNA, 19 nt, Homo sapiens
  misc_RNA (1)...(19): siRNA sense strand
aaggaggaggauaggauaa

SEQ ID NO: 2490156 - RNA, 19 nt, Homo sapiens
  misc_RNA (1)...(19): siRNA sense strand
guaccaagucccagcccaa

SEQ ID NO: 2490157 - RNA, 19 nt, Homo sapiens
  misc_RNA (1)...(19): siRNA sense strand
gguacuaagagccaggcaa

SEQ ID NO: 2490158 - RNA, 19 nt, Homo sapiens
  misc_RNA (1)...(19): siRNA sense strand
aggaagaauugcuggguga

SEQ ID NO: 2490159 - RNA, 19 nt, Homo sapiens
  misc_RNA (1)...(19): siRNA sense strand
aggaaaaggaagaucguaa

SEQ ID NO: 2490160 - RNA, 19 nt, Homo sapiens
  misc_RNA (1)...(19): siRNA sense strand
aggugauauuguugacaua

SEQ ID NO: 2490161 - RNA, 19 nt, Homo sapiens
  misc_RNA (1)...(19): siRNA sense strand
ccacuauuccagaacgaaa

SEQ ID NO: 2490162 - RNA, 19 nt, Homo sapiens
  misc_RNA (1)...(19): siRNA sense strand
acuugaagaacuagagaga

SEQ ID NO: 2490163 - RNA, 19 nt, Homo sapiens
  misc_RNA (1)...(19): siRNA sense strand
uguugugaauggagaauau

SEQ ID NO: 2490164 - RNA, 19 nt, Homo sapiens
  misc_RNA (1)...(19): siRNA sense strand
gagaauaugucccucgcaa

SEQ ID NO: 2490165 - RNA, 19 nt, Homo sapiens
  misc_RNA (1)...(19): siRNA sense strand
cuauaaugcccuucgagaa

SEQ ID NO: 2490166 - RNA, 19 nt, Homo sapiens
  misc_RNA (1)...(19): siRNA sense strand
caguaacaccugaggcuuu

SEQ ID NO: 2490167 - RNA, 19 nt, Homo sapiens
  misc_RNA (1)...(19): siRNA sense strand
ggauuugcuagcugauaaa

SEQ ID NO: 2490168 - RNA, 19 nt, Homo sapiens
  misc_RNA (1)...(19): siRNA sense strand
cugaagaggaaaaggaaga

SEQ ID NO: 2490169 - RNA, 19 nt, Homo sapiens
  misc_RNA (1)...(19): siRNA sense strand
cgaauaaauacuggaaaga

SEQ ID NO: 2490170 - RNA, 19 nt, Homo sapiens
  misc_RNA (1)...(19): siRNA sense strand
agaacuagagagacaggaa

SEQ ID NO: 2490171 - RNA, 19 nt, Homo sapiens
  misc_RNA (1)...(19): siRNA sense strand
aagccaaacguaaacgaaa

SEQ ID NO: 2490172 - RNA, 19 nt, Homo sapiens
  misc_RNA (1)...(19): siRNA sense strand
ggcucgacuugaagaacua

SEQ ID NO: 2490173 - RNA, 19 nt, Homo sapiens
  misc_RNA (1)...(19): siRNA sense strand
caucugaagaaacuggaaa

SEQ ID NO: 2490174 - RNA, 19 nt, Homo sapiens
  misc_RNA (1)...(19): siRNA sense strand
gggacaacugguuugcaaa

SEQ ID NO: 2490175 - RNA, 19 nt, Homo sapiens
  misc_RNA (1)...(19): siRNA sense strand
acagaagauuugcagaaaa

SEQ ID NO: 2490176 - RNA, 19 nt, Homo sapiens
  misc_RNA (1)...(19): siRNA sense strand
gauaaagaacugugggcuc

SEQ ID NO: 2490177 - RNA, 19 nt, Homo sapiens
  misc_RNA (1)...(19): siRNA sense strand
aguuuaaagcugccagauu

SEQ ID NO: 2490178 - RNA, 19 nt, Homo sapiens
  misc_RNA (1)...(19): siRNA sense strand
ugugauugcaaauggagaa

SEQ ID NO: 2490179 - RNA, 19 nt, Homo sapiens
  misc_RNA (1)...(19): siRNA sense strand
uagagagacaggaagaauu

SEQ ID NO: 2490180 - RNA, 19 nt, Homo sapiens
  misc_RNA (1)...(19): siRNA sense strand
ccaugaggcuuuagggguu

SEQ ID NO: 2490181 - RNA, 19 nt, Homo sapiens
  misc_RNA (1)...(19): siRNA sense strand
cgaaagaacagcacuggca

SEQ ID NO: 2490182 - RNA, 19 nt, Homo sapiens
  misc_RNA (1)...(19): siRNA sense strand
cuuuguugauguugugaau

SEQ ID NO: 2490183 - RNA, 19 nt, Homo sapiens
  misc_RNA (1)...(19): siRNA sense strand
agaauaugucccucgcaaa

SEQ ID NO: 2490184 - RNA, 19 nt, Homo sapiens
  misc_RNA (1)...(19): siRNA sense strand
gcaaaugaugugaaaucca

SEQ ID NO: 2490185 - RNA, 19 nt, Homo sapiens
  misc_RNA (1)...(19): siRNA sense strand
cuugauaguaagccugaua

SEQ ID NO: 2490186 - RNA, 19 nt, Homo sapiens
  misc_RNA (1)...(19): siRNA sense strand
agacauuuacagagccuuu

SEQ ID NO: 2490187 - RNA, 19 nt, Homo sapiens
  misc_RNA (1)...(19): siRNA sense strand
cgagaaagacucagcaccu

SEQ ID NO: 2490188 - RNA, 19 nt, Homo sapiens
  misc_RNA (1)...(19): siRNA sense strand
ggauguugcaaguucagaa

SEQ ID NO: 2490189 - RNA, 19 nt, Homo sapiens
  misc_RNA (1)...(19): siRNA sense strand
aagaggaaccacaagaaaa

SEQ ID NO: 2490190 - RNA, 19 nt, Homo sapiens
  misc_RNA (1)...(19): siRNA sense strand
uugcaaaugaugugaaauc

SEQ ID NO: 2490191 - RNA, 19 nt, Homo sapiens
  misc_RNA (1)...(19): siRNA sense strand
cagugaaaagaaagaagaa

SEQ ID NO: 2490192 - RNA, 19 nt, Homo sapiens
  misc_RNA (1)...(19): siRNA sense strand
aauaguguguguagcgaca

SEQ ID NO: 2490193 - RNA, 19 nt, Homo sapiens
  misc_RNA (1)...(19): siRNA sense strand
uguagcgacacuagugaaa

SEQ ID NO: 2490194 - RNA, 19 nt, Homo sapiens
  misc_RNA (1)...(19): siRNA sense strand
ugaagaaacuggaaagagg

SEQ ID NO: 2490195 - RNA, 19 nt, Homo sapiens
  misc_RNA (1)...(19): siRNA sense strand
acgacaacauugacgacga

SEQ ID NO: 2490196 - RNA, 19 nt, Homo sapiens
  misc_RNA (1)...(19): siRNA sense strand
auaacgaccaugaggcuuu

SEQ ID NO: 2490197 - RNA, 19 nt, Homo sapiens
  misc_RNA (1)...(19): siRNA sense strand
agaagguagauaaugacua

SEQ ID NO: 2490198 - RNA, 19 nt, Homo sapiens
  misc_RNA (1)...(19): siRNA sense strand
aaaagaaagaagaagccaa

SEQ ID NO: 2490199 - RNA, 19 nt, Homo sapiens
  misc_RNA (1)...(19): siRNA sense strand
cggaaagaacauguaagaa

SEQ ID NO: 2490200 - RNA, 19 nt, Homo sapiens
  misc_RNA (1)...(19): siRNA sense strand
ccugauacugugauugcaa

SEQ ID NO: 2490201 - RNA, 19 nt, Homo sapiens
  misc_RNA (1)...(19): siRNA sense strand
aaggaagaucguaacacaa

SEQ ID NO: 2490202 - RNA, 19 nt, Homo sapiens
  misc_RNA (1)...(19): siRNA sense strand
gccuaagaggguccgaaua

SEQ ID NO: 2490203 - RNA, 19 nt, Homo sapiens
  misc_RNA (1)...(19): siRNA sense strand
uguugacauacgagaagaa

SEQ ID NO: 2490204 - RNA, 19 nt, Homo sapiens
  misc_RNA (1)...(19): siRNA sense strand
ggggacaacugguuugcaa

SEQ ID NO: 2490205 - RNA, 19 nt, Homo sapiens
  misc_RNA (1)...(19): siRNA sense strand
cgaugcugcaggugauauu

SEQ ID NO: 2490206 - RNA, 19 nt, Homo sapiens
  misc_RNA (1)...(19): siRNA sense strand
cuagagagacaggaagaau

SEQ ID NO: 2490207 - RNA, 19 nt, Homo sapiens
  misc_RNA (1)...(19): siRNA sense strand
gcaucaaguaacagacucu

SEQ ID NO: 2490208 - RNA, 19 nt, Homo sapiens
  misc_RNA (1)...(19): siRNA sense strand
agaggaaccacaagaaaau

SEQ ID NO: 2490209 - RNA, 19 nt, Homo sapiens
  misc_RNA (1)...(19): siRNA sense strand
aggaagaauugcuggguga

SEQ ID NO: 2490210 - RNA, 19 nt, Homo sapiens
  misc_RNA (1)...(19): siRNA sense strand
aggaaaaggaagaucguaa

SEQ ID NO: 2490211 - RNA, 19 nt, Homo sapiens
  misc_RNA (1)...(19): siRNA sense strand
aggugauauuguugacaua

SEQ ID NO: 2490212 - RNA, 19 nt, Homo sapiens
  misc_RNA (1)...(19): siRNA sense strand
ccacuauuccagaacgaaa

SEQ ID NO: 2490213 - RNA, 19 nt, Homo sapiens
  misc_RNA (1)...(19): siRNA sense strand
acuugaagaacuagagaga

SEQ ID NO: 2490214 - RNA, 19 nt, Homo sapiens
  misc_RNA (1)...(19): siRNA sense strand
uguugugaauggagaauau

SEQ ID NO: 2490215 - RNA, 19 nt, Homo sapiens
  misc_RNA (1)...(19): siRNA sense strand
gagaauaugucccucgcaa

SEQ ID NO: 2490216 - RNA, 19 nt, Homo sapiens
  misc_RNA (1)...(19): siRNA sense strand
cuauaaugcccuucgagaa

SEQ ID NO: 2490217 - RNA, 19 nt, Homo sapiens
  misc_RNA (1)...(19): siRNA sense strand
caguaacaccugaggcuuu

SEQ ID NO: 2490218 - RNA, 19 nt, Homo sapiens
  misc_RNA (1)...(19): siRNA sense strand
ggauuugcuagcugauaaa

SEQ ID NO: 2490219 - RNA, 19 nt, Homo sapiens
  misc_RNA (1)...(19): siRNA sense strand
cugaagaggaaaaggaaga

SEQ ID NO: 2490220 - RNA, 19 nt, Homo sapiens
  misc_RNA (1)...(19): siRNA sense strand
cgaauaaauacuggaaaga

SEQ ID NO: 2490221 - RNA, 19 nt, Homo sapiens
  misc_RNA (1)...(19): siRNA sense strand
agaacuagagagacaggaa

SEQ ID NO: 2490222 - RNA, 19 nt, Homo sapiens
  misc_RNA (1)...(19): siRNA sense strand
aagccaaacguaaacgaaa

SEQ ID NO: 2490223 - RNA, 19 nt, Homo sapiens
  misc_RNA (1)...(19): siRNA sense strand
ggcucgacuugaagaacua

SEQ ID NO: 2490224 - RNA, 19 nt, Homo sapiens
  misc_RNA (1)...(19): siRNA sense strand
caucugaagaaacuggaaa

SEQ ID NO: 2490225 - RNA, 19 nt, Homo sapiens
  misc_RNA (1)...(19): siRNA sense strand
gggacaacugguuugcaaa

SEQ ID NO: 2490226 - RNA, 19 nt, Homo sapiens
  misc_RNA (1)...(19): siRNA sense strand
acagaagauuugcagaaaa

SEQ ID NO: 2490227 - RNA, 19 nt, Homo sapiens
  misc_RNA (1)...(19): siRNA sense strand
gauaaagaacugugggcuc

SEQ ID NO: 2490228 - RNA, 19 nt, Homo sapiens
  misc_RNA (1)...(19): siRNA sense strand
aguuuaaagcugccagauu

SEQ ID NO: 2490229 - RNA, 19 nt, Homo sapiens
  misc_RNA (1)...(19): siRNA sense strand
ugugauugcaaauggagaa

SEQ ID NO: 2490230 - RNA, 19 nt, Homo sapiens
  misc_RNA (1)...(19): siRNA sense strand
uagagagacaggaagaauu

SEQ ID NO: 2490231 - RNA, 19 nt, Homo sapiens
  misc_RNA (1)...(19): siRNA sense strand
ccaugaggcuuuagggguu

SEQ ID NO: 2490232 - RNA, 19 nt, Homo sapiens
  misc_RNA (1)...(19): siRNA sense strand
cgaaagaacagcacuggca

SEQ ID NO: 2490233 - RNA, 19 nt, Homo sapiens
  misc_RNA (1)...(19): siRNA sense strand
cuuuguugauguugugaau

SEQ ID NO: 2490234 - RNA, 19 nt, Homo sapiens
  misc_RNA (1)...(19): siRNA sense strand
agaauaugucccucgcaaa

SEQ ID NO: 2490235 - RNA, 19 nt, Homo sapiens
  misc_RNA (1)...(19): siRNA sense strand
gcaaaugaugugaaaucca

SEQ ID NO: 2490236 - RNA, 19 nt, Homo sapiens
  misc_RNA (1)...(19): siRNA sense strand
cuugauaguaagccugaua

SEQ ID NO: 2490237 - RNA, 19 nt, Homo sapiens
  misc_RNA (1)...(19): siRNA sense strand
agacauuuacagagccuuu

SEQ ID NO: 2490238 - RNA, 19 nt, Homo sapiens
  misc_RNA (1)...(19): siRNA sense strand
cgagaaagacucagcaccu

SEQ ID NO: 2490239 - RNA, 19 nt, Homo sapiens
  misc_RNA (1)...(19): siRNA sense strand
ggauguugcaaguucagaa

SEQ ID NO: 2490240 - RNA, 19 nt, Homo sapiens
  misc_RNA (1)...(19): siRNA sense strand
aagaggaaccacaagaaaa

SEQ ID NO: 2490241 - RNA, 19 nt, Homo sapiens
  misc_RNA (1)...(19): siRNA sense strand
uugcaaaugaugugaaauc

SEQ ID NO: 2490242 - RNA, 19 nt, Homo sapiens
  misc_RNA (1)...(19): siRNA sense strand
cagugaaaagaaagaagaa

SEQ ID NO: 2490243 - RNA, 19 nt, Homo sapiens
  misc_RNA (1)...(19): siRNA sense strand
aauaguguguguagcgaca

SEQ ID NO: 2490244 - RNA, 19 nt, Homo sapiens
  misc_RNA (1)...(19): siRNA sense strand
uguagcgacacuagugaaa

SEQ ID NO: 2490245 - RNA, 19 nt, Homo sapiens
  misc_RNA (1)...(19): siRNA sense strand
ugaagaaacuggaaagagg

SEQ ID NO: 2490246 - RNA, 19 nt, Homo sapiens
  misc_RNA (1)...(19): siRNA sense strand
acgacaacauugacgacga

SEQ ID NO: 2490247 - RNA, 19 nt, Homo sapiens
  misc_RNA (1)...(19): siRNA sense strand
auaacgaccaugaggcuuu

SEQ ID NO: 2490248 - RNA, 19 nt, Homo sapiens
  misc_RNA (1)...(19): siRNA sense strand
agaagguagauaaugacua

SEQ ID NO: 2490249 - RNA, 19 nt, Homo sapiens
  misc_RNA (1)...(19): siRNA sense strand
aaaagaaagaagaagccaa

SEQ ID NO: 2490250 - RNA, 19 nt, Homo sapiens
  misc_RNA (1)...(19): siRNA sense strand
cggaaagaacauguaagaa

SEQ ID NO: 2490251 - RNA, 19 nt, Homo sapiens
  misc_RNA (1)...(19): siRNA sense strand
ccugauacugugauugcaa

SEQ ID NO: 2490252 - RNA, 19 nt, Homo sapiens
  misc_RNA (1)...(19): siRNA sense strand
aaggaagaucguaacacaa

SEQ ID NO: 2490253 - RNA, 19 nt, Homo sapiens
  misc_RNA (1)...(19): siRNA sense strand
gccuaagaggguccgaaua

SEQ ID NO: 2490254 - RNA, 19 nt, Homo sapiens
  misc_RNA (1)...(19): siRNA sense strand
uguugacauacgagaagaa

SEQ ID NO: 2490255 - RNA, 19 nt, Homo sapiens
  misc_RNA (1)...(19): siRNA sense strand
ggggacaacugguuugcaa

SEQ ID NO: 2490256 - RNA, 19 nt, Homo sapiens
  misc_RNA (1)...(19): siRNA sense strand
cgaugcugcaggugauauu

SEQ ID NO: 2490257 - RNA, 19 nt, Homo sapiens
  misc_RNA (1)...(19): siRNA sense strand
cuagagagacaggaagaau

SEQ ID NO: 2490258 - RNA, 19 nt, Homo sapiens
  misc_RNA (1)...(19): siRNA sense strand
gcaucaaguaacagacucu

SEQ ID NO: 2490259 - RNA, 19 nt, Homo sapiens
  misc_RNA (1)...(19): siRNA sense strand
agaggaaccacaagaaaau

SEQ ID NO: 2490260 - RNA, 19 nt, Homo sapiens
  misc_RNA (1)...(19): siRNA sense strand
gcaaaaggucucugagcca

SEQ ID NO: 2490261 - RNA, 19 nt, Homo sapiens
  misc_RNA (1)...(19): siRNA sense strand
gcuaauaaauguugccaug

SEQ ID NO: 2490262 - RNA, 19 nt, Homo sapiens
  misc_RNA (1)...(19): siRNA sense strand
cagcauuaccacagcuaca

SEQ ID NO: 2490263 - RNA, 19 nt, Homo sapiens
  misc_RNA (1)...(19): siRNA sense strand
ucgcaauagacaaagugaa

SEQ ID NO: 2490264 - RNA, 19 nt, Homo sapiens
  misc_RNA (1)...(19): siRNA sense strand
gcaaaaggucucugagcca

SEQ ID NO: 2490265 - RNA, 19 nt, Homo sapiens
  misc_RNA (1)...(19): siRNA sense strand
ucuacagugcauuggcuaa

SEQ ID NO: 2490266 - RNA, 19 nt, Homo sapiens
  misc_RNA (1)...(19): siRNA sense strand
cgcaauagacaaagugaag

SEQ ID NO: 2490267 - RNA, 19 nt, Homo sapiens
  misc_RNA (1)...(19): siRNA sense strand
ggaaagaagugguggacac

SEQ ID NO: 2490268 - RNA, 19 nt, Homo sapiens
  misc_RNA (1)...(19): siRNA sense strand
gggagugagggcagaggaa

SEQ ID NO: 2490269 - RNA, 19 nt, Homo sapiens
  misc_RNA (1)...(19): siRNA sense strand
ggaaaugagcagaggaguc

SEQ ID NO: 2490270 - RNA, 19 nt, Homo sapiens
  misc_RNA (1)...(19): siRNA sense strand
acgauaaaggccagcagua

SEQ ID NO: 2490271 - RNA, 19 nt, Homo sapiens
  misc_RNA (1)...(19): siRNA sense strand
gggcaaagucagagacagc

SEQ ID NO: 2490272 - RNA, 19 nt, Homo sapiens
  misc_RNA (1)...(19): siRNA sense strand
cugggauggaguugggaau

SEQ ID NO: 2490273 - RNA, 19 nt, Homo sapiens
  misc_RNA (1)...(19): siRNA sense strand
aaacguuccaagugggaca

SEQ ID NO: 2490274 - RNA, 19 nt, Homo sapiens
  misc_RNA (1)...(19): siRNA sense strand
caguaucuuuauugaggau

SEQ ID NO: 2490275 - RNA, 19 nt, Homo sapiens
  misc_RNA (1)...(19): siRNA sense strand
ggaaugaggcagaugagcu

SEQ ID NO: 2490276 - RNA, 19 nt, Homo sapiens
  misc_RNA (1)...(19): siRNA sense strand
ggacacaagcccaagccca

SEQ ID NO: 2490277 - RNA, 19 nt, Homo sapiens
  misc_RNA (1)...(19): siRNA sense strand
ggaaagaagugguggacac

SEQ ID NO: 2490278 - RNA, 19 nt, Homo sapiens
  misc_RNA (1)...(19): siRNA sense strand
gggagugagggcagaggaa

SEQ ID NO: 2490279 - RNA, 19 nt, Homo sapiens
  misc_RNA (1)...(19): siRNA sense strand
ggaaaugagcagaggaguc

SEQ ID NO: 2490280 - RNA, 19 nt, Homo sapiens
  misc_RNA (1)...(19): siRNA sense strand
acgauaaaggccagcagua

SEQ ID NO: 2490281 - RNA, 19 nt, Homo sapiens
  misc_RNA (1)...(19): siRNA sense strand
gggcaaagucagagacagc

SEQ ID NO: 2490282 - RNA, 19 nt, Homo sapiens
  misc_RNA (1)...(19): siRNA sense strand
cugggauggaguugggaau

SEQ ID NO: 2490283 - RNA, 19 nt, Homo sapiens
  misc_RNA (1)...(19): siRNA sense strand
aaacguuccaagugggaca

SEQ ID NO: 2490284 - RNA, 19 nt, Homo sapiens
  misc_RNA (1)...(19): siRNA sense strand
caguaucuuuauugaggau

SEQ ID NO: 2490285 - RNA, 19 nt, Homo sapiens
  misc_RNA (1)...(19): siRNA sense strand
ggaaugaggcagaugagcu

SEQ ID NO: 2490286 - RNA, 19 nt, Homo sapiens
  misc_RNA (1)...(19): siRNA sense strand
ggacacaagcccaagccca

SEQ ID NO: 2490287 - RNA, 19 nt, Homo sapiens
  misc_RNA (1)...(19): siRNA sense strand
ggaaagaagugguggacac

SEQ ID NO: 2490288 - RNA, 19 nt, Homo sapiens
  misc_RNA (1)...(19): siRNA sense strand
gggagugagggcagaggaa

SEQ ID NO: 2490289 - RNA, 19 nt, Homo sapiens
  misc_RNA (1)...(19): siRNA sense strand
ggaaaugagcagaggaguc

SEQ ID NO: 2490290 - RNA, 19 nt, Homo sapiens
  misc_RNA (1)...(19): siRNA sense strand
acgauaaaggccagcagua

SEQ ID NO: 2490291 - RNA, 19 nt, Homo sapiens
  misc_RNA (1)...(19): siRNA sense strand
gggcaaagucagagacagc

SEQ ID NO: 2490292 - RNA, 19 nt, Homo sapiens
  misc_RNA (1)...(19): siRNA sense strand
cugggauggaguugggaau

SEQ ID NO: 2490293 - RNA, 19 nt, Homo sapiens
  misc_RNA (1)...(19): siRNA sense strand
aaacguuccaagugggaca

SEQ ID NO: 2490294 - RNA, 19 nt, Homo sapiens
  misc_RNA (1)...(19): siRNA sense strand
caguaucuuuauugaggau

SEQ ID NO: 2490295 - RNA, 19 nt, Homo sapiens
  misc_RNA (1)...(19): siRNA sense strand
ggaaugaggcagaugagcu

SEQ ID NO: 2490296 - RNA, 19 nt, Homo sapiens
  misc_RNA (1)...(19): siRNA sense strand
ggacacaagcccaagccca

SEQ ID NO: 2490297 - RNA, 19 nt, Homo sapiens
  misc_RNA (1)...(19): siRNA sense strand
ggauagaauaagugaaaca

SEQ ID NO: 2490298 - RNA, 19 nt, Homo sapiens
  misc_RNA (1)...(19): siRNA sense strand
auguagaaaccgagaauau

SEQ ID NO: 2490299 - RNA, 19 nt, Homo sapiens
  misc_RNA (1)...(19): siRNA sense strand
ggucuauauuucagcgaau

SEQ ID NO: 2490300 - RNA, 19 nt, Homo sapiens
  misc_RNA (1)...(19): siRNA sense strand
ucccaaaagucgagcaaua

SEQ ID NO: 2490301 - RNA, 19 nt, Homo sapiens
  misc_RNA (1)...(19): siRNA sense strand
ugguacaacucgacagaca

SEQ ID NO: 2490302 - RNA, 19 nt, Homo sapiens
  misc_RNA (1)...(19): siRNA sense strand
aauaagugaaacacggaaa

SEQ ID NO: 2490303 - RNA, 19 nt, Homo sapiens
  misc_RNA (1)...(19): siRNA sense strand
gagguuaaugaaauggaaa

SEQ ID NO: 2490304 - RNA, 19 nt, Homo sapiens
  misc_RNA (1)...(19): siRNA sense strand
uuaacaguccacagggaaa

SEQ ID NO: 2490305 - RNA, 19 nt, Homo sapiens
  misc_RNA (1)...(19): siRNA sense strand
accaaagacucaagacaca

SEQ ID NO: 2490306 - RNA, 19 nt, Homo sapiens
  misc_RNA (1)...(19): siRNA sense strand
ccaccauggaagagaagga

SEQ ID NO: 2490307 - RNA, 19 nt, Homo sapiens
  misc_RNA (1)...(19): siRNA sense strand
ccauggaagagaaggaagu

SEQ ID NO: 2490308 - RNA, 19 nt, Homo sapiens
  misc_RNA (1)...(19): siRNA sense strand
gaacagugugagaugccaa

SEQ ID NO: 2490309 - RNA, 19 nt, Homo sapiens
  misc_RNA (1)...(19): siRNA sense strand
cguaauacuccuacaucuu

SEQ ID NO: 2490310 - RNA, 19 nt, Homo sapiens
  misc_RNA (1)...(19): siRNA sense strand
cagaauggaacgacuucaa

SEQ ID NO: 2490311 - RNA, 19 nt, Homo sapiens
  misc_RNA (1)...(19): siRNA sense strand
gaguaugggaucugaugau

SEQ ID NO: 2490312 - RNA, 19 nt, Homo sapiens
  misc_RNA (1)...(19): siRNA sense strand
cacagaagaugaugaggga

SEQ ID NO: 2490313 - RNA, 19 nt, Homo sapiens
  misc_RNA (1)...(19): siRNA sense strand
aagucgagcaauaggcaau

SEQ ID NO: 2490314 - RNA, 19 nt, Homo sapiens
  misc_RNA (1)...(19): siRNA sense strand
gagggagcucaguggaauu

SEQ ID NO: 2490315 - RNA, 19 nt, Homo sapiens
  misc_RNA (1)...(19): siRNA sense strand
gcugaugucccguagucaa

SEQ ID NO: 2490316 - RNA, 19 nt, Homo sapiens
  misc_RNA (1)...(19): siRNA sense strand
agugaaacacggaaacuga

SEQ ID NO: 2490317 - RNA, 19 nt, Homo sapiens
  misc_RNA (1)...(19): siRNA sense strand
agaaggaaguaggaugaau

SEQ ID NO: 2490318 - RNA, 19 nt, Homo sapiens
  misc_RNA (1)...(19): siRNA sense strand
gaugaauggaaguaggacu

SEQ ID NO: 2490319 - RNA, 19 nt, Homo sapiens
  misc_RNA (1)...(19): siRNA sense strand
ccaugaacccucagcaagu

SEQ ID NO: 2490320 - RNA, 19 nt, Homo sapiens
  misc_RNA (1)...(19): siRNA sense strand
ccucaucucaacagccaaa

SEQ ID NO: 2490321 - RNA, 19 nt, Homo sapiens
  misc_RNA (1)...(19): siRNA sense strand
acaccaaagacucaagaca

SEQ ID NO: 2490322 - RNA, 19 nt, Homo sapiens
  misc_RNA (1)...(19): siRNA sense strand
cagaagaugaugagggagc

SEQ ID NO: 2490323 - RNA, 19 nt, Homo sapiens
  misc_RNA (1)...(19): siRNA sense strand
ggaaaauaaucuaacucga

SEQ ID NO: 2490324 - RNA, 19 nt, Homo sapiens
  misc_RNA (1)...(19): siRNA sense strand
caggaacaugucugggcaa

SEQ ID NO: 2490325 - RNA, 19 nt, Homo sapiens
  misc_RNA (1)...(19): siRNA sense strand
aaacacggaaacugaguau

SEQ ID NO: 2490326 - RNA, 19 nt, Homo sapiens
  misc_RNA (1)...(19): siRNA sense strand
cauuuuaaccccagcgcua

SEQ ID NO: 2490327 - RNA, 19 nt, Homo sapiens
  misc_RNA (1)...(19): siRNA sense strand
acagacagcaccagcucaa

SEQ ID NO: 2490328 - RNA, 19 nt, Homo sapiens
  misc_RNA (1)...(19): siRNA sense strand
caucaaaacaccaaagacu

SEQ ID NO: 2490329 - RNA, 19 nt, Homo sapiens
  misc_RNA (1)...(19): siRNA sense strand
ggauagaauaagugaaaca

SEQ ID NO: 2490330 - RNA, 19 nt, Homo sapiens
  misc_RNA (1)...(19): siRNA sense strand
auguagaaaccgagaauau

SEQ ID NO: 2490331 - RNA, 19 nt, Homo sapiens
  misc_RNA (1)...(19): siRNA sense strand
ggucuauauuucagcgaau

SEQ ID NO: 2490332 - RNA, 19 nt, Homo sapiens
  misc_RNA (1)...(19): siRNA sense strand
ucccaaaagucgagcaaua

SEQ ID NO: 2490333 - RNA, 19 nt, Homo sapiens
  misc_RNA (1)...(19): siRNA sense strand
ugguacaacucgacagaca

SEQ ID NO: 2490334 - RNA, 19 nt, Homo sapiens
  misc_RNA (1)...(19): siRNA sense strand
aauaagugaaacacggaaa

SEQ ID NO: 2490335 - RNA, 19 nt, Homo sapiens
  misc_RNA (1)...(19): siRNA sense strand
uuaacaguccacagggaaa

SEQ ID NO: 2490336 - RNA, 19 nt, Homo sapiens
  misc_RNA (1)...(19): siRNA sense strand
ccaccauggaagagaagga

SEQ ID NO: 2490337 - RNA, 19 nt, Homo sapiens
  misc_RNA (1)...(19): siRNA sense strand
ccauggaagagaaggaagu

SEQ ID NO: 2490338 - RNA, 19 nt, Homo sapiens
  misc_RNA (1)...(19): siRNA sense strand
cguaauacuccuacaucuu

SEQ ID NO: 2490339 - RNA, 19 nt, Homo sapiens
  misc_RNA (1)...(19): siRNA sense strand
gaguaugggaucugaugau

SEQ ID NO: 2490340 - RNA, 19 nt, Homo sapiens
  misc_RNA (1)...(19): siRNA sense strand
aagucgagcaauaggcaau

SEQ ID NO: 2490341 - RNA, 19 nt, Homo sapiens
  misc_RNA (1)...(19): siRNA sense strand
gcugaugucccguagucaa

SEQ ID NO: 2490342 - RNA, 19 nt, Homo sapiens
  misc_RNA (1)...(19): siRNA sense strand
agugaaacacggaaacuga

SEQ ID NO: 2490343 - RNA, 19 nt, Homo sapiens
  misc_RNA (1)...(19): siRNA sense strand
agaaggaaguaggaugaau

SEQ ID NO: 2490344 - RNA, 19 nt, Homo sapiens
  misc_RNA (1)...(19): siRNA sense strand
gaugaauggaaguaggacu

SEQ ID NO: 2490345 - RNA, 19 nt, Homo sapiens
  misc_RNA (1)...(19): siRNA sense strand
ccaugaacccucagcaagu

SEQ ID NO: 2490346 - RNA, 19 nt, Homo sapiens
  misc_RNA (1)...(19): siRNA sense strand
ccucaucucaacagccaaa

SEQ ID NO: 2490347 - RNA, 19 nt, Homo sapiens
  misc_RNA (1)...(19): siRNA sense strand
caggaacaugucugggcaa

SEQ ID NO: 2490348 - RNA, 19 nt, Homo sapiens
  misc_RNA (1)...(19): siRNA sense strand
aaacacggaaacugaguau

SEQ ID NO: 2490349 - RNA, 19 nt, Homo sapiens
  misc_RNA (1)...(19): siRNA sense strand
acagacagcaccagcucaa

SEQ ID NO: 2490350 - RNA, 19 nt, Homo sapiens
  misc_RNA (1)...(19): siRNA sense strand
caucauuaccagagcuaca

SEQ ID NO: 2490351 - RNA, 19 nt, Homo sapiens
  misc_RNA (1)...(19): siRNA sense strand
cggccaaauggaaggacga

SEQ ID NO: 2490352 - RNA, 19 nt, Homo sapiens
  misc_RNA (1)...(19): siRNA sense strand
gugaagccgcagacagcaa

SEQ ID NO: 2490353 - RNA, 19 nt, Homo sapiens
  misc_RNA (1)...(19): siRNA sense strand
gcaaaaggucucugagcca

SEQ ID NO: 2490354 - RNA, 19 nt, Homo sapiens
  misc_RNA (1)...(19): siRNA sense strand
cgcaauaggcaaagugaag

SEQ ID NO: 2490355 - RNA, 19 nt, Homo sapiens
  misc_RNA (1)...(19): siRNA sense strand
cguggcacuguuugagaaa

SEQ ID NO: 2490356 - RNA, 19 nt, Homo sapiens
  misc_RNA (1)...(19): siRNA sense strand
ucgcaauaggcaaagugaa

SEQ ID NO: 2490357 - RNA, 19 nt, Homo sapiens
  misc_RNA (1)...(19): siRNA sense strand
ggaaauagcuuauguggga

SEQ ID NO: 2490358 - RNA, 19 nt, Homo sapiens
  misc_RNA (1)...(19): siRNA sense strand
uauccuaaaccgagaacaa

SEQ ID NO: 2490359 - RNA, 19 nt, Homo sapiens
  misc_RNA (1)...(19): siRNA sense strand
cggaaguaccagucaaaga

SEQ ID NO: 2490360 - RNA, 19 nt, Homo sapiens
  misc_RNA (1)...(19): siRNA sense strand
ccaacuuacacaugaacaa

SEQ ID NO: 2490361 - RNA, 19 nt, Homo sapiens
  misc_RNA (1)...(19): siRNA sense strand
gcauuagaggugacgcaaa

SEQ ID NO: 2490362 - RNA, 19 nt, Homo sapiens
  misc_RNA (1)...(19): siRNA sense strand
ccacaaaaguuaaagagga

SEQ ID NO: 2490363 - RNA, 19 nt, Homo sapiens
  misc_RNA (1)...(19): siRNA sense strand
gcaccaaugacauggccaa

SEQ ID NO: 2490364 - RNA, 19 nt, Homo sapiens
  misc_RNA (1)...(19): siRNA sense strand
ccuauuugguguaagaaca

SEQ ID NO: 2490365 - RNA, 19 nt, Homo sapiens
  misc_RNA (1)...(19): siRNA sense strand
ggacaaacagagauccgaa

SEQ ID NO: 2490366 - RNA, 19 nt, Homo sapiens
  misc_RNA (1)...(19): siRNA sense strand
gcacagaagaggcgcacca

SEQ ID NO: 2490367 - RNA, 19 nt, Homo sapiens
  misc_RNA (1)...(19): siRNA sense strand
ccucgucauuaaagacaaa

SEQ ID NO: 2490368 - RNA, 19 nt, Homo sapiens
  misc_RNA (1)...(19): siRNA sense strand
guguguaagacucuagaaa

SEQ ID NO: 2490369 - RNA, 19 nt, Homo sapiens
  misc_RNA (1)...(19): siRNA sense strand
agacuuugguuggaggaaa

SEQ ID NO: 2490370 - RNA, 19 nt, Homo sapiens
  misc_RNA (1)...(19): siRNA sense strand
gaggaagaacggaggaaac

SEQ ID NO: 2490371 - RNA, 19 nt, Homo sapiens
  misc_RNA (1)...(19): siRNA sense strand
uauagcaacaggaaggaaa

SEQ ID NO: 2490372 - RNA, 19 nt, Homo sapiens
  misc_RNA (1)...(19): siRNA sense strand
agccaaggacagagaguca

SEQ ID NO: 2490373 - RNA, 19 nt, Homo sapiens
  misc_RNA (1)...(19): siRNA sense strand
cauuuggauuggacagaau

SEQ ID NO: 2490374 - RNA, 19 nt, Homo sapiens
  misc_RNA (1)...(19): siRNA sense strand
gcacaaagccaaaggccug

SEQ ID NO: 2490375 - RNA, 19 nt, Homo sapiens
  misc_RNA (1)...(19): siRNA sense strand
uugcaagagagucaggaaa

SEQ ID NO: 2490376 - RNA, 19 nt, Homo sapiens
  misc_RNA (1)...(19): siRNA sense strand
gauguuugcaagagaguca

SEQ ID NO: 2490377 - RNA, 19 nt, Homo sapiens
  misc_RNA (1)...(19): siRNA sense strand
gaagagaguaaccaggcua

SEQ ID NO: 2490378 - RNA, 19 nt, Homo sapiens
  misc_RNA (1)...(19): siRNA sense strand
ucagcaaaguggacggcau

SEQ ID NO: 2490379 - RNA, 19 nt, Homo sapiens
  misc_RNA (1)...(19): siRNA sense strand
gcauagaaaaggagucaga

SEQ ID NO: 2490380 - RNA, 19 nt, Homo sapiens
  misc_RNA (1)...(19): siRNA sense strand
guguaagacucuagaaaac

SEQ ID NO: 2490381 - RNA, 19 nt, Homo sapiens
  misc_RNA (1)...(19): siRNA sense strand
augguugagcagagugaaa

SEQ ID NO: 2490382 - RNA, 19 nt, Homo sapiens
  misc_RNA (1)...(19): siRNA sense strand
ugacauucaacaagagcau

SEQ ID NO: 2490383 - RNA, 19 nt, Homo sapiens
  misc_RNA (1)...(19): siRNA sense strand
gggucagggaagucaaaga

SEQ ID NO: 2490384 - RNA, 19 nt, Homo sapiens
  misc_RNA (1)...(19): siRNA sense strand
ucagaagaugggugcacaa

SEQ ID NO: 2490385 - RNA, 19 nt, Homo sapiens
  misc_RNA (1)...(19): siRNA sense strand
aaguauaacaucaggauuc

SEQ ID NO: 2490386 - RNA, 19 nt, Homo sapiens
  misc_RNA (1)...(19): siRNA sense strand
ggcaagaagcagaggacag

SEQ ID NO: 2490387 - RNA, 19 nt, Homo sapiens
  misc_RNA (1)...(19): siRNA sense strand
ggaaaaucuuuguagggga

SEQ ID NO: 2490388 - RNA, 19 nt, Homo sapiens
  misc_RNA (1)...(19): siRNA sense strand
acuucagaguugagucauu

SEQ ID NO: 2490389 - RNA, 19 nt, Homo sapiens
  misc_RNA (1)...(19): siRNA sense strand
ggaagaacggaggaaacaa

SEQ ID NO: 2490390 - RNA, 19 nt, Homo sapiens
  misc_RNA (1)...(19): siRNA sense strand
gcaacaggaaggaaaacaa

SEQ ID NO: 2490391 - RNA, 19 nt, Homo sapiens
  misc_RNA (1)...(19): siRNA sense strand
gucucagccaugugggaaa

SEQ ID NO: 2490392 - RNA, 19 nt, Homo sapiens
  misc_RNA (1)...(19): siRNA sense strand
agaggaagaacggaggaaa

SEQ ID NO: 2490393 - RNA, 19 nt, Homo sapiens
  misc_RNA (1)...(19): siRNA sense strand
cuagugagguccugaggca

SEQ ID NO: 2490394 - RNA, 19 nt, Homo sapiens
  misc_RNA (1)...(19): siRNA sense strand
guaagaacagccaaggaca

SEQ ID NO: 2490395 - RNA, 19 nt, Homo sapiens
  misc_RNA (1)...(19): siRNA sense strand
agccaaaggccuggaguuu

SEQ ID NO: 2490396 - RNA, 19 nt, Homo sapiens
  misc_RNA (1)...(19): siRNA sense strand
cauccaacuuacacaugaa

SEQ ID NO: 2490397 - RNA, 19 nt, Homo sapiens
  misc_RNA (1)...(19): siRNA sense strand
aguaccagucaaagaagaa

SEQ ID NO: 2490398 - RNA, 19 nt, Homo sapiens
  misc_RNA (1)...(19): siRNA sense strand
ugcaagagagucaggaaaa

SEQ ID NO: 2490399 - RNA, 19 nt, Homo sapiens
  misc_RNA (1)...(19): siRNA sense strand
ggcggaaguaccagucaaa

SEQ ID NO: 2490400 - RNA, 19 nt, Homo sapiens
  misc_RNA (1)...(19): siRNA sense strand
ugagacgguuuaagcggaa

SEQ ID NO: 2490401 - RNA, 19 nt, Homo sapiens
  misc_RNA (1)...(19): siRNA sense strand
acgccaacguguuugauga

SEQ ID NO: 2490402 - RNA, 19 nt, Homo sapiens
  misc_RNA (1)...(19): siRNA sense strand
gguuuaagcggaagcaucu

SEQ ID NO: 2490403 - RNA, 19 nt, Homo sapiens
  misc_RNA (1)...(19): siRNA sense strand
ccauugaucacgugccuau

SEQ ID NO: 2490404 - RNA, 19 nt, Homo sapiens
  misc_RNA (1)...(19): siRNA sense strand
aggaagaacggaggaaaca

SEQ ID NO: 2490405 - RNA, 19 nt, Homo sapiens
  misc_RNA (1)...(19): siRNA sense strand
ggacagagagucaugguug

SEQ ID NO: 2490406 - RNA, 19 nt, Homo sapiens
  misc_RNA (1)...(19): siRNA sense strand
ggacagugcaacaaugcca

SEQ ID NO: 2490407 - RNA, 19 nt, Homo sapiens
  misc_RNA (1)...(19): siRNA sense strand
ugaaugacauccagcgacu

SEQ ID NO: 2490408 - RNA, 19 nt, Homo sapiens
  misc_RNA (1)...(19): siRNA sense strand
cagaggaagaacggaggaa

SEQ ID NO: 2490409 - RNA, 19 nt, Homo sapiens
  misc_RNA (1)...(19): siRNA sense strand
agacccagcuccacgguga

SEQ ID NO: 2490410 - RNA, 19 nt, Homo sapiens
  misc_RNA (1)...(19): siRNA sense strand
ccuauaucuucaggagaau

SEQ ID NO: 2490411 - RNA, 19 nt, Homo sapiens
  misc_RNA (1)...(19): siRNA sense strand
ucgguuugguguggaaaua

SEQ ID NO: 2490412 - RNA, 19 nt, Homo sapiens
  misc_RNA (1)...(19): siRNA sense strand
ggaaauagcuuauguggga

SEQ ID NO: 2490413 - RNA, 19 nt, Homo sapiens
  misc_RNA (1)...(19): siRNA sense strand
uauccuaaaccgagaacaa

SEQ ID NO: 2490414 - RNA, 19 nt, Homo sapiens
  misc_RNA (1)...(19): siRNA sense strand
cggaaguaccagucaaaga

SEQ ID NO: 2490415 - RNA, 19 nt, Homo sapiens
  misc_RNA (1)...(19): siRNA sense strand
ccaacuuacacaugaacaa

SEQ ID NO: 2490416 - RNA, 19 nt, Homo sapiens
  misc_RNA (1)...(19): siRNA sense strand
gcauuagaggugacgcaaa

SEQ ID NO: 2490417 - RNA, 19 nt, Homo sapiens
  misc_RNA (1)...(19): siRNA sense strand
ccacaaaaguuaaagagga

SEQ ID NO: 2490418 - RNA, 19 nt, Homo sapiens
  misc_RNA (1)...(19): siRNA sense strand
gcaccaaugacauggccaa

SEQ ID NO: 2490419 - RNA, 19 nt, Homo sapiens
  misc_RNA (1)...(19): siRNA sense strand
ccuauuugguguaagaaca

SEQ ID NO: 2490420 - RNA, 19 nt, Homo sapiens
  misc_RNA (1)...(19): siRNA sense strand
ggacaaacagagauccgaa

SEQ ID NO: 2490421 - RNA, 19 nt, Homo sapiens
  misc_RNA (1)...(19): siRNA sense strand
gcacagaagaggcgcacca

SEQ ID NO: 2490422 - RNA, 19 nt, Homo sapiens
  misc_RNA (1)...(19): siRNA sense strand
ccucgucauuaaagacaaa

SEQ ID NO: 2490423 - RNA, 19 nt, Homo sapiens
  misc_RNA (1)...(19): siRNA sense strand
guguguaagacucuagaaa

SEQ ID NO: 2490424 - RNA, 19 nt, Homo sapiens
  misc_RNA (1)...(19): siRNA sense strand
agacuuugguuggaggaaa

SEQ ID NO: 2490425 - RNA, 19 nt, Homo sapiens
  misc_RNA (1)...(19): siRNA sense strand
gaggaagaacggaggaaac

SEQ ID NO: 2490426 - RNA, 19 nt, Homo sapiens
  misc_RNA (1)...(19): siRNA sense strand
uauagcaacaggaaggaaa

SEQ ID NO: 2490427 - RNA, 19 nt, Homo sapiens
  misc_RNA (1)...(19): siRNA sense strand
agccaaggacagagaguca

SEQ ID NO: 2490428 - RNA, 19 nt, Homo sapiens
  misc_RNA (1)...(19): siRNA sense strand
cauuuggauuggacagaau

SEQ ID NO: 2490429 - RNA, 19 nt, Homo sapiens
  misc_RNA (1)...(19): siRNA sense strand
gcacaaagccaaaggccug

SEQ ID NO: 2490430 - RNA, 19 nt, Homo sapiens
  misc_RNA (1)...(19): siRNA sense strand
uugcaagagagucaggaaa

SEQ ID NO: 2490431 - RNA, 19 nt, Homo sapiens
  misc_RNA (1)...(19): siRNA sense strand
gauguuugcaagagaguca

SEQ ID NO: 2490432 - RNA, 19 nt, Homo sapiens
  misc_RNA (1)...(19): siRNA sense strand
gaagagaguaaccaggcua

SEQ ID NO: 2490433 - RNA, 19 nt, Homo sapiens
  misc_RNA (1)...(19): siRNA sense strand
ucagcaaaguggacggcau

SEQ ID NO: 2490434 - RNA, 19 nt, Homo sapiens
  misc_RNA (1)...(19): siRNA sense strand
gcauagaaaaggagucaga

SEQ ID NO: 2490435 - RNA, 19 nt, Homo sapiens
  misc_RNA (1)...(19): siRNA sense strand
guguaagacucuagaaaac

SEQ ID NO: 2490436 - RNA, 19 nt, Homo sapiens
  misc_RNA (1)...(19): siRNA sense strand
augguugagcagagugaaa

SEQ ID NO: 2490437 - RNA, 19 nt, Homo sapiens
  misc_RNA (1)...(19): siRNA sense strand
ugacauucaacaagagcau

SEQ ID NO: 2490438 - RNA, 19 nt, Homo sapiens
  misc_RNA (1)...(19): siRNA sense strand
gggucagggaagucaaaga

SEQ ID NO: 2490439 - RNA, 19 nt, Homo sapiens
  misc_RNA (1)...(19): siRNA sense strand
ucagaagaugggugcacaa

SEQ ID NO: 2490440 - RNA, 19 nt, Homo sapiens
  misc_RNA (1)...(19): siRNA sense strand
aaguauaacaucaggauuc

SEQ ID NO: 2490441 - RNA, 19 nt, Homo sapiens
  misc_RNA (1)...(19): siRNA sense strand
ggcaagaagcagaggacag

SEQ ID NO: 2490442 - RNA, 19 nt, Homo sapiens
  misc_RNA (1)...(19): siRNA sense strand
ggaaaaucuuuguagggga

SEQ ID NO: 2490443 - RNA, 19 nt, Homo sapiens
  misc_RNA (1)...(19): siRNA sense strand
acuucagaguugagucauu

SEQ ID NO: 2490444 - RNA, 19 nt, Homo sapiens
  misc_RNA (1)...(19): siRNA sense strand
ggaagaacggaggaaacaa

SEQ ID NO: 2490445 - RNA, 19 nt, Homo sapiens
  misc_RNA (1)...(19): siRNA sense strand
gcaacaggaaggaaaacaa

SEQ ID NO: 2490446 - RNA, 19 nt, Homo sapiens
  misc_RNA (1)...(19): siRNA sense strand
gucucagccaugugggaaa

SEQ ID NO: 2490447 - RNA, 19 nt, Homo sapiens
  misc_RNA (1)...(19): siRNA sense strand
agaggaagaacggaggaaa

SEQ ID NO: 2490448 - RNA, 19 nt, Homo sapiens
  misc_RNA (1)...(19): siRNA sense strand
cuagugagguccugaggca

SEQ ID NO: 2490449 - RNA, 19 nt, Homo sapiens
  misc_RNA (1)...(19): siRNA sense strand
guaagaacagccaaggaca

SEQ ID NO: 2490450 - RNA, 19 nt, Homo sapiens
  misc_RNA (1)...(19): siRNA sense strand
agccaaaggccuggaguuu

SEQ ID NO: 2490451 - RNA, 19 nt, Homo sapiens
  misc_RNA (1)...(19): siRNA sense strand
cauccaacuuacacaugaa

SEQ ID NO: 2490452 - RNA, 19 nt, Homo sapiens
  misc_RNA (1)...(19): siRNA sense strand
aguaccagucaaagaagaa

SEQ ID NO: 2490453 - RNA, 19 nt, Homo sapiens
  misc_RNA (1)...(19): siRNA sense strand
ugcaagagagucaggaaaa

SEQ ID NO: 2490454 - RNA, 19 nt, Homo sapiens
  misc_RNA (1)...(19): siRNA sense strand
ggcggaaguaccagucaaa

SEQ ID NO: 2490455 - RNA, 19 nt, Homo sapiens
  misc_RNA (1)...(19): siRNA sense strand
acgccaacguguuugauga

SEQ ID NO: 2490456 - RNA, 19 nt, Homo sapiens
  misc_RNA (1)...(19): siRNA sense strand
gguuuaagcggaagcaucu

SEQ ID NO: 2490457 - RNA, 19 nt, Homo sapiens
  misc_RNA (1)...(19): siRNA sense strand
ccauugaucacgugccuau

SEQ ID NO: 2490458 - RNA, 19 nt, Homo sapiens
  misc_RNA (1)...(19): siRNA sense strand
aggaagaacggaggaaaca

SEQ ID NO: 2490459 - RNA, 19 nt, Homo sapiens
  misc_RNA (1)...(19): siRNA sense strand
ggacagagagucaugguug

SEQ ID NO: 2490460 - RNA, 19 nt, Homo sapiens
  misc_RNA (1)...(19): siRNA sense strand
ggacagugcaacaaugcca

SEQ ID NO: 2490461 - RNA, 19 nt, Homo sapiens
  misc_RNA (1)...(19): siRNA sense strand
ugaaugacauccagcgacu

SEQ ID NO: 2490462 - RNA, 19 nt, Homo sapiens
  misc_RNA (1)...(19): siRNA sense strand
cagaggaagaacggaggaa

SEQ ID NO: 2490463 - RNA, 19 nt, Homo sapiens
  misc_RNA (1)...(19): siRNA sense strand
agacccagcuccacgguga

SEQ ID NO: 2490464 - RNA, 19 nt, Homo sapiens
  misc_RNA (1)...(19): siRNA sense strand
ccuauaucuucaggagaau

SEQ ID NO: 2490465 - RNA, 19 nt, Homo sapiens
  misc_RNA (1)...(19): siRNA sense strand
ucgguuugguguggaaaua

SEQ ID NO: 2490466 - RNA, 19 nt, Homo sapiens
  misc_RNA (1)...(19): siRNA sense strand
aggcggaagccaaggucaa

SEQ ID NO: 2490467 - RNA, 19 nt, Homo sapiens
  misc_RNA (1)...(19): siRNA sense strand
aggcagaaggaucaagaau

SEQ ID NO: 2490468 - RNA, 19 nt, Homo sapiens
  misc_RNA (1)...(19): siRNA sense strand
ggacaguggcugagcacgu

SEQ ID NO: 2490469 - RNA, 19 nt, Homo sapiens
  misc_RNA (1)...(19): siRNA sense strand
ccagaaaggccaggcggaa

SEQ ID NO: 2490470 - RNA, 19 nt, Homo sapiens
  misc_RNA (1)...(19): siRNA sense strand
gaucagaccucaaggacag

SEQ ID NO: 2490471 - RNA, 19 nt, Homo sapiens
  misc_RNA (1)...(19): siRNA sense strand
aggacaggccagcgagaga

SEQ ID NO: 2490472 - RNA, 19 nt, Homo sapiens
  misc_RNA (1)...(19): siRNA sense strand
ggaugaagcugcaggucug

SEQ ID NO: 2490473 - RNA, 19 nt, Homo sapiens
  misc_RNA (1)...(19): siRNA sense strand
cgaucagaccucaaggaca

SEQ ID NO: 2490474 - RNA, 19 nt, Homo sapiens
  misc_RNA (1)...(19): siRNA sense strand
ccacagggccuauggcagu

SEQ ID NO: 2490475 - RNA, 19 nt, Homo sapiens
  misc_RNA (1)...(19): siRNA sense strand
ucuacaugcuggcagggaa

SEQ ID NO: 2490476 - RNA, 19 nt, Homo sapiens
  misc_RNA (1)...(19): siRNA sense strand
cagaugagguuccugccua

SEQ ID NO: 2490477 - RNA, 19 nt, Homo sapiens
  misc_RNA (1)...(19): siRNA sense strand
aggaaaggcaggaggaacc

SEQ ID NO: 2490478 - RNA, 19 nt, Homo sapiens
  misc_RNA (1)...(19): siRNA sense strand
guaccaaguuugcaccaca

SEQ ID NO: 2490479 - RNA, 19 nt, Homo sapiens
  misc_RNA (1)...(19): siRNA sense strand
caccgagaguucaaggaga

SEQ ID NO: 2490480 - RNA, 19 nt, Homo sapiens
  misc_RNA (1)...(19): siRNA sense strand
aggcugaagaggaaaggca

SEQ ID NO: 2490481 - RNA, 19 nt, Homo sapiens
  misc_RNA (1)...(19): siRNA sense strand
aggcagaaggaucaagaau

SEQ ID NO: 2490482 - RNA, 19 nt, Homo sapiens
  misc_RNA (1)...(19): siRNA sense strand
aggcagaaggaucaagaau

SEQ ID NO: 2490483 - RNA, 19 nt, Homo sapiens
  misc_RNA (1)...(19): siRNA sense strand
gaucagaccucaaggacag

SEQ ID NO: 2490484 - RNA, 19 nt, Homo sapiens
  misc_RNA (1)...(19): siRNA sense strand
aggacaggccagcgagaga

SEQ ID NO: 2490485 - RNA, 19 nt, Homo sapiens
  misc_RNA (1)...(19): siRNA sense strand
ggaugaagcugcaggucug

SEQ ID NO: 2490486 - RNA, 19 nt, Homo sapiens
  misc_RNA (1)...(19): siRNA sense strand
cgaucagaccucaaggaca

SEQ ID NO: 2490487 - RNA, 19 nt, Homo sapiens
  misc_RNA (1)...(19): siRNA sense strand
cagaugagguuccugccua

SEQ ID NO: 2490488 - RNA, 19 nt, Homo sapiens
  misc_RNA (1)...(19): siRNA sense strand
aggcagaaggaucaagaau

SEQ ID NO: 2490489 - RNA, 19 nt, Homo sapiens
  misc_RNA (1)...(19): siRNA sense strand
aggcggaagccaaggucaa

SEQ ID NO: 2490490 - RNA, 19 nt, Homo sapiens
  misc_RNA (1)...(19): siRNA sense strand
aggcagaaggaucaagaau

SEQ ID NO: 2490491 - RNA, 19 nt, Homo sapiens
  misc_RNA (1)...(19): siRNA sense strand
ggacaguggcugagcacgu

SEQ ID NO: 2490492 - RNA, 19 nt, Homo sapiens
  misc_RNA (1)...(19): siRNA sense strand
ccagaaaggccaggcggaa

SEQ ID NO: 2490493 - RNA, 19 nt, Homo sapiens
  misc_RNA (1)...(19): siRNA sense strand
gaucagaccucaaggacag

SEQ ID NO: 2490494 - RNA, 19 nt, Homo sapiens
  misc_RNA (1)...(19): siRNA sense strand
aggacaggccagcgagaga

SEQ ID NO: 2490495 - RNA, 19 nt, Homo sapiens
  misc_RNA (1)...(19): siRNA sense strand
ggaugaagcugcaggucug

SEQ ID NO: 2490496 - RNA, 19 nt, Homo sapiens
  misc_RNA (1)...(19): siRNA sense strand
cgaucagaccucaaggaca

SEQ ID NO: 2490497 - RNA, 19 nt, Homo sapiens
  misc_RNA (1)...(19): siRNA sense strand
ccacagggccuauggcagu

SEQ ID NO: 2490498 - RNA, 19 nt, Homo sapiens
  misc_RNA (1)...(19): siRNA sense strand
ucuacaugcuggcagggaa

SEQ ID NO: 2490499 - RNA, 19 nt, Homo sapiens
  misc_RNA (1)...(19): siRNA sense strand
cagaugagguuccugccua

SEQ ID NO: 2490500 - RNA, 19 nt, Homo sapiens
  misc_RNA (1)...(19): siRNA sense strand
aggaaaggcaggaggaacc

SEQ ID NO: 2490501 - RNA, 19 nt, Homo sapiens
  misc_RNA (1)...(19): siRNA sense strand
guaccaaguuugcaccaca

SEQ ID NO: 2490502 - RNA, 19 nt, Homo sapiens
  misc_RNA (1)...(19): siRNA sense strand
caccgagaguucaaggaga

SEQ ID NO: 2490503 - RNA, 19 nt, Homo sapiens
  misc_RNA (1)...(19): siRNA sense strand
aggcugaagaggaaaggca

SEQ ID NO: 2490504 - RNA, 19 nt, Homo sapiens
  misc_RNA (1)...(19): siRNA sense strand
ugacauaaaugaugggcau

SEQ ID NO: 2490505 - RNA, 19 nt, Homo sapiens
  misc_RNA (1)...(19): siRNA sense strand
agaacuuacucaugggcaa

SEQ ID NO: 2490506 - RNA, 19 nt, Homo sapiens
  misc_RNA (1)...(19): siRNA sense strand
acuucaaggucaugcgaga

SEQ ID NO: 2490507 - RNA, 19 nt, Homo sapiens
  misc_RNA (1)...(19): siRNA sense strand
guucaacacuucaagguca

SEQ ID NO: 2490508 - RNA, 19 nt, Homo sapiens
  misc_RNA (1)...(19): siRNA sense strand
gggcugugggagaagaaau

SEQ ID NO: 2490509 - RNA, 19 nt, Homo sapiens
  misc_RNA (1)...(19): siRNA sense strand
aggaaggauaugugcccaa

SEQ ID NO: 2490510 - RNA, 19 nt, Homo sapiens
  misc_RNA (1)...(19): siRNA sense strand
cugucaggcaugaggauga

SEQ ID NO: 2490511 - RNA, 19 nt, Homo sapiens
  misc_RNA (1)...(19): siRNA sense strand
ugcgagacaacaaggguaa

SEQ ID NO: 2490512 - RNA, 19 nt, Homo sapiens
  misc_RNA (1)...(19): siRNA sense strand
gguaauuacuuucugugga

SEQ ID NO: 2490513 - RNA, 19 nt, Homo sapiens
  misc_RNA (1)...(19): siRNA sense strand
cggcuugggcagugaaaug

SEQ ID NO: 2490514 - RNA, 19 nt, Homo sapiens
  misc_RNA (1)...(19): siRNA sense strand
gugaggaugaacugagcuu

SEQ ID NO: 2490515 - RNA, 19 nt, Homo sapiens
  misc_RNA (1)...(19): siRNA sense strand
aggucaugcgagacaacaa

SEQ ID NO: 2490516 - RNA, 19 nt, Homo sapiens
  misc_RNA (1)...(19): siRNA sense strand
gugaacagguugagagggu

SEQ ID NO: 2490517 - RNA, 19 nt, Homo sapiens
  misc_RNA (1)...(19): siRNA sense strand
cugcagugugguagaacua

SEQ ID NO: 2490518 - RNA, 19 nt, Homo sapiens
  misc_RNA (1)...(19): siRNA sense strand
gcauaugagucaaagcacu

SEQ ID NO: 2490519 - RNA, 19 nt, Homo sapiens
  misc_RNA (1)...(19): siRNA sense strand
gcaaaggugaugaaggagu

SEQ ID NO: 2490520 - RNA, 19 nt, Homo sapiens
  misc_RNA (1)...(19): siRNA sense strand
caggcaaugagcagaggaa

SEQ ID NO: 2490521 - RNA, 19 nt, Homo sapiens
  misc_RNA (1)...(19): siRNA sense strand
gauaaagaccagcagcaca

SEQ ID NO: 2490522 - RNA, 19 nt, Homo sapiens
  misc_RNA (1)...(19): siRNA sense strand
cagaggagguugagcaggu

SEQ ID NO: 2490523 - RNA, 19 nt, Homo sapiens
  misc_RNA (1)...(19): siRNA sense strand
cucaggagcuggaggggaa

SEQ ID NO: 2490524 - RNA, 19 nt, Homo sapiens
  misc_RNA (1)...(19): siRNA sense strand
gagcagguccacagaggca

SEQ ID NO: 2490525 - RNA, 19 nt, Homo sapiens
  misc_RNA (1)...(19): siRNA sense strand
guaaacaaauugcgggcac

SEQ ID NO: 2490526 - RNA, 19 nt, Homo sapiens
  misc_RNA (1)...(19): siRNA sense strand
ccaauguagcaaaggugau

SEQ ID NO: 2490527 - RNA, 19 nt, Homo sapiens
  misc_RNA (1)...(19): siRNA sense strand
cagccuugcauaugaguca

SEQ ID NO: 2490528 - RNA, 19 nt, Homo sapiens
  misc_RNA (1)...(19): siRNA sense strand
caguaucuuuauugaggau

SEQ ID NO: 2490529 - RNA, 19 nt, Homo sapiens
  misc_RNA (1)...(19): siRNA sense strand
gggcaaagucagagucagc

SEQ ID NO: 2490530 - RNA, 19 nt, Homo sapiens
  misc_RNA (1)...(19): siRNA sense strand
cagcacaggcagugguuuu

SEQ ID NO: 2490531 - RNA, 19 nt, Homo sapiens
  misc_RNA (1)...(19): siRNA sense strand
caagggauugggaggaaca

SEQ ID NO: 2490532 - RNA, 19 nt, Homo sapiens
  misc_RNA (1)...(19): siRNA sense strand
uugccaaugugguguccaa

SEQ ID NO: 2490533 - RNA, 19 nt, Homo sapiens
  misc_RNA (1)...(19): siRNA sense strand
acgauaaagaccagcagca

SEQ ID NO: 2490534 - RNA, 19 nt, Homo sapiens
  misc_RNA (1)...(19): siRNA sense strand
ccgcauaucauugggcgaa

SEQ ID NO: 2490535 - RNA, 19 nt, Homo sapiens
  misc_RNA (1)...(19): siRNA sense strand
gguugagaggguuguugaa

SEQ ID NO: 2490536 - RNA, 19 nt, Homo sapiens
  misc_RNA (1)...(19): siRNA sense strand
gugaacagguugagagggu

SEQ ID NO: 2490537 - RNA, 19 nt, Homo sapiens
  misc_RNA (1)...(19): siRNA sense strand
cugcagugugguagaacua

SEQ ID NO: 2490538 - RNA, 19 nt, Homo sapiens
  misc_RNA (1)...(19): siRNA sense strand
gcauaugagucaaagcacu

SEQ ID NO: 2490539 - RNA, 19 nt, Homo sapiens
  misc_RNA (1)...(19): siRNA sense strand
gcaaaggugaugaaggagu

SEQ ID NO: 2490540 - RNA, 19 nt, Homo sapiens
  misc_RNA (1)...(19): siRNA sense strand
caggcaaugagcagaggaa

SEQ ID NO: 2490541 - RNA, 19 nt, Homo sapiens
  misc_RNA (1)...(19): siRNA sense strand
gauaaagaccagcagcaca

SEQ ID NO: 2490542 - RNA, 19 nt, Homo sapiens
  misc_RNA (1)...(19): siRNA sense strand
cagaggagguugagcaggu

SEQ ID NO: 2490543 - RNA, 19 nt, Homo sapiens
  misc_RNA (1)...(19): siRNA sense strand
cucaggagcuggaggggaa

SEQ ID NO: 2490544 - RNA, 19 nt, Homo sapiens
  misc_RNA (1)...(19): siRNA sense strand
gagcagguccacagaggca

SEQ ID NO: 2490545 - RNA, 19 nt, Homo sapiens
  misc_RNA (1)...(19): siRNA sense strand
guaaacaaauugcgggcac

SEQ ID NO: 2490546 - RNA, 19 nt, Homo sapiens
  misc_RNA (1)...(19): siRNA sense strand
ccaauguagcaaaggugau

SEQ ID NO: 2490547 - RNA, 19 nt, Homo sapiens
  misc_RNA (1)...(19): siRNA sense strand
cagccuugcauaugaguca

SEQ ID NO: 2490548 - RNA, 19 nt, Homo sapiens
  misc_RNA (1)...(19): siRNA sense strand
caguaucuuuauugaggau

SEQ ID NO: 2490549 - RNA, 19 nt, Homo sapiens
  misc_RNA (1)...(19): siRNA sense strand
gggcaaagucagagucagc

SEQ ID NO: 2490550 - RNA, 19 nt, Homo sapiens
  misc_RNA (1)...(19): siRNA sense strand
cagcacaggcagugguuuu

SEQ ID NO: 2490551 - RNA, 19 nt, Homo sapiens
  misc_RNA (1)...(19): siRNA sense strand
caagggauugggaggaaca

SEQ ID NO: 2490552 - RNA, 19 nt, Homo sapiens
  misc_RNA (1)...(19): siRNA sense strand
uugccaaugugguguccaa

SEQ ID NO: 2490553 - RNA, 19 nt, Homo sapiens
  misc_RNA (1)...(19): siRNA sense strand
acgauaaagaccagcagca

SEQ ID NO: 2490554 - RNA, 19 nt, Homo sapiens
  misc_RNA (1)...(19): siRNA sense strand
ccgcauaucauugggcgaa

SEQ ID NO: 2490555 - RNA, 19 nt, Homo sapiens
  misc_RNA (1)...(19): siRNA sense strand
gguugagaggguuguugaa

SEQ ID NO: 2490556 - RNA, 19 nt, Homo sapiens
  misc_RNA (1)...(19): siRNA sense strand
ggauccugccagaggcuaa

SEQ ID NO: 2490557 - RNA, 19 nt, Homo sapiens
  misc_RNA (1)...(19): siRNA sense strand
acucagacugcucgggcaa

SEQ ID NO: 2490558 - RNA, 19 nt, Homo sapiens
  misc_RNA (1)...(19): siRNA sense strand
ggccaaagcaucagcacca

SEQ ID NO: 2490559 - RNA, 19 nt, Homo sapiens
  misc_RNA (1)...(19): siRNA sense strand
ccaaagagaaagaagagac

SEQ ID NO: 2490560 - RNA, 19 nt, Homo sapiens
  misc_RNA (1)...(19): siRNA sense strand
gccaagaggaggaagggua

SEQ ID NO: 2490561 - RNA, 19 nt, Homo sapiens
  misc_RNA (1)...(19): siRNA sense strand
uguucuagaaagugguaaa

SEQ ID NO: 2490562 - RNA, 19 nt, Homo sapiens
  misc_RNA (1)...(19): siRNA sense strand
gugaagacaucguaggugu

SEQ ID NO: 2490563 - RNA, 19 nt, Homo sapiens
  misc_RNA (1)...(19): siRNA sense strand
gggaaaaugaagauagcau

SEQ ID NO: 2490564 - RNA, 19 nt, Homo sapiens
  misc_RNA (1)...(19): siRNA sense strand
uggauaagguggaggaagg

SEQ ID NO: 2490565 - RNA, 19 nt, Homo sapiens
  misc_RNA (1)...(19): siRNA sense strand
gcauuggcuugguggagga

SEQ ID NO: 2490566 - RNA, 19 nt, Homo sapiens
  misc_RNA (1)...(19): siRNA sense strand
ucagcuuggaggaggaaga

SEQ ID NO: 2490567 - RNA, 19 nt, Homo sapiens
  misc_RNA (1)...(19): siRNA sense strand
ccacagagcccaaaaggca

SEQ ID NO: 2490568 - RNA, 19 nt, Homo sapiens
  misc_RNA (1)...(19): siRNA sense strand
gcaccagacauaaggcagu

SEQ ID NO: 2490569 - RNA, 19 nt, Homo sapiens
  misc_RNA (1)...(19): siRNA sense strand
gcuugguggaggagccuau

SEQ ID NO: 2490570 - RNA, 19 nt, Homo sapiens
  misc_RNA (1)...(19): siRNA sense strand
aggaggaggaggagaggaa

SEQ ID NO: 2490571 - RNA, 19 nt, Homo sapiens
  misc_RNA (1)...(19): siRNA sense strand
aggaagaggaggaggagga

SEQ ID NO: 2490572 - RNA, 19 nt, Homo sapiens
  misc_RNA (1)...(19): siRNA sense strand
aggaggaggaggaggaaga

SEQ ID NO: 2490573 - RNA, 19 nt, Homo sapiens
  misc_RNA (1)...(19): siRNA sense strand
aggaggaggaagaggagga

SEQ ID NO: 2490574 - RNA, 19 nt, Homo sapiens
  misc_RNA (1)...(19): siRNA sense strand
aggaggaagaggaggagga

SEQ ID NO: 2490575 - RNA, 19 nt, Homo sapiens
  misc_RNA (1)...(19): siRNA sense strand
aggaggaggaggaggagga

SEQ ID NO: 2490576 - RNA, 19 nt, Homo sapiens
  misc_RNA (1)...(19): siRNA sense strand
aagaggaggaggaggagga

SEQ ID NO: 2490577 - RNA, 19 nt, Homo sapiens
  misc_RNA (1)...(19): siRNA sense strand
aggaggaggaggaagagga

SEQ ID NO: 2490578 - RNA, 19 nt, Homo sapiens
  misc_RNA (1)...(19): siRNA sense strand
agauaguggccgaggugaa

SEQ ID NO: 2490579 - RNA, 19 nt, Homo sapiens
  misc_RNA (1)...(19): siRNA sense strand
ggaauuaucugcagccuca

SEQ ID NO: 2490580 - RNA, 19 nt, Homo sapiens
  misc_RNA (1)...(19): siRNA sense strand
ccgagguggaagaggaaca

SEQ ID NO: 2490581 - RNA, 19 nt, Homo sapiens
  misc_RNA (1)...(19): siRNA sense strand
gcuacgagcaggaggagga

SEQ ID NO: 2490582 - RNA, 19 nt, Homo sapiens
  misc_RNA (1)...(19): siRNA sense strand
aggcauuuagcguggcaua

SEQ ID NO: 2490583 - RNA, 19 nt, Homo sapiens
  misc_RNA (1)...(19): siRNA sense strand
aagacuugaucgauggaau

SEQ ID NO: 2490584 - RNA, 19 nt, Homo sapiens
  misc_RNA (1)...(19): siRNA sense strand
uagagaagcagaaaggaga

SEQ ID NO: 2490585 - RNA, 19 nt, Homo sapiens
  misc_RNA (1)...(19): siRNA sense strand
gggaauagcugagagagga

SEQ ID NO: 2490586 - RNA, 19 nt, Homo sapiens
  misc_RNA (1)...(19): siRNA sense strand
aaucagaagaccagaccuu

SEQ ID NO: 2490587 - RNA, 19 nt, Homo sapiens
  misc_RNA (1)...(19): siRNA sense strand
agagaagcagaaaggagaa

SEQ ID NO: 2490588 - RNA, 19 nt, Homo sapiens
  misc_RNA (1)...(19): siRNA sense strand
ccgacacacaggagacaau

SEQ ID NO: 2490589 - RNA, 19 nt, Homo sapiens
  misc_RNA (1)...(19): siRNA sense strand
uggaagaggaacagcagca

SEQ ID NO: 2490590 - RNA, 19 nt, Homo sapiens
  misc_RNA (1)...(19): siRNA sense strand
gggucaugcgccaggacau

SEQ ID NO: 2490591 - RNA, 19 nt, Homo sapiens
  misc_RNA (1)...(19): siRNA sense strand
ggcccagaaauuagccaaa

SEQ ID NO: 2490592 - RNA, 19 nt, Homo sapiens
  misc_RNA (1)...(19): siRNA sense strand
acgagcaggaggaggacau

SEQ ID NO: 2490593 - RNA, 19 nt, Homo sapiens
  misc_RNA (1)...(19): siRNA sense strand
aggccaucgaggaggugaa

SEQ ID NO: 2490594 - RNA, 19 nt, Homo sapiens
  misc_RNA (1)...(19): siRNA sense strand
gagaaaucugggaagcuga

SEQ ID NO: 2490595 - RNA, 19 nt, Homo sapiens
  misc_RNA (1)...(19): siRNA sense strand
ccgaggugaagcagagcau

SEQ ID NO: 2490596 - RNA, 19 nt, Homo sapiens
  misc_RNA (1)...(19): siRNA sense strand
agagaaucaaagugcugaa

SEQ ID NO: 2490597 - RNA, 19 nt, Homo sapiens
  misc_RNA (1)...(19): siRNA sense strand
cagaaggaauacagcgaca

SEQ ID NO: 2490598 - RNA, 19 nt, Homo sapiens
  misc_RNA (1)...(19): siRNA sense strand
acaacauuccagagacaaa

SEQ ID NO: 2490599 - RNA, 19 nt, Homo sapiens
  misc_RNA (1)...(19): siRNA sense strand
ggaauuaucugcagccuca

SEQ ID NO: 2490600 - RNA, 19 nt, Homo sapiens
  misc_RNA (1)...(19): siRNA sense strand
cugaggaggaggagggcau

SEQ ID NO: 2490601 - RNA, 19 nt, Homo sapiens
  misc_RNA (1)...(19): siRNA sense strand
agacaaagaagguggcauc

SEQ ID NO: 2490602 - RNA, 19 nt, Homo sapiens
  misc_RNA (1)...(19): siRNA sense strand
acagcuaccuagagggcau

SEQ ID NO: 2490603 - RNA, 19 nt, Homo sapiens
  misc_RNA (1)...(19): siRNA sense strand
uggagaagcacaagggcga

SEQ ID NO: 2490604 - RNA, 19 nt, Homo sapiens
  misc_RNA (1)...(19): siRNA sense strand
acuugagccagaaggaaua

SEQ ID NO: 2490605 - RNA, 19 nt, Homo sapiens
  misc_RNA (1)...(19): siRNA sense strand
ccacggugauccuggccaa

SEQ ID NO: 2490606 - RNA, 19 nt, Homo sapiens
  misc_RNA (1)...(19): siRNA sense strand
gugccagcaaagagggcua

SEQ ID NO: 2490607 - RNA, 19 nt, Homo sapiens
  misc_RNA (1)...(19): siRNA sense strand
ucaucaagggccugaagaa

SEQ ID NO: 2490608 - RNA, 19 nt, Homo sapiens
  misc_RNA (1)...(19): siRNA sense strand
gcaaagagggcuaccagga

SEQ ID NO: 2490609 - RNA, 19 nt, Homo sapiens
  misc_RNA (1)...(19): siRNA sense strand
gggucaagaggaugcaaaa

SEQ ID NO: 2490610 - RNA, 19 nt, Homo sapiens
  misc_RNA (1)...(19): siRNA sense strand
cagaggaacaggagugcca

SEQ ID NO: 2490611 - RNA, 19 nt, Homo sapiens
  misc_RNA (1)...(19): siRNA sense strand
cccgaagacuugagccaga

SEQ ID NO: 2490612 - RNA, 19 nt, Homo sapiens
  misc_RNA (1)...(19): siRNA sense strand
cugaaggcagccaggacua

SEQ ID NO: 2490613 - RNA, 19 nt, Homo sapiens
  misc_RNA (1)...(19): siRNA sense strand
aggaaggcaagaagcagua

SEQ ID NO: 2490614 - RNA, 19 nt, Homo sapiens
  misc_RNA (1)...(19): siRNA sense strand
gcuacugcccugaggacga

SEQ ID NO: 2490615 - RNA, 19 nt, Homo sapiens
  misc_RNA (1)...(19): siRNA sense strand
guggaggaguggacggacu

SEQ ID NO: 2490616 - RNA, 19 nt, Homo sapiens
  misc_RNA (1)...(19): siRNA sense strand
aggaccaggaggaggacau

SEQ ID NO: 2490617 - RNA, 19 nt, Homo sapiens
  misc_RNA (1)...(19): siRNA sense strand
cgggucaagaggaugcaaa

SEQ ID NO: 2490618 - RNA, 19 nt, Homo sapiens
  misc_RNA (1)...(19): siRNA sense strand
gcugcuaagaucaagaaaa

SEQ ID NO: 2490619 - RNA, 19 nt, Homo sapiens
  misc_RNA (1)...(19): siRNA sense strand
ccacgagaagauaguccaa

SEQ ID NO: 2490620 - RNA, 19 nt, Homo sapiens
  misc_RNA (1)...(19): siRNA sense strand
uggaggaccaggaggagga

SEQ ID NO: 2490621 - RNA, 19 nt, Homo sapiens
  misc_RNA (1)...(19): siRNA sense strand
aggaauacagcgacaucau

SEQ ID NO: 2490622 - RNA, 19 nt, Homo sapiens
  misc_RNA (1)...(19): siRNA sense strand
agaaccagacacaggugaa

SEQ ID NO: 2490623 - RNA, 19 nt, Homo sapiens
  misc_RNA (1)...(19): siRNA sense strand
ucaaguaccagcugggcuu

SEQ ID NO: 2490624 - RNA, 19 nt, Homo sapiens
  misc_RNA (1)...(19): siRNA sense strand
ccauacuagugguucgcua

SEQ ID NO: 2490625 - RNA, 19 nt, Homo sapiens
  misc_RNA (1)...(19): siRNA sense strand
ucuaagaaagagugggaaa

SEQ ID NO: 2490626 - RNA, 19 nt, Homo sapiens
  misc_RNA (1)...(19): siRNA sense strand
ccacagaccuccaggggaa

SEQ ID NO: 2490627 - RNA, 19 nt, Homo sapiens
  misc_RNA (1)...(19): siRNA sense strand
agaugaaauccuuggagaa

SEQ ID NO: 2490628 - RNA, 19 nt, Homo sapiens
  misc_RNA (1)...(19): siRNA sense strand
agagaaaguaugaggccau

SEQ ID NO: 2490629 - RNA, 19 nt, Homo sapiens
  misc_RNA (1)...(19): siRNA sense strand
guguauaugaagagaaagu

SEQ ID NO: 2490630 - RNA, 19 nt, Homo sapiens
  misc_RNA (1)...(19): siRNA sense strand
gcucacagaacgaugggaa

SEQ ID NO: 2490631 - RNA, 19 nt, Homo sapiens
  misc_RNA (1)...(19): siRNA sense strand
ugauaaugaccguaaccaa

SEQ ID NO: 2490632 - RNA, 19 nt, Homo sapiens
  misc_RNA (1)...(19): siRNA sense strand
ggaaaugauucgaagggag

SEQ ID NO: 2490633 - RNA, 19 nt, Homo sapiens
  misc_RNA (1)...(19): siRNA sense strand
gagagaaagcagcugguga

SEQ ID NO: 2490634 - RNA, 19 nt, Homo sapiens
  misc_RNA (1)...(19): siRNA sense strand
cucaaauaccagagaagau

SEQ ID NO: 2490635 - RNA, 19 nt, Homo sapiens
  misc_RNA (1)...(19): siRNA sense strand
gaaaugauucgaagggagu

SEQ ID NO: 2490636 - RNA, 19 nt, Homo sapiens
  misc_RNA (1)...(19): siRNA sense strand
ugaccguaaccaagggaau

SEQ ID NO: 2490637 - RNA, 19 nt, Homo sapiens
  misc_RNA (1)...(19): siRNA sense strand
aagaugaaauccuuggaga

SEQ ID NO: 2490638 - RNA, 19 nt, Homo sapiens
  misc_RNA (1)...(19): siRNA sense strand
cuaagaaagagugggaaaa

SEQ ID NO: 2490639 - RNA, 19 nt, Homo sapiens
  misc_RNA (1)...(19): siRNA sense strand
ccaagaagccagcagagga

SEQ ID NO: 2490640 - RNA, 19 nt, Homo sapiens
  misc_RNA (1)...(19): siRNA sense strand
cucacagaacgaugggaaa

SEQ ID NO: 2490641 - RNA, 19 nt, Homo sapiens
  misc_RNA (1)...(19): siRNA sense strand
agccagcagaggaaggaaa

SEQ ID NO: 2490642 - RNA, 19 nt, Homo sapiens
  misc_RNA (1)...(19): siRNA sense strand
uuugcaggcuccagagaau

SEQ ID NO: 2490643 - RNA, 19 nt, Homo sapiens
  misc_RNA (1)...(19): siRNA sense strand
gcaaggagaccuagggcug

SEQ ID NO: 2490644 - RNA, 19 nt, Homo sapiens
  misc_RNA (1)...(19): siRNA sense strand
aaacuaggcuucaaggcca

SEQ ID NO: 2490645 - RNA, 19 nt, Homo sapiens
  misc_RNA (1)...(19): siRNA sense strand
accuagggcuggugcucaa

SEQ ID NO: 2490646 - RNA, 19 nt, Homo sapiens
  misc_RNA (1)...(19): siRNA sense strand
aaacaugccuggacccaca

SEQ ID NO: 2490647 - RNA, 19 nt, Homo sapiens
  misc_RNA (1)...(19): siRNA sense strand
aaguaugaggccaugacua

SEQ ID NO: 2490648 - RNA, 19 nt, Homo sapiens
  misc_RNA (1)...(19): siRNA sense strand
ggaaggaaaugauucgaag

SEQ ID NO: 2490649 - RNA, 19 nt, Homo sapiens
  misc_RNA (1)...(19): siRNA sense strand
uggagaucaucgaggcaau

SEQ ID NO: 2490650 - RNA, 19 nt, Homo sapiens
  misc_RNA (1)...(19): siRNA sense strand
uuacauuggaggaguucaa

SEQ ID NO: 2490651 - RNA, 19 nt, Homo sapiens
  misc_RNA (1)...(19): siRNA sense strand
gcggcagcuucgagcagaa

SEQ ID NO: 2490652 - RNA, 19 nt, Homo sapiens
  misc_RNA (1)...(19): siRNA sense strand
ucaagaagauggaccagga

SEQ ID NO: 2490653 - RNA, 19 nt, Homo sapiens
  misc_RNA (1)...(19): siRNA sense strand
aggauaaggacgaccagau

SEQ ID NO: 2490654 - RNA, 19 nt, Homo sapiens
  misc_RNA (1)...(19): siRNA sense strand
gagcaggagcugaagcagu

SEQ ID NO: 2490655 - RNA, 19 nt, Homo sapiens
  misc_RNA (1)...(19): siRNA sense strand
ccuccaaguucgcgcagca

SEQ ID NO: 2490656 - RNA, 19 nt, Homo sapiens
  misc_RNA (1)...(19): siRNA sense strand
ucuacaagauggugggcac

SEQ ID NO: 2490657 - RNA, 19 nt, Homo sapiens
  misc_RNA (1)...(19): siRNA sense strand
cuacaggaggaacgugaaa

SEQ ID NO: 2490658 - RNA, 19 nt, Homo sapiens
  misc_RNA (1)...(19): siRNA sense strand
ccauacuagugguucgcua

SEQ ID NO: 2490659 - RNA, 19 nt, Homo sapiens
  misc_RNA (1)...(19): siRNA sense strand
ccgaccaaauggaggagga

SEQ ID NO: 2490660 - RNA, 19 nt, Homo sapiens
  misc_RNA (1)...(19): siRNA sense strand
gugaauccaacgaggccaa

SEQ ID NO: 2490661 - RNA, 19 nt, Homo sapiens
  misc_RNA (1)...(19): siRNA sense strand
accaaauggaggaggagga

SEQ ID NO: 2490662 - RNA, 19 nt, Homo sapiens
  misc_RNA (1)...(19): siRNA sense strand
gaggaggaauucauggaaa

SEQ ID NO: 2490663 - RNA, 19 nt, Homo sapiens
  misc_RNA (1)...(19): siRNA sense strand
aggaggaauucauggaaau

SEQ ID NO: 2490664 - RNA, 19 nt, Homo sapiens
  misc_RNA (1)...(19): siRNA sense strand
ggaggaauucauggaaaua

SEQ ID NO: 2490665 - RNA, 19 nt, Homo sapiens
  misc_RNA (1)...(19): siRNA sense strand
ccauacuagugguucgcua

SEQ ID NO: 2490666 - RNA, 19 nt, Homo sapiens
  misc_RNA (1)...(19): siRNA sense strand
ucauggaaauaaugguuga

SEQ ID NO: 2490667 - RNA, 19 nt, Homo sapiens
  misc_RNA (1)...(19): siRNA sense strand
ccaacgaggccaacgagau

SEQ ID NO: 2490668 - RNA, 19 nt, Homo sapiens
  misc_RNA (1)...(19): siRNA sense strand
gaggaauucauggaaauaa

SEQ ID NO: 2490669 - RNA, 19 nt, Homo sapiens
  misc_RNA (1)...(19): siRNA sense strand
cgcuacaggaggaacuuua

SEQ ID NO: 2490670 - RNA, 19 nt, Homo sapiens
  misc_RNA (1)...(19): siRNA sense strand
ccaauaaagacgaucccuu

SEQ ID NO: 2490671 - RNA, 19 nt, Homo sapiens
  misc_RNA (1)...(19): siRNA sense strand
cugaguggcaaaugcaaau

SEQ ID NO: 2490672 - RNA, 19 nt, Homo sapiens
  misc_RNA (1)...(19): siRNA sense strand
gugaagacaaggacagaaa

SEQ ID NO: 2490673 - RNA, 19 nt, Homo sapiens
  misc_RNA (1)...(19): siRNA sense strand
uuauaugaguccagagaau

SEQ ID NO: 2490674 - RNA, 19 nt, Homo sapiens
  misc_RNA (1)...(19): siRNA sense strand
ccaacaaacauuuagacaa

SEQ ID NO: 2490675 - RNA, 19 nt, Homo sapiens
  misc_RNA (1)...(19): siRNA sense strand
ggccaaaacacuaagaaaa

SEQ ID NO: 2490676 - RNA, 19 nt, Homo sapiens
  misc_RNA (1)...(19): siRNA sense strand
ugaccaagcaagacugaaa

SEQ ID NO: 2490677 - RNA, 19 nt, Homo sapiens
  misc_RNA (1)...(19): siRNA sense strand
augauaagguguacgagaa

SEQ ID NO: 2490678 - RNA, 19 nt, Homo sapiens
  misc_RNA (1)...(19): siRNA sense strand
agaagauaguggacaguca

SEQ ID NO: 2490679 - RNA, 19 nt, Homo sapiens
  misc_RNA (1)...(19): siRNA sense strand
caacaggugaagagcgauu

SEQ ID NO: 2490680 - RNA, 19 nt, Homo sapiens
  misc_RNA (1)...(19): siRNA sense strand
gcgucuaauccgacagcaa

SEQ ID NO: 2490681 - RNA, 19 nt, Homo sapiens
  misc_RNA (1)...(19): siRNA sense strand
aggaaauggaagaagauca

SEQ ID NO: 2490682 - RNA, 19 nt, Homo sapiens
  misc_RNA (1)...(19): siRNA sense strand
ggucgaaugauaaggugua

SEQ ID NO: 2490683 - RNA, 19 nt, Homo sapiens
  misc_RNA (1)...(19): siRNA sense strand
ggacagaaaaggaaugcua

SEQ ID NO: 2490684 - RNA, 19 nt, Homo sapiens
  misc_RNA (1)...(19): siRNA sense strand
aagaauagaacuuggacga

SEQ ID NO: 2490685 - RNA, 19 nt, Homo sapiens
  misc_RNA (1)...(19): siRNA sense strand
uggacgauguauuggagaa

SEQ ID NO: 2490686 - RNA, 19 nt, Homo sapiens
  misc_RNA (1)...(19): siRNA sense strand
aagagaaggcucagcaaga

SEQ ID NO: 2490687 - RNA, 19 nt, Homo sapiens
  misc_RNA (1)...(19): siRNA sense strand
ccuuaauagagaagaaagu

SEQ ID NO: 2490688 - RNA, 19 nt, Homo sapiens
  misc_RNA (1)...(19): siRNA sense strand
aaggaaugcuacaacuaaa

SEQ ID NO: 2490689 - RNA, 19 nt, Homo sapiens
  misc_RNA (1)...(19): siRNA sense strand
aagaagagcgcaugaggau

SEQ ID NO: 2490690 - RNA, 19 nt, Homo sapiens
  misc_RNA (1)...(19): siRNA sense strand
cggcgaucauacugggaga

SEQ ID NO: 2490691 - RNA, 19 nt, Homo sapiens
  misc_RNA (1)...(19): siRNA sense strand
ggagaauauggcugaccua

SEQ ID NO: 2490692 - RNA, 19 nt, Homo sapiens
  misc_RNA (1)...(19): siRNA sense strand
guggacagucacaaaguaa

SEQ ID NO: 2490693 - RNA, 19 nt, Homo sapiens
  misc_RNA (1)...(19): siRNA sense strand
cuggauuauuucaguggaa

SEQ ID NO: 2490694 - RNA, 19 nt, Homo sapiens
  misc_RNA (1)...(19): siRNA sense strand
ggcaaucggcccagaagaa

SEQ ID NO: 2490695 - RNA, 19 nt, Homo sapiens
  misc_RNA (1)...(19): siRNA sense strand
agaugauuaugcugagauu

SEQ ID NO: 2490696 - RNA, 19 nt, Homo sapiens
  misc_RNA (1)...(19): siRNA sense strand
ugaaagcaauagugagcca

SEQ ID NO: 2490697 - RNA, 19 nt, Homo sapiens
  misc_RNA (1)...(19): siRNA sense strand
aggaaauugcuuugaaguu

SEQ ID NO: 2490698 - RNA, 19 nt, Homo sapiens
  misc_RNA (1)...(19): siRNA sense strand
ugagauucaaagagaaaga

SEQ ID NO: 2490699 - RNA, 19 nt, Homo sapiens
  misc_RNA (1)...(19): siRNA sense strand
gaucaaguggaccaggaaa

SEQ ID NO: 2490700 - RNA, 19 nt, Homo sapiens
  misc_RNA (1)...(19): siRNA sense strand
ugaaaauggggaaagauua

SEQ ID NO: 2490701 - RNA, 19 nt, Homo sapiens
  misc_RNA (1)...(19): siRNA sense strand
ugauaagguguacgagaau

SEQ ID NO: 2490702 - RNA, 19 nt, Homo sapiens
  misc_RNA (1)...(19): siRNA sense strand
gaaagaaggugaacgggcu

SEQ ID NO: 2490703 - RNA, 19 nt, Homo sapiens
  misc_RNA (1)...(19): siRNA sense strand
aaauaauggcagcugcuua

SEQ ID NO: 2490704 - RNA, 19 nt, Homo sapiens
  misc_RNA (1)...(19): siRNA sense strand
gugaagaacaaugauguaa

SEQ ID NO: 2490705 - RNA, 19 nt, Homo sapiens
  misc_RNA (1)...(19): siRNA sense strand
ggaagagaaggcucagcaa

SEQ ID NO: 2490706 - RNA, 19 nt, Homo sapiens
  misc_RNA (1)...(19): siRNA sense strand
uaaccauugcggagaauau

SEQ ID NO: 2490707 - RNA, 19 nt, Homo sapiens
  misc_RNA (1)...(19): siRNA sense strand
ugauguaaucggucgaauu

SEQ ID NO: 2490708 - RNA, 19 nt, Homo sapiens
  misc_RNA (1)...(19): siRNA sense strand
ucggacagcgugagagaga

SEQ ID NO: 2490709 - RNA, 19 nt, Homo sapiens
  misc_RNA (1)...(19): siRNA sense strand
ccugcgagggauugggcaa

SEQ ID NO: 2490710 - RNA, 19 nt, Homo sapiens
  misc_RNA (1)...(19): siRNA sense strand
gaguaugucccuaugguga

SEQ ID NO: 2490711 - RNA, 19 nt, Homo sapiens
  misc_RNA (1)...(19): siRNA sense strand
uguuagagauagcugauca

SEQ ID NO: 2490712 - RNA, 19 nt, Homo sapiens
  misc_RNA (1)...(19): siRNA sense strand
ucaucagaccucagaaaga

SEQ ID NO: 2490713 - RNA, 19 nt, Homo sapiens
  misc_RNA (1)...(19): siRNA sense strand
agaauaugacagauaccua

SEQ ID NO: 2490714 - RNA, 19 nt, Homo sapiens
  misc_RNA (1)...(19): siRNA sense strand
gguguguguaugugggaga

SEQ ID NO: 2490715 - RNA, 19 nt, Homo sapiens
  misc_RNA (1)...(19): siRNA sense strand
agugaagaacaaugaugua

SEQ ID NO: 2490716 - RNA, 19 nt, Homo sapiens
  misc_RNA (1)...(19): siRNA sense strand
ccagugugagggagaagua

SEQ ID NO: 2490717 - RNA, 19 nt, Homo sapiens
  misc_RNA (1)...(19): siRNA sense strand
gggcaaugcacuagaaaag

SEQ ID NO: 2490718 - RNA, 19 nt, Homo sapiens
  misc_RNA (1)...(19): siRNA sense strand
agaaggaaucaguuaccua

SEQ ID NO: 2490719 - RNA, 19 nt, Homo sapiens
  misc_RNA (1)...(19): siRNA sense strand
ccaaauucgaguacuaaga

SEQ ID NO: 2490720 - RNA, 19 nt, Homo sapiens
  misc_RNA (1)...(19): siRNA sense strand
ccucaaaugauuguguaaa

SEQ ID NO: 2490721 - RNA, 19 nt, Homo sapiens
  misc_RNA (1)...(19): siRNA sense strand
guuagagauagcugaucaa

SEQ ID NO: 2490722 - RNA, 19 nt, Homo sapiens
  misc_RNA (1)...(19): siRNA sense strand
agauguugguuuaaagcga

SEQ ID NO: 2490723 - RNA, 19 nt, Homo sapiens
  misc_RNA (1)...(19): siRNA sense strand
agaauauggcugaccuaau

SEQ ID NO: 2490724 - RNA, 19 nt, Homo sapiens
  misc_RNA (1)...(19): siRNA sense strand
ggugcaauggagcgaguau

SEQ ID NO: 2490725 - RNA, 19 nt, Homo sapiens
  misc_RNA (1)...(19): siRNA sense strand
aggccaaaacacuaagaaa

SEQ ID NO: 2490726 - RNA, 19 nt, Homo sapiens
  misc_RNA (1)...(19): siRNA sense strand
gucagaaacagaugauuau

SEQ ID NO: 2490727 - RNA, 19 nt, Homo sapiens
  misc_RNA (1)...(19): siRNA sense strand
cugagauuauagaugaaga

SEQ ID NO: 2490728 - RNA, 19 nt, Homo sapiens
  misc_RNA (1)...(19): siRNA sense strand
cuguaugccuaucagcuua

SEQ ID NO: 2490729 - RNA, 19 nt, Homo sapiens
  misc_RNA (1)...(19): siRNA sense strand
uaucaucagaccucagaaa

SEQ ID NO: 2490730 - RNA, 19 nt, Homo sapiens
  misc_RNA (1)...(19): siRNA sense strand
gugaagacaaggacagaaa

SEQ ID NO: 2490731 - RNA, 19 nt, Homo sapiens
  misc_RNA (1)...(19): siRNA sense strand
uuauaugaguccagagaau

SEQ ID NO: 2490732 - RNA, 19 nt, Homo sapiens
  misc_RNA (1)...(19): siRNA sense strand
ccaacaaacauuuagacaa

SEQ ID NO: 2490733 - RNA, 19 nt, Homo sapiens
  misc_RNA (1)...(19): siRNA sense strand
ggccaaaacacuaagaaaa

SEQ ID NO: 2490734 - RNA, 19 nt, Homo sapiens
  misc_RNA (1)...(19): siRNA sense strand
ugaccaagcaagacugaaa

SEQ ID NO: 2490735 - RNA, 19 nt, Homo sapiens
  misc_RNA (1)...(19): siRNA sense strand
augauaagguguacgagaa

SEQ ID NO: 2490736 - RNA, 19 nt, Homo sapiens
  misc_RNA (1)...(19): siRNA sense strand
agaagauaguggacaguca

SEQ ID NO: 2490737 - RNA, 19 nt, Homo sapiens
  misc_RNA (1)...(19): siRNA sense strand
caacaggugaagagcgauu

SEQ ID NO: 2490738 - RNA, 19 nt, Homo sapiens
  misc_RNA (1)...(19): siRNA sense strand
gcgucuaauccgacagcaa

SEQ ID NO: 2490739 - RNA, 19 nt, Homo sapiens
  misc_RNA (1)...(19): siRNA sense strand
aggaaauggaagaagauca

SEQ ID NO: 2490740 - RNA, 19 nt, Homo sapiens
  misc_RNA (1)...(19): siRNA sense strand
ggucgaaugauaaggugua

SEQ ID NO: 2490741 - RNA, 19 nt, Homo sapiens
  misc_RNA (1)...(19): siRNA sense strand
ggacagaaaaggaaugcua

SEQ ID NO: 2490742 - RNA, 19 nt, Homo sapiens
  misc_RNA (1)...(19): siRNA sense strand
aagaauagaacuuggacga

SEQ ID NO: 2490743 - RNA, 19 nt, Homo sapiens
  misc_RNA (1)...(19): siRNA sense strand
uggacgauguauuggagaa

SEQ ID NO: 2490744 - RNA, 19 nt, Homo sapiens
  misc_RNA (1)...(19): siRNA sense strand
aagagaaggcucagcaaga

SEQ ID NO: 2490745 - RNA, 19 nt, Homo sapiens
  misc_RNA (1)...(19): siRNA sense strand
ccuuaauagagaagaaagu

SEQ ID NO: 2490746 - RNA, 19 nt, Homo sapiens
  misc_RNA (1)...(19): siRNA sense strand
aaggaaugcuacaacuaaa

SEQ ID NO: 2490747 - RNA, 19 nt, Homo sapiens
  misc_RNA (1)...(19): siRNA sense strand
aagaagagcgcaugaggau

SEQ ID NO: 2490748 - RNA, 19 nt, Homo sapiens
  misc_RNA (1)...(19): siRNA sense strand
cggcgaucauacugggaga

SEQ ID NO: 2490749 - RNA, 19 nt, Homo sapiens
  misc_RNA (1)...(19): siRNA sense strand
ggagaauauggcugaccua

SEQ ID NO: 2490750 - RNA, 19 nt, Homo sapiens
  misc_RNA (1)...(19): siRNA sense strand
guggacagucacaaaguaa

SEQ ID NO: 2490751 - RNA, 19 nt, Homo sapiens
  misc_RNA (1)...(19): siRNA sense strand
cuggauuauuucaguggaa

SEQ ID NO: 2490752 - RNA, 19 nt, Homo sapiens
  misc_RNA (1)...(19): siRNA sense strand
ggcaaucggcccagaagaa

SEQ ID NO: 2490753 - RNA, 19 nt, Homo sapiens
  misc_RNA (1)...(19): siRNA sense strand
agaugauuaugcugagauu

SEQ ID NO: 2490754 - RNA, 19 nt, Homo sapiens
  misc_RNA (1)...(19): siRNA sense strand
ugaaagcaauagugagcca

SEQ ID NO: 2490755 - RNA, 19 nt, Homo sapiens
  misc_RNA (1)...(19): siRNA sense strand
aggaaauugcuuugaaguu

SEQ ID NO: 2490756 - RNA, 19 nt, Homo sapiens
  misc_RNA (1)...(19): siRNA sense strand
ugagauucaaagagaaaga

SEQ ID NO: 2490757 - RNA, 19 nt, Homo sapiens
  misc_RNA (1)...(19): siRNA sense strand
gaucaaguggaccaggaaa

SEQ ID NO: 2490758 - RNA, 19 nt, Homo sapiens
  misc_RNA (1)...(19): siRNA sense strand
ugaaaauggggaaagauua

SEQ ID NO: 2490759 - RNA, 19 nt, Homo sapiens
  misc_RNA (1)...(19): siRNA sense strand
ugauaagguguacgagaau

SEQ ID NO: 2490760 - RNA, 19 nt, Homo sapiens
  misc_RNA (1)...(19): siRNA sense strand
gaaagaaggugaacgggcu

SEQ ID NO: 2490761 - RNA, 19 nt, Homo sapiens
  misc_RNA (1)...(19): siRNA sense strand
gugaagaacaaugauguaa

SEQ ID NO: 2490762 - RNA, 19 nt, Homo sapiens
  misc_RNA (1)...(19): siRNA sense strand
ggaagagaaggcucagcaa

SEQ ID NO: 2490763 - RNA, 19 nt, Homo sapiens
  misc_RNA (1)...(19): siRNA sense strand
uaaccauugcggagaauau

SEQ ID NO: 2490764 - RNA, 19 nt, Homo sapiens
  misc_RNA (1)...(19): siRNA sense strand
ugauguaaucggucgaauu

SEQ ID NO: 2490765 - RNA, 19 nt, Homo sapiens
  misc_RNA (1)...(19): siRNA sense strand
ucggacagcgugagagaga

SEQ ID NO: 2490766 - RNA, 19 nt, Homo sapiens
  misc_RNA (1)...(19): siRNA sense strand
ccugcgagggauugggcaa

SEQ ID NO: 2490767 - RNA, 19 nt, Homo sapiens
  misc_RNA (1)...(19): siRNA sense strand
gaguaugucccuaugguga

SEQ ID NO: 2490768 - RNA, 19 nt, Homo sapiens
  misc_RNA (1)...(19): siRNA sense strand
uguuagagauagcugauca

SEQ ID NO: 2490769 - RNA, 19 nt, Homo sapiens
  misc_RNA (1)...(19): siRNA sense strand
ucaucagaccucagaaaga

SEQ ID NO: 2490770 - RNA, 19 nt, Homo sapiens
  misc_RNA (1)...(19): siRNA sense strand
gguguguguaugugggaga

SEQ ID NO: 2490771 - RNA, 19 nt, Homo sapiens
  misc_RNA (1)...(19): siRNA sense strand
agugaagaacaaugaugua

SEQ ID NO: 2490772 - RNA, 19 nt, Homo sapiens
  misc_RNA (1)...(19): siRNA sense strand
ccagugugagggagaagua

SEQ ID NO: 2490773 - RNA, 19 nt, Homo sapiens
  misc_RNA (1)...(19): siRNA sense strand
gggcaaugcacuagaaaag

SEQ ID NO: 2490774 - RNA, 19 nt, Homo sapiens
  misc_RNA (1)...(19): siRNA sense strand
agaaggaaucaguuaccua

SEQ ID NO: 2490775 - RNA, 19 nt, Homo sapiens
  misc_RNA (1)...(19): siRNA sense strand
ccucaaaugauuguguaaa

SEQ ID NO: 2490776 - RNA, 19 nt, Homo sapiens
  misc_RNA (1)...(19): siRNA sense strand
ccaaauucgaguacuaaga

SEQ ID NO: 2490777 - RNA, 19 nt, Homo sapiens
  misc_RNA (1)...(19): siRNA sense strand
guuagagauagcugaucaa

SEQ ID NO: 2490778 - RNA, 19 nt, Homo sapiens
  misc_RNA (1)...(19): siRNA sense strand
agauguugguuuaaagcga

SEQ ID NO: 2490779 - RNA, 19 nt, Homo sapiens
  misc_RNA (1)...(19): siRNA sense strand
agaauauggcugaccuaau

SEQ ID NO: 2490780 - RNA, 19 nt, Homo sapiens
  misc_RNA (1)...(19): siRNA sense strand
aggccaaaacacuaagaaa

SEQ ID NO: 2490781 - RNA, 19 nt, Homo sapiens
  misc_RNA (1)...(19): siRNA sense strand
ggugcaauggagcgaguau

SEQ ID NO: 2490782 - RNA, 19 nt, Homo sapiens
  misc_RNA (1)...(19): siRNA sense strand
gucagaaacagaugauuau

SEQ ID NO: 2490783 - RNA, 19 nt, Homo sapiens
  misc_RNA (1)...(19): siRNA sense strand
cugagauuauagaugaaga

SEQ ID NO: 2490784 - RNA, 19 nt, Homo sapiens
  misc_RNA (1)...(19): siRNA sense strand
cuguaugccuaucagcuua

SEQ ID NO: 2490785 - RNA, 19 nt, Homo sapiens
  misc_RNA (1)...(19): siRNA sense strand
uaucaucagaccucagaaa

SEQ ID NO: 2490786 - RNA, 19 nt, Homo sapiens
  misc_RNA (1)...(19): siRNA sense strand
ggauuaugagauucaaaga

SEQ ID NO: 2490787 - RNA, 19 nt, Homo sapiens
  misc_RNA (1)...(19): siRNA sense strand
ggauguuugguguguguau

SEQ ID NO: 2490788 - RNA, 19 nt, Homo sapiens
  misc_RNA (1)...(19): siRNA sense strand
ucuaaggaagagugggaaa

SEQ ID NO: 2490789 - RNA, 19 nt, Homo sapiens
  misc_RNA (1)...(19): siRNA sense strand
gcaaagagacccagggaug

SEQ ID NO: 2490790 - RNA, 19 nt, Homo sapiens
  misc_RNA (1)...(19): siRNA sense strand
agagaaaguaugaggccau

SEQ ID NO: 2490791 - RNA, 19 nt, Homo sapiens
  misc_RNA (1)...(19): siRNA sense strand
gagagaaagcagcugguga

SEQ ID NO: 2490792 - RNA, 19 nt, Homo sapiens
  misc_RNA (1)...(19): siRNA sense strand
gcaucagagaagagaagca

SEQ ID NO: 2490793 - RNA, 19 nt, Homo sapiens
  misc_RNA (1)...(19): siRNA sense strand
ccacagaacgaugggaaaa

SEQ ID NO: 2490794 - RNA, 19 nt, Homo sapiens
  misc_RNA (1)...(19): siRNA sense strand
uuggcaggcuccagagaau

SEQ ID NO: 2490795 - RNA, 19 nt, Homo sapiens
  misc_RNA (1)...(19): siRNA sense strand
ggaaggaagugauucgaag

SEQ ID NO: 2490796 - RNA, 19 nt, Homo sapiens
  misc_RNA (1)...(19): siRNA sense strand
ccgaagaucaugcccgaga

SEQ ID NO: 2490797 - RNA, 19 nt, Homo sapiens
  misc_RNA (1)...(19): siRNA sense strand
agaagauucacgagagauc

SEQ ID NO: 2490798 - RNA, 19 nt, Homo sapiens
  misc_RNA (1)...(19): siRNA sense strand
gagaagagaagcaaggccu

SEQ ID NO: 2490799 - RNA, 19 nt, Homo sapiens
  misc_RNA (1)...(19): siRNA sense strand
ccgagaagccagcagagga

SEQ ID NO: 2490800 - RNA, 19 nt, Homo sapiens
  misc_RNA (1)...(19): siRNA sense strand
gggaaaagcaaguagcucu

SEQ ID NO: 2490801 - RNA, 19 nt, Homo sapiens
  misc_RNA (1)...(19): siRNA sense strand
aaacaugccuggacccaca

SEQ ID NO: 2490802 - RNA, 19 nt, Homo sapiens
  misc_RNA (1)...(19): siRNA sense strand
aaguaugaggccaugacua

SEQ ID NO: 2490803 - RNA, 19 nt, Homo sapiens
  misc_RNA (1)...(19): siRNA sense strand
ggaaugagguugaacgucc

SEQ ID NO: 2490804 - RNA, 19 nt, Homo sapiens
  misc_RNA (1)...(19): siRNA sense strand
gaggaggaauucauggaaa

SEQ ID NO: 2490805 - RNA, 19 nt, Homo sapiens
  misc_RNA (1)...(19): siRNA sense strand
aggaggaauucauggaaau

SEQ ID NO: 2490806 - RNA, 19 nt, Homo sapiens
  misc_RNA (1)...(19): siRNA sense strand
ggaggaauucauggaaaua

SEQ ID NO: 2490807 - RNA, 19 nt, Homo sapiens
  misc_RNA (1)...(19): siRNA sense strand
cuacaggaggaacgugaaa

SEQ ID NO: 2490808 - RNA, 19 nt, Homo sapiens
  misc_RNA (1)...(19): siRNA sense strand
ccauacuagugguucgcua

SEQ ID NO: 2490809 - RNA, 19 nt, Homo sapiens
  misc_RNA (1)...(19): siRNA sense strand
ucauggaaauaaugguuga

SEQ ID NO: 2490810 - RNA, 19 nt, Homo sapiens
  misc_RNA (1)...(19): siRNA sense strand
ccaacgaggccaacgagau

SEQ ID NO: 2490811 - RNA, 19 nt, Homo sapiens
  misc_RNA (1)...(19): siRNA sense strand
gaggaauucauggaaauaa

SEQ ID NO: 2490812 - RNA, 19 nt, Homo sapiens
  misc_RNA (1)...(19): siRNA sense strand
agaucgaccuggaggagga

SEQ ID NO: 2490813 - RNA, 19 nt, Homo sapiens
  misc_RNA (1)...(19): siRNA sense strand
augcaugacuucaggagga

SEQ ID NO: 2490814 - RNA, 19 nt, Homo sapiens
  misc_RNA (1)...(19): siRNA sense strand
ggacugugaaggaggucau

SEQ ID NO: 2490815 - RNA, 19 nt, Homo sapiens
  misc_RNA (1)...(19): siRNA sense strand
ggucaaagugugugagucc

SEQ ID NO: 2490816 - RNA, 19 nt, Homo sapiens
  misc_RNA (1)...(19): siRNA sense strand
uggaauucggggagaagaa

SEQ ID NO: 2490817 - RNA, 19 nt, Homo sapiens
  misc_RNA (1)...(19): siRNA sense strand
agaucgaccuggaggagga

SEQ ID NO: 2490818 - RNA, 19 nt, Homo sapiens
  misc_RNA (1)...(19): siRNA sense strand
augcaugacuucaggagga

SEQ ID NO: 2490819 - RNA, 19 nt, Homo sapiens
  misc_RNA (1)...(19): siRNA sense strand
ggacugugaaggaggucau

SEQ ID NO: 2490820 - RNA, 19 nt, Homo sapiens
  misc_RNA (1)...(19): siRNA sense strand
ggucaaagugugugagucc

SEQ ID NO: 2490821 - RNA, 19 nt, Homo sapiens
  misc_RNA (1)...(19): siRNA sense strand
agaucgaccuggaggagga

SEQ ID NO: 2490822 - RNA, 19 nt, Homo sapiens
  misc_RNA (1)...(19): siRNA sense strand
augcaugacuucaggagga

SEQ ID NO: 2490823 - RNA, 19 nt, Homo sapiens
  misc_RNA (1)...(19): siRNA sense strand
ggacugugaaggaggucau

SEQ ID NO: 2490824 - RNA, 19 nt, Homo sapiens
  misc_RNA (1)...(19): siRNA sense strand
ggucaaagugugugagucc

SEQ ID NO: 2490825 - RNA, 19 nt, Homo sapiens
  misc_RNA (1)...(19): siRNA sense strand
gcuccaagauuauggcuga

SEQ ID NO: 2490826 - RNA, 19 nt, Homo sapiens
  misc_RNA (1)...(19): siRNA sense strand
aggaaagggccaaugugaa

SEQ ID NO: 2490827 - RNA, 19 nt, Homo sapiens
  misc_RNA (1)...(19): siRNA sense strand
uagacaaaccagucggaau

SEQ ID NO: 2490828 - RNA, 19 nt, Homo sapiens
  misc_RNA (1)...(19): siRNA sense strand
gggaaagacauguaccuga

SEQ ID NO: 2490829 - RNA, 19 nt, Homo sapiens
  misc_RNA (1)...(19): siRNA sense strand
ggauuuggggagaggggaa

SEQ ID NO: 2490830 - RNA, 19 nt, Homo sapiens
  misc_RNA (1)...(19): siRNA sense strand
agauuauggcugaacggaa

SEQ ID NO: 2490831 - RNA, 19 nt, Homo sapiens
  misc_RNA (1)...(19): siRNA sense strand
gauuauggcugaacggaag

SEQ ID NO: 2490832 - RNA, 19 nt, Homo sapiens
  misc_RNA (1)...(19): siRNA sense strand
gugaaaagaaugaagagga

SEQ ID NO: 2490833 - RNA, 19 nt, Homo sapiens
  misc_RNA (1)...(19): siRNA sense strand
agucacaaccaauguaaaa

SEQ ID NO: 2490834 - RNA, 19 nt, Homo sapiens
  misc_RNA (1)...(19): siRNA sense strand
uugaacagugccauagaaa

SEQ ID NO: 2490835 - RNA, 19 nt, Homo sapiens
  misc_RNA (1)...(19): siRNA sense strand
aggaagucuuaguggaaug

SEQ ID NO: 2490836 - RNA, 19 nt, Homo sapiens
  misc_RNA (1)...(19): siRNA sense strand
caacaacugcaucaggcaa

SEQ ID NO: 2490837 - RNA, 19 nt, Homo sapiens
  misc_RNA (1)...(19): siRNA sense strand
ugaacaugaacguggcuga

SEQ ID NO: 2490838 - RNA, 19 nt, Homo sapiens
  misc_RNA (1)...(19): siRNA sense strand
aguggaaugucgugugcga

SEQ ID NO: 2490839 - RNA, 19 nt, Homo sapiens
  misc_RNA (1)...(19): siRNA sense strand
ucaagaagaucuacgccaa

SEQ ID NO: 2490840 - RNA, 19 nt, Homo sapiens
  misc_RNA (1)...(19): siRNA sense strand
gacaagaucuucaggcaga

SEQ ID NO: 2490841 - RNA, 19 nt, Homo sapiens
  misc_RNA (1)...(19): siRNA sense strand
uguacgaccuggacggcaa

SEQ ID NO: 2490842 - RNA, 19 nt, Homo sapiens
  misc_RNA (1)...(19): siRNA sense strand
ccggagaagcgcacagaca

SEQ ID NO: 2490843 - RNA, 19 nt, Homo sapiens
  misc_RNA (1)...(19): siRNA sense strand
acaccaacaaugacggcaa

SEQ ID NO: 2490844 - RNA, 19 nt, Homo sapiens
  misc_RNA (1)...(19): siRNA sense strand
cagacaagaucuucaggca

SEQ ID NO: 2490845 - RNA, 19 nt, Homo sapiens
  misc_RNA (1)...(19): siRNA sense strand
gguacaagggcuuccucaa

SEQ ID NO: 2490846 - RNA, 19 nt, Homo sapiens
  misc_RNA (1)...(19): siRNA sense strand
ugaugaagaugccggagga

SEQ ID NO: 2490847 - RNA, 19 nt, Homo sapiens
  misc_RNA (1)...(19): siRNA sense strand
aggagugguacaagggcuu

SEQ ID NO: 2490848 - RNA, 19 nt, Homo sapiens
  misc_RNA (1)...(19): siRNA sense strand
ucaagaagaucuacgccaa

SEQ ID NO: 2490849 - RNA, 19 nt, Homo sapiens
  misc_RNA (1)...(19): siRNA sense strand
gacaagaucuucaggcaga

SEQ ID NO: 2490850 - RNA, 19 nt, Homo sapiens
  misc_RNA (1)...(19): siRNA sense strand
uguacgaccuggacggcaa

SEQ ID NO: 2490851 - RNA, 19 nt, Homo sapiens
  misc_RNA (1)...(19): siRNA sense strand
ccggagaagcgcacagaca

SEQ ID NO: 2490852 - RNA, 19 nt, Homo sapiens
  misc_RNA (1)...(19): siRNA sense strand
acaccaacaaugacggcaa

SEQ ID NO: 2490853 - RNA, 19 nt, Homo sapiens
  misc_RNA (1)...(19): siRNA sense strand
cagacaagaucuucaggca

SEQ ID NO: 2490854 - RNA, 19 nt, Homo sapiens
  misc_RNA (1)...(19): siRNA sense strand
gguacaagggcuuccucaa

SEQ ID NO: 2490855 - RNA, 19 nt, Homo sapiens
  misc_RNA (1)...(19): siRNA sense strand
ugaugaagaugccggagga

SEQ ID NO: 2490856 - RNA, 19 nt, Homo sapiens
  misc_RNA (1)...(19): siRNA sense strand
aggagugguacaagggcuu

SEQ ID NO: 2490857 - RNA, 19 nt, Homo sapiens
  misc_RNA (1)...(19): siRNA sense strand
uguccaaggccaagaggaa

SEQ ID NO: 2490858 - RNA, 19 nt, Homo sapiens
  misc_RNA (1)...(19): siRNA sense strand
aagaagaauaugaggccuu

SEQ ID NO: 2490859 - RNA, 19 nt, Homo sapiens
  misc_RNA (1)...(19): siRNA sense strand
ugaaggagcaccagggcau

SEQ ID NO: 2490860 - RNA, 19 nt, Homo sapiens
  misc_RNA (1)...(19): siRNA sense strand
ccuucauggaggagaccaa

SEQ ID NO: 2490861 - RNA, 19 nt, Homo sapiens
  misc_RNA (1)...(19): siRNA sense strand
ugugcaaagacaugauuaa

SEQ ID NO: 2490862 - RNA, 19 nt, Homo sapiens
  misc_RNA (1)...(19): siRNA sense strand
aggaaaugggugucaguga

SEQ ID NO: 2490863 - RNA, 19 nt, Homo sapiens
  misc_RNA (1)...(19): siRNA sense strand
gggacgacgacuuuggcaa

SEQ ID NO: 2490864 - RNA, 19 nt, Homo sapiens
  misc_RNA (1)...(19): siRNA sense strand
gccaagaggaaaugggugu

SEQ ID NO: 2490865 - RNA, 19 nt, Homo sapiens
  misc_RNA (1)...(19): siRNA sense strand
gggccuggacagugagagu

SEQ ID NO: 2490866 - RNA, 19 nt, Homo sapiens
  misc_RNA (1)...(19): siRNA sense strand
gcuccuacuaccugugcaa

SEQ ID NO: 2490867 - RNA, 19 nt, Homo sapiens
  misc_RNA (1)...(19): siRNA sense strand
aagaaguacuggcagcaga

SEQ ID NO: 2490868 - RNA, 19 nt, Homo sapiens
  misc_RNA (1)...(19): siRNA sense strand
uggacaugcagcagaccua

SEQ ID NO: 2490869 - RNA, 19 nt, Homo sapiens
  misc_RNA (1)...(19): siRNA sense strand
cugcagaugaaguuuguau

SEQ ID NO: 2490870 - RNA, 19 nt, Homo sapiens
  misc_RNA (1)...(19): siRNA sense strand
uccaaggccaagaggaaau

SEQ ID NO: 2490871 - RNA, 19 nt, Homo sapiens
  misc_RNA (1)...(19): siRNA sense strand
cacaagugcaagcgggaca

SEQ ID NO: 2490872 - RNA, 19 nt, Homo sapiens
  misc_RNA (1)...(19): siRNA sense strand
uggugauguccaaggccaa

SEQ ID NO: 2490873 - RNA, 19 nt, Homo sapiens
  misc_RNA (1)...(19): siRNA sense strand
gcaaugaucuguuccggga

SEQ ID NO: 2490874 - RNA, 19 nt, Homo sapiens
  misc_RNA (1)...(19): siRNA sense strand
augagaaggcgcuggagga

SEQ ID NO: 2490875 - RNA, 19 nt, Homo sapiens
  misc_RNA (1)...(19): siRNA sense strand
gccuggacagugagaguau

SEQ ID NO: 2490876 - RNA, 19 nt, Homo sapiens
  misc_RNA (1)...(19): siRNA sense strand
acaucgaaacagacugcua

SEQ ID NO: 2490877 - RNA, 19 nt, Homo sapiens
  misc_RNA (1)...(19): siRNA sense strand
agaccaacucacaggacca

SEQ ID NO: 2490878 - RNA, 19 nt, Homo sapiens
  misc_RNA (1)...(19): siRNA sense strand
cggacuacgcggacaucau

SEQ ID NO: 2490879 - RNA, 19 nt, Homo sapiens
  misc_RNA (1)...(19): siRNA sense strand
acagaaaggaagagguuuu

SEQ ID NO: 2490880 - RNA, 19 nt, Homo sapiens
  misc_RNA (1)...(19): siRNA sense strand
aguggaacuucaaaggaau

SEQ ID NO: 2490881 - RNA, 19 nt, Homo sapiens
  misc_RNA (1)...(19): siRNA sense strand
uuuacaagggauugaguuu

SEQ ID NO: 2490882 - RNA, 19 nt, Homo sapiens
  misc_RNA (1)...(19): siRNA sense strand
aaagauacggcguggagau

SEQ ID NO: 2490883 - RNA, 19 nt, Homo sapiens
  misc_RNA (1)...(19): siRNA sense strand
caaaggaaugagugggauc

SEQ ID NO: 2490884 - RNA, 19 nt, Homo sapiens
  misc_RNA (1)...(19): siRNA sense strand
ccgagacauuaguggaacu

SEQ ID NO: 2490885 - RNA, 19 nt, Homo sapiens
  misc_RNA (1)...(19): siRNA sense strand
aacccaacccagagaaaca

SEQ ID NO: 2490886 - RNA, 19 nt, Homo sapiens
  misc_RNA (1)...(19): siRNA sense strand
ccgccgacagaaaggaaga

SEQ ID NO: 2490887 - RNA, 19 nt, Homo sapiens
  misc_RNA (1)...(19): siRNA sense strand
guggcuacugagugggauu

SEQ ID NO: 2490888 - RNA, 19 nt, Homo sapiens
  misc_RNA (1)...(19): siRNA sense strand
ccgugaaguuucuggacac

SEQ ID NO: 2490889 - RNA, 19 nt, Homo sapiens
  misc_RNA (1)...(19): siRNA sense strand
ccauagcaccggagagcaa

SEQ ID NO: 2490890 - RNA, 19 nt, Homo sapiens
  misc_RNA (1)...(19): siRNA sense strand
gggagauaauggagaagca

SEQ ID NO: 2490891 - RNA, 19 nt, Homo sapiens
  misc_RNA (1)...(19): siRNA sense strand
ccauaaagugagccagaau

SEQ ID NO: 2490892 - RNA, 19 nt, Homo sapiens
  misc_RNA (1)...(19): siRNA sense strand
uggacagccugaagagaga

SEQ ID NO: 2490893 - RNA, 19 nt, Homo sapiens
  misc_RNA (1)...(19): siRNA sense strand
ccacacaagaugaaagagu

SEQ ID NO: 2490894 - RNA, 19 nt, Homo sapiens
  misc_RNA (1)...(19): siRNA sense strand
cagaaaugcaguuugugaa

SEQ ID NO: 2490895 - RNA, 19 nt, Homo sapiens
  misc_RNA (1)...(19): siRNA sense strand
ugugagacucugugaagua

SEQ ID NO: 2490896 - RNA, 19 nt, Homo sapiens
  misc_RNA (1)...(19): siRNA sense strand
ggagaaagucacagcugga

SEQ ID NO: 2490897 - RNA, 19 nt, Homo sapiens
  misc_RNA (1)...(19): siRNA sense strand
acagcaaacaagacggauu

SEQ ID NO: 2490898 - RNA, 19 nt, Homo sapiens
  misc_RNA (1)...(19): siRNA sense strand
ccacaaucaaggaggaaag

SEQ ID NO: 2490899 - RNA, 19 nt, Homo sapiens
  misc_RNA (1)...(19): siRNA sense strand
ggacauucauucugccuca

SEQ ID NO: 2490900 - RNA, 19 nt, Homo sapiens
  misc_RNA (1)...(19): siRNA sense strand
cggaaaggacagggcagaa

SEQ ID NO: 2490901 - RNA, 19 nt, Homo sapiens
  misc_RNA (1)...(19): siRNA sense strand
aggaacaugcaaagaccaa

SEQ ID NO: 2490902 - RNA, 19 nt, Homo sapiens
  misc_RNA (1)...(19): siRNA sense strand
cuaaaggagagcugguaca

SEQ ID NO: 2490903 - RNA, 19 nt, Homo sapiens
  misc_RNA (1)...(19): siRNA sense strand
gagagcugguacaggaaca

SEQ ID NO: 2490904 - RNA, 19 nt, Homo sapiens
  misc_RNA (1)...(19): siRNA sense strand
cauagaaaucaauggggaa

SEQ ID NO: 2490905 - RNA, 19 nt, Homo sapiens
  misc_RNA (1)...(19): siRNA sense strand
agaaaugcaguuugugaau

SEQ ID NO: 2490906 - RNA, 19 nt, Homo sapiens
  misc_RNA (1)...(19): siRNA sense strand
cagauaaugaucaggaagu

SEQ ID NO: 2490907 - RNA, 19 nt, Homo sapiens
  misc_RNA (1)...(19): siRNA sense strand
ccuaauucggauagagagu

SEQ ID NO: 2490908 - RNA, 19 nt, Homo sapiens
  misc_RNA (1)...(19): siRNA sense strand
ccgucaacccuaaaggaga

SEQ ID NO: 2490909 - RNA, 19 nt, Homo sapiens
  misc_RNA (1)...(19): siRNA sense strand
gucagcaaguccacggaaa

SEQ ID NO: 2490910 - RNA, 19 nt, Homo sapiens
  misc_RNA (1)...(19): siRNA sense strand
augaaagaguccagcccau

SEQ ID NO: 2490911 - RNA, 19 nt, Homo sapiens
  misc_RNA (1)...(19): siRNA sense strand
ccaugaucgaggagcucaa

SEQ ID NO: 2490912 - RNA, 19 nt, Homo sapiens
  misc_RNA (1)...(19): siRNA sense strand
cauacaagcaaguaggagu

SEQ ID NO: 2490913 - RNA, 19 nt, Homo sapiens
  misc_RNA (1)...(19): siRNA sense strand
ccagaaaugcuuuggcugu

SEQ ID NO: 2490914 - RNA, 19 nt, Homo sapiens
  misc_RNA (1)...(19): siRNA sense strand
uggagcaagcugugucaua

SEQ ID NO: 2490915 - RNA, 19 nt, Homo sapiens
  misc_RNA (1)...(19): siRNA sense strand
guccaguguuugacagaca

SEQ ID NO: 2490916 - RNA, 19 nt, Homo sapiens
  misc_RNA (1)...(19): siRNA sense strand
auugggagauaauggagaa

SEQ ID NO: 2490917 - RNA, 19 nt, Homo sapiens
  misc_RNA (1)...(19): siRNA sense strand
agauaaacgaagccgacau

SEQ ID NO: 2490918 - RNA, 19 nt, Homo sapiens
  misc_RNA (1)...(19): siRNA sense strand
cagaaaaguuuaaagucca

SEQ ID NO: 2490919 - RNA, 19 nt, Homo sapiens
  misc_RNA (1)...(19): siRNA sense strand
ugguacaggaacaugcaaa

SEQ ID NO: 2490920 - RNA, 19 nt, Homo sapiens
  misc_RNA (1)...(19): siRNA sense strand
gaauggaaugccagcugaa

SEQ ID NO: 2490921 - RNA, 19 nt, Homo sapiens
  misc_RNA (1)...(19): siRNA sense strand
ugaagagagaugacaacau

SEQ ID NO: 2490922 - RNA, 19 nt, Homo sapiens
  misc_RNA (1)...(19): siRNA sense strand
gcaguuugugaaugaagaa

SEQ ID NO: 2490923 - RNA, 19 nt, Homo sapiens
  misc_RNA (1)...(19): siRNA sense strand
ccugcgcucccgagagaaa

SEQ ID NO: 2490924 - RNA, 19 nt, Homo sapiens
  misc_RNA (1)...(19): siRNA sense strand
ccgugaaggagcucuacaa

SEQ ID NO: 2490925 - RNA, 19 nt, Homo sapiens
  misc_RNA (1)...(19): siRNA sense strand
agauaaugaucaggaaguu

SEQ ID NO: 2490926 - RNA, 19 nt, Homo sapiens
  misc_RNA (1)...(19): siRNA sense strand
gccugaagagagaugacaa

SEQ ID NO: 2490927 - RNA, 19 nt, Homo sapiens
  misc_RNA (1)...(19): siRNA sense strand
aggaaaagagauaaacgaa

SEQ ID NO: 2490928 - RNA, 19 nt, Homo sapiens
  misc_RNA (1)...(19): siRNA sense strand
ucacagacauggauccuga

SEQ ID NO: 2490929 - RNA, 19 nt, Homo sapiens
  misc_RNA (1)...(19): siRNA sense strand
cuguggaacugggaugaua

SEQ ID NO: 2490930 - RNA, 19 nt, Homo sapiens
  misc_RNA (1)...(19): siRNA sense strand
agagagaugacaacaugaa

SEQ ID NO: 2490931 - RNA, 19 nt, Homo sapiens
  misc_RNA (1)...(19): siRNA sense strand
guggaacugggaugauaaa

SEQ ID NO: 2490932 - RNA, 19 nt, Homo sapiens
  misc_RNA (1)...(19): siRNA sense strand
agagaugacaacaugaaca

SEQ ID NO: 2490933 - RNA, 19 nt, Homo sapiens
  misc_RNA (1)...(19): siRNA sense strand
aagugagccagaauggaua

SEQ ID NO: 2490934 - RNA, 19 nt, Homo sapiens
  misc_RNA (1)...(19): siRNA sense strand
auugaaaagaagccagaaa

SEQ ID NO: 2490935 - RNA, 19 nt, Homo sapiens
  misc_RNA (1)...(19): siRNA sense strand
aaggagagcugguacagga

SEQ ID NO: 2490936 - RNA, 19 nt, Homo sapiens
  misc_RNA (1)...(19): siRNA sense strand
caagcagcucuguaguaaa

SEQ ID NO: 2490937 - RNA, 19 nt, Homo sapiens
  misc_RNA (1)...(19): siRNA sense strand
uguggaacugggaugauaa

SEQ ID NO: 2490938 - RNA, 19 nt, Homo sapiens
  misc_RNA (1)...(19): siRNA sense strand
uugaaaagaagccagaaaa

SEQ ID NO: 2490939 - RNA, 19 nt, Homo sapiens
  misc_RNA (1)...(19): siRNA sense strand
ccauaaagcuaaaggagca

SEQ ID NO: 2490940 - RNA, 19 nt, Homo sapiens
  misc_RNA (1)...(19): siRNA sense strand
cugugaaaaugaagagcaa

SEQ ID NO: 2490941 - RNA, 19 nt, Homo sapiens
  misc_RNA (1)...(19): siRNA sense strand
ugggaagccuagugguaau

SEQ ID NO: 2490942 - RNA, 19 nt, Homo sapiens
  misc_RNA (1)...(19): siRNA sense strand
aggccaugcucgugcucaa

SEQ ID NO: 2490943 - RNA, 19 nt, Homo sapiens
  misc_RNA (1)...(19): siRNA sense strand
gagagugguugaaggccuu

SEQ ID NO: 2490944 - RNA, 19 nt, Homo sapiens
  misc_RNA (1)...(19): siRNA sense strand
gagcaaagccuucuggauc

SEQ ID NO: 2490945 - RNA, 19 nt, Homo sapiens
  misc_RNA (1)...(19): siRNA sense strand
aguacauaccugugaaaau

SEQ ID NO: 2490946 - RNA, 19 nt, Homo sapiens
  misc_RNA (1)...(19): siRNA sense strand
gcacagaggccaugcucgu

SEQ ID NO: 2490947 - RNA, 19 nt, Homo sapiens
  misc_RNA (1)...(19): siRNA sense strand
aguccgaauaccuggauua

SEQ ID NO: 2490948 - RNA, 19 nt, Homo sapiens
  misc_RNA (1)...(19): siRNA sense strand
aggaagaggaggcgaggga

SEQ ID NO: 2490949 - RNA, 19 nt, Homo sapiens
  misc_RNA (1)...(19): siRNA sense strand
aggaggaggaugaggagga

SEQ ID NO: 2490950 - RNA, 19 nt, Homo sapiens
  misc_RNA (1)...(19): siRNA sense strand
aaucagaaauugaggacag

SEQ ID NO: 2490951 - RNA, 19 nt, Homo sapiens
  misc_RNA (1)...(19): siRNA sense strand
agacaagauggaagaagga

SEQ ID NO: 2490952 - RNA, 19 nt, Homo sapiens
  misc_RNA (1)...(19): siRNA sense strand
aggacgaagaggaggagga

SEQ ID NO: 2490953 - RNA, 19 nt, Homo sapiens
  misc_RNA (1)...(19): siRNA sense strand
cagaggacgaagaggagga

SEQ ID NO: 2490954 - RNA, 19 nt, Homo sapiens
  misc_RNA (1)...(19): siRNA sense strand
cagaaauugaggacagcga

SEQ ID NO: 2490955 - RNA, 19 nt, Homo sapiens
  misc_RNA (1)...(19): siRNA sense strand
ucuccaaggacucggguuu

SEQ ID NO: 2490956 - RNA, 19 nt, Homo sapiens
  misc_RNA (1)...(19): siRNA sense strand
aggaugaggaggacacaga

SEQ ID NO: 2490957 - RNA, 19 nt, Homo sapiens
  misc_RNA (1)...(19): siRNA sense strand
cugaccuucugcugggaaa

SEQ ID NO: 2490958 - RNA, 19 nt, Homo sapiens
  misc_RNA (1)...(19): siRNA sense strand
gcuugggauucuucagaca

SEQ ID NO: 2490959 - RNA, 19 nt, Homo sapiens
  misc_RNA (1)...(19): siRNA sense strand
cuaugaugugccugaagaa

SEQ ID NO: 2490960 - RNA, 19 nt, Homo sapiens
  misc_RNA (1)...(19): siRNA sense strand
uugcagaggacgaagagga

SEQ ID NO: 2490961 - RNA, 19 nt, Homo sapiens
  misc_RNA (1)...(19): siRNA sense strand
uggaagagugugcgggaac

SEQ ID NO: 2490962 - RNA, 19 nt, Homo sapiens
  misc_RNA (1)...(19): siRNA sense strand
gcgucagcuuccagcccua

SEQ ID NO: 2490963 - RNA, 19 nt, Homo sapiens
  misc_RNA (1)...(19): siRNA sense strand
aguccgaauaccuggauua

SEQ ID NO: 2490964 - RNA, 19 nt, Homo sapiens
  misc_RNA (1)...(19): siRNA sense strand
aggaagaggaggcgaggga

SEQ ID NO: 2490965 - RNA, 19 nt, Homo sapiens
  misc_RNA (1)...(19): siRNA sense strand
aggaggaggaugaggagga

SEQ ID NO: 2490966 - RNA, 19 nt, Homo sapiens
  misc_RNA (1)...(19): siRNA sense strand
aaucagaaauugaggacag

SEQ ID NO: 2490967 - RNA, 19 nt, Homo sapiens
  misc_RNA (1)...(19): siRNA sense strand
agacaagauggaagaagga

SEQ ID NO: 2490968 - RNA, 19 nt, Homo sapiens
  misc_RNA (1)...(19): siRNA sense strand
aggacgaagaggaggagga

SEQ ID NO: 2490969 - RNA, 19 nt, Homo sapiens
  misc_RNA (1)...(19): siRNA sense strand
cagaggacgaagaggagga

SEQ ID NO: 2490970 - RNA, 19 nt, Homo sapiens
  misc_RNA (1)...(19): siRNA sense strand
cagaaauugaggacagcga

SEQ ID NO: 2490971 - RNA, 19 nt, Homo sapiens
  misc_RNA (1)...(19): siRNA sense strand
ucuccaaggacucggguuu

SEQ ID NO: 2490972 - RNA, 19 nt, Homo sapiens
  misc_RNA (1)...(19): siRNA sense strand
aggaugaggaggacacaga

SEQ ID NO: 2490973 - RNA, 19 nt, Homo sapiens
  misc_RNA (1)...(19): siRNA sense strand
cugaccuucugcugggaaa

SEQ ID NO: 2490974 - RNA, 19 nt, Homo sapiens
  misc_RNA (1)...(19): siRNA sense strand
gcuugggauucuucagaca

SEQ ID NO: 2490975 - RNA, 19 nt, Homo sapiens
  misc_RNA (1)...(19): siRNA sense strand
cuaugaugugccugaagaa

SEQ ID NO: 2490976 - RNA, 19 nt, Homo sapiens
  misc_RNA (1)...(19): siRNA sense strand
uugcagaggacgaagagga

SEQ ID NO: 2490977 - RNA, 19 nt, Homo sapiens
  misc_RNA (1)...(19): siRNA sense strand
uggaagagugugcgggaac

SEQ ID NO: 2490978 - RNA, 19 nt, Homo sapiens
  misc_RNA (1)...(19): siRNA sense strand
gcgucagcuuccagcccua

SEQ ID NO: 2490979 - RNA, 19 nt, Homo sapiens
  misc_RNA (1)...(19): siRNA sense strand
aguccgaauaccuggauua

SEQ ID NO: 2490980 - RNA, 19 nt, Homo sapiens
  misc_RNA (1)...(19): siRNA sense strand
cuaugaugugccugaagaa

SEQ ID NO: 2490981 - RNA, 19 nt, Homo sapiens
  misc_RNA (1)...(19): siRNA sense strand
uggaagagugugcgggaac

SEQ ID NO: 2490982 - RNA, 19 nt, Homo sapiens
  misc_RNA (1)...(19): siRNA sense strand
acacaaacaacgacggcaa

SEQ ID NO: 2490983 - RNA, 19 nt, Homo sapiens
  misc_RNA (1)...(19): siRNA sense strand
ucaagaagaucuacgccaa

SEQ ID NO: 2490984 - RNA, 19 nt, Homo sapiens
  misc_RNA (1)...(19): siRNA sense strand
ugaagaugccggaggacga

SEQ ID NO: 2490985 - RNA, 19 nt, Homo sapiens
  misc_RNA (1)...(19): siRNA sense strand
gguacaagggcuuccucaa

SEQ ID NO: 2490986 - RNA, 19 nt, Homo sapiens
  misc_RNA (1)...(19): siRNA sense strand
ucaauguggaugaguucaa

SEQ ID NO: 2490987 - RNA, 19 nt, Homo sapiens
  misc_RNA (1)...(19): siRNA sense strand
aggagaugcuggagaucgu

SEQ ID NO: 2490988 - RNA, 19 nt, Homo sapiens
  misc_RNA (1)...(19): siRNA sense strand
ugaugaagaugccggagga

SEQ ID NO: 2490989 - RNA, 19 nt, Homo sapiens
  misc_RNA (1)...(19): siRNA sense strand
ccggaaaagaggacugaga

SEQ ID NO: 2490990 - RNA, 19 nt, Homo sapiens
  misc_RNA (1)...(19): siRNA sense strand
aggagugguacaagggcuu

SEQ ID NO: 2490991 - RNA, 19 nt, Homo sapiens
  misc_RNA (1)...(19): siRNA sense strand
gcaaugagguggagccuga

SEQ ID NO: 2490992 - RNA, 19 nt, Homo sapiens
  misc_RNA (1)...(19): siRNA sense strand
cuucacugccugaggacau

SEQ ID NO: 2490993 - RNA, 19 nt, Homo sapiens
  misc_RNA (1)...(19): siRNA sense strand
ucucaaagccgagggccaa

SEQ ID NO: 2490994 - RNA, 19 nt, Homo sapiens
  misc_RNA (1)...(19): siRNA sense strand
aggagcugguggugcagaa

SEQ ID NO: 2490995 - RNA, 19 nt, Homo sapiens
  misc_RNA (1)...(19): siRNA sense strand
cugcaguaccucaagauca

SEQ ID NO: 2490996 - RNA, 19 nt, Homo sapiens
  misc_RNA (1)...(19): siRNA sense strand
gcacaaggcagcugaggug

SEQ ID NO: 2490997 - RNA, 19 nt, Homo sapiens
  misc_RNA (1)...(19): siRNA sense strand
auucaguaggagagaagau

SEQ ID NO: 2490998 - RNA, 19 nt, Homo sapiens
  misc_RNA (1)...(19): siRNA sense strand
ggagcguuucauugagauu

SEQ ID NO: 2490999 - RNA, 19 nt, Homo sapiens
  misc_RNA (1)...(19): siRNA sense strand
agaaggcagccaagcacaa

SEQ ID NO: 2491000 - RNA, 19 nt, Homo sapiens
  misc_RNA (1)...(19): siRNA sense strand
cggaguacacagugaccca

SEQ ID NO: 2491001 - RNA, 19 nt, Homo sapiens
  misc_RNA (1)...(19): siRNA sense strand
gcaaugagguggagccuga

SEQ ID NO: 2491002 - RNA, 19 nt, Homo sapiens
  misc_RNA (1)...(19): siRNA sense strand
cuucacugccugaggacau

SEQ ID NO: 2491003 - RNA, 19 nt, Homo sapiens
  misc_RNA (1)...(19): siRNA sense strand
ucucaaagccgagggccaa

SEQ ID NO: 2491004 - RNA, 19 nt, Homo sapiens
  misc_RNA (1)...(19): siRNA sense strand
aggagcugguggugcagaa

SEQ ID NO: 2491005 - RNA, 19 nt, Homo sapiens
  misc_RNA (1)...(19): siRNA sense strand
cugcaguaccucaagauca

SEQ ID NO: 2491006 - RNA, 19 nt, Homo sapiens
  misc_RNA (1)...(19): siRNA sense strand
gcacaaggcagcugaggug

SEQ ID NO: 2491007 - RNA, 19 nt, Homo sapiens
  misc_RNA (1)...(19): siRNA sense strand
auucaguaggagagaagau

SEQ ID NO: 2491008 - RNA, 19 nt, Homo sapiens
  misc_RNA (1)...(19): siRNA sense strand
ggagcguuucauugagauu

SEQ ID NO: 2491009 - RNA, 19 nt, Homo sapiens
  misc_RNA (1)...(19): siRNA sense strand
agaaggcagccaagcacaa

SEQ ID NO: 2491010 - RNA, 19 nt, Homo sapiens
  misc_RNA (1)...(19): siRNA sense strand
cggaguacacagugaccca

SEQ ID NO: 2491011 - RNA, 19 nt, Homo sapiens
  misc_RNA (1)...(19): siRNA sense strand
ucucaaagccgagggccaa

SEQ ID NO: 2491012 - RNA, 19 nt, Homo sapiens
  misc_RNA (1)...(19): siRNA sense strand
gcacaaggcagcugaggug

SEQ ID NO: 2491013 - RNA, 19 nt, Homo sapiens
  misc_RNA (1)...(19): siRNA sense strand
agaaggcagccaagcacaa

SEQ ID NO: 2491014 - RNA, 19 nt, Homo sapiens
  misc_RNA (1)...(19): siRNA sense strand
gggcauugcugcuggcuca

SEQ ID NO: 2491015 - RNA, 19 nt, Homo sapiens
  misc_RNA (1)...(19): siRNA sense strand
agaaacaguucgcuggcua

SEQ ID NO: 2491016 - RNA, 19 nt, Homo sapiens
  misc_RNA (1)...(19): siRNA sense strand
aggaggaccaggaggacau

SEQ ID NO: 2491017 - RNA, 19 nt, Homo sapiens
  misc_RNA (1)...(19): siRNA sense strand
gcgagaagcuggaagccac

SEQ ID NO: 2491018 - RNA, 19 nt, Homo sapiens
  misc_RNA (1)...(19): siRNA sense strand
guaucuggagaaugaacaa

SEQ ID NO: 2491019 - RNA, 19 nt, Homo sapiens
  misc_RNA (1)...(19): siRNA sense strand
cuucagagcugccaggcca

SEQ ID NO: 2491020 - RNA, 19 nt, Homo sapiens
  misc_RNA (1)...(19): siRNA sense strand
acuaugcuguggagcgcaa

SEQ ID NO: 2491021 - RNA, 19 nt, Homo sapiens
  misc_RNA (1)...(19): siRNA sense strand
gugccaaggaucagagcgu

SEQ ID NO: 2491022 - RNA, 19 nt, Homo sapiens
  misc_RNA (1)...(19): siRNA sense strand
gcucuaggcugaaggaguc

SEQ ID NO: 2491023 - RNA, 19 nt, Homo sapiens
  misc_RNA (1)...(19): siRNA sense strand
ccaaagccuugcuguccaa

SEQ ID NO: 2491024 - RNA, 19 nt, Homo sapiens
  misc_RNA (1)...(19): siRNA sense strand
gcccagaucuacaggguca

SEQ ID NO: 2491025 - RNA, 19 nt, Homo sapiens
  misc_RNA (1)...(19): siRNA sense strand
gcuacgaaguggagcgccu

SEQ ID NO: 2491026 - RNA, 19 nt, Homo sapiens
  misc_RNA (1)...(19): siRNA sense strand
gggauggacuagaugagca

SEQ ID NO: 2491027 - RNA, 19 nt, Homo sapiens
  misc_RNA (1)...(19): siRNA sense strand
aaguggagcgccuggacaa

SEQ ID NO: 2491028 - RNA, 19 nt, Homo sapiens
  misc_RNA (1)...(19): siRNA sense strand
cugcaaaugcugcgggaug

SEQ ID NO: 2491029 - RNA, 19 nt, Homo sapiens
  misc_RNA (1)...(19): siRNA sense strand
uuggaaggcauaagaccua

SEQ ID NO: 2491030 - RNA, 19 nt, Homo sapiens
  misc_RNA (1)...(19): siRNA sense strand
gggacaccuuuguggacca

SEQ ID NO: 2491031 - RNA, 19 nt, Homo sapiens
  misc_RNA (1)...(19): siRNA sense strand
auggauggcccucgagaaa

SEQ ID NO: 2491032 - RNA, 19 nt, Homo sapiens
  misc_RNA (1)...(19): siRNA sense strand
aggaagacguggagggagc

SEQ ID NO: 2491033 - RNA, 19 nt, Homo sapiens
  misc_RNA (1)...(19): siRNA sense strand
gcucaguccucauugccaa

SEQ ID NO: 2491034 - RNA, 19 nt, Homo sapiens
  misc_RNA (1)...(19): siRNA sense strand
cgaggacugaagaggaaau

SEQ ID NO: 2491035 - RNA, 19 nt, Homo sapiens
  misc_RNA (1)...(19): siRNA sense strand
gcacgaggacugaagagga

SEQ ID NO: 2491036 - RNA, 19 nt, Homo sapiens
  misc_RNA (1)...(19): siRNA sense strand
guguuggccacgaggaaga

SEQ ID NO: 2491037 - RNA, 19 nt, Homo sapiens
  misc_RNA (1)...(19): siRNA sense strand
acacaguacugacaggcau

SEQ ID NO: 2491038 - RNA, 19 nt, Homo sapiens
  misc_RNA (1)...(19): siRNA sense strand
gaggaaauguguuggccac

SEQ ID NO: 2491039 - RNA, 19 nt, Homo sapiens
  misc_RNA (1)...(19): siRNA sense strand
auggauggcccucgagaaa

SEQ ID NO: 2491040 - RNA, 19 nt, Homo sapiens
  misc_RNA (1)...(19): siRNA sense strand
aggaagacguggagggagc

SEQ ID NO: 2491041 - RNA, 19 nt, Homo sapiens
  misc_RNA (1)...(19): siRNA sense strand
gcucaguccucauugccaa

SEQ ID NO: 2491042 - RNA, 19 nt, Homo sapiens
  misc_RNA (1)...(19): siRNA sense strand
cgaggacugaagaggaaau

SEQ ID NO: 2491043 - RNA, 19 nt, Homo sapiens
  misc_RNA (1)...(19): siRNA sense strand
gcacgaggacugaagagga

SEQ ID NO: 2491044 - RNA, 19 nt, Homo sapiens
  misc_RNA (1)...(19): siRNA sense strand
guguuggccacgaggaaga

SEQ ID NO: 2491045 - RNA, 19 nt, Homo sapiens
  misc_RNA (1)...(19): siRNA sense strand
acacaguacugacaggcau

SEQ ID NO: 2491046 - RNA, 19 nt, Homo sapiens
  misc_RNA (1)...(19): siRNA sense strand
gaggaaauguguuggccac

SEQ ID NO: 2491047 - RNA, 19 nt, Homo sapiens
  misc_RNA (1)...(19): siRNA sense strand
ggauaaagauggaaagcca

SEQ ID NO: 2491048 - RNA, 19 nt, Homo sapiens
  misc_RNA (1)...(19): siRNA sense strand
ccaaagaagaagaccguga

SEQ ID NO: 2491049 - RNA, 19 nt, Homo sapiens
  misc_RNA (1)...(19): siRNA sense strand
agaacacagcaaaggauaa

SEQ ID NO: 2491050 - RNA, 19 nt, Homo sapiens
  misc_RNA (1)...(19): siRNA sense strand
aggagaaggccaaagaaga

SEQ ID NO: 2491051 - RNA, 19 nt, Homo sapiens
  misc_RNA (1)...(19): siRNA sense strand
agcaaagacaacagaggaa

SEQ ID NO: 2491052 - RNA, 19 nt, Homo sapiens
  misc_RNA (1)...(19): siRNA sense strand
gcugauagccuggggaaaa

SEQ ID NO: 2491053 - RNA, 19 nt, Homo sapiens
  misc_RNA (1)...(19): siRNA sense strand
gagaaaccaucuaagccaa

SEQ ID NO: 2491054 - RNA, 19 nt, Homo sapiens
  misc_RNA (1)...(19): siRNA sense strand
auagauuagaagaggucaa

SEQ ID NO: 2491055 - RNA, 19 nt, Homo sapiens
  misc_RNA (1)...(19): siRNA sense strand
agagacaagcuuggagaaa

SEQ ID NO: 2491056 - RNA, 19 nt, Homo sapiens
  misc_RNA (1)...(19): siRNA sense strand
gaauggagguaaagcgaag

SEQ ID NO: 2491057 - RNA, 19 nt, Homo sapiens
  misc_RNA (1)...(19): siRNA sense strand
cgaugaugccuuggauaaa

SEQ ID NO: 2491058 - RNA, 19 nt, Homo sapiens
  misc_RNA (1)...(19): siRNA sense strand
cuccaaagcaccuaagaau

SEQ ID NO: 2491059 - RNA, 19 nt, Homo sapiens
  misc_RNA (1)...(19): siRNA sense strand
aagucaaggagaaggccaa

SEQ ID NO: 2491060 - RNA, 19 nt, Homo sapiens
  misc_RNA (1)...(19): siRNA sense strand
uuagaagaggucaaggaua

SEQ ID NO: 2491061 - RNA, 19 nt, Homo sapiens
  misc_RNA (1)...(19): siRNA sense strand
ccaaaagagucuaaggaac

SEQ ID NO: 2491062 - RNA, 19 nt, Homo sapiens
  misc_RNA (1)...(19): siRNA sense strand
uggugaggaugaugaaaca

SEQ ID NO: 2491063 - RNA, 19 nt, Homo sapiens
  misc_RNA (1)...(19): siRNA sense strand
ugccagagccugaagaaaa

SEQ ID NO: 2491064 - RNA, 19 nt, Homo sapiens
  misc_RNA (1)...(19): siRNA sense strand
ugauaauggacaggacaaa

SEQ ID NO: 2491065 - RNA, 19 nt, Homo sapiens
  misc_RNA (1)...(19): siRNA sense strand
ggaaaaccugugauggaua

SEQ ID NO: 2491066 - RNA, 19 nt, Homo sapiens
  misc_RNA (1)...(19): siRNA sense strand
augauaauggacaggacaa

SEQ ID NO: 2491067 - RNA, 19 nt, Homo sapiens
  misc_RNA (1)...(19): siRNA sense strand
ggauaaagucaaggagaag

SEQ ID NO: 2491068 - RNA, 19 nt, Homo sapiens
  misc_RNA (1)...(19): siRNA sense strand
cgugaaaagcuuggugaaa

SEQ ID NO: 2491069 - RNA, 19 nt, Homo sapiens
  misc_RNA (1)...(19): siRNA sense strand
ccagaugagaacaaaccaa

SEQ ID NO: 2491070 - RNA, 19 nt, Homo sapiens
  misc_RNA (1)...(19): siRNA sense strand
gugaggaugaugaaacaau

SEQ ID NO: 2491071 - RNA, 19 nt, Homo sapiens
  misc_RNA (1)...(19): siRNA sense strand
agaaguguggugaggauga

SEQ ID NO: 2491072 - RNA, 19 nt, Homo sapiens
  misc_RNA (1)...(19): siRNA sense strand
aaagaagaagaccgugaaa

SEQ ID NO: 2491073 - RNA, 19 nt, Homo sapiens
  misc_RNA (1)...(19): siRNA sense strand
gugacaaagaccucgauga

SEQ ID NO: 2491074 - RNA, 19 nt, Homo sapiens
  misc_RNA (1)...(19): siRNA sense strand
cuacaaagaaaucagagga

SEQ ID NO: 2491075 - RNA, 19 nt, Homo sapiens
  misc_RNA (1)...(19): siRNA sense strand
agaagaggucaaggauaaa

SEQ ID NO: 2491076 - RNA, 19 nt, Homo sapiens
  misc_RNA (1)...(19): siRNA sense strand
cagcaaagacaacagagga

SEQ ID NO: 2491077 - RNA, 19 nt, Homo sapiens
  misc_RNA (1)...(19): siRNA sense strand
gaauguaaagagaaaccau

SEQ ID NO: 2491078 - RNA, 19 nt, Homo sapiens
  misc_RNA (1)...(19): siRNA sense strand
ggacaaaccagugaagcca

SEQ ID NO: 2491079 - RNA, 19 nt, Homo sapiens
  misc_RNA (1)...(19): siRNA sense strand
cucugacagucuaggacaa

SEQ ID NO: 2491080 - RNA, 19 nt, Homo sapiens
  misc_RNA (1)...(19): siRNA sense strand
caaagacaacagaggaaac

SEQ ID NO: 2491081 - RNA, 19 nt, Homo sapiens
  misc_RNA (1)...(19): siRNA sense strand
ggauaaagauggaaagcca

SEQ ID NO: 2491082 - RNA, 19 nt, Homo sapiens
  misc_RNA (1)...(19): siRNA sense strand
ccaaagaagaagaccguga

SEQ ID NO: 2491083 - RNA, 19 nt, Homo sapiens
  misc_RNA (1)...(19): siRNA sense strand
agaacacagcaaaggauaa

SEQ ID NO: 2491084 - RNA, 19 nt, Homo sapiens
  misc_RNA (1)...(19): siRNA sense strand
aggagaaggccaaagaaga

SEQ ID NO: 2491085 - RNA, 19 nt, Homo sapiens
  misc_RNA (1)...(19): siRNA sense strand
agcaaagacaacagaggaa

SEQ ID NO: 2491086 - RNA, 19 nt, Homo sapiens
  misc_RNA (1)...(19): siRNA sense strand
gcugauagccuggggaaaa

SEQ ID NO: 2491087 - RNA, 19 nt, Homo sapiens
  misc_RNA (1)...(19): siRNA sense strand
gagaaaccaucuaagccaa

SEQ ID NO: 2491088 - RNA, 19 nt, Homo sapiens
  misc_RNA (1)...(19): siRNA sense strand
auagauuagaagaggucaa

SEQ ID NO: 2491089 - RNA, 19 nt, Homo sapiens
  misc_RNA (1)...(19): siRNA sense strand
agagacaagcuuggagaaa

SEQ ID NO: 2491090 - RNA, 19 nt, Homo sapiens
  misc_RNA (1)...(19): siRNA sense strand
gaauggagguaaagcgaag

SEQ ID NO: 2491091 - RNA, 19 nt, Homo sapiens
  misc_RNA (1)...(19): siRNA sense strand
cgaugaugccuuggauaaa

SEQ ID NO: 2491092 - RNA, 19 nt, Homo sapiens
  misc_RNA (1)...(19): siRNA sense strand
cuccaaagcaccuaagaau

SEQ ID NO: 2491093 - RNA, 19 nt, Homo sapiens
  misc_RNA (1)...(19): siRNA sense strand
aagucaaggagaaggccaa

SEQ ID NO: 2491094 - RNA, 19 nt, Homo sapiens
  misc_RNA (1)...(19): siRNA sense strand
uuagaagaggucaaggaua

SEQ ID NO: 2491095 - RNA, 19 nt, Homo sapiens
  misc_RNA (1)...(19): siRNA sense strand
ccaaaagagucuaaggaac

SEQ ID NO: 2491096 - RNA, 19 nt, Homo sapiens
  misc_RNA (1)...(19): siRNA sense strand
uggugaggaugaugaaaca

SEQ ID NO: 2491097 - RNA, 19 nt, Homo sapiens
  misc_RNA (1)...(19): siRNA sense strand
ugccagagccugaagaaaa

SEQ ID NO: 2491098 - RNA, 19 nt, Homo sapiens
  misc_RNA (1)...(19): siRNA sense strand
ugauaauggacaggacaaa

SEQ ID NO: 2491099 - RNA, 19 nt, Homo sapiens
  misc_RNA (1)...(19): siRNA sense strand
ggaaaaccugugauggaua

SEQ ID NO: 2491100 - RNA, 19 nt, Homo sapiens
  misc_RNA (1)...(19): siRNA sense strand
augauaauggacaggacaa

SEQ ID NO: 2491101 - RNA, 19 nt, Homo sapiens
  misc_RNA (1)...(19): siRNA sense strand
ggauaaagucaaggagaag

SEQ ID NO: 2491102 - RNA, 19 nt, Homo sapiens
  misc_RNA (1)...(19): siRNA sense strand
cgugaaaagcuuggugaaa

SEQ ID NO: 2491103 - RNA, 19 nt, Homo sapiens
  misc_RNA (1)...(19): siRNA sense strand
ccagaugagaacaaaccaa

SEQ ID NO: 2491104 - RNA, 19 nt, Homo sapiens
  misc_RNA (1)...(19): siRNA sense strand
gugaggaugaugaaacaau

SEQ ID NO: 2491105 - RNA, 19 nt, Homo sapiens
  misc_RNA (1)...(19): siRNA sense strand
agaaguguggugaggauga

SEQ ID NO: 2491106 - RNA, 19 nt, Homo sapiens
  misc_RNA (1)...(19): siRNA sense strand
aaagaagaagaccgugaaa

SEQ ID NO: 2491107 - RNA, 19 nt, Homo sapiens
  misc_RNA (1)...(19): siRNA sense strand
gugacaaagaccucgauga

SEQ ID NO: 2491108 - RNA, 19 nt, Homo sapiens
  misc_RNA (1)...(19): siRNA sense strand
cuacaaagaaaucagagga

SEQ ID NO: 2491109 - RNA, 19 nt, Homo sapiens
  misc_RNA (1)...(19): siRNA sense strand
agaagaggucaaggauaaa

SEQ ID NO: 2491110 - RNA, 19 nt, Homo sapiens
  misc_RNA (1)...(19): siRNA sense strand
cagcaaagacaacagagga

SEQ ID NO: 2491111 - RNA, 19 nt, Homo sapiens
  misc_RNA (1)...(19): siRNA sense strand
gaauguaaagagaaaccau

SEQ ID NO: 2491112 - RNA, 19 nt, Homo sapiens
  misc_RNA (1)...(19): siRNA sense strand
ggacaaaccagugaagcca

SEQ ID NO: 2491113 - RNA, 19 nt, Homo sapiens
  misc_RNA (1)...(19): siRNA sense strand
cucugacagucuaggacaa

SEQ ID NO: 2491114 - RNA, 19 nt, Homo sapiens
  misc_RNA (1)...(19): siRNA sense strand
caaagacaacagaggaaac

SEQ ID NO: 2491115 - RNA, 19 nt, Homo sapiens
  misc_RNA (1)...(19): siRNA sense strand
ggauaaagauggaaagcca

SEQ ID NO: 2491116 - RNA, 19 nt, Homo sapiens
  misc_RNA (1)...(19): siRNA sense strand
ccaaagaagaagaccguga

SEQ ID NO: 2491117 - RNA, 19 nt, Homo sapiens
  misc_RNA (1)...(19): siRNA sense strand
agaacacagcaaaggauaa

SEQ ID NO: 2491118 - RNA, 19 nt, Homo sapiens
  misc_RNA (1)...(19): siRNA sense strand
aggagaaggccaaagaaga

SEQ ID NO: 2491119 - RNA, 19 nt, Homo sapiens
  misc_RNA (1)...(19): siRNA sense strand
agcaaagacaacagaggaa

SEQ ID NO: 2491120 - RNA, 19 nt, Homo sapiens
  misc_RNA (1)...(19): siRNA sense strand
gcugauagccuggggaaaa

SEQ ID NO: 2491121 - RNA, 19 nt, Homo sapiens
  misc_RNA (1)...(19): siRNA sense strand
gagaaaccaucuaagccaa

SEQ ID NO: 2491122 - RNA, 19 nt, Homo sapiens
  misc_RNA (1)...(19): siRNA sense strand
auagauuagaagaggucaa

SEQ ID NO: 2491123 - RNA, 19 nt, Homo sapiens
  misc_RNA (1)...(19): siRNA sense strand
agagacaagcuuggagaaa

SEQ ID NO: 2491124 - RNA, 19 nt, Homo sapiens
  misc_RNA (1)...(19): siRNA sense strand
gaauggagguaaagcgaag

SEQ ID NO: 2491125 - RNA, 19 nt, Homo sapiens
  misc_RNA (1)...(19): siRNA sense strand
cgaugaugccuuggauaaa

SEQ ID NO: 2491126 - RNA, 19 nt, Homo sapiens
  misc_RNA (1)...(19): siRNA sense strand
cuccaaagcaccuaagaau

SEQ ID NO: 2491127 - RNA, 19 nt, Homo sapiens
  misc_RNA (1)...(19): siRNA sense strand
aagucaaggagaaggccaa

SEQ ID NO: 2491128 - RNA, 19 nt, Homo sapiens
  misc_RNA (1)...(19): siRNA sense strand
uuagaagaggucaaggaua

SEQ ID NO: 2491129 - RNA, 19 nt, Homo sapiens
  misc_RNA (1)...(19): siRNA sense strand
uggugaggaugaugaaaca

SEQ ID NO: 2491130 - RNA, 19 nt, Homo sapiens
  misc_RNA (1)...(19): siRNA sense strand
ccaaaagagucuaaggaac

SEQ ID NO: 2491131 - RNA, 19 nt, Homo sapiens
  misc_RNA (1)...(19): siRNA sense strand
ugccagagccugaagaaaa

SEQ ID NO: 2491132 - RNA, 19 nt, Homo sapiens
  misc_RNA (1)...(19): siRNA sense strand
ugauaauggacaggacaaa

SEQ ID NO: 2491133 - RNA, 19 nt, Homo sapiens
  misc_RNA (1)...(19): siRNA sense strand
ggaaaaccugugauggaua

SEQ ID NO: 2491134 - RNA, 19 nt, Homo sapiens
  misc_RNA (1)...(19): siRNA sense strand
augauaauggacaggacaa

SEQ ID NO: 2491135 - RNA, 19 nt, Homo sapiens
  misc_RNA (1)...(19): siRNA sense strand
ggauaaagucaaggagaag

SEQ ID NO: 2491136 - RNA, 19 nt, Homo sapiens
  misc_RNA (1)...(19): siRNA sense strand
cgugaaaagcuuggugaaa

SEQ ID NO: 2491137 - RNA, 19 nt, Homo sapiens
  misc_RNA (1)...(19): siRNA sense strand
ccagaugagaacaaaccaa

SEQ ID NO: 2491138 - RNA, 19 nt, Homo sapiens
  misc_RNA (1)...(19): siRNA sense strand
gugaggaugaugaaacaau

SEQ ID NO: 2491139 - RNA, 19 nt, Homo sapiens
  misc_RNA (1)...(19): siRNA sense strand
agaaguguggugaggauga

SEQ ID NO: 2491140 - RNA, 19 nt, Homo sapiens
  misc_RNA (1)...(19): siRNA sense strand
aaagaagaagaccgugaaa

SEQ ID NO: 2491141 - RNA, 19 nt, Homo sapiens
  misc_RNA (1)...(19): siRNA sense strand
gugacaaagaccucgauga

SEQ ID NO: 2491142 - RNA, 19 nt, Homo sapiens
  misc_RNA (1)...(19): siRNA sense strand
cuacaaagaaaucagagga

SEQ ID NO: 2491143 - RNA, 19 nt, Homo sapiens
  misc_RNA (1)...(19): siRNA sense strand
agaagaggucaaggauaaa

SEQ ID NO: 2491144 - RNA, 19 nt, Homo sapiens
  misc_RNA (1)...(19): siRNA sense strand
cagcaaagacaacagagga

SEQ ID NO: 2491145 - RNA, 19 nt, Homo sapiens
  misc_RNA (1)...(19): siRNA sense strand
gaauguaaagagaaaccau

SEQ ID NO: 2491146 - RNA, 19 nt, Homo sapiens
  misc_RNA (1)...(19): siRNA sense strand
ggacaaaccagugaagcca

SEQ ID NO: 2491147 - RNA, 19 nt, Homo sapiens
  misc_RNA (1)...(19): siRNA sense strand
cucugacagucuaggacaa

SEQ ID NO: 2491148 - RNA, 19 nt, Homo sapiens
  misc_RNA (1)...(19): siRNA sense strand
caaagacaacagaggaaac

SEQ ID NO: 2491149 - RNA, 19 nt, Homo sapiens
  misc_RNA (1)...(19): siRNA sense strand
ggauaaagauggaaagcca

SEQ ID NO: 2491150 - RNA, 19 nt, Homo sapiens
  misc_RNA (1)...(19): siRNA sense strand
ccaaagaagaagaccguga

SEQ ID NO: 2491151 - RNA, 19 nt, Homo sapiens
  misc_RNA (1)...(19): siRNA sense strand
agaacacagcaaaggauaa

SEQ ID NO: 2491152 - RNA, 19 nt, Homo sapiens
  misc_RNA (1)...(19): siRNA sense strand
aggagaaggccaaagaaga

SEQ ID NO: 2491153 - RNA, 19 nt, Homo sapiens
  misc_RNA (1)...(19): siRNA sense strand
agcaaagacaacagaggaa

SEQ ID NO: 2491154 - RNA, 19 nt, Homo sapiens
  misc_RNA (1)...(19): siRNA sense strand
gcugauagccuggggaaaa

SEQ ID NO: 2491155 - RNA, 19 nt, Homo sapiens
  misc_RNA (1)...(19): siRNA sense strand
gagaaaccaucuaagccaa

SEQ ID NO: 2491156 - RNA, 19 nt, Homo sapiens
  misc_RNA (1)...(19): siRNA sense strand
auagauuagaagaggucaa

SEQ ID NO: 2491157 - RNA, 19 nt, Homo sapiens
  misc_RNA (1)...(19): siRNA sense strand
agagacaagcuuggagaaa

SEQ ID NO: 2491158 - RNA, 19 nt, Homo sapiens
  misc_RNA (1)...(19): siRNA sense strand
gaauggagguaaagcgaag

SEQ ID NO: 2491159 - RNA, 19 nt, Homo sapiens
  misc_RNA (1)...(19): siRNA sense strand
cgaugaugccuuggauaaa

SEQ ID NO: 2491160 - RNA, 19 nt, Homo sapiens
  misc_RNA (1)...(19): siRNA sense strand
cuccaaagcaccuaagaau

SEQ ID NO: 2491161 - RNA, 19 nt, Homo sapiens
  misc_RNA (1)...(19): siRNA sense strand
aagucaaggagaaggccaa

SEQ ID NO: 2491162 - RNA, 19 nt, Homo sapiens
  misc_RNA (1)...(19): siRNA sense strand
uuagaagaggucaaggaua

SEQ ID NO: 2491163 - RNA, 19 nt, Homo sapiens
  misc_RNA (1)...(19): siRNA sense strand
ccaaaagagucuaaggaac

SEQ ID NO: 2491164 - RNA, 19 nt, Homo sapiens
  misc_RNA (1)...(19): siRNA sense strand
uggugaggaugaugaaaca

SEQ ID NO: 2491165 - RNA, 19 nt, Homo sapiens
  misc_RNA (1)...(19): siRNA sense strand
ugccagagccugaagaaaa

SEQ ID NO: 2491166 - RNA, 19 nt, Homo sapiens
  misc_RNA (1)...(19): siRNA sense strand
ugauaauggacaggacaaa

SEQ ID NO: 2491167 - RNA, 19 nt, Homo sapiens
  misc_RNA (1)...(19): siRNA sense strand
ggaaaaccugugauggaua

SEQ ID NO: 2491168 - RNA, 19 nt, Homo sapiens
  misc_RNA (1)...(19): siRNA sense strand
augauaauggacaggacaa

SEQ ID NO: 2491169 - RNA, 19 nt, Homo sapiens
  misc_RNA (1)...(19): siRNA sense strand
ggauaaagucaaggagaag

SEQ ID NO: 2491170 - RNA, 19 nt, Homo sapiens
  misc_RNA (1)...(19): siRNA sense strand
cgugaaaagcuuggugaaa

SEQ ID NO: 2491171 - RNA, 19 nt, Homo sapiens
  misc_RNA (1)...(19): siRNA sense strand
ccagaugagaacaaaccaa

SEQ ID NO: 2491172 - RNA, 19 nt, Homo sapiens
  misc_RNA (1)...(19): siRNA sense strand
gugaggaugaugaaacaau

SEQ ID NO: 2491173 - RNA, 19 nt, Homo sapiens
  misc_RNA (1)...(19): siRNA sense strand
agaaguguggugaggauga

SEQ ID NO: 2491174 - RNA, 19 nt, Homo sapiens
  misc_RNA (1)...(19): siRNA sense strand
aaagaagaagaccgugaaa

SEQ ID NO: 2491175 - RNA, 19 nt, Homo sapiens
  misc_RNA (1)...(19): siRNA sense strand
gugacaaagaccucgauga

SEQ ID NO: 2491176 - RNA, 19 nt, Homo sapiens
  misc_RNA (1)...(19): siRNA sense strand
cuacaaagaaaucagagga

SEQ ID NO: 2491177 - RNA, 19 nt, Homo sapiens
  misc_RNA (1)...(19): siRNA sense strand
agaagaggucaaggauaaa

SEQ ID NO: 2491178 - RNA, 19 nt, Homo sapiens
  misc_RNA (1)...(19): siRNA sense strand
cagcaaagacaacagagga

SEQ ID NO: 2491179 - RNA, 19 nt, Homo sapiens
  misc_RNA (1)...(19): siRNA sense strand
gaauguaaagagaaaccau

SEQ ID NO: 2491180 - RNA, 19 nt, Homo sapiens
  misc_RNA (1)...(19): siRNA sense strand
ggacaaaccagugaagcca

SEQ ID NO: 2491181 - RNA, 19 nt, Homo sapiens
  misc_RNA (1)...(19): siRNA sense strand
cucugacagucuaggacaa

SEQ ID NO: 2491182 - RNA, 19 nt, Homo sapiens
  misc_RNA (1)...(19): siRNA sense strand
caaagacaacagaggaaac

SEQ ID NO: 2491183 - RNA, 19 nt, Homo sapiens
  misc_RNA (1)...(19): siRNA sense strand
cuggauaauaggagaaaua

SEQ ID NO: 2491184 - RNA, 19 nt, Homo sapiens
  misc_RNA (1)...(19): siRNA sense strand
cuacaaagaagcagagaca

SEQ ID NO: 2491185 - RNA, 19 nt, Homo sapiens
  misc_RNA (1)...(19): siRNA sense strand
cagaagaacauuuggaaaa

SEQ ID NO: 2491186 - RNA, 19 nt, Homo sapiens
  misc_RNA (1)...(19): siRNA sense strand
acaaagaagcagagacaca

SEQ ID NO: 2491187 - RNA, 19 nt, Homo sapiens
  misc_RNA (1)...(19): siRNA sense strand
gcagaagaacauuuggaaa

SEQ ID NO: 2491188 - RNA, 19 nt, Homo sapiens
  misc_RNA (1)...(19): siRNA sense strand
gcacaauggcucagugaca

SEQ ID NO: 2491189 - RNA, 19 nt, Homo sapiens
  misc_RNA (1)...(19): siRNA sense strand
gggucgaggucuaugcuaa

SEQ ID NO: 2491190 - RNA, 19 nt, Homo sapiens
  misc_RNA (1)...(19): siRNA sense strand
uagcuaaggcagugaacua

SEQ ID NO: 2491191 - RNA, 19 nt, Homo sapiens
  misc_RNA (1)...(19): siRNA sense strand
gggacaagagagaguggaa

SEQ ID NO: 2491192 - RNA, 19 nt, Homo sapiens
  misc_RNA (1)...(19): siRNA sense strand
cugagaugguugagaauca

SEQ ID NO: 2491193 - RNA, 19 nt, Homo sapiens
  misc_RNA (1)...(19): siRNA sense strand
gauugugggucgaggucua

SEQ ID NO: 2491194 - RNA, 19 nt, Homo sapiens
  misc_RNA (1)...(19): siRNA sense strand
ugugaggacugcagugaaa

SEQ ID NO: 2491195 - RNA, 19 nt, Homo sapiens
  misc_RNA (1)...(19): siRNA sense strand
caguagggaaggagaauuu

SEQ ID NO: 2491196 - RNA, 19 nt, Homo sapiens
  misc_RNA (1)...(19): siRNA sense strand
gaacauggggccugggaaa

SEQ ID NO: 2491197 - RNA, 19 nt, Homo sapiens
  misc_RNA (1)...(19): siRNA sense strand
gacaagagagaguggaaau

SEQ ID NO: 2491198 - RNA, 19 nt, Homo sapiens
  misc_RNA (1)...(19): siRNA sense strand
cagaggaugaggagagaga

SEQ ID NO: 2491199 - RNA, 19 nt, Homo sapiens
  misc_RNA (1)...(19): siRNA sense strand
cagaacagacagugacaau

SEQ ID NO: 2491200 - RNA, 19 nt, Homo sapiens
  misc_RNA (1)...(19): siRNA sense strand
gggaagucucugagcaaga

SEQ ID NO: 2491201 - RNA, 19 nt, Homo sapiens
  misc_RNA (1)...(19): siRNA sense strand
agaagaaaauuguggccaa

SEQ ID NO: 2491202 - RNA, 19 nt, Homo sapiens
  misc_RNA (1)...(19): siRNA sense strand
ggacaggauuucuagccua

SEQ ID NO: 2491203 - RNA, 19 nt, Homo sapiens
  misc_RNA (1)...(19): siRNA sense strand
ugacauucaagaagcaaua

SEQ ID NO: 2491204 - RNA, 19 nt, Homo sapiens
  misc_RNA (1)...(19): siRNA sense strand
ggacaagagagaguggaaa

SEQ ID NO: 2491205 - RNA, 19 nt, Homo sapiens
  misc_RNA (1)...(19): siRNA sense strand
ucaucagggugcagaagaa

SEQ ID NO: 2491206 - RNA, 19 nt, Homo sapiens
  misc_RNA (1)...(19): siRNA sense strand
acgaauacaggaugcauua

SEQ ID NO: 2491207 - RNA, 19 nt, Homo sapiens
  misc_RNA (1)...(19): siRNA sense strand
ugauagacccagagaacca

SEQ ID NO: 2491208 - RNA, 19 nt, Homo sapiens
  misc_RNA (1)...(19): siRNA sense strand
gcagugugguguacagcaa

SEQ ID NO: 2491209 - RNA, 19 nt, Homo sapiens
  misc_RNA (1)...(19): siRNA sense strand
ggagaaagcugaaggccag

SEQ ID NO: 2491210 - RNA, 19 nt, Homo sapiens
  misc_RNA (1)...(19): siRNA sense strand
cuguauaauuccagccuga

SEQ ID NO: 2491211 - RNA, 19 nt, Homo sapiens
  misc_RNA (1)...(19): siRNA sense strand
aggcugagaugguugagaa

SEQ ID NO: 2491212 - RNA, 19 nt, Homo sapiens
  misc_RNA (1)...(19): siRNA sense strand
cgcuaaaaguagacaagua

SEQ ID NO: 2491213 - RNA, 19 nt, Homo sapiens
  misc_RNA (1)...(19): siRNA sense strand
ugauaacagugcugauaga

SEQ ID NO: 2491214 - RNA, 19 nt, Homo sapiens
  misc_RNA (1)...(19): siRNA sense strand
ggaggaagacagccagcua

SEQ ID NO: 2491215 - RNA, 19 nt, Homo sapiens
  misc_RNA (1)...(19): siRNA sense strand
acacagagcccaugcuaca

SEQ ID NO: 2491216 - RNA, 19 nt, Homo sapiens
  misc_RNA (1)...(19): siRNA sense strand
uuacaagaaaugccagaaa

SEQ ID NO: 2491217 - RNA, 19 nt, Homo sapiens
  misc_RNA (1)...(19): siRNA sense strand
acaacaugucugaggcaau

SEQ ID NO: 2491218 - RNA, 19 nt, Homo sapiens
  misc_RNA (1)...(19): siRNA sense strand
cugggaagucucugagcaa

SEQ ID NO: 2491219 - RNA, 19 nt, Homo sapiens
  misc_RNA (1)...(19): siRNA sense strand
cgacaugaagaaggaauua

SEQ ID NO: 2491220 - RNA, 19 nt, Homo sapiens
  misc_RNA (1)...(19): siRNA sense strand
aggaggauggccuggauaa

SEQ ID NO: 2491221 - RNA, 19 nt, Homo sapiens
  misc_RNA (1)...(19): siRNA sense strand
ucauguugcuaguaagauu

SEQ ID NO: 2491222 - RNA, 19 nt, Homo sapiens
  misc_RNA (1)...(19): siRNA sense strand
guguguaauauaugggaga

SEQ ID NO: 2491223 - RNA, 19 nt, Homo sapiens
  misc_RNA (1)...(19): siRNA sense strand
ccuuauggcaucauggaau

SEQ ID NO: 2491224 - RNA, 19 nt, Homo sapiens
  misc_RNA (1)...(19): siRNA sense strand
acucgaaggaggaagucua

SEQ ID NO: 2491225 - RNA, 19 nt, Homo sapiens
  misc_RNA (1)...(19): siRNA sense strand
aggagaaagcugaaggcca

SEQ ID NO: 2491226 - RNA, 19 nt, Homo sapiens
  misc_RNA (1)...(19): siRNA sense strand
caaaguuggaagaggcuga

SEQ ID NO: 2491227 - RNA, 19 nt, Homo sapiens
  misc_RNA (1)...(19): siRNA sense strand
aggaggaagucuaucgaca

SEQ ID NO: 2491228 - RNA, 19 nt, Homo sapiens
  misc_RNA (1)...(19): siRNA sense strand
caggcaauggcuaaggaaa

SEQ ID NO: 2491229 - RNA, 19 nt, Homo sapiens
  misc_RNA (1)...(19): siRNA sense strand
aggcaauggcuaaggaaac

SEQ ID NO: 2491230 - RNA, 19 nt, Homo sapiens
  misc_RNA (1)...(19): siRNA sense strand
gaggaugaggagagagagu

SEQ ID NO: 2491231 - RNA, 19 nt, Homo sapiens
  misc_RNA (1)...(19): siRNA sense strand
cuggugagcacuuggacaa

SEQ ID NO: 2491232 - RNA, 19 nt, Homo sapiens
  misc_RNA (1)...(19): siRNA sense strand
guauaauuccagccugaaa

SEQ ID NO: 2491233 - RNA, 19 nt, Homo sapiens
  misc_RNA (1)...(19): siRNA sense strand
uguauuacuucgggauaaa

SEQ ID NO: 2491234 - RNA, 19 nt, Homo sapiens
  misc_RNA (1)...(19): siRNA sense strand
caagcuauccggaaagaau

SEQ ID NO: 2491235 - RNA, 19 nt, Homo sapiens
  misc_RNA (1)...(19): siRNA sense strand
ccggaaagaauuuacaaga

SEQ ID NO: 2491236 - RNA, 19 nt, Homo sapiens
  misc_RNA (1)...(19): siRNA sense strand
ccugauagacccagagaac

SEQ ID NO: 2491237 - RNA, 19 nt, Homo sapiens
  misc_RNA (1)...(19): siRNA sense strand
ggacaagggaggacugugu

SEQ ID NO: 2491238 - RNA, 19 nt, Homo sapiens
  misc_RNA (1)...(19): siRNA sense strand
uugccaagguucagauuga

SEQ ID NO: 2491239 - RNA, 19 nt, Homo sapiens
  misc_RNA (1)...(19): siRNA sense strand
cagaaaaccuccaaacaga

SEQ ID NO: 2491240 - RNA, 19 nt, Homo sapiens
  misc_RNA (1)...(19): siRNA sense strand
cuaauaggcaguuccguaa

SEQ ID NO: 2491241 - RNA, 19 nt, Homo sapiens
  misc_RNA (1)...(19): siRNA sense strand
cccuggaauuugaguggua

SEQ ID NO: 2491242 - RNA, 19 nt, Homo sapiens
  misc_RNA (1)...(19): siRNA sense strand
gaacaaggacugaagccca

SEQ ID NO: 2491243 - RNA, 19 nt, Homo sapiens
  misc_RNA (1)...(19): siRNA sense strand
aauguuuacuugugccaaa

SEQ ID NO: 2491244 - RNA, 19 nt, Homo sapiens
  misc_RNA (1)...(19): siRNA sense strand
aaacaauaccccuggaauu

SEQ ID NO: 2491245 - RNA, 19 nt, Homo sapiens
  misc_RNA (1)...(19): siRNA sense strand
agccagggccacagagcaa

SEQ ID NO: 2491246 - RNA, 19 nt, Homo sapiens
  misc_RNA (1)...(19): siRNA sense strand
agacagaggaugaggagag

SEQ ID NO: 2491247 - RNA, 19 nt, Homo sapiens
  misc_RNA (1)...(19): siRNA sense strand
acaauuacuacuuggauga

SEQ ID NO: 2491248 - RNA, 19 nt, Homo sapiens
  misc_RNA (1)...(19): siRNA sense strand
cagugacaaucaagccaua

SEQ ID NO: 2491249 - RNA, 19 nt, Homo sapiens
  misc_RNA (1)...(19): siRNA sense strand
gcuaaggcagugaacuaua

SEQ ID NO: 2491250 - RNA, 19 nt, Homo sapiens
  misc_RNA (1)...(19): siRNA sense strand
guguaauauaugggagauu

SEQ ID NO: 2491251 - RNA, 19 nt, Homo sapiens
  misc_RNA (1)...(19): siRNA sense strand
gcaaauauauagagcaccu

SEQ ID NO: 2491252 - RNA, 19 nt, Homo sapiens
  misc_RNA (1)...(19): siRNA sense strand
uggaaauguacaugcuaua

SEQ ID NO: 2491253 - RNA, 19 nt, Homo sapiens
  misc_RNA (1)...(19): siRNA sense strand
ccccaaaacaagacggaaa

SEQ ID NO: 2491254 - RNA, 19 nt, Homo sapiens
  misc_RNA (1)...(19): siRNA sense strand
gggaaaaguccaugaaaac

SEQ ID NO: 2491255 - RNA, 19 nt, Homo sapiens
  misc_RNA (1)...(19): siRNA sense strand
aacaagacggaaagugaaa

SEQ ID NO: 2491256 - RNA, 19 nt, Homo sapiens
  misc_RNA (1)...(19): siRNA sense strand
ucgacaagagaauggaaau

SEQ ID NO: 2491257 - RNA, 19 nt, Homo sapiens
  misc_RNA (1)...(19): siRNA sense strand
aguccagcuuagaagacaa

SEQ ID NO: 2491258 - RNA, 19 nt, Homo sapiens
  misc_RNA (1)...(19): siRNA sense strand
ucaggaaauaugaaggaga

SEQ ID NO: 2491259 - RNA, 19 nt, Homo sapiens
  misc_RNA (1)...(19): siRNA sense strand
cuauauugucgaugauuca

SEQ ID NO: 2491260 - RNA, 19 nt, Homo sapiens
  misc_RNA (1)...(19): siRNA sense strand
augcaaauauauagagcac

SEQ ID NO: 2491261 - RNA, 19 nt, Homo sapiens
  misc_RNA (1)...(19): siRNA sense strand
ggugaacgguguggggaaa

SEQ ID NO: 2491262 - RNA, 19 nt, Homo sapiens
  misc_RNA (1)...(19): siRNA sense strand
ugagaugucuucagggagu

SEQ ID NO: 2491263 - RNA, 19 nt, Homo sapiens
  misc_RNA (1)...(19): siRNA sense strand
agcugaggaacgaaagaaa

SEQ ID NO: 2491264 - RNA, 19 nt, Homo sapiens
  misc_RNA (1)...(19): siRNA sense strand
agagaauggaaauguacau

SEQ ID NO: 2491265 - RNA, 19 nt, Homo sapiens
  misc_RNA (1)...(19): siRNA sense strand
cgagauaggccgaaggcua

SEQ ID NO: 2491266 - RNA, 19 nt, Homo sapiens
  misc_RNA (1)...(19): siRNA sense strand
gauuaaacugagugaggaa

SEQ ID NO: 2491267 - RNA, 19 nt, Homo sapiens
  misc_RNA (1)...(19): siRNA sense strand
gugaagaugcugugaacau

SEQ ID NO: 2491268 - RNA, 19 nt, Homo sapiens
  misc_RNA (1)...(19): siRNA sense strand
gaaugauaagaaagcgaaa

SEQ ID NO: 2491269 - RNA, 19 nt, Homo sapiens
  misc_RNA (1)...(19): siRNA sense strand
cauaaaagcacaaggugaa

SEQ ID NO: 2491270 - RNA, 19 nt, Homo sapiens
  misc_RNA (1)...(19): siRNA sense strand
aauuagaaguagagccuga

SEQ ID NO: 2491271 - RNA, 19 nt, Homo sapiens
  misc_RNA (1)...(19): siRNA sense strand
aggaaaaguucuugaagga

SEQ ID NO: 2491272 - RNA, 19 nt, Homo sapiens
  misc_RNA (1)...(19): siRNA sense strand
aguuguaaaugcaaaggaa

SEQ ID NO: 2491273 - RNA, 19 nt, Homo sapiens
  misc_RNA (1)...(19): siRNA sense strand
ggaucugggcaaagcaaau

SEQ ID NO: 2491274 - RNA, 19 nt, Homo sapiens
  misc_RNA (1)...(19): siRNA sense strand
auucaugggaggaggucaa

SEQ ID NO: 2491275 - RNA, 19 nt, Homo sapiens
  misc_RNA (1)...(19): siRNA sense strand
guuguaaaugcaaaggaaa

SEQ ID NO: 2491276 - RNA, 19 nt, Homo sapiens
  misc_RNA (1)...(19): siRNA sense strand
cuauauaaauggaacagca

SEQ ID NO: 2491277 - RNA, 19 nt, Homo sapiens
  misc_RNA (1)...(19): siRNA sense strand
gguugguucaugagguuua

SEQ ID NO: 2491278 - RNA, 19 nt, Homo sapiens
  misc_RNA (1)...(19): siRNA sense strand
caacauucccuuaagccaa

SEQ ID NO: 2491279 - RNA, 19 nt, Homo sapiens
  misc_RNA (1)...(19): siRNA sense strand
guucaugagguuuaaggaa

SEQ ID NO: 2491280 - RNA, 19 nt, Homo sapiens
  misc_RNA (1)...(19): siRNA sense strand
ggaggaaguaagugcagau

SEQ ID NO: 2491281 - RNA, 19 nt, Homo sapiens
  misc_RNA (1)...(19): siRNA sense strand
gugaggaagguaugucaaa

SEQ ID NO: 2491282 - RNA, 19 nt, Homo sapiens
  misc_RNA (1)...(19): siRNA sense strand
ccaucaaccucgaggcaag

SEQ ID NO: 2491283 - RNA, 19 nt, Homo sapiens
  misc_RNA (1)...(19): siRNA sense strand
cccuuaagccaaagccuaa

SEQ ID NO: 2491284 - RNA, 19 nt, Homo sapiens
  misc_RNA (1)...(19): siRNA sense strand
uuucauagcuagagaggag

SEQ ID NO: 2491285 - RNA, 19 nt, Homo sapiens
  misc_RNA (1)...(19): siRNA sense strand
augauaagaaagcgaaaca

SEQ ID NO: 2491286 - RNA, 19 nt, Homo sapiens
  misc_RNA (1)...(19): siRNA sense strand
acauaaaagcacaagguga

SEQ ID NO: 2491287 - RNA, 19 nt, Homo sapiens
  misc_RNA (1)...(19): siRNA sense strand
gcccauggaucaaggggua

SEQ ID NO: 2491288 - RNA, 19 nt, Homo sapiens
  misc_RNA (1)...(19): siRNA sense strand
aaguagagccugaagaugu

SEQ ID NO: 2491289 - RNA, 19 nt, Homo sapiens
  misc_RNA (1)...(19): siRNA sense strand
cuucaaagcuucaaaggac

SEQ ID NO: 2491290 - RNA, 19 nt, Homo sapiens
  misc_RNA (1)...(19): siRNA sense strand
ugaaaugacaacaaaggau

SEQ ID NO: 2491291 - RNA, 19 nt, Homo sapiens
  misc_RNA (1)...(19): siRNA sense strand
ccaagagcucugauggaga

SEQ ID NO: 2491292 - RNA, 19 nt, Homo sapiens
  misc_RNA (1)...(19): siRNA sense strand
gcuucaaaggacaggcuga

SEQ ID NO: 2491293 - RNA, 19 nt, Homo sapiens
  misc_RNA (1)...(19): siRNA sense strand
ugggcaaagcaaauugaaa

SEQ ID NO: 2491294 - RNA, 19 nt, Homo sapiens
  misc_RNA (1)...(19): siRNA sense strand
cuuuaacagaugaggaguu

SEQ ID NO: 2491295 - RNA, 19 nt, Homo sapiens
  misc_RNA (1)...(19): siRNA sense strand
uuauggaugcgcaaagaaa

SEQ ID NO: 2491296 - RNA, 19 nt, Homo sapiens
  misc_RNA (1)...(19): siRNA sense strand
gggcuaaugcagcugguga

SEQ ID NO: 2491297 - RNA, 19 nt, Homo sapiens
  misc_RNA (1)...(19): siRNA sense strand
gugcuauauaaauggaaca

SEQ ID NO: 2491298 - RNA, 19 nt, Homo sapiens
  misc_RNA (1)...(19): siRNA sense strand
uggagauauacgaggagau

SEQ ID NO: 2491299 - RNA, 19 nt, Homo sapiens
  misc_RNA (1)...(19): siRNA sense strand
agaaguagagccugaagau

SEQ ID NO: 2491300 - RNA, 19 nt, Homo sapiens
  misc_RNA (1)...(19): siRNA sense strand
gcggcaaacaguuagccaa

SEQ ID NO: 2491301 - RNA, 19 nt, Homo sapiens
  misc_RNA (1)...(19): siRNA sense strand
acgaaugauaagaaagcga

SEQ ID NO: 2491302 - RNA, 19 nt, Homo sapiens
  misc_RNA (1)...(19): siRNA sense strand
ggauagaagaucagaccag

SEQ ID NO: 2491303 - RNA, 19 nt, Homo sapiens
  misc_RNA (1)...(19): siRNA sense strand
agaauuagaaguagagccu

SEQ ID NO: 2491304 - RNA, 19 nt, Homo sapiens
  misc_RNA (1)...(19): siRNA sense strand
caguuagccaaguuguaaa

SEQ ID NO: 2491305 - RNA, 19 nt, Homo sapiens
  misc_RNA (1)...(19): siRNA sense strand
gcucuagcugccauggaua

SEQ ID NO: 2491306 - RNA, 19 nt, Homo sapiens
  misc_RNA (1)...(19): siRNA sense strand
aucgcaugcuacagagaaa

SEQ ID NO: 2491307 - RNA, 19 nt, Homo sapiens
  misc_RNA (1)...(19): siRNA sense strand
caugaaaggaagagucaac

SEQ ID NO: 2491308 - RNA, 19 nt, Homo sapiens
  misc_RNA (1)...(19): siRNA sense strand
guucuugaaggaaguuaaa

SEQ ID NO: 2491309 - RNA, 19 nt, Homo sapiens
  misc_RNA (1)...(19): siRNA sense strand
augaacacacgaaugauaa

SEQ ID NO: 2491310 - RNA, 19 nt, Homo sapiens
  misc_RNA (1)...(19): siRNA sense strand
cgaaugauaagaaagcgaa

SEQ ID NO: 2491311 - RNA, 19 nt, Homo sapiens
  misc_RNA (1)...(19): siRNA sense strand
gcgaaaagcuucaccgaug

SEQ ID NO: 2491312 - RNA, 19 nt, Homo sapiens
  misc_RNA (1)...(19): siRNA sense strand
gaacaaagcccuaacucuc

SEQ ID NO: 2491313 - RNA, 19 nt, Homo sapiens
  misc_RNA (1)...(19): siRNA sense strand
ggaguuuggaagaaguuga

SEQ ID NO: 2491314 - RNA, 19 nt, Homo sapiens
  misc_RNA (1)...(19): siRNA sense strand
guguggaagcugcagaaga

SEQ ID NO: 2491315 - RNA, 19 nt, Homo sapiens
  misc_RNA (1)...(19): siRNA sense strand
guuuaaggaaagaagccau

SEQ ID NO: 2491316 - RNA, 19 nt, Homo sapiens
  misc_RNA (1)...(19): siRNA sense strand
cuacucuacccgugcuaua

SEQ ID NO: 2491317 - RNA, 19 nt, Homo sapiens
  misc_RNA (1)...(19): siRNA sense strand
agugaaaggaagagucgca

SEQ ID NO: 2491318 - RNA, 19 nt, Homo sapiens
  misc_RNA (1)...(19): siRNA sense strand
cgucaaggccucaggguac

SEQ ID NO: 2491319 - RNA, 19 nt, Homo sapiens
  misc_RNA (1)...(19): siRNA sense strand
acguggacuugcuggacaa

SEQ ID NO: 2491320 - RNA, 19 nt, Homo sapiens
  misc_RNA (1)...(19): siRNA sense strand
gcuugugagagcagaguca

SEQ ID NO: 2491321 - RNA, 19 nt, Homo sapiens
  misc_RNA (1)...(19): siRNA sense strand
ccucaggguacaaggucau

SEQ ID NO: 2491322 - RNA, 19 nt, Homo sapiens
  misc_RNA (1)...(19): siRNA sense strand
gcaaggagaagucccggaa

SEQ ID NO: 2491323 - RNA, 19 nt, Homo sapiens
  misc_RNA (1)...(19): siRNA sense strand
acgucaaggccucagggua

SEQ ID NO: 2491324 - RNA, 19 nt, Homo sapiens
  misc_RNA (1)...(19): siRNA sense strand
ggauagaacuggaggaacc

SEQ ID NO: 2491325 - RNA, 19 nt, Homo sapiens
  misc_RNA (1)...(19): siRNA sense strand
cuauaaauaucgagaggac

SEQ ID NO: 2491326 - RNA, 19 nt, Homo sapiens
  misc_RNA (1)...(19): siRNA sense strand
ggaccaacgugaaggaggu

SEQ ID NO: 2491327 - RNA, 19 nt, Homo sapiens
  misc_RNA (1)...(19): siRNA sense strand
acgugaaggaggucaggua

SEQ ID NO: 2491328 - RNA, 19 nt, Homo sapiens
  misc_RNA (1)...(19): siRNA sense strand
ugggauagaacuggaggaa

SEQ ID NO: 2491329 - RNA, 19 nt, Homo sapiens
  misc_RNA (1)...(19): siRNA sense strand
gaggaaugcugacucgaca

SEQ ID NO: 2491330 - RNA, 19 nt, Homo sapiens
  misc_RNA (1)...(19): siRNA sense strand
ggauagaacuggaggaacc

SEQ ID NO: 2491331 - RNA, 19 nt, Homo sapiens
  misc_RNA (1)...(19): siRNA sense strand
cuauaaauaucgagaggac

SEQ ID NO: 2491332 - RNA, 19 nt, Homo sapiens
  misc_RNA (1)...(19): siRNA sense strand
ggaccaacgugaaggaggu

SEQ ID NO: 2491333 - RNA, 19 nt, Homo sapiens
  misc_RNA (1)...(19): siRNA sense strand
acgugaaggaggucaggua

SEQ ID NO: 2491334 - RNA, 19 nt, Homo sapiens
  misc_RNA (1)...(19): siRNA sense strand
ugggauagaacuggaggaa

SEQ ID NO: 2491335 - RNA, 19 nt, Homo sapiens
  misc_RNA (1)...(19): siRNA sense strand
gaggaaugcugacucgaca

SEQ ID NO: 2491336 - RNA, 19 nt, Homo sapiens
  misc_RNA (1)...(19): siRNA sense strand
ggucaagcagagagagaau

SEQ ID NO: 2491337 - RNA, 19 nt, Homo sapiens
  misc_RNA (1)...(19): siRNA sense strand
cgcaaaugccacagguuua

SEQ ID NO: 2491338 - RNA, 19 nt, Homo sapiens
  misc_RNA (1)...(19): siRNA sense strand
ccaaaguacuucugggugu

SEQ ID NO: 2491339 - RNA, 19 nt, Homo sapiens
  misc_RNA (1)...(19): siRNA sense strand
gaaucuacaaccagagcaa

SEQ ID NO: 2491340 - RNA, 19 nt, Homo sapiens
  misc_RNA (1)...(19): siRNA sense strand
aauacauggaugaaggaaa

SEQ ID NO: 2491341 - RNA, 19 nt, Homo sapiens
  misc_RNA (1)...(19): siRNA sense strand
gugaaagugcugaggacca

SEQ ID NO: 2491342 - RNA, 19 nt, Homo sapiens
  misc_RNA (1)...(19): siRNA sense strand
gugcugaggaccagaccaa

SEQ ID NO: 2491343 - RNA, 19 nt, Homo sapiens
  misc_RNA (1)...(19): siRNA sense strand
agaugaaacugcugccaga

SEQ ID NO: 2491344 - RNA, 19 nt, Homo sapiens
  misc_RNA (1)...(19): siRNA sense strand
acagaaaacagaugggauu

SEQ ID NO: 2491345 - RNA, 19 nt, Homo sapiens
  misc_RNA (1)...(19): siRNA sense strand
agguaugaacauugaugaa

SEQ ID NO: 2491346 - RNA, 19 nt, Homo sapiens
  misc_RNA (1)...(19): siRNA sense strand
gcuugauagaguuaugaua

SEQ ID NO: 2491347 - RNA, 19 nt, Homo sapiens
  misc_RNA (1)...(19): siRNA sense strand
aaacagaacugaauccaga

SEQ ID NO: 2491348 - RNA, 19 nt, Homo sapiens
  misc_RNA (1)...(19): siRNA sense strand
gggaauggaaggugauuuu

SEQ ID NO: 2491349 - RNA, 19 nt, Homo sapiens
  misc_RNA (1)...(19): siRNA sense strand
ggaugaaggaaaugaccca

SEQ ID NO: 2491350 - RNA, 19 nt, Homo sapiens
  misc_RNA (1)...(19): siRNA sense strand
cggaauuggugaauccaca

SEQ ID NO: 2491351 - RNA, 19 nt, Homo sapiens
  misc_RNA (1)...(19): siRNA sense strand
aauuuauggugcugaucaa

SEQ ID NO: 2491352 - RNA, 19 nt, Homo sapiens
  misc_RNA (1)...(19): siRNA sense strand
acuucuggguguaggucaa

SEQ ID NO: 2491353 - RNA, 19 nt, Homo sapiens
  misc_RNA (1)...(19): siRNA sense strand
uguugacaauuaaggacaa

SEQ ID NO: 2491354 - RNA, 19 nt, Homo sapiens
  misc_RNA (1)...(19): siRNA sense strand
gaaacugcugccagagaau

SEQ ID NO: 2491355 - RNA, 19 nt, Homo sapiens
  misc_RNA (1)...(19): siRNA sense strand
gugaaguauuugccaccaa

SEQ ID NO: 2491356 - RNA, 19 nt, Homo sapiens
  misc_RNA (1)...(19): siRNA sense strand
uuccaaaggcugcugguaa

SEQ ID NO: 2491357 - RNA, 19 nt, Homo sapiens
  misc_RNA (1)...(19): siRNA sense strand
agaugauggcagaauaauu

SEQ ID NO: 2491358 - RNA, 19 nt, Homo sapiens
  misc_RNA (1)...(19): siRNA sense strand
gguacagaagcauuugaaa

SEQ ID NO: 2491359 - RNA, 19 nt, Homo sapiens
  misc_RNA (1)...(19): siRNA sense strand
gaguucagaugauggcaga

SEQ ID NO: 2491360 - RNA, 19 nt, Homo sapiens
  misc_RNA (1)...(19): siRNA sense strand
acuggauuaucuugaacaa

SEQ ID NO: 2491361 - RNA, 19 nt, Homo sapiens
  misc_RNA (1)...(19): siRNA sense strand
uuaagaaacuugaggaagg

SEQ ID NO: 2491362 - RNA, 19 nt, Homo sapiens
  misc_RNA (1)...(19): siRNA sense strand
cagugaaagugcugaggac

SEQ ID NO: 2491363 - RNA, 19 nt, Homo sapiens
  misc_RNA (1)...(19): siRNA sense strand
agaacugaauccagagaag

SEQ ID NO: 2491364 - RNA, 19 nt, Homo sapiens
  misc_RNA (1)...(19): siRNA sense strand
augaaggaaaugacccaaa

SEQ ID NO: 2491365 - RNA, 19 nt, Homo sapiens
  misc_RNA (1)...(19): siRNA sense strand
ccagaaauacauggaugaa

SEQ ID NO: 2491366 - RNA, 19 nt, Homo sapiens
  misc_RNA (1)...(19): siRNA sense strand
agcaaaagccuuccaguaa

SEQ ID NO: 2491367 - RNA, 19 nt, Homo sapiens
  misc_RNA (1)...(19): siRNA sense strand
cagagaagcauauuagcca

SEQ ID NO: 2491368 - RNA, 19 nt, Homo sapiens
  misc_RNA (1)...(19): siRNA sense strand
auccacaguucgugauauu

SEQ ID NO: 2491369 - RNA, 19 nt, Homo sapiens
  misc_RNA (1)...(19): siRNA sense strand
cuuugggaauggaagguga

SEQ ID NO: 2491370 - RNA, 19 nt, Homo sapiens
  misc_RNA (1)...(19): siRNA sense strand
cauugaugaaggagccauu

SEQ ID NO: 2491371 - RNA, 19 nt, Homo sapiens
  misc_RNA (1)...(19): siRNA sense strand
cuaccaucaaggacauuaa

SEQ ID NO: 2491372 - RNA, 19 nt, Homo sapiens
  misc_RNA (1)...(19): siRNA sense strand
ggguguaggucaagcagag

SEQ ID NO: 2491373 - RNA, 19 nt, Homo sapiens
  misc_RNA (1)...(19): siRNA sense strand
acguaaaucuaugaaguca

SEQ ID NO: 2491374 - RNA, 19 nt, Homo sapiens
  misc_RNA (1)...(19): siRNA sense strand
uaggucaagcagagagaga

SEQ ID NO: 2491375 - RNA, 19 nt, Homo sapiens
  misc_RNA (1)...(19): siRNA sense strand
aguucuagccacuguaaaa

SEQ ID NO: 2491376 - RNA, 19 nt, Homo sapiens
  misc_RNA (1)...(19): siRNA sense strand
agagcuuggaacaugguaa

SEQ ID NO: 2491377 - RNA, 19 nt, Homo sapiens
  misc_RNA (1)...(19): siRNA sense strand
gagcagagcuugcgccuca

SEQ ID NO: 2491378 - RNA, 19 nt, Homo sapiens
  misc_RNA (1)...(19): siRNA sense strand
uggcugagcuggaggggaa

SEQ ID NO: 2491379 - RNA, 19 nt, Homo sapiens
  misc_RNA (1)...(19): siRNA sense strand
acgugaaggacgacacaau

SEQ ID NO: 2491380 - RNA, 19 nt, Homo sapiens
  misc_RNA (1)...(19): siRNA sense strand
gguucaugaaacaguggaa

SEQ ID NO: 2491381 - RNA, 19 nt, Homo sapiens
  misc_RNA (1)...(19): siRNA sense strand
acgccuacgugaaggacga

SEQ ID NO: 2491382 - RNA, 19 nt, Homo sapiens
  misc_RNA (1)...(19): siRNA sense strand
gaacucaggagaaggcuca

SEQ ID NO: 2491383 - RNA, 19 nt, Homo sapiens
  misc_RNA (1)...(19): siRNA sense strand
ggcuguaccugaauggaga

SEQ ID NO: 2491384 - RNA, 19 nt, Homo sapiens
  misc_RNA (1)...(19): siRNA sense strand
ccuucaugcugcuggacca

SEQ ID NO: 2491385 - RNA, 19 nt, Homo sapiens
  misc_RNA (1)...(19): siRNA sense strand
agucugugcaagagcauga

SEQ ID NO: 2491386 - RNA, 19 nt, Homo sapiens
  misc_RNA (1)...(19): siRNA sense strand
ggaccaagcuggaagccaa

SEQ ID NO: 2491387 - RNA, 19 nt, Homo sapiens
  misc_RNA (1)...(19): siRNA sense strand
cgguagagggugagaaaca

SEQ ID NO: 2491388 - RNA, 19 nt, Homo sapiens
  misc_RNA (1)...(19): siRNA sense strand
gcucggugcuggaggcaaa

SEQ ID NO: 2491389 - RNA, 19 nt, Homo sapiens
  misc_RNA (1)...(19): siRNA sense strand
gcgagagccuggagaagaa

SEQ ID NO: 2491390 - RNA, 19 nt, Homo sapiens
  misc_RNA (1)...(19): siRNA sense strand
gggagaaguuucaggacca

SEQ ID NO: 2491391 - RNA, 19 nt, Homo sapiens
  misc_RNA (1)...(19): siRNA sense strand
gcauauaugaagaaggcau

SEQ ID NO: 2491392 - RNA, 19 nt, Homo sapiens
  misc_RNA (1)...(19): siRNA sense strand
gagcagacgugaaggcgca

SEQ ID NO: 2491393 - RNA, 19 nt, Homo sapiens
  misc_RNA (1)...(19): siRNA sense strand
gacgguagagggugagaaa

SEQ ID NO: 2491394 - RNA, 19 nt, Homo sapiens
  misc_RNA (1)...(19): siRNA sense strand
gagcagaaggucuuggaga

SEQ ID NO: 2491395 - RNA, 19 nt, Homo sapiens
  misc_RNA (1)...(19): siRNA sense strand
ucgagacgguagaggguga

SEQ ID NO: 2491396 - RNA, 19 nt, Homo sapiens
  misc_RNA (1)...(19): siRNA sense strand
agaaacagcaggagcacga

SEQ ID NO: 2491397 - RNA, 19 nt, Homo sapiens
  misc_RNA (1)...(19): siRNA sense strand
gugagaaacagcaggagca

SEQ ID NO: 2491398 - RNA, 19 nt, Homo sapiens
  misc_RNA (1)...(19): siRNA sense strand
ugaaagaauacgagagcug

SEQ ID NO: 2491399 - RNA, 19 nt, Homo sapiens
  misc_RNA (1)...(19): siRNA sense strand
ggucagagcuccugcagag

SEQ ID NO: 2491400 - RNA, 19 nt, Homo sapiens
  misc_RNA (1)...(19): siRNA sense strand
ccuuaaugcugcucgacca

SEQ ID NO: 2491401 - RNA, 19 nt, Homo sapiens
  misc_RNA (1)...(19): siRNA sense strand
cagucaacgacaugaacau

SEQ ID NO: 2491402 - RNA, 19 nt, Homo sapiens
  misc_RNA (1)...(19): siRNA sense strand
ggugcgagagccuggagaa

SEQ ID NO: 2491403 - RNA, 19 nt, Homo sapiens
  misc_RNA (1)...(19): siRNA sense strand
agaagaagacggccacuuu

SEQ ID NO: 2491404 - RNA, 19 nt, Homo sapiens
  misc_RNA (1)...(19): siRNA sense strand
cuggagaagaagacggcca

SEQ ID NO: 2491405 - RNA, 19 nt, Homo sapiens
  misc_RNA (1)...(19): siRNA sense strand
guaucuaccugaacggcga

SEQ ID NO: 2491406 - RNA, 19 nt, Homo sapiens
  misc_RNA (1)...(19): siRNA sense strand
gguuagagugguuggcaca

SEQ ID NO: 2491407 - RNA, 19 nt, Homo sapiens
  misc_RNA (1)...(19): siRNA sense strand
cagccaaccgagagcgcaa

SEQ ID NO: 2491408 - RNA, 19 nt, Homo sapiens
  misc_RNA (1)...(19): siRNA sense strand
gaguauguaaggaggagau

SEQ ID NO: 2491409 - RNA, 19 nt, Homo sapiens
  misc_RNA (1)...(19): siRNA sense strand
uuguggaccuggaggguga

SEQ ID NO: 2491410 - RNA, 19 nt, Homo sapiens
  misc_RNA (1)...(19): siRNA sense strand
aggagaagcugcuggcgga

SEQ ID NO: 2491411 - RNA, 19 nt, Homo sapiens
  misc_RNA (1)...(19): siRNA sense strand
ucugcaagaauaaggagaa

SEQ ID NO: 2491412 - RNA, 19 nt, Homo sapiens
  misc_RNA (1)...(19): siRNA sense strand
ccgagaagauccaggugcu

SEQ ID NO: 2491413 - RNA, 19 nt, Homo sapiens
  misc_RNA (1)...(19): siRNA sense strand
cgagaugcuucuuugggau

SEQ ID NO: 2491414 - RNA, 19 nt, Homo sapiens
  misc_RNA (1)...(19): siRNA sense strand
cuuuggugcaugugaucaa

SEQ ID NO: 2491415 - RNA, 19 nt, Homo sapiens
  misc_RNA (1)...(19): siRNA sense strand
augaaggagucuuggacaa

SEQ ID NO: 2491416 - RNA, 19 nt, Homo sapiens
  misc_RNA (1)...(19): siRNA sense strand
cgacaaaggaagagagacc

SEQ ID NO: 2491417 - RNA, 19 nt, Homo sapiens
  misc_RNA (1)...(19): siRNA sense strand
gugaguaugaggagcgcaa

SEQ ID NO: 2491418 - RNA, 19 nt, Homo sapiens
  misc_RNA (1)...(19): siRNA sense strand
cggcaggacaacaaggaga

SEQ ID NO: 2491419 - RNA, 19 nt, Homo sapiens
  misc_RNA (1)...(19): siRNA sense strand
ccaugaacgauguggagga

SEQ ID NO: 2491420 - RNA, 19 nt, Homo sapiens
  misc_RNA (1)...(19): siRNA sense strand
gugaggugccagagcgaga

SEQ ID NO: 2491421 - RNA, 19 nt, Homo sapiens
  misc_RNA (1)...(19): siRNA sense strand
ugccagagcgagaggaaca

SEQ ID NO: 2491422 - RNA, 19 nt, Homo sapiens
  misc_RNA (1)...(19): siRNA sense strand
aggccgagaagaagaaaga

SEQ ID NO: 2491423 - RNA, 19 nt, Homo sapiens
  misc_RNA (1)...(19): siRNA sense strand
agaagaagaaagagcugau

SEQ ID NO: 2491424 - RNA, 19 nt, Homo sapiens
  misc_RNA (1)...(19): siRNA sense strand
ggaagagagaccagcggga

SEQ ID NO: 2491425 - RNA, 19 nt, Homo sapiens
  misc_RNA (1)...(19): siRNA sense strand
ugaugaaggcgcagagucu

SEQ ID NO: 2491426 - RNA, 19 nt, Homo sapiens
  misc_RNA (1)...(19): siRNA sense strand
ugguggagguggacgacau

SEQ ID NO: 2491427 - RNA, 19 nt, Homo sapiens
  misc_RNA (1)...(19): siRNA sense strand
gcagagguuucaaagccaa

SEQ ID NO: 2491428 - RNA, 19 nt, Homo sapiens
  misc_RNA (1)...(19): siRNA sense strand
ggugccagagcgagaggaa

SEQ ID NO: 2491429 - RNA, 19 nt, Homo sapiens
  misc_RNA (1)...(19): siRNA sense strand
aagagagaccagcgggaca

SEQ ID NO: 2491430 - RNA, 19 nt, Homo sapiens
  misc_RNA (1)...(19): siRNA sense strand
ccucagaaccgacgccaga

SEQ ID NO: 2491431 - RNA, 19 nt, Homo sapiens
  misc_RNA (1)...(19): siRNA sense strand
gcaagaagccugaccccaa

SEQ ID NO: 2491432 - RNA, 19 nt, Homo sapiens
  misc_RNA (1)...(19): siRNA sense strand
cauucaccaucgagaucaa

SEQ ID NO: 2491433 - RNA, 19 nt, Homo sapiens
  misc_RNA (1)...(19): siRNA sense strand
cuauugaggaugaaggagu

SEQ ID NO: 2491434 - RNA, 19 nt, Homo sapiens
  misc_RNA (1)...(19): siRNA sense strand
agcgagaggaacaggaaca

SEQ ID NO: 2491435 - RNA, 19 nt, Homo sapiens
  misc_RNA (1)...(19): siRNA sense strand
gaacaaagcaccagaaggg

SEQ ID NO: 2491436 - RNA, 19 nt, Homo sapiens
  misc_RNA (1)...(19): siRNA sense strand
cggcacacaggcuggaaca

SEQ ID NO: 2491437 - RNA, 19 nt, Homo sapiens
  misc_RNA (1)...(19): siRNA sense strand
cuucgugagcuccgacaaa

SEQ ID NO: 2491438 - RNA, 19 nt, Homo sapiens
  misc_RNA (1)...(19): siRNA sense strand
agaaagagcugaugaaggc

SEQ ID NO: 2491439 - RNA, 19 nt, Homo sapiens
  misc_RNA (1)...(19): siRNA sense strand
acgucgacauccagaacuu

SEQ ID NO: 2491440 - RNA, 19 nt, Homo sapiens
  misc_RNA (1)...(19): siRNA sense strand
augaaggagucuuggacaa

SEQ ID NO: 2491441 - RNA, 19 nt, Homo sapiens
  misc_RNA (1)...(19): siRNA sense strand
cgacaaaggaagagagacc

SEQ ID NO: 2491442 - RNA, 19 nt, Homo sapiens
  misc_RNA (1)...(19): siRNA sense strand
gugaguaugaggagcgcaa

SEQ ID NO: 2491443 - RNA, 19 nt, Homo sapiens
  misc_RNA (1)...(19): siRNA sense strand
cggcaggacaacaaggaga

SEQ ID NO: 2491444 - RNA, 19 nt, Homo sapiens
  misc_RNA (1)...(19): siRNA sense strand
ccaugaacgauguggagga

SEQ ID NO: 2491445 - RNA, 19 nt, Homo sapiens
  misc_RNA (1)...(19): siRNA sense strand
gugaggugccagagcgaga

SEQ ID NO: 2491446 - RNA, 19 nt, Homo sapiens
  misc_RNA (1)...(19): siRNA sense strand
ugccagagcgagaggaaca

SEQ ID NO: 2491447 - RNA, 19 nt, Homo sapiens
  misc_RNA (1)...(19): siRNA sense strand
aggccgagaagaagaaaga

SEQ ID NO: 2491448 - RNA, 19 nt, Homo sapiens
  misc_RNA (1)...(19): siRNA sense strand
agaagaagaaagagcugau

SEQ ID NO: 2491449 - RNA, 19 nt, Homo sapiens
  misc_RNA (1)...(19): siRNA sense strand
ggaagagagaccagcggga

SEQ ID NO: 2491450 - RNA, 19 nt, Homo sapiens
  misc_RNA (1)...(19): siRNA sense strand
ugaugaaggcgcagagucu

SEQ ID NO: 2491451 - RNA, 19 nt, Homo sapiens
  misc_RNA (1)...(19): siRNA sense strand
gcagagguuucaaagccaa

SEQ ID NO: 2491452 - RNA, 19 nt, Homo sapiens
  misc_RNA (1)...(19): siRNA sense strand
ggugccagagcgagaggaa

SEQ ID NO: 2491453 - RNA, 19 nt, Homo sapiens
  misc_RNA (1)...(19): siRNA sense strand
aagagagaccagcgggaca

SEQ ID NO: 2491454 - RNA, 19 nt, Homo sapiens
  misc_RNA (1)...(19): siRNA sense strand
ccucagaaccgacgccaga

SEQ ID NO: 2491455 - RNA, 19 nt, Homo sapiens
  misc_RNA (1)...(19): siRNA sense strand
cauucaccaucgagaucaa

SEQ ID NO: 2491456 - RNA, 19 nt, Homo sapiens
  misc_RNA (1)...(19): siRNA sense strand
cuauugaggaugaaggagu

SEQ ID NO: 2491457 - RNA, 19 nt, Homo sapiens
  misc_RNA (1)...(19): siRNA sense strand
agcgagaggaacaggaaca

SEQ ID NO: 2491458 - RNA, 19 nt, Homo sapiens
  misc_RNA (1)...(19): siRNA sense strand
gaacaaagcaccagaaggg

SEQ ID NO: 2491459 - RNA, 19 nt, Homo sapiens
  misc_RNA (1)...(19): siRNA sense strand
cggcacacaggcuggaaca

SEQ ID NO: 2491460 - RNA, 19 nt, Homo sapiens
  misc_RNA (1)...(19): siRNA sense strand
cuucgugagcuccgacaaa

SEQ ID NO: 2491461 - RNA, 19 nt, Homo sapiens
  misc_RNA (1)...(19): siRNA sense strand
agaaagagcugaugaaggc

SEQ ID NO: 2491462 - RNA, 19 nt, Homo sapiens
  misc_RNA (1)...(19): siRNA sense strand
acgucgacauccagaacuu

SEQ ID NO: 2491463 - RNA, 19 nt, Homo sapiens
  misc_RNA (1)...(19): siRNA sense strand
augaaggagucuuggacaa

SEQ ID NO: 2491464 - RNA, 19 nt, Homo sapiens
  misc_RNA (1)...(19): siRNA sense strand
cgacaaaggaagagagacc

SEQ ID NO: 2491465 - RNA, 19 nt, Homo sapiens
  misc_RNA (1)...(19): siRNA sense strand
gugaguaugaggagcgcaa

SEQ ID NO: 2491466 - RNA, 19 nt, Homo sapiens
  misc_RNA (1)...(19): siRNA sense strand
cggcaggacaacaaggaga

SEQ ID NO: 2491467 - RNA, 19 nt, Homo sapiens
  misc_RNA (1)...(19): siRNA sense strand
ccaugaacgauguggagga

SEQ ID NO: 2491468 - RNA, 19 nt, Homo sapiens
  misc_RNA (1)...(19): siRNA sense strand
gugaggugccagagcgaga

SEQ ID NO: 2491469 - RNA, 19 nt, Homo sapiens
  misc_RNA (1)...(19): siRNA sense strand
ugccagagcgagaggaaca

SEQ ID NO: 2491470 - RNA, 19 nt, Homo sapiens
  misc_RNA (1)...(19): siRNA sense strand
aggccgagaagaagaaaga

SEQ ID NO: 2491471 - RNA, 19 nt, Homo sapiens
  misc_RNA (1)...(19): siRNA sense strand
agaagaagaaagagcugau

SEQ ID NO: 2491472 - RNA, 19 nt, Homo sapiens
  misc_RNA (1)...(19): siRNA sense strand
ggaagagagaccagcggga

SEQ ID NO: 2491473 - RNA, 19 nt, Homo sapiens
  misc_RNA (1)...(19): siRNA sense strand
ugaugaaggcgcagagucu

SEQ ID NO: 2491474 - RNA, 19 nt, Homo sapiens
  misc_RNA (1)...(19): siRNA sense strand
ugguggagguggacgacau

SEQ ID NO: 2491475 - RNA, 19 nt, Homo sapiens
  misc_RNA (1)...(19): siRNA sense strand
gcagagguuucaaagccaa

SEQ ID NO: 2491476 - RNA, 19 nt, Homo sapiens
  misc_RNA (1)...(19): siRNA sense strand
ggugccagagcgagaggaa

SEQ ID NO: 2491477 - RNA, 19 nt, Homo sapiens
  misc_RNA (1)...(19): siRNA sense strand
aagagagaccagcgggaca

SEQ ID NO: 2491478 - RNA, 19 nt, Homo sapiens
  misc_RNA (1)...(19): siRNA sense strand
ccucagaaccgacgccaga

SEQ ID NO: 2491479 - RNA, 19 nt, Homo sapiens
  misc_RNA (1)...(19): siRNA sense strand
gcaagaagccugaccccaa

SEQ ID NO: 2491480 - RNA, 19 nt, Homo sapiens
  misc_RNA (1)...(19): siRNA sense strand
cauucaccaucgagaucaa

SEQ ID NO: 2491481 - RNA, 19 nt, Homo sapiens
  misc_RNA (1)...(19): siRNA sense strand
cuauugaggaugaaggagu

SEQ ID NO: 2491482 - RNA, 19 nt, Homo sapiens
  misc_RNA (1)...(19): siRNA sense strand
agcgagaggaacaggaaca

SEQ ID NO: 2491483 - RNA, 19 nt, Homo sapiens
  misc_RNA (1)...(19): siRNA sense strand
gaacaaagcaccagaaggg

SEQ ID NO: 2491484 - RNA, 19 nt, Homo sapiens
  misc_RNA (1)...(19): siRNA sense strand
cggcacacaggcuggaaca

SEQ ID NO: 2491485 - RNA, 19 nt, Homo sapiens
  misc_RNA (1)...(19): siRNA sense strand
cuucgugagcuccgacaaa

SEQ ID NO: 2491486 - RNA, 19 nt, Homo sapiens
  misc_RNA (1)...(19): siRNA sense strand
agaaagagcugaugaaggc

SEQ ID NO: 2491487 - RNA, 19 nt, Homo sapiens
  misc_RNA (1)...(19): siRNA sense strand
acgucgacauccagaacuu

SEQ ID NO: 2491488 - RNA, 19 nt, Homo sapiens
  misc_RNA (1)...(19): siRNA sense strand
agcaagaggaaguggagaa

SEQ ID NO: 2491489 - RNA, 19 nt, Homo sapiens
  misc_RNA (1)...(19): siRNA sense strand
ccguguacuccaaggacaa

SEQ ID NO: 2491490 - RNA, 19 nt, Homo sapiens
  misc_RNA (1)...(19): siRNA sense strand
cagccgaagaggagcaaga

SEQ ID NO: 2491491 - RNA, 19 nt, Homo sapiens
  misc_RNA (1)...(19): siRNA sense strand
ucaaauucgaagaggacuu

SEQ ID NO: 2491492 - RNA, 19 nt, Homo sapiens
  misc_RNA (1)...(19): siRNA sense strand
ccgaagaggagcaagagga

SEQ ID NO: 2491493 - RNA, 19 nt, Homo sapiens
  misc_RNA (1)...(19): siRNA sense strand
aagaggagcaagaggaagu

SEQ ID NO: 2491494 - RNA, 19 nt, Homo sapiens
  misc_RNA (1)...(19): siRNA sense strand
aagaggaaguggagaaccu

SEQ ID NO: 2491495 - RNA, 19 nt, Homo sapiens
  misc_RNA (1)...(19): siRNA sense strand
gaaggauauuacagccgaa

SEQ ID NO: 2491496 - RNA, 19 nt, Homo sapiens
  misc_RNA (1)...(19): siRNA sense strand
guggagaaccugaagagca

SEQ ID NO: 2491497 - RNA, 19 nt, Homo sapiens
  misc_RNA (1)...(19): siRNA sense strand
cuuucaaauucgaagagga

SEQ ID NO: 2491498 - RNA, 19 nt, Homo sapiens
  misc_RNA (1)...(19): siRNA sense strand
aguaaagaaaagcgagauu

SEQ ID NO: 2491499 - RNA, 19 nt, Homo sapiens
  misc_RNA (1)...(19): siRNA sense strand
aguuguguuuguuggaaau

SEQ ID NO: 2491500 - RNA, 19 nt, Homo sapiens
  misc_RNA (1)...(19): siRNA sense strand
uuuuggaacaugaggguua

SEQ ID NO: 2491501 - RNA, 19 nt, Homo sapiens
  misc_RNA (1)...(19): siRNA sense strand
acccuauguugcugguuaa

SEQ ID NO: 2491502 - RNA, 19 nt, Homo sapiens
  misc_RNA (1)...(19): siRNA sense strand
agaugggcagcgagaagaa

SEQ ID NO: 2491503 - RNA, 19 nt, Homo sapiens
  misc_RNA (1)...(19): siRNA sense strand
augagaacauagacagagu

SEQ ID NO: 2491504 - RNA, 19 nt, Homo sapiens
  misc_RNA (1)...(19): siRNA sense strand
agcaagaggaaguggagaa

SEQ ID NO: 2491505 - RNA, 19 nt, Homo sapiens
  misc_RNA (1)...(19): siRNA sense strand
ccguguacuccaaggacaa

SEQ ID NO: 2491506 - RNA, 19 nt, Homo sapiens
  misc_RNA (1)...(19): siRNA sense strand
cagccgaagaggagcaaga

SEQ ID NO: 2491507 - RNA, 19 nt, Homo sapiens
  misc_RNA (1)...(19): siRNA sense strand
ucaaauucgaagaggacuu

SEQ ID NO: 2491508 - RNA, 19 nt, Homo sapiens
  misc_RNA (1)...(19): siRNA sense strand
ccgaagaggagcaagagga

SEQ ID NO: 2491509 - RNA, 19 nt, Homo sapiens
  misc_RNA (1)...(19): siRNA sense strand
aagaggagcaagaggaagu

SEQ ID NO: 2491510 - RNA, 19 nt, Homo sapiens
  misc_RNA (1)...(19): siRNA sense strand
aagaggaaguggagaaccu

SEQ ID NO: 2491511 - RNA, 19 nt, Homo sapiens
  misc_RNA (1)...(19): siRNA sense strand
gaaggauauuacagccgaa

SEQ ID NO: 2491512 - RNA, 19 nt, Homo sapiens
  misc_RNA (1)...(19): siRNA sense strand
guggagaaccugaagagca

SEQ ID NO: 2491513 - RNA, 19 nt, Homo sapiens
  misc_RNA (1)...(19): siRNA sense strand
cuuucaaauucgaagagga

SEQ ID NO: 2491514 - RNA, 19 nt, Homo sapiens
  misc_RNA (1)...(19): siRNA sense strand
aguaaagaaaagcgagauu

SEQ ID NO: 2491515 - RNA, 19 nt, Homo sapiens
  misc_RNA (1)...(19): siRNA sense strand
aguuguguuuguuggaaau

SEQ ID NO: 2491516 - RNA, 19 nt, Homo sapiens
  misc_RNA (1)...(19): siRNA sense strand
uuuuggaacaugaggguua

SEQ ID NO: 2491517 - RNA, 19 nt, Homo sapiens
  misc_RNA (1)...(19): siRNA sense strand
acccuauguugcugguuaa

SEQ ID NO: 2491518 - RNA, 19 nt, Homo sapiens
  misc_RNA (1)...(19): siRNA sense strand
agaugggcagcgagaagaa

SEQ ID NO: 2491519 - RNA, 19 nt, Homo sapiens
  misc_RNA (1)...(19): siRNA sense strand
augagaacauagacagagu

SEQ ID NO: 2491520 - RNA, 19 nt, Homo sapiens
  misc_RNA (1)...(19): siRNA sense strand
agcaagaggaaguggagaa

SEQ ID NO: 2491521 - RNA, 19 nt, Homo sapiens
  misc_RNA (1)...(19): siRNA sense strand
ccguguacuccaaggacaa

SEQ ID NO: 2491522 - RNA, 19 nt, Homo sapiens
  misc_RNA (1)...(19): siRNA sense strand
cagccgaagaggagcaaga

SEQ ID NO: 2491523 - RNA, 19 nt, Homo sapiens
  misc_RNA (1)...(19): siRNA sense strand
ucaaauucgaagaggacuu

SEQ ID NO: 2491524 - RNA, 19 nt, Homo sapiens
  misc_RNA (1)...(19): siRNA sense strand
ccgaagaggagcaagagga

SEQ ID NO: 2491525 - RNA, 19 nt, Homo sapiens
  misc_RNA (1)...(19): siRNA sense strand
aagaggagcaagaggaagu

SEQ ID NO: 2491526 - RNA, 19 nt, Homo sapiens
  misc_RNA (1)...(19): siRNA sense strand
aagaggaaguggagaaccu

SEQ ID NO: 2491527 - RNA, 19 nt, Homo sapiens
  misc_RNA (1)...(19): siRNA sense strand
gaaggauauuacagccgaa

SEQ ID NO: 2491528 - RNA, 19 nt, Homo sapiens
  misc_RNA (1)...(19): siRNA sense strand
guggagaaccugaagagca

SEQ ID NO: 2491529 - RNA, 19 nt, Homo sapiens
  misc_RNA (1)...(19): siRNA sense strand
cuuucaaauucgaagagga

SEQ ID NO: 2491530 - RNA, 19 nt, Homo sapiens
  misc_RNA (1)...(19): siRNA sense strand
aguaaagaaaagcgagauu

SEQ ID NO: 2491531 - RNA, 19 nt, Homo sapiens
  misc_RNA (1)...(19): siRNA sense strand
aguuguguuuguuggaaau

SEQ ID NO: 2491532 - RNA, 19 nt, Homo sapiens
  misc_RNA (1)...(19): siRNA sense strand
uuuuggaacaugaggguua

SEQ ID NO: 2491533 - RNA, 19 nt, Homo sapiens
  misc_RNA (1)...(19): siRNA sense strand
acccuauguugcugguuaa

SEQ ID NO: 2491534 - RNA, 19 nt, Homo sapiens
  misc_RNA (1)...(19): siRNA sense strand
agaugggcagcgagaagaa

SEQ ID NO: 2491535 - RNA, 19 nt, Homo sapiens
  misc_RNA (1)...(19): siRNA sense strand
augagaacauagacagagu

SEQ ID NO: 2491536 - RNA, 19 nt, Homo sapiens
  misc_RNA (1)...(19): siRNA sense strand
cauggauggcucagagaaa

SEQ ID NO: 2491537 - RNA, 19 nt, Homo sapiens
  misc_RNA (1)...(19): siRNA sense strand
caucaaaaucugaggcaau

SEQ ID NO: 2491538 - RNA, 19 nt, Homo sapiens
  misc_RNA (1)...(19): siRNA sense strand
acaaaugcagagaaggaua

SEQ ID NO: 2491539 - RNA, 19 nt, Homo sapiens
  misc_RNA (1)...(19): siRNA sense strand
aaacauguucaguuggaaa

SEQ ID NO: 2491540 - RNA, 19 nt, Homo sapiens
  misc_RNA (1)...(19): siRNA sense strand
caaagaaaguaaaucggau

SEQ ID NO: 2491541 - RNA, 19 nt, Homo sapiens
  misc_RNA (1)...(19): siRNA sense strand
gcacaaacauggauggcuc

SEQ ID NO: 2491542 - RNA, 19 nt, Homo sapiens
  misc_RNA (1)...(19): siRNA sense strand
uguugaagguagcaaagaa

SEQ ID NO: 2491543 - RNA, 19 nt, Homo sapiens
  misc_RNA (1)...(19): siRNA sense strand
gcuaugaagaggcaggauu

SEQ ID NO: 2491544 - RNA, 19 nt, Homo sapiens
  misc_RNA (1)...(19): siRNA sense strand
aggaaaagaucgacaucau

SEQ ID NO: 2491545 - RNA, 19 nt, Homo sapiens
  misc_RNA (1)...(19): siRNA sense strand
auguucaguuggaaaguua

SEQ ID NO: 2491546 - RNA, 19 nt, Homo sapiens
  misc_RNA (1)...(19): siRNA sense strand
ggaugaugauuuggagaca

SEQ ID NO: 2491547 - RNA, 19 nt, Homo sapiens
  misc_RNA (1)...(19): siRNA sense strand
ucauaaaugcaguggaaag

SEQ ID NO: 2491548 - RNA, 19 nt, Homo sapiens
  misc_RNA (1)...(19): siRNA sense strand
cgaauugcucagugucuaa

SEQ ID NO: 2491549 - RNA, 19 nt, Homo sapiens
  misc_RNA (1)...(19): siRNA sense strand
agauaugaaugacggacuu

SEQ ID NO: 2491550 - RNA, 19 nt, Homo sapiens
  misc_RNA (1)...(19): siRNA sense strand
guggaaaguggcaagaaaa

SEQ ID NO: 2491551 - RNA, 19 nt, Homo sapiens
  misc_RNA (1)...(19): siRNA sense strand
aagccuauccauugaggaa

SEQ ID NO: 2491552 - RNA, 19 nt, Homo sapiens
  misc_RNA (1)...(19): siRNA sense strand
guugaagguagcaaagaau

SEQ ID NO: 2491553 - RNA, 19 nt, Homo sapiens
  misc_RNA (1)...(19): siRNA sense strand
cugaugaagaggaugauga

SEQ ID NO: 2491554 - RNA, 19 nt, Homo sapiens
  misc_RNA (1)...(19): siRNA sense strand
gccuauccauugaggaaaa

SEQ ID NO: 2491555 - RNA, 19 nt, Homo sapiens
  misc_RNA (1)...(19): siRNA sense strand
agacaaaguucuagaagcc

SEQ ID NO: 2491556 - RNA, 19 nt, Homo sapiens
  misc_RNA (1)...(19): siRNA sense strand
aguuaugcaaagacagaau

SEQ ID NO: 2491557 - RNA, 19 nt, Homo sapiens
  misc_RNA (1)...(19): siRNA sense strand
uugaacaauggaugcgaaa

SEQ ID NO: 2491558 - RNA, 19 nt, Homo sapiens
  misc_RNA (1)...(19): siRNA sense strand
cagagauugcugcugaaua

SEQ ID NO: 2491559 - RNA, 19 nt, Homo sapiens
  misc_RNA (1)...(19): siRNA sense strand
ggcauuaaugagaugguau

SEQ ID NO: 2491560 - RNA, 19 nt, Homo sapiens
  misc_RNA (1)...(19): siRNA sense strand
acaaaguucuagaagccuu

SEQ ID NO: 2491561 - RNA, 19 nt, Homo sapiens
  misc_RNA (1)...(19): siRNA sense strand
ggagacaugugaagcagca

SEQ ID NO: 2491562 - RNA, 19 nt, Homo sapiens
  misc_RNA (1)...(19): siRNA sense strand
gcugaauauggaauaaaga

SEQ ID NO: 2491563 - RNA, 19 nt, Homo sapiens
  misc_RNA (1)...(19): siRNA sense strand
aguuaaugguccgauguua

SEQ ID NO: 2491564 - RNA, 19 nt, Homo sapiens
  misc_RNA (1)...(19): siRNA sense strand
gcaacgaagaguggugauu

SEQ ID NO: 2491565 - RNA, 19 nt, Homo sapiens
  misc_RNA (1)...(19): siRNA sense strand
ccuccgauguauuugaaca

SEQ ID NO: 2491566 - RNA, 19 nt, Homo sapiens
  misc_RNA (1)...(19): siRNA sense strand
acuagaugcaguugauaca

SEQ ID NO: 2491567 - RNA, 19 nt, Homo sapiens
  misc_RNA (1)...(19): siRNA sense strand
aguuggaaaguuaugcaaa

SEQ ID NO: 2491568 - RNA, 19 nt, Homo sapiens
  misc_RNA (1)...(19): siRNA sense strand
augcaaagacagaauaacu

SEQ ID NO: 2491569 - RNA, 19 nt, Homo sapiens
  misc_RNA (1)...(19): siRNA sense strand
ugcgaaagcuugaugagga

SEQ ID NO: 2491570 - RNA, 19 nt, Homo sapiens
  misc_RNA (1)...(19): siRNA sense strand
uccauaugcaccaaagaaa

SEQ ID NO: 2491571 - RNA, 19 nt, Homo sapiens
  misc_RNA (1)...(19): siRNA sense strand
aaguaaaucggaugaaacu

SEQ ID NO: 2491572 - RNA, 19 nt, Homo sapiens
  misc_RNA (1)...(19): siRNA sense strand
gaagcuaacagaauggcau

SEQ ID NO: 2491573 - RNA, 19 nt, Homo sapiens
  misc_RNA (1)...(19): siRNA sense strand
uggagauccuagaaggcaa

SEQ ID NO: 2491574 - RNA, 19 nt, Homo sapiens
  misc_RNA (1)...(19): siRNA sense strand
cggaaauacaagaaggucu

SEQ ID NO: 2491575 - RNA, 19 nt, Homo sapiens
  misc_RNA (1)...(19): siRNA sense strand
guggaagaugcuuuagaaa

SEQ ID NO: 2491576 - RNA, 19 nt, Homo sapiens
  misc_RNA (1)...(19): siRNA sense strand
gagauuuacugaagcagga

SEQ ID NO: 2491577 - RNA, 19 nt, Homo sapiens
  misc_RNA (1)...(19): siRNA sense strand
guugcagacaagaggaaga

SEQ ID NO: 2491578 - RNA, 19 nt, Homo sapiens
  misc_RNA (1)...(19): siRNA sense strand
ggaucaaggagacccggaa

SEQ ID NO: 2491579 - RNA, 19 nt, Homo sapiens
  misc_RNA (1)...(19): siRNA sense strand
aaguuauccggcagcgaaa

SEQ ID NO: 2491580 - RNA, 19 nt, Homo sapiens
  misc_RNA (1)...(19): siRNA sense strand
ccacacgaucagggagaau

SEQ ID NO: 2491581 - RNA, 19 nt, Homo sapiens
  misc_RNA (1)...(19): siRNA sense strand
uggagauccuagaaggcaa

SEQ ID NO: 2491582 - RNA, 19 nt, Homo sapiens
  misc_RNA (1)...(19): siRNA sense strand
cggaaauacaagaaggucu

SEQ ID NO: 2491583 - RNA, 19 nt, Homo sapiens
  misc_RNA (1)...(19): siRNA sense strand
guggaagaugcuuuagaaa

SEQ ID NO: 2491584 - RNA, 19 nt, Homo sapiens
  misc_RNA (1)...(19): siRNA sense strand
gagauuuacugaagcagga

SEQ ID NO: 2491585 - RNA, 19 nt, Homo sapiens
  misc_RNA (1)...(19): siRNA sense strand
guugcagacaagaggaaga

SEQ ID NO: 2491586 - RNA, 19 nt, Homo sapiens
  misc_RNA (1)...(19): siRNA sense strand
ggaucaaggagacccggaa

SEQ ID NO: 2491587 - RNA, 19 nt, Homo sapiens
  misc_RNA (1)...(19): siRNA sense strand
aaguuauccggcagcgaaa

SEQ ID NO: 2491588 - RNA, 19 nt, Homo sapiens
  misc_RNA (1)...(19): siRNA sense strand
ccacacgaucagggagaau

SEQ ID NO: 2491589 - RNA, 19 nt, Homo sapiens
  misc_RNA (1)...(19): siRNA sense strand
ccgaaaaggauguggggaa

SEQ ID NO: 2491590 - RNA, 19 nt, Homo sapiens
  misc_RNA (1)...(19): siRNA sense strand
guuaaauggagaugaagaa

SEQ ID NO: 2491591 - RNA, 19 nt, Homo sapiens
  misc_RNA (1)...(19): siRNA sense strand
caggcaaguaggaaagaua

SEQ ID NO: 2491592 - RNA, 19 nt, Homo sapiens
  misc_RNA (1)...(19): siRNA sense strand
agauaaaggaguuuccaaa

SEQ ID NO: 2491593 - RNA, 19 nt, Homo sapiens
  misc_RNA (1)...(19): siRNA sense strand
gggaagaaguaaaacaaau

SEQ ID NO: 2491594 - RNA, 19 nt, Homo sapiens
  misc_RNA (1)...(19): siRNA sense strand
gguuaaauggagaugaaga

SEQ ID NO: 2491595 - RNA, 19 nt, Homo sapiens
  misc_RNA (1)...(19): siRNA sense strand
ugaugaugagcaagagaaa

SEQ ID NO: 2491596 - RNA, 19 nt, Homo sapiens
  misc_RNA (1)...(19): siRNA sense strand
gguaagaggcguggagcuu

SEQ ID NO: 2491597 - RNA, 19 nt, Homo sapiens
  misc_RNA (1)...(19): siRNA sense strand
cacugaauuuggaggagaa

SEQ ID NO: 2491598 - RNA, 19 nt, Homo sapiens
  misc_RNA (1)...(19): siRNA sense strand
gugaaagaggacacaagua

SEQ ID NO: 2491599 - RNA, 19 nt, Homo sapiens
  misc_RNA (1)...(19): siRNA sense strand
caguaaagauguuugguuc

SEQ ID NO: 2491600 - RNA, 19 nt, Homo sapiens
  misc_RNA (1)...(19): siRNA sense strand
auagcaaaugcaugggaaa

SEQ ID NO: 2491601 - RNA, 19 nt, Homo sapiens
  misc_RNA (1)...(19): siRNA sense strand
ccucauaauauuaaggacu

SEQ ID NO: 2491602 - RNA, 19 nt, Homo sapiens
  misc_RNA (1)...(19): siRNA sense strand
gcuuagaacauggggauua

SEQ ID NO: 2491603 - RNA, 19 nt, Homo sapiens
  misc_RNA (1)...(19): siRNA sense strand
gggaaauauacaacacuga

SEQ ID NO: 2491604 - RNA, 19 nt, Homo sapiens
  misc_RNA (1)...(19): siRNA sense strand
gggugugguuaaauggaga

SEQ ID NO: 2491605 - RNA, 19 nt, Homo sapiens
  misc_RNA (1)...(19): siRNA sense strand
uaaucaaagaggagaaacu

SEQ ID NO: 2491606 - RNA, 19 nt, Homo sapiens
  misc_RNA (1)...(19): siRNA sense strand
cauggggauuauagagaaa

SEQ ID NO: 2491607 - RNA, 19 nt, Homo sapiens
  misc_RNA (1)...(19): siRNA sense strand
aaacaguuccagaguaaaa

SEQ ID NO: 2491608 - RNA, 19 nt, Homo sapiens
  misc_RNA (1)...(19): siRNA sense strand
cuguauagauggaagcaac

SEQ ID NO: 2491609 - RNA, 19 nt, Homo sapiens
  misc_RNA (1)...(19): siRNA sense strand
aaaguugggaagaaguaaa

SEQ ID NO: 2491610 - RNA, 19 nt, Homo sapiens
  misc_RNA (1)...(19): siRNA sense strand
aguaaagauguuugguuca

SEQ ID NO: 2491611 - RNA, 19 nt, Homo sapiens
  misc_RNA (1)...(19): siRNA sense strand
uggaagucaaugccagaaa

SEQ ID NO: 2491612 - RNA, 19 nt, Homo sapiens
  misc_RNA (1)...(19): siRNA sense strand
gagauaaaggaguuuccaa

SEQ ID NO: 2491613 - RNA, 19 nt, Homo sapiens
  misc_RNA (1)...(19): siRNA sense strand
guggaauaacaaaggaagu

SEQ ID NO: 2491614 - RNA, 19 nt, Homo sapiens
  misc_RNA (1)...(19): siRNA sense strand
cuaccagggaagaaaauaa

SEQ ID NO: 2491615 - RNA, 19 nt, Homo sapiens
  misc_RNA (1)...(19): siRNA sense strand
agaaaggagauaaaggagu

SEQ ID NO: 2491616 - RNA, 19 nt, Homo sapiens
  misc_RNA (1)...(19): siRNA sense strand
cauagcaaaugcaugggaa

SEQ ID NO: 2491617 - RNA, 19 nt, Homo sapiens
  misc_RNA (1)...(19): siRNA sense strand
gcugagaagagaaagagga

SEQ ID NO: 2491618 - RNA, 19 nt, Homo sapiens
  misc_RNA (1)...(19): siRNA sense strand
agugaggauggucgaauaa

SEQ ID NO: 2491619 - RNA, 19 nt, Homo sapiens
  misc_RNA (1)...(19): siRNA sense strand
gugaugaugagcaagagaa

SEQ ID NO: 2491620 - RNA, 19 nt, Homo sapiens
  misc_RNA (1)...(19): siRNA sense strand
aaguagaauugaagcugga

SEQ ID NO: 2491621 - RNA, 19 nt, Homo sapiens
  misc_RNA (1)...(19): siRNA sense strand
cugcuguaagagagaguuu

SEQ ID NO: 2491622 - RNA, 19 nt, Homo sapiens
  misc_RNA (1)...(19): siRNA sense strand
ugaggauggucgaauaaaa

SEQ ID NO: 2491623 - RNA, 19 nt, Homo sapiens
  misc_RNA (1)...(19): siRNA sense strand
uugaagaaagugaugauga

SEQ ID NO: 2491624 - RNA, 19 nt, Homo sapiens
  misc_RNA (1)...(19): siRNA sense strand
aagagaugcaacaagaaau

SEQ ID NO: 2491625 - RNA, 19 nt, Homo sapiens
  misc_RNA (1)...(19): siRNA sense strand
agguggaauaacaaaggaa

SEQ ID NO: 2491626 - RNA, 19 nt, Homo sapiens
  misc_RNA (1)...(19): siRNA sense strand
ucgaaaucggcaugcaauu

SEQ ID NO: 2491627 - RNA, 19 nt, Homo sapiens
  misc_RNA (1)...(19): siRNA sense strand
ggagaagcugagaagcaga

SEQ ID NO: 2491628 - RNA, 19 nt, Homo sapiens
  misc_RNA (1)...(19): siRNA sense strand
ggaaucaguaagucaacau

SEQ ID NO: 2491629 - RNA, 19 nt, Homo sapiens
  misc_RNA (1)...(19): siRNA sense strand
uagcaaaugcaugggaaaa

SEQ ID NO: 2491630 - RNA, 19 nt, Homo sapiens
  misc_RNA (1)...(19): siRNA sense strand
cgguaagaggcguggagcu

SEQ ID NO: 2491631 - RNA, 19 nt, Homo sapiens
  misc_RNA (1)...(19): siRNA sense strand
gaacagauuucaaagcuag

SEQ ID NO: 2491632 - RNA, 19 nt, Homo sapiens
  misc_RNA (1)...(19): siRNA sense strand
aaagugaugaugagcaaga

SEQ ID NO: 2491633 - RNA, 19 nt, Homo sapiens
  misc_RNA (1)...(19): siRNA sense strand
augaaaugggauuggguaa

SEQ ID NO: 2491634 - RNA, 19 nt, Homo sapiens
  misc_RNA (1)...(19): siRNA sense strand
guuuggauccagugagaaa

SEQ ID NO: 2491635 - RNA, 19 nt, Homo sapiens
  misc_RNA (1)...(19): siRNA sense strand
cuguagaaucugaaguuaa

SEQ ID NO: 2491636 - RNA, 19 nt, Homo sapiens
  misc_RNA (1)...(19): siRNA sense strand
agagauuaugaaagggaaa

SEQ ID NO: 2491637 - RNA, 19 nt, Homo sapiens
  misc_RNA (1)...(19): siRNA sense strand
aauuagaggaacagaagaa

SEQ ID NO: 2491638 - RNA, 19 nt, Homo sapiens
  misc_RNA (1)...(19): siRNA sense strand
cuuaggaugcuuugggaaa

SEQ ID NO: 2491639 - RNA, 19 nt, Homo sapiens
  misc_RNA (1)...(19): siRNA sense strand
cugcuggacuagagagaga

SEQ ID NO: 2491640 - RNA, 19 nt, Homo sapiens
  misc_RNA (1)...(19): siRNA sense strand
ucauagaauuggucagaca

SEQ ID NO: 2491641 - RNA, 19 nt, Homo sapiens
  misc_RNA (1)...(19): siRNA sense strand
aggaagagaagaugaauca

SEQ ID NO: 2491642 - RNA, 19 nt, Homo sapiens
  misc_RNA (1)...(19): siRNA sense strand
cuaaaaggaaacuggaaaa

SEQ ID NO: 2491643 - RNA, 19 nt, Homo sapiens
  misc_RNA (1)...(19): siRNA sense strand
gagcggaagaugcuggaaa

SEQ ID NO: 2491644 - RNA, 19 nt, Homo sapiens
  misc_RNA (1)...(19): siRNA sense strand
gcuaaaaggaaacuggaaa

SEQ ID NO: 2491645 - RNA, 19 nt, Homo sapiens
  misc_RNA (1)...(19): siRNA sense strand
ggauccagugagaaagaaa

SEQ ID NO: 2491646 - RNA, 19 nt, Homo sapiens
  misc_RNA (1)...(19): siRNA sense strand
cuaaagaaagagaacagaa

SEQ ID NO: 2491647 - RNA, 19 nt, Homo sapiens
  misc_RNA (1)...(19): siRNA sense strand
aggaacagaagaagaaaga

SEQ ID NO: 2491648 - RNA, 19 nt, Homo sapiens
  misc_RNA (1)...(19): siRNA sense strand
auaaaaggaucaagagaga

SEQ ID NO: 2491649 - RNA, 19 nt, Homo sapiens
  misc_RNA (1)...(19): siRNA sense strand
gaucaagagagaaggucau

SEQ ID NO: 2491650 - RNA, 19 nt, Homo sapiens
  misc_RNA (1)...(19): siRNA sense strand
uugaaauagccaugagaga

SEQ ID NO: 2491651 - RNA, 19 nt, Homo sapiens
  misc_RNA (1)...(19): siRNA sense strand
ggaucaagagagaagguca

SEQ ID NO: 2491652 - RNA, 19 nt, Homo sapiens
  misc_RNA (1)...(19): siRNA sense strand
agcaacaauuagaggaaca

SEQ ID NO: 2491653 - RNA, 19 nt, Homo sapiens
  misc_RNA (1)...(19): siRNA sense strand
gauucaaugcugauaacaa

SEQ ID NO: 2491654 - RNA, 19 nt, Homo sapiens
  misc_RNA (1)...(19): siRNA sense strand
gguaacaaauucugggaag

SEQ ID NO: 2491655 - RNA, 19 nt, Homo sapiens
  misc_RNA (1)...(19): siRNA sense strand
uagcagaugaaaugggauu

SEQ ID NO: 2491656 - RNA, 19 nt, Homo sapiens
  misc_RNA (1)...(19): siRNA sense strand
gguaccaaguagaaggcau

SEQ ID NO: 2491657 - RNA, 19 nt, Homo sapiens
  misc_RNA (1)...(19): siRNA sense strand
ugucuuacucagagagaga

SEQ ID NO: 2491658 - RNA, 19 nt, Homo sapiens
  misc_RNA (1)...(19): siRNA sense strand
gacuagagagagagcggaa

SEQ ID NO: 2491659 - RNA, 19 nt, Homo sapiens
  misc_RNA (1)...(19): siRNA sense strand
cuuaauaguagaugaagga

SEQ ID NO: 2491660 - RNA, 19 nt, Homo sapiens
  misc_RNA (1)...(19): siRNA sense strand
aagaggaagagaagaugaa

SEQ ID NO: 2491661 - RNA, 19 nt, Homo sapiens
  misc_RNA (1)...(19): siRNA sense strand
cgaaaauggaacagcaaca

SEQ ID NO: 2491662 - RNA, 19 nt, Homo sapiens
  misc_RNA (1)...(19): siRNA sense strand
ccgucuaaucagggaguua

SEQ ID NO: 2491663 - RNA, 19 nt, Homo sapiens
  misc_RNA (1)...(19): siRNA sense strand
agccagagguggaccgaga

SEQ ID NO: 2491664 - RNA, 19 nt, Homo sapiens
  misc_RNA (1)...(19): siRNA sense strand
cacaagaauuuaagaucga

SEQ ID NO: 2491665 - RNA, 19 nt, Homo sapiens
  misc_RNA (1)...(19): siRNA sense strand
acagcaacaauuagaggaa

SEQ ID NO: 2491666 - RNA, 19 nt, Homo sapiens
  misc_RNA (1)...(19): siRNA sense strand
gaugauucagagaggagua

SEQ ID NO: 2491667 - RNA, 19 nt, Homo sapiens
  misc_RNA (1)...(19): siRNA sense strand
uuucaaagaagcaggagau

SEQ ID NO: 2491668 - RNA, 19 nt, Homo sapiens
  misc_RNA (1)...(19): siRNA sense strand
uuucaaagguggucagucu

SEQ ID NO: 2491669 - RNA, 19 nt, Homo sapiens
  misc_RNA (1)...(19): siRNA sense strand
agugaagagaagccaguua

SEQ ID NO: 2491670 - RNA, 19 nt, Homo sapiens
  misc_RNA (1)...(19): siRNA sense strand
ggucaugucaaaagaggaa

SEQ ID NO: 2491671 - RNA, 19 nt, Homo sapiens
  misc_RNA (1)...(19): siRNA sense strand
uaauaguagaugaaggaca

SEQ ID NO: 2491672 - RNA, 19 nt, Homo sapiens
  misc_RNA (1)...(19): siRNA sense strand
ggccaugcuagaagaggaa

SEQ ID NO: 2491673 - RNA, 19 nt, Homo sapiens
  misc_RNA (1)...(19): siRNA sense strand
aagaaagagaacagaaugu

SEQ ID NO: 2491674 - RNA, 19 nt, Homo sapiens
  misc_RNA (1)...(19): siRNA sense strand
agagguggaccgagaaaga

SEQ ID NO: 2491675 - RNA, 19 nt, Homo sapiens
  misc_RNA (1)...(19): siRNA sense strand
aggagaaugaggaugaaaa

SEQ ID NO: 2491676 - RNA, 19 nt, Homo sapiens
  misc_RNA (1)...(19): siRNA sense strand
cuagagagagagcggaaga

SEQ ID NO: 2491677 - RNA, 19 nt, Homo sapiens
  misc_RNA (1)...(19): siRNA sense strand
cggccaugcuagaagagga

SEQ ID NO: 2491678 - RNA, 19 nt, Homo sapiens
  misc_RNA (1)...(19): siRNA sense strand
gggauagagagucgacaga

SEQ ID NO: 2491679 - RNA, 19 nt, Homo sapiens
  misc_RNA (1)...(19): siRNA sense strand
ccagagguggaccgagaaa

SEQ ID NO: 2491680 - RNA, 19 nt, Homo sapiens
  misc_RNA (1)...(19): siRNA sense strand
agaugaaggacacaggauu

SEQ ID NO: 2491681 - RNA, 19 nt, Homo sapiens
  misc_RNA (1)...(19): siRNA sense strand
cugaaacugcugaagauau

SEQ ID NO: 2491682 - RNA, 19 nt, Homo sapiens
  misc_RNA (1)...(19): siRNA sense strand
ggaccgagaaagagcuguu

SEQ ID NO: 2491683 - RNA, 19 nt, Homo sapiens
  misc_RNA (1)...(19): siRNA sense strand
gaugaaaugggauugggua

SEQ ID NO: 2491684 - RNA, 19 nt, Homo sapiens
  misc_RNA (1)...(19): siRNA sense strand
gcugaagauauuauugcua

SEQ ID NO: 2491685 - RNA, 19 nt, Homo sapiens
  misc_RNA (1)...(19): siRNA sense strand
ccagugagaaagaaacaau

SEQ ID NO: 2491686 - RNA, 19 nt, Homo sapiens
  misc_RNA (1)...(19): siRNA sense strand
gagaaagagcuguugugga

SEQ ID NO: 2491687 - RNA, 19 nt, Homo sapiens
  misc_RNA (1)...(19): siRNA sense strand
cuguuguggaagugaauau

SEQ ID NO: 2491688 - RNA, 19 nt, Homo sapiens
  misc_RNA (1)...(19): siRNA sense strand
auagaauuggucagacaaa

SEQ ID NO: 2491689 - RNA, 19 nt, Homo sapiens
  misc_RNA (1)...(19): siRNA sense strand
ucgaaugcugccagaacua

SEQ ID NO: 2491690 - RNA, 19 nt, Homo sapiens
  misc_RNA (1)...(19): siRNA sense strand
uuacaaacggaaagggacu

SEQ ID NO: 2491691 - RNA, 19 nt, Homo sapiens
  misc_RNA (1)...(19): siRNA sense strand
gagagaccgaaaugcguua

SEQ ID NO: 2491692 - RNA, 19 nt, Homo sapiens
  misc_RNA (1)...(19): siRNA sense strand
ucuugaaguuccuccuaaa

SEQ ID NO: 2491693 - RNA, 19 nt, Homo sapiens
  misc_RNA (1)...(19): siRNA sense strand
cgaccaaaacgacgaacua

SEQ ID NO: 2491694 - RNA, 19 nt, Homo sapiens
  misc_RNA (1)...(19): siRNA sense strand
ucuuacucagagagagaaa

SEQ ID NO: 2491695 - RNA, 19 nt, Homo sapiens
  misc_RNA (1)...(19): siRNA sense strand
cagauguauuugaugacuu

SEQ ID NO: 2491696 - RNA, 19 nt, Homo sapiens
  misc_RNA (1)...(19): siRNA sense strand
cuauugaggaucaggacaa

SEQ ID NO: 2491697 - RNA, 19 nt, Homo sapiens
  misc_RNA (1)...(19): siRNA sense strand
ccuuaaagcaauugagcag

SEQ ID NO: 2491698 - RNA, 19 nt, Homo sapiens
  misc_RNA (1)...(19): siRNA sense strand
uggugagcuugguggagaa

SEQ ID NO: 2491699 - RNA, 19 nt, Homo sapiens
  misc_RNA (1)...(19): siRNA sense strand
uggcuaugcuggugcucau

SEQ ID NO: 2491700 - RNA, 19 nt, Homo sapiens
  misc_RNA (1)...(19): siRNA sense strand
ccaccagggcuuuggccuu

SEQ ID NO: 2491701 - RNA, 19 nt, Homo sapiens
  misc_RNA (1)...(19): siRNA sense strand
gggcacaggacuaaggaca

SEQ ID NO: 2491702 - RNA, 19 nt, Homo sapiens
  misc_RNA (1)...(19): siRNA sense strand
aggguaaagcuaugggcua

SEQ ID NO: 2491703 - RNA, 19 nt, Homo sapiens
  misc_RNA (1)...(19): siRNA sense strand
ugauaaagcauauaggcau

SEQ ID NO: 2491704 - RNA, 19 nt, Homo sapiens
  misc_RNA (1)...(19): siRNA sense strand
cggaagacccauguggaaa

SEQ ID NO: 2491705 - RNA, 19 nt, Homo sapiens
  misc_RNA (1)...(19): siRNA sense strand
ccggaagacccauguggaa

SEQ ID NO: 2491706 - RNA, 19 nt, Homo sapiens
  misc_RNA (1)...(19): siRNA sense strand
cugaaaugaaguuugacaa

SEQ ID NO: 2491707 - RNA, 19 nt, Homo sapiens
  misc_RNA (1)...(19): siRNA sense strand
ccauggugucccugauaaa

SEQ ID NO: 2491708 - RNA, 19 nt, Homo sapiens
  misc_RNA (1)...(19): siRNA sense strand
cagagugggaagagaggau

SEQ ID NO: 2491709 - RNA, 19 nt, Homo sapiens
  misc_RNA (1)...(19): siRNA sense strand
ccaaaggaagccauggcaa

SEQ ID NO: 2491710 - RNA, 19 nt, Homo sapiens
  misc_RNA (1)...(19): siRNA sense strand
gugaaaaggaggaacguca

SEQ ID NO: 2491711 - RNA, 19 nt, Homo sapiens
  misc_RNA (1)...(19): siRNA sense strand
ccacugagcauaugggcca

SEQ ID NO: 2491712 - RNA, 19 nt, Homo sapiens
  misc_RNA (1)...(19): siRNA sense strand
ggacuaaggacagggccua

SEQ ID NO: 2491713 - RNA, 19 nt, Homo sapiens
  misc_RNA (1)...(19): siRNA sense strand
gauaaagcauauaggcaug

SEQ ID NO: 2491714 - RNA, 19 nt, Homo sapiens
  misc_RNA (1)...(19): siRNA sense strand
ggguaaagcuaugggcuac

SEQ ID NO: 2491715 - RNA, 19 nt, Homo sapiens
  misc_RNA (1)...(19): siRNA sense strand
cccuaagcaacaugauaaa

SEQ ID NO: 2491716 - RNA, 19 nt, Homo sapiens
  misc_RNA (1)...(19): siRNA sense strand
ugauggaaucugaaaugaa

SEQ ID NO: 2491717 - RNA, 19 nt, Homo sapiens
  misc_RNA (1)...(19): siRNA sense strand
augagagacugcuguggaa

SEQ ID NO: 2491718 - RNA, 19 nt, Homo sapiens
  misc_RNA (1)...(19): siRNA sense strand
aaaccugagcccagaguga

SEQ ID NO: 2491719 - RNA, 19 nt, Homo sapiens
  misc_RNA (1)...(19): siRNA sense strand
ggaucauguuuggagcuaa

SEQ ID NO: 2491720 - RNA, 19 nt, Homo sapiens
  misc_RNA (1)...(19): siRNA sense strand
cgguauuggaugacagauc

SEQ ID NO: 2491721 - RNA, 19 nt, Homo sapiens
  misc_RNA (1)...(19): siRNA sense strand
gcugaaggcugcuaccgua

SEQ ID NO: 2491722 - RNA, 19 nt, Homo sapiens
  misc_RNA (1)...(19): siRNA sense strand
aguuuacagagaagaggaa

SEQ ID NO: 2491723 - RNA, 19 nt, Homo sapiens
  misc_RNA (1)...(19): siRNA sense strand
gauccagggaacaugggaa

SEQ ID NO: 2491724 - RNA, 19 nt, Homo sapiens
  misc_RNA (1)...(19): siRNA sense strand
auacaagguucuuuggcca

SEQ ID NO: 2491725 - RNA, 19 nt, Homo sapiens
  misc_RNA (1)...(19): siRNA sense strand
ggauggagaugcagcaccu

SEQ ID NO: 2491726 - RNA, 19 nt, Homo sapiens
  misc_RNA (1)...(19): siRNA sense strand
ccuaggagaaggagacacu

SEQ ID NO: 2491727 - RNA, 19 nt, Homo sapiens
  misc_RNA (1)...(19): siRNA sense strand
ugguuuccuaugaggguaa

SEQ ID NO: 2491728 - RNA, 19 nt, Homo sapiens
  misc_RNA (1)...(19): siRNA sense strand
caguggugguaccggaaga

SEQ ID NO: 2491729 - RNA, 19 nt, Homo sapiens
  misc_RNA (1)...(19): siRNA sense strand
gcuggaaguucuugaggac

SEQ ID NO: 2491730 - RNA, 19 nt, Homo sapiens
  misc_RNA (1)...(19): siRNA sense strand
gguacaaaucugcgcuguu

SEQ ID NO: 2491731 - RNA, 19 nt, Homo sapiens
  misc_RNA (1)...(19): siRNA sense strand
gcgucaaacugcagggcaa

SEQ ID NO: 2491732 - RNA, 19 nt, Homo sapiens
  misc_RNA (1)...(19): siRNA sense strand
uggagaugcuggaggccaa

SEQ ID NO: 2491733 - RNA, 19 nt, Homo sapiens
  misc_RNA (1)...(19): siRNA sense strand
acaagaagcucaaggugga

SEQ ID NO: 2491734 - RNA, 19 nt, Homo sapiens
  misc_RNA (1)...(19): siRNA sense strand
ugguguacgcugaggacua

SEQ ID NO: 2491735 - RNA, 19 nt, Homo sapiens
  misc_RNA (1)...(19): siRNA sense strand
ccaucaagugcgaguacau

SEQ ID NO: 2491736 - RNA, 19 nt, Homo sapiens
  misc_RNA (1)...(19): siRNA sense strand
cgucaaacugcagggcaaa

SEQ ID NO: 2491737 - RNA, 19 nt, Homo sapiens
  misc_RNA (1)...(19): siRNA sense strand
agcucaagguggagaagga

SEQ ID NO: 2491738 - RNA, 19 nt, Homo sapiens
  misc_RNA (1)...(19): siRNA sense strand
agguggagaaggaggaguu

SEQ ID NO: 2491739 - RNA, 19 nt, Homo sapiens
  misc_RNA (1)...(19): siRNA sense strand
ggacauugccucuggcuac

SEQ ID NO: 2491740 - RNA, 19 nt, Homo sapiens
  misc_RNA (1)...(19): siRNA sense strand
accgagagcuuguggucau

SEQ ID NO: 2491741 - RNA, 19 nt, Homo sapiens
  misc_RNA (1)...(19): siRNA sense strand
cagcacuucuauagcguca

SEQ ID NO: 2491742 - RNA, 19 nt, Homo sapiens
  misc_RNA (1)...(19): siRNA sense strand
caucgaggaucuagaggcu

SEQ ID NO: 2491743 - RNA, 19 nt, Homo sapiens
  misc_RNA (1)...(19): siRNA sense strand
ccagcaaggaagaagaaaa

SEQ ID NO: 2491744 - RNA, 19 nt, Homo sapiens
  misc_RNA (1)...(19): siRNA sense strand
caaugaugucgaggagaaa

SEQ ID NO: 2491745 - RNA, 19 nt, Homo sapiens
  misc_RNA (1)...(19): siRNA sense strand
gucccaaaaugcagacaaa

SEQ ID NO: 2491746 - RNA, 19 nt, Homo sapiens
  misc_RNA (1)...(19): siRNA sense strand
aagaauaacucaggggaga

SEQ ID NO: 2491747 - RNA, 19 nt, Homo sapiens
  misc_RNA (1)...(19): siRNA sense strand
cccuaaaccaucagcuauu

SEQ ID NO: 2491748 - RNA, 19 nt, Homo sapiens
  misc_RNA (1)...(19): siRNA sense strand
gguuuaacugguacaucaa

SEQ ID NO: 2491749 - RNA, 19 nt, Homo sapiens
  misc_RNA (1)...(19): siRNA sense strand
gagcaggggaucuggaaga

SEQ ID NO: 2491750 - RNA, 19 nt, Homo sapiens
  misc_RNA (1)...(19): siRNA sense strand
gcuauugaaugaccgggua

SEQ ID NO: 2491751 - RNA, 19 nt, Homo sapiens
  misc_RNA (1)...(19): siRNA sense strand
ggguauuugaagaaagaag

SEQ ID NO: 2491752 - RNA, 19 nt, Homo sapiens
  misc_RNA (1)...(19): siRNA sense strand
gaagagcccugcuuggcaa

SEQ ID NO: 2491753 - RNA, 19 nt, Homo sapiens
  misc_RNA (1)...(19): siRNA sense strand
cuucauauuaccaagccua

SEQ ID NO: 2491754 - RNA, 19 nt, Homo sapiens
  misc_RNA (1)...(19): siRNA sense strand
cagacaaagaugagcaccu

SEQ ID NO: 2491755 - RNA, 19 nt, Homo sapiens
  misc_RNA (1)...(19): siRNA sense strand
gggaagaggcguugcgcuu

SEQ ID NO: 2491756 - RNA, 19 nt, Homo sapiens
  misc_RNA (1)...(19): siRNA sense strand
ugaagaaguuugaaaggca

SEQ ID NO: 2491757 - RNA, 19 nt, Homo sapiens
  misc_RNA (1)...(19): siRNA sense strand
ucaaagaccucaaggcacu

SEQ ID NO: 2491758 - RNA, 19 nt, Homo sapiens
  misc_RNA (1)...(19): siRNA sense strand
ccgugcagcuucugggaga

SEQ ID NO: 2491759 - RNA, 19 nt, Homo sapiens
  misc_RNA (1)...(19): siRNA sense strand
ucaccauccuggaggcaga

SEQ ID NO: 2491760 - RNA, 19 nt, Homo sapiens
  misc_RNA (1)...(19): siRNA sense strand
acgaagugaagcugcgcaa

SEQ ID NO: 2491761 - RNA, 19 nt, Homo sapiens
  misc_RNA (1)...(19): siRNA sense strand
cggaggugcacgaagugaa

SEQ ID NO: 2491762 - RNA, 19 nt, Homo sapiens
  misc_RNA (1)...(19): siRNA sense strand
ccucaaagaccucaaggca

SEQ ID NO: 2491763 - RNA, 19 nt, Homo sapiens
  misc_RNA (1)...(19): siRNA sense strand
gagaaaugcaugcaggauc

SEQ ID NO: 2491764 - RNA, 19 nt, Homo sapiens
  misc_RNA (1)...(19): siRNA sense strand
agaaaggcgaugaagaagu

SEQ ID NO: 2491765 - RNA, 19 nt, Homo sapiens
  misc_RNA (1)...(19): siRNA sense strand
uggcaaaggaagaaggcag

SEQ ID NO: 2491766 - RNA, 19 nt, Homo sapiens
  misc_RNA (1)...(19): siRNA sense strand
gggaagaggcguugcgcuu

SEQ ID NO: 2491767 - RNA, 19 nt, Homo sapiens
  misc_RNA (1)...(19): siRNA sense strand
ugaagaaguuugaaaggca

SEQ ID NO: 2491768 - RNA, 19 nt, Homo sapiens
  misc_RNA (1)...(19): siRNA sense strand
ucaaagaccucaaggcacu

SEQ ID NO: 2491769 - RNA, 19 nt, Homo sapiens
  misc_RNA (1)...(19): siRNA sense strand
ccgugcagcuucugggaga

SEQ ID NO: 2491770 - RNA, 19 nt, Homo sapiens
  misc_RNA (1)...(19): siRNA sense strand
ucaccauccuggaggcaga

SEQ ID NO: 2491771 - RNA, 19 nt, Homo sapiens
  misc_RNA (1)...(19): siRNA sense strand
acgaagugaagcugcgcaa

SEQ ID NO: 2491772 - RNA, 19 nt, Homo sapiens
  misc_RNA (1)...(19): siRNA sense strand
cggaggugcacgaagugaa

SEQ ID NO: 2491773 - RNA, 19 nt, Homo sapiens
  misc_RNA (1)...(19): siRNA sense strand
ccucaaagaccucaaggca

SEQ ID NO: 2491774 - RNA, 19 nt, Homo sapiens
  misc_RNA (1)...(19): siRNA sense strand
gagaaaugcaugcaggauc

SEQ ID NO: 2491775 - RNA, 19 nt, Homo sapiens
  misc_RNA (1)...(19): siRNA sense strand
agaaaggcgaugaagaagu

SEQ ID NO: 2491776 - RNA, 19 nt, Homo sapiens
  misc_RNA (1)...(19): siRNA sense strand
uggcaaaggaagaaggcag

SEQ ID NO: 2491777 - RNA, 19 nt, Homo sapiens
  misc_RNA (1)...(19): siRNA sense strand
uagagaagaugguggccaa

SEQ ID NO: 2491778 - RNA, 19 nt, Homo sapiens
  misc_RNA (1)...(19): siRNA sense strand
ggaagguggugauggccaa

SEQ ID NO: 2491779 - RNA, 19 nt, Homo sapiens
  misc_RNA (1)...(19): siRNA sense strand
uggccaagcagcacgggaa

SEQ ID NO: 2491780 - RNA, 19 nt, Homo sapiens
  misc_RNA (1)...(19): siRNA sense strand
aggaucaguuggaggccuu

SEQ ID NO: 2491781 - RNA, 19 nt, Homo sapiens
  misc_RNA (1)...(19): siRNA sense strand
ccuuacaaccauaggauuu

SEQ ID NO: 2491782 - RNA, 19 nt, Homo sapiens
  misc_RNA (1)...(19): siRNA sense strand
cuguguacuuucaaggaua

SEQ ID NO: 2491783 - RNA, 19 nt, Homo sapiens
  misc_RNA (1)...(19): siRNA sense strand
acaaaagguuggacgaaau

SEQ ID NO: 2491784 - RNA, 19 nt, Homo sapiens
  misc_RNA (1)...(19): siRNA sense strand
augaugaggugguggcuau

SEQ ID NO: 2491785 - RNA, 19 nt, Homo sapiens
  misc_RNA (1)...(19): siRNA sense strand
cgguagaguuccaaaccau

SEQ ID NO: 2491786 - RNA, 19 nt, Homo sapiens
  misc_RNA (1)...(19): siRNA sense strand
caaccauaggauuuggaaa

SEQ ID NO: 2491787 - RNA, 19 nt, Homo sapiens
  misc_RNA (1)...(19): siRNA sense strand
aaacauagcuccuaccaca

SEQ ID NO: 2491788 - RNA, 19 nt, Homo sapiens
  misc_RNA (1)...(19): siRNA sense strand
guauaaacaagaagcgcca

SEQ ID NO: 2491789 - RNA, 19 nt, Homo sapiens
  misc_RNA (1)...(19): siRNA sense strand
ccuagaauauggagcagca

SEQ ID NO: 2491790 - RNA, 19 nt, Homo sapiens
  misc_RNA (1)...(19): siRNA sense strand
uuguaaacucucuggauau

SEQ ID NO: 2491791 - RNA, 19 nt, Homo sapiens
  misc_RNA (1)...(19): siRNA sense strand
auugagaaagucaggcaaa

SEQ ID NO: 2491792 - RNA, 19 nt, Homo sapiens
  misc_RNA (1)...(19): siRNA sense strand
auaaacaagaagcgccaaa

SEQ ID NO: 2491793 - RNA, 19 nt, Homo sapiens
  misc_RNA (1)...(19): siRNA sense strand
caaacagccaauagaggau

SEQ ID NO: 2491794 - RNA, 19 nt, Homo sapiens
  misc_RNA (1)...(19): siRNA sense strand
aggaugaacuaucugaaaa

SEQ ID NO: 2491795 - RNA, 19 nt, Homo sapiens
  misc_RNA (1)...(19): siRNA sense strand
gggaaggaggacccagcaa

SEQ ID NO: 2491796 - RNA, 19 nt, Homo sapiens
  misc_RNA (1)...(19): siRNA sense strand
aaaauguggaugagggaau

SEQ ID NO: 2491797 - RNA, 19 nt, Homo sapiens
  misc_RNA (1)...(19): siRNA sense strand
gggccguguggcuaggaaa

SEQ ID NO: 2491798 - RNA, 19 nt, Homo sapiens
  misc_RNA (1)...(19): siRNA sense strand
gacaaauagccgaaguguu

SEQ ID NO: 2491799 - RNA, 19 nt, Homo sapiens
  misc_RNA (1)...(19): siRNA sense strand
gccuguaguuuauaguaau

SEQ ID NO: 2491800 - RNA, 19 nt, Homo sapiens
  misc_RNA (1)...(19): siRNA sense strand
ucaaaacaaagcagaacaa

SEQ ID NO: 2491801 - RNA, 19 nt, Homo sapiens
  misc_RNA (1)...(19): siRNA sense strand
cugaauaauguacgggacu

SEQ ID NO: 2491802 - RNA, 19 nt, Homo sapiens
  misc_RNA (1)...(19): siRNA sense strand
aaggaugaacuaucugaaa

SEQ ID NO: 2491803 - RNA, 19 nt, Homo sapiens
  misc_RNA (1)...(19): siRNA sense strand
ccuuacaaccauaggauuu

SEQ ID NO: 2491804 - RNA, 19 nt, Homo sapiens
  misc_RNA (1)...(19): siRNA sense strand
cuguguacuuucaaggaua

SEQ ID NO: 2491805 - RNA, 19 nt, Homo sapiens
  misc_RNA (1)...(19): siRNA sense strand
acaaaagguuggacgaaau

SEQ ID NO: 2491806 - RNA, 19 nt, Homo sapiens
  misc_RNA (1)...(19): siRNA sense strand
augaugaggugguggcuau

SEQ ID NO: 2491807 - RNA, 19 nt, Homo sapiens
  misc_RNA (1)...(19): siRNA sense strand
cgguagaguuccaaaccau

SEQ ID NO: 2491808 - RNA, 19 nt, Homo sapiens
  misc_RNA (1)...(19): siRNA sense strand
caaccauaggauuuggaaa

SEQ ID NO: 2491809 - RNA, 19 nt, Homo sapiens
  misc_RNA (1)...(19): siRNA sense strand
aaacauagcuccuaccaca

SEQ ID NO: 2491810 - RNA, 19 nt, Homo sapiens
  misc_RNA (1)...(19): siRNA sense strand
guauaaacaagaagcgcca

SEQ ID NO: 2491811 - RNA, 19 nt, Homo sapiens
  misc_RNA (1)...(19): siRNA sense strand
ccuagaauauggagcagca

SEQ ID NO: 2491812 - RNA, 19 nt, Homo sapiens
  misc_RNA (1)...(19): siRNA sense strand
uuguaaacucucuggauau

SEQ ID NO: 2491813 - RNA, 19 nt, Homo sapiens
  misc_RNA (1)...(19): siRNA sense strand
auugagaaagucaggcaaa

SEQ ID NO: 2491814 - RNA, 19 nt, Homo sapiens
  misc_RNA (1)...(19): siRNA sense strand
auaaacaagaagcgccaaa

SEQ ID NO: 2491815 - RNA, 19 nt, Homo sapiens
  misc_RNA (1)...(19): siRNA sense strand
caaacagccaauagaggau

SEQ ID NO: 2491816 - RNA, 19 nt, Homo sapiens
  misc_RNA (1)...(19): siRNA sense strand
aggaugaacuaucugaaaa

SEQ ID NO: 2491817 - RNA, 19 nt, Homo sapiens
  misc_RNA (1)...(19): siRNA sense strand
gggaaggaggacccagcaa

SEQ ID NO: 2491818 - RNA, 19 nt, Homo sapiens
  misc_RNA (1)...(19): siRNA sense strand
aaaauguggaugagggaau

SEQ ID NO: 2491819 - RNA, 19 nt, Homo sapiens
  misc_RNA (1)...(19): siRNA sense strand
gggccguguggcuaggaaa

SEQ ID NO: 2491820 - RNA, 19 nt, Homo sapiens
  misc_RNA (1)...(19): siRNA sense strand
gacaaauagccgaaguguu

SEQ ID NO: 2491821 - RNA, 19 nt, Homo sapiens
  misc_RNA (1)...(19): siRNA sense strand
gccuguaguuuauaguaau

SEQ ID NO: 2491822 - RNA, 19 nt, Homo sapiens
  misc_RNA (1)...(19): siRNA sense strand
ucaaaacaaagcagaacaa

SEQ ID NO: 2491823 - RNA, 19 nt, Homo sapiens
  misc_RNA (1)...(19): siRNA sense strand
cugaauaauguacgggacu

SEQ ID NO: 2491824 - RNA, 19 nt, Homo sapiens
  misc_RNA (1)...(19): siRNA sense strand
aaggaugaacuaucugaaa

SEQ ID NO: 2491825 - RNA, 19 nt, Homo sapiens
  misc_RNA (1)...(19): siRNA sense strand
ccuuacaaccauaggauuu

SEQ ID NO: 2491826 - RNA, 19 nt, Homo sapiens
  misc_RNA (1)...(19): siRNA sense strand
cuguguacuuucaaggaua

SEQ ID NO: 2491827 - RNA, 19 nt, Homo sapiens
  misc_RNA (1)...(19): siRNA sense strand
acaaaagguuggacgaaau

SEQ ID NO: 2491828 - RNA, 19 nt, Homo sapiens
  misc_RNA (1)...(19): siRNA sense strand
augaugaggugguggcuau

SEQ ID NO: 2491829 - RNA, 19 nt, Homo sapiens
  misc_RNA (1)...(19): siRNA sense strand
cgguagaguuccaaaccau

SEQ ID NO: 2491830 - RNA, 19 nt, Homo sapiens
  misc_RNA (1)...(19): siRNA sense strand
caaccauaggauuuggaaa

SEQ ID NO: 2491831 - RNA, 19 nt, Homo sapiens
  misc_RNA (1)...(19): siRNA sense strand
aaacauagcuccuaccaca

SEQ ID NO: 2491832 - RNA, 19 nt, Homo sapiens
  misc_RNA (1)...(19): siRNA sense strand
guauaaacaagaagcgcca

SEQ ID NO: 2491833 - RNA, 19 nt, Homo sapiens
  misc_RNA (1)...(19): siRNA sense strand
ccuagaauauggagcagca

SEQ ID NO: 2491834 - RNA, 19 nt, Homo sapiens
  misc_RNA (1)...(19): siRNA sense strand
auugagaaagucaggcaaa

SEQ ID NO: 2491835 - RNA, 19 nt, Homo sapiens
  misc_RNA (1)...(19): siRNA sense strand
auaaacaagaagcgccaaa

SEQ ID NO: 2491836 - RNA, 19 nt, Homo sapiens
  misc_RNA (1)...(19): siRNA sense strand
caaacagccaauagaggau

SEQ ID NO: 2491837 - RNA, 19 nt, Homo sapiens
  misc_RNA (1)...(19): siRNA sense strand
aggaugaacuaucugaaaa

SEQ ID NO: 2491838 - RNA, 19 nt, Homo sapiens
  misc_RNA (1)...(19): siRNA sense strand
gggaaggaggacccagcaa

SEQ ID NO: 2491839 - RNA, 19 nt, Homo sapiens
  misc_RNA (1)...(19): siRNA sense strand
aaaauguggaugagggaau

SEQ ID NO: 2491840 - RNA, 19 nt, Homo sapiens
  misc_RNA (1)...(19): siRNA sense strand
gggccguguggcuaggaaa

SEQ ID NO: 2491841 - RNA, 19 nt, Homo sapiens
  misc_RNA (1)...(19): siRNA sense strand
gacaaauagccgaaguguu

SEQ ID NO: 2491842 - RNA, 19 nt, Homo sapiens
  misc_RNA (1)...(19): siRNA sense strand
ucaaaacaaagcagaacaa

SEQ ID NO: 2491843 - RNA, 19 nt, Homo sapiens
  misc_RNA (1)...(19): siRNA sense strand
cugaauaauguacgggacu

SEQ ID NO: 2491844 - RNA, 19 nt, Homo sapiens
  misc_RNA (1)...(19): siRNA sense strand
aaggaugaacuaucugaaa

SEQ ID NO: 2491845 - RNA, 19 nt, Homo sapiens
  misc_RNA (1)...(19): siRNA sense strand
uggagaagagaaagacaaa

SEQ ID NO: 2491846 - RNA, 19 nt, Homo sapiens
  misc_RNA (1)...(19): siRNA sense strand
gagaaagacaaacggaaaa

SEQ ID NO: 2491847 - RNA, 19 nt, Homo sapiens
  misc_RNA (1)...(19): siRNA sense strand
ucaguauggagaagagaaa

SEQ ID NO: 2491848 - RNA, 19 nt, Homo sapiens
  misc_RNA (1)...(19): siRNA sense strand
acagaaaggugcuggccau

SEQ ID NO: 2491849 - RNA, 19 nt, Homo sapiens
  misc_RNA (1)...(19): siRNA sense strand
cagcggucacagagaaaua

SEQ ID NO: 2491850 - RNA, 19 nt, Homo sapiens
  misc_RNA (1)...(19): siRNA sense strand
gggacaagccagagguuuu

SEQ ID NO: 2491851 - RNA, 19 nt, Homo sapiens
  misc_RNA (1)...(19): siRNA sense strand
uggauuugguauuggaaga

SEQ ID NO: 2491852 - RNA, 19 nt, Homo sapiens
  misc_RNA (1)...(19): siRNA sense strand
gguaaaaccuggacggacu

SEQ ID NO: 2491853 - RNA, 19 nt, Homo sapiens
  misc_RNA (1)...(19): siRNA sense strand
agauauaacuucuaccaga

SEQ ID NO: 2491854 - RNA, 19 nt, Homo sapiens
  misc_RNA (1)...(19): siRNA sense strand
aguauggagaagagaaaga

SEQ ID NO: 2491855 - RNA, 19 nt, Homo sapiens
  misc_RNA (1)...(19): siRNA sense strand
gcaaaaguuauaagggaga

SEQ ID NO: 2491856 - RNA, 19 nt, Homo sapiens
  misc_RNA (1)...(19): siRNA sense strand
ccgacgugguccagaacau

SEQ ID NO: 2491857 - RNA, 19 nt, Homo sapiens
  misc_RNA (1)...(19): siRNA sense strand
guguaaggguuguccgcuu

SEQ ID NO: 2491858 - RNA, 19 nt, Homo sapiens
  misc_RNA (1)...(19): siRNA sense strand
ucgagaaaggcuacuguaa

SEQ ID NO: 2491859 - RNA, 19 nt, Homo sapiens
  misc_RNA (1)...(19): siRNA sense strand
gggaugauucagacaaaca

SEQ ID NO: 2491860 - RNA, 19 nt, Homo sapiens
  misc_RNA (1)...(19): siRNA sense strand
gcagaugaagagagggcca

SEQ ID NO: 2491861 - RNA, 19 nt, Homo sapiens
  misc_RNA (1)...(19): siRNA sense strand
gacugaacaaagaggaauu

SEQ ID NO: 2491862 - RNA, 19 nt, Homo sapiens
  misc_RNA (1)...(19): siRNA sense strand
ugaucaugacucagaggaa

SEQ ID NO: 2491863 - RNA, 19 nt, Homo sapiens
  misc_RNA (1)...(19): siRNA sense strand
ugguauuggaagaaugaau

SEQ ID NO: 2491864 - RNA, 19 nt, Homo sapiens
  misc_RNA (1)...(19): siRNA sense strand
gaagaaugaaucuggcaca

SEQ ID NO: 2491865 - RNA, 19 nt, Homo sapiens
  misc_RNA (1)...(19): siRNA sense strand
aagagaaagacaaacggaa

SEQ ID NO: 2491866 - RNA, 19 nt, Homo sapiens
  misc_RNA (1)...(19): siRNA sense strand
uggcagaaucgcagaugau

SEQ ID NO: 2491867 - RNA, 19 nt, Homo sapiens
  misc_RNA (1)...(19): siRNA sense strand
cauggagacgaucgagaaa

SEQ ID NO: 2491868 - RNA, 19 nt, Homo sapiens
  misc_RNA (1)...(19): siRNA sense strand
cggguaaugaguugugauu

SEQ ID NO: 2491869 - RNA, 19 nt, Homo sapiens
  misc_RNA (1)...(19): siRNA sense strand
uggacugaacaaagaggaa

SEQ ID NO: 2491870 - RNA, 19 nt, Homo sapiens
  misc_RNA (1)...(19): siRNA sense strand
auggagaagagaaagacaa

SEQ ID NO: 2491871 - RNA, 19 nt, Homo sapiens
  misc_RNA (1)...(19): siRNA sense strand
auaaccugauggacagaaa

SEQ ID NO: 2491872 - RNA, 19 nt, Homo sapiens
  misc_RNA (1)...(19): siRNA sense strand
caggaucaucaauggcaaa

SEQ ID NO: 2491873 - RNA, 19 nt, Homo sapiens
  misc_RNA (1)...(19): siRNA sense strand
acagcaagcacaugcagaa

SEQ ID NO: 2491874 - RNA, 19 nt, Homo sapiens
  misc_RNA (1)...(19): siRNA sense strand
acaaucaauuuucggguaa

SEQ ID NO: 2491875 - RNA, 19 nt, Homo sapiens
  misc_RNA (1)...(19): siRNA sense strand
ggacugaacaaagaggaau

SEQ ID NO: 2491876 - RNA, 19 nt, Homo sapiens
  misc_RNA (1)...(19): siRNA sense strand
ccagaaagggcacaggcuu

SEQ ID NO: 2491877 - RNA, 19 nt, Homo sapiens
  misc_RNA (1)...(19): siRNA sense strand
agacgaucgagaaaggcua

SEQ ID NO: 2491878 - RNA, 19 nt, Homo sapiens
  misc_RNA (1)...(19): siRNA sense strand
acaaagaggaauuagcagu

SEQ ID NO: 2491879 - RNA, 19 nt, Homo sapiens
  misc_RNA (1)...(19): siRNA sense strand
ccucuguucuguaggaagu

SEQ ID NO: 2491880 - RNA, 19 nt, Homo sapiens
  misc_RNA (1)...(19): siRNA sense strand
cagaaagggcacaggcuug

SEQ ID NO: 2491881 - RNA, 19 nt, Homo sapiens
  misc_RNA (1)...(19): siRNA sense strand
ccacuucacccgagggaac

SEQ ID NO: 2491882 - RNA, 19 nt, Homo sapiens
  misc_RNA (1)...(19): siRNA sense strand
gcugagagguccugcacac

SEQ ID NO: 2491883 - RNA, 19 nt, Homo sapiens
  misc_RNA (1)...(19): siRNA sense strand
ugaccaaggcgccaggaga

SEQ ID NO: 2491884 - RNA, 19 nt, Homo sapiens
  misc_RNA (1)...(19): siRNA sense strand
ggauuugguauuggaagaa

SEQ ID NO: 2491885 - RNA, 19 nt, Homo sapiens
  misc_RNA (1)...(19): siRNA sense strand
cauuugugccucaguggua

SEQ ID NO: 2491886 - RNA, 19 nt, Homo sapiens
  misc_RNA (1)...(19): siRNA sense strand
uggagaagagaaagacaaa

SEQ ID NO: 2491887 - RNA, 19 nt, Homo sapiens
  misc_RNA (1)...(19): siRNA sense strand
gagaaagacaaacggaaaa

SEQ ID NO: 2491888 - RNA, 19 nt, Homo sapiens
  misc_RNA (1)...(19): siRNA sense strand
ucaguauggagaagagaaa

SEQ ID NO: 2491889 - RNA, 19 nt, Homo sapiens
  misc_RNA (1)...(19): siRNA sense strand
acagaaaggugcuggccau

SEQ ID NO: 2491890 - RNA, 19 nt, Homo sapiens
  misc_RNA (1)...(19): siRNA sense strand
cagcggucacagagaaaua

SEQ ID NO: 2491891 - RNA, 19 nt, Homo sapiens
  misc_RNA (1)...(19): siRNA sense strand
gggacaagccagagguuuu

SEQ ID NO: 2491892 - RNA, 19 nt, Homo sapiens
  misc_RNA (1)...(19): siRNA sense strand
uggauuugguauuggaaga

SEQ ID NO: 2491893 - RNA, 19 nt, Homo sapiens
  misc_RNA (1)...(19): siRNA sense strand
gguaaaaccuggacggacu

SEQ ID NO: 2491894 - RNA, 19 nt, Homo sapiens
  misc_RNA (1)...(19): siRNA sense strand
agauauaacuucuaccaga

SEQ ID NO: 2491895 - RNA, 19 nt, Homo sapiens
  misc_RNA (1)...(19): siRNA sense strand
aguauggagaagagaaaga

SEQ ID NO: 2491896 - RNA, 19 nt, Homo sapiens
  misc_RNA (1)...(19): siRNA sense strand
gcaaaaguuauaagggaga

SEQ ID NO: 2491897 - RNA, 19 nt, Homo sapiens
  misc_RNA (1)...(19): siRNA sense strand
ccgacgugguccagaacau

SEQ ID NO: 2491898 - RNA, 19 nt, Homo sapiens
  misc_RNA (1)...(19): siRNA sense strand
guguaaggguuguccgcuu

SEQ ID NO: 2491899 - RNA, 19 nt, Homo sapiens
  misc_RNA (1)...(19): siRNA sense strand
ucgagaaaggcuacuguaa

SEQ ID NO: 2491900 - RNA, 19 nt, Homo sapiens
  misc_RNA (1)...(19): siRNA sense strand
gggaugauucagacaaaca

SEQ ID NO: 2491901 - RNA, 19 nt, Homo sapiens
  misc_RNA (1)...(19): siRNA sense strand
gcagaugaagagagggcca

SEQ ID NO: 2491902 - RNA, 19 nt, Homo sapiens
  misc_RNA (1)...(19): siRNA sense strand
gacugaacaaagaggaauu

SEQ ID NO: 2491903 - RNA, 19 nt, Homo sapiens
  misc_RNA (1)...(19): siRNA sense strand
ugaucaugacucagaggaa

SEQ ID NO: 2491904 - RNA, 19 nt, Homo sapiens
  misc_RNA (1)...(19): siRNA sense strand
ugguauuggaagaaugaau

SEQ ID NO: 2491905 - RNA, 19 nt, Homo sapiens
  misc_RNA (1)...(19): siRNA sense strand
gaagaaugaaucuggcaca

SEQ ID NO: 2491906 - RNA, 19 nt, Homo sapiens
  misc_RNA (1)...(19): siRNA sense strand
aagagaaagacaaacggaa

SEQ ID NO: 2491907 - RNA, 19 nt, Homo sapiens
  misc_RNA (1)...(19): siRNA sense strand
uggcagaaucgcagaugau

SEQ ID NO: 2491908 - RNA, 19 nt, Homo sapiens
  misc_RNA (1)...(19): siRNA sense strand
cauggagacgaucgagaaa

SEQ ID NO: 2491909 - RNA, 19 nt, Homo sapiens
  misc_RNA (1)...(19): siRNA sense strand
cggguaaugaguugugauu

SEQ ID NO: 2491910 - RNA, 19 nt, Homo sapiens
  misc_RNA (1)...(19): siRNA sense strand
uggacugaacaaagaggaa

SEQ ID NO: 2491911 - RNA, 19 nt, Homo sapiens
  misc_RNA (1)...(19): siRNA sense strand
auggagaagagaaagacaa

SEQ ID NO: 2491912 - RNA, 19 nt, Homo sapiens
  misc_RNA (1)...(19): siRNA sense strand
auaaccugauggacagaaa

SEQ ID NO: 2491913 - RNA, 19 nt, Homo sapiens
  misc_RNA (1)...(19): siRNA sense strand
caggaucaucaauggcaaa

SEQ ID NO: 2491914 - RNA, 19 nt, Homo sapiens
  misc_RNA (1)...(19): siRNA sense strand
acagcaagcacaugcagaa

SEQ ID NO: 2491915 - RNA, 19 nt, Homo sapiens
  misc_RNA (1)...(19): siRNA sense strand
acaaucaauuuucggguaa

SEQ ID NO: 2491916 - RNA, 19 nt, Homo sapiens
  misc_RNA (1)...(19): siRNA sense strand
ggacugaacaaagaggaau

SEQ ID NO: 2491917 - RNA, 19 nt, Homo sapiens
  misc_RNA (1)...(19): siRNA sense strand
ccagaaagggcacaggcuu

SEQ ID NO: 2491918 - RNA, 19 nt, Homo sapiens
  misc_RNA (1)...(19): siRNA sense strand
agacgaucgagaaaggcua

SEQ ID NO: 2491919 - RNA, 19 nt, Homo sapiens
  misc_RNA (1)...(19): siRNA sense strand
acaaagaggaauuagcagu

SEQ ID NO: 2491920 - RNA, 19 nt, Homo sapiens
  misc_RNA (1)...(19): siRNA sense strand
ccucuguucuguaggaagu

SEQ ID NO: 2491921 - RNA, 19 nt, Homo sapiens
  misc_RNA (1)...(19): siRNA sense strand
cagaaagggcacaggcuug

SEQ ID NO: 2491922 - RNA, 19 nt, Homo sapiens
  misc_RNA (1)...(19): siRNA sense strand
ccacuucacccgagggaac

SEQ ID NO: 2491923 - RNA, 19 nt, Homo sapiens
  misc_RNA (1)...(19): siRNA sense strand
gcugagagguccugcacac

SEQ ID NO: 2491924 - RNA, 19 nt, Homo sapiens
  misc_RNA (1)...(19): siRNA sense strand
ugaccaaggcgccaggaga

SEQ ID NO: 2491925 - RNA, 19 nt, Homo sapiens
  misc_RNA (1)...(19): siRNA sense strand
ggauuugguauuggaagaa

SEQ ID NO: 2491926 - RNA, 19 nt, Homo sapiens
  misc_RNA (1)...(19): siRNA sense strand
cauuugugccucaguggua

SEQ ID NO: 2491927 - RNA, 19 nt, Homo sapiens
  misc_RNA (1)...(19): siRNA sense strand
ugaugauguucguggcaau

SEQ ID NO: 2491928 - RNA, 19 nt, Homo sapiens
  misc_RNA (1)...(19): siRNA sense strand
uggugaagaacuugaaaga

SEQ ID NO: 2491929 - RNA, 19 nt, Homo sapiens
  misc_RNA (1)...(19): siRNA sense strand
gaagaaauaugaagggcac

SEQ ID NO: 2491930 - RNA, 19 nt, Homo sapiens
  misc_RNA (1)...(19): siRNA sense strand
gggagaaaguggacccagu

SEQ ID NO: 2491931 - RNA, 19 nt, Homo sapiens
  misc_RNA (1)...(19): siRNA sense strand
agaagaaauaugaagggca

SEQ ID NO: 2491932 - RNA, 19 nt, Homo sapiens
  misc_RNA (1)...(19): siRNA sense strand
auggaugugaguuggauaa

SEQ ID NO: 2491933 - RNA, 19 nt, Homo sapiens
  misc_RNA (1)...(19): siRNA sense strand
caauaagcuucccaggaga

SEQ ID NO: 2491934 - RNA, 19 nt, Homo sapiens
  misc_RNA (1)...(19): siRNA sense strand
gcuuuaacccagaggccca

SEQ ID NO: 2491935 - RNA, 19 nt, Homo sapiens
  misc_RNA (1)...(19): siRNA sense strand
aguuggauaaggagaucaa

SEQ ID NO: 2491936 - RNA, 19 nt, Homo sapiens
  misc_RNA (1)...(19): siRNA sense strand
gugaguuggauaaggagau

SEQ ID NO: 2491937 - RNA, 19 nt, Homo sapiens
  misc_RNA (1)...(19): siRNA sense strand
ggcuugaauuuuagcuuaa

SEQ ID NO: 2491938 - RNA, 19 nt, Homo sapiens
  misc_RNA (1)...(19): siRNA sense strand
gagaaaggguucaaggcaa

SEQ ID NO: 2491939 - RNA, 19 nt, Homo sapiens
  misc_RNA (1)...(19): siRNA sense strand
ggacaggagcagugcccaa

SEQ ID NO: 2491940 - RNA, 19 nt, Homo sapiens
  misc_RNA (1)...(19): siRNA sense strand
augaagaaucugacguaaa

SEQ ID NO: 2491941 - RNA, 19 nt, Homo sapiens
  misc_RNA (1)...(19): siRNA sense strand
agcugaugguaguggaaua

SEQ ID NO: 2491942 - RNA, 19 nt, Homo sapiens
  misc_RNA (1)...(19): siRNA sense strand
aggaagaggaagaagagau

SEQ ID NO: 2491943 - RNA, 19 nt, Homo sapiens
  misc_RNA (1)...(19): siRNA sense strand
ucgaaaucgcccaggaaau

SEQ ID NO: 2491944 - RNA, 19 nt, Homo sapiens
  misc_RNA (1)...(19): siRNA sense strand
gccugaaagaagaggaaga

SEQ ID NO: 2491945 - RNA, 19 nt, Homo sapiens
  misc_RNA (1)...(19): siRNA sense strand
guugauaaccagggcgaaa

SEQ ID NO: 2491946 - RNA, 19 nt, Homo sapiens
  misc_RNA (1)...(19): siRNA sense strand
ucagauacaugcaggccaa

SEQ ID NO: 2491947 - RNA, 19 nt, Homo sapiens
  misc_RNA (1)...(19): siRNA sense strand
gggucauggucgcguggaa

SEQ ID NO: 2491948 - RNA, 19 nt, Homo sapiens
  misc_RNA (1)...(19): siRNA sense strand
ugaaagaagaggaagagga

SEQ ID NO: 2491949 - RNA, 19 nt, Homo sapiens
  misc_RNA (1)...(19): siRNA sense strand
aaagcauggcugagagcaa

SEQ ID NO: 2491950 - RNA, 19 nt, Homo sapiens
  misc_RNA (1)...(19): siRNA sense strand
uggaauaugcugagaguac

SEQ ID NO: 2491951 - RNA, 19 nt, Homo sapiens
  misc_RNA (1)...(19): siRNA sense strand
ggguucaagaagugccaua

SEQ ID NO: 2491952 - RNA, 19 nt, Homo sapiens
  misc_RNA (1)...(19): siRNA sense strand
gagccugaaagaagaggaa

SEQ ID NO: 2491953 - RNA, 19 nt, Homo sapiens
  misc_RNA (1)...(19): siRNA sense strand
uggccgaauaugucagaua

SEQ ID NO: 2491954 - RNA, 19 nt, Homo sapiens
  misc_RNA (1)...(19): siRNA sense strand
ccagcaacuuggaggagga

SEQ ID NO: 2491955 - RNA, 19 nt, Homo sapiens
  misc_RNA (1)...(19): siRNA sense strand
aagaggaagaagagauuca

SEQ ID NO: 2491956 - RNA, 19 nt, Homo sapiens
  misc_RNA (1)...(19): siRNA sense strand
gguaugaccucucggcuga

SEQ ID NO: 2491957 - RNA, 19 nt, Homo sapiens
  misc_RNA (1)...(19): siRNA sense strand
aguuuggaguauuggaaaa

SEQ ID NO: 2491958 - RNA, 19 nt, Homo sapiens
  misc_RNA (1)...(19): siRNA sense strand
aagaggaagaggaagaaga

SEQ ID NO: 2491959 - RNA, 19 nt, Homo sapiens
  misc_RNA (1)...(19): siRNA sense strand
aagaaugaugagaagguau

SEQ ID NO: 2491960 - RNA, 19 nt, Homo sapiens
  misc_RNA (1)...(19): siRNA sense strand
ccggaagaccugacugaga

SEQ ID NO: 2491961 - RNA, 19 nt, Homo sapiens
  misc_RNA (1)...(19): siRNA sense strand
gguuggugucgaagaauga

SEQ ID NO: 2491962 - RNA, 19 nt, Homo sapiens
  misc_RNA (1)...(19): siRNA sense strand
agaaaggguucaaggcaag

SEQ ID NO: 2491963 - RNA, 19 nt, Homo sapiens
  misc_RNA (1)...(19): siRNA sense strand
cugaagacuugaugcagga

SEQ ID NO: 2491964 - RNA, 19 nt, Homo sapiens
  misc_RNA (1)...(19): siRNA sense strand
gccaggaggaggagaacca

SEQ ID NO: 2491965 - RNA, 19 nt, Homo sapiens
  misc_RNA (1)...(19): siRNA sense strand
guugccaggaggaggagaa

SEQ ID NO: 2491966 - RNA, 19 nt, Homo sapiens
  misc_RNA (1)...(19): siRNA sense strand
cugaugacauagcugggaa

SEQ ID NO: 2491967 - RNA, 19 nt, Homo sapiens
  misc_RNA (1)...(19): siRNA sense strand
caguuuggaguauuggaaa

SEQ ID NO: 2491968 - RNA, 19 nt, Homo sapiens
  misc_RNA (1)...(19): siRNA sense strand
gauucagagccgggaacua

SEQ ID NO: 2491969 - RNA, 19 nt, Homo sapiens
  misc_RNA (1)...(19): siRNA sense strand
acgcaggguucaagcugau

SEQ ID NO: 2491970 - RNA, 19 nt, Homo sapiens
  misc_RNA (1)...(19): siRNA sense strand
ggcgcaaagugaagccaca

SEQ ID NO: 2491971 - RNA, 19 nt, Homo sapiens
  misc_RNA (1)...(19): siRNA sense strand
aaagauugugacaccgaaa

SEQ ID NO: 2491972 - RNA, 19 nt, Homo sapiens
  misc_RNA (1)...(19): siRNA sense strand
ucgcagaaauuguaggagu

SEQ ID NO: 2491973 - RNA, 19 nt, Homo sapiens
  misc_RNA (1)...(19): siRNA sense strand
agaaauuguaggagugguu

SEQ ID NO: 2491974 - RNA, 19 nt, Homo sapiens
  misc_RNA (1)...(19): siRNA sense strand
augaagaaguaaugaccca

SEQ ID NO: 2491975 - RNA, 19 nt, Homo sapiens
  misc_RNA (1)...(19): siRNA sense strand
ccaaagaguucaaagaguc

SEQ ID NO: 2491976 - RNA, 19 nt, Homo sapiens
  misc_RNA (1)...(19): siRNA sense strand
cgaacaggacacagccgaa

SEQ ID NO: 2491977 - RNA, 19 nt, Homo sapiens
  misc_RNA (1)...(19): siRNA sense strand
gauaaugaaaccagcagga

SEQ ID NO: 2491978 - RNA, 19 nt, Homo sapiens
  misc_RNA (1)...(19): siRNA sense strand
aggaagaaugaagaaguaa

SEQ ID NO: 2491979 - RNA, 19 nt, Homo sapiens
  misc_RNA (1)...(19): siRNA sense strand
aggaugugugacagaggua

SEQ ID NO: 2491980 - RNA, 19 nt, Homo sapiens
  misc_RNA (1)...(19): siRNA sense strand
gcuuaugaguacugcaacu

SEQ ID NO: 2491981 - RNA, 19 nt, Homo sapiens
  misc_RNA (1)...(19): siRNA sense strand
aguagaacguguacgcaga

SEQ ID NO: 2491982 - RNA, 19 nt, Homo sapiens
  misc_RNA (1)...(19): siRNA sense strand
ccugaaugaccuugaaaau

SEQ ID NO: 2491983 - RNA, 19 nt, Homo sapiens
  misc_RNA (1)...(19): siRNA sense strand
agguaauggaugaugaagu

SEQ ID NO: 2491984 - RNA, 19 nt, Homo sapiens
  misc_RNA (1)...(19): siRNA sense strand
gcuuaugaguacugcaacu

SEQ ID NO: 2491985 - RNA, 19 nt, Homo sapiens
  misc_RNA (1)...(19): siRNA sense strand
aguagaacguguacgcaga

SEQ ID NO: 2491986 - RNA, 19 nt, Homo sapiens
  misc_RNA (1)...(19): siRNA sense strand
ccugaaugaccuugaaaau

SEQ ID NO: 2491987 - RNA, 19 nt, Homo sapiens
  misc_RNA (1)...(19): siRNA sense strand
agguaauggaugaugaagu

SEQ ID NO: 2491988 - RNA, 19 nt, Homo sapiens
  misc_RNA (1)...(19): siRNA sense strand
gcuuaugaguacugcaacu

SEQ ID NO: 2491989 - RNA, 19 nt, Homo sapiens
  misc_RNA (1)...(19): siRNA sense strand
aguagaacguguacgcaga

SEQ ID NO: 2491990 - RNA, 19 nt, Homo sapiens
  misc_RNA (1)...(19): siRNA sense strand
ccugaaugaccuugaaaau

SEQ ID NO: 2491991 - RNA, 19 nt, Homo sapiens
  misc_RNA (1)...(19): siRNA sense strand
agguaauggaugaugaagu

SEQ ID NO: 2491992 - RNA, 19 nt, Homo sapiens
  misc_RNA (1)...(19): siRNA sense strand
gcuuaugaguacugcaacu

SEQ ID NO: 2491993 - RNA, 19 nt, Homo sapiens
  misc_RNA (1)...(19): siRNA sense strand
aguagaacguguacgcaga

SEQ ID NO: 2491994 - RNA, 19 nt, Homo sapiens
  misc_RNA (1)...(19): siRNA sense strand
ccugaaugaccuugaaaau

SEQ ID NO: 2491995 - RNA, 19 nt, Homo sapiens
  misc_RNA (1)...(19): siRNA sense strand
agguaauggaugaugaagu

SEQ ID NO: 2491996 - RNA, 19 nt, Homo sapiens
  misc_RNA (1)...(19): siRNA sense strand
ggaaaucaucuuuacggaa

SEQ ID NO: 2491997 - RNA, 19 nt, Homo sapiens
  misc_RNA (1)...(19): siRNA sense strand
auuugaaagcacaggaaga

SEQ ID NO: 2491998 - RNA, 19 nt, Homo sapiens
  misc_RNA (1)...(19): siRNA sense strand
guccagcauuguagggcaa

SEQ ID NO: 2491999 - RNA, 19 nt, Homo sapiens
  misc_RNA (1)...(19): siRNA sense strand
aggaagaagcucaaggucu

SEQ ID NO: 2492000 - RNA, 19 nt, Homo sapiens
  misc_RNA (1)...(19): siRNA sense strand
gccuaaaaguauacaggau

SEQ ID NO: 2492001 - RNA, 19 nt, Homo sapiens
  misc_RNA (1)...(19): siRNA sense strand
gggaaaucaucuuuacgga

SEQ ID NO: 2492002 - RNA, 19 nt, Homo sapiens
  misc_RNA (1)...(19): siRNA sense strand
ucguauuggagcugauaga

SEQ ID NO: 2492003 - RNA, 19 nt, Homo sapiens
  misc_RNA (1)...(19): siRNA sense strand
auuugaaagcacaggaaga

SEQ ID NO: 2492004 - RNA, 19 nt, Homo sapiens
  misc_RNA (1)...(19): siRNA sense strand
guccagcauuguagggcaa

SEQ ID NO: 2492005 - RNA, 19 nt, Homo sapiens
  misc_RNA (1)...(19): siRNA sense strand
aggaagaagcucaaggucu

SEQ ID NO: 2492006 - RNA, 19 nt, Homo sapiens
  misc_RNA (1)...(19): siRNA sense strand
gccuaaaaguauacaggau

SEQ ID NO: 2492007 - RNA, 19 nt, Homo sapiens
  misc_RNA (1)...(19): siRNA sense strand
ucguauuggagcugauaga

SEQ ID NO: 2492008 - RNA, 19 nt, Homo sapiens
  misc_RNA (1)...(19): siRNA sense strand
auuugaaagcacaggaaga

SEQ ID NO: 2492009 - RNA, 19 nt, Homo sapiens
  misc_RNA (1)...(19): siRNA sense strand
guccagcauuguagggcaa

SEQ ID NO: 2492010 - RNA, 19 nt, Homo sapiens
  misc_RNA (1)...(19): siRNA sense strand
aggaagaagcucaaggucu

SEQ ID NO: 2492011 - RNA, 19 nt, Homo sapiens
  misc_RNA (1)...(19): siRNA sense strand
gccuaaaaguauacaggau

SEQ ID NO: 2492012 - RNA, 19 nt, Homo sapiens
  misc_RNA (1)...(19): siRNA sense strand
ucguauuggagcugauaga

SEQ ID NO: 2492013 - RNA, 19 nt, Homo sapiens
  misc_RNA (1)...(19): siRNA sense strand
ucaaguacaucaaggccaa

SEQ ID NO: 2492014 - RNA, 19 nt, Homo sapiens
  misc_RNA (1)...(19): siRNA sense strand
ucaaggagauggacgccua

SEQ ID NO: 2492015 - RNA, 19 nt, Homo sapiens
  misc_RNA (1)...(19): siRNA sense strand
gccugaagaacaagaccaa

SEQ ID NO: 2492016 - RNA, 19 nt, Homo sapiens
  misc_RNA (1)...(19): siRNA sense strand
cggccaagaagaacaccaa

SEQ ID NO: 2492017 - RNA, 19 nt, Homo sapiens
  misc_RNA (1)...(19): siRNA sense strand
agcagauccuggaggucaa

SEQ ID NO: 2492018 - RNA, 19 nt, Homo sapiens
  misc_RNA (1)...(19): siRNA sense strand
acuucgaggugucggccaa

SEQ ID NO: 2492019 - RNA, 19 nt, Homo sapiens
  misc_RNA (1)...(19): siRNA sense strand
ggcaagagcuccaucgugu

SEQ ID NO: 2492020 - RNA, 19 nt, Homo sapiens
  misc_RNA (1)...(19): siRNA sense strand
ccaacguggacgagauguu

SEQ ID NO: 2492021 - RNA, 19 nt, Homo sapiens
  misc_RNA (1)...(19): siRNA sense strand
aguccuucgaugaggucaa

SEQ ID NO: 2492022 - RNA, 19 nt, Homo sapiens
  misc_RNA (1)...(19): siRNA sense strand
aggugucggccaagaagaa

SEQ ID NO: 2492023 - RNA, 19 nt, Homo sapiens
  misc_RNA (1)...(19): siRNA sense strand
aguucuggguggagcucaa

SEQ ID NO: 2492024 - RNA, 19 nt, Homo sapiens
  misc_RNA (1)...(19): siRNA sense strand
aguucuggguggagcucaa

SEQ ID NO: 2492025 - RNA, 19 nt, Homo sapiens
  misc_RNA (1)...(19): siRNA sense strand
aguucuggguggagcucaa

SEQ ID NO: 2492026 - RNA, 19 nt, Homo sapiens
  misc_RNA (1)...(19): siRNA sense strand
aagagaagcaaaagugaaa

SEQ ID NO: 2492027 - RNA, 19 nt, Homo sapiens
  misc_RNA (1)...(19): siRNA sense strand
cuggagaauuacaagaaaa

SEQ ID NO: 2492028 - RNA, 19 nt, Homo sapiens
  misc_RNA (1)...(19): siRNA sense strand
uggaagugaacguggacau

SEQ ID NO: 2492029 - RNA, 19 nt, Homo sapiens
  misc_RNA (1)...(19): siRNA sense strand
agacaagccucguggagcu

SEQ ID NO: 2492030 - RNA, 19 nt, Homo sapiens
  misc_RNA (1)...(19): siRNA sense strand
aagcugaacuagaugcaga

SEQ ID NO: 2492031 - RNA, 19 nt, Homo sapiens
  misc_RNA (1)...(19): siRNA sense strand
cagauggaccugauggaca

SEQ ID NO: 2492032 - RNA, 19 nt, Homo sapiens
  misc_RNA (1)...(19): siRNA sense strand
gcgcacugggagaagaaaa

SEQ ID NO: 2492033 - RNA, 19 nt, Homo sapiens
  misc_RNA (1)...(19): siRNA sense strand
agccaaagacugugcaagu

SEQ ID NO: 2492034 - RNA, 19 nt, Homo sapiens
  misc_RNA (1)...(19): siRNA sense strand
agcuuuaaucgcagacuua

SEQ ID NO: 2492035 - RNA, 19 nt, Homo sapiens
  misc_RNA (1)...(19): siRNA sense strand
uuagaauccaugacagcaa

SEQ ID NO: 2492036 - RNA, 19 nt, Homo sapiens
  misc_RNA (1)...(19): siRNA sense strand
ugaacuagaugcagagcac

SEQ ID NO: 2492037 - RNA, 19 nt, Homo sapiens
  misc_RNA (1)...(19): siRNA sense strand
caagagaagcaaaagugaa

SEQ ID NO: 2492038 - RNA, 19 nt, Homo sapiens
  misc_RNA (1)...(19): siRNA sense strand
aagagaagcaaaagugaaa

SEQ ID NO: 2492039 - RNA, 19 nt, Homo sapiens
  misc_RNA (1)...(19): siRNA sense strand
cuggagaauuacaagaaaa

SEQ ID NO: 2492040 - RNA, 19 nt, Homo sapiens
  misc_RNA (1)...(19): siRNA sense strand
uggaagugaacguggacau

SEQ ID NO: 2492041 - RNA, 19 nt, Homo sapiens
  misc_RNA (1)...(19): siRNA sense strand
agacaagccucguggagcu

SEQ ID NO: 2492042 - RNA, 19 nt, Homo sapiens
  misc_RNA (1)...(19): siRNA sense strand
aagcugaacuagaugcaga

SEQ ID NO: 2492043 - RNA, 19 nt, Homo sapiens
  misc_RNA (1)...(19): siRNA sense strand
cagauggaccugauggaca

SEQ ID NO: 2492044 - RNA, 19 nt, Homo sapiens
  misc_RNA (1)...(19): siRNA sense strand
gcgcacugggagaagaaaa

SEQ ID NO: 2492045 - RNA, 19 nt, Homo sapiens
  misc_RNA (1)...(19): siRNA sense strand
agccaaagacugugcaagu

SEQ ID NO: 2492046 - RNA, 19 nt, Homo sapiens
  misc_RNA (1)...(19): siRNA sense strand
agcuuuaaucgcagacuua

SEQ ID NO: 2492047 - RNA, 19 nt, Homo sapiens
  misc_RNA (1)...(19): siRNA sense strand
uuagaauccaugacagcaa

SEQ ID NO: 2492048 - RNA, 19 nt, Homo sapiens
  misc_RNA (1)...(19): siRNA sense strand
ugaacuagaugcagagcac

SEQ ID NO: 2492049 - RNA, 19 nt, Homo sapiens
  misc_RNA (1)...(19): siRNA sense strand
caagagaagcaaaagugaa

SEQ ID NO: 2492050 - RNA, 19 nt, Homo sapiens
  misc_RNA (1)...(19): siRNA sense strand
cuggagaauuacaagaaaa

SEQ ID NO: 2492051 - RNA, 19 nt, Homo sapiens
  misc_RNA (1)...(19): siRNA sense strand
uggaagugaacguggacau

SEQ ID NO: 2492052 - RNA, 19 nt, Homo sapiens
  misc_RNA (1)...(19): siRNA sense strand
agacaagccucguggagcu

SEQ ID NO: 2492053 - RNA, 19 nt, Homo sapiens
  misc_RNA (1)...(19): siRNA sense strand
aagcugaacuagaugcaga

SEQ ID NO: 2492054 - RNA, 19 nt, Homo sapiens
  misc_RNA (1)...(19): siRNA sense strand
cagauggaccugauggaca

SEQ ID NO: 2492055 - RNA, 19 nt, Homo sapiens
  misc_RNA (1)...(19): siRNA sense strand
gcgcacugggagaagaaaa

SEQ ID NO: 2492056 - RNA, 19 nt, Homo sapiens
  misc_RNA (1)...(19): siRNA sense strand
agcuuuaaucgcagacuua

SEQ ID NO: 2492057 - RNA, 19 nt, Homo sapiens
  misc_RNA (1)...(19): siRNA sense strand
uuagaauccaugacagcaa

SEQ ID NO: 2492058 - RNA, 19 nt, Homo sapiens
  misc_RNA (1)...(19): siRNA sense strand
ugaacuagaugcagagcac

SEQ ID NO: 2492059 - RNA, 19 nt, Homo sapiens
  misc_RNA (1)...(19): siRNA sense strand
cagcaagcguagucgagga

SEQ ID NO: 2492060 - RNA, 19 nt, Homo sapiens
  misc_RNA (1)...(19): siRNA sense strand
gcguauagcuucuggccug

SEQ ID NO: 2492061 - RNA, 19 nt, Homo sapiens
  misc_RNA (1)...(19): siRNA sense strand
gcuuuauaaugguggccca

SEQ ID NO: 2492062 - RNA, 19 nt, Homo sapiens
  misc_RNA (1)...(19): siRNA sense strand
gcaagaaguacaaagugga

SEQ ID NO: 2492063 - RNA, 19 nt, Homo sapiens
  misc_RNA (1)...(19): siRNA sense strand
cuggauuguuggacgaguu

SEQ ID NO: 2492064 - RNA, 19 nt, Homo sapiens
  misc_RNA (1)...(19): siRNA sense strand
gagaagaggcagaggguga

SEQ ID NO: 2492065 - RNA, 19 nt, Homo sapiens
  misc_RNA (1)...(19): siRNA sense strand
cggaagaagaggaagcgaa

SEQ ID NO: 2492066 - RNA, 19 nt, Homo sapiens
  misc_RNA (1)...(19): siRNA sense strand
gcgaagaugaaguggacca

SEQ ID NO: 2492067 - RNA, 19 nt, Homo sapiens
  misc_RNA (1)...(19): siRNA sense strand
ggagaaagcaggaacggga

SEQ ID NO: 2492068 - RNA, 19 nt, Homo sapiens
  misc_RNA (1)...(19): siRNA sense strand
uggcaaaacucaaggcuca

SEQ ID NO: 2492069 - RNA, 19 nt, Homo sapiens
  misc_RNA (1)...(19): siRNA sense strand
agaaaagagaagaggcaga

SEQ ID NO: 2492070 - RNA, 19 nt, Homo sapiens
  misc_RNA (1)...(19): siRNA sense strand
gcagaaaagagaagaggca

SEQ ID NO: 2492071 - RNA, 19 nt, Homo sapiens
  misc_RNA (1)...(19): siRNA sense strand
agaaauuccggaagcgaga

SEQ ID NO: 2492072 - RNA, 19 nt, Homo sapiens
  misc_RNA (1)...(19): siRNA sense strand
ggcagagggugaaggggaa

SEQ ID NO: 2492073 - RNA, 19 nt, Homo sapiens
  misc_RNA (1)...(19): siRNA sense strand
cccugaagcgcaaggagaa

SEQ ID NO: 2492074 - RNA, 19 nt, Homo sapiens
  misc_RNA (1)...(19): siRNA sense strand
ccggcgugguggagaagau

SEQ ID NO: 2492075 - RNA, 19 nt, Homo sapiens
  misc_RNA (1)...(19): siRNA sense strand
aggcggagggcgugaagau

SEQ ID NO: 2492076 - RNA, 19 nt, Homo sapiens
  misc_RNA (1)...(19): siRNA sense strand
ucaauaagguggaggugag

SEQ ID NO: 2492077 - RNA, 19 nt, Homo sapiens
  misc_RNA (1)...(19): siRNA sense strand
gagaagagaaggcugcuga

SEQ ID NO: 2492078 - RNA, 19 nt, Homo sapiens
  misc_RNA (1)...(19): siRNA sense strand
gggaccggaagaagaggaa

SEQ ID NO: 2492079 - RNA, 19 nt, Homo sapiens
  misc_RNA (1)...(19): siRNA sense strand
ucuacaaggcggagggcgu

SEQ ID NO: 2492080 - RNA, 19 nt, Homo sapiens
  misc_RNA (1)...(19): siRNA sense strand
gcccugaagcgcaaggaga

SEQ ID NO: 2492081 - RNA, 19 nt, Homo sapiens
  misc_RNA (1)...(19): siRNA sense strand
agucaaggacauuggaaaa

SEQ ID NO: 2492082 - RNA, 19 nt, Homo sapiens
  misc_RNA (1)...(19): siRNA sense strand
gcuucaacacggagcaaau

SEQ ID NO: 2492083 - RNA, 19 nt, Homo sapiens
  misc_RNA (1)...(19): siRNA sense strand
uguugaaaauggacagaua

SEQ ID NO: 2492084 - RNA, 19 nt, Homo sapiens
  misc_RNA (1)...(19): siRNA sense strand
gagcaaauguuaauggauc

SEQ ID NO: 2492085 - RNA, 19 nt, Homo sapiens
  misc_RNA (1)...(19): siRNA sense strand
cagcuauucaagauggaua

SEQ ID NO: 2492086 - RNA, 19 nt, Homo sapiens
  misc_RNA (1)...(19): siRNA sense strand
aagucaaggacauuggaaa

SEQ ID NO: 2492087 - RNA, 19 nt, Homo sapiens
  misc_RNA (1)...(19): siRNA sense strand
gaguuuacuaauuggaaga

SEQ ID NO: 2492088 - RNA, 19 nt, Homo sapiens
  misc_RNA (1)...(19): siRNA sense strand
caucuuugucguuuggaaa

SEQ ID NO: 2492089 - RNA, 19 nt, Homo sapiens
  misc_RNA (1)...(19): siRNA sense strand
aggaaaaugcugagaucau

SEQ ID NO: 2492090 - RNA, 19 nt, Homo sapiens
  misc_RNA (1)...(19): siRNA sense strand
ggacaaagcuacacccuug

SEQ ID NO: 2492091 - RNA, 19 nt, Homo sapiens
  misc_RNA (1)...(19): siRNA sense strand
agaaauauuacuccggaau

SEQ ID NO: 2492092 - RNA, 19 nt, Homo sapiens
  misc_RNA (1)...(19): siRNA sense strand
gagcaaacaaggaaugcca

SEQ ID NO: 2492093 - RNA, 19 nt, Homo sapiens
  misc_RNA (1)...(19): siRNA sense strand
acaaggaaugccaggauga

SEQ ID NO: 2492094 - RNA, 19 nt, Homo sapiens
  misc_RNA (1)...(19): siRNA sense strand
uagaaauauuacuccggaa

SEQ ID NO: 2492095 - RNA, 19 nt, Homo sapiens
  misc_RNA (1)...(19): siRNA sense strand
gccugaaguacgagaaguu

SEQ ID NO: 2492096 - RNA, 19 nt, Homo sapiens
  misc_RNA (1)...(19): siRNA sense strand
uggacagauagauguguua

SEQ ID NO: 2492097 - RNA, 19 nt, Homo sapiens
  misc_RNA (1)...(19): siRNA sense strand
ucaugcaauuaaagcacaa

SEQ ID NO: 2492098 - RNA, 19 nt, Homo sapiens
  misc_RNA (1)...(19): siRNA sense strand
cucaagagggacacacaaa

SEQ ID NO: 2492099 - RNA, 19 nt, Homo sapiens
  misc_RNA (1)...(19): siRNA sense strand
ccaaaaggacugugaguuc

SEQ ID NO: 2492100 - RNA, 19 nt, Homo sapiens
  misc_RNA (1)...(19): siRNA sense strand
acugugaguucuuuggaau

SEQ ID NO: 2492101 - RNA, 19 nt, Homo sapiens
  misc_RNA (1)...(19): siRNA sense strand
gcucaagagggacacacaa

SEQ ID NO: 2492102 - RNA, 19 nt, Homo sapiens
  misc_RNA (1)...(19): siRNA sense strand
acgagaaguuuucgauauu

SEQ ID NO: 2492103 - RNA, 19 nt, Homo sapiens
  misc_RNA (1)...(19): siRNA sense strand
agcuauucaagauggauaa

SEQ ID NO: 2492104 - RNA, 19 nt, Homo sapiens
  misc_RNA (1)...(19): siRNA sense strand
gaaaaugcugagaucauaa

SEQ ID NO: 2492105 - RNA, 19 nt, Homo sapiens
  misc_RNA (1)...(19): siRNA sense strand
aggaaugccaggaugacuu

SEQ ID NO: 2492106 - RNA, 19 nt, Homo sapiens
  misc_RNA (1)...(19): siRNA sense strand
ucuuuggaauugugaacau

SEQ ID NO: 2492107 - RNA, 19 nt, Homo sapiens
  misc_RNA (1)...(19): siRNA sense strand
ggaaaaugcugagaucaua

SEQ ID NO: 2492108 - RNA, 19 nt, Homo sapiens
  misc_RNA (1)...(19): siRNA sense strand
agucaaggacauuggaaaa

SEQ ID NO: 2492109 - RNA, 19 nt, Homo sapiens
  misc_RNA (1)...(19): siRNA sense strand
gcuucaacacggagcaaau

SEQ ID NO: 2492110 - RNA, 19 nt, Homo sapiens
  misc_RNA (1)...(19): siRNA sense strand
uguugaaaauggacagaua

SEQ ID NO: 2492111 - RNA, 19 nt, Homo sapiens
  misc_RNA (1)...(19): siRNA sense strand
gagcaaauguuaauggauc

SEQ ID NO: 2492112 - RNA, 19 nt, Homo sapiens
  misc_RNA (1)...(19): siRNA sense strand
cagcuauucaagauggaua

SEQ ID NO: 2492113 - RNA, 19 nt, Homo sapiens
  misc_RNA (1)...(19): siRNA sense strand
aagucaaggacauuggaaa

SEQ ID NO: 2492114 - RNA, 19 nt, Homo sapiens
  misc_RNA (1)...(19): siRNA sense strand
gaguuuacuaauuggaaga

SEQ ID NO: 2492115 - RNA, 19 nt, Homo sapiens
  misc_RNA (1)...(19): siRNA sense strand
caucuuugucguuuggaaa

SEQ ID NO: 2492116 - RNA, 19 nt, Homo sapiens
  misc_RNA (1)...(19): siRNA sense strand
aggaaaaugcugagaucau

SEQ ID NO: 2492117 - RNA, 19 nt, Homo sapiens
  misc_RNA (1)...(19): siRNA sense strand
ggacaaagcuacacccuug

SEQ ID NO: 2492118 - RNA, 19 nt, Homo sapiens
  misc_RNA (1)...(19): siRNA sense strand
agaaauauuacuccggaau

SEQ ID NO: 2492119 - RNA, 19 nt, Homo sapiens
  misc_RNA (1)...(19): siRNA sense strand
gagcaaacaaggaaugcca

SEQ ID NO: 2492120 - RNA, 19 nt, Homo sapiens
  misc_RNA (1)...(19): siRNA sense strand
acaaggaaugccaggauga

SEQ ID NO: 2492121 - RNA, 19 nt, Homo sapiens
  misc_RNA (1)...(19): siRNA sense strand
uagaaauauuacuccggaa

SEQ ID NO: 2492122 - RNA, 19 nt, Homo sapiens
  misc_RNA (1)...(19): siRNA sense strand
gccugaaguacgagaaguu

SEQ ID NO: 2492123 - RNA, 19 nt, Homo sapiens
  misc_RNA (1)...(19): siRNA sense strand
uggacagauagauguguua

SEQ ID NO: 2492124 - RNA, 19 nt, Homo sapiens
  misc_RNA (1)...(19): siRNA sense strand
ucaugcaauuaaagcacaa

SEQ ID NO: 2492125 - RNA, 19 nt, Homo sapiens
  misc_RNA (1)...(19): siRNA sense strand
cucaagagggacacacaaa

SEQ ID NO: 2492126 - RNA, 19 nt, Homo sapiens
  misc_RNA (1)...(19): siRNA sense strand
ccaaaaggacugugaguuc

SEQ ID NO: 2492127 - RNA, 19 nt, Homo sapiens
  misc_RNA (1)...(19): siRNA sense strand
acugugaguucuuuggaau

SEQ ID NO: 2492128 - RNA, 19 nt, Homo sapiens
  misc_RNA (1)...(19): siRNA sense strand
gcucaagagggacacacaa

SEQ ID NO: 2492129 - RNA, 19 nt, Homo sapiens
  misc_RNA (1)...(19): siRNA sense strand
acgagaaguuuucgauauu

SEQ ID NO: 2492130 - RNA, 19 nt, Homo sapiens
  misc_RNA (1)...(19): siRNA sense strand
agcuauucaagauggauaa

SEQ ID NO: 2492131 - RNA, 19 nt, Homo sapiens
  misc_RNA (1)...(19): siRNA sense strand
gaaaaugcugagaucauaa

SEQ ID NO: 2492132 - RNA, 19 nt, Homo sapiens
  misc_RNA (1)...(19): siRNA sense strand
aggaaugccaggaugacuu

SEQ ID NO: 2492133 - RNA, 19 nt, Homo sapiens
  misc_RNA (1)...(19): siRNA sense strand
ucuuuggaauugugaacau

SEQ ID NO: 2492134 - RNA, 19 nt, Homo sapiens
  misc_RNA (1)...(19): siRNA sense strand
ggaaaaugcugagaucaua

SEQ ID NO: 2492135 - RNA, 19 nt, Homo sapiens
  misc_RNA (1)...(19): siRNA sense strand
gggaagaagcccaggguga

SEQ ID NO: 2492136 - RNA, 19 nt, Homo sapiens
  misc_RNA (1)...(19): siRNA sense strand
cggugaggucugagaagaa

SEQ ID NO: 2492137 - RNA, 19 nt, Homo sapiens
  misc_RNA (1)...(19): siRNA sense strand
agucagaagaggaggagga

SEQ ID NO: 2492138 - RNA, 19 nt, Homo sapiens
  misc_RNA (1)...(19): siRNA sense strand
ggucugagaagaaggccaa

SEQ ID NO: 2492139 - RNA, 19 nt, Homo sapiens
  misc_RNA (1)...(19): siRNA sense strand
guucagaaaaggaggaaga

SEQ ID NO: 2492140 - RNA, 19 nt, Homo sapiens
  misc_RNA (1)...(19): siRNA sense strand
aggaggaagaggacgacaa

SEQ ID NO: 2492141 - RNA, 19 nt, Homo sapiens
  misc_RNA (1)...(19): siRNA sense strand
augaggaggaggaggaaga

SEQ ID NO: 2492142 - RNA, 19 nt, Homo sapiens
  misc_RNA (1)...(19): siRNA sense strand
aggcccaagcagaggcaaa

SEQ ID NO: 2492143 - RNA, 19 nt, Homo sapiens
  misc_RNA (1)...(19): siRNA sense strand
gcuuaugggaagagcgagu

SEQ ID NO: 2492144 - RNA, 19 nt, Homo sapiens
  misc_RNA (1)...(19): siRNA sense strand
ggugaugaagagggagaaa

SEQ ID NO: 2492145 - RNA, 19 nt, Homo sapiens
  misc_RNA (1)...(19): siRNA sense strand
gagaaaaugaggaggagga

SEQ ID NO: 2492146 - RNA, 19 nt, Homo sapiens
  misc_RNA (1)...(19): siRNA sense strand
aggaggaggaagaggacga

SEQ ID NO: 2492147 - RNA, 19 nt, Homo sapiens
  misc_RNA (1)...(19): siRNA sense strand
aggaggagagugaggccaa

SEQ ID NO: 2492148 - RNA, 19 nt, Homo sapiens
  misc_RNA (1)...(19): siRNA sense strand
cuguggaguucaugcacua

SEQ ID NO: 2492149 - RNA, 19 nt, Homo sapiens
  misc_RNA (1)...(19): siRNA sense strand
cccaggaggaggagaguga

SEQ ID NO: 2492150 - RNA, 19 nt, Homo sapiens
  misc_RNA (1)...(19): siRNA sense strand
ccggaaggcuuaugggaag

SEQ ID NO: 2492151 - RNA, 19 nt, Homo sapiens
  misc_RNA (1)...(19): siRNA sense strand
aagaaggccaagaaggcaa

SEQ ID NO: 2492152 - RNA, 19 nt, Homo sapiens
  misc_RNA (1)...(19): siRNA sense strand
ggaggaagaugcagaggcu

SEQ ID NO: 2492153 - RNA, 19 nt, Homo sapiens
  misc_RNA (1)...(19): siRNA sense strand
agaagaucauguuuggcaa

SEQ ID NO: 2492154 - RNA, 19 nt, Homo sapiens
  misc_RNA (1)...(19): siRNA sense strand
acuacaaacucgaccacau

SEQ ID NO: 2492155 - RNA, 19 nt, Homo sapiens
  misc_RNA (1)...(19): siRNA sense strand
ugaugaagagggagaaaau

SEQ ID NO: 2492156 - RNA, 19 nt, Homo sapiens
  misc_RNA (1)...(19): siRNA sense strand
ugaccgagaaggaaggaga

SEQ ID NO: 2492157 - RNA, 19 nt, Homo sapiens
  misc_RNA (1)...(19): siRNA sense strand
ggggagaggacccaggaaa

SEQ ID NO: 2492158 - RNA, 19 nt, Homo sapiens
  misc_RNA (1)...(19): siRNA sense strand
aacacaagaagaagguuaa

SEQ ID NO: 2492159 - RNA, 19 nt, Homo sapiens
  misc_RNA (1)...(19): siRNA sense strand
gggagaggacccaggaaac

SEQ ID NO: 2492160 - RNA, 19 nt, Homo sapiens
  misc_RNA (1)...(19): siRNA sense strand
aacccaaacacaagaagaa

SEQ ID NO: 2492161 - RNA, 19 nt, Homo sapiens
  misc_RNA (1)...(19): siRNA sense strand
augaugaagaagcgggaga

SEQ ID NO: 2492162 - RNA, 19 nt, Homo sapiens
  misc_RNA (1)...(19): siRNA sense strand
cggaaggcuuaugggaaga

SEQ ID NO: 2492163 - RNA, 19 nt, Homo sapiens
  misc_RNA (1)...(19): siRNA sense strand
cggaacaaagcccggaaga

SEQ ID NO: 2492164 - RNA, 19 nt, Homo sapiens
  misc_RNA (1)...(19): siRNA sense strand
acgacaacaacgaagguga

SEQ ID NO: 2492165 - RNA, 19 nt, Homo sapiens
  misc_RNA (1)...(19): siRNA sense strand
acaacgaaggugaugguga

SEQ ID NO: 2492166 - RNA, 19 nt, Homo sapiens
  misc_RNA (1)...(19): siRNA sense strand
guagagcguuuaaaggaca

SEQ ID NO: 2492167 - RNA, 19 nt, Homo sapiens
  misc_RNA (1)...(19): siRNA sense strand
aggaggaggaagaugcaga

SEQ ID NO: 2492168 - RNA, 19 nt, Homo sapiens
  misc_RNA (1)...(19): siRNA sense strand
acaagguguucguccggaa

SEQ ID NO: 2492169 - RNA, 19 nt, Homo sapiens
  misc_RNA (1)...(19): siRNA sense strand
guggaacacuguagagcgu

SEQ ID NO: 2492170 - RNA, 19 nt, Homo sapiens
  misc_RNA (1)...(19): siRNA sense strand
gcgcaggagaagcacaaga

SEQ ID NO: 2492171 - RNA, 19 nt, Homo sapiens
  misc_RNA (1)...(19): siRNA sense strand
ugaaugagucagaagagga

SEQ ID NO: 2492172 - RNA, 19 nt, Homo sapiens
  misc_RNA (1)...(19): siRNA sense strand
aggcgcaggagaagcacaa

SEQ ID NO: 2492173 - RNA, 19 nt, Homo sapiens
  misc_RNA (1)...(19): siRNA sense strand
agcuggaggcgcaggagaa

SEQ ID NO: 2492174 - RNA, 19 nt, Homo sapiens
  misc_RNA (1)...(19): siRNA sense strand
aggagaagcacaagaagcu

SEQ ID NO: 2492175 - RNA, 19 nt, Homo sapiens
  misc_RNA (1)...(19): siRNA sense strand
caggaguuuugguggggaa

SEQ ID NO: 2492176 - RNA, 19 nt, Homo sapiens
  misc_RNA (1)...(19): siRNA sense strand
augggaagagcgaguggaa

SEQ ID NO: 2492177 - RNA, 19 nt, Homo sapiens
  misc_RNA (1)...(19): siRNA sense strand
ugauggugaugaagaggga

SEQ ID NO: 2492178 - RNA, 19 nt, Homo sapiens
  misc_RNA (1)...(19): siRNA sense strand
agaugaaccugguggcuga

SEQ ID NO: 2492179 - RNA, 19 nt, Homo sapiens
  misc_RNA (1)...(19): siRNA sense strand
acagagaaggagaacgcaa

SEQ ID NO: 2492180 - RNA, 19 nt, Homo sapiens
  misc_RNA (1)...(19): siRNA sense strand
ggagaaggcuggcucguca

SEQ ID NO: 2492181 - RNA, 19 nt, Homo sapiens
  misc_RNA (1)...(19): siRNA sense strand
ugacagagcgugugcggga

SEQ ID NO: 2492182 - RNA, 19 nt, Homo sapiens
  misc_RNA (1)...(19): siRNA sense strand
gggaaagauuggagaaggc

SEQ ID NO: 2492183 - RNA, 19 nt, Homo sapiens
  misc_RNA (1)...(19): siRNA sense strand
agaacacagagaaggagaa

SEQ ID NO: 2492184 - RNA, 19 nt, Homo sapiens
  misc_RNA (1)...(19): siRNA sense strand
acagcaucgaggacagaua

SEQ ID NO: 2492185 - RNA, 19 nt, Homo sapiens
  misc_RNA (1)...(19): siRNA sense strand
cauuauuaucacaggguua

SEQ ID NO: 2492186 - RNA, 19 nt, Homo sapiens
  misc_RNA (1)...(19): siRNA sense strand
caguaugguggaaaggaua

SEQ ID NO: 2492187 - RNA, 19 nt, Homo sapiens
  misc_RNA (1)...(19): siRNA sense strand
gagcagauaucaaugccaa

SEQ ID NO: 2492188 - RNA, 19 nt, Homo sapiens
  misc_RNA (1)...(19): siRNA sense strand
ggacaagguuccugggcag

SEQ ID NO: 2492189 - RNA, 19 nt, Homo sapiens
  misc_RNA (1)...(19): siRNA sense strand
ucuacauagugaaaggcaa

SEQ ID NO: 2492190 - RNA, 19 nt, Homo sapiens
  misc_RNA (1)...(19): siRNA sense strand
cggcaaggauagcagcuga

SEQ ID NO: 2492191 - RNA, 19 nt, Homo sapiens
  misc_RNA (1)...(19): siRNA sense strand
acaugaagcagcaagucaa

SEQ ID NO: 2492192 - RNA, 19 nt, Homo sapiens
  misc_RNA (1)...(19): siRNA sense strand
ccgaagcuacauaggaaaa

SEQ ID NO: 2492193 - RNA, 19 nt, Homo sapiens
  misc_RNA (1)...(19): siRNA sense strand
cuacauagugaaaggcaac

SEQ ID NO: 2492194 - RNA, 19 nt, Homo sapiens
  misc_RNA (1)...(19): siRNA sense strand
ggguuauaauguaaaugca

SEQ ID NO: 2492195 - RNA, 19 nt, Homo sapiens
  misc_RNA (1)...(19): siRNA sense strand
gaggagagacccagggcua

SEQ ID NO: 2492196 - RNA, 19 nt, Homo sapiens
  misc_RNA (1)...(19): siRNA sense strand
gcacaggacuagugggugu

SEQ ID NO: 2492197 - RNA, 19 nt, Homo sapiens
  misc_RNA (1)...(19): siRNA sense strand
gagcaauguagaaggccua

SEQ ID NO: 2492198 - RNA, 19 nt, Homo sapiens
  misc_RNA (1)...(19): siRNA sense strand
cugaccggauccagagcaa

SEQ ID NO: 2492199 - RNA, 19 nt, Homo sapiens
  misc_RNA (1)...(19): siRNA sense strand
cugaaagauaugcugaaaa

SEQ ID NO: 2492200 - RNA, 19 nt, Homo sapiens
  misc_RNA (1)...(19): siRNA sense strand
ggcucugggcacaggacua

SEQ ID NO: 2492201 - RNA, 19 nt, Homo sapiens
  misc_RNA (1)...(19): siRNA sense strand
ggcugaaagauaugcugaa

SEQ ID NO: 2492202 - RNA, 19 nt, Homo sapiens
  misc_RNA (1)...(19): siRNA sense strand
cagcauggcuacagggagg

SEQ ID NO: 2492203 - RNA, 19 nt, Homo sapiens
  misc_RNA (1)...(19): siRNA sense strand
cgccacggguacaaggauu

SEQ ID NO: 2492204 - RNA, 19 nt, Homo sapiens
  misc_RNA (1)...(19): siRNA sense strand
aggaaauccccaagagaga

SEQ ID NO: 2492205 - RNA, 19 nt, Homo sapiens
  misc_RNA (1)...(19): siRNA sense strand
cgacugagcacuaaggauc

SEQ ID NO: 2492206 - RNA, 19 nt, Homo sapiens
  misc_RNA (1)...(19): siRNA sense strand
uggcagaccacugaggaaa

SEQ ID NO: 2492207 - RNA, 19 nt, Homo sapiens
  misc_RNA (1)...(19): siRNA sense strand
cuggauaggguguacgaga

SEQ ID NO: 2492208 - RNA, 19 nt, Homo sapiens
  misc_RNA (1)...(19): siRNA sense strand
gcccggucaucguggacaa

SEQ ID NO: 2492209 - RNA, 19 nt, Homo sapiens
  misc_RNA (1)...(19): siRNA sense strand
cccuguacuuacuggacaa

SEQ ID NO: 2492210 - RNA, 19 nt, Homo sapiens
  misc_RNA (1)...(19): siRNA sense strand
cgagaaagugcuuagccuu

SEQ ID NO: 2492211 - RNA, 19 nt, Homo sapiens
  misc_RNA (1)...(19): siRNA sense strand
acauagagaaccaagacga

SEQ ID NO: 2492212 - RNA, 19 nt, Homo sapiens
  misc_RNA (1)...(19): siRNA sense strand
gagaggagauugaagcuac

SEQ ID NO: 2492213 - RNA, 19 nt, Homo sapiens
  misc_RNA (1)...(19): siRNA sense strand
caggaggaucuguguccaa

SEQ ID NO: 2492214 - RNA, 19 nt, Homo sapiens
  misc_RNA (1)...(19): siRNA sense strand
ggcagaccacugaggaaau

SEQ ID NO: 2492215 - RNA, 19 nt, Homo sapiens
  misc_RNA (1)...(19): siRNA sense strand
cggaucaagaccaggaaga

SEQ ID NO: 2492216 - RNA, 19 nt, Homo sapiens
  misc_RNA (1)...(19): siRNA sense strand
augcagagacagaguucau

SEQ ID NO: 2492217 - RNA, 19 nt, Homo sapiens
  misc_RNA (1)...(19): siRNA sense strand
ugagaaugcugaagcugga

SEQ ID NO: 2492218 - RNA, 19 nt, Homo sapiens
  misc_RNA (1)...(19): siRNA sense strand
aucaagaccaggaagaauu

SEQ ID NO: 2492219 - RNA, 19 nt, Homo sapiens
  misc_RNA (1)...(19): siRNA sense strand
cggaucaagaccaggaaga

SEQ ID NO: 2492220 - RNA, 19 nt, Homo sapiens
  misc_RNA (1)...(19): siRNA sense strand
augcagagacagaguucau

SEQ ID NO: 2492221 - RNA, 19 nt, Homo sapiens
  misc_RNA (1)...(19): siRNA sense strand
ugagaaugcugaagcugga

SEQ ID NO: 2492222 - RNA, 19 nt, Homo sapiens
  misc_RNA (1)...(19): siRNA sense strand
aucaagaccaggaagaauu

SEQ ID NO: 2492223 - RNA, 19 nt, Homo sapiens
  misc_RNA (1)...(19): siRNA sense strand
ggaaagacauaaaggagaa

SEQ ID NO: 2492224 - RNA, 19 nt, Homo sapiens
  misc_RNA (1)...(19): siRNA sense strand
cugcagaagauuuggacaa

SEQ ID NO: 2492225 - RNA, 19 nt, Homo sapiens
  misc_RNA (1)...(19): siRNA sense strand
gggaaagacauaaaggaga

SEQ ID NO: 2492226 - RNA, 19 nt, Homo sapiens
  misc_RNA (1)...(19): siRNA sense strand
gagaaagcccugauugaua

SEQ ID NO: 2492227 - RNA, 19 nt, Homo sapiens
  misc_RNA (1)...(19): siRNA sense strand
gagcuugacucuagccuua

SEQ ID NO: 2492228 - RNA, 19 nt, Homo sapiens
  misc_RNA (1)...(19): siRNA sense strand
cuuaaagagccacggacaa

SEQ ID NO: 2492229 - RNA, 19 nt, Homo sapiens
  misc_RNA (1)...(19): siRNA sense strand
aauacaaccucuaugggaa

SEQ ID NO: 2492230 - RNA, 19 nt, Homo sapiens
  misc_RNA (1)...(19): siRNA sense strand
auacaaccucuaugggaaa

SEQ ID NO: 2492231 - RNA, 19 nt, Homo sapiens
  misc_RNA (1)...(19): siRNA sense strand
aggagaaagcccugauuga

SEQ ID NO: 2492232 - RNA, 19 nt, Homo sapiens
  misc_RNA (1)...(19): siRNA sense strand
ggaugaagcuggugcagac

SEQ ID NO: 2492233 - RNA, 19 nt, Homo sapiens
  misc_RNA (1)...(19): siRNA sense strand
guauagcagauuuggguga

SEQ ID NO: 2492234 - RNA, 19 nt, Homo sapiens
  misc_RNA (1)...(19): siRNA sense strand
cuuuagaagaaucaaggaa

SEQ ID NO: 2492235 - RNA, 19 nt, Homo sapiens
  misc_RNA (1)...(19): siRNA sense strand
aggaagauuuucagguuuu

SEQ ID NO: 2492236 - RNA, 19 nt, Homo sapiens
  misc_RNA (1)...(19): siRNA sense strand
cugaggaacaagaugccaa

SEQ ID NO: 2492237 - RNA, 19 nt, Homo sapiens
  misc_RNA (1)...(19): siRNA sense strand
gaaagacauaaaggagaaa

SEQ ID NO: 2492238 - RNA, 19 nt, Homo sapiens
  misc_RNA (1)...(19): siRNA sense strand
cagagaagcccaagcucca

SEQ ID NO: 2492239 - RNA, 19 nt, Homo sapiens
  misc_RNA (1)...(19): siRNA sense strand
ggugcagaccagagccauu

SEQ ID NO: 2492240 - RNA, 19 nt, Homo sapiens
  misc_RNA (1)...(19): siRNA sense strand
agaaagcccugauugauau

SEQ ID NO: 2492241 - RNA, 19 nt, Homo sapiens
  misc_RNA (1)...(19): siRNA sense strand
gauccaagagaaaacaaaa

SEQ ID NO: 2492242 - RNA, 19 nt, Homo sapiens
  misc_RNA (1)...(19): siRNA sense strand
aggaggaagaggagggcau

SEQ ID NO: 2492243 - RNA, 19 nt, Homo sapiens
  misc_RNA (1)...(19): siRNA sense strand
cgaccaaagggaagcaaaa

SEQ ID NO: 2492244 - RNA, 19 nt, Homo sapiens
  misc_RNA (1)...(19): siRNA sense strand
uggagaaggaggaagagga

SEQ ID NO: 2492245 - RNA, 19 nt, Homo sapiens
  misc_RNA (1)...(19): siRNA sense strand
ccgaccaaagggaagcaaa

SEQ ID NO: 2492246 - RNA, 19 nt, Homo sapiens
  misc_RNA (1)...(19): siRNA sense strand
cacaacuccaggaaggaaa

SEQ ID NO: 2492247 - RNA, 19 nt, Homo sapiens
  misc_RNA (1)...(19): siRNA sense strand
ggaaggaaaccaaggggca

SEQ ID NO: 2492248 - RNA, 19 nt, Homo sapiens
  misc_RNA (1)...(19): siRNA sense strand
aggaggaagaggagggcau

SEQ ID NO: 2492249 - RNA, 19 nt, Homo sapiens
  misc_RNA (1)...(19): siRNA sense strand
cgaccaaagggaagcaaaa

SEQ ID NO: 2492250 - RNA, 19 nt, Homo sapiens
  misc_RNA (1)...(19): siRNA sense strand
uggagaaggaggaagagga

SEQ ID NO: 2492251 - RNA, 19 nt, Homo sapiens
  misc_RNA (1)...(19): siRNA sense strand
ccgaccaaagggaagcaaa

SEQ ID NO: 2492252 - RNA, 19 nt, Homo sapiens
  misc_RNA (1)...(19): siRNA sense strand
cacaacuccaggaaggaaa

SEQ ID NO: 2492253 - RNA, 19 nt, Homo sapiens
  misc_RNA (1)...(19): siRNA sense strand
ggaaggaaaccaaggggca

SEQ ID NO: 2492254 - RNA, 19 nt, Homo sapiens
  misc_RNA (1)...(19): siRNA sense strand
aggaggaagaggagggcau

SEQ ID NO: 2492255 - RNA, 19 nt, Homo sapiens
  misc_RNA (1)...(19): siRNA sense strand
cgaccaaagggaagcaaaa

SEQ ID NO: 2492256 - RNA, 19 nt, Homo sapiens
  misc_RNA (1)...(19): siRNA sense strand
uggagaaggaggaagagga

SEQ ID NO: 2492257 - RNA, 19 nt, Homo sapiens
  misc_RNA (1)...(19): siRNA sense strand
ccgaccaaagggaagcaaa

SEQ ID NO: 2492258 - RNA, 19 nt, Homo sapiens
  misc_RNA (1)...(19): siRNA sense strand
cacaacuccaggaaggaaa

SEQ ID NO: 2492259 - RNA, 19 nt, Homo sapiens
  misc_RNA (1)...(19): siRNA sense strand
ggaaggaaaccaaggggca

SEQ ID NO: 2492260 - RNA, 19 nt, Homo sapiens
  misc_RNA (1)...(19): siRNA sense strand
aggaggaagaggagggcau

SEQ ID NO: 2492261 - RNA, 19 nt, Homo sapiens
  misc_RNA (1)...(19): siRNA sense strand
cgaccaaagggaagcaaaa

SEQ ID NO: 2492262 - RNA, 19 nt, Homo sapiens
  misc_RNA (1)...(19): siRNA sense strand
uggagaaggaggaagagga

SEQ ID NO: 2492263 - RNA, 19 nt, Homo sapiens
  misc_RNA (1)...(19): siRNA sense strand
ccgaccaaagggaagcaaa

SEQ ID NO: 2492264 - RNA, 19 nt, Homo sapiens
  misc_RNA (1)...(19): siRNA sense strand
cacaacuccaggaaggaaa

SEQ ID NO: 2492265 - RNA, 19 nt, Homo sapiens
  misc_RNA (1)...(19): siRNA sense strand
ggaaggaaaccaaggggca

SEQ ID NO: 2492266 - RNA, 19 nt, Homo sapiens
  misc_RNA (1)...(19): siRNA sense strand
aggaggaagaggagggcau

SEQ ID NO: 2492267 - RNA, 19 nt, Homo sapiens
  misc_RNA (1)...(19): siRNA sense strand
cgaccaaagggaagcaaaa

SEQ ID NO: 2492268 - RNA, 19 nt, Homo sapiens
  misc_RNA (1)...(19): siRNA sense strand
uggagaaggaggaagagga

SEQ ID NO: 2492269 - RNA, 19 nt, Homo sapiens
  misc_RNA (1)...(19): siRNA sense strand
ccgaccaaagggaagcaaa

SEQ ID NO: 2492270 - RNA, 19 nt, Homo sapiens
  misc_RNA (1)...(19): siRNA sense strand
cacaacuccaggaaggaaa

SEQ ID NO: 2492271 - RNA, 19 nt, Homo sapiens
  misc_RNA (1)...(19): siRNA sense strand
ggaaggaaaccaaggggca

SEQ ID NO: 2492272 - RNA, 19 nt, Homo sapiens
  misc_RNA (1)...(19): siRNA sense strand
aggaggaagaggagggcau

SEQ ID NO: 2492273 - RNA, 19 nt, Homo sapiens
  misc_RNA (1)...(19): siRNA sense strand
cgaccaaagggaagcaaaa

SEQ ID NO: 2492274 - RNA, 19 nt, Homo sapiens
  misc_RNA (1)...(19): siRNA sense strand
uggagaaggaggaagagga

SEQ ID NO: 2492275 - RNA, 19 nt, Homo sapiens
  misc_RNA (1)...(19): siRNA sense strand
ccgaccaaagggaagcaaa

SEQ ID NO: 2492276 - RNA, 19 nt, Homo sapiens
  misc_RNA (1)...(19): siRNA sense strand
cacaacuccaggaaggaaa

SEQ ID NO: 2492277 - RNA, 19 nt, Homo sapiens
  misc_RNA (1)...(19): siRNA sense strand
ggaaggaaaccaaggggca

SEQ ID NO: 2492278 - RNA, 19 nt, Homo sapiens
  misc_RNA (1)...(19): siRNA sense strand
aggaggaagaggagggcau

SEQ ID NO: 2492279 - RNA, 19 nt, Homo sapiens
  misc_RNA (1)...(19): siRNA sense strand
cgaccaaagggaagcaaaa

SEQ ID NO: 2492280 - RNA, 19 nt, Homo sapiens
  misc_RNA (1)...(19): siRNA sense strand
uggagaaggaggaagagga

SEQ ID NO: 2492281 - RNA, 19 nt, Homo sapiens
  misc_RNA (1)...(19): siRNA sense strand
ccgaccaaagggaagcaaa

SEQ ID NO: 2492282 - RNA, 19 nt, Homo sapiens
  misc_RNA (1)...(19): siRNA sense strand
cacaacuccaggaaggaaa

SEQ ID NO: 2492283 - RNA, 19 nt, Homo sapiens
  misc_RNA (1)...(19): siRNA sense strand
ggaaggaaaccaaggggca

SEQ ID NO: 2492284 - RNA, 19 nt, Homo sapiens
  misc_RNA (1)...(19): siRNA sense strand
gcagcuacucaguggguga

SEQ ID NO: 2492285 - RNA, 19 nt, Homo sapiens
  misc_RNA (1)...(19): siRNA sense strand
ccuuagagcgaaugaagca

SEQ ID NO: 2492286 - RNA, 19 nt, Homo sapiens
  misc_RNA (1)...(19): siRNA sense strand
aaugaagcaaaguuggaaa

SEQ ID NO: 2492287 - RNA, 19 nt, Homo sapiens
  misc_RNA (1)...(19): siRNA sense strand
gauguuaccaagauggaga

SEQ ID NO: 2492288 - RNA, 19 nt, Homo sapiens
  misc_RNA (1)...(19): siRNA sense strand
agaggcagguggugagcca

SEQ ID NO: 2492289 - RNA, 19 nt, Homo sapiens
  misc_RNA (1)...(19): siRNA sense strand
cugcacugguaccgggaga

SEQ ID NO: 2492290 - RNA, 19 nt, Homo sapiens
  misc_RNA (1)...(19): siRNA sense strand
aggcauucuuacaccaauu

SEQ ID NO: 2492291 - RNA, 19 nt, Homo sapiens
  misc_RNA (1)...(19): siRNA sense strand
gcacaaaccugaaccuggu

SEQ ID NO: 2492292 - RNA, 19 nt, Homo sapiens
  misc_RNA (1)...(19): siRNA sense strand
agaaaguggaagagggaaa

SEQ ID NO: 2492293 - RNA, 19 nt, Homo sapiens
  misc_RNA (1)...(19): siRNA sense strand
gcgcaaauguccugggcua

SEQ ID NO: 2492294 - RNA, 19 nt, Homo sapiens
  misc_RNA (1)...(19): siRNA sense strand
cugaagacugugaggauua

SEQ ID NO: 2492295 - RNA, 19 nt, Homo sapiens
  misc_RNA (1)...(19): siRNA sense strand
gcauaagaucacaggaaga

SEQ ID NO: 2492296 - RNA, 19 nt, Homo sapiens
  misc_RNA (1)...(19): siRNA sense strand
agguagaaggugagaaaga

SEQ ID NO: 2492297 - RNA, 19 nt, Homo sapiens
  misc_RNA (1)...(19): siRNA sense strand
gaaucaaaguuguggagga

SEQ ID NO: 2492298 - RNA, 19 nt, Homo sapiens
  misc_RNA (1)...(19): siRNA sense strand
aguggaauguguagugaaa

SEQ ID NO: 2492299 - RNA, 19 nt, Homo sapiens
  misc_RNA (1)...(19): siRNA sense strand
ucaaaguuguggaggaaaa

SEQ ID NO: 2492300 - RNA, 19 nt, Homo sapiens
  misc_RNA (1)...(19): siRNA sense strand
ggugcaagguagaagguga

SEQ ID NO: 2492301 - RNA, 19 nt, Homo sapiens
  misc_RNA (1)...(19): siRNA sense strand
gcuuauaguguuagaacuu

SEQ ID NO: 2492302 - RNA, 19 nt, Homo sapiens
  misc_RNA (1)...(19): siRNA sense strand
gugaauggauuaaaggaca

SEQ ID NO: 2492303 - RNA, 19 nt, Homo sapiens
  misc_RNA (1)...(19): siRNA sense strand
gggcauuaaccaugacaau

SEQ ID NO: 2492304 - RNA, 19 nt, Homo sapiens
  misc_RNA (1)...(19): siRNA sense strand
ugucaaacaagguggauga

SEQ ID NO: 2492305 - RNA, 19 nt, Homo sapiens
  misc_RNA (1)...(19): siRNA sense strand
gcagaaaguggaagaggga

SEQ ID NO: 2492306 - RNA, 19 nt, Homo sapiens
  misc_RNA (1)...(19): siRNA sense strand
uguuauuugcacaggauua

SEQ ID NO: 2492307 - RNA, 19 nt, Homo sapiens
  misc_RNA (1)...(19): siRNA sense strand
ucgaaagugcaaugagcaa

SEQ ID NO: 2492308 - RNA, 19 nt, Homo sapiens
  misc_RNA (1)...(19): siRNA sense strand
cucaauuaccuguggcaaa

SEQ ID NO: 2492309 - RNA, 19 nt, Homo sapiens
  misc_RNA (1)...(19): siRNA sense strand
ccagaaaaccagagcucua

SEQ ID NO: 2492310 - RNA, 19 nt, Homo sapiens
  misc_RNA (1)...(19): siRNA sense strand
guagaaggugagaaagaau

SEQ ID NO: 2492311 - RNA, 19 nt, Homo sapiens
  misc_RNA (1)...(19): siRNA sense strand
cuucauauuuauugagcca

SEQ ID NO: 2492312 - RNA, 19 nt, Homo sapiens
  misc_RNA (1)...(19): siRNA sense strand
ccagaaaacaauacagaau

SEQ ID NO: 2492313 - RNA, 19 nt, Homo sapiens
  misc_RNA (1)...(19): siRNA sense strand
agaagaucauuguggugua

SEQ ID NO: 2492314 - RNA, 19 nt, Homo sapiens
  misc_RNA (1)...(19): siRNA sense strand
agaacuauauauugggcau

SEQ ID NO: 2492315 - RNA, 19 nt, Homo sapiens
  misc_RNA (1)...(19): siRNA sense strand
ggaggagaaaggaagacaa

SEQ ID NO: 2492316 - RNA, 19 nt, Homo sapiens
  misc_RNA (1)...(19): siRNA sense strand
augcauaagaucacaggaa

SEQ ID NO: 2492317 - RNA, 19 nt, Homo sapiens
  misc_RNA (1)...(19): siRNA sense strand
aggaaaaggucacagagaa

SEQ ID NO: 2492318 - RNA, 19 nt, Homo sapiens
  misc_RNA (1)...(19): siRNA sense strand
ggugagaaagaaugcagaa

SEQ ID NO: 2492319 - RNA, 19 nt, Homo sapiens
  misc_RNA (1)...(19): siRNA sense strand
ggauuagauaucugugcaa

SEQ ID NO: 2492320 - RNA, 19 nt, Homo sapiens
  misc_RNA (1)...(19): siRNA sense strand
augcaauggcaauggaaaa

SEQ ID NO: 2492321 - RNA, 19 nt, Homo sapiens
  misc_RNA (1)...(19): siRNA sense strand
agacgaggccucugggaga

SEQ ID NO: 2492322 - RNA, 19 nt, Homo sapiens
  misc_RNA (1)...(19): siRNA sense strand
gagcaauggaacacugauu

SEQ ID NO: 2492323 - RNA, 19 nt, Homo sapiens
  misc_RNA (1)...(19): siRNA sense strand
guggaagagggaaacgaua

SEQ ID NO: 2492324 - RNA, 19 nt, Homo sapiens
  misc_RNA (1)...(19): siRNA sense strand
uggaagagggaaacgauau

SEQ ID NO: 2492325 - RNA, 19 nt, Homo sapiens
  misc_RNA (1)...(19): siRNA sense strand
cauuucagauaaaggaaga

SEQ ID NO: 2492326 - RNA, 19 nt, Homo sapiens
  misc_RNA (1)...(19): siRNA sense strand
caaguguggcaaaggcaua

SEQ ID NO: 2492327 - RNA, 19 nt, Homo sapiens
  misc_RNA (1)...(19): siRNA sense strand
caagaauacaacauagaga

SEQ ID NO: 2492328 - RNA, 19 nt, Homo sapiens
  misc_RNA (1)...(19): siRNA sense strand
auuaauagugacuggaaga

SEQ ID NO: 2492329 - RNA, 19 nt, Homo sapiens
  misc_RNA (1)...(19): siRNA sense strand
uggcaaaggcauacgucau

SEQ ID NO: 2492330 - RNA, 19 nt, Homo sapiens
  misc_RNA (1)...(19): siRNA sense strand
ucagauaaaggaagaccua

SEQ ID NO: 2492331 - RNA, 19 nt, Homo sapiens
  misc_RNA (1)...(19): siRNA sense strand
guauuauugcugaagacaa

SEQ ID NO: 2492332 - RNA, 19 nt, Homo sapiens
  misc_RNA (1)...(19): siRNA sense strand
gcauauacuucaguggcaa

SEQ ID NO: 2492333 - RNA, 19 nt, Homo sapiens
  misc_RNA (1)...(19): siRNA sense strand
ggaucagaauuauggucuu

SEQ ID NO: 2492334 - RNA, 19 nt, Homo sapiens
  misc_RNA (1)...(19): siRNA sense strand
caccagaggagcagguuau

SEQ ID NO: 2492335 - RNA, 19 nt, Homo sapiens
  misc_RNA (1)...(19): siRNA sense strand
uguuucaggaucagaauua

SEQ ID NO: 2492336 - RNA, 19 nt, Homo sapiens
  misc_RNA (1)...(19): siRNA sense strand
ucacaggaagacauggaaa

SEQ ID NO: 2492337 - RNA, 19 nt, Homo sapiens
  misc_RNA (1)...(19): siRNA sense strand
ugugaaacaugcagggacu

SEQ ID NO: 2492338 - RNA, 19 nt, Homo sapiens
  misc_RNA (1)...(19): siRNA sense strand
gauuauggugcaagguaga

SEQ ID NO: 2492339 - RNA, 19 nt, Homo sapiens
  misc_RNA (1)...(19): siRNA sense strand
ggaaaaucaugcaagauca

SEQ ID NO: 2492340 - RNA, 19 nt, Homo sapiens
  misc_RNA (1)...(19): siRNA sense strand
gauuagagcccgagagagg

SEQ ID NO: 2492341 - RNA, 19 nt, Homo sapiens
  misc_RNA (1)...(19): siRNA sense strand
ggcugaagacugugaggau

SEQ ID NO: 2492342 - RNA, 19 nt, Homo sapiens
  misc_RNA (1)...(19): siRNA sense strand
ggaggaggagaaaggaaga

SEQ ID NO: 2492343 - RNA, 19 nt, Homo sapiens
  misc_RNA (1)...(19): siRNA sense strand
auguagaagugcuggugau

SEQ ID NO: 2492344 - RNA, 19 nt, Homo sapiens
  misc_RNA (1)...(19): siRNA sense strand
gacaaugagaaaugcaaau

SEQ ID NO: 2492345 - RNA, 19 nt, Homo sapiens
  misc_RNA (1)...(19): siRNA sense strand
guacccaacaacugagcaa

SEQ ID NO: 2492346 - RNA, 19 nt, Homo sapiens
  misc_RNA (1)...(19): siRNA sense strand
ggagaaaggaagacaacag

SEQ ID NO: 2492347 - RNA, 19 nt, Homo sapiens
  misc_RNA (1)...(19): siRNA sense strand
uaaccaagccagagccaca

SEQ ID NO: 2492348 - RNA, 19 nt, Homo sapiens
  misc_RNA (1)...(19): siRNA sense strand
cauuuagagaugucaacaa

SEQ ID NO: 2492349 - RNA, 19 nt, Homo sapiens
  misc_RNA (1)...(19): siRNA sense strand
guggaggaggagaaaggaa

SEQ ID NO: 2492350 - RNA, 19 nt, Homo sapiens
  misc_RNA (1)...(19): siRNA sense strand
acaacaguguccugcacaa

SEQ ID NO: 2492351 - RNA, 19 nt, Homo sapiens
  misc_RNA (1)...(19): siRNA sense strand
cacaggaagacauggaaau

SEQ ID NO: 2492352 - RNA, 19 nt, Homo sapiens
  misc_RNA (1)...(19): siRNA sense strand
ggaaaaggucacagagaag

SEQ ID NO: 2492353 - RNA, 19 nt, Homo sapiens
  misc_RNA (1)...(19): siRNA sense strand
ccguguauauaggcagaaa

SEQ ID NO: 2492354 - RNA, 19 nt, Homo sapiens
  misc_RNA (1)...(19): siRNA sense strand
gccaaauaaaucagagaua

SEQ ID NO: 2492355 - RNA, 19 nt, Homo sapiens
  misc_RNA (1)...(19): siRNA sense strand
gagaagaagcccagaaaau

SEQ ID NO: 2492356 - RNA, 19 nt, Homo sapiens
  misc_RNA (1)...(19): siRNA sense strand
guggaugggcagugggauu

SEQ ID NO: 2492357 - RNA, 19 nt, Homo sapiens
  misc_RNA (1)...(19): siRNA sense strand
ggacaaagaucucagugga

SEQ ID NO: 2492358 - RNA, 19 nt, Homo sapiens
  misc_RNA (1)...(19): siRNA sense strand
ggaucugagcaauggaaau

SEQ ID NO: 2492359 - RNA, 19 nt, Homo sapiens
  misc_RNA (1)...(19): siRNA sense strand
gcagagaacaaaagagaga

SEQ ID NO: 2492360 - RNA, 19 nt, Homo sapiens
  misc_RNA (1)...(19): siRNA sense strand
gagcaguaucgucagguaa

SEQ ID NO: 2492361 - RNA, 19 nt, Homo sapiens
  misc_RNA (1)...(19): siRNA sense strand
cgugaagggaaucguguua

SEQ ID NO: 2492362 - RNA, 19 nt, Homo sapiens
  misc_RNA (1)...(19): siRNA sense strand
cugaagacacaguggacau

SEQ ID NO: 2492363 - RNA, 19 nt, Homo sapiens
  misc_RNA (1)...(19): siRNA sense strand
caaagaucucaguggauau

SEQ ID NO: 2492364 - RNA, 19 nt, Homo sapiens
  misc_RNA (1)...(19): siRNA sense strand
caccaaaggcauagagaac

SEQ ID NO: 2492365 - RNA, 19 nt, Homo sapiens
  misc_RNA (1)...(19): siRNA sense strand
cagaaguacaaacagguaa

SEQ ID NO: 2492366 - RNA, 19 nt, Homo sapiens
  misc_RNA (1)...(19): siRNA sense strand
ugguguggcuauaggaaca

SEQ ID NO: 2492367 - RNA, 19 nt, Homo sapiens
  misc_RNA (1)...(19): siRNA sense strand
cagaaauggaagcagaaaa

SEQ ID NO: 2492368 - RNA, 19 nt, Homo sapiens
  misc_RNA (1)...(19): siRNA sense strand
agacuuggugagagaagaa

SEQ ID NO: 2492369 - RNA, 19 nt, Homo sapiens
  misc_RNA (1)...(19): siRNA sense strand
aggaagaaaacgaaggauu

SEQ ID NO: 2492370 - RNA, 19 nt, Homo sapiens
  misc_RNA (1)...(19): siRNA sense strand
caauuuaucuggugggaag

SEQ ID NO: 2492371 - RNA, 19 nt, Homo sapiens
  misc_RNA (1)...(19): siRNA sense strand
acacauugaaguacaggua

SEQ ID NO: 2492372 - RNA, 19 nt, Homo sapiens
  misc_RNA (1)...(19): siRNA sense strand
ccaccaaaggcauagagaa

SEQ ID NO: 2492373 - RNA, 19 nt, Homo sapiens
  misc_RNA (1)...(19): siRNA sense strand
uuguacacgugaagggaau

SEQ ID NO: 2492374 - RNA, 19 nt, Homo sapiens
  misc_RNA (1)...(19): siRNA sense strand
caccagaaauggaagcaga

SEQ ID NO: 2492375 - RNA, 19 nt, Homo sapiens
  misc_RNA (1)...(19): siRNA sense strand
agaaauggaagcagaaaau

SEQ ID NO: 2492376 - RNA, 19 nt, Homo sapiens
  misc_RNA (1)...(19): siRNA sense strand
aguacaaacagguaaccaa

SEQ ID NO: 2492377 - RNA, 19 nt, Homo sapiens
  misc_RNA (1)...(19): siRNA sense strand
uagccaaggcggaucuaaa

SEQ ID NO: 2492378 - RNA, 19 nt, Homo sapiens
  misc_RNA (1)...(19): siRNA sense strand
agaucucaguggauauaaa

SEQ ID NO: 2492379 - RNA, 19 nt, Homo sapiens
  misc_RNA (1)...(19): siRNA sense strand
aggaacagcagaaggaguu

SEQ ID NO: 2492380 - RNA, 19 nt, Homo sapiens
  misc_RNA (1)...(19): siRNA sense strand
gcgccaaauaaaucagaga

SEQ ID NO: 2492381 - RNA, 19 nt, Homo sapiens
  misc_RNA (1)...(19): siRNA sense strand
gggauaaguccaaagccuu

SEQ ID NO: 2492382 - RNA, 19 nt, Homo sapiens
  misc_RNA (1)...(19): siRNA sense strand
gagcaaugacucagaugca

SEQ ID NO: 2492383 - RNA, 19 nt, Homo sapiens
  misc_RNA (1)...(19): siRNA sense strand
acucagaugcauauaaaga

SEQ ID NO: 2492384 - RNA, 19 nt, Homo sapiens
  misc_RNA (1)...(19): siRNA sense strand
auauaaagguucaagcacu

SEQ ID NO: 2492385 - RNA, 19 nt, Homo sapiens
  misc_RNA (1)...(19): siRNA sense strand
auagugagguugaugaaaa

SEQ ID NO: 2492386 - RNA, 19 nt, Homo sapiens
  misc_RNA (1)...(19): siRNA sense strand
caguguaucagucgagcaa

SEQ ID NO: 2492387 - RNA, 19 nt, Homo sapiens
  misc_RNA (1)...(19): siRNA sense strand
cugcugaaaaugaagaaaa

SEQ ID NO: 2492388 - RNA, 19 nt, Homo sapiens
  misc_RNA (1)...(19): siRNA sense strand
ugacugugguacaugacaa

SEQ ID NO: 2492389 - RNA, 19 nt, Homo sapiens
  misc_RNA (1)...(19): siRNA sense strand
auggauaaaccaccagaaa

SEQ ID NO: 2492390 - RNA, 19 nt, Homo sapiens
  misc_RNA (1)...(19): siRNA sense strand
gggcagugggauuugucaa

SEQ ID NO: 2492391 - RNA, 19 nt, Homo sapiens
  misc_RNA (1)...(19): siRNA sense strand
ggaauuaagucaaccacgu

SEQ ID NO: 2492392 - RNA, 19 nt, Homo sapiens
  misc_RNA (1)...(19): siRNA sense strand
cagaaaauagugagguuga

SEQ ID NO: 2492393 - RNA, 19 nt, Homo sapiens
  misc_RNA (1)...(19): siRNA sense strand
uggauaaaccaccagaaau

SEQ ID NO: 2492394 - RNA, 19 nt, Homo sapiens
  misc_RNA (1)...(19): siRNA sense strand
gcucagaaaggaggagaga

SEQ ID NO: 2492395 - RNA, 19 nt, Homo sapiens
  misc_RNA (1)...(19): siRNA sense strand
cagcagaagaagcaacuga

SEQ ID NO: 2492396 - RNA, 19 nt, Homo sapiens
  misc_RNA (1)...(19): siRNA sense strand
gccaggugcacgagaaaca

SEQ ID NO: 2492397 - RNA, 19 nt, Homo sapiens
  misc_RNA (1)...(19): siRNA sense strand
caggaaacuagaaauguau

SEQ ID NO: 2492398 - RNA, 19 nt, Homo sapiens
  misc_RNA (1)...(19): siRNA sense strand
caguggauauaaagguuca

SEQ ID NO: 2492399 - RNA, 19 nt, Homo sapiens
  misc_RNA (1)...(19): siRNA sense strand
agagagagcaguaucguca

SEQ ID NO: 2492400 - RNA, 19 nt, Homo sapiens
  misc_RNA (1)...(19): siRNA sense strand
aucaggaacuuaaggaaca

SEQ ID NO: 2492401 - RNA, 19 nt, Homo sapiens
  misc_RNA (1)...(19): siRNA sense strand
aaauagugagguugaugaa

SEQ ID NO: 2492402 - RNA, 19 nt, Homo sapiens
  misc_RNA (1)...(19): siRNA sense strand
uuacagauccuuugggagu

SEQ ID NO: 2492403 - RNA, 19 nt, Homo sapiens
  misc_RNA (1)...(19): siRNA sense strand
acgaaggauuugugaaggu

SEQ ID NO: 2492404 - RNA, 19 nt, Homo sapiens
  misc_RNA (1)...(19): siRNA sense strand
uguuggagcaaguguauuu

SEQ ID NO: 2492405 - RNA, 19 nt, Homo sapiens
  misc_RNA (1)...(19): siRNA sense strand
cuuaaagauucgauucuca

SEQ ID NO: 2492406 - RNA, 19 nt, Homo sapiens
  misc_RNA (1)...(19): siRNA sense strand
ccagaaauggaagcagaaa

SEQ ID NO: 2492407 - RNA, 19 nt, Homo sapiens
  misc_RNA (1)...(19): siRNA sense strand
cagaaaaugaguagucuuu

SEQ ID NO: 2492408 - RNA, 19 nt, Homo sapiens
  misc_RNA (1)...(19): siRNA sense strand
ugauuuccuuagugaagaa

SEQ ID NO: 2492409 - RNA, 19 nt, Homo sapiens
  misc_RNA (1)...(19): siRNA sense strand
auucagauguggcaacaau

SEQ ID NO: 2492410 - RNA, 19 nt, Homo sapiens
  misc_RNA (1)...(19): siRNA sense strand
aagaaaagucagaaguuca

SEQ ID NO: 2492411 - RNA, 19 nt, Homo sapiens
  misc_RNA (1)...(19): siRNA sense strand
acgguagagugcaggcuuu

SEQ ID NO: 2492412 - RNA, 19 nt, Homo sapiens
  misc_RNA (1)...(19): siRNA sense strand
ucagaaaggaggagagacc

SEQ ID NO: 2492413 - RNA, 19 nt, Homo sapiens
  misc_RNA (1)...(19): siRNA sense strand
agauaaguuagaucaggaa

SEQ ID NO: 2492414 - RNA, 19 nt, Homo sapiens
  misc_RNA (1)...(19): siRNA sense strand
gccaaauaaaucagagaua

SEQ ID NO: 2492415 - RNA, 19 nt, Homo sapiens
  misc_RNA (1)...(19): siRNA sense strand
gagaagaagcccagaaaau

SEQ ID NO: 2492416 - RNA, 19 nt, Homo sapiens
  misc_RNA (1)...(19): siRNA sense strand
guggaugggcagugggauu

SEQ ID NO: 2492417 - RNA, 19 nt, Homo sapiens
  misc_RNA (1)...(19): siRNA sense strand
ggacaaagaucucagugga

SEQ ID NO: 2492418 - RNA, 19 nt, Homo sapiens
  misc_RNA (1)...(19): siRNA sense strand
ggaucugagcaauggaaau

SEQ ID NO: 2492419 - RNA, 19 nt, Homo sapiens
  misc_RNA (1)...(19): siRNA sense strand
gcagagaacaaaagagaga

SEQ ID NO: 2492420 - RNA, 19 nt, Homo sapiens
  misc_RNA (1)...(19): siRNA sense strand
gagcaguaucgucagguaa

SEQ ID NO: 2492421 - RNA, 19 nt, Homo sapiens
  misc_RNA (1)...(19): siRNA sense strand
cgugaagggaaucguguua

SEQ ID NO: 2492422 - RNA, 19 nt, Homo sapiens
  misc_RNA (1)...(19): siRNA sense strand
cugaagacacaguggacau

SEQ ID NO: 2492423 - RNA, 19 nt, Homo sapiens
  misc_RNA (1)...(19): siRNA sense strand
caaagaucucaguggauau

SEQ ID NO: 2492424 - RNA, 19 nt, Homo sapiens
  misc_RNA (1)...(19): siRNA sense strand
caccaaaggcauagagaac

SEQ ID NO: 2492425 - RNA, 19 nt, Homo sapiens
  misc_RNA (1)...(19): siRNA sense strand
cagaaguacaaacagguaa

SEQ ID NO: 2492426 - RNA, 19 nt, Homo sapiens
  misc_RNA (1)...(19): siRNA sense strand
ugguguggcuauaggaaca

SEQ ID NO: 2492427 - RNA, 19 nt, Homo sapiens
  misc_RNA (1)...(19): siRNA sense strand
cagaaauggaagcagaaaa

SEQ ID NO: 2492428 - RNA, 19 nt, Homo sapiens
  misc_RNA (1)...(19): siRNA sense strand
agacuuggugagagaagaa

SEQ ID NO: 2492429 - RNA, 19 nt, Homo sapiens
  misc_RNA (1)...(19): siRNA sense strand
aggaagaaaacgaaggauu

SEQ ID NO: 2492430 - RNA, 19 nt, Homo sapiens
  misc_RNA (1)...(19): siRNA sense strand
caauuuaucuggugggaag

SEQ ID NO: 2492431 - RNA, 19 nt, Homo sapiens
  misc_RNA (1)...(19): siRNA sense strand
acacauugaaguacaggua

SEQ ID NO: 2492432 - RNA, 19 nt, Homo sapiens
  misc_RNA (1)...(19): siRNA sense strand
ccaccaaaggcauagagaa

SEQ ID NO: 2492433 - RNA, 19 nt, Homo sapiens
  misc_RNA (1)...(19): siRNA sense strand
uuguacacgugaagggaau

SEQ ID NO: 2492434 - RNA, 19 nt, Homo sapiens
  misc_RNA (1)...(19): siRNA sense strand
caccagaaauggaagcaga

SEQ ID NO: 2492435 - RNA, 19 nt, Homo sapiens
  misc_RNA (1)...(19): siRNA sense strand
agaaauggaagcagaaaau

SEQ ID NO: 2492436 - RNA, 19 nt, Homo sapiens
  misc_RNA (1)...(19): siRNA sense strand
aguacaaacagguaaccaa

SEQ ID NO: 2492437 - RNA, 19 nt, Homo sapiens
  misc_RNA (1)...(19): siRNA sense strand
uagccaaggcggaucuaaa

SEQ ID NO: 2492438 - RNA, 19 nt, Homo sapiens
  misc_RNA (1)...(19): siRNA sense strand
agaucucaguggauauaaa

SEQ ID NO: 2492439 - RNA, 19 nt, Homo sapiens
  misc_RNA (1)...(19): siRNA sense strand
aggaacagcagaaggaguu

SEQ ID NO: 2492440 - RNA, 19 nt, Homo sapiens
  misc_RNA (1)...(19): siRNA sense strand
gcgccaaauaaaucagaga

SEQ ID NO: 2492441 - RNA, 19 nt, Homo sapiens
  misc_RNA (1)...(19): siRNA sense strand
gggauaaguccaaagccuu

SEQ ID NO: 2492442 - RNA, 19 nt, Homo sapiens
  misc_RNA (1)...(19): siRNA sense strand
gagcaaugacucagaugca

SEQ ID NO: 2492443 - RNA, 19 nt, Homo sapiens
  misc_RNA (1)...(19): siRNA sense strand
acucagaugcauauaaaga

SEQ ID NO: 2492444 - RNA, 19 nt, Homo sapiens
  misc_RNA (1)...(19): siRNA sense strand
auauaaagguucaagcacu

SEQ ID NO: 2492445 - RNA, 19 nt, Homo sapiens
  misc_RNA (1)...(19): siRNA sense strand
auagugagguugaugaaaa

SEQ ID NO: 2492446 - RNA, 19 nt, Homo sapiens
  misc_RNA (1)...(19): siRNA sense strand
caguguaucagucgagcaa

SEQ ID NO: 2492447 - RNA, 19 nt, Homo sapiens
  misc_RNA (1)...(19): siRNA sense strand
cugcugaaaaugaagaaaa

SEQ ID NO: 2492448 - RNA, 19 nt, Homo sapiens
  misc_RNA (1)...(19): siRNA sense strand
ugacugugguacaugacaa

SEQ ID NO: 2492449 - RNA, 19 nt, Homo sapiens
  misc_RNA (1)...(19): siRNA sense strand
auggauaaaccaccagaaa

SEQ ID NO: 2492450 - RNA, 19 nt, Homo sapiens
  misc_RNA (1)...(19): siRNA sense strand
gggcagugggauuugucaa

SEQ ID NO: 2492451 - RNA, 19 nt, Homo sapiens
  misc_RNA (1)...(19): siRNA sense strand
ggaauuaagucaaccacgu

SEQ ID NO: 2492452 - RNA, 19 nt, Homo sapiens
  misc_RNA (1)...(19): siRNA sense strand
cagaaaauagugagguuga

SEQ ID NO: 2492453 - RNA, 19 nt, Homo sapiens
  misc_RNA (1)...(19): siRNA sense strand
uggauaaaccaccagaaau

SEQ ID NO: 2492454 - RNA, 19 nt, Homo sapiens
  misc_RNA (1)...(19): siRNA sense strand
gcucagaaaggaggagaga

SEQ ID NO: 2492455 - RNA, 19 nt, Homo sapiens
  misc_RNA (1)...(19): siRNA sense strand
cagcagaagaagcaacuga

SEQ ID NO: 2492456 - RNA, 19 nt, Homo sapiens
  misc_RNA (1)...(19): siRNA sense strand
gccaggugcacgagaaaca

SEQ ID NO: 2492457 - RNA, 19 nt, Homo sapiens
  misc_RNA (1)...(19): siRNA sense strand
caggaaacuagaaauguau

SEQ ID NO: 2492458 - RNA, 19 nt, Homo sapiens
  misc_RNA (1)...(19): siRNA sense strand
caguggauauaaagguuca

SEQ ID NO: 2492459 - RNA, 19 nt, Homo sapiens
  misc_RNA (1)...(19): siRNA sense strand
agagagagcaguaucguca

SEQ ID NO: 2492460 - RNA, 19 nt, Homo sapiens
  misc_RNA (1)...(19): siRNA sense strand
aucaggaacuuaaggaaca

SEQ ID NO: 2492461 - RNA, 19 nt, Homo sapiens
  misc_RNA (1)...(19): siRNA sense strand
aaauagugagguugaugaa

SEQ ID NO: 2492462 - RNA, 19 nt, Homo sapiens
  misc_RNA (1)...(19): siRNA sense strand
uuacagauccuuugggagu

SEQ ID NO: 2492463 - RNA, 19 nt, Homo sapiens
  misc_RNA (1)...(19): siRNA sense strand
acgaaggauuugugaaggu

SEQ ID NO: 2492464 - RNA, 19 nt, Homo sapiens
  misc_RNA (1)...(19): siRNA sense strand
uguuggagcaaguguauuu

SEQ ID NO: 2492465 - RNA, 19 nt, Homo sapiens
  misc_RNA (1)...(19): siRNA sense strand
cuuaaagauucgauucuca

SEQ ID NO: 2492466 - RNA, 19 nt, Homo sapiens
  misc_RNA (1)...(19): siRNA sense strand
ccagaaauggaagcagaaa

SEQ ID NO: 2492467 - RNA, 19 nt, Homo sapiens
  misc_RNA (1)...(19): siRNA sense strand
cagaaaaugaguagucuuu

SEQ ID NO: 2492468 - RNA, 19 nt, Homo sapiens
  misc_RNA (1)...(19): siRNA sense strand
ugauuuccuuagugaagaa

SEQ ID NO: 2492469 - RNA, 19 nt, Homo sapiens
  misc_RNA (1)...(19): siRNA sense strand
auucagauguggcaacaau

SEQ ID NO: 2492470 - RNA, 19 nt, Homo sapiens
  misc_RNA (1)...(19): siRNA sense strand
aagaaaagucagaaguuca

SEQ ID NO: 2492471 - RNA, 19 nt, Homo sapiens
  misc_RNA (1)...(19): siRNA sense strand
acgguagagugcaggcuuu

SEQ ID NO: 2492472 - RNA, 19 nt, Homo sapiens
  misc_RNA (1)...(19): siRNA sense strand
ucagaaaggaggagagacc

SEQ ID NO: 2492473 - RNA, 19 nt, Homo sapiens
  misc_RNA (1)...(19): siRNA sense strand
agauaaguuagaucaggaa

SEQ ID NO: 2492474 - RNA, 19 nt, Homo sapiens
  misc_RNA (1)...(19): siRNA sense strand
gggaggacguacugaggca

SEQ ID NO: 2492475 - RNA, 19 nt, Homo sapiens
  misc_RNA (1)...(19): siRNA sense strand
cugaggcagcagagggaga

SEQ ID NO: 2492476 - RNA, 19 nt, Homo sapiens
  misc_RNA (1)...(19): siRNA sense strand
uggccaagcugcacaggga

SEQ ID NO: 2492477 - RNA, 19 nt, Homo sapiens
  misc_RNA (1)...(19): siRNA sense strand
gggaggacguacugaggca

SEQ ID NO: 2492478 - RNA, 19 nt, Homo sapiens
  misc_RNA (1)...(19): siRNA sense strand
cugaggcagcagagggaga

SEQ ID NO: 2492479 - RNA, 19 nt, Homo sapiens
  misc_RNA (1)...(19): siRNA sense strand
uggccaagcugcacaggga

SEQ ID NO: 2492480 - RNA, 19 nt, Homo sapiens
  misc_RNA (1)...(19): siRNA sense strand
cgaucaugagagagaaaua

SEQ ID NO: 2492481 - RNA, 19 nt, Homo sapiens
  misc_RNA (1)...(19): siRNA sense strand
aaccagaguacguuggaaa

SEQ ID NO: 2492482 - RNA, 19 nt, Homo sapiens
  misc_RNA (1)...(19): siRNA sense strand
gacgaucaugagagagaaa

SEQ ID NO: 2492483 - RNA, 19 nt, Homo sapiens
  misc_RNA (1)...(19): siRNA sense strand
aggcuaaagacgaucauga

SEQ ID NO: 2492484 - RNA, 19 nt, Homo sapiens
  misc_RNA (1)...(19): siRNA sense strand
cagcaguuccacaggcaca

SEQ ID NO: 2492485 - RNA, 19 nt, Homo sapiens
  misc_RNA (1)...(19): siRNA sense strand
uggaaaacuucuuggaaag

SEQ ID NO: 2492486 - RNA, 19 nt, Homo sapiens
  misc_RNA (1)...(19): siRNA sense strand
aacacaacugagaaggaaa

SEQ ID NO: 2492487 - RNA, 19 nt, Homo sapiens
  misc_RNA (1)...(19): siRNA sense strand
ccuuacaggagaucaucaa

SEQ ID NO: 2492488 - RNA, 19 nt, Homo sapiens
  misc_RNA (1)...(19): siRNA sense strand
cgaucaugagagagaaaua

SEQ ID NO: 2492489 - RNA, 19 nt, Homo sapiens
  misc_RNA (1)...(19): siRNA sense strand
aaccagaguacguuggaaa

SEQ ID NO: 2492490 - RNA, 19 nt, Homo sapiens
  misc_RNA (1)...(19): siRNA sense strand
gacgaucaugagagagaaa

SEQ ID NO: 2492491 - RNA, 19 nt, Homo sapiens
  misc_RNA (1)...(19): siRNA sense strand
aggcuaaagacgaucauga

SEQ ID NO: 2492492 - RNA, 19 nt, Homo sapiens
  misc_RNA (1)...(19): siRNA sense strand
cagcaguuccacaggcaca

SEQ ID NO: 2492493 - RNA, 19 nt, Homo sapiens
  misc_RNA (1)...(19): siRNA sense strand
uggaaaacuucuuggaaag

SEQ ID NO: 2492494 - RNA, 19 nt, Homo sapiens
  misc_RNA (1)...(19): siRNA sense strand
aacacaacugagaaggaaa

SEQ ID NO: 2492495 - RNA, 19 nt, Homo sapiens
  misc_RNA (1)...(19): siRNA sense strand
ccuuacaggagaucaucaa

SEQ ID NO: 2492496 - RNA, 19 nt, Homo sapiens
  misc_RNA (1)...(19): siRNA sense strand
gccugaaguauuaugagaa

SEQ ID NO: 2492497 - RNA, 19 nt, Homo sapiens
  misc_RNA (1)...(19): siRNA sense strand
caaucaucuucgucaccaa

SEQ ID NO: 2492498 - RNA, 19 nt, Homo sapiens
  misc_RNA (1)...(19): siRNA sense strand
ccaaagaagagaaacgaga

SEQ ID NO: 2492499 - RNA, 19 nt, Homo sapiens
  misc_RNA (1)...(19): siRNA sense strand
ucacaagcaaagaggaaga

SEQ ID NO: 2492500 - RNA, 19 nt, Homo sapiens
  misc_RNA (1)...(19): siRNA sense strand
gggcaaagcuugugugucc

SEQ ID NO: 2492501 - RNA, 19 nt, Homo sapiens
  misc_RNA (1)...(19): siRNA sense strand
uuguagugccagagacuua

SEQ ID NO: 2492502 - RNA, 19 nt, Homo sapiens
  misc_RNA (1)...(19): siRNA sense strand
ccaccauggcaguugcaaa

SEQ ID NO: 2492503 - RNA, 19 nt, Homo sapiens
  misc_RNA (1)...(19): siRNA sense strand
ugauguggcgagugggcaa

SEQ ID NO: 2492504 - RNA, 19 nt, Homo sapiens
  misc_RNA (1)...(19): siRNA sense strand
acuacuacaaaguggacua

SEQ ID NO: 2492505 - RNA, 19 nt, Homo sapiens
  misc_RNA (1)...(19): siRNA sense strand
gcaaagaggaagacgacag

SEQ ID NO: 2492506 - RNA, 19 nt, Homo sapiens
  misc_RNA (1)...(19): siRNA sense strand
acuuugaaaucguggucau

SEQ ID NO: 2492507 - RNA, 19 nt, Homo sapiens
  misc_RNA (1)...(19): siRNA sense strand
aagaggaagacgacaguga

SEQ ID NO: 2492508 - RNA, 19 nt, Homo sapiens
  misc_RNA (1)...(19): siRNA sense strand
uugggaacgggaagaguaa

SEQ ID NO: 2492509 - RNA, 19 nt, Homo sapiens
  misc_RNA (1)...(19): siRNA sense strand
caguggaaucgaucguaua

SEQ ID NO: 2492510 - RNA, 19 nt, Homo sapiens
  misc_RNA (1)...(19): siRNA sense strand
caucaaugugggugagaag

SEQ ID NO: 2492511 - RNA, 19 nt, Homo sapiens
  misc_RNA (1)...(19): siRNA sense strand
uggucauacuggaaggcau

SEQ ID NO: 2492512 - RNA, 19 nt, Homo sapiens
  misc_RNA (1)...(19): siRNA sense strand
ccgugauugccaugagaga

SEQ ID NO: 2492513 - RNA, 19 nt, Homo sapiens
  misc_RNA (1)...(19): siRNA sense strand
uggaucaaauagacaucaa

SEQ ID NO: 2492514 - RNA, 19 nt, Homo sapiens
  misc_RNA (1)...(19): siRNA sense strand
caagcaaagaggaagacga

SEQ ID NO: 2492515 - RNA, 19 nt, Homo sapiens
  misc_RNA (1)...(19): siRNA sense strand
aguccaugaaauagaugaa

SEQ ID NO: 2492516 - RNA, 19 nt, Homo sapiens
  misc_RNA (1)...(19): siRNA sense strand
augcauccaaagagggcaa

SEQ ID NO: 2492517 - RNA, 19 nt, Homo sapiens
  misc_RNA (1)...(19): siRNA sense strand
cggcgagagucggagauau

SEQ ID NO: 2492518 - RNA, 19 nt, Homo sapiens
  misc_RNA (1)...(19): siRNA sense strand
acacagugccguagcucuu

SEQ ID NO: 2492519 - RNA, 19 nt, Homo sapiens
  misc_RNA (1)...(19): siRNA sense strand
cagaagaagacgguaugaa

SEQ ID NO: 2492520 - RNA, 19 nt, Homo sapiens
  misc_RNA (1)...(19): siRNA sense strand
ccucaaauccagaauuacu

SEQ ID NO: 2492521 - RNA, 19 nt, Homo sapiens
  misc_RNA (1)...(19): siRNA sense strand
cugaauccacauagagaaa

SEQ ID NO: 2492522 - RNA, 19 nt, Homo sapiens
  misc_RNA (1)...(19): siRNA sense strand
gcguaauguuauugaagcu

SEQ ID NO: 2492523 - RNA, 19 nt, Homo sapiens
  misc_RNA (1)...(19): siRNA sense strand
guugaagagauuauggaga

SEQ ID NO: 2492524 - RNA, 19 nt, Homo sapiens
  misc_RNA (1)...(19): siRNA sense strand
ucucagaugaagcggugaa

SEQ ID NO: 2492525 - RNA, 19 nt, Homo sapiens
  misc_RNA (1)...(19): siRNA sense strand
uuggauaagcacuuggaau

SEQ ID NO: 2492526 - RNA, 19 nt, Homo sapiens
  misc_RNA (1)...(19): siRNA sense strand
cugaauccacauagagaaa

SEQ ID NO: 2492527 - RNA, 19 nt, Homo sapiens
  misc_RNA (1)...(19): siRNA sense strand
gcguaauguuauugaagcu

SEQ ID NO: 2492528 - RNA, 19 nt, Homo sapiens
  misc_RNA (1)...(19): siRNA sense strand
guugaagagauuauggaga

SEQ ID NO: 2492529 - RNA, 19 nt, Homo sapiens
  misc_RNA (1)...(19): siRNA sense strand
ucucagaugaagcggugaa

SEQ ID NO: 2492530 - RNA, 19 nt, Homo sapiens
  misc_RNA (1)...(19): siRNA sense strand
uuggauaagcacuuggaau

SEQ ID NO: 2492531 - RNA, 19 nt, Homo sapiens
  misc_RNA (1)...(19): siRNA sense strand
cugaauccacauagagaaa

SEQ ID NO: 2492532 - RNA, 19 nt, Homo sapiens
  misc_RNA (1)...(19): siRNA sense strand
gcguaauguuauugaagcu

SEQ ID NO: 2492533 - RNA, 19 nt, Homo sapiens
  misc_RNA (1)...(19): siRNA sense strand
guugaagagauuauggaga

SEQ ID NO: 2492534 - RNA, 19 nt, Homo sapiens
  misc_RNA (1)...(19): siRNA sense strand
ucucagaugaagcggugaa

SEQ ID NO: 2492535 - RNA, 19 nt, Homo sapiens
  misc_RNA (1)...(19): siRNA sense strand
uuggauaagcacuuggaau

SEQ ID NO: 2492536 - RNA, 19 nt, Homo sapiens
  misc_RNA (1)...(19): siRNA sense strand
cguuaaaucaggaagcaga

SEQ ID NO: 2492537 - RNA, 19 nt, Homo sapiens
  misc_RNA (1)...(19): siRNA sense strand
acgagaaggccgaggaauc

SEQ ID NO: 2492538 - RNA, 19 nt, Homo sapiens
  misc_RNA (1)...(19): siRNA sense strand
ccgaaugaagcaaaagaaa

SEQ ID NO: 2492539 - RNA, 19 nt, Homo sapiens
  misc_RNA (1)...(19): siRNA sense strand
gcaaaagaaacgugagaag

SEQ ID NO: 2492540 - RNA, 19 nt, Homo sapiens
  misc_RNA (1)...(19): siRNA sense strand
aaacagggaaaguuggaga

SEQ ID NO: 2492541 - RNA, 19 nt, Homo sapiens
  misc_RNA (1)...(19): siRNA sense strand
cccucggaccauaggauua

SEQ ID NO: 2492542 - RNA, 19 nt, Homo sapiens
  misc_RNA (1)...(19): siRNA sense strand
cgccaggaaacgacgagaa

SEQ ID NO: 2492543 - RNA, 19 nt, Homo sapiens
  misc_RNA (1)...(19): siRNA sense strand
cguuaaaucaggaagcaga

SEQ ID NO: 2492544 - RNA, 19 nt, Homo sapiens
  misc_RNA (1)...(19): siRNA sense strand
cccucggaccauaggauua

SEQ ID NO: 2492545 - RNA, 19 nt, Homo sapiens
  misc_RNA (1)...(19): siRNA sense strand
ccugaggauugcugagaaa

SEQ ID NO: 2492546 - RNA, 19 nt, Homo sapiens
  misc_RNA (1)...(19): siRNA sense strand
gcuuguagcaguagaagaa

SEQ ID NO: 2492547 - RNA, 19 nt, Homo sapiens
  misc_RNA (1)...(19): siRNA sense strand
guguauauggagauggaaa

SEQ ID NO: 2492548 - RNA, 19 nt, Homo sapiens
  misc_RNA (1)...(19): siRNA sense strand
cagcagaagcaaugaccaa

SEQ ID NO: 2492549 - RNA, 19 nt, Homo sapiens
  misc_RNA (1)...(19): siRNA sense strand
ccaccaagcaccagcacaa

SEQ ID NO: 2492550 - RNA, 19 nt, Homo sapiens
  misc_RNA (1)...(19): siRNA sense strand
gagugaagucaaagauauu

SEQ ID NO: 2492551 - RNA, 19 nt, Homo sapiens
  misc_RNA (1)...(19): siRNA sense strand
agucaaagauauucaggau

SEQ ID NO: 2492552 - RNA, 19 nt, Homo sapiens
  misc_RNA (1)...(19): siRNA sense strand
gggaauauuagaugaagau

SEQ ID NO: 2492553 - RNA, 19 nt, Homo sapiens
  misc_RNA (1)...(19): siRNA sense strand
caaggaaagagauggagaa

SEQ ID NO: 2492554 - RNA, 19 nt, Homo sapiens
  misc_RNA (1)...(19): siRNA sense strand
ccaucaauguggagaaugu

SEQ ID NO: 2492555 - RNA, 19 nt, Homo sapiens
  misc_RNA (1)...(19): siRNA sense strand
gugaagaggaugugaguuc

SEQ ID NO: 2492556 - RNA, 19 nt, Homo sapiens
  misc_RNA (1)...(19): siRNA sense strand
ucagaagaugagagauuua

SEQ ID NO: 2492557 - RNA, 19 nt, Homo sapiens
  misc_RNA (1)...(19): siRNA sense strand
gagacagauaagaaugaaa

SEQ ID NO: 2492558 - RNA, 19 nt, Homo sapiens
  misc_RNA (1)...(19): siRNA sense strand
cagugauguuugagacaga

SEQ ID NO: 2492559 - RNA, 19 nt, Homo sapiens
  misc_RNA (1)...(19): siRNA sense strand
agggaauauuagaugaaga

SEQ ID NO: 2492560 - RNA, 19 nt, Homo sapiens
  misc_RNA (1)...(19): siRNA sense strand
aggaagacacugaggagga

SEQ ID NO: 2492561 - RNA, 19 nt, Homo sapiens
  misc_RNA (1)...(19): siRNA sense strand
guuuggagcuggagagaag

SEQ ID NO: 2492562 - RNA, 19 nt, Homo sapiens
  misc_RNA (1)...(19): siRNA sense strand
gcguaaaacuacugagaag

SEQ ID NO: 2492563 - RNA, 19 nt, Homo sapiens
  misc_RNA (1)...(19): siRNA sense strand
aggaaagagauggagaaua

SEQ ID NO: 2492564 - RNA, 19 nt, Homo sapiens
  misc_RNA (1)...(19): siRNA sense strand
cacaaaggccgaagaguca

SEQ ID NO: 2492565 - RNA, 19 nt, Homo sapiens
  misc_RNA (1)...(19): siRNA sense strand
uggagaaguuauaaguaca

SEQ ID NO: 2492566 - RNA, 19 nt, Homo sapiens
  misc_RNA (1)...(19): siRNA sense strand
uagaagaggcagucaguca

SEQ ID NO: 2492567 - RNA, 19 nt, Homo sapiens
  misc_RNA (1)...(19): siRNA sense strand
aggaugugcuauuaguuaa

SEQ ID NO: 2492568 - RNA, 19 nt, Homo sapiens
  misc_RNA (1)...(19): siRNA sense strand
aaucaaggccugaagauca

SEQ ID NO: 2492569 - RNA, 19 nt, Homo sapiens
  misc_RNA (1)...(19): siRNA sense strand
ggauugaaagaaauggcaa

SEQ ID NO: 2492570 - RNA, 19 nt, Homo sapiens
  misc_RNA (1)...(19): siRNA sense strand
ggaaacaaggaaagagaug

SEQ ID NO: 2492571 - RNA, 19 nt, Homo sapiens
  misc_RNA (1)...(19): siRNA sense strand
cauuauguuuggaguugaa

SEQ ID NO: 2492572 - RNA, 19 nt, Homo sapiens
  misc_RNA (1)...(19): siRNA sense strand
auacagagcaagagcacga

SEQ ID NO: 2492573 - RNA, 19 nt, Homo sapiens
  misc_RNA (1)...(19): siRNA sense strand
ugugacacugagagagaaa

SEQ ID NO: 2492574 - RNA, 19 nt, Homo sapiens
  misc_RNA (1)...(19): siRNA sense strand
guaaggaguccaagggagu

SEQ ID NO: 2492575 - RNA, 19 nt, Homo sapiens
  misc_RNA (1)...(19): siRNA sense strand
agaucuaccaacaagguua

SEQ ID NO: 2492576 - RNA, 19 nt, Homo sapiens
  misc_RNA (1)...(19): siRNA sense strand
ccugcuaagaagaggccua

SEQ ID NO: 2492577 - RNA, 19 nt, Homo sapiens
  misc_RNA (1)...(19): siRNA sense strand
aggaagaggaccugccaga

SEQ ID NO: 2492578 - RNA, 19 nt, Homo sapiens
  misc_RNA (1)...(19): siRNA sense strand
aaacaaggaaagagaugga

SEQ ID NO: 2492579 - RNA, 19 nt, Homo sapiens
  misc_RNA (1)...(19): siRNA sense strand
uuucuagcuuugugcguaa

SEQ ID NO: 2492580 - RNA, 19 nt, Homo sapiens
  misc_RNA (1)...(19): siRNA sense strand
gauucagcuuguagcagua

SEQ ID NO: 2492581 - RNA, 19 nt, Homo sapiens
  misc_RNA (1)...(19): siRNA sense strand
ccaaagagaaaaugacaga

SEQ ID NO: 2492582 - RNA, 19 nt, Homo sapiens
  misc_RNA (1)...(19): siRNA sense strand
uuauuuggauggaaggcua

SEQ ID NO: 2492583 - RNA, 19 nt, Homo sapiens
  misc_RNA (1)...(19): siRNA sense strand
gaucaugcugggaagguuu

SEQ ID NO: 2492584 - RNA, 19 nt, Homo sapiens
  misc_RNA (1)...(19): siRNA sense strand
aauuaaacuuccugcagau

SEQ ID NO: 2492585 - RNA, 19 nt, Homo sapiens
  misc_RNA (1)...(19): siRNA sense strand
aacuuugacugcagauaaa

SEQ ID NO: 2492586 - RNA, 19 nt, Homo sapiens
  misc_RNA (1)...(19): siRNA sense strand
acacaaaggccgaagaguc

SEQ ID NO: 2492587 - RNA, 19 nt, Homo sapiens
  misc_RNA (1)...(19): siRNA sense strand
ugaaauugaaccaggaugu

SEQ ID NO: 2492588 - RNA, 19 nt, Homo sapiens
  misc_RNA (1)...(19): siRNA sense strand
gauaaaacagcaugugaau

SEQ ID NO: 2492589 - RNA, 19 nt, Homo sapiens
  misc_RNA (1)...(19): siRNA sense strand
aaagagcgaaggagaguau

SEQ ID NO: 2492590 - RNA, 19 nt, Homo sapiens
  misc_RNA (1)...(19): siRNA sense strand
uguauauggagauggaaaa

SEQ ID NO: 2492591 - RNA, 19 nt, Homo sapiens
  misc_RNA (1)...(19): siRNA sense strand
gggccuugauacaaagcau

SEQ ID NO: 2492592 - RNA, 19 nt, Homo sapiens
  misc_RNA (1)...(19): siRNA sense strand
guguuguacaguuagauua

SEQ ID NO: 2492593 - RNA, 19 nt, Homo sapiens
  misc_RNA (1)...(19): siRNA sense strand
cuuugauggagaaguuaua

SEQ ID NO: 2492594 - RNA, 19 nt, Homo sapiens
  misc_RNA (1)...(19): siRNA sense strand
aagaagaggccuauggaac

SEQ ID NO: 2492595 - RNA, 19 nt, Homo sapiens
  misc_RNA (1)...(19): siRNA sense strand
aaggagaguaucaagcuua

SEQ ID NO: 2492596 - RNA, 19 nt, Homo sapiens
  misc_RNA (1)...(19): siRNA sense strand
cugaaugauaugagccuga

SEQ ID NO: 2492597 - RNA, 19 nt, Homo sapiens
  misc_RNA (1)...(19): siRNA sense strand
acaaggaaagagauggaga

SEQ ID NO: 2492598 - RNA, 19 nt, Homo sapiens
  misc_RNA (1)...(19): siRNA sense strand
cuuacaucuuagugagcau

SEQ ID NO: 2492599 - RNA, 19 nt, Homo sapiens
  misc_RNA (1)...(19): siRNA sense strand
uguuugagacagauaagaa

SEQ ID NO: 2492600 - RNA, 19 nt, Homo sapiens
  misc_RNA (1)...(19): siRNA sense strand
cuucaggcugucaaagaaa

SEQ ID NO: 2492601 - RNA, 19 nt, Homo sapiens
  misc_RNA (1)...(19): siRNA sense strand
agaaauggcaaguuccaau

SEQ ID NO: 2492602 - RNA, 19 nt, Homo sapiens
  misc_RNA (1)...(19): siRNA sense strand
ucaucauccugcugaguuu

SEQ ID NO: 2492603 - RNA, 19 nt, Homo sapiens
  misc_RNA (1)...(19): siRNA sense strand
ggucacugcuacaggaaug

SEQ ID NO: 2492604 - RNA, 19 nt, Homo sapiens
  misc_RNA (1)...(19): siRNA sense strand
uggagugaagucaaagaua

SEQ ID NO: 2492605 - RNA, 19 nt, Homo sapiens
  misc_RNA (1)...(19): siRNA sense strand
aagcaaugaccaagcuaca

SEQ ID NO: 2492606 - RNA, 19 nt, Homo sapiens
  misc_RNA (1)...(19): siRNA sense strand
guuuggaguugaauguauu

SEQ ID NO: 2492607 - RNA, 19 nt, Homo sapiens
  misc_RNA (1)...(19): siRNA sense strand
cagcacaauggaugaugaa

SEQ ID NO: 2492608 - RNA, 19 nt, Homo sapiens
  misc_RNA (1)...(19): siRNA sense strand
ucaagagcgucgugggaaa

SEQ ID NO: 2492609 - RNA, 19 nt, Homo sapiens
  misc_RNA (1)...(19): siRNA sense strand
ccugaggauugcugagaaa

SEQ ID NO: 2492610 - RNA, 19 nt, Homo sapiens
  misc_RNA (1)...(19): siRNA sense strand
gcuuguagcaguagaagaa

SEQ ID NO: 2492611 - RNA, 19 nt, Homo sapiens
  misc_RNA (1)...(19): siRNA sense strand
guguauauggagauggaaa

SEQ ID NO: 2492612 - RNA, 19 nt, Homo sapiens
  misc_RNA (1)...(19): siRNA sense strand
cagcagaagcaaugaccaa

SEQ ID NO: 2492613 - RNA, 19 nt, Homo sapiens
  misc_RNA (1)...(19): siRNA sense strand
ggaauuaaaucaagagcgu

SEQ ID NO: 2492614 - RNA, 19 nt, Homo sapiens
  misc_RNA (1)...(19): siRNA sense strand
ccaccaagcaccagcacaa

SEQ ID NO: 2492615 - RNA, 19 nt, Homo sapiens
  misc_RNA (1)...(19): siRNA sense strand
gagugaagucaaagauauu

SEQ ID NO: 2492616 - RNA, 19 nt, Homo sapiens
  misc_RNA (1)...(19): siRNA sense strand
agucaaagauauucaggau

SEQ ID NO: 2492617 - RNA, 19 nt, Homo sapiens
  misc_RNA (1)...(19): siRNA sense strand
gggaauauuagaugaagau

SEQ ID NO: 2492618 - RNA, 19 nt, Homo sapiens
  misc_RNA (1)...(19): siRNA sense strand
caaggaaagagauggagaa

SEQ ID NO: 2492619 - RNA, 19 nt, Homo sapiens
  misc_RNA (1)...(19): siRNA sense strand
ccaucaauguggagaaugu

SEQ ID NO: 2492620 - RNA, 19 nt, Homo sapiens
  misc_RNA (1)...(19): siRNA sense strand
gugaagaggaugugaguuc

SEQ ID NO: 2492621 - RNA, 19 nt, Homo sapiens
  misc_RNA (1)...(19): siRNA sense strand
ucagaagaugagagauuua

SEQ ID NO: 2492622 - RNA, 19 nt, Homo sapiens
  misc_RNA (1)...(19): siRNA sense strand
gagacagauaagaaugaaa

SEQ ID NO: 2492623 - RNA, 19 nt, Homo sapiens
  misc_RNA (1)...(19): siRNA sense strand
cagugauguuugagacaga

SEQ ID NO: 2492624 - RNA, 19 nt, Homo sapiens
  misc_RNA (1)...(19): siRNA sense strand
agggaauauuagaugaaga

SEQ ID NO: 2492625 - RNA, 19 nt, Homo sapiens
  misc_RNA (1)...(19): siRNA sense strand
aggaagacacugaggagga

SEQ ID NO: 2492626 - RNA, 19 nt, Homo sapiens
  misc_RNA (1)...(19): siRNA sense strand
guuuggagcuggagagaag

SEQ ID NO: 2492627 - RNA, 19 nt, Homo sapiens
  misc_RNA (1)...(19): siRNA sense strand
gcguaaaacuacugagaag

SEQ ID NO: 2492628 - RNA, 19 nt, Homo sapiens
  misc_RNA (1)...(19): siRNA sense strand
cacaaaggccgaagaguca

SEQ ID NO: 2492629 - RNA, 19 nt, Homo sapiens
  misc_RNA (1)...(19): siRNA sense strand
aggaaagagauggagaaua

SEQ ID NO: 2492630 - RNA, 19 nt, Homo sapiens
  misc_RNA (1)...(19): siRNA sense strand
aaagaaggcuggaagcaca

SEQ ID NO: 2492631 - RNA, 19 nt, Homo sapiens
  misc_RNA (1)...(19): siRNA sense strand
acacagggaaggugcaauu

SEQ ID NO: 2492632 - RNA, 19 nt, Homo sapiens
  misc_RNA (1)...(19): siRNA sense strand
uggagaaguuauaaguaca

SEQ ID NO: 2492633 - RNA, 19 nt, Homo sapiens
  misc_RNA (1)...(19): siRNA sense strand
uagaagaggcagucaguca

SEQ ID NO: 2492634 - RNA, 19 nt, Homo sapiens
  misc_RNA (1)...(19): siRNA sense strand
aggaugugcuauuaguuaa

SEQ ID NO: 2492635 - RNA, 19 nt, Homo sapiens
  misc_RNA (1)...(19): siRNA sense strand
aaucaaggccugaagauca

SEQ ID NO: 2492636 - RNA, 19 nt, Homo sapiens
  misc_RNA (1)...(19): siRNA sense strand
ggauugaaagaaauggcaa

SEQ ID NO: 2492637 - RNA, 19 nt, Homo sapiens
  misc_RNA (1)...(19): siRNA sense strand
ggaaacaaggaaagagaug

SEQ ID NO: 2492638 - RNA, 19 nt, Homo sapiens
  misc_RNA (1)...(19): siRNA sense strand
cauuauguuuggaguugaa

SEQ ID NO: 2492639 - RNA, 19 nt, Homo sapiens
  misc_RNA (1)...(19): siRNA sense strand
auacagagcaagagcacga

SEQ ID NO: 2492640 - RNA, 19 nt, Homo sapiens
  misc_RNA (1)...(19): siRNA sense strand
ugugacacugagagagaaa

SEQ ID NO: 2492641 - RNA, 19 nt, Homo sapiens
  misc_RNA (1)...(19): siRNA sense strand
guaaggaguccaagggagu

SEQ ID NO: 2492642 - RNA, 19 nt, Homo sapiens
  misc_RNA (1)...(19): siRNA sense strand
gggcaguucaggaggagga

SEQ ID NO: 2492643 - RNA, 19 nt, Homo sapiens
  misc_RNA (1)...(19): siRNA sense strand
agaucuaccaacaagguua

SEQ ID NO: 2492644 - RNA, 19 nt, Homo sapiens
  misc_RNA (1)...(19): siRNA sense strand
gugggaaaccggaacaaau

SEQ ID NO: 2492645 - RNA, 19 nt, Homo sapiens
  misc_RNA (1)...(19): siRNA sense strand
ccugcuaagaagaggccua

SEQ ID NO: 2492646 - RNA, 19 nt, Homo sapiens
  misc_RNA (1)...(19): siRNA sense strand
aggaagaggaccugccaga

SEQ ID NO: 2492647 - RNA, 19 nt, Homo sapiens
  misc_RNA (1)...(19): siRNA sense strand
aaacaaggaaagagaugga

SEQ ID NO: 2492648 - RNA, 19 nt, Homo sapiens
  misc_RNA (1)...(19): siRNA sense strand
uuucuagcuuugugcguaa

SEQ ID NO: 2492649 - RNA, 19 nt, Homo sapiens
  misc_RNA (1)...(19): siRNA sense strand
gauucagcuuguagcagua

SEQ ID NO: 2492650 - RNA, 19 nt, Homo sapiens
  misc_RNA (1)...(19): siRNA sense strand
ccaaagagaaaaugacaga

SEQ ID NO: 2492651 - RNA, 19 nt, Homo sapiens
  misc_RNA (1)...(19): siRNA sense strand
gaucaugcugggaagguuu

SEQ ID NO: 2492652 - RNA, 19 nt, Homo sapiens
  misc_RNA (1)...(19): siRNA sense strand
uuauuuggauggaaggcua

SEQ ID NO: 2492653 - RNA, 19 nt, Homo sapiens
  misc_RNA (1)...(19): siRNA sense strand
aauuaaacuuccugcagau

SEQ ID NO: 2492654 - RNA, 19 nt, Homo sapiens
  misc_RNA (1)...(19): siRNA sense strand
aacuuugacugcagauaaa

SEQ ID NO: 2492655 - RNA, 19 nt, Homo sapiens
  misc_RNA (1)...(19): siRNA sense strand
acacaaaggccgaagaguc

SEQ ID NO: 2492656 - RNA, 19 nt, Homo sapiens
  misc_RNA (1)...(19): siRNA sense strand
ugaaauugaaccaggaugu

SEQ ID NO: 2492657 - RNA, 19 nt, Homo sapiens
  misc_RNA (1)...(19): siRNA sense strand
gauaaaacagcaugugaau

SEQ ID NO: 2492658 - RNA, 19 nt, Homo sapiens
  misc_RNA (1)...(19): siRNA sense strand
aaagagcgaaggagaguau

SEQ ID NO: 2492659 - RNA, 19 nt, Homo sapiens
  misc_RNA (1)...(19): siRNA sense strand
uguauauggagauggaaaa

SEQ ID NO: 2492660 - RNA, 19 nt, Homo sapiens
  misc_RNA (1)...(19): siRNA sense strand
gggccuugauacaaagcau

SEQ ID NO: 2492661 - RNA, 19 nt, Homo sapiens
  misc_RNA (1)...(19): siRNA sense strand
guguuguacaguuagauua

SEQ ID NO: 2492662 - RNA, 19 nt, Homo sapiens
  misc_RNA (1)...(19): siRNA sense strand
cuuugauggagaaguuaua

SEQ ID NO: 2492663 - RNA, 19 nt, Homo sapiens
  misc_RNA (1)...(19): siRNA sense strand
aagaagaggccuauggaac

SEQ ID NO: 2492664 - RNA, 19 nt, Homo sapiens
  misc_RNA (1)...(19): siRNA sense strand
aaggagaguaucaagcuua

SEQ ID NO: 2492665 - RNA, 19 nt, Homo sapiens
  misc_RNA (1)...(19): siRNA sense strand
cugaaugauaugagccuga

SEQ ID NO: 2492666 - RNA, 19 nt, Homo sapiens
  misc_RNA (1)...(19): siRNA sense strand
acaaggaaagagauggaga

SEQ ID NO: 2492667 - RNA, 19 nt, Homo sapiens
  misc_RNA (1)...(19): siRNA sense strand
cuuacaucuuagugagcau

SEQ ID NO: 2492668 - RNA, 19 nt, Homo sapiens
  misc_RNA (1)...(19): siRNA sense strand
uguuugagacagauaagaa

SEQ ID NO: 2492669 - RNA, 19 nt, Homo sapiens
  misc_RNA (1)...(19): siRNA sense strand
cuucaggcugucaaagaaa

SEQ ID NO: 2492670 - RNA, 19 nt, Homo sapiens
  misc_RNA (1)...(19): siRNA sense strand
agaaauggcaaguuccaau

SEQ ID NO: 2492671 - RNA, 19 nt, Homo sapiens
  misc_RNA (1)...(19): siRNA sense strand
ucaucauccugcugaguuu

SEQ ID NO: 2492672 - RNA, 19 nt, Homo sapiens
  misc_RNA (1)...(19): siRNA sense strand
ggucacugcuacaggaaug

SEQ ID NO: 2492673 - RNA, 19 nt, Homo sapiens
  misc_RNA (1)...(19): siRNA sense strand
ccugaggauugcugagaaa

SEQ ID NO: 2492674 - RNA, 19 nt, Homo sapiens
  misc_RNA (1)...(19): siRNA sense strand
gcuuguagcaguagaagaa

SEQ ID NO: 2492675 - RNA, 19 nt, Homo sapiens
  misc_RNA (1)...(19): siRNA sense strand
guguauauggagauggaaa

SEQ ID NO: 2492676 - RNA, 19 nt, Homo sapiens
  misc_RNA (1)...(19): siRNA sense strand
cagcagaagcaaugaccaa

SEQ ID NO: 2492677 - RNA, 19 nt, Homo sapiens
  misc_RNA (1)...(19): siRNA sense strand
ccaccaagcaccagcacaa

SEQ ID NO: 2492678 - RNA, 19 nt, Homo sapiens
  misc_RNA (1)...(19): siRNA sense strand
gagugaagucaaagauauu

SEQ ID NO: 2492679 - RNA, 19 nt, Homo sapiens
  misc_RNA (1)...(19): siRNA sense strand
agucaaagauauucaggau

SEQ ID NO: 2492680 - RNA, 19 nt, Homo sapiens
  misc_RNA (1)...(19): siRNA sense strand
gggaauauuagaugaagau

SEQ ID NO: 2492681 - RNA, 19 nt, Homo sapiens
  misc_RNA (1)...(19): siRNA sense strand
caaggaaagagauggagaa

SEQ ID NO: 2492682 - RNA, 19 nt, Homo sapiens
  misc_RNA (1)...(19): siRNA sense strand
ccaucaauguggagaaugu

SEQ ID NO: 2492683 - RNA, 19 nt, Homo sapiens
  misc_RNA (1)...(19): siRNA sense strand
gugaagaggaugugaguuc

SEQ ID NO: 2492684 - RNA, 19 nt, Homo sapiens
  misc_RNA (1)...(19): siRNA sense strand
ucagaagaugagagauuua

SEQ ID NO: 2492685 - RNA, 19 nt, Homo sapiens
  misc_RNA (1)...(19): siRNA sense strand
gagacagauaagaaugaaa

SEQ ID NO: 2492686 - RNA, 19 nt, Homo sapiens
  misc_RNA (1)...(19): siRNA sense strand
cagugauguuugagacaga

SEQ ID NO: 2492687 - RNA, 19 nt, Homo sapiens
  misc_RNA (1)...(19): siRNA sense strand
agggaauauuagaugaaga

SEQ ID NO: 2492688 - RNA, 19 nt, Homo sapiens
  misc_RNA (1)...(19): siRNA sense strand
aggaagacacugaggagga

SEQ ID NO: 2492689 - RNA, 19 nt, Homo sapiens
  misc_RNA (1)...(19): siRNA sense strand
guuuggagcuggagagaag

SEQ ID NO: 2492690 - RNA, 19 nt, Homo sapiens
  misc_RNA (1)...(19): siRNA sense strand
gcguaaaacuacugagaag

SEQ ID NO: 2492691 - RNA, 19 nt, Homo sapiens
  misc_RNA (1)...(19): siRNA sense strand
aggaaagagauggagaaua

SEQ ID NO: 2492692 - RNA, 19 nt, Homo sapiens
  misc_RNA (1)...(19): siRNA sense strand
cacaaaggccgaagaguca

SEQ ID NO: 2492693 - RNA, 19 nt, Homo sapiens
  misc_RNA (1)...(19): siRNA sense strand
uggagaaguuauaaguaca

SEQ ID NO: 2492694 - RNA, 19 nt, Homo sapiens
  misc_RNA (1)...(19): siRNA sense strand
uagaagaggcagucaguca

SEQ ID NO: 2492695 - RNA, 19 nt, Homo sapiens
  misc_RNA (1)...(19): siRNA sense strand
aggaugugcuauuaguuaa

SEQ ID NO: 2492696 - RNA, 19 nt, Homo sapiens
  misc_RNA (1)...(19): siRNA sense strand
aaucaaggccugaagauca

SEQ ID NO: 2492697 - RNA, 19 nt, Homo sapiens
  misc_RNA (1)...(19): siRNA sense strand
ggauugaaagaaauggcaa

SEQ ID NO: 2492698 - RNA, 19 nt, Homo sapiens
  misc_RNA (1)...(19): siRNA sense strand
ggaaacaaggaaagagaug

SEQ ID NO: 2492699 - RNA, 19 nt, Homo sapiens
  misc_RNA (1)...(19): siRNA sense strand
cauuauguuuggaguugaa

SEQ ID NO: 2492700 - RNA, 19 nt, Homo sapiens
  misc_RNA (1)...(19): siRNA sense strand
auacagagcaagagcacga

SEQ ID NO: 2492701 - RNA, 19 nt, Homo sapiens
  misc_RNA (1)...(19): siRNA sense strand
ugugacacugagagagaaa

SEQ ID NO: 2492702 - RNA, 19 nt, Homo sapiens
  misc_RNA (1)...(19): siRNA sense strand
guaaggaguccaagggagu

SEQ ID NO: 2492703 - RNA, 19 nt, Homo sapiens
  misc_RNA (1)...(19): siRNA sense strand
agaucuaccaacaagguua

SEQ ID NO: 2492704 - RNA, 19 nt, Homo sapiens
  misc_RNA (1)...(19): siRNA sense strand
ccugcuaagaagaggccua

SEQ ID NO: 2492705 - RNA, 19 nt, Homo sapiens
  misc_RNA (1)...(19): siRNA sense strand
aggaagaggaccugccaga

SEQ ID NO: 2492706 - RNA, 19 nt, Homo sapiens
  misc_RNA (1)...(19): siRNA sense strand
aaacaaggaaagagaugga

SEQ ID NO: 2492707 - RNA, 19 nt, Homo sapiens
  misc_RNA (1)...(19): siRNA sense strand
uuucuagcuuugugcguaa

SEQ ID NO: 2492708 - RNA, 19 nt, Homo sapiens
  misc_RNA (1)...(19): siRNA sense strand
gauucagcuuguagcagua

SEQ ID NO: 2492709 - RNA, 19 nt, Homo sapiens
  misc_RNA (1)...(19): siRNA sense strand
ccaaagagaaaaugacaga

SEQ ID NO: 2492710 - RNA, 19 nt, Homo sapiens
  misc_RNA (1)...(19): siRNA sense strand
uuauuuggauggaaggcua

SEQ ID NO: 2492711 - RNA, 19 nt, Homo sapiens
  misc_RNA (1)...(19): siRNA sense strand
gaucaugcugggaagguuu

SEQ ID NO: 2492712 - RNA, 19 nt, Homo sapiens
  misc_RNA (1)...(19): siRNA sense strand
aauuaaacuuccugcagau

SEQ ID NO: 2492713 - RNA, 19 nt, Homo sapiens
  misc_RNA (1)...(19): siRNA sense strand
aacuuugacugcagauaaa

SEQ ID NO: 2492714 - RNA, 19 nt, Homo sapiens
  misc_RNA (1)...(19): siRNA sense strand
acacaaaggccgaagaguc

SEQ ID NO: 2492715 - RNA, 19 nt, Homo sapiens
  misc_RNA (1)...(19): siRNA sense strand
ugaaauugaaccaggaugu

SEQ ID NO: 2492716 - RNA, 19 nt, Homo sapiens
  misc_RNA (1)...(19): siRNA sense strand
gauaaaacagcaugugaau

SEQ ID NO: 2492717 - RNA, 19 nt, Homo sapiens
  misc_RNA (1)...(19): siRNA sense strand
aaagagcgaaggagaguau

SEQ ID NO: 2492718 - RNA, 19 nt, Homo sapiens
  misc_RNA (1)...(19): siRNA sense strand
uguauauggagauggaaaa

SEQ ID NO: 2492719 - RNA, 19 nt, Homo sapiens
  misc_RNA (1)...(19): siRNA sense strand
gggccuugauacaaagcau

SEQ ID NO: 2492720 - RNA, 19 nt, Homo sapiens
  misc_RNA (1)...(19): siRNA sense strand
guguuguacaguuagauua

SEQ ID NO: 2492721 - RNA, 19 nt, Homo sapiens
  misc_RNA (1)...(19): siRNA sense strand
cuuugauggagaaguuaua

SEQ ID NO: 2492722 - RNA, 19 nt, Homo sapiens
  misc_RNA (1)...(19): siRNA sense strand
aagaagaggccuauggaac

SEQ ID NO: 2492723 - RNA, 19 nt, Homo sapiens
  misc_RNA (1)...(19): siRNA sense strand
aaggagaguaucaagcuua

SEQ ID NO: 2492724 - RNA, 19 nt, Homo sapiens
  misc_RNA (1)...(19): siRNA sense strand
cugaaugauaugagccuga

SEQ ID NO: 2492725 - RNA, 19 nt, Homo sapiens
  misc_RNA (1)...(19): siRNA sense strand
acaaggaaagagauggaga

SEQ ID NO: 2492726 - RNA, 19 nt, Homo sapiens
  misc_RNA (1)...(19): siRNA sense strand
cuuacaucuuagugagcau

SEQ ID NO: 2492727 - RNA, 19 nt, Homo sapiens
  misc_RNA (1)...(19): siRNA sense strand
uguuugagacagauaagaa

SEQ ID NO: 2492728 - RNA, 19 nt, Homo sapiens
  misc_RNA (1)...(19): siRNA sense strand
cuucaggcugucaaagaaa

SEQ ID NO: 2492729 - RNA, 19 nt, Homo sapiens
  misc_RNA (1)...(19): siRNA sense strand
agaaauggcaaguuccaau

SEQ ID NO: 2492730 - RNA, 19 nt, Homo sapiens
  misc_RNA (1)...(19): siRNA sense strand
ucaucauccugcugaguuu

SEQ ID NO: 2492731 - RNA, 19 nt, Homo sapiens
  misc_RNA (1)...(19): siRNA sense strand
ggucacugcuacaggaaug

SEQ ID NO: 2492732 - RNA, 19 nt, Homo sapiens
  misc_RNA (1)...(19): siRNA sense strand
uggagugaagucaaagaua

SEQ ID NO: 2492733 - RNA, 19 nt, Homo sapiens
  misc_RNA (1)...(19): siRNA sense strand
aagcaaugaccaagcuaca

SEQ ID NO: 2492734 - RNA, 19 nt, Homo sapiens
  misc_RNA (1)...(19): siRNA sense strand
guuuggaguugaauguauu

SEQ ID NO: 2492735 - RNA, 19 nt, Homo sapiens
  misc_RNA (1)...(19): siRNA sense strand
cagcacaauggaugaugaa

SEQ ID NO: 2492736 - RNA, 19 nt, Homo sapiens
  misc_RNA (1)...(19): siRNA sense strand
ggacugaguugauaggaga

SEQ ID NO: 2492737 - RNA, 19 nt, Homo sapiens
  misc_RNA (1)...(19): siRNA sense strand
gcuggagacccgagggaau

SEQ ID NO: 2492738 - RNA, 19 nt, Homo sapiens
  misc_RNA (1)...(19): siRNA sense strand
cuccagaagaacugagaca

SEQ ID NO: 2492739 - RNA, 19 nt, Homo sapiens
  misc_RNA (1)...(19): siRNA sense strand
ggggaauaaccgcuggaaa

SEQ ID NO: 2492740 - RNA, 19 nt, Homo sapiens
  misc_RNA (1)...(19): siRNA sense strand
gcuccagcuagaugggaau

SEQ ID NO: 2492741 - RNA, 19 nt, Homo sapiens
  misc_RNA (1)...(19): siRNA sense strand
ccuaaguacagacagggua

SEQ ID NO: 2492742 - RNA, 19 nt, Homo sapiens
  misc_RNA (1)...(19): siRNA sense strand
uagaacagcugaaggccca

SEQ ID NO: 2492743 - RNA, 19 nt, Homo sapiens
  misc_RNA (1)...(19): siRNA sense strand
ccuuugaacuccugugcca

SEQ ID NO: 2492744 - RNA, 19 nt, Homo sapiens
  misc_RNA (1)...(19): siRNA sense strand
gaacugagacacagcagca

SEQ ID NO: 2492745 - RNA, 19 nt, Homo sapiens
  misc_RNA (1)...(19): siRNA sense strand
cagccaaggaucugguguu

SEQ ID NO: 2492746 - RNA, 19 nt, Homo sapiens
  misc_RNA (1)...(19): siRNA sense strand
gagucugaauccuggacga

SEQ ID NO: 2492747 - RNA, 19 nt, Homo sapiens
  misc_RNA (1)...(19): siRNA sense strand
aggcaagggcaaagugaug

SEQ ID NO: 2492748 - RNA, 19 nt, Homo sapiens
  misc_RNA (1)...(19): siRNA sense strand
ccacauaacucgagacagg

SEQ ID NO: 2492749 - RNA, 19 nt, Homo sapiens
  misc_RNA (1)...(19): siRNA sense strand
ggaucaagacaguggugga

SEQ ID NO: 2492750 - RNA, 19 nt, Homo sapiens
  misc_RNA (1)...(19): siRNA sense strand
cugugaagguggugguugu

SEQ ID NO: 2492751 - RNA, 19 nt, Homo sapiens
  misc_RNA (1)...(19): siRNA sense strand
ccaacagguuuccaggaga

SEQ ID NO: 2492752 - RNA, 19 nt, Homo sapiens
  misc_RNA (1)...(19): siRNA sense strand
gugccacauuacaggguga

SEQ ID NO: 2492753 - RNA, 19 nt, Homo sapiens
  misc_RNA (1)...(19): siRNA sense strand
ccaggagaugguagacauu

SEQ ID NO: 2492754 - RNA, 19 nt, Homo sapiens
  misc_RNA (1)...(19): siRNA sense strand
ggaucaagacaguggugga

SEQ ID NO: 2492755 - RNA, 19 nt, Homo sapiens
  misc_RNA (1)...(19): siRNA sense strand
ggaucaagacaguggugga

SEQ ID NO: 2492756 - RNA, 19 nt, Homo sapiens
  misc_RNA (1)...(19): siRNA sense strand
ccacauaacucgagacagg

SEQ ID NO: 2492757 - RNA, 19 nt, Homo sapiens
  misc_RNA (1)...(19): siRNA sense strand
ggaucaagacaguggugga

SEQ ID NO: 2492758 - RNA, 19 nt, Homo sapiens
  misc_RNA (1)...(19): siRNA sense strand
cugugaagguggugguugu

SEQ ID NO: 2492759 - RNA, 19 nt, Homo sapiens
  misc_RNA (1)...(19): siRNA sense strand
ccaacagguuuccaggaga

SEQ ID NO: 2492760 - RNA, 19 nt, Homo sapiens
  misc_RNA (1)...(19): siRNA sense strand
gugccacauuacaggguga

SEQ ID NO: 2492761 - RNA, 19 nt, Homo sapiens
  misc_RNA (1)...(19): siRNA sense strand
ccaggagaugguagacauu

SEQ ID NO: 2492762 - RNA, 19 nt, Homo sapiens
  misc_RNA (1)...(19): siRNA sense strand
ggaucaagacaguggugga

SEQ ID NO: 2492763 - RNA, 19 nt, Homo sapiens
  misc_RNA (1)...(19): siRNA sense strand
ggaagcaggugaagggcaa

SEQ ID NO: 2492764 - RNA, 19 nt, Homo sapiens
  misc_RNA (1)...(19): siRNA sense strand
agggaggaagugagagaua

SEQ ID NO: 2492765 - RNA, 19 nt, Homo sapiens
  misc_RNA (1)...(19): siRNA sense strand
aggaaaugaccaagagucu

SEQ ID NO: 2492766 - RNA, 19 nt, Homo sapiens
  misc_RNA (1)...(19): siRNA sense strand
gcauguaacaagaucccaa

SEQ ID NO: 2492767 - RNA, 19 nt, Homo sapiens
  misc_RNA (1)...(19): siRNA sense strand
gagagauaugagugagcau

SEQ ID NO: 2492768 - RNA, 19 nt, Homo sapiens
  misc_RNA (1)...(19): siRNA sense strand
aggaacuggcucugcuuaa

SEQ ID NO: 2492769 - RNA, 19 nt, Homo sapiens
  misc_RNA (1)...(19): siRNA sense strand
aagugagagauaugaguga

SEQ ID NO: 2492770 - RNA, 19 nt, Homo sapiens
  misc_RNA (1)...(19): siRNA sense strand
ccagcagcccacugaggaa

SEQ ID NO: 2492771 - RNA, 19 nt, Homo sapiens
  misc_RNA (1)...(19): siRNA sense strand
cagaaagaggaaaugacca

SEQ ID NO: 2492772 - RNA, 19 nt, Homo sapiens
  misc_RNA (1)...(19): siRNA sense strand
aagaggaugagaaggcaaa

SEQ ID NO: 2492773 - RNA, 19 nt, Homo sapiens
  misc_RNA (1)...(19): siRNA sense strand
ggaagaagcaguugggcuc

SEQ ID NO: 2492774 - RNA, 19 nt, Homo sapiens
  misc_RNA (1)...(19): siRNA sense strand
cagaacacgugcugaggca

SEQ ID NO: 2492775 - RNA, 19 nt, Homo sapiens
  misc_RNA (1)...(19): siRNA sense strand
gggaagaagcaguugggcu

SEQ ID NO: 2492776 - RNA, 19 nt, Homo sapiens
  misc_RNA (1)...(19): siRNA sense strand
augcagaguucgagccgca

SEQ ID NO: 2492777 - RNA, 19 nt, Homo sapiens
  misc_RNA (1)...(19): siRNA sense strand
aaagaggaugagaaggcaa

SEQ ID NO: 2492778 - RNA, 19 nt, Homo sapiens
  misc_RNA (1)...(19): siRNA sense strand
cugcaagugaugacagcau

SEQ ID NO: 2492779 - RNA, 19 nt, Homo sapiens
  misc_RNA (1)...(19): siRNA sense strand
aggaccagauggacgguga

SEQ ID NO: 2492780 - RNA, 19 nt, Homo sapiens
  misc_RNA (1)...(19): siRNA sense strand
augaagaaugucagaagca

SEQ ID NO: 2492781 - RNA, 19 nt, Homo sapiens
  misc_RNA (1)...(19): siRNA sense strand
gggagaagaugauggcaga

SEQ ID NO: 2492782 - RNA, 19 nt, Homo sapiens
  misc_RNA (1)...(19): siRNA sense strand
gcaacaacuaccaggccaa

SEQ ID NO: 2492783 - RNA, 19 nt, Homo sapiens
  misc_RNA (1)...(19): siRNA sense strand
gcaccuauaaggaugggaa

SEQ ID NO: 2492784 - RNA, 19 nt, Homo sapiens
  misc_RNA (1)...(19): siRNA sense strand
guuuaaccaaugugggaca

SEQ ID NO: 2492785 - RNA, 19 nt, Homo sapiens
  misc_RNA (1)...(19): siRNA sense strand
gguaaugaccuguccgugu

SEQ ID NO: 2492786 - RNA, 19 nt, Homo sapiens
  misc_RNA (1)...(19): siRNA sense strand
aggagugugacaaguuuaa

SEQ ID NO: 2492787 - RNA, 19 nt, Homo sapiens
  misc_RNA (1)...(19): siRNA sense strand
aguacuggauuguccggaa

SEQ ID NO: 2492788 - RNA, 19 nt, Homo sapiens
  misc_RNA (1)...(19): siRNA sense strand
ccagagaagaaauggguuc

SEQ ID NO: 2492789 - RNA, 19 nt, Homo sapiens
  misc_RNA (1)...(19): siRNA sense strand
acucuuuggagaugagcua

SEQ ID NO: 2492790 - RNA, 19 nt, Homo sapiens
  misc_RNA (1)...(19): siRNA sense strand
acaucaacucuuuggagau

SEQ ID NO: 2492791 - RNA, 19 nt, Homo sapiens
  misc_RNA (1)...(19): siRNA sense strand
acuuaacacacgaggagau

SEQ ID NO: 2492792 - RNA, 19 nt, Homo sapiens
  misc_RNA (1)...(19): siRNA sense strand
aggaggagguguugcccau

SEQ ID NO: 2492793 - RNA, 19 nt, Homo sapiens
  misc_RNA (1)...(19): siRNA sense strand
ccguacuccucguggacuu

SEQ ID NO: 2492794 - RNA, 19 nt, Homo sapiens
  misc_RNA (1)...(19): siRNA sense strand
cuucaagagaauuagcuau

SEQ ID NO: 2492795 - RNA, 19 nt, Homo sapiens
  misc_RNA (1)...(19): siRNA sense strand
acuuaacacacgaggagau

SEQ ID NO: 2492796 - RNA, 19 nt, Homo sapiens
  misc_RNA (1)...(19): siRNA sense strand
aggaggagguguugcccau

SEQ ID NO: 2492797 - RNA, 19 nt, Homo sapiens
  misc_RNA (1)...(19): siRNA sense strand
ccguacuccucguggacuu

SEQ ID NO: 2492798 - RNA, 19 nt, Homo sapiens
  misc_RNA (1)...(19): siRNA sense strand
cuucaagagaauuagcuau

SEQ ID NO: 2492799 - RNA, 19 nt, Homo sapiens
  misc_RNA (1)...(19): siRNA sense strand
acuuaacacacgaggagau

SEQ ID NO: 2492800 - RNA, 19 nt, Homo sapiens
  misc_RNA (1)...(19): siRNA sense strand
aggaggagguguugcccau

SEQ ID NO: 2492801 - RNA, 19 nt, Homo sapiens
  misc_RNA (1)...(19): siRNA sense strand
ccguacuccucguggacuu

SEQ ID NO: 2492802 - RNA, 19 nt, Homo sapiens
  misc_RNA (1)...(19): siRNA sense strand
cuucaagagaauuagcuau

SEQ ID NO: 2492803 - RNA, 19 nt, Homo sapiens
  misc_RNA (1)...(19): siRNA sense strand
gagaagagucuauuggaga

SEQ ID NO: 2492804 - RNA, 19 nt, Homo sapiens
  misc_RNA (1)...(19): siRNA sense strand
gcaggagauugcuaggcua

SEQ ID NO: 2492805 - RNA, 19 nt, Homo sapiens
  misc_RNA (1)...(19): siRNA sense strand
gcuagaggaaaguggagau

SEQ ID NO: 2492806 - RNA, 19 nt, Homo sapiens
  misc_RNA (1)...(19): siRNA sense strand
ugaggaaacuccaggccau

SEQ ID NO: 2492807 - RNA, 19 nt, Homo sapiens
  misc_RNA (1)...(19): siRNA sense strand
gagugagagcuguagaaaa

SEQ ID NO: 2492808 - RNA, 19 nt, Homo sapiens
  misc_RNA (1)...(19): siRNA sense strand
gcgacugggaaguagauga

SEQ ID NO: 2492809 - RNA, 19 nt, Homo sapiens
  misc_RNA (1)...(19): siRNA sense strand
gcuuauucugccugagaca

SEQ ID NO: 2492810 - RNA, 19 nt, Homo sapiens
  misc_RNA (1)...(19): siRNA sense strand
aaguacagcuucuggagga

SEQ ID NO: 2492811 - RNA, 19 nt, Homo sapiens
  misc_RNA (1)...(19): siRNA sense strand
ggacagauacucaggcuag

SEQ ID NO: 2492812 - RNA, 19 nt, Homo sapiens
  misc_RNA (1)...(19): siRNA sense strand
gguuuagagagcagggucu

SEQ ID NO: 2492813 - RNA, 19 nt, Homo sapiens
  misc_RNA (1)...(19): siRNA sense strand
gaacagaauuugucccuuc

SEQ ID NO: 2492814 - RNA, 19 nt, Homo sapiens
  misc_RNA (1)...(19): siRNA sense strand
uggaauuggaugcugguga

SEQ ID NO: 2492815 - RNA, 19 nt, Homo sapiens
  misc_RNA (1)...(19): siRNA sense strand
ugacuaugaucgaagccaa

SEQ ID NO: 2492816 - RNA, 19 nt, Homo sapiens
  misc_RNA (1)...(19): siRNA sense strand
cgucuaugguucucgggua

SEQ ID NO: 2492817 - RNA, 19 nt, Homo sapiens
  misc_RNA (1)...(19): siRNA sense strand
acaagaucacccagagcaa

SEQ ID NO: 2492818 - RNA, 19 nt, Homo sapiens
  misc_RNA (1)...(19): siRNA sense strand
uggaagagcuaccuggaca

SEQ ID NO: 2492819 - RNA, 19 nt, Homo sapiens
  misc_RNA (1)...(19): siRNA sense strand
uggacaucauagagaacca

SEQ ID NO: 2492820 - RNA, 19 nt, Homo sapiens
  misc_RNA (1)...(19): siRNA sense strand
guuuugaggcuuuggagaa

SEQ ID NO: 2492821 - RNA, 19 nt, Homo sapiens
  misc_RNA (1)...(19): siRNA sense strand
cuuaugaggagaaacggua

SEQ ID NO: 2492822 - RNA, 19 nt, Homo sapiens
  misc_RNA (1)...(19): siRNA sense strand
gcacacaacugauaaggcu

SEQ ID NO: 2492823 - RNA, 19 nt, Homo sapiens
  misc_RNA (1)...(19): siRNA sense strand
cuggaugggaagaacaaga

SEQ ID NO: 2492824 - RNA, 19 nt, Homo sapiens
  misc_RNA (1)...(19): siRNA sense strand
uugagcaccaagagagaaa

SEQ ID NO: 2492825 - RNA, 19 nt, Homo sapiens
  misc_RNA (1)...(19): siRNA sense strand
gagaaagcuccaugggacu

SEQ ID NO: 2492826 - RNA, 19 nt, Homo sapiens
  misc_RNA (1)...(19): siRNA sense strand
guuugagcaccaagagaga

SEQ ID NO: 2492827 - RNA, 19 nt, Homo sapiens
  misc_RNA (1)...(19): siRNA sense strand
agagaaagcuccaugggac

SEQ ID NO: 2492828 - RNA, 19 nt, Homo sapiens
  misc_RNA (1)...(19): siRNA sense strand
uggaacugcaggaggcuga

SEQ ID NO: 2492829 - RNA, 19 nt, Homo sapiens
  misc_RNA (1)...(19): siRNA sense strand
ggaaagagguucagccaga

SEQ ID NO: 2492830 - RNA, 19 nt, Homo sapiens
  misc_RNA (1)...(19): siRNA sense strand
ccaacaugagggugcagaa

SEQ ID NO: 2492831 - RNA, 19 nt, Homo sapiens
  misc_RNA (1)...(19): siRNA sense strand
gcggaaagagguucagcca

SEQ ID NO: 2492832 - RNA, 19 nt, Homo sapiens
  misc_RNA (1)...(19): siRNA sense strand
cagucaaagaagacagaaa

SEQ ID NO: 2492833 - RNA, 19 nt, Homo sapiens
  misc_RNA (1)...(19): siRNA sense strand
cagcaauggcagaguauau

SEQ ID NO: 2492834 - RNA, 19 nt, Homo sapiens
  misc_RNA (1)...(19): siRNA sense strand
agacaauggaccucagaua

SEQ ID NO: 2492835 - RNA, 19 nt, Homo sapiens
  misc_RNA (1)...(19): siRNA sense strand
uguagaucauguugagaaa

SEQ ID NO: 2492836 - RNA, 19 nt, Homo sapiens
  misc_RNA (1)...(19): siRNA sense strand
cauaaagauuacagugaca

SEQ ID NO: 2492837 - RNA, 19 nt, Homo sapiens
  misc_RNA (1)...(19): siRNA sense strand
auacaagagcuaugagcaa

SEQ ID NO: 2492838 - RNA, 19 nt, Homo sapiens
  misc_RNA (1)...(19): siRNA sense strand
uagaagaaacagaaggauu

SEQ ID NO: 2492839 - RNA, 19 nt, Homo sapiens
  misc_RNA (1)...(19): siRNA sense strand
caacagagacaauaggaga

SEQ ID NO: 2492840 - RNA, 19 nt, Homo sapiens
  misc_RNA (1)...(19): siRNA sense strand
cgaagacguuuguggguga

SEQ ID NO: 2492841 - RNA, 19 nt, Homo sapiens
  misc_RNA (1)...(19): siRNA sense strand
ggugaaaauaggagaguca

SEQ ID NO: 2492842 - RNA, 19 nt, Homo sapiens
  misc_RNA (1)...(19): siRNA sense strand
uaggagagucagugggaau

SEQ ID NO: 2492843 - RNA, 19 nt, Homo sapiens
  misc_RNA (1)...(19): siRNA sense strand
gcagcuuggaggugacaaa

SEQ ID NO: 2492844 - RNA, 19 nt, Homo sapiens
  misc_RNA (1)...(19): siRNA sense strand
caguuuaaccagagauuca

SEQ ID NO: 2492845 - RNA, 19 nt, Homo sapiens
  misc_RNA (1)...(19): siRNA sense strand
uggcaauauucuuguaaca

SEQ ID NO: 2492846 - RNA, 19 nt, Homo sapiens
  misc_RNA (1)...(19): siRNA sense strand
gaggaaugugauuuggaaa

SEQ ID NO: 2492847 - RNA, 19 nt, Homo sapiens
  misc_RNA (1)...(19): siRNA sense strand
agaagagaacagacagcaa

SEQ ID NO: 2492848 - RNA, 19 nt, Homo sapiens
  misc_RNA (1)...(19): siRNA sense strand
guggaaugcaagagauuga

SEQ ID NO: 2492849 - RNA, 19 nt, Homo sapiens
  misc_RNA (1)...(19): siRNA sense strand
caguagauggacagucaaa

SEQ ID NO: 2492850 - RNA, 19 nt, Homo sapiens
  misc_RNA (1)...(19): siRNA sense strand
gaguauauuucgucaacca

SEQ ID NO: 2492851 - RNA, 19 nt, Homo sapiens
  misc_RNA (1)...(19): siRNA sense strand
agucugaaguuguuaccaa

SEQ ID NO: 2492852 - RNA, 19 nt, Homo sapiens
  misc_RNA (1)...(19): siRNA sense strand
aggagcaacaucuggauua

SEQ ID NO: 2492853 - RNA, 19 nt, Homo sapiens
  misc_RNA (1)...(19): siRNA sense strand
uuauggagguguagcaaga

SEQ ID NO: 2492854 - RNA, 19 nt, Homo sapiens
  misc_RNA (1)...(19): siRNA sense strand
caaagagccaacagagaca

SEQ ID NO: 2492855 - RNA, 19 nt, Homo sapiens
  misc_RNA (1)...(19): siRNA sense strand
ucaucuggguuaaggaaaa

SEQ ID NO: 2492856 - RNA, 19 nt, Homo sapiens
  misc_RNA (1)...(19): siRNA sense strand
aaaagaacaacaugggaua

SEQ ID NO: 2492857 - RNA, 19 nt, Homo sapiens
  misc_RNA (1)...(19): siRNA sense strand
gaacaaaccaguuggacuc

SEQ ID NO: 2492858 - RNA, 19 nt, Homo sapiens
  misc_RNA (1)...(19): siRNA sense strand
ccgccgacaaauacaaaua

SEQ ID NO: 2492859 - RNA, 19 nt, Homo sapiens
  misc_RNA (1)...(19): siRNA sense strand
agagauucauuuaugggaa

SEQ ID NO: 2492860 - RNA, 19 nt, Homo sapiens
  misc_RNA (1)...(19): siRNA sense strand
ccccagaagucaaggucaa

SEQ ID NO: 2492861 - RNA, 19 nt, Homo sapiens
  misc_RNA (1)...(19): siRNA sense strand
gucucgagguguugaagaa

SEQ ID NO: 2492862 - RNA, 19 nt, Homo sapiens
  misc_RNA (1)...(19): siRNA sense strand
gacaaagagccaacagaga

SEQ ID NO: 2492863 - RNA, 19 nt, Homo sapiens
  misc_RNA (1)...(19): siRNA sense strand
gaccauuucacaagaacaa

SEQ ID NO: 2492864 - RNA, 19 nt, Homo sapiens
  misc_RNA (1)...(19): siRNA sense strand
agauuacagugacaagaaa

SEQ ID NO: 2492865 - RNA, 19 nt, Homo sapiens
  misc_RNA (1)...(19): siRNA sense strand
agucaugaucugaaaccua

SEQ ID NO: 2492866 - RNA, 19 nt, Homo sapiens
  misc_RNA (1)...(19): siRNA sense strand
cauagaagaaacagaagga

SEQ ID NO: 2492867 - RNA, 19 nt, Homo sapiens
  misc_RNA (1)...(19): siRNA sense strand
caauaggagacuugucaau

SEQ ID NO: 2492868 - RNA, 19 nt, Homo sapiens
  misc_RNA (1)...(19): siRNA sense strand
ccgacaaauacaaauacaa

SEQ ID NO: 2492869 - RNA, 19 nt, Homo sapiens
  misc_RNA (1)...(19): siRNA sense strand
agaacaacaacguggcaga

SEQ ID NO: 2492870 - RNA, 19 nt, Homo sapiens
  misc_RNA (1)...(19): siRNA sense strand
gaccacaauagaagaacua

SEQ ID NO: 2492871 - RNA, 19 nt, Homo sapiens
  misc_RNA (1)...(19): siRNA sense strand
guuguuugccauagaagaa

SEQ ID NO: 2492872 - RNA, 19 nt, Homo sapiens
  misc_RNA (1)...(19): siRNA sense strand
agucaaagaagacagaaaa

SEQ ID NO: 2492873 - RNA, 19 nt, Homo sapiens
  misc_RNA (1)...(19): siRNA sense strand
gaaaccuaaugguggcaau

SEQ ID NO: 2492874 - RNA, 19 nt, Homo sapiens
  misc_RNA (1)...(19): siRNA sense strand
uggcaguuuguuaaagaaa

SEQ ID NO: 2492875 - RNA, 19 nt, Homo sapiens
  misc_RNA (1)...(19): siRNA sense strand
augagcaacugaaggaaaa

SEQ ID NO: 2492876 - RNA, 19 nt, Homo sapiens
  misc_RNA (1)...(19): siRNA sense strand
cguccggaacuaugaacaa

SEQ ID NO: 2492877 - RNA, 19 nt, Homo sapiens
  misc_RNA (1)...(19): siRNA sense strand
auccagaucaccugaaaua

SEQ ID NO: 2492878 - RNA, 19 nt, Homo sapiens
  misc_RNA (1)...(19): siRNA sense strand
guaaagaauuugauccucu

SEQ ID NO: 2492879 - RNA, 19 nt, Homo sapiens
  misc_RNA (1)...(19): siRNA sense strand
caugaaguguugaacccaa

SEQ ID NO: 2492880 - RNA, 19 nt, Homo sapiens
  misc_RNA (1)...(19): siRNA sense strand
ggacucaaggauuuagaau

SEQ ID NO: 2492881 - RNA, 19 nt, Homo sapiens
  misc_RNA (1)...(19): siRNA sense strand
acguagaggucacaguaga

SEQ ID NO: 2492882 - RNA, 19 nt, Homo sapiens
  misc_RNA (1)...(19): siRNA sense strand
ggaacugcugcauuagaua

SEQ ID NO: 2492883 - RNA, 19 nt, Homo sapiens
  misc_RNA (1)...(19): siRNA sense strand
aaggaugaaacaagaguga

SEQ ID NO: 2492884 - RNA, 19 nt, Homo sapiens
  misc_RNA (1)...(19): siRNA sense strand
cuuugaaggcuuuaaugaa

SEQ ID NO: 2492885 - RNA, 19 nt, Homo sapiens
  misc_RNA (1)...(19): siRNA sense strand
ugggagaagagaacagaca

SEQ ID NO: 2492886 - RNA, 19 nt, Homo sapiens
  misc_RNA (1)...(19): siRNA sense strand
cgucauuaugcaaggacca

SEQ ID NO: 2492887 - RNA, 19 nt, Homo sapiens
  misc_RNA (1)...(19): siRNA sense strand
ggagagucagugggaauaa

SEQ ID NO: 2492888 - RNA, 19 nt, Homo sapiens
  misc_RNA (1)...(19): siRNA sense strand
agaagaacuaccaccuaua

SEQ ID NO: 2492889 - RNA, 19 nt, Homo sapiens
  misc_RNA (1)...(19): siRNA sense strand
ggguuaaggaaaacaauau

SEQ ID NO: 2492890 - RNA, 19 nt, Homo sapiens
  misc_RNA (1)...(19): siRNA sense strand
gaaaagaacaacaugggau

SEQ ID NO: 2492891 - RNA, 19 nt, Homo sapiens
  misc_RNA (1)...(19): siRNA sense strand
agguuauagucaaggauau

SEQ ID NO: 2492892 - RNA, 19 nt, Homo sapiens
  misc_RNA (1)...(19): siRNA sense strand
gaguggaacaaguggccaa

SEQ ID NO: 2492893 - RNA, 19 nt, Homo sapiens
  misc_RNA (1)...(19): siRNA sense strand
acagcagaauggaggucaa

SEQ ID NO: 2492894 - RNA, 19 nt, Homo sapiens
  misc_RNA (1)...(19): siRNA sense strand
cgggagaggacgacguuca

SEQ ID NO: 2492895 - RNA, 19 nt, Homo sapiens
  misc_RNA (1)...(19): siRNA sense strand
ggauuauaaagaucagaca

SEQ ID NO: 2492896 - RNA, 19 nt, Homo sapiens
  misc_RNA (1)...(19): siRNA sense strand
cagacaucuucaugcgaga

SEQ ID NO: 2492897 - RNA, 19 nt, Homo sapiens
  misc_RNA (1)...(19): siRNA sense strand
augcugacugcuuggauua

SEQ ID NO: 2492898 - RNA, 19 nt, Homo sapiens
  misc_RNA (1)...(19): siRNA sense strand
cgggaagugaguucagaga

SEQ ID NO: 2492899 - RNA, 19 nt, Homo sapiens
  misc_RNA (1)...(19): siRNA sense strand
guuuaagaaucgaagagcu

SEQ ID NO: 2492900 - RNA, 19 nt, Homo sapiens
  misc_RNA (1)...(19): siRNA sense strand
uggaagcacuguuugccaa

SEQ ID NO: 2492901 - RNA, 19 nt, Homo sapiens
  misc_RNA (1)...(19): siRNA sense strand
agguuauagucaaggauau

SEQ ID NO: 2492902 - RNA, 19 nt, Homo sapiens
  misc_RNA (1)...(19): siRNA sense strand
gaguggaacaaguggccaa

SEQ ID NO: 2492903 - RNA, 19 nt, Homo sapiens
  misc_RNA (1)...(19): siRNA sense strand
acagcagaauggaggucaa

SEQ ID NO: 2492904 - RNA, 19 nt, Homo sapiens
  misc_RNA (1)...(19): siRNA sense strand
cgggagaggacgacguuca

SEQ ID NO: 2492905 - RNA, 19 nt, Homo sapiens
  misc_RNA (1)...(19): siRNA sense strand
ggauuauaaagaucagaca

SEQ ID NO: 2492906 - RNA, 19 nt, Homo sapiens
  misc_RNA (1)...(19): siRNA sense strand
cagacaucuucaugcgaga

SEQ ID NO: 2492907 - RNA, 19 nt, Homo sapiens
  misc_RNA (1)...(19): siRNA sense strand
augcugacugcuuggauua

SEQ ID NO: 2492908 - RNA, 19 nt, Homo sapiens
  misc_RNA (1)...(19): siRNA sense strand
cgggaagugaguucagaga

SEQ ID NO: 2492909 - RNA, 19 nt, Homo sapiens
  misc_RNA (1)...(19): siRNA sense strand
guuuaagaaucgaagagcu

SEQ ID NO: 2492910 - RNA, 19 nt, Homo sapiens
  misc_RNA (1)...(19): siRNA sense strand
uggaagcacuguuugccaa

SEQ ID NO: 2492911 - RNA, 19 nt, Homo sapiens
  misc_RNA (1)...(19): siRNA sense strand
gaggagaaauugaaccugu

SEQ ID NO: 2492912 - RNA, 19 nt, Homo sapiens
  misc_RNA (1)...(19): siRNA sense strand
gaguguccaaugaggagaa

SEQ ID NO: 2492913 - RNA, 19 nt, Homo sapiens
  misc_RNA (1)...(19): siRNA sense strand
ccuugaggguacuuagaau

SEQ ID NO: 2492914 - RNA, 19 nt, Homo sapiens
  misc_RNA (1)...(19): siRNA sense strand
acuacgaccgcgagcgcaa

SEQ ID NO: 2492915 - RNA, 19 nt, Homo sapiens
  misc_RNA (1)...(19): siRNA sense strand
ugauuaagcuugcccguca

SEQ ID NO: 2492916 - RNA, 19 nt, Homo sapiens
  misc_RNA (1)...(19): siRNA sense strand
ggagucaccuugaggguac

SEQ ID NO: 2492917 - RNA, 19 nt, Homo sapiens
  misc_RNA (1)...(19): siRNA sense strand
guacuuagaaugaugagga

SEQ ID NO: 2492918 - RNA, 19 nt, Homo sapiens
  misc_RNA (1)...(19): siRNA sense strand
ugucaguggaauuguucua

SEQ ID NO: 2492919 - RNA, 19 nt, Homo sapiens
  misc_RNA (1)...(19): siRNA sense strand
agguauaguaggagccucu

SEQ ID NO: 2492920 - RNA, 19 nt, Homo sapiens
  misc_RNA (1)...(19): siRNA sense strand
ccuugaggguacuuagaau

SEQ ID NO: 2492921 - RNA, 19 nt, Homo sapiens
  misc_RNA (1)...(19): siRNA sense strand
acuacgaccgcgagcgcaa

SEQ ID NO: 2492922 - RNA, 19 nt, Homo sapiens
  misc_RNA (1)...(19): siRNA sense strand
ugauuaagcuugcccguca

SEQ ID NO: 2492923 - RNA, 19 nt, Homo sapiens
  misc_RNA (1)...(19): siRNA sense strand
ggagucaccuugaggguac

SEQ ID NO: 2492924 - RNA, 19 nt, Homo sapiens
  misc_RNA (1)...(19): siRNA sense strand
guacuuagaaugaugagga

SEQ ID NO: 2492925 - RNA, 19 nt, Homo sapiens
  misc_RNA (1)...(19): siRNA sense strand
ugucaguggaauuguucua

SEQ ID NO: 2492926 - RNA, 19 nt, Homo sapiens
  misc_RNA (1)...(19): siRNA sense strand
agguauaguaggagccucu

SEQ ID NO: 2492927 - RNA, 19 nt, Homo sapiens
  misc_RNA (1)...(19): siRNA sense strand
auuuaagacaggagacaaa

SEQ ID NO: 2492928 - RNA, 19 nt, Homo sapiens
  misc_RNA (1)...(19): siRNA sense strand
acauaaaggcggauuucaa

SEQ ID NO: 2492929 - RNA, 19 nt, Homo sapiens
  misc_RNA (1)...(19): siRNA sense strand
acaacaaugaccaggacaa

SEQ ID NO: 2492930 - RNA, 19 nt, Homo sapiens
  misc_RNA (1)...(19): siRNA sense strand
ccaugaagaagaaaggaga

SEQ ID NO: 2492931 - RNA, 19 nt, Homo sapiens
  misc_RNA (1)...(19): siRNA sense strand
gcugaagagauuaagaaaa

SEQ ID NO: 2492932 - RNA, 19 nt, Homo sapiens
  misc_RNA (1)...(19): siRNA sense strand
ucgaagaagccgagcggga

SEQ ID NO: 2492933 - RNA, 19 nt, Homo sapiens
  misc_RNA (1)...(19): siRNA sense strand
aggacaaugcuuuggaaga

SEQ ID NO: 2492934 - RNA, 19 nt, Homo sapiens
  misc_RNA (1)...(19): siRNA sense strand
ggcugaagagauuaagaaa

SEQ ID NO: 2492935 - RNA, 19 nt, Homo sapiens
  misc_RNA (1)...(19): siRNA sense strand
aagcagaagcuaaagugaa

SEQ ID NO: 2492936 - RNA, 19 nt, Homo sapiens
  misc_RNA (1)...(19): siRNA sense strand
guguggagacgguggucaa

SEQ ID NO: 2492937 - RNA, 19 nt, Homo sapiens
  misc_RNA (1)...(19): siRNA sense strand
uggcucaguuauuggacaa

SEQ ID NO: 2492938 - RNA, 19 nt, Homo sapiens
  misc_RNA (1)...(19): siRNA sense strand
ugagcaaauuuaaggagau

SEQ ID NO: 2492939 - RNA, 19 nt, Homo sapiens
  misc_RNA (1)...(19): siRNA sense strand
auucaaaacaccagcuaaa

SEQ ID NO: 2492940 - RNA, 19 nt, Homo sapiens
  misc_RNA (1)...(19): siRNA sense strand
gcaucacacucuugggcuu

SEQ ID NO: 2492941 - RNA, 19 nt, Homo sapiens
  misc_RNA (1)...(19): siRNA sense strand
gaacuuggacaguggcaca

SEQ ID NO: 2492942 - RNA, 19 nt, Homo sapiens
  misc_RNA (1)...(19): siRNA sense strand
ugacuuugagugugaagaa

SEQ ID NO: 2492943 - RNA, 19 nt, Homo sapiens
  misc_RNA (1)...(19): siRNA sense strand
cuauugaugagaaggaaga

SEQ ID NO: 2492944 - RNA, 19 nt, Homo sapiens
  misc_RNA (1)...(19): siRNA sense strand
ccagagggcgauagcaaaa

SEQ ID NO: 2492945 - RNA, 19 nt, Homo sapiens
  misc_RNA (1)...(19): siRNA sense strand
uugcggaagcagaagcuaa

SEQ ID NO: 2492946 - RNA, 19 nt, Homo sapiens
  misc_RNA (1)...(19): siRNA sense strand
gaaauauucugguaggaac

SEQ ID NO: 2492947 - RNA, 19 nt, Homo sapiens
  misc_RNA (1)...(19): siRNA sense strand
cuucaguuaaugagcaaau

SEQ ID NO: 2492948 - RNA, 19 nt, Homo sapiens
  misc_RNA (1)...(19): siRNA sense strand
aauuuaaggagaugggcuu

SEQ ID NO: 2492949 - RNA, 19 nt, Homo sapiens
  misc_RNA (1)...(19): siRNA sense strand
gaagaaaagaugauggagu

SEQ ID NO: 2492950 - RNA, 19 nt, Homo sapiens
  misc_RNA (1)...(19): siRNA sense strand
caaaauugcggaagcagaa

SEQ ID NO: 2492951 - RNA, 19 nt, Homo sapiens
  misc_RNA (1)...(19): siRNA sense strand
cgaagaagccgagcgggaa

SEQ ID NO: 2492952 - RNA, 19 nt, Homo sapiens
  misc_RNA (1)...(19): siRNA sense strand
agacaggagacaaauucaa

SEQ ID NO: 2492953 - RNA, 19 nt, Homo sapiens
  misc_RNA (1)...(19): siRNA sense strand
ccauuuaagacaggagaca

SEQ ID NO: 2492954 - RNA, 19 nt, Homo sapiens
  misc_RNA (1)...(19): siRNA sense strand
cugaaagacauuaaggaag

SEQ ID NO: 2492955 - RNA, 19 nt, Homo sapiens
  misc_RNA (1)...(19): siRNA sense strand
gagaaggaagagcugagaa

SEQ ID NO: 2492956 - RNA, 19 nt, Homo sapiens
  misc_RNA (1)...(19): siRNA sense strand
cgggaagcagagugcaaaa

SEQ ID NO: 2492957 - RNA, 19 nt, Homo sapiens
  misc_RNA (1)...(19): siRNA sense strand
uugcugacuuugaguguga

SEQ ID NO: 2492958 - RNA, 19 nt, Homo sapiens
  misc_RNA (1)...(19): siRNA sense strand
augaagaagaaaggagaga

SEQ ID NO: 2492959 - RNA, 19 nt, Homo sapiens
  misc_RNA (1)...(19): siRNA sense strand
ccagugagcucaaugggca

SEQ ID NO: 2492960 - RNA, 19 nt, Homo sapiens
  misc_RNA (1)...(19): siRNA sense strand
ggagaugggcuuugagcug

SEQ ID NO: 2492961 - RNA, 19 nt, Homo sapiens
  misc_RNA (1)...(19): siRNA sense strand
agaugggcuuugagcugaa

SEQ ID NO: 2492962 - RNA, 19 nt, Homo sapiens
  misc_RNA (1)...(19): siRNA sense strand
ccuuaccacaguugggcaa

SEQ ID NO: 2492963 - RNA, 19 nt, Homo sapiens
  misc_RNA (1)...(19): siRNA sense strand
augagcaaauuuaaggaga

SEQ ID NO: 2492964 - RNA, 19 nt, Homo sapiens
  misc_RNA (1)...(19): siRNA sense strand
ggacacaguuggauggguu

SEQ ID NO: 2492965 - RNA, 19 nt, Homo sapiens
  misc_RNA (1)...(19): siRNA sense strand
caagcugaagagaggcaaa

SEQ ID NO: 2492966 - RNA, 19 nt, Homo sapiens
  misc_RNA (1)...(19): siRNA sense strand
ggauggguucagaggcaca

SEQ ID NO: 2492967 - RNA, 19 nt, Homo sapiens
  misc_RNA (1)...(19): siRNA sense strand
ccaccuaccucuuuggcca

SEQ ID NO: 2492968 - RNA, 19 nt, Homo sapiens
  misc_RNA (1)...(19): siRNA sense strand
ccaccuaccucuuuggcca

SEQ ID NO: 2492969 - RNA, 19 nt, Homo sapiens
  misc_RNA (1)...(19): siRNA sense strand
ccaccuaccucuuuggcca

SEQ ID NO: 2492970 - RNA, 19 nt, Homo sapiens
  misc_RNA (1)...(19): siRNA sense strand
aacaauuaguggaaggaaa

SEQ ID NO: 2492971 - RNA, 19 nt, Homo sapiens
  misc_RNA (1)...(19): siRNA sense strand
cagugugggcauugggaaa

SEQ ID NO: 2492972 - RNA, 19 nt, Homo sapiens
  misc_RNA (1)...(19): siRNA sense strand
cugugaagacucugauaua

SEQ ID NO: 2492973 - RNA, 19 nt, Homo sapiens
  misc_RNA (1)...(19): siRNA sense strand
aggcagaaaccauaggcaa

SEQ ID NO: 2492974 - RNA, 19 nt, Homo sapiens
  misc_RNA (1)...(19): siRNA sense strand
ggcagaaaccauaggcaau

SEQ ID NO: 2492975 - RNA, 19 nt, Homo sapiens
  misc_RNA (1)...(19): siRNA sense strand
guggagggcuggagaaaau

SEQ ID NO: 2492976 - RNA, 19 nt, Homo sapiens
  misc_RNA (1)...(19): siRNA sense strand
acgagaaacuggacaacca

SEQ ID NO: 2492977 - RNA, 19 nt, Homo sapiens
  misc_RNA (1)...(19): siRNA sense strand
gacacaucccaaagagaaa

SEQ ID NO: 2492978 - RNA, 19 nt, Homo sapiens
  misc_RNA (1)...(19): siRNA sense strand
auaaagaagcagugugguu

SEQ ID NO: 2492979 - RNA, 19 nt, Homo sapiens
  misc_RNA (1)...(19): siRNA sense strand
cgauggacuaaguaauaua

SEQ ID NO: 2492980 - RNA, 19 nt, Homo sapiens
  misc_RNA (1)...(19): siRNA sense strand
gagcaagcagugugggcau

SEQ ID NO: 2492981 - RNA, 19 nt, Homo sapiens
  misc_RNA (1)...(19): siRNA sense strand
acaacgagaaacuggacaa

SEQ ID NO: 2492982 - RNA, 19 nt, Homo sapiens
  misc_RNA (1)...(19): siRNA sense strand
aagcaguaguucaguccaa

SEQ ID NO: 2492983 - RNA, 19 nt, Homo sapiens
  misc_RNA (1)...(19): siRNA sense strand
uggcugaagaugaggcaga

SEQ ID NO: 2492984 - RNA, 19 nt, Homo sapiens
  misc_RNA (1)...(19): siRNA sense strand
ccaacaucacugcaggaaa

SEQ ID NO: 2492985 - RNA, 19 nt, Homo sapiens
  misc_RNA (1)...(19): siRNA sense strand
cugcuugggccauaaguaa

SEQ ID NO: 2492986 - RNA, 19 nt, Homo sapiens
  misc_RNA (1)...(19): siRNA sense strand
ugggaaauaucauagguga

SEQ ID NO: 2492987 - RNA, 19 nt, Homo sapiens
  misc_RNA (1)...(19): siRNA sense strand
cucaagaauuucaagaaca

SEQ ID NO: 2492988 - RNA, 19 nt, Homo sapiens
  misc_RNA (1)...(19): siRNA sense strand
agaagaauguggagggcug

SEQ ID NO: 2492989 - RNA, 19 nt, Homo sapiens
  misc_RNA (1)...(19): siRNA sense strand
uggugauuauagagugcaa

SEQ ID NO: 2492990 - RNA, 19 nt, Homo sapiens
  misc_RNA (1)...(19): siRNA sense strand
aaauauacugguagacaca

SEQ ID NO: 2492991 - RNA, 19 nt, Homo sapiens
  misc_RNA (1)...(19): siRNA sense strand
cacuuagagcugugggcaa

SEQ ID NO: 2492992 - RNA, 19 nt, Homo sapiens
  misc_RNA (1)...(19): siRNA sense strand
acaaauuggccuaugagau

SEQ ID NO: 2492993 - RNA, 19 nt, Homo sapiens
  misc_RNA (1)...(19): siRNA sense strand
aagugauaaccaaggaauu

SEQ ID NO: 2492994 - RNA, 19 nt, Homo sapiens
  misc_RNA (1)...(19): siRNA sense strand
aagucuuggaguugugaaa

SEQ ID NO: 2492995 - RNA, 19 nt, Homo sapiens
  misc_RNA (1)...(19): siRNA sense strand
uaugagaagacaacgaaau

SEQ ID NO: 2492996 - RNA, 19 nt, Homo sapiens
  misc_RNA (1)...(19): siRNA sense strand
ggagacuaugagaagacaa

SEQ ID NO: 2492997 - RNA, 19 nt, Homo sapiens
  misc_RNA (1)...(19): siRNA sense strand
aauucaaggcggaacauuu

SEQ ID NO: 2492998 - RNA, 19 nt, Homo sapiens
  misc_RNA (1)...(19): siRNA sense strand
aaacauugcaucuggaacu

SEQ ID NO: 2492999 - RNA, 19 nt, Homo sapiens
  misc_RNA (1)...(19): siRNA sense strand
aagaaauguuacuuggguu

SEQ ID NO: 2493000 - RNA, 19 nt, Homo sapiens
  misc_RNA (1)...(19): siRNA sense strand
ccuuacugaugcuggcaau

SEQ ID NO: 2493001 - RNA, 19 nt, Homo sapiens
  misc_RNA (1)...(19): siRNA sense strand
acucugauauagaugguga

SEQ ID NO: 2493002 - RNA, 19 nt, Homo sapiens
  misc_RNA (1)...(19): siRNA sense strand
ugguaauagacucuggaau

SEQ ID NO: 2493003 - RNA, 19 nt, Homo sapiens
  misc_RNA (1)...(19): siRNA sense strand
caaucuuguaccaaugaua

SEQ ID NO: 2493004 - RNA, 19 nt, Homo sapiens
  misc_RNA (1)...(19): siRNA sense strand
gugauuauagagugcaaaa

SEQ ID NO: 2493005 - RNA, 19 nt, Homo sapiens
  misc_RNA (1)...(19): siRNA sense strand
ggagauucuuccagcccuu

SEQ ID NO: 2493006 - RNA, 19 nt, Homo sapiens
  misc_RNA (1)...(19): siRNA sense strand
agaugaggcagaaaccaua

SEQ ID NO: 2493007 - RNA, 19 nt, Homo sapiens
  misc_RNA (1)...(19): siRNA sense strand
acgaaaugaaguuguaguu

SEQ ID NO: 2493008 - RNA, 19 nt, Homo sapiens
  misc_RNA (1)...(19): siRNA sense strand
aucuggaacuucugaacaa

SEQ ID NO: 2493009 - RNA, 19 nt, Homo sapiens
  misc_RNA (1)...(19): siRNA sense strand
cuaugagaagacaacgaaa

SEQ ID NO: 2493010 - RNA, 19 nt, Homo sapiens
  misc_RNA (1)...(19): siRNA sense strand
uaguggaaggaaagaucaa

SEQ ID NO: 2493011 - RNA, 19 nt, Homo sapiens
  misc_RNA (1)...(19): siRNA sense strand
gggcauugggaaauaucau

SEQ ID NO: 2493012 - RNA, 19 nt, Homo sapiens
  misc_RNA (1)...(19): siRNA sense strand
ccaccaccaccaauggaaa

SEQ ID NO: 2493013 - RNA, 19 nt, Homo sapiens
  misc_RNA (1)...(19): siRNA sense strand
gcugaagaugaggcagaaa

SEQ ID NO: 2493014 - RNA, 19 nt, Homo sapiens
  misc_RNA (1)...(19): siRNA sense strand
agguacaggcaguaauuga

SEQ ID NO: 2493015 - RNA, 19 nt, Homo sapiens
  misc_RNA (1)...(19): siRNA sense strand
ccaugaagcaucuggacca

SEQ ID NO: 2493016 - RNA, 19 nt, Homo sapiens
  misc_RNA (1)...(19): siRNA sense strand
aggagaaacaagugauaau

SEQ ID NO: 2493017 - RNA, 19 nt, Homo sapiens
  misc_RNA (1)...(19): siRNA sense strand
guaacaaggcggaggagga

SEQ ID NO: 2493018 - RNA, 19 nt, Homo sapiens
  misc_RNA (1)...(19): siRNA sense strand
acgagaaagccaagcagaa

SEQ ID NO: 2493019 - RNA, 19 nt, Homo sapiens
  misc_RNA (1)...(19): siRNA sense strand
acuuagaggaugccaguaa

SEQ ID NO: 2493020 - RNA, 19 nt, Homo sapiens
  misc_RNA (1)...(19): siRNA sense strand
ggaucaacuccgucagcaa

SEQ ID NO: 2493021 - RNA, 19 nt, Homo sapiens
  misc_RNA (1)...(19): siRNA sense strand
aggacuugcuggagacuau

SEQ ID NO: 2493022 - RNA, 19 nt, Homo sapiens
  misc_RNA (1)...(19): siRNA sense strand
cugaaagauaagauggaga

SEQ ID NO: 2493023 - RNA, 19 nt, Homo sapiens
  misc_RNA (1)...(19): siRNA sense strand
ccgagaaggacuuggaacu

SEQ ID NO: 2493024 - RNA, 19 nt, Homo sapiens
  misc_RNA (1)...(19): siRNA sense strand
gcucaguuacagcaggaaa

SEQ ID NO: 2493025 - RNA, 19 nt, Homo sapiens
  misc_RNA (1)...(19): siRNA sense strand
gcaggaaaugagaaagaca

SEQ ID NO: 2493026 - RNA, 19 nt, Homo sapiens
  misc_RNA (1)...(19): siRNA sense strand
agcuggaccuggagaacaa

SEQ ID NO: 2493027 - RNA, 19 nt, Homo sapiens
  misc_RNA (1)...(19): siRNA sense strand
cuacagucacucaggagaa

SEQ ID NO: 2493028 - RNA, 19 nt, Homo sapiens
  misc_RNA (1)...(19): siRNA sense strand
cacugaaacuggaggagga

SEQ ID NO: 2493029 - RNA, 19 nt, Homo sapiens
  misc_RNA (1)...(19): siRNA sense strand
aagaaggacuugcuggaga

SEQ ID NO: 2493030 - RNA, 19 nt, Homo sapiens
  misc_RNA (1)...(19): siRNA sense strand
ccauucgagaugagaagaa

SEQ ID NO: 2493031 - RNA, 19 nt, Homo sapiens
  misc_RNA (1)...(19): siRNA sense strand
uggagaagcugaagaggcu

SEQ ID NO: 2493032 - RNA, 19 nt, Homo sapiens
  misc_RNA (1)...(19): siRNA sense strand
gggcccaagagcagaguga

SEQ ID NO: 2493033 - RNA, 19 nt, Homo sapiens
  misc_RNA (1)...(19): siRNA sense strand
gauaagauggagaagcuga

SEQ ID NO: 2493034 - RNA, 19 nt, Homo sapiens
  misc_RNA (1)...(19): siRNA sense strand
augucaauguccugaaaga

SEQ ID NO: 2493035 - RNA, 19 nt, Homo sapiens
  misc_RNA (1)...(19): siRNA sense strand
uggaggaggagcugcacaa

SEQ ID NO: 2493036 - RNA, 19 nt, Homo sapiens
  misc_RNA (1)...(19): siRNA sense strand
agcaaauagcagaaaccaa

SEQ ID NO: 2493037 - RNA, 19 nt, Homo sapiens
  misc_RNA (1)...(19): siRNA sense strand
gcaccuacgagaaagccaa

SEQ ID NO: 2493038 - RNA, 19 nt, Homo sapiens
  misc_RNA (1)...(19): siRNA sense strand
ggaugugguccgugccuau

SEQ ID NO: 2493039 - RNA, 19 nt, Homo sapiens
  misc_RNA (1)...(19): siRNA sense strand
gcugcaagaacuucaggaa

SEQ ID NO: 2493040 - RNA, 19 nt, Homo sapiens
  misc_RNA (1)...(19): siRNA sense strand
acuuggaacuggagcaacu

SEQ ID NO: 2493041 - RNA, 19 nt, Homo sapiens
  misc_RNA (1)...(19): siRNA sense strand
cgguaucccacgaggcaga

SEQ ID NO: 2493042 - RNA, 19 nt, Homo sapiens
  misc_RNA (1)...(19): siRNA sense strand
gcauuagaggccagcauca

SEQ ID NO: 2493043 - RNA, 19 nt, Homo sapiens
  misc_RNA (1)...(19): siRNA sense strand
gguuagaagagacccgaga

SEQ ID NO: 2493044 - RNA, 19 nt, Homo sapiens
  misc_RNA (1)...(19): siRNA sense strand
ugaacagauggaaggauuu

SEQ ID NO: 2493045 - RNA, 19 nt, Homo sapiens
  misc_RNA (1)...(19): siRNA sense strand
aagaugguaaccugggaaa

SEQ ID NO: 2493046 - RNA, 19 nt, Homo sapiens
  misc_RNA (1)...(19): siRNA sense strand
gugagguggaggagcugaa

SEQ ID NO: 2493047 - RNA, 19 nt, Homo sapiens
  misc_RNA (1)...(19): siRNA sense strand
aagccaagcagaaggacca

SEQ ID NO: 2493048 - RNA, 19 nt, Homo sapiens
  misc_RNA (1)...(19): siRNA sense strand
cugaggaagcagaagcaca

SEQ ID NO: 2493049 - RNA, 19 nt, Homo sapiens
  misc_RNA (1)...(19): siRNA sense strand
acuucaguccagaggagaa

SEQ ID NO: 2493050 - RNA, 19 nt, Homo sapiens
  misc_RNA (1)...(19): siRNA sense strand
aaagugaacugcaggccau

SEQ ID NO: 2493051 - RNA, 19 nt, Homo sapiens
  misc_RNA (1)...(19): siRNA sense strand
cagagcugaaggagaagua

SEQ ID NO: 2493052 - RNA, 19 nt, Homo sapiens
  misc_RNA (1)...(19): siRNA sense strand
cugaaggagaaguauauuu

SEQ ID NO: 2493053 - RNA, 19 nt, Homo sapiens
  misc_RNA (1)...(19): siRNA sense strand
agaugaaacaggacuuaga

SEQ ID NO: 2493054 - RNA, 19 nt, Homo sapiens
  misc_RNA (1)...(19): siRNA sense strand
agguagaagaacagagggu

SEQ ID NO: 2493055 - RNA, 19 nt, Homo sapiens
  misc_RNA (1)...(19): siRNA sense strand
gcugaaggagaaagaggca

SEQ ID NO: 2493056 - RNA, 19 nt, Homo sapiens
  misc_RNA (1)...(19): siRNA sense strand
gcaggagcaaauagcagaa

SEQ ID NO: 2493057 - RNA, 19 nt, Homo sapiens
  misc_RNA (1)...(19): siRNA sense strand
ggagaaggcuacugcacuc

SEQ ID NO: 2493058 - RNA, 19 nt, Homo sapiens
  misc_RNA (1)...(19): siRNA sense strand
cuucuuacuuggcugacaa

SEQ ID NO: 2493059 - RNA, 19 nt, Homo sapiens
  misc_RNA (1)...(19): siRNA sense strand
gaagaguuugagagguaca

SEQ ID NO: 2493060 - RNA, 19 nt, Homo sapiens
  misc_RNA (1)...(19): siRNA sense strand
cuucaguccagaggagaaa

SEQ ID NO: 2493061 - RNA, 19 nt, Homo sapiens
  misc_RNA (1)...(19): siRNA sense strand
acgcagaaguccugugggu

SEQ ID NO: 2493062 - RNA, 19 nt, Homo sapiens
  misc_RNA (1)...(19): siRNA sense strand
ggguagaagaugacagacc

SEQ ID NO: 2493063 - RNA, 19 nt, Homo sapiens
  misc_RNA (1)...(19): siRNA sense strand
gaaacaagugauaaugcga

SEQ ID NO: 2493064 - RNA, 19 nt, Homo sapiens
  misc_RNA (1)...(19): siRNA sense strand
gcagcaacaucuugggcaa

SEQ ID NO: 2493065 - RNA, 19 nt, Homo sapiens
  misc_RNA (1)...(19): siRNA sense strand
cgggaugguuacuggagaa

SEQ ID NO: 2493066 - RNA, 19 nt, Homo sapiens
  misc_RNA (1)...(19): siRNA sense strand
uguuugaacuggaaggcaa

SEQ ID NO: 2493067 - RNA, 19 nt, Homo sapiens
  misc_RNA (1)...(19): siRNA sense strand
aggcugaagugcagaccaa

SEQ ID NO: 2493068 - RNA, 19 nt, Homo sapiens
  misc_RNA (1)...(19): siRNA sense strand
ccuuugagguugaggagga

SEQ ID NO: 2493069 - RNA, 19 nt, Homo sapiens
  misc_RNA (1)...(19): siRNA sense strand
acucagagcuggacggcga

SEQ ID NO: 2493070 - RNA, 19 nt, Homo sapiens
  misc_RNA (1)...(19): siRNA sense strand
ggaugaaguuuguguccga

SEQ ID NO: 2493071 - RNA, 19 nt, Homo sapiens
  misc_RNA (1)...(19): siRNA sense strand
cuuccaagcuuuugagauu

SEQ ID NO: 2493072 - RNA, 19 nt, Homo sapiens
  misc_RNA (1)...(19): siRNA sense strand
guacaaaugcccagcgugu

SEQ ID NO: 2493073 - RNA, 19 nt, Homo sapiens
  misc_RNA (1)...(19): siRNA sense strand
ccuaugaccaccuggaaau

SEQ ID NO: 2493074 - RNA, 19 nt, Homo sapiens
  misc_RNA (1)...(19): siRNA sense strand
ccaaagagcucuauuccca

SEQ ID NO: 2493075 - RNA, 19 nt, Homo sapiens
  misc_RNA (1)...(19): siRNA sense strand
gggccaugugguuggguuu

SEQ ID NO: 2493076 - RNA, 19 nt, Homo sapiens
  misc_RNA (1)...(19): siRNA sense strand
ccggaugacuacagaccuu

SEQ ID NO: 2493077 - RNA, 19 nt, Homo sapiens
  misc_RNA (1)...(19): siRNA sense strand
augagaagccggaggaugu

SEQ ID NO: 2493078 - RNA, 19 nt, Homo sapiens
  misc_RNA (1)...(19): siRNA sense strand
ccgaaggaguaucccacaa

SEQ ID NO: 2493079 - RNA, 19 nt, Homo sapiens
  misc_RNA (1)...(19): siRNA sense strand
gaagaugacuugaagcugu

SEQ ID NO: 2493080 - RNA, 19 nt, Homo sapiens
  misc_RNA (1)...(19): siRNA sense strand
ucaaggacagagaggauau

SEQ ID NO: 2493081 - RNA, 19 nt, Homo sapiens
  misc_RNA (1)...(19): siRNA sense strand
cugcaggacacaacgggaa

SEQ ID NO: 2493082 - RNA, 19 nt, Homo sapiens
  misc_RNA (1)...(19): siRNA sense strand
acgacuacauggaagccua

SEQ ID NO: 2493083 - RNA, 19 nt, Homo sapiens
  misc_RNA (1)...(19): siRNA sense strand
ccuuagaugaagaugacuu

SEQ ID NO: 2493084 - RNA, 19 nt, Homo sapiens
  misc_RNA (1)...(19): siRNA sense strand
cauacgacuuugacagcau

SEQ ID NO: 2493085 - RNA, 19 nt, Homo sapiens
  misc_RNA (1)...(19): siRNA sense strand
gaacaaagaugccggucag

SEQ ID NO: 2493086 - RNA, 19 nt, Homo sapiens
  misc_RNA (1)...(19): siRNA sense strand
ccgaagagccacaaccuca

SEQ ID NO: 2493087 - RNA, 19 nt, Homo sapiens
  misc_RNA (1)...(19): siRNA sense strand
gccaugagacacugggaga

SEQ ID NO: 2493088 - RNA, 19 nt, Homo sapiens
  misc_RNA (1)...(19): siRNA sense strand
acgagugugccaaggacaa

SEQ ID NO: 2493089 - RNA, 19 nt, Homo sapiens
  misc_RNA (1)...(19): siRNA sense strand
aguuugagaucgagcagca

SEQ ID NO: 2493090 - RNA, 19 nt, Homo sapiens
  misc_RNA (1)...(19): siRNA sense strand
gcuguuucacauugacaaa

SEQ ID NO: 2493091 - RNA, 19 nt, Homo sapiens
  misc_RNA (1)...(19): siRNA sense strand
acacagcacaggugggcuu

SEQ ID NO: 2493092 - RNA, 19 nt, Homo sapiens
  misc_RNA (1)...(19): siRNA sense strand
agccaggucaggaguauaa

SEQ ID NO: 2493093 - RNA, 19 nt, Homo sapiens
  misc_RNA (1)...(19): siRNA sense strand
gauaaggacgagugugcca

SEQ ID NO: 2493094 - RNA, 19 nt, Homo sapiens
  misc_RNA (1)...(19): siRNA sense strand
gcaccaaguuccaggaugc

SEQ ID NO: 2493095 - RNA, 19 nt, Homo sapiens
  misc_RNA (1)...(19): siRNA sense strand
acggaugaggaaagcuuua

SEQ ID NO: 2493096 - RNA, 19 nt, Homo sapiens
  misc_RNA (1)...(19): siRNA sense strand
agaaugggcaugacugcaa

SEQ ID NO: 2493097 - RNA, 19 nt, Homo sapiens
  misc_RNA (1)...(19): siRNA sense strand
ggccauauccauugggaag

SEQ ID NO: 2493098 - RNA, 19 nt, Homo sapiens
  misc_RNA (1)...(19): siRNA sense strand
gggaugguuacuggagaaa

SEQ ID NO: 2493099 - RNA, 19 nt, Homo sapiens
  misc_RNA (1)...(19): siRNA sense strand
ucacauugacaaagccaga

SEQ ID NO: 2493100 - RNA, 19 nt, Homo sapiens
  misc_RNA (1)...(19): siRNA sense strand
gaugugaaaucgagcucca

SEQ ID NO: 2493101 - RNA, 19 nt, Homo sapiens
  misc_RNA (1)...(19): siRNA sense strand
gccuaugaccaccuggaaa

SEQ ID NO: 2493102 - RNA, 19 nt, Homo sapiens
  misc_RNA (1)...(19): siRNA sense strand
ugaacaaagaugccgguca

SEQ ID NO: 2493103 - RNA, 19 nt, Homo sapiens
  misc_RNA (1)...(19): siRNA sense strand
cuggguggccgaaggagua

SEQ ID NO: 2493104 - RNA, 19 nt, Homo sapiens
  misc_RNA (1)...(19): siRNA sense strand
guuugaacuggaaggcaau

SEQ ID NO: 2493105 - RNA, 19 nt, Homo sapiens
  misc_RNA (1)...(19): siRNA sense strand
acaacaugcgcguggaguu

SEQ ID NO: 2493106 - RNA, 19 nt, Homo sapiens
  misc_RNA (1)...(19): siRNA sense strand
gcguggaguucaaguccga

SEQ ID NO: 2493107 - RNA, 19 nt, Homo sapiens
  misc_RNA (1)...(19): siRNA sense strand
agguugaggaggaggccga

SEQ ID NO: 2493108 - RNA, 19 nt, Homo sapiens
  misc_RNA (1)...(19): siRNA sense strand
ggauucgcaaagagagaaa

SEQ ID NO: 2493109 - RNA, 19 nt, Homo sapiens
  misc_RNA (1)...(19): siRNA sense strand
ucgcaaagagagaaaccaa

SEQ ID NO: 2493110 - RNA, 19 nt, Homo sapiens
  misc_RNA (1)...(19): siRNA sense strand
agagaaaccaauauggaga

SEQ ID NO: 2493111 - RNA, 19 nt, Homo sapiens
  misc_RNA (1)...(19): siRNA sense strand
agaagaugaacaaggaaaa

SEQ ID NO: 2493112 - RNA, 19 nt, Homo sapiens
  misc_RNA (1)...(19): siRNA sense strand
uaguuaaugacaaggacaa

SEQ ID NO: 2493113 - RNA, 19 nt, Homo sapiens
  misc_RNA (1)...(19): siRNA sense strand
caacagaauuccuggcuuc

SEQ ID NO: 2493114 - RNA, 19 nt, Homo sapiens
  misc_RNA (1)...(19): siRNA sense strand
cuggauucgcaaagagaga

SEQ ID NO: 2493115 - RNA, 19 nt, Homo sapiens
  misc_RNA (1)...(19): siRNA sense strand
uggucagacaggaaagcaa

SEQ ID NO: 2493116 - RNA, 19 nt, Homo sapiens
  misc_RNA (1)...(19): siRNA sense strand
aguuaaugacaaggacaaa

SEQ ID NO: 2493117 - RNA, 19 nt, Homo sapiens
  misc_RNA (1)...(19): siRNA sense strand
aggacaaacaacagaauuc

SEQ ID NO: 2493118 - RNA, 19 nt, Homo sapiens
  misc_RNA (1)...(19): siRNA sense strand
cagaaaucgaguacuuaau

SEQ ID NO: 2493119 - RNA, 19 nt, Homo sapiens
  misc_RNA (1)...(19): siRNA sense strand
ugguacuggcuuuaugaaa

SEQ ID NO: 2493120 - RNA, 19 nt, Homo sapiens
  misc_RNA (1)...(19): siRNA sense strand
uggacuggucagacaggaa

SEQ ID NO: 2493121 - RNA, 19 nt, Homo sapiens
  misc_RNA (1)...(19): siRNA sense strand
cagauguggugaugcguga

SEQ ID NO: 2493122 - RNA, 19 nt, Homo sapiens
  misc_RNA (1)...(19): siRNA sense strand
agaaggaggcugagggcuc

SEQ ID NO: 2493123 - RNA, 19 nt, Homo sapiens
  misc_RNA (1)...(19): siRNA sense strand
agaagcagaaggaggcuga

SEQ ID NO: 2493124 - RNA, 19 nt, Homo sapiens
  misc_RNA (1)...(19): siRNA sense strand
gcacagcguucacggcuca

SEQ ID NO: 2493125 - RNA, 19 nt, Homo sapiens
  misc_RNA (1)...(19): siRNA sense strand
cagauguggugaugcguga

SEQ ID NO: 2493126 - RNA, 19 nt, Homo sapiens
  misc_RNA (1)...(19): siRNA sense strand
agaaggaggcugagggcuc

SEQ ID NO: 2493127 - RNA, 19 nt, Homo sapiens
  misc_RNA (1)...(19): siRNA sense strand
agaagcagaaggaggcuga

SEQ ID NO: 2493128 - RNA, 19 nt, Homo sapiens
  misc_RNA (1)...(19): siRNA sense strand
gcacagcguucacggcuca

SEQ ID NO: 2493129 - RNA, 19 nt, Homo sapiens
  misc_RNA (1)...(19): siRNA sense strand
agauaugacaggaaggaau

SEQ ID NO: 2493130 - RNA, 19 nt, Homo sapiens
  misc_RNA (1)...(19): siRNA sense strand
cgucgaaaccaguggagau

SEQ ID NO: 2493131 - RNA, 19 nt, Homo sapiens
  misc_RNA (1)...(19): siRNA sense strand
gggagaaaugaggaagaaa

SEQ ID NO: 2493132 - RNA, 19 nt, Homo sapiens
  misc_RNA (1)...(19): siRNA sense strand
ggauaaacgucgaaaccag

SEQ ID NO: 2493133 - RNA, 19 nt, Homo sapiens
  misc_RNA (1)...(19): siRNA sense strand
agaaaagauaugacaggaa

SEQ ID NO: 2493134 - RNA, 19 nt, Homo sapiens
  misc_RNA (1)...(19): siRNA sense strand
ggggaaagccaaaugucaa

SEQ ID NO: 2493135 - RNA, 19 nt, Homo sapiens
  misc_RNA (1)...(19): siRNA sense strand
cugggagaaaugaggaaga

SEQ ID NO: 2493136 - RNA, 19 nt, Homo sapiens
  misc_RNA (1)...(19): siRNA sense strand
gccaaaugucaaagaaugu

SEQ ID NO: 2493137 - RNA, 19 nt, Homo sapiens
  misc_RNA (1)...(19): siRNA sense strand
cuugaagaaugcuggggaa

SEQ ID NO: 2493138 - RNA, 19 nt, Homo sapiens
  misc_RNA (1)...(19): siRNA sense strand
aagccaaaugucaaagaau

SEQ ID NO: 2493139 - RNA, 19 nt, Homo sapiens
  misc_RNA (1)...(19): siRNA sense strand
cccuuaaaucaaugcuaaa

SEQ ID NO: 2493140 - RNA, 19 nt, Homo sapiens
  misc_RNA (1)...(19): siRNA sense strand
ugagaaaagguguacuaaa

SEQ ID NO: 2493141 - RNA, 19 nt, Homo sapiens
  misc_RNA (1)...(19): siRNA sense strand
gauaagagaaacugagcag

SEQ ID NO: 2493142 - RNA, 19 nt, Homo sapiens
  misc_RNA (1)...(19): siRNA sense strand
uuaaauggauggagcgcua

SEQ ID NO: 2493143 - RNA, 19 nt, Homo sapiens
  misc_RNA (1)...(19): siRNA sense strand
gcuccaaauauaaggaaca

SEQ ID NO: 2493144 - RNA, 19 nt, Homo sapiens
  misc_RNA (1)...(19): siRNA sense strand
uggugaaauucgugaacuu

SEQ ID NO: 2493145 - RNA, 19 nt, Homo sapiens
  misc_RNA (1)...(19): siRNA sense strand
cagcuauggagguggugaa

SEQ ID NO: 2493146 - RNA, 19 nt, Homo sapiens
  misc_RNA (1)...(19): siRNA sense strand
uggccaugacucagacaaa

SEQ ID NO: 2493147 - RNA, 19 nt, Homo sapiens
  misc_RNA (1)...(19): siRNA sense strand
gaaacuagaaugaaccgaa

SEQ ID NO: 2493148 - RNA, 19 nt, Homo sapiens
  misc_RNA (1)...(19): siRNA sense strand
gcacucaaguucuggagga

SEQ ID NO: 2493149 - RNA, 19 nt, Homo sapiens
  misc_RNA (1)...(19): siRNA sense strand
ccaaauacaaacaggacgu

SEQ ID NO: 2493150 - RNA, 19 nt, Homo sapiens
  misc_RNA (1)...(19): siRNA sense strand
ccucucagguccagggagu

SEQ ID NO: 2493151 - RNA, 19 nt, Homo sapiens
  misc_RNA (1)...(19): siRNA sense strand
ugccagaagaauugcggaa

SEQ ID NO: 2493152 - RNA, 19 nt, Homo sapiens
  misc_RNA (1)...(19): siRNA sense strand
ugaugauaaucguagcaau

SEQ ID NO: 2493153 - RNA, 19 nt, Homo sapiens
  misc_RNA (1)...(19): siRNA sense strand
gaagacaguuucugcagga

SEQ ID NO: 2493154 - RNA, 19 nt, Homo sapiens
  misc_RNA (1)...(19): siRNA sense strand
ggcaucaggcagcuggaaa

SEQ ID NO: 2493155 - RNA, 19 nt, Homo sapiens
  misc_RNA (1)...(19): siRNA sense strand
uuaaauggauggagcgcua

SEQ ID NO: 2493156 - RNA, 19 nt, Homo sapiens
  misc_RNA (1)...(19): siRNA sense strand
gcuccaaauauaaggaaca

SEQ ID NO: 2493157 - RNA, 19 nt, Homo sapiens
  misc_RNA (1)...(19): siRNA sense strand
uggugaaauucgugaacuu

SEQ ID NO: 2493158 - RNA, 19 nt, Homo sapiens
  misc_RNA (1)...(19): siRNA sense strand
cagcuauggagguggugaa

SEQ ID NO: 2493159 - RNA, 19 nt, Homo sapiens
  misc_RNA (1)...(19): siRNA sense strand
uggccaugacucagacaaa

SEQ ID NO: 2493160 - RNA, 19 nt, Homo sapiens
  misc_RNA (1)...(19): siRNA sense strand
gcacucaaguucuggagga

SEQ ID NO: 2493161 - RNA, 19 nt, Homo sapiens
  misc_RNA (1)...(19): siRNA sense strand
ccaaauacaaacaggacgu

SEQ ID NO: 2493162 - RNA, 19 nt, Homo sapiens
  misc_RNA (1)...(19): siRNA sense strand
ccucucagguccagggagu

SEQ ID NO: 2493163 - RNA, 19 nt, Homo sapiens
  misc_RNA (1)...(19): siRNA sense strand
ugccagaagaauugcggaa

SEQ ID NO: 2493164 - RNA, 19 nt, Homo sapiens
  misc_RNA (1)...(19): siRNA sense strand
ugaugauaaucguagcaau

SEQ ID NO: 2493165 - RNA, 19 nt, Homo sapiens
  misc_RNA (1)...(19): siRNA sense strand
gaagacaguuucugcagga

SEQ ID NO: 2493166 - RNA, 19 nt, Homo sapiens
  misc_RNA (1)...(19): siRNA sense strand
ggcaucaggcagcuggaaa

SEQ ID NO: 2493167 - RNA, 19 nt, Homo sapiens
  misc_RNA (1)...(19): siRNA sense strand
ccauaaagugugaggacau

SEQ ID NO: 2493168 - RNA, 19 nt, Homo sapiens
  misc_RNA (1)...(19): siRNA sense strand
acaauaacaugcagggcaa

SEQ ID NO: 2493169 - RNA, 19 nt, Homo sapiens
  misc_RNA (1)...(19): siRNA sense strand
agaaagugaaagaggaaau

SEQ ID NO: 2493170 - RNA, 19 nt, Homo sapiens
  misc_RNA (1)...(19): siRNA sense strand
cuauuauaauggcgagaga

SEQ ID NO: 2493171 - RNA, 19 nt, Homo sapiens
  misc_RNA (1)...(19): siRNA sense strand
uguugaaguuacagaggau

SEQ ID NO: 2493172 - RNA, 19 nt, Homo sapiens
  misc_RNA (1)...(19): siRNA sense strand
aggagaaagugaaagagga

SEQ ID NO: 2493173 - RNA, 19 nt, Homo sapiens
  misc_RNA (1)...(19): siRNA sense strand
augcugaagaguauaguaa

SEQ ID NO: 2493174 - RNA, 19 nt, Homo sapiens
  misc_RNA (1)...(19): siRNA sense strand
ugagaugaucauuacgaaa

SEQ ID NO: 2493175 - RNA, 19 nt, Homo sapiens
  misc_RNA (1)...(19): siRNA sense strand
aggauggcguggaggacuu

SEQ ID NO: 2493176 - RNA, 19 nt, Homo sapiens
  misc_RNA (1)...(19): siRNA sense strand
gagaaagugaaagaggaaa

SEQ ID NO: 2493177 - RNA, 19 nt, Homo sapiens
  misc_RNA (1)...(19): siRNA sense strand
agagcgaagagguggccaa

SEQ ID NO: 2493178 - RNA, 19 nt, Homo sapiens
  misc_RNA (1)...(19): siRNA sense strand
gcgagagaaccgugccaca

SEQ ID NO: 2493179 - RNA, 19 nt, Homo sapiens
  misc_RNA (1)...(19): siRNA sense strand
ggaguauacaccagugcuu

SEQ ID NO: 2493180 - RNA, 19 nt, Homo sapiens
  misc_RNA (1)...(19): siRNA sense strand
augggugaccuguggcaaa

SEQ ID NO: 2493181 - RNA, 19 nt, Homo sapiens
  misc_RNA (1)...(19): siRNA sense strand
ugaauauacuucuagcaca

SEQ ID NO: 2493182 - RNA, 19 nt, Homo sapiens
  misc_RNA (1)...(19): siRNA sense strand
ggaccaacaaacuagacau

SEQ ID NO: 2493183 - RNA, 19 nt, Homo sapiens
  misc_RNA (1)...(19): siRNA sense strand
ggucgagguucuuaccaga

SEQ ID NO: 2493184 - RNA, 19 nt, Homo sapiens
  misc_RNA (1)...(19): siRNA sense strand
agaugaucauuacgaaaca

SEQ ID NO: 2493185 - RNA, 19 nt, Homo sapiens
  misc_RNA (1)...(19): siRNA sense strand
aagaauggcagcaugggua

SEQ ID NO: 2493186 - RNA, 19 nt, Homo sapiens
  misc_RNA (1)...(19): siRNA sense strand
cagcaacccaagaagaaca

SEQ ID NO: 2493187 - RNA, 19 nt, Homo sapiens
  misc_RNA (1)...(19): siRNA sense strand
uggaggagaucgaccgguu

SEQ ID NO: 2493188 - RNA, 19 nt, Homo sapiens
  misc_RNA (1)...(19): siRNA sense strand
accaagaaauauagaggaa

SEQ ID NO: 2493189 - RNA, 19 nt, Homo sapiens
  misc_RNA (1)...(19): siRNA sense strand
cgcaauaucaggaggagaa

SEQ ID NO: 2493190 - RNA, 19 nt, Homo sapiens
  misc_RNA (1)...(19): siRNA sense strand
cuguaaagcaaccaagaaa

SEQ ID NO: 2493191 - RNA, 19 nt, Homo sapiens
  misc_RNA (1)...(19): siRNA sense strand
aagcaagaacaaauggaaa

SEQ ID NO: 2493192 - RNA, 19 nt, Homo sapiens
  misc_RNA (1)...(19): siRNA sense strand
uguacaagaauuugagcaa

SEQ ID NO: 2493193 - RNA, 19 nt, Homo sapiens
  misc_RNA (1)...(19): siRNA sense strand
acuucaaacuccagugcaa

SEQ ID NO: 2493194 - RNA, 19 nt, Homo sapiens
  misc_RNA (1)...(19): siRNA sense strand
aagaagguauagaggaaca

SEQ ID NO: 2493195 - RNA, 19 nt, Homo sapiens
  misc_RNA (1)...(19): siRNA sense strand
ggguaaagucacaaaagaa

SEQ ID NO: 2493196 - RNA, 19 nt, Homo sapiens
  misc_RNA (1)...(19): siRNA sense strand
caucgaagcaagaacaaau

SEQ ID NO: 2493197 - RNA, 19 nt, Homo sapiens
  misc_RNA (1)...(19): siRNA sense strand
agcaagaacaaauggaaau

SEQ ID NO: 2493198 - RNA, 19 nt, Homo sapiens
  misc_RNA (1)...(19): siRNA sense strand
caaugaagaaauaggaagu

SEQ ID NO: 2493199 - RNA, 19 nt, Homo sapiens
  misc_RNA (1)...(19): siRNA sense strand
augaagacccucaaguaaa

SEQ ID NO: 2493200 - RNA, 19 nt, Homo sapiens
  misc_RNA (1)...(19): siRNA sense strand
ccaaauggacugaagcuga

SEQ ID NO: 2493201 - RNA, 19 nt, Homo sapiens
  misc_RNA (1)...(19): siRNA sense strand
caucaagaaacaaggagau

SEQ ID NO: 2493202 - RNA, 19 nt, Homo sapiens
  misc_RNA (1)...(19): siRNA sense strand
agaacuacgaggagcaaga

SEQ ID NO: 2493203 - RNA, 19 nt, Homo sapiens
  misc_RNA (1)...(19): siRNA sense strand
acuuguaucuccuggaaau

SEQ ID NO: 2493204 - RNA, 19 nt, Homo sapiens
  misc_RNA (1)...(19): siRNA sense strand
agauggaagcggugauaca

SEQ ID NO: 2493205 - RNA, 19 nt, Homo sapiens
  misc_RNA (1)...(19): siRNA sense strand
cuccacaaauccaggcaaa

SEQ ID NO: 2493206 - RNA, 19 nt, Homo sapiens
  misc_RNA (1)...(19): siRNA sense strand
cugugacaauauaaggaua

SEQ ID NO: 2493207 - RNA, 19 nt, Homo sapiens
  misc_RNA (1)...(19): siRNA sense strand
ugaugaugauauuggugaa

SEQ ID NO: 2493208 - RNA, 19 nt, Homo sapiens
  misc_RNA (1)...(19): siRNA sense strand
aagagaugcagaugagaau

SEQ ID NO: 2493209 - RNA, 19 nt, Homo sapiens
  misc_RNA (1)...(19): siRNA sense strand
cugucuaugugcugaagaa

SEQ ID NO: 2493210 - RNA, 19 nt, Homo sapiens
  misc_RNA (1)...(19): siRNA sense strand
uguauuaugaacagggauu

SEQ ID NO: 2493211 - RNA, 19 nt, Homo sapiens
  misc_RNA (1)...(19): siRNA sense strand
uugaagcagcucugggaaa

SEQ ID NO: 2493212 - RNA, 19 nt, Homo sapiens
  misc_RNA (1)...(19): siRNA sense strand
agucacaaaagaaggaaaa

SEQ ID NO: 2493213 - RNA, 19 nt, Homo sapiens
  misc_RNA (1)...(19): siRNA sense strand
ggauuuaagcauucggguu

SEQ ID NO: 2493214 - RNA, 19 nt, Homo sapiens
  misc_RNA (1)...(19): siRNA sense strand
ugaagaaauaggaaguaca

SEQ ID NO: 2493215 - RNA, 19 nt, Homo sapiens
  misc_RNA (1)...(19): siRNA sense strand
cuuaagguccugugacaau

SEQ ID NO: 2493216 - RNA, 19 nt, Homo sapiens
  misc_RNA (1)...(19): siRNA sense strand
agaucggcuuccagacaaa

SEQ ID NO: 2493217 - RNA, 19 nt, Homo sapiens
  misc_RNA (1)...(19): siRNA sense strand
ccugagaagaagaauauga

SEQ ID NO: 2493218 - RNA, 19 nt, Homo sapiens
  misc_RNA (1)...(19): siRNA sense strand
cuucaguguagcaggaaaa

SEQ ID NO: 2493219 - RNA, 19 nt, Homo sapiens
  misc_RNA (1)...(19): siRNA sense strand
aguuauuccugcugguaga

SEQ ID NO: 2493220 - RNA, 19 nt, Homo sapiens
  misc_RNA (1)...(19): siRNA sense strand
gugaacaggaugugccaga

SEQ ID NO: 2493221 - RNA, 19 nt, Homo sapiens
  misc_RNA (1)...(19): siRNA sense strand
guggacaacuuuuggggua

SEQ ID NO: 2493222 - RNA, 19 nt, Homo sapiens
  misc_RNA (1)...(19): siRNA sense strand
caagaaauauagaggaacc

SEQ ID NO: 2493223 - RNA, 19 nt, Homo sapiens
  misc_RNA (1)...(19): siRNA sense strand
agaaacaaggagaugccua

SEQ ID NO: 2493224 - RNA, 19 nt, Homo sapiens
  misc_RNA (1)...(19): siRNA sense strand
uggaggaggagcugaugaa

SEQ ID NO: 2493225 - RNA, 19 nt, Homo sapiens
  misc_RNA (1)...(19): siRNA sense strand
cugccagaguccugagaau

SEQ ID NO: 2493226 - RNA, 19 nt, Homo sapiens
  misc_RNA (1)...(19): siRNA sense strand
agucuguguuugaggguga

SEQ ID NO: 2493227 - RNA, 19 nt, Homo sapiens
  misc_RNA (1)...(19): siRNA sense strand
ccaacuacccagaaggcuu

SEQ ID NO: 2493228 - RNA, 19 nt, Homo sapiens
  misc_RNA (1)...(19): siRNA sense strand
ccagaaaugucuccggcuu

SEQ ID NO: 2493229 - RNA, 19 nt, Homo sapiens
  misc_RNA (1)...(19): siRNA sense strand
ucugcaaggcugugaccaa

SEQ ID NO: 2493230 - RNA, 19 nt, Homo sapiens
  misc_RNA (1)...(19): siRNA sense strand
gagcaucgguuuagagcug

SEQ ID NO: 2493231 - RNA, 19 nt, Homo sapiens
  misc_RNA (1)...(19): siRNA sense strand
ggacaagcagccugggaac

SEQ ID NO: 2493232 - RNA, 19 nt, Homo sapiens
  misc_RNA (1)...(19): siRNA sense strand
gggcagaagcuuuugagau

SEQ ID NO: 2493233 - RNA, 19 nt, Homo sapiens
  misc_RNA (1)...(19): siRNA sense strand
ugcaagaaggagugaaaau

SEQ ID NO: 2493234 - RNA, 19 nt, Homo sapiens
  misc_RNA (1)...(19): siRNA sense strand
cugccagaguccugagaau

SEQ ID NO: 2493235 - RNA, 19 nt, Homo sapiens
  misc_RNA (1)...(19): siRNA sense strand
agucuguguuugaggguga

SEQ ID NO: 2493236 - RNA, 19 nt, Homo sapiens
  misc_RNA (1)...(19): siRNA sense strand
ccaacuacccagaaggcuu

SEQ ID NO: 2493237 - RNA, 19 nt, Homo sapiens
  misc_RNA (1)...(19): siRNA sense strand
ccagaaaugucuccggcuu

SEQ ID NO: 2493238 - RNA, 19 nt, Homo sapiens
  misc_RNA (1)...(19): siRNA sense strand
ucugcaaggcugugaccaa

SEQ ID NO: 2493239 - RNA, 19 nt, Homo sapiens
  misc_RNA (1)...(19): siRNA sense strand
gagcaucgguuuagagcug

SEQ ID NO: 2493240 - RNA, 19 nt, Homo sapiens
  misc_RNA (1)...(19): siRNA sense strand
ggacaagcagccugggaac

SEQ ID NO: 2493241 - RNA, 19 nt, Homo sapiens
  misc_RNA (1)...(19): siRNA sense strand
gggcagaagcuuuugagau

SEQ ID NO: 2493242 - RNA, 19 nt, Homo sapiens
  misc_RNA (1)...(19): siRNA sense strand
ugcaagaaggagugaaaau

SEQ ID NO: 2493243 - RNA, 19 nt, Homo sapiens
  misc_RNA (1)...(19): siRNA sense strand
ccccaagacaagagaauua

SEQ ID NO: 2493244 - RNA, 19 nt, Homo sapiens
  misc_RNA (1)...(19): siRNA sense strand
aggaggaggaccaguggaa

SEQ ID NO: 2493245 - RNA, 19 nt, Homo sapiens
  misc_RNA (1)...(19): siRNA sense strand
ggucagguguugcgcguca

SEQ ID NO: 2493246 - RNA, 19 nt, Homo sapiens
  misc_RNA (1)...(19): siRNA sense strand
ggaaggacgaccuggcaga

SEQ ID NO: 2493247 - RNA, 19 nt, Homo sapiens
  misc_RNA (1)...(19): siRNA sense strand
ccagaaagaagauagcuga

SEQ ID NO: 2493248 - RNA, 19 nt, Homo sapiens
  misc_RNA (1)...(19): siRNA sense strand
ucgaggaggcggaggaacu

SEQ ID NO: 2493249 - RNA, 19 nt, Homo sapiens
  misc_RNA (1)...(19): siRNA sense strand
gcuuaugaguauaccacca

SEQ ID NO: 2493250 - RNA, 19 nt, Homo sapiens
  misc_RNA (1)...(19): siRNA sense strand
acaucgaggaagacgaaga

SEQ ID NO: 2493251 - RNA, 19 nt, Homo sapiens
  misc_RNA (1)...(19): siRNA sense strand
gggagaggggagaggugaa

SEQ ID NO: 2493252 - RNA, 19 nt, Homo sapiens
  misc_RNA (1)...(19): siRNA sense strand
acggcuggacagagggcaa

SEQ ID NO: 2493253 - RNA, 19 nt, Homo sapiens
  misc_RNA (1)...(19): siRNA sense strand
gcgacgacuacgaggagca

SEQ ID NO: 2493254 - RNA, 19 nt, Homo sapiens
  misc_RNA (1)...(19): siRNA sense strand
ggagaaugagggcagccaa

SEQ ID NO: 2493255 - RNA, 19 nt, Homo sapiens
  misc_RNA (1)...(19): siRNA sense strand
ggaucauucucaacgggau

SEQ ID NO: 2493256 - RNA, 19 nt, Homo sapiens
  misc_RNA (1)...(19): siRNA sense strand
acuacgaggagcagacaga

SEQ ID NO: 2493257 - RNA, 19 nt, Homo sapiens
  misc_RNA (1)...(19): siRNA sense strand
cgacggagaaugagggcag

SEQ ID NO: 2493258 - RNA, 19 nt, Homo sapiens
  misc_RNA (1)...(19): siRNA sense strand
ggcucaagauccagcacga

SEQ ID NO: 2493259 - RNA, 19 nt, Homo sapiens
  misc_RNA (1)...(19): siRNA sense strand
ugguggaccugguggccau

SEQ ID NO: 2493260 - RNA, 19 nt, Homo sapiens
  misc_RNA (1)...(19): siRNA sense strand
guggagaaaccaaaggcaa

SEQ ID NO: 2493261 - RNA, 19 nt, Homo sapiens
  misc_RNA (1)...(19): siRNA sense strand
cggcugaaaucaugggcca

SEQ ID NO: 2493262 - RNA, 19 nt, Homo sapiens
  misc_RNA (1)...(19): siRNA sense strand
gaacuauacaggugggaac

SEQ ID NO: 2493263 - RNA, 19 nt, Homo sapiens
  misc_RNA (1)...(19): siRNA sense strand
ccauuuacaucuuggugca

SEQ ID NO: 2493264 - RNA, 19 nt, Homo sapiens
  misc_RNA (1)...(19): siRNA sense strand
cuacagaacuauacaggug

SEQ ID NO: 2493265 - RNA, 19 nt, Homo sapiens
  misc_RNA (1)...(19): siRNA sense strand
guuggaaacuccugccuca

SEQ ID NO: 2493266 - RNA, 19 nt, Homo sapiens
  misc_RNA (1)...(19): siRNA sense strand
uggagaaaccaaaggcaac

SEQ ID NO: 2493267 - RNA, 19 nt, Homo sapiens
  misc_RNA (1)...(19): siRNA sense strand
agucuucagugcugguaau

SEQ ID NO: 2493268 - RNA, 19 nt, Homo sapiens
  misc_RNA (1)...(19): siRNA sense strand
uggcagggaucgaggccua

SEQ ID NO: 2493269 - RNA, 19 nt, Homo sapiens
  misc_RNA (1)...(19): siRNA sense strand
cgggcaagaaugagaccua

SEQ ID NO: 2493270 - RNA, 19 nt, Homo sapiens
  misc_RNA (1)...(19): siRNA sense strand
ccaacaugaaggugugcaa

SEQ ID NO: 2493271 - RNA, 19 nt, Homo sapiens
  misc_RNA (1)...(19): siRNA sense strand
agaagaucauagagaagca

SEQ ID NO: 2493272 - RNA, 19 nt, Homo sapiens
  misc_RNA (1)...(19): siRNA sense strand
gcgugguggaacugaacaa

SEQ ID NO: 2493273 - RNA, 19 nt, Homo sapiens
  misc_RNA (1)...(19): siRNA sense strand
ggaaccagaacuugggcau

SEQ ID NO: 2493274 - RNA, 19 nt, Homo sapiens
  misc_RNA (1)...(19): siRNA sense strand
agauggucaccgugggcaa

SEQ ID NO: 2493275 - RNA, 19 nt, Homo sapiens
  misc_RNA (1)...(19): siRNA sense strand
agguggaggaagaagauca

SEQ ID NO: 2493276 - RNA, 19 nt, Homo sapiens
  misc_RNA (1)...(19): siRNA sense strand
ucaaugaacugcugcggga

SEQ ID NO: 2493277 - RNA, 19 nt, Homo sapiens
  misc_RNA (1)...(19): siRNA sense strand
gcacaucgccauugagcgu

SEQ ID NO: 2493278 - RNA, 19 nt, Homo sapiens
  misc_RNA (1)...(19): siRNA sense strand
cgggacaaguggcgcaagu

SEQ ID NO: 2493279 - RNA, 19 nt, Homo sapiens
  misc_RNA (1)...(19): siRNA sense strand
gacaacaagagguggagga

SEQ ID NO: 2493280 - RNA, 19 nt, Homo sapiens
  misc_RNA (1)...(19): siRNA sense strand
uggcagggaucgaggccua

SEQ ID NO: 2493281 - RNA, 19 nt, Homo sapiens
  misc_RNA (1)...(19): siRNA sense strand
cgggcaagaaugagaccua

SEQ ID NO: 2493282 - RNA, 19 nt, Homo sapiens
  misc_RNA (1)...(19): siRNA sense strand
ccaacaugaaggugugcaa

SEQ ID NO: 2493283 - RNA, 19 nt, Homo sapiens
  misc_RNA (1)...(19): siRNA sense strand
agaagaucauagagaagca

SEQ ID NO: 2493284 - RNA, 19 nt, Homo sapiens
  misc_RNA (1)...(19): siRNA sense strand
gcgugguggaacugaacaa

SEQ ID NO: 2493285 - RNA, 19 nt, Homo sapiens
  misc_RNA (1)...(19): siRNA sense strand
ggaaccagaacuugggcau

SEQ ID NO: 2493286 - RNA, 19 nt, Homo sapiens
  misc_RNA (1)...(19): siRNA sense strand
agauggucaccgugggcaa

SEQ ID NO: 2493287 - RNA, 19 nt, Homo sapiens
  misc_RNA (1)...(19): siRNA sense strand
agguggaggaagaagauca

SEQ ID NO: 2493288 - RNA, 19 nt, Homo sapiens
  misc_RNA (1)...(19): siRNA sense strand
ucaaugaacugcugcggga

SEQ ID NO: 2493289 - RNA, 19 nt, Homo sapiens
  misc_RNA (1)...(19): siRNA sense strand
gcacaucgccauugagcgu

SEQ ID NO: 2493290 - RNA, 19 nt, Homo sapiens
  misc_RNA (1)...(19): siRNA sense strand
cgggacaaguggcgcaagu

SEQ ID NO: 2493291 - RNA, 19 nt, Homo sapiens
  misc_RNA (1)...(19): siRNA sense strand
gacaacaagagguggagga

SEQ ID NO: 2493292 - RNA, 19 nt, Homo sapiens
  misc_RNA (1)...(19): siRNA sense strand
gaagaaagcuguugggaga

SEQ ID NO: 2493293 - RNA, 19 nt, Homo sapiens
  misc_RNA (1)...(19): siRNA sense strand
gaauaauggcagugaucaa

SEQ ID NO: 2493294 - RNA, 19 nt, Homo sapiens
  misc_RNA (1)...(19): siRNA sense strand
gguuaaauggaaaggaaaa

SEQ ID NO: 2493295 - RNA, 19 nt, Homo sapiens
  misc_RNA (1)...(19): siRNA sense strand
gaaaggaaaaggugggaaa

SEQ ID NO: 2493296 - RNA, 19 nt, Homo sapiens
  misc_RNA (1)...(19): siRNA sense strand
cugaggaaguagaagaaau

SEQ ID NO: 2493297 - RNA, 19 nt, Homo sapiens
  misc_RNA (1)...(19): siRNA sense strand
ucgaauaggagcagaugaa

SEQ ID NO: 2493298 - RNA, 19 nt, Homo sapiens
  misc_RNA (1)...(19): siRNA sense strand
uagaagaaauaaaggcaga

SEQ ID NO: 2493299 - RNA, 19 nt, Homo sapiens
  misc_RNA (1)...(19): siRNA sense strand
aagauaaaguaaagcccaa

SEQ ID NO: 2493300 - RNA, 19 nt, Homo sapiens
  misc_RNA (1)...(19): siRNA sense strand
aggaagaucagcugaggaa

SEQ ID NO: 2493301 - RNA, 19 nt, Homo sapiens
  misc_RNA (1)...(19): siRNA sense strand
ugcaaagguuaaauggaaa

SEQ ID NO: 2493302 - RNA, 19 nt, Homo sapiens
  misc_RNA (1)...(19): siRNA sense strand
cugaagagaaagaagauga

SEQ ID NO: 2493303 - RNA, 19 nt, Homo sapiens
  misc_RNA (1)...(19): siRNA sense strand
agguuaaauggaaaggaaa

SEQ ID NO: 2493304 - RNA, 19 nt, Homo sapiens
  misc_RNA (1)...(19): siRNA sense strand
auuagauaguggucgaaua

SEQ ID NO: 2493305 - RNA, 19 nt, Homo sapiens
  misc_RNA (1)...(19): siRNA sense strand
gagaaacaaaagagugaaa

SEQ ID NO: 2493306 - RNA, 19 nt, Homo sapiens
  misc_RNA (1)...(19): siRNA sense strand
gggagaaacaaaagaguga

SEQ ID NO: 2493307 - RNA, 19 nt, Homo sapiens
  misc_RNA (1)...(19): siRNA sense strand
gcacaagaagaaaggcaca

SEQ ID NO: 2493308 - RNA, 19 nt, Homo sapiens
  misc_RNA (1)...(19): siRNA sense strand
agaauuaagcacaagaaga

SEQ ID NO: 2493309 - RNA, 19 nt, Homo sapiens
  misc_RNA (1)...(19): siRNA sense strand
acaauuagauaguggucga

SEQ ID NO: 2493310 - RNA, 19 nt, Homo sapiens
  misc_RNA (1)...(19): siRNA sense strand
ugacagaaggcauggacau

SEQ ID NO: 2493311 - RNA, 19 nt, Homo sapiens
  misc_RNA (1)...(19): siRNA sense strand
acaaaagagugaaaagaga

SEQ ID NO: 2493312 - RNA, 19 nt, Homo sapiens
  misc_RNA (1)...(19): siRNA sense strand
gccaauaagaaguugugaa

SEQ ID NO: 2493313 - RNA, 19 nt, Homo sapiens
  misc_RNA (1)...(19): siRNA sense strand
aggauaaaucauacgguga

SEQ ID NO: 2493314 - RNA, 19 nt, Homo sapiens
  misc_RNA (1)...(19): siRNA sense strand
cagcugaggaaguagaaga

SEQ ID NO: 2493315 - RNA, 19 nt, Homo sapiens
  misc_RNA (1)...(19): siRNA sense strand
cagaagaauacauguggau

SEQ ID NO: 2493316 - RNA, 19 nt, Homo sapiens
  misc_RNA (1)...(19): siRNA sense strand
cacaauguacagagggauu

SEQ ID NO: 2493317 - RNA, 19 nt, Homo sapiens
  misc_RNA (1)...(19): siRNA sense strand
ucacuaugaagaagaagaa

SEQ ID NO: 2493318 - RNA, 19 nt, Homo sapiens
  misc_RNA (1)...(19): siRNA sense strand
ugaaagagaaaggaguaaa

SEQ ID NO: 2493319 - RNA, 19 nt, Homo sapiens
  misc_RNA (1)...(19): siRNA sense strand
auguacuguuuguguguaa

SEQ ID NO: 2493320 - RNA, 19 nt, Homo sapiens
  misc_RNA (1)...(19): siRNA sense strand
aaauacaccaagagugauu

SEQ ID NO: 2493321 - RNA, 19 nt, Homo sapiens
  misc_RNA (1)...(19): siRNA sense strand
augaaagagaaaggaguaa

SEQ ID NO: 2493322 - RNA, 19 nt, Homo sapiens
  misc_RNA (1)...(19): siRNA sense strand
ucccaagaauuaagcacaa

SEQ ID NO: 2493323 - RNA, 19 nt, Homo sapiens
  misc_RNA (1)...(19): siRNA sense strand
gaaccgaagucguagccga

SEQ ID NO: 2493324 - RNA, 19 nt, Homo sapiens
  misc_RNA (1)...(19): siRNA sense strand
aaagagagaccgaagcaga

SEQ ID NO: 2493325 - RNA, 19 nt, Homo sapiens
  misc_RNA (1)...(19): siRNA sense strand
gaugaggacuacaugccaa

SEQ ID NO: 2493326 - RNA, 19 nt, Homo sapiens
  misc_RNA (1)...(19): siRNA sense strand
aagagagaccgaagcagaa

SEQ ID NO: 2493327 - RNA, 19 nt, Homo sapiens
  misc_RNA (1)...(19): siRNA sense strand
gaagauugugagaaagcau

SEQ ID NO: 2493328 - RNA, 19 nt, Homo sapiens
  misc_RNA (1)...(19): siRNA sense strand
agauaguggucgaauagga

SEQ ID NO: 2493329 - RNA, 19 nt, Homo sapiens
  misc_RNA (1)...(19): siRNA sense strand
ggaaaaggugggaaauaca

SEQ ID NO: 2493330 - RNA, 19 nt, Homo sapiens
  misc_RNA (1)...(19): siRNA sense strand
cuuauagaugacagaagaa

SEQ ID NO: 2493331 - RNA, 19 nt, Homo sapiens
  misc_RNA (1)...(19): siRNA sense strand
agcccaaacaggauacaaa

SEQ ID NO: 2493332 - RNA, 19 nt, Homo sapiens
  misc_RNA (1)...(19): siRNA sense strand
ucuuaucaccacaggagaa

SEQ ID NO: 2493333 - RNA, 19 nt, Homo sapiens
  misc_RNA (1)...(19): siRNA sense strand
gugaauaauggcagugauc

SEQ ID NO: 2493334 - RNA, 19 nt, Homo sapiens
  misc_RNA (1)...(19): siRNA sense strand
accagaaccuacaagggaa

SEQ ID NO: 2493335 - RNA, 19 nt, Homo sapiens
  misc_RNA (1)...(19): siRNA sense strand
cagaugaagaaauugauga

SEQ ID NO: 2493336 - RNA, 19 nt, Homo sapiens
  misc_RNA (1)...(19): siRNA sense strand
aaguaaagcccaaacagga

SEQ ID NO: 2493337 - RNA, 19 nt, Homo sapiens
  misc_RNA (1)...(19): siRNA sense strand
agucgguugcaaagguuaa

SEQ ID NO: 2493338 - RNA, 19 nt, Homo sapiens
  misc_RNA (1)...(19): siRNA sense strand
ggugaauaauggcagugau

SEQ ID NO: 2493339 - RNA, 19 nt, Homo sapiens
  misc_RNA (1)...(19): siRNA sense strand
aaggaaaaggugggaaaua

SEQ ID NO: 2493340 - RNA, 19 nt, Homo sapiens
  misc_RNA (1)...(19): siRNA sense strand
aagagaaagaagaugagga

SEQ ID NO: 2493341 - RNA, 19 nt, Homo sapiens
  misc_RNA (1)...(19): siRNA sense strand
cuacaagggaacaauuaga

SEQ ID NO: 2493342 - RNA, 19 nt, Homo sapiens
  misc_RNA (1)...(19): siRNA sense strand
aguagaagaaauaaaggca

SEQ ID NO: 2493343 - RNA, 19 nt, Homo sapiens
  misc_RNA (1)...(19): siRNA sense strand
ggcuaaaacucaggcuaua

SEQ ID NO: 2493344 - RNA, 19 nt, Homo sapiens
  misc_RNA (1)...(19): siRNA sense strand
uggaaagcuuaccgggaaa

SEQ ID NO: 2493345 - RNA, 19 nt, Homo sapiens
  misc_RNA (1)...(19): siRNA sense strand
ccuacaaaguuuacgccua

SEQ ID NO: 2493346 - RNA, 19 nt, Homo sapiens
  misc_RNA (1)...(19): siRNA sense strand
gcaccaaaguaaacgcaga

SEQ ID NO: 2493347 - RNA, 19 nt, Homo sapiens
  misc_RNA (1)...(19): siRNA sense strand
acgucaagcaggagugcaa

SEQ ID NO: 2493348 - RNA, 19 nt, Homo sapiens
  misc_RNA (1)...(19): siRNA sense strand
aaguaaacgcagagagugu

SEQ ID NO: 2493349 - RNA, 19 nt, Homo sapiens
  misc_RNA (1)...(19): siRNA sense strand
cugcuaacucagaaaggaa

SEQ ID NO: 2493350 - RNA, 19 nt, Homo sapiens
  misc_RNA (1)...(19): siRNA sense strand
gaaagaaagugggagcaga

SEQ ID NO: 2493351 - RNA, 19 nt, Homo sapiens
  misc_RNA (1)...(19): siRNA sense strand
auggaaagcuuaccgggaa

SEQ ID NO: 2493352 - RNA, 19 nt, Homo sapiens
  misc_RNA (1)...(19): siRNA sense strand
cugcugaaguuauggaaac

SEQ ID NO: 2493353 - RNA, 19 nt, Homo sapiens
  misc_RNA (1)...(19): siRNA sense strand
gcaaaguggaagaccgugu

SEQ ID NO: 2493354 - RNA, 19 nt, Homo sapiens
  misc_RNA (1)...(19): siRNA sense strand
acucagaaaggaaaugcaa

SEQ ID NO: 2493355 - RNA, 19 nt, Homo sapiens
  misc_RNA (1)...(19): siRNA sense strand
gcuaacucagaaaggaaau

SEQ ID NO: 2493356 - RNA, 19 nt, Homo sapiens
  misc_RNA (1)...(19): siRNA sense strand
cgggaaagaaagugggagc

SEQ ID NO: 2493357 - RNA, 19 nt, Homo sapiens
  misc_RNA (1)...(19): siRNA sense strand
agaaagugggagcagaaga

SEQ ID NO: 2493358 - RNA, 19 nt, Homo sapiens
  misc_RNA (1)...(19): siRNA sense strand
gggccuaaugcacgcacua

SEQ ID NO: 2493359 - RNA, 19 nt, Homo sapiens
  misc_RNA (1)...(19): siRNA sense strand
gcugcugaaguuauggaaa

SEQ ID NO: 2493360 - RNA, 19 nt, Homo sapiens
  misc_RNA (1)...(19): siRNA sense strand
gccuaaugcacgcacuaaa

SEQ ID NO: 2493361 - RNA, 19 nt, Homo sapiens
  misc_RNA (1)...(19): siRNA sense strand
cagcaaaguggaagaccgu

SEQ ID NO: 2493362 - RNA, 19 nt, Homo sapiens
  misc_RNA (1)...(19): siRNA sense strand
ggcuuagugucuugguaga

SEQ ID NO: 2493363 - RNA, 19 nt, Homo sapiens
  misc_RNA (1)...(19): siRNA sense strand
ucaaagaggugguggucug

SEQ ID NO: 2493364 - RNA, 19 nt, Homo sapiens
  misc_RNA (1)...(19): siRNA sense strand
ucucaaagaaggacccaga

SEQ ID NO: 2493365 - RNA, 19 nt, Homo sapiens
  misc_RNA (1)...(19): siRNA sense strand
ggacucaccccaagggcua

SEQ ID NO: 2493366 - RNA, 19 nt, Homo sapiens
  misc_RNA (1)...(19): siRNA sense strand
agggcuacaccgaguacaa

SEQ ID NO: 2493367 - RNA, 19 nt, Homo sapiens
  misc_RNA (1)...(19): siRNA sense strand
ucaaagaggugguggucug

SEQ ID NO: 2493368 - RNA, 19 nt, Homo sapiens
  misc_RNA (1)...(19): siRNA sense strand
ucucaaagaaggacccaga

SEQ ID NO: 2493369 - RNA, 19 nt, Homo sapiens
  misc_RNA (1)...(19): siRNA sense strand
ggacucaccccaagggcua

SEQ ID NO: 2493370 - RNA, 19 nt, Homo sapiens
  misc_RNA (1)...(19): siRNA sense strand
agggcuacaccgaguacaa

SEQ ID NO: 2493371 - RNA, 19 nt, Homo sapiens
  misc_RNA (1)...(19): siRNA sense strand
gaggaaaggaagaggggaa

SEQ ID NO: 2493372 - RNA, 19 nt, Homo sapiens
  misc_RNA (1)...(19): siRNA sense strand
cgccaaagaaggagcuaau

SEQ ID NO: 2493373 - RNA, 19 nt, Homo sapiens
  misc_RNA (1)...(19): siRNA sense strand
augccaacgaugugaagaa

SEQ ID NO: 2493374 - RNA, 19 nt, Homo sapiens
  misc_RNA (1)...(19): siRNA sense strand
augcagauggagugggaga

SEQ ID NO: 2493375 - RNA, 19 nt, Homo sapiens
  misc_RNA (1)...(19): siRNA sense strand
agaagaaagcuuuggccca

SEQ ID NO: 2493376 - RNA, 19 nt, Homo sapiens
  misc_RNA (1)...(19): siRNA sense strand
augugaagaaauuggaaga

SEQ ID NO: 2493377 - RNA, 19 nt, Homo sapiens
  misc_RNA (1)...(19): siRNA sense strand
caguggaagaagaaagcuu

SEQ ID NO: 2493378 - RNA, 19 nt, Homo sapiens
  misc_RNA (1)...(19): siRNA sense strand
gcgccaaagaaggagcuaa

SEQ ID NO: 2493379 - RNA, 19 nt, Homo sapiens
  misc_RNA (1)...(19): siRNA sense strand
guaucugaggaaaggaaga

SEQ ID NO: 2493380 - RNA, 19 nt, Homo sapiens
  misc_RNA (1)...(19): siRNA sense strand
uggagugggagaugccaaa

SEQ ID NO: 2493381 - RNA, 19 nt, Homo sapiens
  misc_RNA (1)...(19): siRNA sense strand
acacagaccaccagaccca

SEQ ID NO: 2493382 - RNA, 19 nt, Homo sapiens
  misc_RNA (1)...(19): siRNA sense strand
aagccaaagcugauaaaau

SEQ ID NO: 2493383 - RNA, 19 nt, Homo sapiens
  misc_RNA (1)...(19): siRNA sense strand
aggaaaggaagaggggaaa

SEQ ID NO: 2493384 - RNA, 19 nt, Homo sapiens
  misc_RNA (1)...(19): siRNA sense strand
cuaaucaggugguagcuca

SEQ ID NO: 2493385 - RNA, 19 nt, Homo sapiens
  misc_RNA (1)...(19): siRNA sense strand
gaggaaaggaagaggggaa

SEQ ID NO: 2493386 - RNA, 19 nt, Homo sapiens
  misc_RNA (1)...(19): siRNA sense strand
cgccaaagaaggagcuaau

SEQ ID NO: 2493387 - RNA, 19 nt, Homo sapiens
  misc_RNA (1)...(19): siRNA sense strand
augccaacgaugugaagaa

SEQ ID NO: 2493388 - RNA, 19 nt, Homo sapiens
  misc_RNA (1)...(19): siRNA sense strand
augcagauggagugggaga

SEQ ID NO: 2493389 - RNA, 19 nt, Homo sapiens
  misc_RNA (1)...(19): siRNA sense strand
agaagaaagcuuuggccca

SEQ ID NO: 2493390 - RNA, 19 nt, Homo sapiens
  misc_RNA (1)...(19): siRNA sense strand
augugaagaaauuggaaga

SEQ ID NO: 2493391 - RNA, 19 nt, Homo sapiens
  misc_RNA (1)...(19): siRNA sense strand
caguggaagaagaaagcuu

SEQ ID NO: 2493392 - RNA, 19 nt, Homo sapiens
  misc_RNA (1)...(19): siRNA sense strand
gcgccaaagaaggagcuaa

SEQ ID NO: 2493393 - RNA, 19 nt, Homo sapiens
  misc_RNA (1)...(19): siRNA sense strand
guaucugaggaaaggaaga

SEQ ID NO: 2493394 - RNA, 19 nt, Homo sapiens
  misc_RNA (1)...(19): siRNA sense strand
uggagugggagaugccaaa

SEQ ID NO: 2493395 - RNA, 19 nt, Homo sapiens
  misc_RNA (1)...(19): siRNA sense strand
acacagaccaccagaccca

SEQ ID NO: 2493396 - RNA, 19 nt, Homo sapiens
  misc_RNA (1)...(19): siRNA sense strand
aagccaaagcugauaaaau

SEQ ID NO: 2493397 - RNA, 19 nt, Homo sapiens
  misc_RNA (1)...(19): siRNA sense strand
aggaaaggaagaggggaaa

SEQ ID NO: 2493398 - RNA, 19 nt, Homo sapiens
  misc_RNA (1)...(19): siRNA sense strand
cuaaucaggugguagcuca

SEQ ID NO: 2493399 - RNA, 19 nt, Homo sapiens
  misc_RNA (1)...(19): siRNA sense strand
ggaaaugucuggaggagcu

SEQ ID NO: 2493400 - RNA, 19 nt, Homo sapiens
  misc_RNA (1)...(19): siRNA sense strand
uguucgaaucauugacaaa

SEQ ID NO: 2493401 - RNA, 19 nt, Homo sapiens
  misc_RNA (1)...(19): siRNA sense strand
cuuuauaagaugcgaaaug

SEQ ID NO: 2493402 - RNA, 19 nt, Homo sapiens
  misc_RNA (1)...(19): siRNA sense strand
ggauaugaauugucuccca

SEQ ID NO: 2493403 - RNA, 19 nt, Homo sapiens
  misc_RNA (1)...(19): siRNA sense strand
ggaagaacuguguggccau

SEQ ID NO: 2493404 - RNA, 19 nt, Homo sapiens
  misc_RNA (1)...(19): siRNA sense strand
cuguaugaguugaaggaag

SEQ ID NO: 2493405 - RNA, 19 nt, Homo sapiens
  misc_RNA (1)...(19): siRNA sense strand
gggaagaacuguguggcca

SEQ ID NO: 2493406 - RNA, 19 nt, Homo sapiens
  misc_RNA (1)...(19): siRNA sense strand
acaucaucgagaaggacaa

SEQ ID NO: 2493407 - RNA, 19 nt, Homo sapiens
  misc_RNA (1)...(19): siRNA sense strand
aggaaggucggcagaucaa

SEQ ID NO: 2493408 - RNA, 19 nt, Homo sapiens
  misc_RNA (1)...(19): siRNA sense strand
cuggagaggagcagagaua

SEQ ID NO: 2493409 - RNA, 19 nt, Homo sapiens
  misc_RNA (1)...(19): siRNA sense strand
ggagaggagcagagauaca

SEQ ID NO: 2493410 - RNA, 19 nt, Homo sapiens
  misc_RNA (1)...(19): siRNA sense strand
agaaagaagagcucagauu

SEQ ID NO: 2493411 - RNA, 19 nt, Homo sapiens
  misc_RNA (1)...(19): siRNA sense strand
gggaagaggagacacggaa

SEQ ID NO: 2493412 - RNA, 19 nt, Homo sapiens
  misc_RNA (1)...(19): siRNA sense strand
gguaugaacaguaugccua

SEQ ID NO: 2493413 - RNA, 19 nt, Homo sapiens
  misc_RNA (1)...(19): siRNA sense strand
acgcacagacugacagaau

SEQ ID NO: 2493414 - RNA, 19 nt, Homo sapiens
  misc_RNA (1)...(19): siRNA sense strand
cuggagaacgggaaggaga

SEQ ID NO: 2493415 - RNA, 19 nt, Homo sapiens
  misc_RNA (1)...(19): siRNA sense strand
cugcugugcuguggagaaa

SEQ ID NO: 2493416 - RNA, 19 nt, Homo sapiens
  misc_RNA (1)...(19): siRNA sense strand
aaagaagagcucagauuga

SEQ ID NO: 2493417 - RNA, 19 nt, Homo sapiens
  misc_RNA (1)...(19): siRNA sense strand
gcuucaucgccaugggcua

SEQ ID NO: 2493418 - RNA, 19 nt, Homo sapiens
  misc_RNA (1)...(19): siRNA sense strand
gcuacuacaaccagagcga

SEQ ID NO: 2493419 - RNA, 19 nt, Homo sapiens
  misc_RNA (1)...(19): siRNA sense strand
gcucagaucuccaagcgca

SEQ ID NO: 2493420 - RNA, 19 nt, Homo sapiens
  misc_RNA (1)...(19): siRNA sense strand
gcugugcuguggagaaaga

SEQ ID NO: 2493421 - RNA, 19 nt, Homo sapiens
  misc_RNA (1)...(19): siRNA sense strand
gaaugaaccugcagacccu

SEQ ID NO: 2493422 - RNA, 19 nt, Homo sapiens
  misc_RNA (1)...(19): siRNA sense strand
uggagaacgggaaggagau

SEQ ID NO: 2493423 - RNA, 19 nt, Homo sapiens
  misc_RNA (1)...(19): siRNA sense strand
gcugcugugcuguggagaa

SEQ ID NO: 2493424 - RNA, 19 nt, Homo sapiens
  misc_RNA (1)...(19): siRNA sense strand
cguccaaaccugcggguga

SEQ ID NO: 2493425 - RNA, 19 nt, Homo sapiens
  misc_RNA (1)...(19): siRNA sense strand
gggacgaggacgugcuguu

SEQ ID NO: 2493426 - RNA, 19 nt, Homo sapiens
  misc_RNA (1)...(19): siRNA sense strand
cguccaaaccugcggguga

SEQ ID NO: 2493427 - RNA, 19 nt, Homo sapiens
  misc_RNA (1)...(19): siRNA sense strand
gggacgaggacgugcuguu

SEQ ID NO: 2493428 - RNA, 19 nt, Homo sapiens
  misc_RNA (1)...(19): siRNA sense strand
cguccaaaccugcggguga

SEQ ID NO: 2493429 - RNA, 19 nt, Homo sapiens
  misc_RNA (1)...(19): siRNA sense strand
gggacgaggacgugcuguu

SEQ ID NO: 2493430 - RNA, 19 nt, Homo sapiens
  misc_RNA (1)...(19): siRNA sense strand
cgaaauuagcgcaguggcu

SEQ ID NO: 2493431 - RNA, 19 nt, Homo sapiens
  misc_RNA (1)...(19): siRNA sense strand
cgaaauuagcgcaguggcu

SEQ ID NO: 2493432 - RNA, 19 nt, Homo sapiens
  misc_RNA (1)...(19): siRNA sense strand
ccgaaaggcaggaggcuca

SEQ ID NO: 2493433 - RNA, 19 nt, Homo sapiens
  misc_RNA (1)...(19): siRNA sense strand
cuaugacaccagugagaaa

SEQ ID NO: 2493434 - RNA, 19 nt, Homo sapiens
  misc_RNA (1)...(19): siRNA sense strand
gccugaagcuuuauggcua

SEQ ID NO: 2493435 - RNA, 19 nt, Homo sapiens
  misc_RNA (1)...(19): siRNA sense strand
uuuaaugacucguggagca

SEQ ID NO: 2493436 - RNA, 19 nt, Homo sapiens
  misc_RNA (1)...(19): siRNA sense strand
cguucgacuuggagcugaa

SEQ ID NO: 2493437 - RNA, 19 nt, Homo sapiens
  misc_RNA (1)...(19): siRNA sense strand
ccacuggccuguuugggua

SEQ ID NO: 2493438 - RNA, 19 nt, Homo sapiens
  misc_RNA (1)...(19): siRNA sense strand
gauaggaacuccaacgacu

SEQ ID NO: 2493439 - RNA, 19 nt, Homo sapiens
  misc_RNA (1)...(19): siRNA sense strand
ggaauugaacucugggauc

SEQ ID NO: 2493440 - RNA, 19 nt, Homo sapiens
  misc_RNA (1)...(19): siRNA sense strand
ggaacaaagguggagucaa

SEQ ID NO: 2493441 - RNA, 19 nt, Homo sapiens
  misc_RNA (1)...(19): siRNA sense strand
ggaucgaggacuuuggguu

SEQ ID NO: 2493442 - RNA, 19 nt, Homo sapiens
  misc_RNA (1)...(19): siRNA sense strand
gguuuggagacaugaacuu

SEQ ID NO: 2493443 - RNA, 19 nt, Homo sapiens
  misc_RNA (1)...(19): siRNA sense strand
cuaugacaccagugagaaa

SEQ ID NO: 2493444 - RNA, 19 nt, Homo sapiens
  misc_RNA (1)...(19): siRNA sense strand
gccugaagcuuuauggcua

SEQ ID NO: 2493445 - RNA, 19 nt, Homo sapiens
  misc_RNA (1)...(19): siRNA sense strand
cguucgacuuggagcugaa

SEQ ID NO: 2493446 - RNA, 19 nt, Homo sapiens
  misc_RNA (1)...(19): siRNA sense strand
ccacuggccuguuugggua

SEQ ID NO: 2493447 - RNA, 19 nt, Homo sapiens
  misc_RNA (1)...(19): siRNA sense strand
gauaggaacuccaacgacu

SEQ ID NO: 2493448 - RNA, 19 nt, Homo sapiens
  misc_RNA (1)...(19): siRNA sense strand
ggaacaaagguggagucaa

SEQ ID NO: 2493449 - RNA, 19 nt, Homo sapiens
  misc_RNA (1)...(19): siRNA sense strand
ggaucgaggacuuuggguu

SEQ ID NO: 2493450 - RNA, 19 nt, Homo sapiens
  misc_RNA (1)...(19): siRNA sense strand
gguuuggagacaugaacuu

SEQ ID NO: 2493451 - RNA, 19 nt, Homo sapiens
  misc_RNA (1)...(19): siRNA sense strand
gugauaugacagagagcaa

SEQ ID NO: 2493452 - RNA, 19 nt, Homo sapiens
  misc_RNA (1)...(19): siRNA sense strand
gagaggagacuuccaaaua

SEQ ID NO: 2493453 - RNA, 19 nt, Homo sapiens
  misc_RNA (1)...(19): siRNA sense strand
ggucaaguguaauuggagu

SEQ ID NO: 2493454 - RNA, 19 nt, Homo sapiens
  misc_RNA (1)...(19): siRNA sense strand
ccucaggagaagaguaguu

SEQ ID NO: 2493455 - RNA, 19 nt, Homo sapiens
  misc_RNA (1)...(19): siRNA sense strand
ugacauaacuacugaccac

SEQ ID NO: 2493456 - RNA, 19 nt, Homo sapiens
  misc_RNA (1)...(19): siRNA sense strand
caaacauggagaauggaca

SEQ ID NO: 2493457 - RNA, 19 nt, Homo sapiens
  misc_RNA (1)...(19): siRNA sense strand
uuaauaagcucgucaccga

SEQ ID NO: 2493458 - RNA, 19 nt, Homo sapiens
  misc_RNA (1)...(19): siRNA sense strand
gagaagaguaguuccacca

SEQ ID NO: 2493459 - RNA, 19 nt, Homo sapiens
  misc_RNA (1)...(19): siRNA sense strand
gugauaugacagagagcaa

SEQ ID NO: 2493460 - RNA, 19 nt, Homo sapiens
  misc_RNA (1)...(19): siRNA sense strand
gagaggagacuuccaaaua

SEQ ID NO: 2493461 - RNA, 19 nt, Homo sapiens
  misc_RNA (1)...(19): siRNA sense strand
ggucaaguguaauuggagu

SEQ ID NO: 2493462 - RNA, 19 nt, Homo sapiens
  misc_RNA (1)...(19): siRNA sense strand
ccucaggagaagaguaguu

SEQ ID NO: 2493463 - RNA, 19 nt, Homo sapiens
  misc_RNA (1)...(19): siRNA sense strand
ugacauaacuacugaccac

SEQ ID NO: 2493464 - RNA, 19 nt, Homo sapiens
  misc_RNA (1)...(19): siRNA sense strand
caaacauggagaauggaca

SEQ ID NO: 2493465 - RNA, 19 nt, Homo sapiens
  misc_RNA (1)...(19): siRNA sense strand
uuaauaagcucgucaccga

SEQ ID NO: 2493466 - RNA, 19 nt, Homo sapiens
  misc_RNA (1)...(19): siRNA sense strand
gagaagaguaguuccacca

SEQ ID NO: 2493467 - RNA, 19 nt, Homo sapiens
  misc_RNA (1)...(19): siRNA sense strand
agaucaacauauaggccua

SEQ ID NO: 2493468 - RNA, 19 nt, Homo sapiens
  misc_RNA (1)...(19): siRNA sense strand
guacugaugucaaggggaa

SEQ ID NO: 2493469 - RNA, 19 nt, Homo sapiens
  misc_RNA (1)...(19): siRNA sense strand
cagaagcaggugaagggaa

SEQ ID NO: 2493470 - RNA, 19 nt, Homo sapiens
  misc_RNA (1)...(19): siRNA sense strand
aagaagaaguuuacagccu

SEQ ID NO: 2493471 - RNA, 19 nt, Homo sapiens
  misc_RNA (1)...(19): siRNA sense strand
agaagagagaagaugauca

SEQ ID NO: 2493472 - RNA, 19 nt, Homo sapiens
  misc_RNA (1)...(19): siRNA sense strand
ucagaagagagaagaugau

SEQ ID NO: 2493473 - RNA, 19 nt, Homo sapiens
  misc_RNA (1)...(19): siRNA sense strand
gagagaagaugaucagggu

SEQ ID NO: 2493474 - RNA, 19 nt, Homo sapiens
  misc_RNA (1)...(19): siRNA sense strand
agagccuaaagaagagaaa

SEQ ID NO: 2493475 - RNA, 19 nt, Homo sapiens
  misc_RNA (1)...(19): siRNA sense strand
cagugaaacaagaaagaau

SEQ ID NO: 2493476 - RNA, 19 nt, Homo sapiens
  misc_RNA (1)...(19): siRNA sense strand
agaacuaugagcagagaau

SEQ ID NO: 2493477 - RNA, 19 nt, Homo sapiens
  misc_RNA (1)...(19): siRNA sense strand
agcaaaagacugagaacua

SEQ ID NO: 2493478 - RNA, 19 nt, Homo sapiens
  misc_RNA (1)...(19): siRNA sense strand
ugaucagccacaagauaaa

SEQ ID NO: 2493479 - RNA, 19 nt, Homo sapiens
  misc_RNA (1)...(19): siRNA sense strand
cugcuugaagacagugaaa

SEQ ID NO: 2493480 - RNA, 19 nt, Homo sapiens
  misc_RNA (1)...(19): siRNA sense strand
augcauggauagagauucu

SEQ ID NO: 2493481 - RNA, 19 nt, Homo sapiens
  misc_RNA (1)...(19): siRNA sense strand
agagaauacgugaacaaca

SEQ ID NO: 2493482 - RNA, 19 nt, Homo sapiens
  misc_RNA (1)...(19): siRNA sense strand
cagugaaacaagaaagaau

SEQ ID NO: 2493483 - RNA, 19 nt, Homo sapiens
  misc_RNA (1)...(19): siRNA sense strand
agaacuaugagcagagaau

SEQ ID NO: 2493484 - RNA, 19 nt, Homo sapiens
  misc_RNA (1)...(19): siRNA sense strand
agcaaaagacugagaacua

SEQ ID NO: 2493485 - RNA, 19 nt, Homo sapiens
  misc_RNA (1)...(19): siRNA sense strand
ugaucagccacaagauaaa

SEQ ID NO: 2493486 - RNA, 19 nt, Homo sapiens
  misc_RNA (1)...(19): siRNA sense strand
cugcuugaagacagugaaa

SEQ ID NO: 2493487 - RNA, 19 nt, Homo sapiens
  misc_RNA (1)...(19): siRNA sense strand
augcauggauagagauucu

SEQ ID NO: 2493488 - RNA, 19 nt, Homo sapiens
  misc_RNA (1)...(19): siRNA sense strand
agagaauacgugaacaaca

SEQ ID NO: 2493489 - RNA, 19 nt, Homo sapiens
  misc_RNA (1)...(19): siRNA sense strand
agagaaagugugaggucaa

SEQ ID NO: 2493490 - RNA, 19 nt, Homo sapiens
  misc_RNA (1)...(19): siRNA sense strand
uggaggaguaugagaggaa

SEQ ID NO: 2493491 - RNA, 19 nt, Homo sapiens
  misc_RNA (1)...(19): siRNA sense strand
gaggaguaugagaggaaca

SEQ ID NO: 2493492 - RNA, 19 nt, Homo sapiens
  misc_RNA (1)...(19): siRNA sense strand
cagagaaagugugagguca

SEQ ID NO: 2493493 - RNA, 19 nt, Homo sapiens
  misc_RNA (1)...(19): siRNA sense strand
ucgaggagaugguggccca

SEQ ID NO: 2493494 - RNA, 19 nt, Homo sapiens
  misc_RNA (1)...(19): siRNA sense strand
cuugaaaaguggcagaaaa

SEQ ID NO: 2493495 - RNA, 19 nt, Homo sapiens
  misc_RNA (1)...(19): siRNA sense strand
gcaauuacacagaggccuu

SEQ ID NO: 2493496 - RNA, 19 nt, Homo sapiens
  misc_RNA (1)...(19): siRNA sense strand
cuucaaaaccauugcagaa

SEQ ID NO: 2493497 - RNA, 19 nt, Homo sapiens
  misc_RNA (1)...(19): siRNA sense strand
gggcagucccagugagaac

SEQ ID NO: 2493498 - RNA, 19 nt, Homo sapiens
  misc_RNA (1)...(19): siRNA sense strand
cuuccaugucugugaauuu

SEQ ID NO: 2493499 - RNA, 19 nt, Homo sapiens
  misc_RNA (1)...(19): siRNA sense strand
agaagaaugaggagacagu

SEQ ID NO: 2493500 - RNA, 19 nt, Homo sapiens
  misc_RNA (1)...(19): siRNA sense strand
guaagaagaaugaggagac

SEQ ID NO: 2493501 - RNA, 19 nt, Homo sapiens
  misc_RNA (1)...(19): siRNA sense strand
aggagacaguagaagugaa

SEQ ID NO: 2493502 - RNA, 19 nt, Homo sapiens
  misc_RNA (1)...(19): siRNA sense strand
agauuugugugacgggcaa

SEQ ID NO: 2493503 - RNA, 19 nt, Homo sapiens
  misc_RNA (1)...(19): siRNA sense strand
cuaauguggaggcacgaaa

SEQ ID NO: 2493504 - RNA, 19 nt, Homo sapiens
  misc_RNA (1)...(19): siRNA sense strand
ccauaauauuccuaaugca

SEQ ID NO: 2493505 - RNA, 19 nt, Homo sapiens
  misc_RNA (1)...(19): siRNA sense strand
gaugaauguaagcugggua

SEQ ID NO: 2493506 - RNA, 19 nt, Homo sapiens
  misc_RNA (1)...(19): siRNA sense strand
aaaagaaggcagcagacaa

SEQ ID NO: 2493507 - RNA, 19 nt, Homo sapiens
  misc_RNA (1)...(19): siRNA sense strand
gcaggugucagcaggaaaa

SEQ ID NO: 2493508 - RNA, 19 nt, Homo sapiens
  misc_RNA (1)...(19): siRNA sense strand
gcaauuacacagaggccuu

SEQ ID NO: 2493509 - RNA, 19 nt, Homo sapiens
  misc_RNA (1)...(19): siRNA sense strand
cuuccaugucugugaauuu

SEQ ID NO: 2493510 - RNA, 19 nt, Homo sapiens
  misc_RNA (1)...(19): siRNA sense strand
agaagaaugaggagacagu

SEQ ID NO: 2493511 - RNA, 19 nt, Homo sapiens
  misc_RNA (1)...(19): siRNA sense strand
guaagaagaaugaggagac

SEQ ID NO: 2493512 - RNA, 19 nt, Homo sapiens
  misc_RNA (1)...(19): siRNA sense strand
aggagacaguagaagugaa

SEQ ID NO: 2493513 - RNA, 19 nt, Homo sapiens
  misc_RNA (1)...(19): siRNA sense strand
agauuugugugacgggcaa

SEQ ID NO: 2493514 - RNA, 19 nt, Homo sapiens
  misc_RNA (1)...(19): siRNA sense strand
ccauaauauuccuaaugca

SEQ ID NO: 2493515 - RNA, 19 nt, Homo sapiens
  misc_RNA (1)...(19): siRNA sense strand
gaugaauguaagcugggua

SEQ ID NO: 2493516 - RNA, 19 nt, Homo sapiens
  misc_RNA (1)...(19): siRNA sense strand
ccacauaugccaugggcgu

SEQ ID NO: 2493517 - RNA, 19 nt, Homo sapiens
  misc_RNA (1)...(19): siRNA sense strand
ccugaauggcuguucgaga

SEQ ID NO: 2493518 - RNA, 19 nt, Homo sapiens
  misc_RNA (1)...(19): siRNA sense strand
gccacaaccggcugagcaa

SEQ ID NO: 2493519 - RNA, 19 nt, Homo sapiens
  misc_RNA (1)...(19): siRNA sense strand
gggaaaaggugcagugacc

SEQ ID NO: 2493520 - RNA, 19 nt, Homo sapiens
  misc_RNA (1)...(19): siRNA sense strand
aggaaaucuuggugcacua

SEQ ID NO: 2493521 - RNA, 19 nt, Homo sapiens
  misc_RNA (1)...(19): siRNA sense strand
cgacagagcaucagccaca

SEQ ID NO: 2493522 - RNA, 19 nt, Homo sapiens
  misc_RNA (1)...(19): siRNA sense strand
ucaaauauguggaagagga

SEQ ID NO: 2493523 - RNA, 19 nt, Homo sapiens
  misc_RNA (1)...(19): siRNA sense strand
uggaacggguccuggaaau

SEQ ID NO: 2493524 - RNA, 19 nt, Homo sapiens
  misc_RNA (1)...(19): siRNA sense strand
ggaucgaauagcagcagaa

SEQ ID NO: 2493525 - RNA, 19 nt, Homo sapiens
  misc_RNA (1)...(19): siRNA sense strand
ugguauacgcccugcuuua

SEQ ID NO: 2493526 - RNA, 19 nt, Homo sapiens
  misc_RNA (1)...(19): siRNA sense strand
acuaaaacuuucagcagaa

SEQ ID NO: 2493527 - RNA, 19 nt, Homo sapiens
  misc_RNA (1)...(19): siRNA sense strand
cugcaggucauuaguuaaa

SEQ ID NO: 2493528 - RNA, 19 nt, Homo sapiens
  misc_RNA (1)...(19): siRNA sense strand
cagcagaaugucagaacca

SEQ ID NO: 2493529 - RNA, 19 nt, Homo sapiens
  misc_RNA (1)...(19): siRNA sense strand
agauuaugcacaagaccua

SEQ ID NO: 2493530 - RNA, 19 nt, Homo sapiens
  misc_RNA (1)...(19): siRNA sense strand
ccuggaaaucauuaagcaa

SEQ ID NO: 2493531 - RNA, 19 nt, Homo sapiens
  misc_RNA (1)...(19): siRNA sense strand
ugucauugaagaagugauu

SEQ ID NO: 2493532 - RNA, 19 nt, Homo sapiens
  misc_RNA (1)...(19): siRNA sense strand
uagcaaauaugucggcaca

SEQ ID NO: 2493533 - RNA, 19 nt, Homo sapiens
  misc_RNA (1)...(19): siRNA sense strand
agaugucagaggaggaauu

SEQ ID NO: 2493534 - RNA, 19 nt, Homo sapiens
  misc_RNA (1)...(19): siRNA sense strand
ccauuauguccuucaagaa

SEQ ID NO: 2493535 - RNA, 19 nt, Homo sapiens
  misc_RNA (1)...(19): siRNA sense strand
gcagaaugucagaaccaca

SEQ ID NO: 2493536 - RNA, 19 nt, Homo sapiens
  misc_RNA (1)...(19): siRNA sense strand
ugucagaggaggaauuaca

SEQ ID NO: 2493537 - RNA, 19 nt, Homo sapiens
  misc_RNA (1)...(19): siRNA sense strand
uggacuugcaucaggagua

SEQ ID NO: 2493538 - RNA, 19 nt, Homo sapiens
  misc_RNA (1)...(19): siRNA sense strand
auccauucaugaagugaua

SEQ ID NO: 2493539 - RNA, 19 nt, Homo sapiens
  misc_RNA (1)...(19): siRNA sense strand
gcuuuauggacuugcauca

SEQ ID NO: 2493540 - RNA, 19 nt, Homo sapiens
  misc_RNA (1)...(19): siRNA sense strand
aggagcagcccgaggaguu

SEQ ID NO: 2493541 - RNA, 19 nt, Homo sapiens
  misc_RNA (1)...(19): siRNA sense strand
acgcgaucucuuugaacaa

SEQ ID NO: 2493542 - RNA, 19 nt, Homo sapiens
  misc_RNA (1)...(19): siRNA sense strand
guugaaacucuuggaggaa

SEQ ID NO: 2493543 - RNA, 19 nt, Homo sapiens
  misc_RNA (1)...(19): siRNA sense strand
gugcacuaauuaaggucuu

SEQ ID NO: 2493544 - RNA, 19 nt, Homo sapiens
  misc_RNA (1)...(19): siRNA sense strand
guagaagcuauaucaacaa

SEQ ID NO: 2493545 - RNA, 19 nt, Homo sapiens
  misc_RNA (1)...(19): siRNA sense strand
gcucgcacagauauggaaa

SEQ ID NO: 2493546 - RNA, 19 nt, Homo sapiens
  misc_RNA (1)...(19): siRNA sense strand
uggaagaggagcagcccga

SEQ ID NO: 2493547 - RNA, 19 nt, Homo sapiens
  misc_RNA (1)...(19): siRNA sense strand
cuuccuuucuagaaccaaa

SEQ ID NO: 2493548 - RNA, 19 nt, Homo sapiens
  misc_RNA (1)...(19): siRNA sense strand
ucuguaucauguugaagaa

SEQ ID NO: 2493549 - RNA, 19 nt, Homo sapiens
  misc_RNA (1)...(19): siRNA sense strand
agaaggaggggaagggaaa

SEQ ID NO: 2493550 - RNA, 19 nt, Homo sapiens
  misc_RNA (1)...(19): siRNA sense strand
agaagagagaagaugauca

SEQ ID NO: 2493551 - RNA, 19 nt, Homo sapiens
  misc_RNA (1)...(19): siRNA sense strand
aggaagaagauauagacca

SEQ ID NO: 2493552 - RNA, 19 nt, Homo sapiens
  misc_RNA (1)...(19): siRNA sense strand
cugagauucaagugccuaa

SEQ ID NO: 2493553 - RNA, 19 nt, Homo sapiens
  misc_RNA (1)...(19): siRNA sense strand
cagaaggaggggaagggaa

SEQ ID NO: 2493554 - RNA, 19 nt, Homo sapiens
  misc_RNA (1)...(19): siRNA sense strand
ugccaaaaucagagcaauu

SEQ ID NO: 2493555 - RNA, 19 nt, Homo sapiens
  misc_RNA (1)...(19): siRNA sense strand
ucagaagagagaagaugau

SEQ ID NO: 2493556 - RNA, 19 nt, Homo sapiens
  misc_RNA (1)...(19): siRNA sense strand
gggaagauucugccaaaau

SEQ ID NO: 2493557 - RNA, 19 nt, Homo sapiens
  misc_RNA (1)...(19): siRNA sense strand
gagagaagaugaucagggu

SEQ ID NO: 2493558 - RNA, 19 nt, Homo sapiens
  misc_RNA (1)...(19): siRNA sense strand
aggggaagauucugccaaa

SEQ ID NO: 2493559 - RNA, 19 nt, Homo sapiens
  misc_RNA (1)...(19): siRNA sense strand
agaucaacauauaggccua

SEQ ID NO: 2493560 - RNA, 19 nt, Homo sapiens
  misc_RNA (1)...(19): siRNA sense strand
agaaggaggugacaggcaa

SEQ ID NO: 2493561 - RNA, 19 nt, Homo sapiens
  misc_RNA (1)...(19): siRNA sense strand
aggagagagaagaagauca

SEQ ID NO: 2493562 - RNA, 19 nt, Homo sapiens
  misc_RNA (1)...(19): siRNA sense strand
uggucaggagagagaagaa

SEQ ID NO: 2493563 - RNA, 19 nt, Homo sapiens
  misc_RNA (1)...(19): siRNA sense strand
gagaagaagaucagggugc

SEQ ID NO: 2493564 - RNA, 19 nt, Homo sapiens
  misc_RNA (1)...(19): siRNA sense strand
gggaagauucugccaaaau

SEQ ID NO: 2493565 - RNA, 19 nt, Homo sapiens
  misc_RNA (1)...(19): siRNA sense strand
aggggaagauucugccaaa

SEQ ID NO: 2493566 - RNA, 19 nt, Homo sapiens
  misc_RNA (1)...(19): siRNA sense strand
agaucaacauauaggccua

SEQ ID NO: 2493567 - RNA, 19 nt, Homo sapiens
  misc_RNA (1)...(19): siRNA sense strand
agaaggaggugacaggcaa

SEQ ID NO: 2493568 - RNA, 19 nt, Homo sapiens
  misc_RNA (1)...(19): siRNA sense strand
aggagagagaagaagauca

SEQ ID NO: 2493569 - RNA, 19 nt, Homo sapiens
  misc_RNA (1)...(19): siRNA sense strand
uggucaggagagagaagaa

SEQ ID NO: 2493570 - RNA, 19 nt, Homo sapiens
  misc_RNA (1)...(19): siRNA sense strand
gagaagaagaucagggugc

SEQ ID NO: 2493571 - RNA, 19 nt, Homo sapiens
  misc_RNA (1)...(19): siRNA sense strand
gggaagauucugccaaaau

SEQ ID NO: 2493572 - RNA, 19 nt, Homo sapiens
  misc_RNA (1)...(19): siRNA sense strand
aggggaagauucugccaaa

SEQ ID NO: 2493573 - RNA, 19 nt, Homo sapiens
  misc_RNA (1)...(19): siRNA sense strand
gcaggaaggcaaaggccaa

SEQ ID NO: 2493574 - RNA, 19 nt, Homo sapiens
  misc_RNA (1)...(19): siRNA sense strand
aaaagaaggugguggccaa

SEQ ID NO: 2493575 - RNA, 19 nt, Homo sapiens
  misc_RNA (1)...(19): siRNA sense strand
gggcucagcaggaaggcaa

SEQ ID NO: 2493576 - RNA, 19 nt, Homo sapiens
  misc_RNA (1)...(19): siRNA sense strand
ccacagagaaggcucgcaa

SEQ ID NO: 2493577 - RNA, 19 nt, Homo sapiens
  misc_RNA (1)...(19): siRNA sense strand
aaggagaugcugaggccua

SEQ ID NO: 2493578 - RNA, 19 nt, Homo sapiens
  misc_RNA (1)...(19): siRNA sense strand
gcuucaaauuaguucccaa

SEQ ID NO: 2493579 - RNA, 19 nt, Homo sapiens
  misc_RNA (1)...(19): siRNA sense strand
caagugaggccaaggagga

SEQ ID NO: 2493580 - RNA, 19 nt, Homo sapiens
  misc_RNA (1)...(19): siRNA sense strand
augcugaggccuacaggaa

SEQ ID NO: 2493581 - RNA, 19 nt, Homo sapiens
  misc_RNA (1)...(19): siRNA sense strand
ccaacgugggcaaggugaa

SEQ ID NO: 2493582 - RNA, 19 nt, Homo sapiens
  misc_RNA (1)...(19): siRNA sense strand
cagcaaaggugcagaagcc

SEQ ID NO: 2493583 - RNA, 19 nt, Homo sapiens
  misc_RNA (1)...(19): siRNA sense strand
gccaaaggcagcaggagca

SEQ ID NO: 2493584 - RNA, 19 nt, Homo sapiens
  misc_RNA (1)...(19): siRNA sense strand
aauuaguucccaagcacaa

SEQ ID NO: 2493585 - RNA, 19 nt, Homo sapiens
  misc_RNA (1)...(19): siRNA sense strand
aggcaaaggccaaaggcag

SEQ ID NO: 2493586 - RNA, 19 nt, Homo sapiens
  misc_RNA (1)...(19): siRNA sense strand
gcgcauuggugguggugga

SEQ ID NO: 2493587 - RNA, 19 nt, Homo sapiens
  misc_RNA (1)...(19): siRNA sense strand
aagccaauccagagaacaa

SEQ ID NO: 2493588 - RNA, 19 nt, Homo sapiens
  misc_RNA (1)...(19): siRNA sense strand
aagaaagaggagacagcaa

SEQ ID NO: 2493589 - RNA, 19 nt, Homo sapiens
  misc_RNA (1)...(19): siRNA sense strand
uggacaacuuccuggacaa

SEQ ID NO: 2493590 - RNA, 19 nt, Homo sapiens
  misc_RNA (1)...(19): siRNA sense strand
ugaaggaccuggaggagga

SEQ ID NO: 2493591 - RNA, 19 nt, Homo sapiens
  misc_RNA (1)...(19): siRNA sense strand
acaucaaacuggacagcga

SEQ ID NO: 2493592 - RNA, 19 nt, Homo sapiens
  misc_RNA (1)...(19): siRNA sense strand
gcgcacugugugaggagaa

SEQ ID NO: 2493593 - RNA, 19 nt, Homo sapiens
  misc_RNA (1)...(19): siRNA sense strand
ugauagagaaacuggacau

SEQ ID NO: 2493594 - RNA, 19 nt, Homo sapiens
  misc_RNA (1)...(19): siRNA sense strand
ccgagauguauguggccaa

SEQ ID NO: 2493595 - RNA, 19 nt, Homo sapiens
  misc_RNA (1)...(19): siRNA sense strand
agcaaaacugauagagaaa

SEQ ID NO: 2493596 - RNA, 19 nt, Homo sapiens
  misc_RNA (1)...(19): siRNA sense strand
acagcgaggacaaggacaa

SEQ ID NO: 2493597 - RNA, 19 nt, Homo sapiens
  misc_RNA (1)...(19): siRNA sense strand
ggaugugccuugugggaac

SEQ ID NO: 2493598 - RNA, 19 nt, Homo sapiens
  misc_RNA (1)...(19): siRNA sense strand
ccgagaaguacgaguggga

SEQ ID NO: 2493599 - RNA, 19 nt, Homo sapiens
  misc_RNA (1)...(19): siRNA sense strand
acaaggacaaagaaggcaa

SEQ ID NO: 2493600 - RNA, 19 nt, Homo sapiens
  misc_RNA (1)...(19): siRNA sense strand
acaacaugcgggugaugaa

SEQ ID NO: 2493601 - RNA, 19 nt, Homo sapiens
  misc_RNA (1)...(19): siRNA sense strand
uguuuguggucaaggccua

SEQ ID NO: 2493602 - RNA, 19 nt, Homo sapiens
  misc_RNA (1)...(19): siRNA sense strand
ccuucgagcacgcgcacaa

SEQ ID NO: 2493603 - RNA, 19 nt, Homo sapiens
  misc_RNA (1)...(19): siRNA sense strand
gugcaguaccucaacgaga

SEQ ID NO: 2493604 - RNA, 19 nt, Homo sapiens
  misc_RNA (1)...(19): siRNA sense strand
gggaagaagcugccacgca

SEQ ID NO: 2493605 - RNA, 19 nt, Homo sapiens
  misc_RNA (1)...(19): siRNA sense strand
cggcaaguucagcaaguca

SEQ ID NO: 2493606 - RNA, 19 nt, Homo sapiens
  misc_RNA (1)...(19): siRNA sense strand
caaaacugauagagaaacu

SEQ ID NO: 2493607 - RNA, 19 nt, Homo sapiens
  misc_RNA (1)...(19): siRNA sense strand
ucaucgaggagucgggaga

SEQ ID NO: 2493608 - RNA, 19 nt, Homo sapiens
  misc_RNA (1)...(19): siRNA sense strand
cugugacggcccagaagua

SEQ ID NO: 2493609 - RNA, 19 nt, Homo sapiens
  misc_RNA (1)...(19): siRNA sense strand
ccacaaaacaugaggaaau

SEQ ID NO: 2493610 - RNA, 19 nt, Homo sapiens
  misc_RNA (1)...(19): siRNA sense strand
cgauauugacgaagagauu

SEQ ID NO: 2493611 - RNA, 19 nt, Homo sapiens
  misc_RNA (1)...(19): siRNA sense strand
guaaaggagaggagccaaa

SEQ ID NO: 2493612 - RNA, 19 nt, Homo sapiens
  misc_RNA (1)...(19): siRNA sense strand
gggaaaucacugagacaau

SEQ ID NO: 2493613 - RNA, 19 nt, Homo sapiens
  misc_RNA (1)...(19): siRNA sense strand
gguagaagccuuuggcaau

SEQ ID NO: 2493614 - RNA, 19 nt, Homo sapiens
  misc_RNA (1)...(19): siRNA sense strand
cgguauucauucagagcaa

SEQ ID NO: 2493615 - RNA, 19 nt, Homo sapiens
  misc_RNA (1)...(19): siRNA sense strand
agaaggaggaggagagaga

SEQ ID NO: 2493616 - RNA, 19 nt, Homo sapiens
  misc_RNA (1)...(19): siRNA sense strand
gaauacagucucagagcaa

SEQ ID NO: 2493617 - RNA, 19 nt, Homo sapiens
  misc_RNA (1)...(19): siRNA sense strand
cugaauaucuccuggaaaa

SEQ ID NO: 2493618 - RNA, 19 nt, Homo sapiens
  misc_RNA (1)...(19): siRNA sense strand
acaucaagaagaaggauaa

SEQ ID NO: 2493619 - RNA, 19 nt, Homo sapiens
  misc_RNA (1)...(19): siRNA sense strand
uguaugaggaagagguuaa

SEQ ID NO: 2493620 - RNA, 19 nt, Homo sapiens
  misc_RNA (1)...(19): siRNA sense strand
cgaagagauugaagcagaa

SEQ ID NO: 2493621 - RNA, 19 nt, Homo sapiens
  misc_RNA (1)...(19): siRNA sense strand
gaauaauguguaugaggaa

SEQ ID NO: 2493622 - RNA, 19 nt, Homo sapiens
  misc_RNA (1)...(19): siRNA sense strand
aggauaaaguaaauggaga

SEQ ID NO: 2493623 - RNA, 19 nt, Homo sapiens
  misc_RNA (1)...(19): siRNA sense strand
gcaaaggaacuuaugggaa

SEQ ID NO: 2493624 - RNA, 19 nt, Homo sapiens
  misc_RNA (1)...(19): siRNA sense strand
acgaagagauugaagcaga

SEQ ID NO: 2493625 - RNA, 19 nt, Homo sapiens
  misc_RNA (1)...(19): siRNA sense strand
agcaagaauucgaagacua

SEQ ID NO: 2493626 - RNA, 19 nt, Homo sapiens
  misc_RNA (1)...(19): siRNA sense strand
gaggaauugugaagaguca

SEQ ID NO: 2493627 - RNA, 19 nt, Homo sapiens
  misc_RNA (1)...(19): siRNA sense strand
aacaaagacucgaaagcaa

SEQ ID NO: 2493628 - RNA, 19 nt, Homo sapiens
  misc_RNA (1)...(19): siRNA sense strand
agcaagaacuccagaauca

SEQ ID NO: 2493629 - RNA, 19 nt, Homo sapiens
  misc_RNA (1)...(19): siRNA sense strand
ggaauugugaagagucaaa

SEQ ID NO: 2493630 - RNA, 19 nt, Homo sapiens
  misc_RNA (1)...(19): siRNA sense strand
acacuuagccaaaggucaa

SEQ ID NO: 2493631 - RNA, 19 nt, Homo sapiens
  misc_RNA (1)...(19): siRNA sense strand
acagagaugugaaaggcaa

SEQ ID NO: 2493632 - RNA, 19 nt, Homo sapiens
  misc_RNA (1)...(19): siRNA sense strand
gguacacagaggagaggaa

SEQ ID NO: 2493633 - RNA, 19 nt, Homo sapiens
  misc_RNA (1)...(19): siRNA sense strand
ggucacuagaggagaaaca

SEQ ID NO: 2493634 - RNA, 19 nt, Homo sapiens
  misc_RNA (1)...(19): siRNA sense strand
gcuccaaauaauaaaggaa

SEQ ID NO: 2493635 - RNA, 19 nt, Homo sapiens
  misc_RNA (1)...(19): siRNA sense strand
ucaagaagaaggauaacaa

SEQ ID NO: 2493636 - RNA, 19 nt, Homo sapiens
  misc_RNA (1)...(19): siRNA sense strand
cagcagaauucaaugacuu

SEQ ID NO: 2493637 - RNA, 19 nt, Homo sapiens
  misc_RNA (1)...(19): siRNA sense strand
gagaaaguggugcuggaaa

SEQ ID NO: 2493638 - RNA, 19 nt, Homo sapiens
  misc_RNA (1)...(19): siRNA sense strand
caggagaaaaggaaagaaa

SEQ ID NO: 2493639 - RNA, 19 nt, Homo sapiens
  misc_RNA (1)...(19): siRNA sense strand
ugguagaagccuuuggcaa

SEQ ID NO: 2493640 - RNA, 19 nt, Homo sapiens
  misc_RNA (1)...(19): siRNA sense strand
guuucaaagucauagguuu

SEQ ID NO: 2493641 - RNA, 19 nt, Homo sapiens
  misc_RNA (1)...(19): siRNA sense strand
gaguaacaacagaguguau

SEQ ID NO: 2493642 - RNA, 19 nt, Homo sapiens
  misc_RNA (1)...(19): siRNA sense strand
ccaggaggaagaagauaaa

SEQ ID NO: 2493643 - RNA, 19 nt, Homo sapiens
  misc_RNA (1)...(19): siRNA sense strand
agaagaaggauaacaaaga

SEQ ID NO: 2493644 - RNA, 19 nt, Homo sapiens
  misc_RNA (1)...(19): siRNA sense strand
ggaacauagcccuaguuua

SEQ ID NO: 2493645 - RNA, 19 nt, Homo sapiens
  misc_RNA (1)...(19): siRNA sense strand
gugcuugacuaaagauuau

SEQ ID NO: 2493646 - RNA, 19 nt, Homo sapiens
  misc_RNA (1)...(19): siRNA sense strand
gcaucaaaccaaauaguga

SEQ ID NO: 2493647 - RNA, 19 nt, Homo sapiens
  misc_RNA (1)...(19): siRNA sense strand
ccaaaggaacauagcccua

SEQ ID NO: 2493648 - RNA, 19 nt, Homo sapiens
  misc_RNA (1)...(19): siRNA sense strand
ccaauuaauagacgaguuu

SEQ ID NO: 2493649 - RNA, 19 nt, Homo sapiens
  misc_RNA (1)...(19): siRNA sense strand
caacaguguaauuaggcaa

SEQ ID NO: 2493650 - RNA, 19 nt, Homo sapiens
  misc_RNA (1)...(19): siRNA sense strand
aaggaaagaaagcgcuaua

SEQ ID NO: 2493651 - RNA, 19 nt, Homo sapiens
  misc_RNA (1)...(19): siRNA sense strand
gggaaacaaagaaaagaaa

SEQ ID NO: 2493652 - RNA, 19 nt, Homo sapiens
  misc_RNA (1)...(19): siRNA sense strand
gaagaaacaagcagaaaau

SEQ ID NO: 2493653 - RNA, 19 nt, Homo sapiens
  misc_RNA (1)...(19): siRNA sense strand
ccuuguagggccagaagua

SEQ ID NO: 2493654 - RNA, 19 nt, Homo sapiens
  misc_RNA (1)...(19): siRNA sense strand
cccaggaggaagaagauaa

SEQ ID NO: 2493655 - RNA, 19 nt, Homo sapiens
  misc_RNA (1)...(19): siRNA sense strand
cuaaaaugguggugggcca

SEQ ID NO: 2493656 - RNA, 19 nt, Homo sapiens
  misc_RNA (1)...(19): siRNA sense strand
ucgaaagcaacuucagaaa

SEQ ID NO: 2493657 - RNA, 19 nt, Homo sapiens
  misc_RNA (1)...(19): siRNA sense strand
agagauugaagcagaauau

SEQ ID NO: 2493658 - RNA, 19 nt, Homo sapiens
  misc_RNA (1)...(19): siRNA sense strand
agauauucccugauggauu

SEQ ID NO: 2493659 - RNA, 19 nt, Homo sapiens
  misc_RNA (1)...(19): siRNA sense strand
ccuucugauacaugggaaa

SEQ ID NO: 2493660 - RNA, 19 nt, Homo sapiens
  misc_RNA (1)...(19): siRNA sense strand
cgugaagaaacaagcagaa

SEQ ID NO: 2493661 - RNA, 19 nt, Homo sapiens
  misc_RNA (1)...(19): siRNA sense strand
gagaguaacaacagagugu

SEQ ID NO: 2493662 - RNA, 19 nt, Homo sapiens
  misc_RNA (1)...(19): siRNA sense strand
aagauaaagcagcgguauu

SEQ ID NO: 2493663 - RNA, 19 nt, Homo sapiens
  misc_RNA (1)...(19): siRNA sense strand
gaaccuugcaagagaagau

SEQ ID NO: 2493664 - RNA, 19 nt, Homo sapiens
  misc_RNA (1)...(19): siRNA sense strand
aggaaggccauaucagaaa

SEQ ID NO: 2493665 - RNA, 19 nt, Homo sapiens
  misc_RNA (1)...(19): siRNA sense strand
gcucugcaguggaggauca

SEQ ID NO: 2493666 - RNA, 19 nt, Homo sapiens
  misc_RNA (1)...(19): siRNA sense strand
gugaagaaacaagcagaaa

SEQ ID NO: 2493667 - RNA, 19 nt, Homo sapiens
  misc_RNA (1)...(19): siRNA sense strand
ggauaaaguaaauggagac

SEQ ID NO: 2493668 - RNA, 19 nt, Homo sapiens
  misc_RNA (1)...(19): siRNA sense strand
gguuauggcuaccggguca

SEQ ID NO: 2493669 - RNA, 19 nt, Homo sapiens
  misc_RNA (1)...(19): siRNA sense strand
agacugaagaggaagaaaa

SEQ ID NO: 2493670 - RNA, 19 nt, Homo sapiens
  misc_RNA (1)...(19): siRNA sense strand
aagagcaaacagaaagaaa

SEQ ID NO: 2493671 - RNA, 19 nt, Homo sapiens
  misc_RNA (1)...(19): siRNA sense strand
cugaagaggaagaaaagaa

SEQ ID NO: 2493672 - RNA, 19 nt, Homo sapiens
  misc_RNA (1)...(19): siRNA sense strand
acgugaggaaagacggaaa

SEQ ID NO: 2493673 - RNA, 19 nt, Homo sapiens
  misc_RNA (1)...(19): siRNA sense strand
aagaaauggugauguggca

SEQ ID NO: 2493674 - RNA, 19 nt, Homo sapiens
  misc_RNA (1)...(19): siRNA sense strand
gguucuacgaaguugacua

SEQ ID NO: 2493675 - RNA, 19 nt, Homo sapiens
  misc_RNA (1)...(19): siRNA sense strand
cguugaaccagacggauau

SEQ ID NO: 2493676 - RNA, 19 nt, Homo sapiens
  misc_RNA (1)...(19): siRNA sense strand
aaacagaaagaaaugguga

SEQ ID NO: 2493677 - RNA, 19 nt, Homo sapiens
  misc_RNA (1)...(19): siRNA sense strand
cuaacguccuggagggcga

SEQ ID NO: 2493678 - RNA, 19 nt, Homo sapiens
  misc_RNA (1)...(19): siRNA sense strand
cggauaucaacguagggua

SEQ ID NO: 2493679 - RNA, 19 nt, Homo sapiens
  misc_RNA (1)...(19): siRNA sense strand
cucgaagagcaaacagaaa

SEQ ID NO: 2493680 - RNA, 19 nt, Homo sapiens
  misc_RNA (1)...(19): siRNA sense strand
aaagaaccucgaagagcaa

SEQ ID NO: 2493681 - RNA, 19 nt, Homo sapiens
  misc_RNA (1)...(19): siRNA sense strand
ccagcugcccaaagaggaa

SEQ ID NO: 2493682 - RNA, 19 nt, Homo sapiens
  misc_RNA (1)...(19): siRNA sense strand
ucgaaagcccaguggccau

SEQ ID NO: 2493683 - RNA, 19 nt, Homo sapiens
  misc_RNA (1)...(19): siRNA sense strand
gcaauguucaucacggcaa

SEQ ID NO: 2493684 - RNA, 19 nt, Homo sapiens
  misc_RNA (1)...(19): siRNA sense strand
cccaaagaggaacuggaaa

SEQ ID NO: 2493685 - RNA, 19 nt, Homo sapiens
  misc_RNA (1)...(19): siRNA sense strand
ccuagaaggaaugguggaa

SEQ ID NO: 2493686 - RNA, 19 nt, Homo sapiens
  misc_RNA (1)...(19): siRNA sense strand
cggaaagugcaauguucau

SEQ ID NO: 2493687 - RNA, 19 nt, Homo sapiens
  misc_RNA (1)...(19): siRNA sense strand
ccaaagucguaguggccca

SEQ ID NO: 2493688 - RNA, 19 nt, Homo sapiens
  misc_RNA (1)...(19): siRNA sense strand
gagaacgaggugugcguga

SEQ ID NO: 2493689 - RNA, 19 nt, Homo sapiens
  misc_RNA (1)...(19): siRNA sense strand
ccacgugcucagagaacga

SEQ ID NO: 2493690 - RNA, 19 nt, Homo sapiens
  misc_RNA (1)...(19): siRNA sense strand
aaacggacgcccagcgaca

SEQ ID NO: 2493691 - RNA, 19 nt, Homo sapiens
  misc_RNA (1)...(19): siRNA sense strand
gugacaggccaguguacuu

SEQ ID NO: 2493692 - RNA, 19 nt, Homo sapiens
  misc_RNA (1)...(19): siRNA sense strand
gcucagagaacgaggugug

SEQ ID NO: 2493693 - RNA, 19 nt, Homo sapiens
  misc_RNA (1)...(19): siRNA sense strand
uguccuggauccacggcaa

SEQ ID NO: 2493694 - RNA, 19 nt, Homo sapiens
  misc_RNA (1)...(19): siRNA sense strand
ccaaagucguaguggccca

SEQ ID NO: 2493695 - RNA, 19 nt, Homo sapiens
  misc_RNA (1)...(19): siRNA sense strand
gagaacgaggugugcguga

SEQ ID NO: 2493696 - RNA, 19 nt, Homo sapiens
  misc_RNA (1)...(19): siRNA sense strand
ccacgugcucagagaacga

SEQ ID NO: 2493697 - RNA, 19 nt, Homo sapiens
  misc_RNA (1)...(19): siRNA sense strand
aaacggacgcccagcgaca

SEQ ID NO: 2493698 - RNA, 19 nt, Homo sapiens
  misc_RNA (1)...(19): siRNA sense strand
gugacaggccaguguacuu

SEQ ID NO: 2493699 - RNA, 19 nt, Homo sapiens
  misc_RNA (1)...(19): siRNA sense strand
gcucagagaacgaggugug

SEQ ID NO: 2493700 - RNA, 19 nt, Homo sapiens
  misc_RNA (1)...(19): siRNA sense strand
uguccuggauccacggcaa

SEQ ID NO: 2493701 - RNA, 19 nt, Homo sapiens
  misc_RNA (1)...(19): siRNA sense strand
caaaaugaguccaggccaa

SEQ ID NO: 2493702 - RNA, 19 nt, Homo sapiens
  misc_RNA (1)...(19): siRNA sense strand
acauggagucugagcccaa

SEQ ID NO: 2493703 - RNA, 19 nt, Homo sapiens
  misc_RNA (1)...(19): siRNA sense strand
gaguccaggccaagcaaau

SEQ ID NO: 2493704 - RNA, 19 nt, Homo sapiens
  misc_RNA (1)...(19): siRNA sense strand
cagacaaaacacaguaaau

SEQ ID NO: 2493705 - RNA, 19 nt, Homo sapiens
  misc_RNA (1)...(19): siRNA sense strand
gaggaaaaguauagagaaa

SEQ ID NO: 2493706 - RNA, 19 nt, Homo sapiens
  misc_RNA (1)...(19): siRNA sense strand
caacagaaucagagcuaaa

SEQ ID NO: 2493707 - RNA, 19 nt, Homo sapiens
  misc_RNA (1)...(19): siRNA sense strand
gcuacaaggaauagacuua

SEQ ID NO: 2493708 - RNA, 19 nt, Homo sapiens
  misc_RNA (1)...(19): siRNA sense strand
acacaaggucagaaaguaa

SEQ ID NO: 2493709 - RNA, 19 nt, Homo sapiens
  misc_RNA (1)...(19): siRNA sense strand
caacaaaucuugaccgaga

SEQ ID NO: 2493710 - RNA, 19 nt, Homo sapiens
  misc_RNA (1)...(19): siRNA sense strand
ggaaagacgacuauaagaa

SEQ ID NO: 2493711 - RNA, 19 nt, Homo sapiens
  misc_RNA (1)...(19): siRNA sense strand
cgaaagaagcaaauggaga

SEQ ID NO: 2493712 - RNA, 19 nt, Homo sapiens
  misc_RNA (1)...(19): siRNA sense strand
aagcaaauggagaaagaua

SEQ ID NO: 2493713 - RNA, 19 nt, Homo sapiens
  misc_RNA (1)...(19): siRNA sense strand
aggagaaacaagagaaaca

SEQ ID NO: 2493714 - RNA, 19 nt, Homo sapiens
  misc_RNA (1)...(19): siRNA sense strand
ugucaaauccuaugagaau

SEQ ID NO: 2493715 - RNA, 19 nt, Homo sapiens
  misc_RNA (1)...(19): siRNA sense strand
gauuugaaggagaaggaaa

SEQ ID NO: 2493716 - RNA, 19 nt, Homo sapiens
  misc_RNA (1)...(19): siRNA sense strand
caauaaugccugaagaaga

SEQ ID NO: 2493717 - RNA, 19 nt, Homo sapiens
  misc_RNA (1)...(19): siRNA sense strand
acacagaagauacaagaaa

SEQ ID NO: 2493718 - RNA, 19 nt, Homo sapiens
  misc_RNA (1)...(19): siRNA sense strand
gugcagaaauugaccgaga

SEQ ID NO: 2493719 - RNA, 19 nt, Homo sapiens
  misc_RNA (1)...(19): siRNA sense strand
gcagaaauugaccgagaaa

SEQ ID NO: 2493720 - RNA, 19 nt, Homo sapiens
  misc_RNA (1)...(19): siRNA sense strand
acaguaagggagaaagaaa

SEQ ID NO: 2493721 - RNA, 19 nt, Homo sapiens
  misc_RNA (1)...(19): siRNA sense strand
agacaggcuuaaagaggaa

SEQ ID NO: 2493722 - RNA, 19 nt, Homo sapiens
  misc_RNA (1)...(19): siRNA sense strand
ccaggagaaacaagagaaa

SEQ ID NO: 2493723 - RNA, 19 nt, Homo sapiens
  misc_RNA (1)...(19): siRNA sense strand
guacaacaaaugagcuaaa

SEQ ID NO: 2493724 - RNA, 19 nt, Homo sapiens
  misc_RNA (1)...(19): siRNA sense strand
ggaagagaacauagacaau

SEQ ID NO: 2493725 - RNA, 19 nt, Homo sapiens
  misc_RNA (1)...(19): siRNA sense strand
cugaagcaauauaaggaaa

SEQ ID NO: 2493726 - RNA, 19 nt, Homo sapiens
  misc_RNA (1)...(19): siRNA sense strand
ugaagaagaaagugccaaa

SEQ ID NO: 2493727 - RNA, 19 nt, Homo sapiens
  misc_RNA (1)...(19): siRNA sense strand
acaaaauagcacaggauaa

SEQ ID NO: 2493728 - RNA, 19 nt, Homo sapiens
  misc_RNA (1)...(19): siRNA sense strand
agacagaggcugaguuaca

SEQ ID NO: 2493729 - RNA, 19 nt, Homo sapiens
  misc_RNA (1)...(19): siRNA sense strand
acuaagugaaugcgagaaa

SEQ ID NO: 2493730 - RNA, 19 nt, Homo sapiens
  misc_RNA (1)...(19): siRNA sense strand
cauagaagaacaagaaaca

SEQ ID NO: 2493731 - RNA, 19 nt, Homo sapiens
  misc_RNA (1)...(19): siRNA sense strand
ggcauuagggcgacagaaa

SEQ ID NO: 2493732 - RNA, 19 nt, Homo sapiens
  misc_RNA (1)...(19): siRNA sense strand
cagguaagcccuuuggaaa

SEQ ID NO: 2493733 - RNA, 19 nt, Homo sapiens
  misc_RNA (1)...(19): siRNA sense strand
gagaacaguaagggagaaa

SEQ ID NO: 2493734 - RNA, 19 nt, Homo sapiens
  misc_RNA (1)...(19): siRNA sense strand
gcgagaaacacaaagaaaa

SEQ ID NO: 2493735 - RNA, 19 nt, Homo sapiens
  misc_RNA (1)...(19): siRNA sense strand
ugaccaagcaauaaugaaa

SEQ ID NO: 2493736 - RNA, 19 nt, Homo sapiens
  misc_RNA (1)...(19): siRNA sense strand
uggaagagaaaauggaaaa

SEQ ID NO: 2493737 - RNA, 19 nt, Homo sapiens
  misc_RNA (1)...(19): siRNA sense strand
ugaacaaggaucuggauau

SEQ ID NO: 2493738 - RNA, 19 nt, Homo sapiens
  misc_RNA (1)...(19): siRNA sense strand
agauaauagugaacuggaa

SEQ ID NO: 2493739 - RNA, 19 nt, Homo sapiens
  misc_RNA (1)...(19): siRNA sense strand
aggaauagacuuagaucga

SEQ ID NO: 2493740 - RNA, 19 nt, Homo sapiens
  misc_RNA (1)...(19): siRNA sense strand
agauaaaggaugcuaaaga

SEQ ID NO: 2493741 - RNA, 19 nt, Homo sapiens
  misc_RNA (1)...(19): siRNA sense strand
aggacaaagauaagcaaau

SEQ ID NO: 2493742 - RNA, 19 nt, Homo sapiens
  misc_RNA (1)...(19): siRNA sense strand
ucaagggacugaugagcaa

SEQ ID NO: 2493743 - RNA, 19 nt, Homo sapiens
  misc_RNA (1)...(19): siRNA sense strand
aggcaaagcauaauugauu

SEQ ID NO: 2493744 - RNA, 19 nt, Homo sapiens
  misc_RNA (1)...(19): siRNA sense strand
agagauaaaggaugcuaaa

SEQ ID NO: 2493745 - RNA, 19 nt, Homo sapiens
  misc_RNA (1)...(19): siRNA sense strand
ccagauaaacucaagucaa

SEQ ID NO: 2493746 - RNA, 19 nt, Homo sapiens
  misc_RNA (1)...(19): siRNA sense strand
uggugaugcugaagggaga

SEQ ID NO: 2493747 - RNA, 19 nt, Homo sapiens
  misc_RNA (1)...(19): siRNA sense strand
uggaagagaacauagacaa

SEQ ID NO: 2493748 - RNA, 19 nt, Homo sapiens
  misc_RNA (1)...(19): siRNA sense strand
agggagaaagaaaggaaau

SEQ ID NO: 2493749 - RNA, 19 nt, Homo sapiens
  misc_RNA (1)...(19): siRNA sense strand
uagugaacuggaagagaaa

SEQ ID NO: 2493750 - RNA, 19 nt, Homo sapiens
  misc_RNA (1)...(19): siRNA sense strand
gggagaaagaaaggaaauu

SEQ ID NO: 2493751 - RNA, 19 nt, Homo sapiens
  misc_RNA (1)...(19): siRNA sense strand
gaugaaugacuuugcagaa

SEQ ID NO: 2493752 - RNA, 19 nt, Homo sapiens
  misc_RNA (1)...(19): siRNA sense strand
ccaaauugaacaaggaacu

SEQ ID NO: 2493753 - RNA, 19 nt, Homo sapiens
  misc_RNA (1)...(19): siRNA sense strand
agaaauugaccgagaaaug

SEQ ID NO: 2493754 - RNA, 19 nt, Homo sapiens
  misc_RNA (1)...(19): siRNA sense strand
agcaaauggagaaagauaa

SEQ ID NO: 2493755 - RNA, 19 nt, Homo sapiens
  misc_RNA (1)...(19): siRNA sense strand
guuaagcaaggcugagaaa

SEQ ID NO: 2493756 - RNA, 19 nt, Homo sapiens
  misc_RNA (1)...(19): siRNA sense strand
aagacaaagcugacaaaga

SEQ ID NO: 2493757 - RNA, 19 nt, Homo sapiens
  misc_RNA (1)...(19): siRNA sense strand
aagacuggcuacauaguaa

SEQ ID NO: 2493758 - RNA, 19 nt, Homo sapiens
  misc_RNA (1)...(19): siRNA sense strand
cccaugaggcaaagcauaa

SEQ ID NO: 2493759 - RNA, 19 nt, Homo sapiens
  misc_RNA (1)...(19): siRNA sense strand
uuacaauuauggagagguu

SEQ ID NO: 2493760 - RNA, 19 nt, Homo sapiens
  misc_RNA (1)...(19): siRNA sense strand
acucaugagacaagauauu

SEQ ID NO: 2493761 - RNA, 19 nt, Homo sapiens
  misc_RNA (1)...(19): siRNA sense strand
cuucaaaggaaauugucaa

SEQ ID NO: 2493762 - RNA, 19 nt, Homo sapiens
  misc_RNA (1)...(19): siRNA sense strand
cugacaaagaugaacaaau

SEQ ID NO: 2493763 - RNA, 19 nt, Homo sapiens
  misc_RNA (1)...(19): siRNA sense strand
gagagauaaaggaugcuaa

SEQ ID NO: 2493764 - RNA, 19 nt, Homo sapiens
  misc_RNA (1)...(19): siRNA sense strand
gaggaaaaguauagagaaa

SEQ ID NO: 2493765 - RNA, 19 nt, Homo sapiens
  misc_RNA (1)...(19): siRNA sense strand
caacagaaucagagcuaaa

SEQ ID NO: 2493766 - RNA, 19 nt, Homo sapiens
  misc_RNA (1)...(19): siRNA sense strand
gcuacaaggaauagacuua

SEQ ID NO: 2493767 - RNA, 19 nt, Homo sapiens
  misc_RNA (1)...(19): siRNA sense strand
acacaaggucagaaaguaa

SEQ ID NO: 2493768 - RNA, 19 nt, Homo sapiens
  misc_RNA (1)...(19): siRNA sense strand
caacaaaucuugaccgaga

SEQ ID NO: 2493769 - RNA, 19 nt, Homo sapiens
  misc_RNA (1)...(19): siRNA sense strand
ggaaagacgacuauaagaa

SEQ ID NO: 2493770 - RNA, 19 nt, Homo sapiens
  misc_RNA (1)...(19): siRNA sense strand
cgaaagaagcaaauggaga

SEQ ID NO: 2493771 - RNA, 19 nt, Homo sapiens
  misc_RNA (1)...(19): siRNA sense strand
aagcaaauggagaaagaua

SEQ ID NO: 2493772 - RNA, 19 nt, Homo sapiens
  misc_RNA (1)...(19): siRNA sense strand
aggagaaacaagagaaaca

SEQ ID NO: 2493773 - RNA, 19 nt, Homo sapiens
  misc_RNA (1)...(19): siRNA sense strand
ugucaaauccuaugagaau

SEQ ID NO: 2493774 - RNA, 19 nt, Homo sapiens
  misc_RNA (1)...(19): siRNA sense strand
gauuugaaggagaaggaaa

SEQ ID NO: 2493775 - RNA, 19 nt, Homo sapiens
  misc_RNA (1)...(19): siRNA sense strand
caauaaugccugaagaaga

SEQ ID NO: 2493776 - RNA, 19 nt, Homo sapiens
  misc_RNA (1)...(19): siRNA sense strand
acacagaagauacaagaaa

SEQ ID NO: 2493777 - RNA, 19 nt, Homo sapiens
  misc_RNA (1)...(19): siRNA sense strand
acaguaagggagaaagaaa

SEQ ID NO: 2493778 - RNA, 19 nt, Homo sapiens
  misc_RNA (1)...(19): siRNA sense strand
agacaggcuuaaagaggaa

SEQ ID NO: 2493779 - RNA, 19 nt, Homo sapiens
  misc_RNA (1)...(19): siRNA sense strand
ccaggagaaacaagagaaa

SEQ ID NO: 2493780 - RNA, 19 nt, Homo sapiens
  misc_RNA (1)...(19): siRNA sense strand
guacaacaaaugagcuaaa

SEQ ID NO: 2493781 - RNA, 19 nt, Homo sapiens
  misc_RNA (1)...(19): siRNA sense strand
ggaagagaacauagacaau

SEQ ID NO: 2493782 - RNA, 19 nt, Homo sapiens
  misc_RNA (1)...(19): siRNA sense strand
cugaagcaauauaaggaaa

SEQ ID NO: 2493783 - RNA, 19 nt, Homo sapiens
  misc_RNA (1)...(19): siRNA sense strand
ugaagaagaaagugccaaa

SEQ ID NO: 2493784 - RNA, 19 nt, Homo sapiens
  misc_RNA (1)...(19): siRNA sense strand
acaaaauagcacaggauaa

SEQ ID NO: 2493785 - RNA, 19 nt, Homo sapiens
  misc_RNA (1)...(19): siRNA sense strand
agacagaggcugaguuaca

SEQ ID NO: 2493786 - RNA, 19 nt, Homo sapiens
  misc_RNA (1)...(19): siRNA sense strand
acuaagugaaugcgagaaa

SEQ ID NO: 2493787 - RNA, 19 nt, Homo sapiens
  misc_RNA (1)...(19): siRNA sense strand
cauagaagaacaagaaaca

SEQ ID NO: 2493788 - RNA, 19 nt, Homo sapiens
  misc_RNA (1)...(19): siRNA sense strand
ggcauuagggcgacagaaa

SEQ ID NO: 2493789 - RNA, 19 nt, Homo sapiens
  misc_RNA (1)...(19): siRNA sense strand
cagguaagcccuuuggaaa

SEQ ID NO: 2493790 - RNA, 19 nt, Homo sapiens
  misc_RNA (1)...(19): siRNA sense strand
gagaacaguaagggagaaa

SEQ ID NO: 2493791 - RNA, 19 nt, Homo sapiens
  misc_RNA (1)...(19): siRNA sense strand
gcgagaaacacaaagaaaa

SEQ ID NO: 2493792 - RNA, 19 nt, Homo sapiens
  misc_RNA (1)...(19): siRNA sense strand
ugaccaagcaauaaugaaa

SEQ ID NO: 2493793 - RNA, 19 nt, Homo sapiens
  misc_RNA (1)...(19): siRNA sense strand
uggaagagaaaauggaaaa

SEQ ID NO: 2493794 - RNA, 19 nt, Homo sapiens
  misc_RNA (1)...(19): siRNA sense strand
ugaacaaggaucuggauau

SEQ ID NO: 2493795 - RNA, 19 nt, Homo sapiens
  misc_RNA (1)...(19): siRNA sense strand
agauaauagugaacuggaa

SEQ ID NO: 2493796 - RNA, 19 nt, Homo sapiens
  misc_RNA (1)...(19): siRNA sense strand
aggaauagacuuagaucga

SEQ ID NO: 2493797 - RNA, 19 nt, Homo sapiens
  misc_RNA (1)...(19): siRNA sense strand
agauaaaggaugcuaaaga

SEQ ID NO: 2493798 - RNA, 19 nt, Homo sapiens
  misc_RNA (1)...(19): siRNA sense strand
ucaagggacugaugagcaa

SEQ ID NO: 2493799 - RNA, 19 nt, Homo sapiens
  misc_RNA (1)...(19): siRNA sense strand
aggcaaagcauaauugauu

SEQ ID NO: 2493800 - RNA, 19 nt, Homo sapiens
  misc_RNA (1)...(19): siRNA sense strand
agagauaaaggaugcuaaa

SEQ ID NO: 2493801 - RNA, 19 nt, Homo sapiens
  misc_RNA (1)...(19): siRNA sense strand
ccagauaaacucaagucaa

SEQ ID NO: 2493802 - RNA, 19 nt, Homo sapiens
  misc_RNA (1)...(19): siRNA sense strand
uggugaugcugaagggaga

SEQ ID NO: 2493803 - RNA, 19 nt, Homo sapiens
  misc_RNA (1)...(19): siRNA sense strand
uggaagagaacauagacaa

SEQ ID NO: 2493804 - RNA, 19 nt, Homo sapiens
  misc_RNA (1)...(19): siRNA sense strand
agggagaaagaaaggaaau

SEQ ID NO: 2493805 - RNA, 19 nt, Homo sapiens
  misc_RNA (1)...(19): siRNA sense strand
uagugaacuggaagagaaa

SEQ ID NO: 2493806 - RNA, 19 nt, Homo sapiens
  misc_RNA (1)...(19): siRNA sense strand
gggagaaagaaaggaaauu

SEQ ID NO: 2493807 - RNA, 19 nt, Homo sapiens
  misc_RNA (1)...(19): siRNA sense strand
gaugaaugacuuugcagaa

SEQ ID NO: 2493808 - RNA, 19 nt, Homo sapiens
  misc_RNA (1)...(19): siRNA sense strand
ccaaauugaacaaggaacu

SEQ ID NO: 2493809 - RNA, 19 nt, Homo sapiens
  misc_RNA (1)...(19): siRNA sense strand
agcaaauggagaaagauaa

SEQ ID NO: 2493810 - RNA, 19 nt, Homo sapiens
  misc_RNA (1)...(19): siRNA sense strand
guuaagcaaggcugagaaa

SEQ ID NO: 2493811 - RNA, 19 nt, Homo sapiens
  misc_RNA (1)...(19): siRNA sense strand
aagacaaagcugacaaaga

SEQ ID NO: 2493812 - RNA, 19 nt, Homo sapiens
  misc_RNA (1)...(19): siRNA sense strand
aagacuggcuacauaguaa

SEQ ID NO: 2493813 - RNA, 19 nt, Homo sapiens
  misc_RNA (1)...(19): siRNA sense strand
cccaugaggcaaagcauaa

SEQ ID NO: 2493814 - RNA, 19 nt, Homo sapiens
  misc_RNA (1)...(19): siRNA sense strand
uuacaauuauggagagguu

SEQ ID NO: 2493815 - RNA, 19 nt, Homo sapiens
  misc_RNA (1)...(19): siRNA sense strand
acucaugagacaagauauu

SEQ ID NO: 2493816 - RNA, 19 nt, Homo sapiens
  misc_RNA (1)...(19): siRNA sense strand
cuucaaaggaaauugucaa

SEQ ID NO: 2493817 - RNA, 19 nt, Homo sapiens
  misc_RNA (1)...(19): siRNA sense strand
cugacaaagaugaacaaau

SEQ ID NO: 2493818 - RNA, 19 nt, Homo sapiens
  misc_RNA (1)...(19): siRNA sense strand
gagagauaaaggaugcuaa

SEQ ID NO: 2493819 - RNA, 19 nt, Homo sapiens
  misc_RNA (1)...(19): siRNA sense strand
agaaguuggaagagaacau

SEQ ID NO: 2493820 - RNA, 19 nt, Homo sapiens
  misc_RNA (1)...(19): siRNA sense strand
uuuccaaggcugugcuaaa

SEQ ID NO: 2493821 - RNA, 19 nt, Homo sapiens
  misc_RNA (1)...(19): siRNA sense strand
auagugaacuggaagagaa

SEQ ID NO: 2493822 - RNA, 19 nt, Homo sapiens
  misc_RNA (1)...(19): siRNA sense strand
cagagaacaguaagggaga

SEQ ID NO: 2493823 - RNA, 19 nt, Homo sapiens
  misc_RNA (1)...(19): siRNA sense strand
caaacuugugagagagaga

SEQ ID NO: 2493824 - RNA, 19 nt, Homo sapiens
  misc_RNA (1)...(19): siRNA sense strand
acaagaaggggaagcaaaa

SEQ ID NO: 2493825 - RNA, 19 nt, Homo sapiens
  misc_RNA (1)...(19): siRNA sense strand
ccaaagacaaagcugacaa

SEQ ID NO: 2493826 - RNA, 19 nt, Homo sapiens
  misc_RNA (1)...(19): siRNA sense strand
agaacgacauagaagaaca

SEQ ID NO: 2493827 - RNA, 19 nt, Homo sapiens
  misc_RNA (1)...(19): siRNA sense strand
aaugugagcuggaaggcau

SEQ ID NO: 2493828 - RNA, 19 nt, Homo sapiens
  misc_RNA (1)...(19): siRNA sense strand
ggaagaagcacaugcacgu

SEQ ID NO: 2493829 - RNA, 19 nt, Homo sapiens
  misc_RNA (1)...(19): siRNA sense strand
cgugcacacaggcgagaaa

SEQ ID NO: 2493830 - RNA, 19 nt, Homo sapiens
  misc_RNA (1)...(19): siRNA sense strand
augaauaugaacaugggua

SEQ ID NO: 2493831 - RNA, 19 nt, Homo sapiens
  misc_RNA (1)...(19): siRNA sense strand
cccaagaagagcugcaaca

SEQ ID NO: 2493832 - RNA, 19 nt, Homo sapiens
  misc_RNA (1)...(19): siRNA sense strand
ccgagaugcaggaccguga

SEQ ID NO: 2493833 - RNA, 19 nt, Homo sapiens
  misc_RNA (1)...(19): siRNA sense strand
gagcuaaucugcaagugga

SEQ ID NO: 2493834 - RNA, 19 nt, Homo sapiens
  misc_RNA (1)...(19): siRNA sense strand
ccaacagcagcgacaggaa

SEQ ID NO: 2493835 - RNA, 19 nt, Homo sapiens
  misc_RNA (1)...(19): siRNA sense strand
gcgacaggaagaagcacau

SEQ ID NO: 2493836 - RNA, 19 nt, Homo sapiens
  misc_RNA (1)...(19): siRNA sense strand
ggaagcacaugaaggucca

SEQ ID NO: 2493837 - RNA, 19 nt, Homo sapiens
  misc_RNA (1)...(19): siRNA sense strand
gcucgcagaaugugcucaa

SEQ ID NO: 2493838 - RNA, 19 nt, Homo sapiens
  misc_RNA (1)...(19): siRNA sense strand
aggagaaggccgagggcaa

SEQ ID NO: 2493839 - RNA, 19 nt, Homo sapiens
  misc_RNA (1)...(19): siRNA sense strand
ccgcugaggcagaggagaa

SEQ ID NO: 2493840 - RNA, 19 nt, Homo sapiens
  misc_RNA (1)...(19): siRNA sense strand
aggaagacaaggaggagaa

SEQ ID NO: 2493841 - RNA, 19 nt, Homo sapiens
  misc_RNA (1)...(19): siRNA sense strand
agaagaaagaccagaugaa

SEQ ID NO: 2493842 - RNA, 19 nt, Homo sapiens
  misc_RNA (1)...(19): siRNA sense strand
gcuccaacgagaagggcua

SEQ ID NO: 2493843 - RNA, 19 nt, Homo sapiens
  misc_RNA (1)...(19): siRNA sense strand
guuucgugcuggagggcaa

SEQ ID NO: 2493844 - RNA, 19 nt, Homo sapiens
  misc_RNA (1)...(19): siRNA sense strand
aggaaaagaaggaagacaa

SEQ ID NO: 2493845 - RNA, 19 nt, Homo sapiens
  misc_RNA (1)...(19): siRNA sense strand
ccuuugagagugaggacaa

SEQ ID NO: 2493846 - RNA, 19 nt, Homo sapiens
  misc_RNA (1)...(19): siRNA sense strand
acgaagaccuagacggcau

SEQ ID NO: 2493847 - RNA, 19 nt, Homo sapiens
  misc_RNA (1)...(19): siRNA sense strand
aguacgaggaggaggaaaa

SEQ ID NO: 2493848 - RNA, 19 nt, Homo sapiens
  misc_RNA (1)...(19): siRNA sense strand
cuacauugaggguggaaca

SEQ ID NO: 2493849 - RNA, 19 nt, Homo sapiens
  misc_RNA (1)...(19): siRNA sense strand
uuaacaagaaugagcggaa

SEQ ID NO: 2493850 - RNA, 19 nt, Homo sapiens
  misc_RNA (1)...(19): siRNA sense strand
gcaaagaaggcgaggaagc

SEQ ID NO: 2493851 - RNA, 19 nt, Homo sapiens
  misc_RNA (1)...(19): siRNA sense strand
agguauauauccagcacau

SEQ ID NO: 2493852 - RNA, 19 nt, Homo sapiens
  misc_RNA (1)...(19): siRNA sense strand
agaaugagcggaaagggaa

SEQ ID NO: 2493853 - RNA, 19 nt, Homo sapiens
  misc_RNA (1)...(19): siRNA sense strand
cggaagaggaguuuggcca

SEQ ID NO: 2493854 - RNA, 19 nt, Homo sapiens
  misc_RNA (1)...(19): siRNA sense strand
uggagaacgccaagaacau

SEQ ID NO: 2493855 - RNA, 19 nt, Homo sapiens
  misc_RNA (1)...(19): siRNA sense strand
cuagccagguggagaucaa

SEQ ID NO: 2493856 - RNA, 19 nt, Homo sapiens
  misc_RNA (1)...(19): siRNA sense strand
cugagaaugucaaggccau

SEQ ID NO: 2493857 - RNA, 19 nt, Homo sapiens
  misc_RNA (1)...(19): siRNA sense strand
guaucguguguaugggaaa

SEQ ID NO: 2493858 - RNA, 19 nt, Homo sapiens
  misc_RNA (1)...(19): siRNA sense strand
agaaggaagacaaggagga

SEQ ID NO: 2493859 - RNA, 19 nt, Homo sapiens
  misc_RNA (1)...(19): siRNA sense strand
gaacauaagcagcguccca

SEQ ID NO: 2493860 - RNA, 19 nt, Homo sapiens
  misc_RNA (1)...(19): siRNA sense strand
ucaagaagcacgugccuga

SEQ ID NO: 2493861 - RNA, 19 nt, Homo sapiens
  misc_RNA (1)...(19): siRNA sense strand
aagaaugagcggaaaggga

SEQ ID NO: 2493862 - RNA, 19 nt, Homo sapiens
  misc_RNA (1)...(19): siRNA sense strand
agaucgagguccuggaugu

SEQ ID NO: 2493863 - RNA, 19 nt, Homo sapiens
  misc_RNA (1)...(19): siRNA sense strand
cggagcagcugauggagga

SEQ ID NO: 2493864 - RNA, 19 nt, Homo sapiens
  misc_RNA (1)...(19): siRNA sense strand
cugaagaagcuguaccuga

SEQ ID NO: 2493865 - RNA, 19 nt, Homo sapiens
  misc_RNA (1)...(19): siRNA sense strand
aggccacacucgacaagaa

SEQ ID NO: 2493866 - RNA, 19 nt, Homo sapiens
  misc_RNA (1)...(19): siRNA sense strand
uguucaaggccaaguucaa

SEQ ID NO: 2493867 - RNA, 19 nt, Homo sapiens
  misc_RNA (1)...(19): siRNA sense strand
cgcucgugcucaauggaaa

SEQ ID NO: 2493868 - RNA, 19 nt, Homo sapiens
  misc_RNA (1)...(19): siRNA sense strand
cagauguugcccaggagaa

SEQ ID NO: 2493869 - RNA, 19 nt, Homo sapiens
  misc_RNA (1)...(19): siRNA sense strand
gcaaguucuacgaggcuga

SEQ ID NO: 2493870 - RNA, 19 nt, Homo sapiens
  misc_RNA (1)...(19): siRNA sense strand
caucauguugcuagacaau

SEQ ID NO: 2493871 - RNA, 19 nt, Homo sapiens
  misc_RNA (1)...(19): siRNA sense strand
gcgcagguguucaaggcca

SEQ ID NO: 2493872 - RNA, 19 nt, Homo sapiens
  misc_RNA (1)...(19): siRNA sense strand
agaagcagccagaggagga

SEQ ID NO: 2493873 - RNA, 19 nt, Homo sapiens
  misc_RNA (1)...(19): siRNA sense strand
acaauggccaagaggucua

SEQ ID NO: 2493874 - RNA, 19 nt, Homo sapiens
  misc_RNA (1)...(19): siRNA sense strand
ggaagcaaccgcugaggca

SEQ ID NO: 2493875 - RNA, 19 nt, Homo sapiens
  misc_RNA (1)...(19): siRNA sense strand
uggaguacgaggaggagga

SEQ ID NO: 2493876 - RNA, 19 nt, Homo sapiens
  misc_RNA (1)...(19): siRNA sense strand
agacaauggccaagagguc

SEQ ID NO: 2493877 - RNA, 19 nt, Homo sapiens
  misc_RNA (1)...(19): siRNA sense strand
gagaucaagcugagccuga

SEQ ID NO: 2493878 - RNA, 19 nt, Homo sapiens
  misc_RNA (1)...(19): siRNA sense strand
gccuggagggucugagcaa

SEQ ID NO: 2493879 - RNA, 19 nt, Homo sapiens
  misc_RNA (1)...(19): siRNA sense strand
ccgagaagaaagaccagau

SEQ ID NO: 2493880 - RNA, 19 nt, Homo sapiens
  misc_RNA (1)...(19): siRNA sense strand
aagcaaccgcugaggcaga

SEQ ID NO: 2493881 - RNA, 19 nt, Homo sapiens
  misc_RNA (1)...(19): siRNA sense strand
aggaggacuuccagugcau

SEQ ID NO: 2493882 - RNA, 19 nt, Homo sapiens
  misc_RNA (1)...(19): siRNA sense strand
gugaggacaaccagggcau

SEQ ID NO: 2493883 - RNA, 19 nt, Homo sapiens
  misc_RNA (1)...(19): siRNA sense strand
acaucaaguuggagccugu

SEQ ID NO: 2493884 - RNA, 19 nt, Homo sapiens
  misc_RNA (1)...(19): siRNA sense strand
ccgggaaggugaaacgcga

SEQ ID NO: 2493885 - RNA, 19 nt, Homo sapiens
  misc_RNA (1)...(19): siRNA sense strand
agacuagccagguggagau

SEQ ID NO: 2493886 - RNA, 19 nt, Homo sapiens
  misc_RNA (1)...(19): siRNA sense strand
cuggagaacgccaagaaca

SEQ ID NO: 2493887 - RNA, 19 nt, Homo sapiens
  misc_RNA (1)...(19): siRNA sense strand
gcacuguccgggaggagau

SEQ ID NO: 2493888 - RNA, 19 nt, Homo sapiens
  misc_RNA (1)...(19): siRNA sense strand
cgcagguguucaaggccaa

SEQ ID NO: 2493889 - RNA, 19 nt, Homo sapiens
  misc_RNA (1)...(19): siRNA sense strand
aaaagaaguucgagagccu

SEQ ID NO: 2493890 - RNA, 19 nt, Homo sapiens
  misc_RNA (1)...(19): siRNA sense strand
acagcaagcagguuaucaa

SEQ ID NO: 2493891 - RNA, 19 nt, Homo sapiens
  misc_RNA (1)...(19): siRNA sense strand
gcuacuucccugagaaugu

SEQ ID NO: 2493892 - RNA, 19 nt, Homo sapiens
  misc_RNA (1)...(19): siRNA sense strand
gucccaagguggagcugau

SEQ ID NO: 2493893 - RNA, 19 nt, Homo sapiens
  misc_RNA (1)...(19): siRNA sense strand
auguguugacgguggacua

SEQ ID NO: 2493894 - RNA, 19 nt, Homo sapiens
  misc_RNA (1)...(19): siRNA sense strand
cuguggaguacgaggagga

SEQ ID NO: 2493895 - RNA, 19 nt, Homo sapiens
  misc_RNA (1)...(19): siRNA sense strand
cugcaaaagaaguucgaga

SEQ ID NO: 2493896 - RNA, 19 nt, Homo sapiens
  misc_RNA (1)...(19): siRNA sense strand
ugacggagaucgagguccu

SEQ ID NO: 2493897 - RNA, 19 nt, Homo sapiens
  misc_RNA (1)...(19): siRNA sense strand
ucuacgaggcugacugcua

SEQ ID NO: 2493898 - RNA, 19 nt, Homo sapiens
  misc_RNA (1)...(19): siRNA sense strand
acauugugcucaagaccuu

SEQ ID NO: 2493899 - RNA, 19 nt, Homo sapiens
  misc_RNA (1)...(19): siRNA sense strand
cagaggagaagcagccaga

SEQ ID NO: 2493900 - RNA, 19 nt, Homo sapiens
  misc_RNA (1)...(19): siRNA sense strand
ugucccauuucaagaggaa

SEQ ID NO: 2493901 - RNA, 19 nt, Homo sapiens
  misc_RNA (1)...(19): siRNA sense strand
acaaggaggagaaggccga

SEQ ID NO: 2493902 - RNA, 19 nt, Homo sapiens
  misc_RNA (1)...(19): siRNA sense strand
ccgcaagggcaaugagcag

SEQ ID NO: 2493903 - RNA, 19 nt, Homo sapiens
  misc_RNA (1)...(19): siRNA sense strand
gcaaugagcagcacgccuu

SEQ ID NO: 2493904 - RNA, 19 nt, Homo sapiens
  misc_RNA (1)...(19): siRNA sense strand
augaagacgagguggaaga

SEQ ID NO: 2493905 - RNA, 19 nt, Homo sapiens
  misc_RNA (1)...(19): siRNA sense strand
uggaagacgaggaggagga

SEQ ID NO: 2493906 - RNA, 19 nt, Homo sapiens
  misc_RNA (1)...(19): siRNA sense strand
cuuucagcauugagaguau

SEQ ID NO: 2493907 - RNA, 19 nt, Homo sapiens
  misc_RNA (1)...(19): siRNA sense strand
gguaucaggcgguggcaga

SEQ ID NO: 2493908 - RNA, 19 nt, Homo sapiens
  misc_RNA (1)...(19): siRNA sense strand
aaaucgauguccugggaga

SEQ ID NO: 2493909 - RNA, 19 nt, Homo sapiens
  misc_RNA (1)...(19): siRNA sense strand
aagacgagguggaagacga

SEQ ID NO: 2493910 - RNA, 19 nt, Homo sapiens
  misc_RNA (1)...(19): siRNA sense strand
agguggaagacgaggagga

SEQ ID NO: 2493911 - RNA, 19 nt, Homo sapiens
  misc_RNA (1)...(19): siRNA sense strand
agccuugggaggagggcaa

SEQ ID NO: 2493912 - RNA, 19 nt, Homo sapiens
  misc_RNA (1)...(19): siRNA sense strand
aggaggaagaugaagacga

SEQ ID NO: 2493913 - RNA, 19 nt, Homo sapiens
  misc_RNA (1)...(19): siRNA sense strand
aagaugaagacgaggugga

SEQ ID NO: 2493914 - RNA, 19 nt, Homo sapiens
  misc_RNA (1)...(19): siRNA sense strand
ccgauggggaagacgguaa

SEQ ID NO: 2493915 - RNA, 19 nt, Homo sapiens
  misc_RNA (1)...(19): siRNA sense strand
cauugagaguaucaugcaa

SEQ ID NO: 2493916 - RNA, 19 nt, Homo sapiens
  misc_RNA (1)...(19): siRNA sense strand
ugcagaaagacguggaaga

SEQ ID NO: 2493917 - RNA, 19 nt, Homo sapiens
  misc_RNA (1)...(19): siRNA sense strand
acuuugaccaggagcuuaa

SEQ ID NO: 2493918 - RNA, 19 nt, Homo sapiens
  misc_RNA (1)...(19): siRNA sense strand
gcuaccauguuccgggcua

SEQ ID NO: 2493919 - RNA, 19 nt, Homo sapiens
  misc_RNA (1)...(19): siRNA sense strand
uuguggagucuguggauga

SEQ ID NO: 2493920 - RNA, 19 nt, Homo sapiens
  misc_RNA (1)...(19): siRNA sense strand
agcagaaacuggaagggaa

SEQ ID NO: 2493921 - RNA, 19 nt, Homo sapiens
  misc_RNA (1)...(19): siRNA sense strand
gcucugaggaugauggcau

SEQ ID NO: 2493922 - RNA, 19 nt, Homo sapiens
  misc_RNA (1)...(19): siRNA sense strand
cggcuguggcugacaagaa

SEQ ID NO: 2493923 - RNA, 19 nt, Homo sapiens
  misc_RNA (1)...(19): siRNA sense strand
ugaagaagucugaggccca

SEQ ID NO: 2493924 - RNA, 19 nt, Homo sapiens
  misc_RNA (1)...(19): siRNA sense strand
gcagaaacuggaagggaag

SEQ ID NO: 2493925 - RNA, 19 nt, Homo sapiens
  misc_RNA (1)...(19): siRNA sense strand
cauacuaagucccuggaga

SEQ ID NO: 2493926 - RNA, 19 nt, Homo sapiens
  misc_RNA (1)...(19): siRNA sense strand
aggcccugguggaggaaaa

SEQ ID NO: 2493927 - RNA, 19 nt, Homo sapiens
  misc_RNA (1)...(19): siRNA sense strand
aggcugagcugaaggcacu

SEQ ID NO: 2493928 - RNA, 19 nt, Homo sapiens
  misc_RNA (1)...(19): siRNA sense strand
uaagaaaggugacagacga

SEQ ID NO: 2493929 - RNA, 19 nt, Homo sapiens
  misc_RNA (1)...(19): siRNA sense strand
aggaggaccugcuggagga

SEQ ID NO: 2493930 - RNA, 19 nt, Homo sapiens
  misc_RNA (1)...(19): siRNA sense strand
gggaagcccaagaagcaga

SEQ ID NO: 2493931 - RNA, 19 nt, Homo sapiens
  misc_RNA (1)...(19): siRNA sense strand
agaagaugaggcugagcau

SEQ ID NO: 2493932 - RNA, 19 nt, Homo sapiens
  misc_RNA (1)...(19): siRNA sense strand
agcagaaacuggaagggaa

SEQ ID NO: 2493933 - RNA, 19 nt, Homo sapiens
  misc_RNA (1)...(19): siRNA sense strand
gcucugaggaugauggcau

SEQ ID NO: 2493934 - RNA, 19 nt, Homo sapiens
  misc_RNA (1)...(19): siRNA sense strand
cggcuguggcugacaagaa

SEQ ID NO: 2493935 - RNA, 19 nt, Homo sapiens
  misc_RNA (1)...(19): siRNA sense strand
ugaagaagucugaggccca

SEQ ID NO: 2493936 - RNA, 19 nt, Homo sapiens
  misc_RNA (1)...(19): siRNA sense strand
gcagaaacuggaagggaag

SEQ ID NO: 2493937 - RNA, 19 nt, Homo sapiens
  misc_RNA (1)...(19): siRNA sense strand
cauacuaagucccuggaga

SEQ ID NO: 2493938 - RNA, 19 nt, Homo sapiens
  misc_RNA (1)...(19): siRNA sense strand
aggcccugguggaggaaaa

SEQ ID NO: 2493939 - RNA, 19 nt, Homo sapiens
  misc_RNA (1)...(19): siRNA sense strand
aggcugagcugaaggcacu

SEQ ID NO: 2493940 - RNA, 19 nt, Homo sapiens
  misc_RNA (1)...(19): siRNA sense strand
uaagaaaggugacagacga

SEQ ID NO: 2493941 - RNA, 19 nt, Homo sapiens
  misc_RNA (1)...(19): siRNA sense strand
aggaggaccugcuggagga

SEQ ID NO: 2493942 - RNA, 19 nt, Homo sapiens
  misc_RNA (1)...(19): siRNA sense strand
gggaagcccaagaagcaga

SEQ ID NO: 2493943 - RNA, 19 nt, Homo sapiens
  misc_RNA (1)...(19): siRNA sense strand
agaagaugaggcugagcau

SEQ ID NO: 2493944 - RNA, 19 nt, Homo sapiens
  misc_RNA (1)...(19): siRNA sense strand
agcagaaacuggaagggaa

SEQ ID NO: 2493945 - RNA, 19 nt, Homo sapiens
  misc_RNA (1)...(19): siRNA sense strand
gcucugaggaugauggcau

SEQ ID NO: 2493946 - RNA, 19 nt, Homo sapiens
  misc_RNA (1)...(19): siRNA sense strand
cggcuguggcugacaagaa

SEQ ID NO: 2493947 - RNA, 19 nt, Homo sapiens
  misc_RNA (1)...(19): siRNA sense strand
ugaagaagucugaggccca

SEQ ID NO: 2493948 - RNA, 19 nt, Homo sapiens
  misc_RNA (1)...(19): siRNA sense strand
gcagaaacuggaagggaag

SEQ ID NO: 2493949 - RNA, 19 nt, Homo sapiens
  misc_RNA (1)...(19): siRNA sense strand
cauacuaagucccuggaga

SEQ ID NO: 2493950 - RNA, 19 nt, Homo sapiens
  misc_RNA (1)...(19): siRNA sense strand
aggcccugguggaggaaaa

SEQ ID NO: 2493951 - RNA, 19 nt, Homo sapiens
  misc_RNA (1)...(19): siRNA sense strand
aggcugagcugaaggcacu

SEQ ID NO: 2493952 - RNA, 19 nt, Homo sapiens
  misc_RNA (1)...(19): siRNA sense strand
uaagaaaggugacagacga

SEQ ID NO: 2493953 - RNA, 19 nt, Homo sapiens
  misc_RNA (1)...(19): siRNA sense strand
aggaggaccugcuggagga

SEQ ID NO: 2493954 - RNA, 19 nt, Homo sapiens
  misc_RNA (1)...(19): siRNA sense strand
gggaagcccaagaagcaga

SEQ ID NO: 2493955 - RNA, 19 nt, Homo sapiens
  misc_RNA (1)...(19): siRNA sense strand
agaagaugaggcugagcau

SEQ ID NO: 2493956 - RNA, 19 nt, Homo sapiens
  misc_RNA (1)...(19): siRNA sense strand
ccaucaaacaggagcucau

SEQ ID NO: 2493957 - RNA, 19 nt, Homo sapiens
  misc_RNA (1)...(19): siRNA sense strand
gaggaaacgauuacggcuu

SEQ ID NO: 2493958 - RNA, 19 nt, Homo sapiens
  misc_RNA (1)...(19): siRNA sense strand
ccuucaaagccaaauacaa

SEQ ID NO: 2493959 - RNA, 19 nt, Homo sapiens
  misc_RNA (1)...(19): siRNA sense strand
ggcaugaaccugacgguga

SEQ ID NO: 2493960 - RNA, 19 nt, Homo sapiens
  misc_RNA (1)...(19): siRNA sense strand
ggaaagcccuucaaagcca

SEQ ID NO: 2493961 - RNA, 19 nt, Homo sapiens
  misc_RNA (1)...(19): siRNA sense strand
acacaaacgaacucacaca

SEQ ID NO: 2493962 - RNA, 19 nt, Homo sapiens
  misc_RNA (1)...(19): siRNA sense strand
cggaacaggccaaccacau

SEQ ID NO: 2493963 - RNA, 19 nt, Homo sapiens
  misc_RNA (1)...(19): siRNA sense strand
gggaacaacuggagcggga

SEQ ID NO: 2493964 - RNA, 19 nt, Homo sapiens
  misc_RNA (1)...(19): siRNA sense strand
ggacuuauucccagggcga

SEQ ID NO: 2493965 - RNA, 19 nt, Homo sapiens
  misc_RNA (1)...(19): siRNA sense strand
cggcaggaguaucggucca

SEQ ID NO: 2493966 - RNA, 19 nt, Homo sapiens
  misc_RNA (1)...(19): siRNA sense strand
cccaaaucaaggcggcuua

SEQ ID NO: 2493967 - RNA, 19 nt, Homo sapiens
  misc_RNA (1)...(19): siRNA sense strand
ugaggaagauccagggcga

SEQ ID NO: 2493968 - RNA, 19 nt, Homo sapiens
  misc_RNA (1)...(19): siRNA sense strand
ugaggaagauccagggcga

SEQ ID NO: 2493969 - RNA, 19 nt, Homo sapiens
  misc_RNA (1)...(19): siRNA sense strand
ugaggaagauccagggcga

SEQ ID NO: 2493970 - RNA, 19 nt, Homo sapiens
  misc_RNA (1)...(19): siRNA sense strand
aggacgaggaggaggacua

SEQ ID NO: 2493971 - RNA, 19 nt, Homo sapiens
  misc_RNA (1)...(19): siRNA sense strand
gaacagaaagccaagcaga

SEQ ID NO: 2493972 - RNA, 19 nt, Homo sapiens
  misc_RNA (1)...(19): siRNA sense strand
cugacgaggacgaggagga

SEQ ID NO: 2493973 - RNA, 19 nt, Homo sapiens
  misc_RNA (1)...(19): siRNA sense strand
aacagaaagccaagcagaa

SEQ ID NO: 2493974 - RNA, 19 nt, Homo sapiens
  misc_RNA (1)...(19): siRNA sense strand
agccaaaauggaacagaaa

SEQ ID NO: 2493975 - RNA, 19 nt, Homo sapiens
  misc_RNA (1)...(19): siRNA sense strand
aaauggaacagaaagccaa

SEQ ID NO: 2493976 - RNA, 19 nt, Homo sapiens
  misc_RNA (1)...(19): siRNA sense strand
acgaggacgaggaggagga

SEQ ID NO: 2493977 - RNA, 19 nt, Homo sapiens
  misc_RNA (1)...(19): siRNA sense strand
ucggaaagugauagagaaa

SEQ ID NO: 2493978 - RNA, 19 nt, Homo sapiens
  misc_RNA (1)...(19): siRNA sense strand
cgauaagaauagcagggaa

SEQ ID NO: 2493979 - RNA, 19 nt, Homo sapiens
  misc_RNA (1)...(19): siRNA sense strand
aggacgaggaggaggacua

SEQ ID NO: 2493980 - RNA, 19 nt, Homo sapiens
  misc_RNA (1)...(19): siRNA sense strand
auggauaagaccagggaau

SEQ ID NO: 2493981 - RNA, 19 nt, Homo sapiens
  misc_RNA (1)...(19): siRNA sense strand
cagaggacgaagaggucaa

SEQ ID NO: 2493982 - RNA, 19 nt, Homo sapiens
  misc_RNA (1)...(19): siRNA sense strand
gaacagaaagccaagcaga

SEQ ID NO: 2493983 - RNA, 19 nt, Homo sapiens
  misc_RNA (1)...(19): siRNA sense strand
ccgugaagaggaagcggaa

SEQ ID NO: 2493984 - RNA, 19 nt, Homo sapiens
  misc_RNA (1)...(19): siRNA sense strand
cuggaaaaguuuauggaga

SEQ ID NO: 2493985 - RNA, 19 nt, Homo sapiens
  misc_RNA (1)...(19): siRNA sense strand
agauaagaaaggaagcaca

SEQ ID NO: 2493986 - RNA, 19 nt, Homo sapiens
  misc_RNA (1)...(19): siRNA sense strand
agaacaaccgugagaacca

SEQ ID NO: 2493987 - RNA, 19 nt, Homo sapiens
  misc_RNA (1)...(19): siRNA sense strand
gcacagaagucgcaggcag

SEQ ID NO: 2493988 - RNA, 19 nt, Homo sapiens
  misc_RNA (1)...(19): siRNA sense strand
aggacgaagaggucaagaa

SEQ ID NO: 2493989 - RNA, 19 nt, Homo sapiens
  misc_RNA (1)...(19): siRNA sense strand
aggagaugcagcagaugua

SEQ ID NO: 2493990 - RNA, 19 nt, Homo sapiens
  misc_RNA (1)...(19): siRNA sense strand
cugacgaggacgaggagga

SEQ ID NO: 2493991 - RNA, 19 nt, Homo sapiens
  misc_RNA (1)...(19): siRNA sense strand
agaagcagcugaaggagca

SEQ ID NO: 2493992 - RNA, 19 nt, Homo sapiens
  misc_RNA (1)...(19): siRNA sense strand
aggaggacgacgaguauga

SEQ ID NO: 2493993 - RNA, 19 nt, Homo sapiens
  misc_RNA (1)...(19): siRNA sense strand
cugaacuggugcagaggga

SEQ ID NO: 2493994 - RNA, 19 nt, Homo sapiens
  misc_RNA (1)...(19): siRNA sense strand
cugaaggagcagcaggaga

SEQ ID NO: 2493995 - RNA, 19 nt, Homo sapiens
  misc_RNA (1)...(19): siRNA sense strand
augaggagguggacagcga

SEQ ID NO: 2493996 - RNA, 19 nt, Homo sapiens
  misc_RNA (1)...(19): siRNA sense strand
cggcgcauggagauggaua

SEQ ID NO: 2493997 - RNA, 19 nt, Homo sapiens
  misc_RNA (1)...(19): siRNA sense strand
aacagaaagccaagcagaa

SEQ ID NO: 2493998 - RNA, 19 nt, Homo sapiens
  misc_RNA (1)...(19): siRNA sense strand
ggcgcauggagauggauaa

SEQ ID NO: 2493999 - RNA, 19 nt, Homo sapiens
  misc_RNA (1)...(19): siRNA sense strand
aguaugaggcguuccgcaa

SEQ ID NO: 2494000 - RNA, 19 nt, Homo sapiens
  misc_RNA (1)...(19): siRNA sense strand
cgacagaagcuggaggagu

SEQ ID NO: 2494001 - RNA, 19 nt, Homo sapiens
  misc_RNA (1)...(19): siRNA sense strand
acaggaagaagguggcuga

SEQ ID NO: 2494002 - RNA, 19 nt, Homo sapiens
  misc_RNA (1)...(19): siRNA sense strand
ccagaacaaccgugagaac

SEQ ID NO: 2494003 - RNA, 19 nt, Homo sapiens
  misc_RNA (1)...(19): siRNA sense strand
gcccaauagccaaggguac

SEQ ID NO: 2494004 - RNA, 19 nt, Homo sapiens
  misc_RNA (1)...(19): siRNA sense strand
gcaagcacuucaucggaga

SEQ ID NO: 2494005 - RNA, 19 nt, Homo sapiens
  misc_RNA (1)...(19): siRNA sense strand
caucaagaacccagugaac

SEQ ID NO: 2494006 - RNA, 19 nt, Homo sapiens
  misc_RNA (1)...(19): siRNA sense strand
ggcugagauaagaaaggaa

SEQ ID NO: 2494007 - RNA, 19 nt, Homo sapiens
  misc_RNA (1)...(19): siRNA sense strand
agccaaaauggaacagaaa

SEQ ID NO: 2494008 - RNA, 19 nt, Homo sapiens
  misc_RNA (1)...(19): siRNA sense strand
aaauggaacagaaagccaa

SEQ ID NO: 2494009 - RNA, 19 nt, Homo sapiens
  misc_RNA (1)...(19): siRNA sense strand
acgaggacgaggaggagga

SEQ ID NO: 2494010 - RNA, 19 nt, Homo sapiens
  misc_RNA (1)...(19): siRNA sense strand
gaacaaucccagacggccu

SEQ ID NO: 2494011 - RNA, 19 nt, Homo sapiens
  misc_RNA (1)...(19): siRNA sense strand
gaacagaaagccaagcaga

SEQ ID NO: 2494012 - RNA, 19 nt, Homo sapiens
  misc_RNA (1)...(19): siRNA sense strand
aacagaaagccaagcagaa

SEQ ID NO: 2494013 - RNA, 19 nt, Homo sapiens
  misc_RNA (1)...(19): siRNA sense strand
agccaaaauggaacagaaa

SEQ ID NO: 2494014 - RNA, 19 nt, Homo sapiens
  misc_RNA (1)...(19): siRNA sense strand
aaauggaacagaaagccaa

SEQ ID NO: 2494015 - RNA, 19 nt, Homo sapiens
  misc_RNA (1)...(19): siRNA sense strand
uggaagaacuguuggccaa

SEQ ID NO: 2494016 - RNA, 19 nt, Homo sapiens
  misc_RNA (1)...(19): siRNA sense strand
cccaagaagaagaagggaa

SEQ ID NO: 2494017 - RNA, 19 nt, Homo sapiens
  misc_RNA (1)...(19): siRNA sense strand
ggaaauaauccaaagcagu

SEQ ID NO: 2494018 - RNA, 19 nt, Homo sapiens
  misc_RNA (1)...(19): siRNA sense strand
gggaaaaguggaagugaga

SEQ ID NO: 2494019 - RNA, 19 nt, Homo sapiens
  misc_RNA (1)...(19): siRNA sense strand
gugcugugccugaggaaca

SEQ ID NO: 2494020 - RNA, 19 nt, Homo sapiens
  misc_RNA (1)...(19): siRNA sense strand
ugacccuggcagagaguua

SEQ ID NO: 2494021 - RNA, 19 nt, Homo sapiens
  misc_RNA (1)...(19): siRNA sense strand
guuuagaacuucaggagag

SEQ ID NO: 2494022 - RNA, 19 nt, Homo sapiens
  misc_RNA (1)...(19): siRNA sense strand
ggaaaguuaugcaaugcca

SEQ ID NO: 2494023 - RNA, 19 nt, Homo sapiens
  misc_RNA (1)...(19): siRNA sense strand
gcaaaaugcuccuggacuc

SEQ ID NO: 2494024 - RNA, 19 nt, Homo sapiens
  misc_RNA (1)...(19): siRNA sense strand
gcuacuacaaccagagcga

SEQ ID NO: 2494025 - RNA, 19 nt, Homo sapiens
  misc_RNA (1)...(19): siRNA sense strand
gaggaagagcucaggugga

SEQ ID NO: 2494026 - RNA, 19 nt, Homo sapiens
  misc_RNA (1)...(19): siRNA sense strand
ggaagagcucagguggaaa

SEQ ID NO: 2494027 - RNA, 19 nt, Homo sapiens
  misc_RNA (1)...(19): siRNA sense strand
aggcauuucuccugguaca

SEQ ID NO: 2494028 - RNA, 19 nt, Homo sapiens
  misc_RNA (1)...(19): siRNA sense strand
aggauuaugaagagcauga

SEQ ID NO: 2494029 - RNA, 19 nt, Homo sapiens
  misc_RNA (1)...(19): siRNA sense strand
cauuugaguuuguagacca

SEQ ID NO: 2494030 - RNA, 19 nt, Homo sapiens
  misc_RNA (1)...(19): siRNA sense strand
ccaucaagagccucagaga

SEQ ID NO: 2494031 - RNA, 19 nt, Homo sapiens
  misc_RNA (1)...(19): siRNA sense strand
ucggaguacuguagccaca

SEQ ID NO: 2494032 - RNA, 19 nt, Homo sapiens
  misc_RNA (1)...(19): siRNA sense strand
accaggaacaguugaaaga

SEQ ID NO: 2494033 - RNA, 19 nt, Homo sapiens
  misc_RNA (1)...(19): siRNA sense strand
auuaugaagagcaugacaa

SEQ ID NO: 2494034 - RNA, 19 nt, Homo sapiens
  misc_RNA (1)...(19): siRNA sense strand
ugacucaggaugacagaca

SEQ ID NO: 2494035 - RNA, 19 nt, Homo sapiens
  misc_RNA (1)...(19): siRNA sense strand
aggcauuucuccugguaca

SEQ ID NO: 2494036 - RNA, 19 nt, Homo sapiens
  misc_RNA (1)...(19): siRNA sense strand
aggauuaugaagagcauga

SEQ ID NO: 2494037 - RNA, 19 nt, Homo sapiens
  misc_RNA (1)...(19): siRNA sense strand
cauuugaguuuguagacca

SEQ ID NO: 2494038 - RNA, 19 nt, Homo sapiens
  misc_RNA (1)...(19): siRNA sense strand
ccaucaagagccucagaga

SEQ ID NO: 2494039 - RNA, 19 nt, Homo sapiens
  misc_RNA (1)...(19): siRNA sense strand
ucggaguacuguagccaca

SEQ ID NO: 2494040 - RNA, 19 nt, Homo sapiens
  misc_RNA (1)...(19): siRNA sense strand
accaggaacaguugaaaga

SEQ ID NO: 2494041 - RNA, 19 nt, Homo sapiens
  misc_RNA (1)...(19): siRNA sense strand
auuaugaagagcaugacaa

SEQ ID NO: 2494042 - RNA, 19 nt, Homo sapiens
  misc_RNA (1)...(19): siRNA sense strand
ugacucaggaugacagaca

SEQ ID NO: 2494043 - RNA, 19 nt, Homo sapiens
  misc_RNA (1)...(19): siRNA sense strand
aggcauuucuccugguaca

SEQ ID NO: 2494044 - RNA, 19 nt, Homo sapiens
  misc_RNA (1)...(19): siRNA sense strand
aggauuaugaagagcauga

SEQ ID NO: 2494045 - RNA, 19 nt, Homo sapiens
  misc_RNA (1)...(19): siRNA sense strand
cauuugaguuuguagacca

SEQ ID NO: 2494046 - RNA, 19 nt, Homo sapiens
  misc_RNA (1)...(19): siRNA sense strand
ccaucaagagccucagaga

SEQ ID NO: 2494047 - RNA, 19 nt, Homo sapiens
  misc_RNA (1)...(19): siRNA sense strand
ucggaguacuguagccaca

SEQ ID NO: 2494048 - RNA, 19 nt, Homo sapiens
  misc_RNA (1)...(19): siRNA sense strand
accaggaacaguugaaaga

SEQ ID NO: 2494049 - RNA, 19 nt, Homo sapiens
  misc_RNA (1)...(19): siRNA sense strand
auuaugaagagcaugacaa

SEQ ID NO: 2494050 - RNA, 19 nt, Homo sapiens
  misc_RNA (1)...(19): siRNA sense strand
ugacucaggaugacagaca

SEQ ID NO: 2494051 - RNA, 19 nt, Homo sapiens
  misc_RNA (1)...(19): siRNA sense strand
aggcauuucuccugguaca

SEQ ID NO: 2494052 - RNA, 19 nt, Homo sapiens
  misc_RNA (1)...(19): siRNA sense strand
aggauuaugaagagcauga

SEQ ID NO: 2494053 - RNA, 19 nt, Homo sapiens
  misc_RNA (1)...(19): siRNA sense strand
cauuugaguuuguagacca

SEQ ID NO: 2494054 - RNA, 19 nt, Homo sapiens
  misc_RNA (1)...(19): siRNA sense strand
ccaucaagagccucagaga

SEQ ID NO: 2494055 - RNA, 19 nt, Homo sapiens
  misc_RNA (1)...(19): siRNA sense strand
ucggaguacuguagccaca

SEQ ID NO: 2494056 - RNA, 19 nt, Homo sapiens
  misc_RNA (1)...(19): siRNA sense strand
accaggaacaguugaaaga

SEQ ID NO: 2494057 - RNA, 19 nt, Homo sapiens
  misc_RNA (1)...(19): siRNA sense strand
auuaugaagagcaugacaa

SEQ ID NO: 2494058 - RNA, 19 nt, Homo sapiens
  misc_RNA (1)...(19): siRNA sense strand
ugacucaggaugacagaca

SEQ ID NO: 2494059 - RNA, 19 nt, Homo sapiens
  misc_RNA (1)...(19): siRNA sense strand
guggagaagagaagggagu

SEQ ID NO: 2494060 - RNA, 19 nt, Homo sapiens
  misc_RNA (1)...(19): siRNA sense strand
ggagaagagaagggaguca

SEQ ID NO: 2494061 - RNA, 19 nt, Homo sapiens
  misc_RNA (1)...(19): siRNA sense strand
agucacacaccgagaccaa

SEQ ID NO: 2494062 - RNA, 19 nt, Homo sapiens
  misc_RNA (1)...(19): siRNA sense strand
cguauaagacggcggagca

SEQ ID NO: 2494063 - RNA, 19 nt, Homo sapiens
  misc_RNA (1)...(19): siRNA sense strand
cgggcauacacaucagaaa

SEQ ID NO: 2494064 - RNA, 19 nt, Homo sapiens
  misc_RNA (1)...(19): siRNA sense strand
gcuccaagaccuucgccaa

SEQ ID NO: 2494065 - RNA, 19 nt, Homo sapiens
  misc_RNA (1)...(19): siRNA sense strand
ccacauugcuccaagaccu

SEQ ID NO: 2494066 - RNA, 19 nt, Homo sapiens
  misc_RNA (1)...(19): siRNA sense strand
agaagagaagggagucaau

SEQ ID NO: 2494067 - RNA, 19 nt, Homo sapiens
  misc_RNA (1)...(19): siRNA sense strand
caacaaagauaaacccuuc

SEQ ID NO: 2494068 - RNA, 19 nt, Homo sapiens
  misc_RNA (1)...(19): siRNA sense strand
agucggagaugcagaucca

SEQ ID NO: 2494069 - RNA, 19 nt, Homo sapiens
  misc_RNA (1)...(19): siRNA sense strand
aggaucagcuguugccaga

SEQ ID NO: 2494070 - RNA, 19 nt, Homo sapiens
  misc_RNA (1)...(19): siRNA sense strand
agaugaaggaucagcuguu

SEQ ID NO: 2494071 - RNA, 19 nt, Homo sapiens
  misc_RNA (1)...(19): siRNA sense strand
agguuaaaggagagacaaa

SEQ ID NO: 2494072 - RNA, 19 nt, Homo sapiens
  misc_RNA (1)...(19): siRNA sense strand
gcaccaagaccaaggagga

SEQ ID NO: 2494073 - RNA, 19 nt, Homo sapiens
  misc_RNA (1)...(19): siRNA sense strand
ccagguuaaaggagagaca

SEQ ID NO: 2494074 - RNA, 19 nt, Homo sapiens
  misc_RNA (1)...(19): siRNA sense strand
caagaaacaucaaagcgau

SEQ ID NO: 2494075 - RNA, 19 nt, Homo sapiens
  misc_RNA (1)...(19): siRNA sense strand
acaagaaacaucaaagcga

SEQ ID NO: 2494076 - RNA, 19 nt, Homo sapiens
  misc_RNA (1)...(19): siRNA sense strand
uuauaagagaccauggauu

SEQ ID NO: 2494077 - RNA, 19 nt, Homo sapiens
  misc_RNA (1)...(19): siRNA sense strand
gagcagauuucauugagga

SEQ ID NO: 2494078 - RNA, 19 nt, Homo sapiens
  misc_RNA (1)...(19): siRNA sense strand
ucauugaggaauuugacaa

SEQ ID NO: 2494079 - RNA, 19 nt, Homo sapiens
  misc_RNA (1)...(19): siRNA sense strand
cauuccagguuaaaggaga

SEQ ID NO: 2494080 - RNA, 19 nt, Homo sapiens
  misc_RNA (1)...(19): siRNA sense strand
ggccaguggaacaugacaa

SEQ ID NO: 2494081 - RNA, 19 nt, Homo sapiens
  misc_RNA (1)...(19): siRNA sense strand
aggaggagugugagaagca

SEQ ID NO: 2494082 - RNA, 19 nt, Homo sapiens
  misc_RNA (1)...(19): siRNA sense strand
agguuaaaggagagacaaa

SEQ ID NO: 2494083 - RNA, 19 nt, Homo sapiens
  misc_RNA (1)...(19): siRNA sense strand
gcaccaagaccaaggagga

SEQ ID NO: 2494084 - RNA, 19 nt, Homo sapiens
  misc_RNA (1)...(19): siRNA sense strand
ccagguuaaaggagagaca

SEQ ID NO: 2494085 - RNA, 19 nt, Homo sapiens
  misc_RNA (1)...(19): siRNA sense strand
caagaaacaucaaagcgau

SEQ ID NO: 2494086 - RNA, 19 nt, Homo sapiens
  misc_RNA (1)...(19): siRNA sense strand
acaagaaacaucaaagcga

SEQ ID NO: 2494087 - RNA, 19 nt, Homo sapiens
  misc_RNA (1)...(19): siRNA sense strand
uuauaagagaccauggauu

SEQ ID NO: 2494088 - RNA, 19 nt, Homo sapiens
  misc_RNA (1)...(19): siRNA sense strand
gagcagauuucauugagga

SEQ ID NO: 2494089 - RNA, 19 nt, Homo sapiens
  misc_RNA (1)...(19): siRNA sense strand
ucauugaggaauuugacaa

SEQ ID NO: 2494090 - RNA, 19 nt, Homo sapiens
  misc_RNA (1)...(19): siRNA sense strand
cauuccagguuaaaggaga

SEQ ID NO: 2494091 - RNA, 19 nt, Homo sapiens
  misc_RNA (1)...(19): siRNA sense strand
ggccaguggaacaugacaa

SEQ ID NO: 2494092 - RNA, 19 nt, Homo sapiens
  misc_RNA (1)...(19): siRNA sense strand
aggaggagugugagaagca

SEQ ID NO: 2494093 - RNA, 19 nt, Homo sapiens
  misc_RNA (1)...(19): siRNA sense strand
ggacugggcuaguggguga

SEQ ID NO: 2494094 - RNA, 19 nt, Homo sapiens
  misc_RNA (1)...(19): siRNA sense strand
cugcaaagugugugccaua

SEQ ID NO: 2494095 - RNA, 19 nt, Homo sapiens
  misc_RNA (1)...(19): siRNA sense strand
gcgaaaugauggagcucga

SEQ ID NO: 2494096 - RNA, 19 nt, Homo sapiens
  misc_RNA (1)...(19): siRNA sense strand
agauccagcuugagaguau

SEQ ID NO: 2494097 - RNA, 19 nt, Homo sapiens
  misc_RNA (1)...(19): siRNA sense strand
agaccaaacguguggaaaa

SEQ ID NO: 2494098 - RNA, 19 nt, Homo sapiens
  misc_RNA (1)...(19): siRNA sense strand
cugaagauuaugugagaca

SEQ ID NO: 2494099 - RNA, 19 nt, Homo sapiens
  misc_RNA (1)...(19): siRNA sense strand
cgcaagagcuguagccaca

SEQ ID NO: 2494100 - RNA, 19 nt, Homo sapiens
  misc_RNA (1)...(19): siRNA sense strand
gaggaguaucaaaggacaa

SEQ ID NO: 2494101 - RNA, 19 nt, Homo sapiens
  misc_RNA (1)...(19): siRNA sense strand
cagagaaacuagacgccuu

SEQ ID NO: 2494102 - RNA, 19 nt, Homo sapiens
  misc_RNA (1)...(19): siRNA sense strand
gagcaggcccagagacaca

SEQ ID NO: 2494103 - RNA, 19 nt, Homo sapiens
  misc_RNA (1)...(19): siRNA sense strand
gaguggaguaucugaagaa

SEQ ID NO: 2494104 - RNA, 19 nt, Homo sapiens
  misc_RNA (1)...(19): siRNA sense strand
ccauagaaggauacggcau

SEQ ID NO: 2494105 - RNA, 19 nt, Homo sapiens
  misc_RNA (1)...(19): siRNA sense strand
ccaacauauccgagcuaau

SEQ ID NO: 2494106 - RNA, 19 nt, Homo sapiens
  misc_RNA (1)...(19): siRNA sense strand
aggaaaagcagcagcauuu

SEQ ID NO: 2494107 - RNA, 19 nt, Homo sapiens
  misc_RNA (1)...(19): siRNA sense strand
ccauagcaguaaugauaca

SEQ ID NO: 2494108 - RNA, 19 nt, Homo sapiens
  misc_RNA (1)...(19): siRNA sense strand
uagcagaagacaugaacuu

SEQ ID NO: 2494109 - RNA, 19 nt, Homo sapiens
  misc_RNA (1)...(19): siRNA sense strand
cagagauuacacagagcaa

SEQ ID NO: 2494110 - RNA, 19 nt, Homo sapiens
  misc_RNA (1)...(19): siRNA sense strand
ggggcgaaauagaaguaaa

SEQ ID NO: 2494111 - RNA, 19 nt, Homo sapiens
  misc_RNA (1)...(19): siRNA sense strand
cuaaugaaccuuugggcca

SEQ ID NO: 2494112 - RNA, 19 nt, Homo sapiens
  misc_RNA (1)...(19): siRNA sense strand
uggaaaagauagcagaaga

SEQ ID NO: 2494113 - RNA, 19 nt, Homo sapiens
  misc_RNA (1)...(19): siRNA sense strand
cagagcaggcccagagaca

SEQ ID NO: 2494114 - RNA, 19 nt, Homo sapiens
  misc_RNA (1)...(19): siRNA sense strand
auacaagucacauggguuu

SEQ ID NO: 2494115 - RNA, 19 nt, Homo sapiens
  misc_RNA (1)...(19): siRNA sense strand
ccaacauccaaguaagcua

SEQ ID NO: 2494116 - RNA, 19 nt, Homo sapiens
  misc_RNA (1)...(19): siRNA sense strand
cauagaaggauacggcauu

SEQ ID NO: 2494117 - RNA, 19 nt, Homo sapiens
  misc_RNA (1)...(19): siRNA sense strand
uggaaguagugauggccau

SEQ ID NO: 2494118 - RNA, 19 nt, Homo sapiens
  misc_RNA (1)...(19): siRNA sense strand
agugaggacccgagauaca

SEQ ID NO: 2494119 - RNA, 19 nt, Homo sapiens
  misc_RNA (1)...(19): siRNA sense strand
gcggaccaccaaugggaaa

SEQ ID NO: 2494120 - RNA, 19 nt, Homo sapiens
  misc_RNA (1)...(19): siRNA sense strand
cccagaauguggaggaacu

SEQ ID NO: 2494121 - RNA, 19 nt, Homo sapiens
  misc_RNA (1)...(19): siRNA sense strand
agguagaugaugaaggcuu

SEQ ID NO: 2494122 - RNA, 19 nt, Homo sapiens
  misc_RNA (1)...(19): siRNA sense strand
aaaucucacuucaggacaa

SEQ ID NO: 2494123 - RNA, 19 nt, Homo sapiens
  misc_RNA (1)...(19): siRNA sense strand
agucugucuuugagcacua

SEQ ID NO: 2494124 - RNA, 19 nt, Homo sapiens
  misc_RNA (1)...(19): siRNA sense strand
agaacgauccagagaaacu

SEQ ID NO: 2494125 - RNA, 19 nt, Homo sapiens
  misc_RNA (1)...(19): siRNA sense strand
cauuugccauagaaggaua

SEQ ID NO: 2494126 - RNA, 19 nt, Homo sapiens
  misc_RNA (1)...(19): siRNA sense strand
acucagugaugcaggaacu

SEQ ID NO: 2494127 - RNA, 19 nt, Homo sapiens
  misc_RNA (1)...(19): siRNA sense strand
ggaggaguaucaaaggaca

SEQ ID NO: 2494128 - RNA, 19 nt, Homo sapiens
  misc_RNA (1)...(19): siRNA sense strand
cuugagaguauuaagaaca

SEQ ID NO: 2494129 - RNA, 19 nt, Homo sapiens
  misc_RNA (1)...(19): siRNA sense strand
uaucaagguuucuagccaa

SEQ ID NO: 2494130 - RNA, 19 nt, Homo sapiens
  misc_RNA (1)...(19): siRNA sense strand
ucaugacaaccgacggaaa

SEQ ID NO: 2494131 - RNA, 19 nt, Homo sapiens
  misc_RNA (1)...(19): siRNA sense strand
ggacuauggaauauggcca

SEQ ID NO: 2494132 - RNA, 19 nt, Homo sapiens
  misc_RNA (1)...(19): siRNA sense strand
uuagugaggacccgagaua

SEQ ID NO: 2494133 - RNA, 19 nt, Homo sapiens
  misc_RNA (1)...(19): siRNA sense strand
agugguuccaucagaguaa

SEQ ID NO: 2494134 - RNA, 19 nt, Homo sapiens
  misc_RNA (1)...(19): siRNA sense strand
cuggaagguuucuaaugaa

SEQ ID NO: 2494135 - RNA, 19 nt, Homo sapiens
  misc_RNA (1)...(19): siRNA sense strand
cugaagaacgauccagaga

SEQ ID NO: 2494136 - RNA, 19 nt, Homo sapiens
  misc_RNA (1)...(19): siRNA sense strand
caugacaaccgacggaaau

SEQ ID NO: 2494137 - RNA, 19 nt, Homo sapiens
  misc_RNA (1)...(19): siRNA sense strand
cccaggaccucuugagcuu

SEQ ID NO: 2494138 - RNA, 19 nt, Homo sapiens
  misc_RNA (1)...(19): siRNA sense strand
agaagugcugcuauggaua

SEQ ID NO: 2494139 - RNA, 19 nt, Homo sapiens
  misc_RNA (1)...(19): siRNA sense strand
acuaaugacucuuccacau

SEQ ID NO: 2494140 - RNA, 19 nt, Homo sapiens
  misc_RNA (1)...(19): siRNA sense strand
gggcgaaauagaaguaaag

SEQ ID NO: 2494141 - RNA, 19 nt, Homo sapiens
  misc_RNA (1)...(19): siRNA sense strand
auguuggacuggaagguuu

SEQ ID NO: 2494142 - RNA, 19 nt, Homo sapiens
  misc_RNA (1)...(19): siRNA sense strand
acgccuucaucauggacaa

SEQ ID NO: 2494143 - RNA, 19 nt, Homo sapiens
  misc_RNA (1)...(19): siRNA sense strand
agacuuugcaaaugggcau

SEQ ID NO: 2494144 - RNA, 19 nt, Homo sapiens
  misc_RNA (1)...(19): siRNA sense strand
ggaaagauugucauggacu

SEQ ID NO: 2494145 - RNA, 19 nt, Homo sapiens
  misc_RNA (1)...(19): siRNA sense strand
ggacaaaaccagcugggca

SEQ ID NO: 2494146 - RNA, 19 nt, Homo sapiens
  misc_RNA (1)...(19): siRNA sense strand
cuaaauguaucucggaacu

SEQ ID NO: 2494147 - RNA, 19 nt, Homo sapiens
  misc_RNA (1)...(19): siRNA sense strand
gcuugagaguauuaagaac

SEQ ID NO: 2494148 - RNA, 19 nt, Homo sapiens
  misc_RNA (1)...(19): siRNA sense strand
caaagaagcugguggaguc

SEQ ID NO: 2494149 - RNA, 19 nt, Homo sapiens
  misc_RNA (1)...(19): siRNA sense strand
acaaagugaagcugaucaa

SEQ ID NO: 2494150 - RNA, 19 nt, Homo sapiens
  misc_RNA (1)...(19): siRNA sense strand
ccaggaaaucaaagccaau

SEQ ID NO: 2494151 - RNA, 19 nt, Homo sapiens
  misc_RNA (1)...(19): siRNA sense strand
uggacaaagugaagcugau

SEQ ID NO: 2494152 - RNA, 19 nt, Homo sapiens
  misc_RNA (1)...(19): siRNA sense strand
aggcaaagaagcuggugga

SEQ ID NO: 2494153 - RNA, 19 nt, Homo sapiens
  misc_RNA (1)...(19): siRNA sense strand
agaacuacauccaaggcau

SEQ ID NO: 2494154 - RNA, 19 nt, Homo sapiens
  misc_RNA (1)...(19): siRNA sense strand
gcaaagaagcugguggagu

SEQ ID NO: 2494155 - RNA, 19 nt, Homo sapiens
  misc_RNA (1)...(19): siRNA sense strand
agauauccccauagcgaaa

SEQ ID NO: 2494156 - RNA, 19 nt, Homo sapiens
  misc_RNA (1)...(19): siRNA sense strand
aggcgguggaagaagauau

SEQ ID NO: 2494157 - RNA, 19 nt, Homo sapiens
  misc_RNA (1)...(19): siRNA sense strand
cccaggaaaucaaagccaa

SEQ ID NO: 2494158 - RNA, 19 nt, Homo sapiens
  misc_RNA (1)...(19): siRNA sense strand
cugaagaaaacguugaaga

SEQ ID NO: 2494159 - RNA, 19 nt, Homo sapiens
  misc_RNA (1)...(19): siRNA sense strand
ugaagaaaacguugaagau

SEQ ID NO: 2494160 - RNA, 19 nt, Homo sapiens
  misc_RNA (1)...(19): siRNA sense strand
ucaaccucguccaggcaaa

SEQ ID NO: 2494161 - RNA, 19 nt, Homo sapiens
  misc_RNA (1)...(19): siRNA sense strand
ggaaaggcuuacagagaau

SEQ ID NO: 2494162 - RNA, 19 nt, Homo sapiens
  misc_RNA (1)...(19): siRNA sense strand
ugaaagaugaugaaggaaa

SEQ ID NO: 2494163 - RNA, 19 nt, Homo sapiens
  misc_RNA (1)...(19): siRNA sense strand
agauaguugugcagggaaa

SEQ ID NO: 2494164 - RNA, 19 nt, Homo sapiens
  misc_RNA (1)...(19): siRNA sense strand
gcuuaaauccaauggcaaa

SEQ ID NO: 2494165 - RNA, 19 nt, Homo sapiens
  misc_RNA (1)...(19): siRNA sense strand
gagaaaggaagccgagaaa

SEQ ID NO: 2494166 - RNA, 19 nt, Homo sapiens
  misc_RNA (1)...(19): siRNA sense strand
ccacaaagcaagagcagau

SEQ ID NO: 2494167 - RNA, 19 nt, Homo sapiens
  misc_RNA (1)...(19): siRNA sense strand
guuaaagaaugguguggaa

SEQ ID NO: 2494168 - RNA, 19 nt, Homo sapiens
  misc_RNA (1)...(19): siRNA sense strand
gaaagaugaugaaggaaaa

SEQ ID NO: 2494169 - RNA, 19 nt, Homo sapiens
  misc_RNA (1)...(19): siRNA sense strand
gcgauauggccaagagcaa

SEQ ID NO: 2494170 - RNA, 19 nt, Homo sapiens
  misc_RNA (1)...(19): siRNA sense strand
agaguuaacugaagaggaa

SEQ ID NO: 2494171 - RNA, 19 nt, Homo sapiens
  misc_RNA (1)...(19): siRNA sense strand
acagauacaaagugaguua

SEQ ID NO: 2494172 - RNA, 19 nt, Homo sapiens
  misc_RNA (1)...(19): siRNA sense strand
acauuaagguacuggagaa

SEQ ID NO: 2494173 - RNA, 19 nt, Homo sapiens
  misc_RNA (1)...(19): siRNA sense strand
ccgauaaagccaaggaaca

SEQ ID NO: 2494174 - RNA, 19 nt, Homo sapiens
  misc_RNA (1)...(19): siRNA sense strand
auacugagaacuagagaaa

SEQ ID NO: 2494175 - RNA, 19 nt, Homo sapiens
  misc_RNA (1)...(19): siRNA sense strand
acuacaagaugcaaaguaa

SEQ ID NO: 2494176 - RNA, 19 nt, Homo sapiens
  misc_RNA (1)...(19): siRNA sense strand
gguucaggucauugagaaa

SEQ ID NO: 2494177 - RNA, 19 nt, Homo sapiens
  misc_RNA (1)...(19): siRNA sense strand
gaggaaaggcuuacagaga

SEQ ID NO: 2494178 - RNA, 19 nt, Homo sapiens
  misc_RNA (1)...(19): siRNA sense strand
gcagaacagaagagggcua

SEQ ID NO: 2494179 - RNA, 19 nt, Homo sapiens
  misc_RNA (1)...(19): siRNA sense strand
ccacuggaccaaagaguua

SEQ ID NO: 2494180 - RNA, 19 nt, Homo sapiens
  misc_RNA (1)...(19): siRNA sense strand
cgauaaagccaaggaacaa

SEQ ID NO: 2494181 - RNA, 19 nt, Homo sapiens
  misc_RNA (1)...(19): siRNA sense strand
gcagucaagccuagaguaa

SEQ ID NO: 2494182 - RNA, 19 nt, Homo sapiens
  misc_RNA (1)...(19): siRNA sense strand
accuaaaguuggagaaaca

SEQ ID NO: 2494183 - RNA, 19 nt, Homo sapiens
  misc_RNA (1)...(19): siRNA sense strand
gcugaagaaugguguggaa

SEQ ID NO: 2494184 - RNA, 19 nt, Homo sapiens
  misc_RNA (1)...(19): siRNA sense strand
gugcuaaagaggugaaaca

SEQ ID NO: 2494185 - RNA, 19 nt, Homo sapiens
  misc_RNA (1)...(19): siRNA sense strand
caagaaaacuacagaucua

SEQ ID NO: 2494186 - RNA, 19 nt, Homo sapiens
  misc_RNA (1)...(19): siRNA sense strand
agccugagccagagagaaa

SEQ ID NO: 2494187 - RNA, 19 nt, Homo sapiens
  misc_RNA (1)...(19): siRNA sense strand
ggauugaacaagagauuga

SEQ ID NO: 2494188 - RNA, 19 nt, Homo sapiens
  misc_RNA (1)...(19): siRNA sense strand
agcuaaagccaaagaacaa

SEQ ID NO: 2494189 - RNA, 19 nt, Homo sapiens
  misc_RNA (1)...(19): siRNA sense strand
ccagcaauauuaaaggaaa

SEQ ID NO: 2494190 - RNA, 19 nt, Homo sapiens
  misc_RNA (1)...(19): siRNA sense strand
ccaaggaggaccagggaga

SEQ ID NO: 2494191 - RNA, 19 nt, Homo sapiens
  misc_RNA (1)...(19): siRNA sense strand
uaguaaugcuguaggccaa

SEQ ID NO: 2494192 - RNA, 19 nt, Homo sapiens
  misc_RNA (1)...(19): siRNA sense strand
gaucaggacagaagagaga

SEQ ID NO: 2494193 - RNA, 19 nt, Homo sapiens
  misc_RNA (1)...(19): siRNA sense strand
gugaauuggucauaagaga

SEQ ID NO: 2494194 - RNA, 19 nt, Homo sapiens
  misc_RNA (1)...(19): siRNA sense strand
cucaagaacagguaagaaa

SEQ ID NO: 2494195 - RNA, 19 nt, Homo sapiens
  misc_RNA (1)...(19): siRNA sense strand
agauucagaaggagaaaua

SEQ ID NO: 2494196 - RNA, 19 nt, Homo sapiens
  misc_RNA (1)...(19): siRNA sense strand
gaaagguggacguuggaaa

SEQ ID NO: 2494197 - RNA, 19 nt, Homo sapiens
  misc_RNA (1)...(19): siRNA sense strand
cgcaauaagcauggagaaa

SEQ ID NO: 2494198 - RNA, 19 nt, Homo sapiens
  misc_RNA (1)...(19): siRNA sense strand
acaacagaucagaaagaaa

SEQ ID NO: 2494199 - RNA, 19 nt, Homo sapiens
  misc_RNA (1)...(19): siRNA sense strand
ccauaagaguguggaaauu

SEQ ID NO: 2494200 - RNA, 19 nt, Homo sapiens
  misc_RNA (1)...(19): siRNA sense strand
caauaagcauggagaaacu

SEQ ID NO: 2494201 - RNA, 19 nt, Homo sapiens
  misc_RNA (1)...(19): siRNA sense strand
cuuaaagguuguugguaga

SEQ ID NO: 2494202 - RNA, 19 nt, Homo sapiens
  misc_RNA (1)...(19): siRNA sense strand
ccaaggaacaagaauuaaa

SEQ ID NO: 2494203 - RNA, 19 nt, Homo sapiens
  misc_RNA (1)...(19): siRNA sense strand
ggagaagaugagaaaggaa

SEQ ID NO: 2494204 - RNA, 19 nt, Homo sapiens
  misc_RNA (1)...(19): siRNA sense strand
ugcuaaagccaaagaacaa

SEQ ID NO: 2494205 - RNA, 19 nt, Homo sapiens
  misc_RNA (1)...(19): siRNA sense strand
caaagagaaacaacagaaa

SEQ ID NO: 2494206 - RNA, 19 nt, Homo sapiens
  misc_RNA (1)...(19): siRNA sense strand
gguucaugagggagauaaa

SEQ ID NO: 2494207 - RNA, 19 nt, Homo sapiens
  misc_RNA (1)...(19): siRNA sense strand
cgucugaugcugaagauua

SEQ ID NO: 2494208 - RNA, 19 nt, Homo sapiens
  misc_RNA (1)...(19): siRNA sense strand
caggagaauuagagugcau

SEQ ID NO: 2494209 - RNA, 19 nt, Homo sapiens
  misc_RNA (1)...(19): siRNA sense strand
acaaauauguaguggaaag

SEQ ID NO: 2494210 - RNA, 19 nt, Homo sapiens
  misc_RNA (1)...(19): siRNA sense strand
agaagaaguaccugcuaaa

SEQ ID NO: 2494211 - RNA, 19 nt, Homo sapiens
  misc_RNA (1)...(19): siRNA sense strand
cuacaagauggcagagcua

SEQ ID NO: 2494212 - RNA, 19 nt, Homo sapiens
  misc_RNA (1)...(19): siRNA sense strand
auaaugauguggagcuuaa

SEQ ID NO: 2494213 - RNA, 19 nt, Homo sapiens
  misc_RNA (1)...(19): siRNA sense strand
gcacagaggacucggcaga

SEQ ID NO: 2494214 - RNA, 19 nt, Homo sapiens
  misc_RNA (1)...(19): siRNA sense strand
gggcaagaguacacgcuuu

SEQ ID NO: 2494215 - RNA, 19 nt, Homo sapiens
  misc_RNA (1)...(19): siRNA sense strand
uaagaaaggaagcggagaa

SEQ ID NO: 2494216 - RNA, 19 nt, Homo sapiens
  misc_RNA (1)...(19): siRNA sense strand
cccauaaaguagucauuaa

SEQ ID NO: 2494217 - RNA, 19 nt, Homo sapiens
  misc_RNA (1)...(19): siRNA sense strand
gaggauugaacaagagauu

SEQ ID NO: 2494218 - RNA, 19 nt, Homo sapiens
  misc_RNA (1)...(19): siRNA sense strand
acccaaagucaaagaacaa

SEQ ID NO: 2494219 - RNA, 19 nt, Homo sapiens
  misc_RNA (1)...(19): siRNA sense strand
acugagaacuagagaaacu

SEQ ID NO: 2494220 - RNA, 19 nt, Homo sapiens
  misc_RNA (1)...(19): siRNA sense strand
ccacuuuggaguacggaua

SEQ ID NO: 2494221 - RNA, 19 nt, Homo sapiens
  misc_RNA (1)...(19): siRNA sense strand
aaagagaacaagugcaaau

SEQ ID NO: 2494222 - RNA, 19 nt, Homo sapiens
  misc_RNA (1)...(19): siRNA sense strand
agucaagagaugugguuau

SEQ ID NO: 2494223 - RNA, 19 nt, Homo sapiens
  misc_RNA (1)...(19): siRNA sense strand
ccaccaaauuagaugacau

SEQ ID NO: 2494224 - RNA, 19 nt, Homo sapiens
  misc_RNA (1)...(19): siRNA sense strand
ugauauggccagagugaga

SEQ ID NO: 2494225 - RNA, 19 nt, Homo sapiens
  misc_RNA (1)...(19): siRNA sense strand
acaaguaacucaagaagca

SEQ ID NO: 2494226 - RNA, 19 nt, Homo sapiens
  misc_RNA (1)...(19): siRNA sense strand
ggauauaaggaacgcauuu

SEQ ID NO: 2494227 - RNA, 19 nt, Homo sapiens
  misc_RNA (1)...(19): siRNA sense strand
auguagaagaucaggaauu

SEQ ID NO: 2494228 - RNA, 19 nt, Homo sapiens
  misc_RNA (1)...(19): siRNA sense strand
gggaagaaggugaucucua

SEQ ID NO: 2494229 - RNA, 19 nt, Homo sapiens
  misc_RNA (1)...(19): siRNA sense strand
gguaaaagccaucaacaua

SEQ ID NO: 2494230 - RNA, 19 nt, Homo sapiens
  misc_RNA (1)...(19): siRNA sense strand
aauuaagccaagugacaaa

SEQ ID NO: 2494231 - RNA, 19 nt, Homo sapiens
  misc_RNA (1)...(19): siRNA sense strand
uuaagguacuggagaagaa

SEQ ID NO: 2494232 - RNA, 19 nt, Homo sapiens
  misc_RNA (1)...(19): siRNA sense strand
ggaaaggcuuacagagaau

SEQ ID NO: 2494233 - RNA, 19 nt, Homo sapiens
  misc_RNA (1)...(19): siRNA sense strand
ugaaagaugaugaaggaaa

SEQ ID NO: 2494234 - RNA, 19 nt, Homo sapiens
  misc_RNA (1)...(19): siRNA sense strand
agauaguugugcagggaaa

SEQ ID NO: 2494235 - RNA, 19 nt, Homo sapiens
  misc_RNA (1)...(19): siRNA sense strand
gcuuaaauccaauggcaaa

SEQ ID NO: 2494236 - RNA, 19 nt, Homo sapiens
  misc_RNA (1)...(19): siRNA sense strand
gagaaaggaagccgagaaa

SEQ ID NO: 2494237 - RNA, 19 nt, Homo sapiens
  misc_RNA (1)...(19): siRNA sense strand
ccacaaagcaagagcagau

SEQ ID NO: 2494238 - RNA, 19 nt, Homo sapiens
  misc_RNA (1)...(19): siRNA sense strand
guuaaagaaugguguggaa

SEQ ID NO: 2494239 - RNA, 19 nt, Homo sapiens
  misc_RNA (1)...(19): siRNA sense strand
gaaagaugaugaaggaaaa

SEQ ID NO: 2494240 - RNA, 19 nt, Homo sapiens
  misc_RNA (1)...(19): siRNA sense strand
gcgauauggccaagagcaa

SEQ ID NO: 2494241 - RNA, 19 nt, Homo sapiens
  misc_RNA (1)...(19): siRNA sense strand
agaguuaacugaagaggaa

SEQ ID NO: 2494242 - RNA, 19 nt, Homo sapiens
  misc_RNA (1)...(19): siRNA sense strand
acagauacaaagugaguua

SEQ ID NO: 2494243 - RNA, 19 nt, Homo sapiens
  misc_RNA (1)...(19): siRNA sense strand
acauuaagguacuggagaa

SEQ ID NO: 2494244 - RNA, 19 nt, Homo sapiens
  misc_RNA (1)...(19): siRNA sense strand
ccgauaaagccaaggaaca

SEQ ID NO: 2494245 - RNA, 19 nt, Homo sapiens
  misc_RNA (1)...(19): siRNA sense strand
auacugagaacuagagaaa

SEQ ID NO: 2494246 - RNA, 19 nt, Homo sapiens
  misc_RNA (1)...(19): siRNA sense strand
acuacaagaugcaaaguaa

SEQ ID NO: 2494247 - RNA, 19 nt, Homo sapiens
  misc_RNA (1)...(19): siRNA sense strand
gguucaggucauugagaaa

SEQ ID NO: 2494248 - RNA, 19 nt, Homo sapiens
  misc_RNA (1)...(19): siRNA sense strand
gaggaaaggcuuacagaga

SEQ ID NO: 2494249 - RNA, 19 nt, Homo sapiens
  misc_RNA (1)...(19): siRNA sense strand
gcagaacagaagagggcua

SEQ ID NO: 2494250 - RNA, 19 nt, Homo sapiens
  misc_RNA (1)...(19): siRNA sense strand
ccacuggaccaaagaguua

SEQ ID NO: 2494251 - RNA, 19 nt, Homo sapiens
  misc_RNA (1)...(19): siRNA sense strand
cgauaaagccaaggaacaa

SEQ ID NO: 2494252 - RNA, 19 nt, Homo sapiens
  misc_RNA (1)...(19): siRNA sense strand
gcagucaagccuagaguaa

SEQ ID NO: 2494253 - RNA, 19 nt, Homo sapiens
  misc_RNA (1)...(19): siRNA sense strand
accuaaaguuggagaaaca

SEQ ID NO: 2494254 - RNA, 19 nt, Homo sapiens
  misc_RNA (1)...(19): siRNA sense strand
gcugaagaaugguguggaa

SEQ ID NO: 2494255 - RNA, 19 nt, Homo sapiens
  misc_RNA (1)...(19): siRNA sense strand
gugcuaaagaggugaaaca

SEQ ID NO: 2494256 - RNA, 19 nt, Homo sapiens
  misc_RNA (1)...(19): siRNA sense strand
caagaaaacuacagaucua

SEQ ID NO: 2494257 - RNA, 19 nt, Homo sapiens
  misc_RNA (1)...(19): siRNA sense strand
agccugagccagagagaaa

SEQ ID NO: 2494258 - RNA, 19 nt, Homo sapiens
  misc_RNA (1)...(19): siRNA sense strand
ggauugaacaagagauuga

SEQ ID NO: 2494259 - RNA, 19 nt, Homo sapiens
  misc_RNA (1)...(19): siRNA sense strand
agcuaaagccaaagaacaa

SEQ ID NO: 2494260 - RNA, 19 nt, Homo sapiens
  misc_RNA (1)...(19): siRNA sense strand
ccagcaauauuaaaggaaa

SEQ ID NO: 2494261 - RNA, 19 nt, Homo sapiens
  misc_RNA (1)...(19): siRNA sense strand
ccaaggaggaccagggaga

SEQ ID NO: 2494262 - RNA, 19 nt, Homo sapiens
  misc_RNA (1)...(19): siRNA sense strand
uaguaaugcuguaggccaa

SEQ ID NO: 2494263 - RNA, 19 nt, Homo sapiens
  misc_RNA (1)...(19): siRNA sense strand
gaucaggacagaagagaga

SEQ ID NO: 2494264 - RNA, 19 nt, Homo sapiens
  misc_RNA (1)...(19): siRNA sense strand
gugaauuggucauaagaga

SEQ ID NO: 2494265 - RNA, 19 nt, Homo sapiens
  misc_RNA (1)...(19): siRNA sense strand
cucaagaacagguaagaaa

SEQ ID NO: 2494266 - RNA, 19 nt, Homo sapiens
  misc_RNA (1)...(19): siRNA sense strand
agauucagaaggagaaaua

SEQ ID NO: 2494267 - RNA, 19 nt, Homo sapiens
  misc_RNA (1)...(19): siRNA sense strand
gaaagguggacguuggaaa

SEQ ID NO: 2494268 - RNA, 19 nt, Homo sapiens
  misc_RNA (1)...(19): siRNA sense strand
cgcaauaagcauggagaaa

SEQ ID NO: 2494269 - RNA, 19 nt, Homo sapiens
  misc_RNA (1)...(19): siRNA sense strand
acaacagaucagaaagaaa

SEQ ID NO: 2494270 - RNA, 19 nt, Homo sapiens
  misc_RNA (1)...(19): siRNA sense strand
ccauaagaguguggaaauu

SEQ ID NO: 2494271 - RNA, 19 nt, Homo sapiens
  misc_RNA (1)...(19): siRNA sense strand
caauaagcauggagaaacu

SEQ ID NO: 2494272 - RNA, 19 nt, Homo sapiens
  misc_RNA (1)...(19): siRNA sense strand
cuuaaagguuguugguaga

SEQ ID NO: 2494273 - RNA, 19 nt, Homo sapiens
  misc_RNA (1)...(19): siRNA sense strand
ccaaggaacaagaauuaaa

SEQ ID NO: 2494274 - RNA, 19 nt, Homo sapiens
  misc_RNA (1)...(19): siRNA sense strand
ggagaagaugagaaaggaa

SEQ ID NO: 2494275 - RNA, 19 nt, Homo sapiens
  misc_RNA (1)...(19): siRNA sense strand
ugcuaaagccaaagaacaa

SEQ ID NO: 2494276 - RNA, 19 nt, Homo sapiens
  misc_RNA (1)...(19): siRNA sense strand
caaagagaaacaacagaaa

SEQ ID NO: 2494277 - RNA, 19 nt, Homo sapiens
  misc_RNA (1)...(19): siRNA sense strand
gguucaugagggagauaaa

SEQ ID NO: 2494278 - RNA, 19 nt, Homo sapiens
  misc_RNA (1)...(19): siRNA sense strand
cgucugaugcugaagauua

SEQ ID NO: 2494279 - RNA, 19 nt, Homo sapiens
  misc_RNA (1)...(19): siRNA sense strand
caggagaauuagagugcau

SEQ ID NO: 2494280 - RNA, 19 nt, Homo sapiens
  misc_RNA (1)...(19): siRNA sense strand
acaaauauguaguggaaag

SEQ ID NO: 2494281 - RNA, 19 nt, Homo sapiens
  misc_RNA (1)...(19): siRNA sense strand
agaagaaguaccugcuaaa

SEQ ID NO: 2494282 - RNA, 19 nt, Homo sapiens
  misc_RNA (1)...(19): siRNA sense strand
cuacaagauggcagagcua

SEQ ID NO: 2494283 - RNA, 19 nt, Homo sapiens
  misc_RNA (1)...(19): siRNA sense strand
auaaugauguggagcuuaa

SEQ ID NO: 2494284 - RNA, 19 nt, Homo sapiens
  misc_RNA (1)...(19): siRNA sense strand
gcacagaggacucggcaga

SEQ ID NO: 2494285 - RNA, 19 nt, Homo sapiens
  misc_RNA (1)...(19): siRNA sense strand
gggcaagaguacacgcuuu

SEQ ID NO: 2494286 - RNA, 19 nt, Homo sapiens
  misc_RNA (1)...(19): siRNA sense strand
uaagaaaggaagcggagaa

SEQ ID NO: 2494287 - RNA, 19 nt, Homo sapiens
  misc_RNA (1)...(19): siRNA sense strand
cccauaaaguagucauuaa

SEQ ID NO: 2494288 - RNA, 19 nt, Homo sapiens
  misc_RNA (1)...(19): siRNA sense strand
gaggauugaacaagagauu

SEQ ID NO: 2494289 - RNA, 19 nt, Homo sapiens
  misc_RNA (1)...(19): siRNA sense strand
acccaaagucaaagaacaa

SEQ ID NO: 2494290 - RNA, 19 nt, Homo sapiens
  misc_RNA (1)...(19): siRNA sense strand
acugagaacuagagaaacu

SEQ ID NO: 2494291 - RNA, 19 nt, Homo sapiens
  misc_RNA (1)...(19): siRNA sense strand
ccacuuuggaguacggaua

SEQ ID NO: 2494292 - RNA, 19 nt, Homo sapiens
  misc_RNA (1)...(19): siRNA sense strand
aaagagaacaagugcaaau

SEQ ID NO: 2494293 - RNA, 19 nt, Homo sapiens
  misc_RNA (1)...(19): siRNA sense strand
agucaagagaugugguuau

SEQ ID NO: 2494294 - RNA, 19 nt, Homo sapiens
  misc_RNA (1)...(19): siRNA sense strand
ccaccaaauuagaugacau

SEQ ID NO: 2494295 - RNA, 19 nt, Homo sapiens
  misc_RNA (1)...(19): siRNA sense strand
ugauauggccagagugaga

SEQ ID NO: 2494296 - RNA, 19 nt, Homo sapiens
  misc_RNA (1)...(19): siRNA sense strand
acaaguaacucaagaagca

SEQ ID NO: 2494297 - RNA, 19 nt, Homo sapiens
  misc_RNA (1)...(19): siRNA sense strand
ggauauaaggaacgcauuu

SEQ ID NO: 2494298 - RNA, 19 nt, Homo sapiens
  misc_RNA (1)...(19): siRNA sense strand
auguagaagaucaggaauu

SEQ ID NO: 2494299 - RNA, 19 nt, Homo sapiens
  misc_RNA (1)...(19): siRNA sense strand
gggaagaaggugaucucua

SEQ ID NO: 2494300 - RNA, 19 nt, Homo sapiens
  misc_RNA (1)...(19): siRNA sense strand
gguaaaagccaucaacaua

SEQ ID NO: 2494301 - RNA, 19 nt, Homo sapiens
  misc_RNA (1)...(19): siRNA sense strand
aauuaagccaagugacaaa

SEQ ID NO: 2494302 - RNA, 19 nt, Homo sapiens
  misc_RNA (1)...(19): siRNA sense strand
uuaagguacuggagaagaa

SEQ ID NO: 2494303 - RNA, 19 nt, Homo sapiens
  misc_RNA (1)...(19): siRNA sense strand
ggaaaggcuuacagagaau

SEQ ID NO: 2494304 - RNA, 19 nt, Homo sapiens
  misc_RNA (1)...(19): siRNA sense strand
ugaaagaugaugaaggaaa

SEQ ID NO: 2494305 - RNA, 19 nt, Homo sapiens
  misc_RNA (1)...(19): siRNA sense strand
agauaguugugcagggaaa

SEQ ID NO: 2494306 - RNA, 19 nt, Homo sapiens
  misc_RNA (1)...(19): siRNA sense strand
gcuuaaauccaauggcaaa

SEQ ID NO: 2494307 - RNA, 19 nt, Homo sapiens
  misc_RNA (1)...(19): siRNA sense strand
gagaaaggaagccgagaaa

SEQ ID NO: 2494308 - RNA, 19 nt, Homo sapiens
  misc_RNA (1)...(19): siRNA sense strand
ccacaaagcaagagcagau

SEQ ID NO: 2494309 - RNA, 19 nt, Homo sapiens
  misc_RNA (1)...(19): siRNA sense strand
guuaaagaaugguguggaa

SEQ ID NO: 2494310 - RNA, 19 nt, Homo sapiens
  misc_RNA (1)...(19): siRNA sense strand
gaaagaugaugaaggaaaa

SEQ ID NO: 2494311 - RNA, 19 nt, Homo sapiens
  misc_RNA (1)...(19): siRNA sense strand
gcgauauggccaagagcaa

SEQ ID NO: 2494312 - RNA, 19 nt, Homo sapiens
  misc_RNA (1)...(19): siRNA sense strand
agaguuaacugaagaggaa

SEQ ID NO: 2494313 - RNA, 19 nt, Homo sapiens
  misc_RNA (1)...(19): siRNA sense strand
acagauacaaagugaguua

SEQ ID NO: 2494314 - RNA, 19 nt, Homo sapiens
  misc_RNA (1)...(19): siRNA sense strand
acauuaagguacuggagaa

SEQ ID NO: 2494315 - RNA, 19 nt, Homo sapiens
  misc_RNA (1)...(19): siRNA sense strand
ccgauaaagccaaggaaca

SEQ ID NO: 2494316 - RNA, 19 nt, Homo sapiens
  misc_RNA (1)...(19): siRNA sense strand
auacugagaacuagagaaa

SEQ ID NO: 2494317 - RNA, 19 nt, Homo sapiens
  misc_RNA (1)...(19): siRNA sense strand
acuacaagaugcaaaguaa

SEQ ID NO: 2494318 - RNA, 19 nt, Homo sapiens
  misc_RNA (1)...(19): siRNA sense strand
gguucaggucauugagaaa

SEQ ID NO: 2494319 - RNA, 19 nt, Homo sapiens
  misc_RNA (1)...(19): siRNA sense strand
gaggaaaggcuuacagaga

SEQ ID NO: 2494320 - RNA, 19 nt, Homo sapiens
  misc_RNA (1)...(19): siRNA sense strand
gcagaacagaagagggcua

SEQ ID NO: 2494321 - RNA, 19 nt, Homo sapiens
  misc_RNA (1)...(19): siRNA sense strand
ccacuggaccaaagaguua

SEQ ID NO: 2494322 - RNA, 19 nt, Homo sapiens
  misc_RNA (1)...(19): siRNA sense strand
cgauaaagccaaggaacaa

SEQ ID NO: 2494323 - RNA, 19 nt, Homo sapiens
  misc_RNA (1)...(19): siRNA sense strand
gcagucaagccuagaguaa

SEQ ID NO: 2494324 - RNA, 19 nt, Homo sapiens
  misc_RNA (1)...(19): siRNA sense strand
accuaaaguuggagaaaca

SEQ ID NO: 2494325 - RNA, 19 nt, Homo sapiens
  misc_RNA (1)...(19): siRNA sense strand
gcugaagaaugguguggaa

SEQ ID NO: 2494326 - RNA, 19 nt, Homo sapiens
  misc_RNA (1)...(19): siRNA sense strand
gugcuaaagaggugaaaca

SEQ ID NO: 2494327 - RNA, 19 nt, Homo sapiens
  misc_RNA (1)...(19): siRNA sense strand
caagaaaacuacagaucua

SEQ ID NO: 2494328 - RNA, 19 nt, Homo sapiens
  misc_RNA (1)...(19): siRNA sense strand
agccugagccagagagaaa

SEQ ID NO: 2494329 - RNA, 19 nt, Homo sapiens
  misc_RNA (1)...(19): siRNA sense strand
ggauugaacaagagauuga

SEQ ID NO: 2494330 - RNA, 19 nt, Homo sapiens
  misc_RNA (1)...(19): siRNA sense strand
agcuaaagccaaagaacaa

SEQ ID NO: 2494331 - RNA, 19 nt, Homo sapiens
  misc_RNA (1)...(19): siRNA sense strand
ccagcaauauuaaaggaaa

SEQ ID NO: 2494332 - RNA, 19 nt, Homo sapiens
  misc_RNA (1)...(19): siRNA sense strand
ccaaggaggaccagggaga

SEQ ID NO: 2494333 - RNA, 19 nt, Homo sapiens
  misc_RNA (1)...(19): siRNA sense strand
uaguaaugcuguaggccaa

SEQ ID NO: 2494334 - RNA, 19 nt, Homo sapiens
  misc_RNA (1)...(19): siRNA sense strand
gaucaggacagaagagaga

SEQ ID NO: 2494335 - RNA, 19 nt, Homo sapiens
  misc_RNA (1)...(19): siRNA sense strand
gugaauuggucauaagaga

SEQ ID NO: 2494336 - RNA, 19 nt, Homo sapiens
  misc_RNA (1)...(19): siRNA sense strand
cucaagaacagguaagaaa

SEQ ID NO: 2494337 - RNA, 19 nt, Homo sapiens
  misc_RNA (1)...(19): siRNA sense strand
agauucagaaggagaaaua

SEQ ID NO: 2494338 - RNA, 19 nt, Homo sapiens
  misc_RNA (1)...(19): siRNA sense strand
gaaagguggacguuggaaa

SEQ ID NO: 2494339 - RNA, 19 nt, Homo sapiens
  misc_RNA (1)...(19): siRNA sense strand
cgcaauaagcauggagaaa

SEQ ID NO: 2494340 - RNA, 19 nt, Homo sapiens
  misc_RNA (1)...(19): siRNA sense strand
acaacagaucagaaagaaa

SEQ ID NO: 2494341 - RNA, 19 nt, Homo sapiens
  misc_RNA (1)...(19): siRNA sense strand
ccauaagaguguggaaauu

SEQ ID NO: 2494342 - RNA, 19 nt, Homo sapiens
  misc_RNA (1)...(19): siRNA sense strand
caauaagcauggagaaacu

SEQ ID NO: 2494343 - RNA, 19 nt, Homo sapiens
  misc_RNA (1)...(19): siRNA sense strand
cuuaaagguuguugguaga

SEQ ID NO: 2494344 - RNA, 19 nt, Homo sapiens
  misc_RNA (1)...(19): siRNA sense strand
ccaaggaacaagaauuaaa

SEQ ID NO: 2494345 - RNA, 19 nt, Homo sapiens
  misc_RNA (1)...(19): siRNA sense strand
ggagaagaugagaaaggaa

SEQ ID NO: 2494346 - RNA, 19 nt, Homo sapiens
  misc_RNA (1)...(19): siRNA sense strand
ugcuaaagccaaagaacaa

SEQ ID NO: 2494347 - RNA, 19 nt, Homo sapiens
  misc_RNA (1)...(19): siRNA sense strand
caaagagaaacaacagaaa

SEQ ID NO: 2494348 - RNA, 19 nt, Homo sapiens
  misc_RNA (1)...(19): siRNA sense strand
gguucaugagggagauaaa

SEQ ID NO: 2494349 - RNA, 19 nt, Homo sapiens
  misc_RNA (1)...(19): siRNA sense strand
cgucugaugcugaagauua

SEQ ID NO: 2494350 - RNA, 19 nt, Homo sapiens
  misc_RNA (1)...(19): siRNA sense strand
caggagaauuagagugcau

SEQ ID NO: 2494351 - RNA, 19 nt, Homo sapiens
  misc_RNA (1)...(19): siRNA sense strand
acaaauauguaguggaaag

SEQ ID NO: 2494352 - RNA, 19 nt, Homo sapiens
  misc_RNA (1)...(19): siRNA sense strand
agaagaaguaccugcuaaa

SEQ ID NO: 2494353 - RNA, 19 nt, Homo sapiens
  misc_RNA (1)...(19): siRNA sense strand
cuacaagauggcagagcua

SEQ ID NO: 2494354 - RNA, 19 nt, Homo sapiens
  misc_RNA (1)...(19): siRNA sense strand
auaaugauguggagcuuaa

SEQ ID NO: 2494355 - RNA, 19 nt, Homo sapiens
  misc_RNA (1)...(19): siRNA sense strand
gcacagaggacucggcaga

SEQ ID NO: 2494356 - RNA, 19 nt, Homo sapiens
  misc_RNA (1)...(19): siRNA sense strand
gggcaagaguacacgcuuu

SEQ ID NO: 2494357 - RNA, 19 nt, Homo sapiens
  misc_RNA (1)...(19): siRNA sense strand
uaagaaaggaagcggagaa

SEQ ID NO: 2494358 - RNA, 19 nt, Homo sapiens
  misc_RNA (1)...(19): siRNA sense strand
cccauaaaguagucauuaa

SEQ ID NO: 2494359 - RNA, 19 nt, Homo sapiens
  misc_RNA (1)...(19): siRNA sense strand
gaggauugaacaagagauu

SEQ ID NO: 2494360 - RNA, 19 nt, Homo sapiens
  misc_RNA (1)...(19): siRNA sense strand
acccaaagucaaagaacaa

SEQ ID NO: 2494361 - RNA, 19 nt, Homo sapiens
  misc_RNA (1)...(19): siRNA sense strand
acugagaacuagagaaacu

SEQ ID NO: 2494362 - RNA, 19 nt, Homo sapiens
  misc_RNA (1)...(19): siRNA sense strand
ccacuuuggaguacggaua

SEQ ID NO: 2494363 - RNA, 19 nt, Homo sapiens
  misc_RNA (1)...(19): siRNA sense strand
aaagagaacaagugcaaau

SEQ ID NO: 2494364 - RNA, 19 nt, Homo sapiens
  misc_RNA (1)...(19): siRNA sense strand
agucaagagaugugguuau

SEQ ID NO: 2494365 - RNA, 19 nt, Homo sapiens
  misc_RNA (1)...(19): siRNA sense strand
ccaccaaauuagaugacau

SEQ ID NO: 2494366 - RNA, 19 nt, Homo sapiens
  misc_RNA (1)...(19): siRNA sense strand
ugauauggccagagugaga

SEQ ID NO: 2494367 - RNA, 19 nt, Homo sapiens
  misc_RNA (1)...(19): siRNA sense strand
acaaguaacucaagaagca

SEQ ID NO: 2494368 - RNA, 19 nt, Homo sapiens
  misc_RNA (1)...(19): siRNA sense strand
ggauauaaggaacgcauuu

SEQ ID NO: 2494369 - RNA, 19 nt, Homo sapiens
  misc_RNA (1)...(19): siRNA sense strand
auguagaagaucaggaauu

SEQ ID NO: 2494370 - RNA, 19 nt, Homo sapiens
  misc_RNA (1)...(19): siRNA sense strand
gggaagaaggugaucucua

SEQ ID NO: 2494371 - RNA, 19 nt, Homo sapiens
  misc_RNA (1)...(19): siRNA sense strand
gguaaaagccaucaacaua

SEQ ID NO: 2494372 - RNA, 19 nt, Homo sapiens
  misc_RNA (1)...(19): siRNA sense strand
aauuaagccaagugacaaa

SEQ ID NO: 2494373 - RNA, 19 nt, Homo sapiens
  misc_RNA (1)...(19): siRNA sense strand
uuaagguacuggagaagaa

SEQ ID NO: 2494374 - RNA, 19 nt, Homo sapiens
  misc_RNA (1)...(19): siRNA sense strand
ggaaaggcuuacagagaau

SEQ ID NO: 2494375 - RNA, 19 nt, Homo sapiens
  misc_RNA (1)...(19): siRNA sense strand
ugaaagaugaugaaggaaa

SEQ ID NO: 2494376 - RNA, 19 nt, Homo sapiens
  misc_RNA (1)...(19): siRNA sense strand
agauaguugugcagggaaa

SEQ ID NO: 2494377 - RNA, 19 nt, Homo sapiens
  misc_RNA (1)...(19): siRNA sense strand
gcuuaaauccaauggcaaa

SEQ ID NO: 2494378 - RNA, 19 nt, Homo sapiens
  misc_RNA (1)...(19): siRNA sense strand
gagaaaggaagccgagaaa

SEQ ID NO: 2494379 - RNA, 19 nt, Homo sapiens
  misc_RNA (1)...(19): siRNA sense strand
ccacaaagcaagagcagau

SEQ ID NO: 2494380 - RNA, 19 nt, Homo sapiens
  misc_RNA (1)...(19): siRNA sense strand
guuaaagaaugguguggaa

SEQ ID NO: 2494381 - RNA, 19 nt, Homo sapiens
  misc_RNA (1)...(19): siRNA sense strand
gaaagaugaugaaggaaaa

SEQ ID NO: 2494382 - RNA, 19 nt, Homo sapiens
  misc_RNA (1)...(19): siRNA sense strand
gcgauauggccaagagcaa

SEQ ID NO: 2494383 - RNA, 19 nt, Homo sapiens
  misc_RNA (1)...(19): siRNA sense strand
agaguuaacugaagaggaa

SEQ ID NO: 2494384 - RNA, 19 nt, Homo sapiens
  misc_RNA (1)...(19): siRNA sense strand
acagauacaaagugaguua

SEQ ID NO: 2494385 - RNA, 19 nt, Homo sapiens
  misc_RNA (1)...(19): siRNA sense strand
acauuaagguacuggagaa

SEQ ID NO: 2494386 - RNA, 19 nt, Homo sapiens
  misc_RNA (1)...(19): siRNA sense strand
ccgauaaagccaaggaaca

SEQ ID NO: 2494387 - RNA, 19 nt, Homo sapiens
  misc_RNA (1)...(19): siRNA sense strand
auacugagaacuagagaaa

SEQ ID NO: 2494388 - RNA, 19 nt, Homo sapiens
  misc_RNA (1)...(19): siRNA sense strand
acuacaagaugcaaaguaa

SEQ ID NO: 2494389 - RNA, 19 nt, Homo sapiens
  misc_RNA (1)...(19): siRNA sense strand
gguucaggucauugagaaa

SEQ ID NO: 2494390 - RNA, 19 nt, Homo sapiens
  misc_RNA (1)...(19): siRNA sense strand
gaggaaaggcuuacagaga

SEQ ID NO: 2494391 - RNA, 19 nt, Homo sapiens
  misc_RNA (1)...(19): siRNA sense strand
gcagaacagaagagggcua

SEQ ID NO: 2494392 - RNA, 19 nt, Homo sapiens
  misc_RNA (1)...(19): siRNA sense strand
ccacuggaccaaagaguua

SEQ ID NO: 2494393 - RNA, 19 nt, Homo sapiens
  misc_RNA (1)...(19): siRNA sense strand
cgauaaagccaaggaacaa

SEQ ID NO: 2494394 - RNA, 19 nt, Homo sapiens
  misc_RNA (1)...(19): siRNA sense strand
gcagucaagccuagaguaa

SEQ ID NO: 2494395 - RNA, 19 nt, Homo sapiens
  misc_RNA (1)...(19): siRNA sense strand
accuaaaguuggagaaaca

SEQ ID NO: 2494396 - RNA, 19 nt, Homo sapiens
  misc_RNA (1)...(19): siRNA sense strand
gcugaagaaugguguggaa

SEQ ID NO: 2494397 - RNA, 19 nt, Homo sapiens
  misc_RNA (1)...(19): siRNA sense strand
gugcuaaagaggugaaaca

SEQ ID NO: 2494398 - RNA, 19 nt, Homo sapiens
  misc_RNA (1)...(19): siRNA sense strand
caagaaaacuacagaucua

SEQ ID NO: 2494399 - RNA, 19 nt, Homo sapiens
  misc_RNA (1)...(19): siRNA sense strand
agccugagccagagagaaa

SEQ ID NO: 2494400 - RNA, 19 nt, Homo sapiens
  misc_RNA (1)...(19): siRNA sense strand
ggauugaacaagagauuga

SEQ ID NO: 2494401 - RNA, 19 nt, Homo sapiens
  misc_RNA (1)...(19): siRNA sense strand
agcuaaagccaaagaacaa

SEQ ID NO: 2494402 - RNA, 19 nt, Homo sapiens
  misc_RNA (1)...(19): siRNA sense strand
ccagcaauauuaaaggaaa

SEQ ID NO: 2494403 - RNA, 19 nt, Homo sapiens
  misc_RNA (1)...(19): siRNA sense strand
ccaaggaggaccagggaga

SEQ ID NO: 2494404 - RNA, 19 nt, Homo sapiens
  misc_RNA (1)...(19): siRNA sense strand
uaguaaugcuguaggccaa

SEQ ID NO: 2494405 - RNA, 19 nt, Homo sapiens
  misc_RNA (1)...(19): siRNA sense strand
gaucaggacagaagagaga

SEQ ID NO: 2494406 - RNA, 19 nt, Homo sapiens
  misc_RNA (1)...(19): siRNA sense strand
gugaauuggucauaagaga

SEQ ID NO: 2494407 - RNA, 19 nt, Homo sapiens
  misc_RNA (1)...(19): siRNA sense strand
cucaagaacagguaagaaa

SEQ ID NO: 2494408 - RNA, 19 nt, Homo sapiens
  misc_RNA (1)...(19): siRNA sense strand
agauucagaaggagaaaua

SEQ ID NO: 2494409 - RNA, 19 nt, Homo sapiens
  misc_RNA (1)...(19): siRNA sense strand
gaaagguggacguuggaaa

SEQ ID NO: 2494410 - RNA, 19 nt, Homo sapiens
  misc_RNA (1)...(19): siRNA sense strand
cgcaauaagcauggagaaa

SEQ ID NO: 2494411 - RNA, 19 nt, Homo sapiens
  misc_RNA (1)...(19): siRNA sense strand
acaacagaucagaaagaaa

SEQ ID NO: 2494412 - RNA, 19 nt, Homo sapiens
  misc_RNA (1)...(19): siRNA sense strand
ccauaagaguguggaaauu

SEQ ID NO: 2494413 - RNA, 19 nt, Homo sapiens
  misc_RNA (1)...(19): siRNA sense strand
caauaagcauggagaaacu

SEQ ID NO: 2494414 - RNA, 19 nt, Homo sapiens
  misc_RNA (1)...(19): siRNA sense strand
cuuaaagguuguugguaga

SEQ ID NO: 2494415 - RNA, 19 nt, Homo sapiens
  misc_RNA (1)...(19): siRNA sense strand
ccaaggaacaagaauuaaa

SEQ ID NO: 2494416 - RNA, 19 nt, Homo sapiens
  misc_RNA (1)...(19): siRNA sense strand
ggagaagaugagaaaggaa

SEQ ID NO: 2494417 - RNA, 19 nt, Homo sapiens
  misc_RNA (1)...(19): siRNA sense strand
ugcuaaagccaaagaacaa

SEQ ID NO: 2494418 - RNA, 19 nt, Homo sapiens
  misc_RNA (1)...(19): siRNA sense strand
caaagagaaacaacagaaa

SEQ ID NO: 2494419 - RNA, 19 nt, Homo sapiens
  misc_RNA (1)...(19): siRNA sense strand
gguucaugagggagauaaa

SEQ ID NO: 2494420 - RNA, 19 nt, Homo sapiens
  misc_RNA (1)...(19): siRNA sense strand
cgucugaugcugaagauua

SEQ ID NO: 2494421 - RNA, 19 nt, Homo sapiens
  misc_RNA (1)...(19): siRNA sense strand
caggagaauuagagugcau

SEQ ID NO: 2494422 - RNA, 19 nt, Homo sapiens
  misc_RNA (1)...(19): siRNA sense strand
acaaauauguaguggaaag

SEQ ID NO: 2494423 - RNA, 19 nt, Homo sapiens
  misc_RNA (1)...(19): siRNA sense strand
agaagaaguaccugcuaaa

SEQ ID NO: 2494424 - RNA, 19 nt, Homo sapiens
  misc_RNA (1)...(19): siRNA sense strand
cuacaagauggcagagcua

SEQ ID NO: 2494425 - RNA, 19 nt, Homo sapiens
  misc_RNA (1)...(19): siRNA sense strand
auaaugauguggagcuuaa

SEQ ID NO: 2494426 - RNA, 19 nt, Homo sapiens
  misc_RNA (1)...(19): siRNA sense strand
gcacagaggacucggcaga

SEQ ID NO: 2494427 - RNA, 19 nt, Homo sapiens
  misc_RNA (1)...(19): siRNA sense strand
gggcaagaguacacgcuuu

SEQ ID NO: 2494428 - RNA, 19 nt, Homo sapiens
  misc_RNA (1)...(19): siRNA sense strand
uaagaaaggaagcggagaa

SEQ ID NO: 2494429 - RNA, 19 nt, Homo sapiens
  misc_RNA (1)...(19): siRNA sense strand
cccauaaaguagucauuaa

SEQ ID NO: 2494430 - RNA, 19 nt, Homo sapiens
  misc_RNA (1)...(19): siRNA sense strand
gaggauugaacaagagauu

SEQ ID NO: 2494431 - RNA, 19 nt, Homo sapiens
  misc_RNA (1)...(19): siRNA sense strand
acccaaagucaaagaacaa

SEQ ID NO: 2494432 - RNA, 19 nt, Homo sapiens
  misc_RNA (1)...(19): siRNA sense strand
acugagaacuagagaaacu

SEQ ID NO: 2494433 - RNA, 19 nt, Homo sapiens
  misc_RNA (1)...(19): siRNA sense strand
ccacuuuggaguacggaua

SEQ ID NO: 2494434 - RNA, 19 nt, Homo sapiens
  misc_RNA (1)...(19): siRNA sense strand
aaagagaacaagugcaaau

SEQ ID NO: 2494435 - RNA, 19 nt, Homo sapiens
  misc_RNA (1)...(19): siRNA sense strand
agucaagagaugugguuau

SEQ ID NO: 2494436 - RNA, 19 nt, Homo sapiens
  misc_RNA (1)...(19): siRNA sense strand
ccaccaaauuagaugacau

SEQ ID NO: 2494437 - RNA, 19 nt, Homo sapiens
  misc_RNA (1)...(19): siRNA sense strand
ugauauggccagagugaga

SEQ ID NO: 2494438 - RNA, 19 nt, Homo sapiens
  misc_RNA (1)...(19): siRNA sense strand
acaaguaacucaagaagca

SEQ ID NO: 2494439 - RNA, 19 nt, Homo sapiens
  misc_RNA (1)...(19): siRNA sense strand
ggauauaaggaacgcauuu

SEQ ID NO: 2494440 - RNA, 19 nt, Homo sapiens
  misc_RNA (1)...(19): siRNA sense strand
auguagaagaucaggaauu

SEQ ID NO: 2494441 - RNA, 19 nt, Homo sapiens
  misc_RNA (1)...(19): siRNA sense strand
gggaagaaggugaucucua

SEQ ID NO: 2494442 - RNA, 19 nt, Homo sapiens
  misc_RNA (1)...(19): siRNA sense strand
gguaaaagccaucaacaua

SEQ ID NO: 2494443 - RNA, 19 nt, Homo sapiens
  misc_RNA (1)...(19): siRNA sense strand
aauuaagccaagugacaaa

SEQ ID NO: 2494444 - RNA, 19 nt, Homo sapiens
  misc_RNA (1)...(19): siRNA sense strand
uuaagguacuggagaagaa

SEQ ID NO: 2494445 - RNA, 19 nt, Homo sapiens
  misc_RNA (1)...(19): siRNA sense strand
ggaaaggcuuacagagaau

SEQ ID NO: 2494446 - RNA, 19 nt, Homo sapiens
  misc_RNA (1)...(19): siRNA sense strand
ugaaagaugaugaaggaaa

SEQ ID NO: 2494447 - RNA, 19 nt, Homo sapiens
  misc_RNA (1)...(19): siRNA sense strand
agauaguugugcagggaaa

SEQ ID NO: 2494448 - RNA, 19 nt, Homo sapiens
  misc_RNA (1)...(19): siRNA sense strand
gcuuaaauccaauggcaaa

SEQ ID NO: 2494449 - RNA, 19 nt, Homo sapiens
  misc_RNA (1)...(19): siRNA sense strand
gagaaaggaagccgagaaa

SEQ ID NO: 2494450 - RNA, 19 nt, Homo sapiens
  misc_RNA (1)...(19): siRNA sense strand
ccacaaagcaagagcagau

SEQ ID NO: 2494451 - RNA, 19 nt, Homo sapiens
  misc_RNA (1)...(19): siRNA sense strand
guuaaagaaugguguggaa

SEQ ID NO: 2494452 - RNA, 19 nt, Homo sapiens
  misc_RNA (1)...(19): siRNA sense strand
gaaagaugaugaaggaaaa

SEQ ID NO: 2494453 - RNA, 19 nt, Homo sapiens
  misc_RNA (1)...(19): siRNA sense strand
gcgauauggccaagagcaa

SEQ ID NO: 2494454 - RNA, 19 nt, Homo sapiens
  misc_RNA (1)...(19): siRNA sense strand
agaguuaacugaagaggaa

SEQ ID NO: 2494455 - RNA, 19 nt, Homo sapiens
  misc_RNA (1)...(19): siRNA sense strand
acagauacaaagugaguua

SEQ ID NO: 2494456 - RNA, 19 nt, Homo sapiens
  misc_RNA (1)...(19): siRNA sense strand
acauuaagguacuggagaa

SEQ ID NO: 2494457 - RNA, 19 nt, Homo sapiens
  misc_RNA (1)...(19): siRNA sense strand
ccgauaaagccaaggaaca

SEQ ID NO: 2494458 - RNA, 19 nt, Homo sapiens
  misc_RNA (1)...(19): siRNA sense strand
auacugagaacuagagaaa

SEQ ID NO: 2494459 - RNA, 19 nt, Homo sapiens
  misc_RNA (1)...(19): siRNA sense strand
acuacaagaugcaaaguaa

SEQ ID NO: 2494460 - RNA, 19 nt, Homo sapiens
  misc_RNA (1)...(19): siRNA sense strand
gguucaggucauugagaaa

SEQ ID NO: 2494461 - RNA, 19 nt, Homo sapiens
  misc_RNA (1)...(19): siRNA sense strand
gaggaaaggcuuacagaga

SEQ ID NO: 2494462 - RNA, 19 nt, Homo sapiens
  misc_RNA (1)...(19): siRNA sense strand
gcagaacagaagagggcua

SEQ ID NO: 2494463 - RNA, 19 nt, Homo sapiens
  misc_RNA (1)...(19): siRNA sense strand
ccacuggaccaaagaguua

SEQ ID NO: 2494464 - RNA, 19 nt, Homo sapiens
  misc_RNA (1)...(19): siRNA sense strand
cgauaaagccaaggaacaa

SEQ ID NO: 2494465 - RNA, 19 nt, Homo sapiens
  misc_RNA (1)...(19): siRNA sense strand
gcagucaagccuagaguaa

SEQ ID NO: 2494466 - RNA, 19 nt, Homo sapiens
  misc_RNA (1)...(19): siRNA sense strand
accuaaaguuggagaaaca

SEQ ID NO: 2494467 - RNA, 19 nt, Homo sapiens
  misc_RNA (1)...(19): siRNA sense strand
gcugaagaaugguguggaa

SEQ ID NO: 2494468 - RNA, 19 nt, Homo sapiens
  misc_RNA (1)...(19): siRNA sense strand
gugcuaaagaggugaaaca

SEQ ID NO: 2494469 - RNA, 19 nt, Homo sapiens
  misc_RNA (1)...(19): siRNA sense strand
caagaaaacuacagaucua

SEQ ID NO: 2494470 - RNA, 19 nt, Homo sapiens
  misc_RNA (1)...(19): siRNA sense strand
agccugagccagagagaaa

SEQ ID NO: 2494471 - RNA, 19 nt, Homo sapiens
  misc_RNA (1)...(19): siRNA sense strand
ggauugaacaagagauuga

SEQ ID NO: 2494472 - RNA, 19 nt, Homo sapiens
  misc_RNA (1)...(19): siRNA sense strand
agcuaaagccaaagaacaa

SEQ ID NO: 2494473 - RNA, 19 nt, Homo sapiens
  misc_RNA (1)...(19): siRNA sense strand
ccagcaauauuaaaggaaa

SEQ ID NO: 2494474 - RNA, 19 nt, Homo sapiens
  misc_RNA (1)...(19): siRNA sense strand
ccaaggaggaccagggaga

SEQ ID NO: 2494475 - RNA, 19 nt, Homo sapiens
  misc_RNA (1)...(19): siRNA sense strand
uaguaaugcuguaggccaa

SEQ ID NO: 2494476 - RNA, 19 nt, Homo sapiens
  misc_RNA (1)...(19): siRNA sense strand
gaucaggacagaagagaga

SEQ ID NO: 2494477 - RNA, 19 nt, Homo sapiens
  misc_RNA (1)...(19): siRNA sense strand
gugaauuggucauaagaga

SEQ ID NO: 2494478 - RNA, 19 nt, Homo sapiens
  misc_RNA (1)...(19): siRNA sense strand
cucaagaacagguaagaaa

SEQ ID NO: 2494479 - RNA, 19 nt, Homo sapiens
  misc_RNA (1)...(19): siRNA sense strand
agauucagaaggagaaaua

SEQ ID NO: 2494480 - RNA, 19 nt, Homo sapiens
  misc_RNA (1)...(19): siRNA sense strand
gaaagguggacguuggaaa

SEQ ID NO: 2494481 - RNA, 19 nt, Homo sapiens
  misc_RNA (1)...(19): siRNA sense strand
cgcaauaagcauggagaaa

SEQ ID NO: 2494482 - RNA, 19 nt, Homo sapiens
  misc_RNA (1)...(19): siRNA sense strand
acaacagaucagaaagaaa

SEQ ID NO: 2494483 - RNA, 19 nt, Homo sapiens
  misc_RNA (1)...(19): siRNA sense strand
ccauaagaguguggaaauu

SEQ ID NO: 2494484 - RNA, 19 nt, Homo sapiens
  misc_RNA (1)...(19): siRNA sense strand
caauaagcauggagaaacu

SEQ ID NO: 2494485 - RNA, 19 nt, Homo sapiens
  misc_RNA (1)...(19): siRNA sense strand
cuuaaagguuguugguaga

SEQ ID NO: 2494486 - RNA, 19 nt, Homo sapiens
  misc_RNA (1)...(19): siRNA sense strand
ccaaggaacaagaauuaaa

SEQ ID NO: 2494487 - RNA, 19 nt, Homo sapiens
  misc_RNA (1)...(19): siRNA sense strand
ggagaagaugagaaaggaa

SEQ ID NO: 2494488 - RNA, 19 nt, Homo sapiens
  misc_RNA (1)...(19): siRNA sense strand
ugcuaaagccaaagaacaa

SEQ ID NO: 2494489 - RNA, 19 nt, Homo sapiens
  misc_RNA (1)...(19): siRNA sense strand
caaagagaaacaacagaaa

SEQ ID NO: 2494490 - RNA, 19 nt, Homo sapiens
  misc_RNA (1)...(19): siRNA sense strand
gguucaugagggagauaaa

SEQ ID NO: 2494491 - RNA, 19 nt, Homo sapiens
  misc_RNA (1)...(19): siRNA sense strand
cgucugaugcugaagauua

SEQ ID NO: 2494492 - RNA, 19 nt, Homo sapiens
  misc_RNA (1)...(19): siRNA sense strand
caggagaauuagagugcau

SEQ ID NO: 2494493 - RNA, 19 nt, Homo sapiens
  misc_RNA (1)...(19): siRNA sense strand
acaaauauguaguggaaag

SEQ ID NO: 2494494 - RNA, 19 nt, Homo sapiens
  misc_RNA (1)...(19): siRNA sense strand
agaagaaguaccugcuaaa

SEQ ID NO: 2494495 - RNA, 19 nt, Homo sapiens
  misc_RNA (1)...(19): siRNA sense strand
cuacaagauggcagagcua

SEQ ID NO: 2494496 - RNA, 19 nt, Homo sapiens
  misc_RNA (1)...(19): siRNA sense strand
auaaugauguggagcuuaa

SEQ ID NO: 2494497 - RNA, 19 nt, Homo sapiens
  misc_RNA (1)...(19): siRNA sense strand
gcacagaggacucggcaga

SEQ ID NO: 2494498 - RNA, 19 nt, Homo sapiens
  misc_RNA (1)...(19): siRNA sense strand
gggcaagaguacacgcuuu

SEQ ID NO: 2494499 - RNA, 19 nt, Homo sapiens
  misc_RNA (1)...(19): siRNA sense strand
uaagaaaggaagcggagaa

SEQ ID NO: 2494500 - RNA, 19 nt, Homo sapiens
  misc_RNA (1)...(19): siRNA sense strand
cccauaaaguagucauuaa

SEQ ID NO: 2494501 - RNA, 19 nt, Homo sapiens
  misc_RNA (1)...(19): siRNA sense strand
gaggauugaacaagagauu

SEQ ID NO: 2494502 - RNA, 19 nt, Homo sapiens
  misc_RNA (1)...(19): siRNA sense strand
acccaaagucaaagaacaa

SEQ ID NO: 2494503 - RNA, 19 nt, Homo sapiens
  misc_RNA (1)...(19): siRNA sense strand
acugagaacuagagaaacu

SEQ ID NO: 2494504 - RNA, 19 nt, Homo sapiens
  misc_RNA (1)...(19): siRNA sense strand
ccacuuuggaguacggaua

SEQ ID NO: 2494505 - RNA, 19 nt, Homo sapiens
  misc_RNA (1)...(19): siRNA sense strand
aaagagaacaagugcaaau

SEQ ID NO: 2494506 - RNA, 19 nt, Homo sapiens
  misc_RNA (1)...(19): siRNA sense strand
agucaagagaugugguuau

SEQ ID NO: 2494507 - RNA, 19 nt, Homo sapiens
  misc_RNA (1)...(19): siRNA sense strand
ccaccaaauuagaugacau

SEQ ID NO: 2494508 - RNA, 19 nt, Homo sapiens
  misc_RNA (1)...(19): siRNA sense strand
ugauauggccagagugaga

SEQ ID NO: 2494509 - RNA, 19 nt, Homo sapiens
  misc_RNA (1)...(19): siRNA sense strand
acaaguaacucaagaagca

SEQ ID NO: 2494510 - RNA, 19 nt, Homo sapiens
  misc_RNA (1)...(19): siRNA sense strand
ggauauaaggaacgcauuu

SEQ ID NO: 2494511 - RNA, 19 nt, Homo sapiens
  misc_RNA (1)...(19): siRNA sense strand
auguagaagaucaggaauu

SEQ ID NO: 2494512 - RNA, 19 nt, Homo sapiens
  misc_RNA (1)...(19): siRNA sense strand
gggaagaaggugaucucua

SEQ ID NO: 2494513 - RNA, 19 nt, Homo sapiens
  misc_RNA (1)...(19): siRNA sense strand
gguaaaagccaucaacaua

SEQ ID NO: 2494514 - RNA, 19 nt, Homo sapiens
  misc_RNA (1)...(19): siRNA sense strand
aauuaagccaagugacaaa

SEQ ID NO: 2494515 - RNA, 19 nt, Homo sapiens
  misc_RNA (1)...(19): siRNA sense strand
uuaagguacuggagaagaa

SEQ ID NO: 2494516 - RNA, 19 nt, Homo sapiens
  misc_RNA (1)...(19): siRNA sense strand
gugccuuacgggugaacaa

SEQ ID NO: 2494517 - RNA, 19 nt, Homo sapiens
  misc_RNA (1)...(19): siRNA sense strand
ggcuguacuaucugcgaaa

SEQ ID NO: 2494518 - RNA, 19 nt, Homo sapiens
  misc_RNA (1)...(19): siRNA sense strand
cagcuauucuggaggcguu

SEQ ID NO: 2494519 - RNA, 19 nt, Homo sapiens
  misc_RNA (1)...(19): siRNA sense strand
aaggaagaugguuggguga

SEQ ID NO: 2494520 - RNA, 19 nt, Homo sapiens
  misc_RNA (1)...(19): siRNA sense strand
gugccuuacgggugaacaa

SEQ ID NO: 2494521 - RNA, 19 nt, Homo sapiens
  misc_RNA (1)...(19): siRNA sense strand
ggcuguacuaucugcgaaa

SEQ ID NO: 2494522 - RNA, 19 nt, Homo sapiens
  misc_RNA (1)...(19): siRNA sense strand
cagcuauucuggaggcguu

SEQ ID NO: 2494523 - RNA, 19 nt, Homo sapiens
  misc_RNA (1)...(19): siRNA sense strand
aaggaagaugguuggguga

SEQ ID NO: 2494524 - RNA, 19 nt, Homo sapiens
  misc_RNA (1)...(19): siRNA sense strand
caaccauaggaaagagcua

SEQ ID NO: 2494525 - RNA, 19 nt, Homo sapiens
  misc_RNA (1)...(19): siRNA sense strand
agaacaagaccaagagcca

SEQ ID NO: 2494526 - RNA, 19 nt, Homo sapiens
  misc_RNA (1)...(19): siRNA sense strand
gagaagagccucauaggga

SEQ ID NO: 2494527 - RNA, 19 nt, Homo sapiens
  misc_RNA (1)...(19): siRNA sense strand
aagagaaauccaaggacuu

SEQ ID NO: 2494528 - RNA, 19 nt, Homo sapiens
  misc_RNA (1)...(19): siRNA sense strand
agguagagugugaggagca

SEQ ID NO: 2494529 - RNA, 19 nt, Homo sapiens
  misc_RNA (1)...(19): siRNA sense strand
gguccgaaaagaagugaua

SEQ ID NO: 2494530 - RNA, 19 nt, Homo sapiens
  misc_RNA (1)...(19): siRNA sense strand
augaagaacaagaccaaga

SEQ ID NO: 2494531 - RNA, 19 nt, Homo sapiens
  misc_RNA (1)...(19): siRNA sense strand
ggugguggcuguagcgcuu

SEQ ID NO: 2494532 - RNA, 19 nt, Homo sapiens
  misc_RNA (1)...(19): siRNA sense strand
gaaaagaagugauacgguu

SEQ ID NO: 2494533 - RNA, 19 nt, Homo sapiens
  misc_RNA (1)...(19): siRNA sense strand
acgguuugagaaagagaaa

SEQ ID NO: 2494534 - RNA, 19 nt, Homo sapiens
  misc_RNA (1)...(19): siRNA sense strand
aaagagaaauccaaggacu

SEQ ID NO: 2494535 - RNA, 19 nt, Homo sapiens
  misc_RNA (1)...(19): siRNA sense strand
agggaugacaaaagugaaa

SEQ ID NO: 2494536 - RNA, 19 nt, Homo sapiens
  misc_RNA (1)...(19): siRNA sense strand
caaaagugaaaguugggaa

SEQ ID NO: 2494537 - RNA, 19 nt, Homo sapiens
  misc_RNA (1)...(19): siRNA sense strand
agaagagccucauagggau

SEQ ID NO: 2494538 - RNA, 19 nt, Homo sapiens
  misc_RNA (1)...(19): siRNA sense strand
cgggugacucaauaugaaa

SEQ ID NO: 2494539 - RNA, 19 nt, Homo sapiens
  misc_RNA (1)...(19): siRNA sense strand
caaccauaggaaagagcua

SEQ ID NO: 2494540 - RNA, 19 nt, Homo sapiens
  misc_RNA (1)...(19): siRNA sense strand
agaacaagaccaagagcca

SEQ ID NO: 2494541 - RNA, 19 nt, Homo sapiens
  misc_RNA (1)...(19): siRNA sense strand
gagaagagccucauaggga

SEQ ID NO: 2494542 - RNA, 19 nt, Homo sapiens
  misc_RNA (1)...(19): siRNA sense strand
aagagaaauccaaggacuu

SEQ ID NO: 2494543 - RNA, 19 nt, Homo sapiens
  misc_RNA (1)...(19): siRNA sense strand
agguagagugugaggagca

SEQ ID NO: 2494544 - RNA, 19 nt, Homo sapiens
  misc_RNA (1)...(19): siRNA sense strand
gguccgaaaagaagugaua

SEQ ID NO: 2494545 - RNA, 19 nt, Homo sapiens
  misc_RNA (1)...(19): siRNA sense strand
augaagaacaagaccaaga

SEQ ID NO: 2494546 - RNA, 19 nt, Homo sapiens
  misc_RNA (1)...(19): siRNA sense strand
ggugguggcuguagcgcuu

SEQ ID NO: 2494547 - RNA, 19 nt, Homo sapiens
  misc_RNA (1)...(19): siRNA sense strand
gaaaagaagugauacgguu

SEQ ID NO: 2494548 - RNA, 19 nt, Homo sapiens
  misc_RNA (1)...(19): siRNA sense strand
acgguuugagaaagagaaa

SEQ ID NO: 2494549 - RNA, 19 nt, Homo sapiens
  misc_RNA (1)...(19): siRNA sense strand
aaagagaaauccaaggacu

SEQ ID NO: 2494550 - RNA, 19 nt, Homo sapiens
  misc_RNA (1)...(19): siRNA sense strand
agggaugacaaaagugaaa

SEQ ID NO: 2494551 - RNA, 19 nt, Homo sapiens
  misc_RNA (1)...(19): siRNA sense strand
caaaagugaaaguugggaa

SEQ ID NO: 2494552 - RNA, 19 nt, Homo sapiens
  misc_RNA (1)...(19): siRNA sense strand
agaagagccucauagggau

SEQ ID NO: 2494553 - RNA, 19 nt, Homo sapiens
  misc_RNA (1)...(19): siRNA sense strand
cgggugacucaauaugaaa

SEQ ID NO: 2494554 - RNA, 19 nt, Homo sapiens
  misc_RNA (1)...(19): siRNA sense strand
caaccauaggaaagagcua

SEQ ID NO: 2494555 - RNA, 19 nt, Homo sapiens
  misc_RNA (1)...(19): siRNA sense strand
agaacaagaccaagagcca

SEQ ID NO: 2494556 - RNA, 19 nt, Homo sapiens
  misc_RNA (1)...(19): siRNA sense strand
gagaagagccucauaggga

SEQ ID NO: 2494557 - RNA, 19 nt, Homo sapiens
  misc_RNA (1)...(19): siRNA sense strand
aagagaaauccaaggacuu

SEQ ID NO: 2494558 - RNA, 19 nt, Homo sapiens
  misc_RNA (1)...(19): siRNA sense strand
agguagagugugaggagca

SEQ ID NO: 2494559 - RNA, 19 nt, Homo sapiens
  misc_RNA (1)...(19): siRNA sense strand
gguccgaaaagaagugaua

SEQ ID NO: 2494560 - RNA, 19 nt, Homo sapiens
  misc_RNA (1)...(19): siRNA sense strand
augaagaacaagaccaaga

SEQ ID NO: 2494561 - RNA, 19 nt, Homo sapiens
  misc_RNA (1)...(19): siRNA sense strand
ggugguggcuguagcgcuu

SEQ ID NO: 2494562 - RNA, 19 nt, Homo sapiens
  misc_RNA (1)...(19): siRNA sense strand
gaaaagaagugauacgguu

SEQ ID NO: 2494563 - RNA, 19 nt, Homo sapiens
  misc_RNA (1)...(19): siRNA sense strand
acgguuugagaaagagaaa

SEQ ID NO: 2494564 - RNA, 19 nt, Homo sapiens
  misc_RNA (1)...(19): siRNA sense strand
aaagagaaauccaaggacu

SEQ ID NO: 2494565 - RNA, 19 nt, Homo sapiens
  misc_RNA (1)...(19): siRNA sense strand
agggaugacaaaagugaaa

SEQ ID NO: 2494566 - RNA, 19 nt, Homo sapiens
  misc_RNA (1)...(19): siRNA sense strand
caaaagugaaaguugggaa

SEQ ID NO: 2494567 - RNA, 19 nt, Homo sapiens
  misc_RNA (1)...(19): siRNA sense strand
agaagagccucauagggau

SEQ ID NO: 2494568 - RNA, 19 nt, Homo sapiens
  misc_RNA (1)...(19): siRNA sense strand
cgggugacucaauaugaaa

SEQ ID NO: 2494569 - RNA, 19 nt, Homo sapiens
  misc_RNA (1)...(19): siRNA sense strand
gcgccaagaucaccggcaa

SEQ ID NO: 2494570 - RNA, 19 nt, Homo sapiens
  misc_RNA (1)...(19): siRNA sense strand
gugcaauauuugggacaau

SEQ ID NO: 2494571 - RNA, 19 nt, Homo sapiens
  misc_RNA (1)...(19): siRNA sense strand
cgccaagaucaccggcaaa

SEQ ID NO: 2494572 - RNA, 19 nt, Homo sapiens
  misc_RNA (1)...(19): siRNA sense strand
guauagagacggagguggu

SEQ ID NO: 2494573 - RNA, 19 nt, Homo sapiens
  misc_RNA (1)...(19): siRNA sense strand
acgacggcccugugcaaua

SEQ ID NO: 2494574 - RNA, 19 nt, Homo sapiens
  misc_RNA (1)...(19): siRNA sense strand
ugcaagugcggguggacaa

SEQ ID NO: 2494575 - RNA, 19 nt, Homo sapiens
  misc_RNA (1)...(19): siRNA sense strand
gaagcaaaccucaguggca

SEQ ID NO: 2494576 - RNA, 19 nt, Homo sapiens
  misc_RNA (1)...(19): siRNA sense strand
cauggaaggugucucggaa

SEQ ID NO: 2494577 - RNA, 19 nt, Homo sapiens
  misc_RNA (1)...(19): siRNA sense strand
uggaggacgcugaggagca

SEQ ID NO: 2494578 - RNA, 19 nt, Homo sapiens
  misc_RNA (1)...(19): siRNA sense strand
cgaaugaagugcuggcaga

SEQ ID NO: 2494579 - RNA, 19 nt, Homo sapiens
  misc_RNA (1)...(19): siRNA sense strand
agugggaagauuugagaaa

SEQ ID NO: 2494580 - RNA, 19 nt, Homo sapiens
  misc_RNA (1)...(19): siRNA sense strand
cagcaaauuagcaagcaaa

SEQ ID NO: 2494581 - RNA, 19 nt, Homo sapiens
  misc_RNA (1)...(19): siRNA sense strand
agauugaagaagaagcaaa

SEQ ID NO: 2494582 - RNA, 19 nt, Homo sapiens
  misc_RNA (1)...(19): siRNA sense strand
acgugaagcugaagcaaaa

SEQ ID NO: 2494583 - RNA, 19 nt, Homo sapiens
  misc_RNA (1)...(19): siRNA sense strand
ccaaggucaaaguggguaa

SEQ ID NO: 2494584 - RNA, 19 nt, Homo sapiens
  misc_RNA (1)...(19): siRNA sense strand
aagaagaagcaaauggaga

SEQ ID NO: 2494585 - RNA, 19 nt, Homo sapiens
  misc_RNA (1)...(19): siRNA sense strand
ggaucagcaacuuaggaaa

SEQ ID NO: 2494586 - RNA, 19 nt, Homo sapiens
  misc_RNA (1)...(19): siRNA sense strand
caacaaggggaaagagauu

SEQ ID NO: 2494587 - RNA, 19 nt, Homo sapiens
  misc_RNA (1)...(19): siRNA sense strand
ucugaguggagcaggaaua

SEQ ID NO: 2494588 - RNA, 19 nt, Homo sapiens
  misc_RNA (1)...(19): siRNA sense strand
augcaugguuugaagaaaa

SEQ ID NO: 2494589 - RNA, 19 nt, Homo sapiens
  misc_RNA (1)...(19): siRNA sense strand
aagaaaagcagcagcaauu

SEQ ID NO: 2494590 - RNA, 19 nt, Homo sapiens
  misc_RNA (1)...(19): siRNA sense strand
gauccagggaagagauuga

SEQ ID NO: 2494591 - RNA, 19 nt, Homo sapiens
  misc_RNA (1)...(19): siRNA sense strand
cagggaagagauugaagaa

SEQ ID NO: 2494592 - RNA, 19 nt, Homo sapiens
  misc_RNA (1)...(19): siRNA sense strand
ggaauauugaggaugguga

SEQ ID NO: 2494593 - RNA, 19 nt, Homo sapiens
  misc_RNA (1)...(19): siRNA sense strand
ugcagaagccacagaagaa

SEQ ID NO: 2494594 - RNA, 19 nt, Homo sapiens
  misc_RNA (1)...(19): siRNA sense strand
acagcaaauuagcaagcaa

SEQ ID NO: 2494595 - RNA, 19 nt, Homo sapiens
  misc_RNA (1)...(19): siRNA sense strand
ccaccgacuuugaggaucu

SEQ ID NO: 2494596 - RNA, 19 nt, Homo sapiens
  misc_RNA (1)...(19): siRNA sense strand
augaagugcuggcagaaau

SEQ ID NO: 2494597 - RNA, 19 nt, Homo sapiens
  misc_RNA (1)...(19): siRNA sense strand
guauaguagggaugaccaa

SEQ ID NO: 2494598 - RNA, 19 nt, Homo sapiens
  misc_RNA (1)...(19): siRNA sense strand
uaagagagugggaggcgaa

SEQ ID NO: 2494599 - RNA, 19 nt, Homo sapiens
  misc_RNA (1)...(19): siRNA sense strand
agaugaugacagagaagau

SEQ ID NO: 2494600 - RNA, 19 nt, Homo sapiens
  misc_RNA (1)...(19): siRNA sense strand
auuccuaccugaagccaaa

SEQ ID NO: 2494601 - RNA, 19 nt, Homo sapiens
  misc_RNA (1)...(19): siRNA sense strand
agguugaggagaagauaga

SEQ ID NO: 2494602 - RNA, 19 nt, Homo sapiens
  misc_RNA (1)...(19): siRNA sense strand
ugagaaagaacgagugaag

SEQ ID NO: 2494603 - RNA, 19 nt, Homo sapiens
  misc_RNA (1)...(19): siRNA sense strand
agaaaugggaagaugcuca

SEQ ID NO: 2494604 - RNA, 19 nt, Homo sapiens
  misc_RNA (1)...(19): siRNA sense strand
gauaaaauacagcaagcua

SEQ ID NO: 2494605 - RNA, 19 nt, Homo sapiens
  misc_RNA (1)...(19): siRNA sense strand
gcagcagcaauuugagaau

SEQ ID NO: 2494606 - RNA, 19 nt, Homo sapiens
  misc_RNA (1)...(19): siRNA sense strand
cuuagaaucacuaguucaa

SEQ ID NO: 2494607 - RNA, 19 nt, Homo sapiens
  misc_RNA (1)...(19): siRNA sense strand
uauuagaugaugacagaga

SEQ ID NO: 2494608 - RNA, 19 nt, Homo sapiens
  misc_RNA (1)...(19): siRNA sense strand
gggaaagagauuuugaaca

SEQ ID NO: 2494609 - RNA, 19 nt, Homo sapiens
  misc_RNA (1)...(19): siRNA sense strand
agaagauauuagugcaaac

SEQ ID NO: 2494610 - RNA, 19 nt, Homo sapiens
  misc_RNA (1)...(19): siRNA sense strand
ucaaaguggguaaagaaga

SEQ ID NO: 2494611 - RNA, 19 nt, Homo sapiens
  misc_RNA (1)...(19): siRNA sense strand
uagaguaacaacaaagaca

SEQ ID NO: 2494612 - RNA, 19 nt, Homo sapiens
  misc_RNA (1)...(19): siRNA sense strand
aagaagauucagcgacuuu

SEQ ID NO: 2494613 - RNA, 19 nt, Homo sapiens
  misc_RNA (1)...(19): siRNA sense strand
gaagaaaagcagcagcaau

SEQ ID NO: 2494614 - RNA, 19 nt, Homo sapiens
  misc_RNA (1)...(19): siRNA sense strand
guuagguaauucugaggau

SEQ ID NO: 2494615 - RNA, 19 nt, Homo sapiens
  misc_RNA (1)...(19): siRNA sense strand
cagugaaagguguguuuga

SEQ ID NO: 2494616 - RNA, 19 nt, Homo sapiens
  misc_RNA (1)...(19): siRNA sense strand
uuugauagauccagggaag

SEQ ID NO: 2494617 - RNA, 19 nt, Homo sapiens
  misc_RNA (1)...(19): siRNA sense strand
gccuagagcaguuaauaca

SEQ ID NO: 2494618 - RNA, 19 nt, Homo sapiens
  misc_RNA (1)...(19): siRNA sense strand
agauagaccaguuacauca

SEQ ID NO: 2494619 - RNA, 19 nt, Homo sapiens
  misc_RNA (1)...(19): siRNA sense strand
cugccgacgcugucaacaa

SEQ ID NO: 2494620 - RNA, 19 nt, Homo sapiens
  misc_RNA (1)...(19): siRNA sense strand
uagguaauucugaggauca

SEQ ID NO: 2494621 - RNA, 19 nt, Homo sapiens
  misc_RNA (1)...(19): siRNA sense strand
agaagauagaccaguuaca

SEQ ID NO: 2494622 - RNA, 19 nt, Homo sapiens
  misc_RNA (1)...(19): siRNA sense strand
agagauugaagaagaagca

SEQ ID NO: 2494623 - RNA, 19 nt, Homo sapiens
  misc_RNA (1)...(19): siRNA sense strand
caagaugaaugaaucggau

SEQ ID NO: 2494624 - RNA, 19 nt, Homo sapiens
  misc_RNA (1)...(19): siRNA sense strand
guugcuaacaaaccagaua

SEQ ID NO: 2494625 - RNA, 19 nt, Homo sapiens
  misc_RNA (1)...(19): siRNA sense strand
ugcuaacaaaccagauaaa

SEQ ID NO: 2494626 - RNA, 19 nt, Homo sapiens
  misc_RNA (1)...(19): siRNA sense strand
gagagugggaggcgaaagu

SEQ ID NO: 2494627 - RNA, 19 nt, Homo sapiens
  misc_RNA (1)...(19): siRNA sense strand
ggaauaaccgugugggacu

SEQ ID NO: 2494628 - RNA, 19 nt, Homo sapiens
  misc_RNA (1)...(19): siRNA sense strand
acuacuuggauauggaaua

SEQ ID NO: 2494629 - RNA, 19 nt, Homo sapiens
  misc_RNA (1)...(19): siRNA sense strand
agucuuugaccgugggaau

SEQ ID NO: 2494630 - RNA, 19 nt, Homo sapiens
  misc_RNA (1)...(19): siRNA sense strand
agaaagugucacagagcca

SEQ ID NO: 2494631 - RNA, 19 nt, Homo sapiens
  misc_RNA (1)...(19): siRNA sense strand
ggcagauugcacuggauaa

SEQ ID NO: 2494632 - RNA, 19 nt, Homo sapiens
  misc_RNA (1)...(19): siRNA sense strand
ucaucaacuacuuggauau

SEQ ID NO: 2494633 - RNA, 19 nt, Homo sapiens
  misc_RNA (1)...(19): siRNA sense strand
uggacuucguggauggaau

SEQ ID NO: 2494634 - RNA, 19 nt, Homo sapiens
  misc_RNA (1)...(19): siRNA sense strand
cccuauacccucagcccaa

SEQ ID NO: 2494635 - RNA, 19 nt, Homo sapiens
  misc_RNA (1)...(19): siRNA sense strand
ggaauaaccgugugggacu

SEQ ID NO: 2494636 - RNA, 19 nt, Homo sapiens
  misc_RNA (1)...(19): siRNA sense strand
acuacuuggauauggaaua

SEQ ID NO: 2494637 - RNA, 19 nt, Homo sapiens
  misc_RNA (1)...(19): siRNA sense strand
agucuuugaccgugggaau

SEQ ID NO: 2494638 - RNA, 19 nt, Homo sapiens
  misc_RNA (1)...(19): siRNA sense strand
agaaagugucacagagcca

SEQ ID NO: 2494639 - RNA, 19 nt, Homo sapiens
  misc_RNA (1)...(19): siRNA sense strand
ggcagauugcacuggauaa

SEQ ID NO: 2494640 - RNA, 19 nt, Homo sapiens
  misc_RNA (1)...(19): siRNA sense strand
ucaucaacuacuuggauau

SEQ ID NO: 2494641 - RNA, 19 nt, Homo sapiens
  misc_RNA (1)...(19): siRNA sense strand
uggacuucguggauggaau

SEQ ID NO: 2494642 - RNA, 19 nt, Homo sapiens
  misc_RNA (1)...(19): siRNA sense strand
cccuauacccucagcccaa

SEQ ID NO: 2494643 - RNA, 19 nt, Homo sapiens
  misc_RNA (1)...(19): siRNA sense strand
cugagagugcagagggaua

SEQ ID NO: 2494644 - RNA, 19 nt, Homo sapiens
  misc_RNA (1)...(19): siRNA sense strand
gagcagauguggaggguuc

SEQ ID NO: 2494645 - RNA, 19 nt, Homo sapiens
  misc_RNA (1)...(19): siRNA sense strand
caauauaaucagcggacca

SEQ ID NO: 2494646 - RNA, 19 nt, Homo sapiens
  misc_RNA (1)...(19): siRNA sense strand
gggaaaacacccagcaaca

SEQ ID NO: 2494647 - RNA, 19 nt, Homo sapiens
  misc_RNA (1)...(19): siRNA sense strand
gugcagagggauaggcagu

SEQ ID NO: 2494648 - RNA, 19 nt, Homo sapiens
  misc_RNA (1)...(19): siRNA sense strand
gcaucgucuccuauggaaa

SEQ ID NO: 2494649 - RNA, 19 nt, Homo sapiens
  misc_RNA (1)...(19): siRNA sense strand
gaggguuccuggugcgaga

SEQ ID NO: 2494650 - RNA, 19 nt, Homo sapiens
  misc_RNA (1)...(19): siRNA sense strand
gaacagauacacuccgaga

SEQ ID NO: 2494651 - RNA, 19 nt, Homo sapiens
  misc_RNA (1)...(19): siRNA sense strand
gagucagacggaaucgaaa

SEQ ID NO: 2494652 - RNA, 19 nt, Homo sapiens
  misc_RNA (1)...(19): siRNA sense strand
gcagaagagucagacggaa

SEQ ID NO: 2494653 - RNA, 19 nt, Homo sapiens
  misc_RNA (1)...(19): siRNA sense strand
ccgaggugguggaaggaca

SEQ ID NO: 2494654 - RNA, 19 nt, Homo sapiens
  misc_RNA (1)...(19): siRNA sense strand
gcaccgaguucauggggaa

SEQ ID NO: 2494655 - RNA, 19 nt, Homo sapiens
  misc_RNA (1)...(19): siRNA sense strand
gcgagaauucgguggagau

SEQ ID NO: 2494656 - RNA, 19 nt, Homo sapiens
  misc_RNA (1)...(19): siRNA sense strand
ccacaaauguucuuggauc

SEQ ID NO: 2494657 - RNA, 19 nt, Homo sapiens
  misc_RNA (1)...(19): siRNA sense strand
aggcgggacuugugggcau

SEQ ID NO: 2494658 - RNA, 19 nt, Homo sapiens
  misc_RNA (1)...(19): siRNA sense strand
gauccauggcugugauaca

SEQ ID NO: 2494659 - RNA, 19 nt, Homo sapiens
  misc_RNA (1)...(19): siRNA sense strand
cagcuuggcaucagggaca

SEQ ID NO: 2494660 - RNA, 19 nt, Homo sapiens
  misc_RNA (1)...(19): siRNA sense strand
ccucaaauguccugggcuc

SEQ ID NO: 2494661 - RNA, 19 nt, Homo sapiens
  misc_RNA (1)...(19): siRNA sense strand
ggucagaugugaaaggcac

SEQ ID NO: 2494662 - RNA, 19 nt, Homo sapiens
  misc_RNA (1)...(19): siRNA sense strand
gaguacaagugcucagcca

SEQ ID NO: 2494663 - RNA, 19 nt, Homo sapiens
  misc_RNA (1)...(19): siRNA sense strand
acguaugccugcaggagca

SEQ ID NO: 2494664 - RNA, 19 nt, Homo sapiens
  misc_RNA (1)...(19): siRNA sense strand
aagcagagcaugggcgaga

SEQ ID NO: 2494665 - RNA, 19 nt, Homo sapiens
  misc_RNA (1)...(19): siRNA sense strand
agcccagggaugaggguuu

SEQ ID NO: 2494666 - RNA, 19 nt, Homo sapiens
  misc_RNA (1)...(19): siRNA sense strand
ccaucugguacuacgacua

SEQ ID NO: 2494667 - RNA, 19 nt, Homo sapiens
  misc_RNA (1)...(19): siRNA sense strand
cagccauaacuuugacaca

SEQ ID NO: 2494668 - RNA, 19 nt, Homo sapiens
  misc_RNA (1)...(19): siRNA sense strand
caggagaagaagaggaaau

SEQ ID NO: 2494669 - RNA, 19 nt, Homo sapiens
  misc_RNA (1)...(19): siRNA sense strand
gaccuaaaguugugggaga

SEQ ID NO: 2494670 - RNA, 19 nt, Homo sapiens
  misc_RNA (1)...(19): siRNA sense strand
cuaacaaaggcgaggagaa

SEQ ID NO: 2494671 - RNA, 19 nt, Homo sapiens
  misc_RNA (1)...(19): siRNA sense strand
agaaagacgacgagaacau

SEQ ID NO: 2494672 - RNA, 19 nt, Homo sapiens
  misc_RNA (1)...(19): siRNA sense strand
ugaaaguagaaguggauau

SEQ ID NO: 2494673 - RNA, 19 nt, Homo sapiens
  misc_RNA (1)...(19): siRNA sense strand
cgacaguauggcagaggaa

SEQ ID NO: 2494674 - RNA, 19 nt, Homo sapiens
  misc_RNA (1)...(19): siRNA sense strand
ugaaauucuuagugagagu

SEQ ID NO: 2494675 - RNA, 19 nt, Homo sapiens
  misc_RNA (1)...(19): siRNA sense strand
uagaaguggauauggagaa

SEQ ID NO: 2494676 - RNA, 19 nt, Homo sapiens
  misc_RNA (1)...(19): siRNA sense strand
aggcaggaggaaagggaga

SEQ ID NO: 2494677 - RNA, 19 nt, Homo sapiens
  misc_RNA (1)...(19): siRNA sense strand
agugaaauucuuagugaga

SEQ ID NO: 2494678 - RNA, 19 nt, Homo sapiens
  misc_RNA (1)...(19): siRNA sense strand
uugcacaggcagaggaaca

SEQ ID NO: 2494679 - RNA, 19 nt, Homo sapiens
  misc_RNA (1)...(19): siRNA sense strand
ucggagagcaacagugcaa

SEQ ID NO: 2494680 - RNA, 19 nt, Homo sapiens
  misc_RNA (1)...(19): siRNA sense strand
gagaacauuccgauggaga

SEQ ID NO: 2494681 - RNA, 19 nt, Homo sapiens
  misc_RNA (1)...(19): siRNA sense strand
ucgcauggagaaaggagaa

SEQ ID NO: 2494682 - RNA, 19 nt, Homo sapiens
  misc_RNA (1)...(19): siRNA sense strand
aggaacgacaccaggagaa

SEQ ID NO: 2494683 - RNA, 19 nt, Homo sapiens
  misc_RNA (1)...(19): siRNA sense strand
aagaaagucgacagagaca

SEQ ID NO: 2494684 - RNA, 19 nt, Homo sapiens
  misc_RNA (1)...(19): siRNA sense strand
acgaauacgaagcagaaaa

SEQ ID NO: 2494685 - RNA, 19 nt, Homo sapiens
  misc_RNA (1)...(19): siRNA sense strand
gcgaaaacuagaagcugaa

SEQ ID NO: 2494686 - RNA, 19 nt, Homo sapiens
  misc_RNA (1)...(19): siRNA sense strand
aagaaacaacagagagcca

SEQ ID NO: 2494687 - RNA, 19 nt, Homo sapiens
  misc_RNA (1)...(19): siRNA sense strand
gggagauuggcaagauuau

SEQ ID NO: 2494688 - RNA, 19 nt, Homo sapiens
  misc_RNA (1)...(19): siRNA sense strand
ccuggaaagcacagauuca

SEQ ID NO: 2494689 - RNA, 19 nt, Homo sapiens
  misc_RNA (1)...(19): siRNA sense strand
cuuccaacccugaccuaaa

SEQ ID NO: 2494690 - RNA, 19 nt, Homo sapiens
  misc_RNA (1)...(19): siRNA sense strand
ggacaaggagagugggcag

SEQ ID NO: 2494691 - RNA, 19 nt, Homo sapiens
  misc_RNA (1)...(19): siRNA sense strand
ggagaaaggagaaccguac

SEQ ID NO: 2494692 - RNA, 19 nt, Homo sapiens
  misc_RNA (1)...(19): siRNA sense strand
gugagaguguggugccaga

SEQ ID NO: 2494693 - RNA, 19 nt, Homo sapiens
  misc_RNA (1)...(19): siRNA sense strand
cgcaaaaggcaggaggaaa

SEQ ID NO: 2494694 - RNA, 19 nt, Homo sapiens
  misc_RNA (1)...(19): siRNA sense strand
aagaacaagcagcuaacaa

SEQ ID NO: 2494695 - RNA, 19 nt, Homo sapiens
  misc_RNA (1)...(19): siRNA sense strand
aaguggauauggagaaaau

SEQ ID NO: 2494696 - RNA, 19 nt, Homo sapiens
  misc_RNA (1)...(19): siRNA sense strand
aggaggaaagggagaagga

SEQ ID NO: 2494697 - RNA, 19 nt, Homo sapiens
  misc_RNA (1)...(19): siRNA sense strand
aggagaagaaagacgacga

SEQ ID NO: 2494698 - RNA, 19 nt, Homo sapiens
  misc_RNA (1)...(19): siRNA sense strand
gcgagaucucacugaugaa

SEQ ID NO: 2494699 - RNA, 19 nt, Homo sapiens
  misc_RNA (1)...(19): siRNA sense strand
gagccaacagaauggugaa

SEQ ID NO: 2494700 - RNA, 19 nt, Homo sapiens
  misc_RNA (1)...(19): siRNA sense strand
cuuaaugguucaucagcga

SEQ ID NO: 2494701 - RNA, 19 nt, Homo sapiens
  misc_RNA (1)...(19): siRNA sense strand
caagauuauugguggcaug

SEQ ID NO: 2494702 - RNA, 19 nt, Homo sapiens
  misc_RNA (1)...(19): siRNA sense strand
ccgccucaucagugaaauu

SEQ ID NO: 2494703 - RNA, 19 nt, Homo sapiens
  misc_RNA (1)...(19): siRNA sense strand
aggagaagaagaggaaauu

SEQ ID NO: 2494704 - RNA, 19 nt, Homo sapiens
  misc_RNA (1)...(19): siRNA sense strand
aaggcgaggagaagaaaga

SEQ ID NO: 2494705 - RNA, 19 nt, Homo sapiens
  misc_RNA (1)...(19): siRNA sense strand
accaggagaagaagaggaa

SEQ ID NO: 2494706 - RNA, 19 nt, Homo sapiens
  misc_RNA (1)...(19): siRNA sense strand
ucugaaaguagaaguggau

SEQ ID NO: 2494707 - RNA, 19 nt, Homo sapiens
  misc_RNA (1)...(19): siRNA sense strand
gcgaggagaagaaagacga

SEQ ID NO: 2494708 - RNA, 19 nt, Homo sapiens
  misc_RNA (1)...(19): siRNA sense strand
ccuaaaguugugggagauu

SEQ ID NO: 2494709 - RNA, 19 nt, Homo sapiens
  misc_RNA (1)...(19): siRNA sense strand
caacagaucccauaccaga

SEQ ID NO: 2494710 - RNA, 19 nt, Homo sapiens
  misc_RNA (1)...(19): siRNA sense strand
uaaugguucaucagcgaaa

SEQ ID NO: 2494711 - RNA, 19 nt, Homo sapiens
  misc_RNA (1)...(19): siRNA sense strand
guagaaguggauauggaga

SEQ ID NO: 2494712 - RNA, 19 nt, Homo sapiens
  misc_RNA (1)...(19): siRNA sense strand
ccgcaaaaggcaggaggaa

SEQ ID NO: 2494713 - RNA, 19 nt, Homo sapiens
  misc_RNA (1)...(19): siRNA sense strand
cgauggagacagaggagac

SEQ ID NO: 2494714 - RNA, 19 nt, Homo sapiens
  misc_RNA (1)...(19): siRNA sense strand
cuugaagaaacaacagaga

SEQ ID NO: 2494715 - RNA, 19 nt, Homo sapiens
  misc_RNA (1)...(19): siRNA sense strand
ggugaagaaggcacgucua

SEQ ID NO: 2494716 - RNA, 19 nt, Homo sapiens
  misc_RNA (1)...(19): siRNA sense strand
cugaaugagcuaagggaaa

SEQ ID NO: 2494717 - RNA, 19 nt, Homo sapiens
  misc_RNA (1)...(19): siRNA sense strand
caacaaaagaacugaggaa

SEQ ID NO: 2494718 - RNA, 19 nt, Homo sapiens
  misc_RNA (1)...(19): siRNA sense strand
ucacauauccagagcacau

SEQ ID NO: 2494719 - RNA, 19 nt, Homo sapiens
  misc_RNA (1)...(19): siRNA sense strand
ccgauagaauccaguucaa

SEQ ID NO: 2494720 - RNA, 19 nt, Homo sapiens
  misc_RNA (1)...(19): siRNA sense strand
uaacuaaacaggacgaaaa

SEQ ID NO: 2494721 - RNA, 19 nt, Homo sapiens
  misc_RNA (1)...(19): siRNA sense strand
cuuccugggcauuggauua

SEQ ID NO: 2494722 - RNA, 19 nt, Homo sapiens
  misc_RNA (1)...(19): siRNA sense strand
cauuggaagccaucgguua

SEQ ID NO: 2494723 - RNA, 19 nt, Homo sapiens
  misc_RNA (1)...(19): siRNA sense strand
ucaaaugugugcugggcuu

SEQ ID NO: 2494724 - RNA, 19 nt, Homo sapiens
  misc_RNA (1)...(19): siRNA sense strand
aggcagaauuugugagcug

SEQ ID NO: 2494725 - RNA, 19 nt, Homo sapiens
  misc_RNA (1)...(19): siRNA sense strand
aucaguacauggagacaua

SEQ ID NO: 2494726 - RNA, 19 nt, Homo sapiens
  misc_RNA (1)...(19): siRNA sense strand
cugauggacaccagaacaa

SEQ ID NO: 2494727 - RNA, 19 nt, Homo sapiens
  misc_RNA (1)...(19): siRNA sense strand
caucauggaacgacugcaa

SEQ ID NO: 2494728 - RNA, 19 nt, Homo sapiens
  misc_RNA (1)...(19): siRNA sense strand
ugauauugcccuugcuauu

SEQ ID NO: 2494729 - RNA, 19 nt, Homo sapiens
  misc_RNA (1)...(19): siRNA sense strand
ucugauggaaauugugaaa

SEQ ID NO: 2494730 - RNA, 19 nt, Homo sapiens
  misc_RNA (1)...(19): siRNA sense strand
ggauuaucugaaugagcua

SEQ ID NO: 2494731 - RNA, 19 nt, Homo sapiens
  misc_RNA (1)...(19): siRNA sense strand
ucgaagacuaacaaagcaa

SEQ ID NO: 2494732 - RNA, 19 nt, Homo sapiens
  misc_RNA (1)...(19): siRNA sense strand
acagaaacuuaccggccua

SEQ ID NO: 2494733 - RNA, 19 nt, Homo sapiens
  misc_RNA (1)...(19): siRNA sense strand
auaaagagucugaaaggca

SEQ ID NO: 2494734 - RNA, 19 nt, Homo sapiens
  misc_RNA (1)...(19): siRNA sense strand
cuucagaggcagcagaaca

SEQ ID NO: 2494735 - RNA, 19 nt, Homo sapiens
  misc_RNA (1)...(19): siRNA sense strand
uaugaaucucugauggaaa

SEQ ID NO: 2494736 - RNA, 19 nt, Homo sapiens
  misc_RNA (1)...(19): siRNA sense strand
ucaaguacauggaggccuu

SEQ ID NO: 2494737 - RNA, 19 nt, Homo sapiens
  misc_RNA (1)...(19): siRNA sense strand
cgaaaaugaugaugacgau

SEQ ID NO: 2494738 - RNA, 19 nt, Homo sapiens
  misc_RNA (1)...(19): siRNA sense strand
cuguuaaggauguuccaaa

SEQ ID NO: 2494739 - RNA, 19 nt, Homo sapiens
  misc_RNA (1)...(19): siRNA sense strand
ugcuauuggaggagaguuu

SEQ ID NO: 2494740 - RNA, 19 nt, Homo sapiens
  misc_RNA (1)...(19): siRNA sense strand
gggauagaauucuggucca

SEQ ID NO: 2494741 - RNA, 19 nt, Homo sapiens
  misc_RNA (1)...(19): siRNA sense strand
cagacagaccugauggaca

SEQ ID NO: 2494742 - RNA, 19 nt, Homo sapiens
  misc_RNA (1)...(19): siRNA sense strand
cuucagauggagucacaua

SEQ ID NO: 2494743 - RNA, 19 nt, Homo sapiens
  misc_RNA (1)...(19): siRNA sense strand
cagacauuggguacagaaa

SEQ ID NO: 2494744 - RNA, 19 nt, Homo sapiens
  misc_RNA (1)...(19): siRNA sense strand
cggaugugaugcugguaca

SEQ ID NO: 2494745 - RNA, 19 nt, Homo sapiens
  misc_RNA (1)...(19): siRNA sense strand
acaugaaggagucgacauu

SEQ ID NO: 2494746 - RNA, 19 nt, Homo sapiens
  misc_RNA (1)...(19): siRNA sense strand
augaaucucugauggaaau

SEQ ID NO: 2494747 - RNA, 19 nt, Homo sapiens
  misc_RNA (1)...(19): siRNA sense strand
caguacauggagacauaua

SEQ ID NO: 2494748 - RNA, 19 nt, Homo sapiens
  misc_RNA (1)...(19): siRNA sense strand
agacagaccugauggacac

SEQ ID NO: 2494749 - RNA, 19 nt, Homo sapiens
  misc_RNA (1)...(19): siRNA sense strand
agauauagacccagagcag

SEQ ID NO: 2494750 - RNA, 19 nt, Homo sapiens
  misc_RNA (1)...(19): siRNA sense strand
ggaaguguuggguggugaa

SEQ ID NO: 2494751 - RNA, 19 nt, Homo sapiens
  misc_RNA (1)...(19): siRNA sense strand
cagaguugcagcuggucua

SEQ ID NO: 2494752 - RNA, 19 nt, Homo sapiens
  misc_RNA (1)...(19): siRNA sense strand
cuauuggaggagaguuuaa

SEQ ID NO: 2494753 - RNA, 19 nt, Homo sapiens
  misc_RNA (1)...(19): siRNA sense strand
cuuagagguuguauugaau

SEQ ID NO: 2494754 - RNA, 19 nt, Homo sapiens
  misc_RNA (1)...(19): siRNA sense strand
agagcagcuacaagauaaa

SEQ ID NO: 2494755 - RNA, 19 nt, Homo sapiens
  misc_RNA (1)...(19): siRNA sense strand
caguguaguuguucgagau

SEQ ID NO: 2494756 - RNA, 19 nt, Homo sapiens
  misc_RNA (1)...(19): siRNA sense strand
acugaagggcggagaucga

SEQ ID NO: 2494757 - RNA, 19 nt, Homo sapiens
  misc_RNA (1)...(19): siRNA sense strand
caaucacaaucgaagcaau

SEQ ID NO: 2494758 - RNA, 19 nt, Homo sapiens
  misc_RNA (1)...(19): siRNA sense strand
agauacagcugcauggacu

SEQ ID NO: 2494759 - RNA, 19 nt, Homo sapiens
  misc_RNA (1)...(19): siRNA sense strand
cugugcaacucuucagaau

SEQ ID NO: 2494760 - RNA, 19 nt, Homo sapiens
  misc_RNA (1)...(19): siRNA sense strand
ugaaauuaguagaagcuag

SEQ ID NO: 2494761 - RNA, 19 nt, Homo sapiens
  misc_RNA (1)...(19): siRNA sense strand
cugugggcuuagugggaga

SEQ ID NO: 2494762 - RNA, 19 nt, Homo sapiens
  misc_RNA (1)...(19): siRNA sense strand
ccaacagcacagagcacau

SEQ ID NO: 2494763 - RNA, 19 nt, Homo sapiens
  misc_RNA (1)...(19): siRNA sense strand
gagccuaguaauaauguga

SEQ ID NO: 2494764 - RNA, 19 nt, Homo sapiens
  misc_RNA (1)...(19): siRNA sense strand
acaaaagaacugaggaaac

SEQ ID NO: 2494765 - RNA, 19 nt, Homo sapiens
  misc_RNA (1)...(19): siRNA sense strand
cuaacuaaacaggacgaaa

SEQ ID NO: 2494766 - RNA, 19 nt, Homo sapiens
  misc_RNA (1)...(19): siRNA sense strand
acauugaugagguggcuuu

SEQ ID NO: 2494767 - RNA, 19 nt, Homo sapiens
  misc_RNA (1)...(19): siRNA sense strand
cuaaacaggacgaaaauga

SEQ ID NO: 2494768 - RNA, 19 nt, Homo sapiens
  misc_RNA (1)...(19): siRNA sense strand
cagaaaacgacuuugguca

SEQ ID NO: 2494769 - RNA, 19 nt, Homo sapiens
  misc_RNA (1)...(19): siRNA sense strand
gggaaggauguacugaaau

SEQ ID NO: 2494770 - RNA, 19 nt, Homo sapiens
  misc_RNA (1)...(19): siRNA sense strand
ggcggagaucgaagacuaa

SEQ ID NO: 2494771 - RNA, 19 nt, Homo sapiens
  misc_RNA (1)...(19): siRNA sense strand
ggauuguagagaagggcaa

SEQ ID NO: 2494772 - RNA, 19 nt, Homo sapiens
  misc_RNA (1)...(19): siRNA sense strand
agccagaaucauagacaaa

SEQ ID NO: 2494773 - RNA, 19 nt, Homo sapiens
  misc_RNA (1)...(19): siRNA sense strand
gcuggauaucccugagaaa

SEQ ID NO: 2494774 - RNA, 19 nt, Homo sapiens
  misc_RNA (1)...(19): siRNA sense strand
uggccaagcagcagaggaa

SEQ ID NO: 2494775 - RNA, 19 nt, Homo sapiens
  misc_RNA (1)...(19): siRNA sense strand
ggacaaaagcuuccggcua

SEQ ID NO: 2494776 - RNA, 19 nt, Homo sapiens
  misc_RNA (1)...(19): siRNA sense strand
cuguuuaccacgugagcaa

SEQ ID NO: 2494777 - RNA, 19 nt, Homo sapiens
  misc_RNA (1)...(19): siRNA sense strand
ccuuggagucaguaauaaa

SEQ ID NO: 2494778 - RNA, 19 nt, Homo sapiens
  misc_RNA (1)...(19): siRNA sense strand
ccaagaagauguagagcug

SEQ ID NO: 2494779 - RNA, 19 nt, Homo sapiens
  misc_RNA (1)...(19): siRNA sense strand
ccgcacagccagaaucaua

SEQ ID NO: 2494780 - RNA, 19 nt, Homo sapiens
  misc_RNA (1)...(19): siRNA sense strand
agggaaagggauaaaguga

SEQ ID NO: 2494781 - RNA, 19 nt, Homo sapiens
  misc_RNA (1)...(19): siRNA sense strand
ccaaauauggugaaggcca

SEQ ID NO: 2494782 - RNA, 19 nt, Homo sapiens
  misc_RNA (1)...(19): siRNA sense strand
gggauaaagugaugccucu

SEQ ID NO: 2494783 - RNA, 19 nt, Homo sapiens
  misc_RNA (1)...(19): siRNA sense strand
aaaguuacgaauuggacaa

SEQ ID NO: 2494784 - RNA, 19 nt, Homo sapiens
  misc_RNA (1)...(19): siRNA sense strand
aaaaugaccgacagggaaa

SEQ ID NO: 2494785 - RNA, 19 nt, Homo sapiens
  misc_RNA (1)...(19): siRNA sense strand
agauuaaacuaguggucac

SEQ ID NO: 2494786 - RNA, 19 nt, Homo sapiens
  misc_RNA (1)...(19): siRNA sense strand
ccacugacaucacgggcuu

SEQ ID NO: 2494787 - RNA, 19 nt, Homo sapiens
  misc_RNA (1)...(19): siRNA sense strand
ccgacagggaaagggauaa

SEQ ID NO: 2494788 - RNA, 19 nt, Homo sapiens
  misc_RNA (1)...(19): siRNA sense strand
gaagcaggaacgucuguaa

SEQ ID NO: 2494789 - RNA, 19 nt, Homo sapiens
  misc_RNA (1)...(19): siRNA sense strand
agcauggauuauugggauu

SEQ ID NO: 2494790 - RNA, 19 nt, Homo sapiens
  misc_RNA (1)...(19): siRNA sense strand
accgacagggaaagggaua

SEQ ID NO: 2494791 - RNA, 19 nt, Homo sapiens
  misc_RNA (1)...(19): siRNA sense strand
ucacugaacugaagggcac

SEQ ID NO: 2494792 - RNA, 19 nt, Homo sapiens
  misc_RNA (1)...(19): siRNA sense strand
aagcauggauuauugggau

SEQ ID NO: 2494793 - RNA, 19 nt, Homo sapiens
  misc_RNA (1)...(19): siRNA sense strand
uccaagaagaugagcaguu

SEQ ID NO: 2494794 - RNA, 19 nt, Homo sapiens
  misc_RNA (1)...(19): siRNA sense strand
acgugcuggugcugacaaa

SEQ ID NO: 2494795 - RNA, 19 nt, Homo sapiens
  misc_RNA (1)...(19): siRNA sense strand
aguaauaaaaugaccgaca

SEQ ID NO: 2494796 - RNA, 19 nt, Homo sapiens
  misc_RNA (1)...(19): siRNA sense strand
gcaaauacuucuauggcaa

SEQ ID NO: 2494797 - RNA, 19 nt, Homo sapiens
  misc_RNA (1)...(19): siRNA sense strand
gcucugaggacaagggcaa

SEQ ID NO: 2494798 - RNA, 19 nt, Homo sapiens
  misc_RNA (1)...(19): siRNA sense strand
agguggacgccgagggauu

SEQ ID NO: 2494799 - RNA, 19 nt, Homo sapiens
  misc_RNA (1)...(19): siRNA sense strand
ccaaagcgcugaaugguga

SEQ ID NO: 2494800 - RNA, 19 nt, Homo sapiens
  misc_RNA (1)...(19): siRNA sense strand
caaggaaacuucuggagca

SEQ ID NO: 2494801 - RNA, 19 nt, Homo sapiens
  misc_RNA (1)...(19): siRNA sense strand
ucaggaagcugcaggagga

SEQ ID NO: 2494802 - RNA, 19 nt, Homo sapiens
  misc_RNA (1)...(19): siRNA sense strand
ccacauaccaggaccacga

SEQ ID NO: 2494803 - RNA, 19 nt, Homo sapiens
  misc_RNA (1)...(19): siRNA sense strand
ccaguggcucugaggacaa

SEQ ID NO: 2494804 - RNA, 19 nt, Homo sapiens
  misc_RNA (1)...(19): siRNA sense strand
augagcaaguggugagcuu

SEQ ID NO: 2494805 - RNA, 19 nt, Homo sapiens
  misc_RNA (1)...(19): siRNA sense strand
cugcacagcuaccgcguca

SEQ ID NO: 2494806 - RNA, 19 nt, Homo sapiens
  misc_RNA (1)...(19): siRNA sense strand
ggaaacuucuggagcacgu

SEQ ID NO: 2494807 - RNA, 19 nt, Homo sapiens
  misc_RNA (1)...(19): siRNA sense strand
uggcaaagaacaucagaac

SEQ ID NO: 2494808 - RNA, 19 nt, Homo sapiens
  misc_RNA (1)...(19): siRNA sense strand
guaccuugucucugcggaa

SEQ ID NO: 2494809 - RNA, 19 nt, Homo sapiens
  misc_RNA (1)...(19): siRNA sense strand
gcaaauacuucuauggcaa

SEQ ID NO: 2494810 - RNA, 19 nt, Homo sapiens
  misc_RNA (1)...(19): siRNA sense strand
gcucugaggacaagggcaa

SEQ ID NO: 2494811 - RNA, 19 nt, Homo sapiens
  misc_RNA (1)...(19): siRNA sense strand
agguggacgccgagggauu

SEQ ID NO: 2494812 - RNA, 19 nt, Homo sapiens
  misc_RNA (1)...(19): siRNA sense strand
ccaaagcgcugaaugguga

SEQ ID NO: 2494813 - RNA, 19 nt, Homo sapiens
  misc_RNA (1)...(19): siRNA sense strand
caaggaaacuucuggagca

SEQ ID NO: 2494814 - RNA, 19 nt, Homo sapiens
  misc_RNA (1)...(19): siRNA sense strand
ucaggaagcugcaggagga

SEQ ID NO: 2494815 - RNA, 19 nt, Homo sapiens
  misc_RNA (1)...(19): siRNA sense strand
ccacauaccaggaccacga

SEQ ID NO: 2494816 - RNA, 19 nt, Homo sapiens
  misc_RNA (1)...(19): siRNA sense strand
ccaguggcucugaggacaa

SEQ ID NO: 2494817 - RNA, 19 nt, Homo sapiens
  misc_RNA (1)...(19): siRNA sense strand
augagcaaguggugagcuu

SEQ ID NO: 2494818 - RNA, 19 nt, Homo sapiens
  misc_RNA (1)...(19): siRNA sense strand
cugcacagcuaccgcguca

SEQ ID NO: 2494819 - RNA, 19 nt, Homo sapiens
  misc_RNA (1)...(19): siRNA sense strand
ggaaacuucuggagcacgu

SEQ ID NO: 2494820 - RNA, 19 nt, Homo sapiens
  misc_RNA (1)...(19): siRNA sense strand
uggcaaagaacaucagaac

SEQ ID NO: 2494821 - RNA, 19 nt, Homo sapiens
  misc_RNA (1)...(19): siRNA sense strand
guaccuugucucugcggaa

SEQ ID NO: 2494822 - RNA, 19 nt, Homo sapiens
  misc_RNA (1)...(19): siRNA sense strand
cuugagaggaacagaggaa

SEQ ID NO: 2494823 - RNA, 19 nt, Homo sapiens
  misc_RNA (1)...(19): siRNA sense strand
ccacagauccacacggaga

SEQ ID NO: 2494824 - RNA, 19 nt, Homo sapiens
  misc_RNA (1)...(19): siRNA sense strand
cgguauagcuccagcgggu

SEQ ID NO: 2494825 - RNA, 19 nt, Homo sapiens
  misc_RNA (1)...(19): siRNA sense strand
agcacuacaucgagggcaa

SEQ ID NO: 2494826 - RNA, 19 nt, Homo sapiens
  misc_RNA (1)...(19): siRNA sense strand
aggagacagaagagaacaa

SEQ ID NO: 2494827 - RNA, 19 nt, Homo sapiens
  misc_RNA (1)...(19): siRNA sense strand
ugagaggaacagaggaaaa

SEQ ID NO: 2494828 - RNA, 19 nt, Homo sapiens
  misc_RNA (1)...(19): siRNA sense strand
gucuacagauggaggccaa

SEQ ID NO: 2494829 - RNA, 19 nt, Homo sapiens
  misc_RNA (1)...(19): siRNA sense strand
cuggaagugcaaaggcuua

SEQ ID NO: 2494830 - RNA, 19 nt, Homo sapiens
  misc_RNA (1)...(19): siRNA sense strand
gcggugaguacgacggaau

SEQ ID NO: 2494831 - RNA, 19 nt, Homo sapiens
  misc_RNA (1)...(19): siRNA sense strand
acgcaauccagaaggccaa

SEQ ID NO: 2494832 - RNA, 19 nt, Homo sapiens
  misc_RNA (1)...(19): siRNA sense strand
guuaauaaguacuacagca

SEQ ID NO: 2494833 - RNA, 19 nt, Homo sapiens
  misc_RNA (1)...(19): siRNA sense strand
ccuccaacuacguggcgaa

SEQ ID NO: 2494834 - RNA, 19 nt, Homo sapiens
  misc_RNA (1)...(19): siRNA sense strand
gagacgagaacaugagcga

SEQ ID NO: 2494835 - RNA, 19 nt, Homo sapiens
  misc_RNA (1)...(19): siRNA sense strand
augucaauuccaagguuaa

SEQ ID NO: 2494836 - RNA, 19 nt, Homo sapiens
  misc_RNA (1)...(19): siRNA sense strand
aguacgagucugacgaaga

SEQ ID NO: 2494837 - RNA, 19 nt, Homo sapiens
  misc_RNA (1)...(19): siRNA sense strand
cggcaaacuccuuccacuu

SEQ ID NO: 2494838 - RNA, 19 nt, Homo sapiens
  misc_RNA (1)...(19): siRNA sense strand
agaacaaaaccaaaggauu

SEQ ID NO: 2494839 - RNA, 19 nt, Homo sapiens
  misc_RNA (1)...(19): siRNA sense strand
gacccaagcucgaaccaga

SEQ ID NO: 2494840 - RNA, 19 nt, Homo sapiens
  misc_RNA (1)...(19): siRNA sense strand
cagaagagaacaaaaccaa

SEQ ID NO: 2494841 - RNA, 19 nt, Homo sapiens
  misc_RNA (1)...(19): siRNA sense strand
ccaccgggagucugagaau

SEQ ID NO: 2494842 - RNA, 19 nt, Homo sapiens
  misc_RNA (1)...(19): siRNA sense strand
acucuggagacgagaacau

SEQ ID NO: 2494843 - RNA, 19 nt, Homo sapiens
  misc_RNA (1)...(19): siRNA sense strand
ggaaguccauuuuggggaa

SEQ ID NO: 2494844 - RNA, 19 nt, Homo sapiens
  misc_RNA (1)...(19): siRNA sense strand
ucgaaaagaaaaucgggaa

SEQ ID NO: 2494845 - RNA, 19 nt, Homo sapiens
  misc_RNA (1)...(19): siRNA sense strand
agcugauagugguggacau

SEQ ID NO: 2494846 - RNA, 19 nt, Homo sapiens
  misc_RNA (1)...(19): siRNA sense strand
cugauaucuuugagcguau

SEQ ID NO: 2494847 - RNA, 19 nt, Homo sapiens
  misc_RNA (1)...(19): siRNA sense strand
gcguauagcgagcgaggca

SEQ ID NO: 2494848 - RNA, 19 nt, Homo sapiens
  misc_RNA (1)...(19): siRNA sense strand
ggaaccagcuggagggcaa

SEQ ID NO: 2494849 - RNA, 19 nt, Homo sapiens
  misc_RNA (1)...(19): siRNA sense strand
guacagagaugcuggguga

SEQ ID NO: 2494850 - RNA, 19 nt, Homo sapiens
  misc_RNA (1)...(19): siRNA sense strand
uggagaaccugcugcgcaa

SEQ ID NO: 2494851 - RNA, 19 nt, Homo sapiens
  misc_RNA (1)...(19): siRNA sense strand
agaagaagauggaguccca

SEQ ID NO: 2494852 - RNA, 19 nt, Homo sapiens
  misc_RNA (1)...(19): siRNA sense strand
uucacaagcaacagagaaa

SEQ ID NO: 2494853 - RNA, 19 nt, Homo sapiens
  misc_RNA (1)...(19): siRNA sense strand
agaagauggccguggaguu

SEQ ID NO: 2494854 - RNA, 19 nt, Homo sapiens
  misc_RNA (1)...(19): siRNA sense strand
ggcugaaaccacagaccaa

SEQ ID NO: 2494855 - RNA, 19 nt, Homo sapiens
  misc_RNA (1)...(19): siRNA sense strand
cuauucaggcuguggagaa

SEQ ID NO: 2494856 - RNA, 19 nt, Homo sapiens
  misc_RNA (1)...(19): siRNA sense strand
ggcuggagaacguggagaa

SEQ ID NO: 2494857 - RNA, 19 nt, Homo sapiens
  misc_RNA (1)...(19): siRNA sense strand
ggagaagcggaguugggua

SEQ ID NO: 2494858 - RNA, 19 nt, Homo sapiens
  misc_RNA (1)...(19): siRNA sense strand
ugaucaaacaggagcuaca

SEQ ID NO: 2494859 - RNA, 19 nt, Homo sapiens
  misc_RNA (1)...(19): siRNA sense strand
ccgagaagaagcuggcuga

SEQ ID NO: 2494860 - RNA, 19 nt, Homo sapiens
  misc_RNA (1)...(19): siRNA sense strand
uggagaacguggagaaccu

SEQ ID NO: 2494861 - RNA, 19 nt, Homo sapiens
  misc_RNA (1)...(19): siRNA sense strand
acgaauguucugaguguga

SEQ ID NO: 2494862 - RNA, 19 nt, Homo sapiens
  misc_RNA (1)...(19): siRNA sense strand
guggagaagaagauggagu

SEQ ID NO: 2494863 - RNA, 19 nt, Homo sapiens
  misc_RNA (1)...(19): siRNA sense strand
agacagagggagaagcgga

SEQ ID NO: 2494864 - RNA, 19 nt, Homo sapiens
  misc_RNA (1)...(19): siRNA sense strand
gcagaaaucucauaggcag

SEQ ID NO: 2494865 - RNA, 19 nt, Homo sapiens
  misc_RNA (1)...(19): siRNA sense strand
gcgagaagauggccgugga

SEQ ID NO: 2494866 - RNA, 19 nt, Homo sapiens
  misc_RNA (1)...(19): siRNA sense strand
gcugcaggaguaugggcua

SEQ ID NO: 2494867 - RNA, 19 nt, Homo sapiens
  misc_RNA (1)...(19): siRNA sense strand
gagaagagcuuuguccaga

SEQ ID NO: 2494868 - RNA, 19 nt, Homo sapiens
  misc_RNA (1)...(19): siRNA sense strand
cggaggaugaaguggaaaa

SEQ ID NO: 2494869 - RNA, 19 nt, Homo sapiens
  misc_RNA (1)...(19): siRNA sense strand
gcaaaugcgagcaggagga

SEQ ID NO: 2494870 - RNA, 19 nt, Homo sapiens
  misc_RNA (1)...(19): siRNA sense strand
ccggcaauuucuacggcua

SEQ ID NO: 2494871 - RNA, 19 nt, Homo sapiens
  misc_RNA (1)...(19): siRNA sense strand
aagagaacaacaaagacaa

SEQ ID NO: 2494872 - RNA, 19 nt, Homo sapiens
  misc_RNA (1)...(19): siRNA sense strand
cgcaaauccaggaguucua

SEQ ID NO: 2494873 - RNA, 19 nt, Homo sapiens
  misc_RNA (1)...(19): siRNA sense strand
cugcaacgccagagccuau

SEQ ID NO: 2494874 - RNA, 19 nt, Homo sapiens
  misc_RNA (1)...(19): siRNA sense strand
gcagcaaaugcgagcagga

SEQ ID NO: 2494875 - RNA, 19 nt, Homo sapiens
  misc_RNA (1)...(19): siRNA sense strand
gagcaggaggagcuggaga

SEQ ID NO: 2494876 - RNA, 19 nt, Homo sapiens
  misc_RNA (1)...(19): siRNA sense strand
agcaggaggagcuggagaa

SEQ ID NO: 2494877 - RNA, 19 nt, Homo sapiens
  misc_RNA (1)...(19): siRNA sense strand
gcaaaguggacaagcguag

SEQ ID NO: 2494878 - RNA, 19 nt, Homo sapiens
  misc_RNA (1)...(19): siRNA sense strand
uggagaacuuggaggugaa

SEQ ID NO: 2494879 - RNA, 19 nt, Homo sapiens
  misc_RNA (1)...(19): siRNA sense strand
acuacaaggugcagaagau

SEQ ID NO: 2494880 - RNA, 19 nt, Homo sapiens
  misc_RNA (1)...(19): siRNA sense strand
cugaaauccuuuugagcaa

SEQ ID NO: 2494881 - RNA, 19 nt, Homo sapiens
  misc_RNA (1)...(19): siRNA sense strand
gggaagacagugaaggcau

SEQ ID NO: 2494882 - RNA, 19 nt, Homo sapiens
  misc_RNA (1)...(19): siRNA sense strand
ugugcauguugaugagaaa

SEQ ID NO: 2494883 - RNA, 19 nt, Homo sapiens
  misc_RNA (1)...(19): siRNA sense strand
ggacgaugagaguggccaa

SEQ ID NO: 2494884 - RNA, 19 nt, Homo sapiens
  misc_RNA (1)...(19): siRNA sense strand
ggcugagggugguggucaa

SEQ ID NO: 2494885 - RNA, 19 nt, Homo sapiens
  misc_RNA (1)...(19): siRNA sense strand
uggcauucgcaaaggagaa

SEQ ID NO: 2494886 - RNA, 19 nt, Homo sapiens
  misc_RNA (1)...(19): siRNA sense strand
cugucgagguggagaacca

SEQ ID NO: 2494887 - RNA, 19 nt, Homo sapiens
  misc_RNA (1)...(19): siRNA sense strand
gggaagucauccaggccuu

SEQ ID NO: 2494888 - RNA, 19 nt, Homo sapiens
  misc_RNA (1)...(19): siRNA sense strand
caucgaagugauugcacaa

SEQ ID NO: 2494889 - RNA, 19 nt, Homo sapiens
  misc_RNA (1)...(19): siRNA sense strand
ccucaaaggagaugcuguu

SEQ ID NO: 2494890 - RNA, 19 nt, Homo sapiens
  misc_RNA (1)...(19): siRNA sense strand
guggaggacgugaggguga

SEQ ID NO: 2494891 - RNA, 19 nt, Homo sapiens
  misc_RNA (1)...(19): siRNA sense strand
ccaaagugcugcugcccuu

SEQ ID NO: 2494892 - RNA, 19 nt, Homo sapiens
  misc_RNA (1)...(19): siRNA sense strand
gggaacaagcccagccuca

SEQ ID NO: 2494893 - RNA, 19 nt, Homo sapiens
  misc_RNA (1)...(19): siRNA sense strand
agaugaagguguaugugau

SEQ ID NO: 2494894 - RNA, 19 nt, Homo sapiens
  misc_RNA (1)...(19): siRNA sense strand
uauauaaagcugcagacaa

SEQ ID NO: 2494895 - RNA, 19 nt, Homo sapiens
  misc_RNA (1)...(19): siRNA sense strand
gcccagaagaggugaccau

SEQ ID NO: 2494896 - RNA, 19 nt, Homo sapiens
  misc_RNA (1)...(19): siRNA sense strand
cugaaauagaagcagaaca

SEQ ID NO: 2494897 - RNA, 19 nt, Homo sapiens
  misc_RNA (1)...(19): siRNA sense strand
aaauauuaaugucgcccaa

SEQ ID NO: 2494898 - RNA, 19 nt, Homo sapiens
  misc_RNA (1)...(19): siRNA sense strand
ccaucauuguugcuguaaa

SEQ ID NO: 2494899 - RNA, 19 nt, Homo sapiens
  misc_RNA (1)...(19): siRNA sense strand
caggacacgucgaugguca

SEQ ID NO: 2494900 - RNA, 19 nt, Homo sapiens
  misc_RNA (1)...(19): siRNA sense strand
uggccgugccuuugggaau

SEQ ID NO: 2494901 - RNA, 19 nt, Homo sapiens
  misc_RNA (1)...(19): siRNA sense strand
ggaaccagcaggaggugga

SEQ ID NO: 2494902 - RNA, 19 nt, Homo sapiens
  misc_RNA (1)...(19): siRNA sense strand
gugcagaagaucaggcaag

SEQ ID NO: 2494903 - RNA, 19 nt, Homo sapiens
  misc_RNA (1)...(19): siRNA sense strand
ccgaauugaaacugugcuu

SEQ ID NO: 2494904 - RNA, 19 nt, Homo sapiens
  misc_RNA (1)...(19): siRNA sense strand
ccggcaagguggucaucau

SEQ ID NO: 2494905 - RNA, 19 nt, Homo sapiens
  misc_RNA (1)...(19): siRNA sense strand
cuggaaggccucucaggaa

SEQ ID NO: 2494906 - RNA, 19 nt, Homo sapiens
  misc_RNA (1)...(19): siRNA sense strand
augcacaggcugacggaca

SEQ ID NO: 2494907 - RNA, 19 nt, Homo sapiens
  misc_RNA (1)...(19): siRNA sense strand
cggacauucaggagcugua

SEQ ID NO: 2494908 - RNA, 19 nt, Homo sapiens
  misc_RNA (1)...(19): siRNA sense strand
gacagaagcucuaaccuga

SEQ ID NO: 2494909 - RNA, 19 nt, Homo sapiens
  misc_RNA (1)...(19): siRNA sense strand
ugcuaagggccgugaggau

SEQ ID NO: 2494910 - RNA, 19 nt, Homo sapiens
  misc_RNA (1)...(19): siRNA sense strand
ccaucgaagugauugcaca

SEQ ID NO: 2494911 - RNA, 19 nt, Homo sapiens
  misc_RNA (1)...(19): siRNA sense strand
cggucaugaucauagccua

SEQ ID NO: 2494912 - RNA, 19 nt, Homo sapiens
  misc_RNA (1)...(19): siRNA sense strand
aguacgaguugcagcuuca

SEQ ID NO: 2494913 - RNA, 19 nt, Homo sapiens
  misc_RNA (1)...(19): siRNA sense strand
caggaguauucgcaugcaa

SEQ ID NO: 2494914 - RNA, 19 nt, Homo sapiens
  misc_RNA (1)...(19): siRNA sense strand
gcgccuaucaguacacaau

SEQ ID NO: 2494915 - RNA, 19 nt, Homo sapiens
  misc_RNA (1)...(19): siRNA sense strand
cgcccaacucauauauaaa

SEQ ID NO: 2494916 - RNA, 19 nt, Homo sapiens
  misc_RNA (1)...(19): siRNA sense strand
ccacuaacagagacgacuu

SEQ ID NO: 2494917 - RNA, 19 nt, Homo sapiens
  misc_RNA (1)...(19): siRNA sense strand
ugauuguugccgugggaga

SEQ ID NO: 2494918 - RNA, 19 nt, Homo sapiens
  misc_RNA (1)...(19): siRNA sense strand
ugacggacaagcagcggaa

SEQ ID NO: 2494919 - RNA, 19 nt, Homo sapiens
  misc_RNA (1)...(19): siRNA sense strand
cuggagaacuuggagguga

SEQ ID NO: 2494920 - RNA, 19 nt, Homo sapiens
  misc_RNA (1)...(19): siRNA sense strand
ggacgauugugaaggacuc

SEQ ID NO: 2494921 - RNA, 19 nt, Homo sapiens
  misc_RNA (1)...(19): siRNA sense strand
gggugguggucaaggcugu

SEQ ID NO: 2494922 - RNA, 19 nt, Homo sapiens
  misc_RNA (1)...(19): siRNA sense strand
cccugaaauagaagcagaa

SEQ ID NO: 2494923 - RNA, 19 nt, Homo sapiens
  misc_RNA (1)...(19): siRNA sense strand
gugcagccucucugagcua

SEQ ID NO: 2494924 - RNA, 19 nt, Homo sapiens
  misc_RNA (1)...(19): siRNA sense strand
agcaggagguggaaauuca

SEQ ID NO: 2494925 - RNA, 19 nt, Homo sapiens
  misc_RNA (1)...(19): siRNA sense strand
ugaugaagcccuugacaac

SEQ ID NO: 2494926 - RNA, 19 nt, Homo sapiens
  misc_RNA (1)...(19): siRNA sense strand
acugcaagugugaccaaua

SEQ ID NO: 2494927 - RNA, 19 nt, Homo sapiens
  misc_RNA (1)...(19): siRNA sense strand
gaccaguauaacaaggaaa

SEQ ID NO: 2494928 - RNA, 19 nt, Homo sapiens
  misc_RNA (1)...(19): siRNA sense strand
gaccaguauaacaaggaaa

SEQ ID NO: 2494929 - RNA, 19 nt, Homo sapiens
  misc_RNA (1)...(19): siRNA sense strand
gaguuuaagucuacggcca

SEQ ID NO: 2494930 - RNA, 19 nt, Homo sapiens
  misc_RNA (1)...(19): siRNA sense strand
acuccuaugccucgggaaa

SEQ ID NO: 2494931 - RNA, 19 nt, Homo sapiens
  misc_RNA (1)...(19): siRNA sense strand
caccacgggaggacgguaa

SEQ ID NO: 2494932 - RNA, 19 nt, Homo sapiens
  misc_RNA (1)...(19): siRNA sense strand
uggaagaaggacaacaaau

SEQ ID NO: 2494933 - RNA, 19 nt, Homo sapiens
  misc_RNA (1)...(19): siRNA sense strand
aguggaagaaggacaacaa

SEQ ID NO: 2494934 - RNA, 19 nt, Homo sapiens
  misc_RNA (1)...(19): siRNA sense strand
gggauggaccucagcguca

SEQ ID NO: 2494935 - RNA, 19 nt, Homo sapiens
  misc_RNA (1)...(19): siRNA sense strand
augaaguggaagaaggaca

SEQ ID NO: 2494936 - RNA, 19 nt, Homo sapiens
  misc_RNA (1)...(19): siRNA sense strand
cggcgcaugaaguggaaga

SEQ ID NO: 2494937 - RNA, 19 nt, Homo sapiens
  misc_RNA (1)...(19): siRNA sense strand
uguccgagcgccagaucaa

SEQ ID NO: 2494938 - RNA, 19 nt, Homo sapiens
  misc_RNA (1)...(19): siRNA sense strand
ccgaaauagacgaggccag

SEQ ID NO: 2494939 - RNA, 19 nt, Homo sapiens
  misc_RNA (1)...(19): siRNA sense strand
gcguauacccgcuaccaga

SEQ ID NO: 2494940 - RNA, 19 nt, Homo sapiens
  misc_RNA (1)...(19): siRNA sense strand
aagugaaaguggagaacaa

SEQ ID NO: 2494941 - RNA, 19 nt, Homo sapiens
  misc_RNA (1)...(19): siRNA sense strand
agcaaauguuagagagcaa

SEQ ID NO: 2494942 - RNA, 19 nt, Homo sapiens
  misc_RNA (1)...(19): siRNA sense strand
gugaugaauuagaagacaa

SEQ ID NO: 2494943 - RNA, 19 nt, Homo sapiens
  misc_RNA (1)...(19): siRNA sense strand
gauccagagcagaaggaaa

SEQ ID NO: 2494944 - RNA, 19 nt, Homo sapiens
  misc_RNA (1)...(19): siRNA sense strand
agaucaagaaguugguaua

SEQ ID NO: 2494945 - RNA, 19 nt, Homo sapiens
  misc_RNA (1)...(19): siRNA sense strand
aaguaauagaguuggcaaa

SEQ ID NO: 2494946 - RNA, 19 nt, Homo sapiens
  misc_RNA (1)...(19): siRNA sense strand
acucaaaagccaaaggaaa

SEQ ID NO: 2494947 - RNA, 19 nt, Homo sapiens
  misc_RNA (1)...(19): siRNA sense strand
cauuaaagcuacuggguac

SEQ ID NO: 2494948 - RNA, 19 nt, Homo sapiens
  misc_RNA (1)...(19): siRNA sense strand
gguuguaaauguagccaau

SEQ ID NO: 2494949 - RNA, 19 nt, Homo sapiens
  misc_RNA (1)...(19): siRNA sense strand
gggaggaaggagacagcaa

SEQ ID NO: 2494950 - RNA, 19 nt, Homo sapiens
  misc_RNA (1)...(19): siRNA sense strand
cucaaaagccaaaggaaaa

SEQ ID NO: 2494951 - RNA, 19 nt, Homo sapiens
  misc_RNA (1)...(19): siRNA sense strand
aguucgaaauguagaagua

SEQ ID NO: 2494952 - RNA, 19 nt, Homo sapiens
  misc_RNA (1)...(19): siRNA sense strand
ugguaaaacugcagauauu

SEQ ID NO: 2494953 - RNA, 19 nt, Homo sapiens
  misc_RNA (1)...(19): siRNA sense strand
gggagaaggaaaaugaaaa

SEQ ID NO: 2494954 - RNA, 19 nt, Homo sapiens
  misc_RNA (1)...(19): siRNA sense strand
aagcaaagcaagagaauuc

SEQ ID NO: 2494955 - RNA, 19 nt, Homo sapiens
  misc_RNA (1)...(19): siRNA sense strand
gaugauugcaaaagggaaa

SEQ ID NO: 2494956 - RNA, 19 nt, Homo sapiens
  misc_RNA (1)...(19): siRNA sense strand
uggaagugaaaguggagaa

SEQ ID NO: 2494957 - RNA, 19 nt, Homo sapiens
  misc_RNA (1)...(19): siRNA sense strand
cugcuaaacuggaugcuau

SEQ ID NO: 2494958 - RNA, 19 nt, Homo sapiens
  misc_RNA (1)...(19): siRNA sense strand
aagaagaagccguauacua

SEQ ID NO: 2494959 - RNA, 19 nt, Homo sapiens
  misc_RNA (1)...(19): siRNA sense strand
agaagacaauggaaagaau

SEQ ID NO: 2494960 - RNA, 19 nt, Homo sapiens
  misc_RNA (1)...(19): siRNA sense strand
acacagguuugcagcuaaa

SEQ ID NO: 2494961 - RNA, 19 nt, Homo sapiens
  misc_RNA (1)...(19): siRNA sense strand
gguucgauaugcugaagaa

SEQ ID NO: 2494962 - RNA, 19 nt, Homo sapiens
  misc_RNA (1)...(19): siRNA sense strand
aaacaaagcaagauagaac

SEQ ID NO: 2494963 - RNA, 19 nt, Homo sapiens
  misc_RNA (1)...(19): siRNA sense strand
gaagauggggagaaggaaa

SEQ ID NO: 2494964 - RNA, 19 nt, Homo sapiens
  misc_RNA (1)...(19): siRNA sense strand
cuaacaggaaugaaugaaa

SEQ ID NO: 2494965 - RNA, 19 nt, Homo sapiens
  misc_RNA (1)...(19): siRNA sense strand
ggauaaacaauuugcagca

SEQ ID NO: 2494966 - RNA, 19 nt, Homo sapiens
  misc_RNA (1)...(19): siRNA sense strand
gucacuaaggagaaagaaa

SEQ ID NO: 2494967 - RNA, 19 nt, Homo sapiens
  misc_RNA (1)...(19): siRNA sense strand
ccgcaagcuauguaacuua

SEQ ID NO: 2494968 - RNA, 19 nt, Homo sapiens
  misc_RNA (1)...(19): siRNA sense strand
aaagaacagccaagaggaa

SEQ ID NO: 2494969 - RNA, 19 nt, Homo sapiens
  misc_RNA (1)...(19): siRNA sense strand
gcgauuugaagaagaauga

SEQ ID NO: 2494970 - RNA, 19 nt, Homo sapiens
  misc_RNA (1)...(19): siRNA sense strand
gcguuuacuucguagcaau

SEQ ID NO: 2494971 - RNA, 19 nt, Homo sapiens
  misc_RNA (1)...(19): siRNA sense strand
ggauaauauacacagguuu

SEQ ID NO: 2494972 - RNA, 19 nt, Homo sapiens
  misc_RNA (1)...(19): siRNA sense strand
cugaagaacagcaggaucu

SEQ ID NO: 2494973 - RNA, 19 nt, Homo sapiens
  misc_RNA (1)...(19): siRNA sense strand
cacuacugaucgaaagaua

SEQ ID NO: 2494974 - RNA, 19 nt, Homo sapiens
  misc_RNA (1)...(19): siRNA sense strand
cugaaagugugguuguuau

SEQ ID NO: 2494975 - RNA, 19 nt, Homo sapiens
  misc_RNA (1)...(19): siRNA sense strand
ugaaagugugguuguuaua

SEQ ID NO: 2494976 - RNA, 19 nt, Homo sapiens
  misc_RNA (1)...(19): siRNA sense strand
ucacuaaggagaaagaaaa

SEQ ID NO: 2494977 - RNA, 19 nt, Homo sapiens
  misc_RNA (1)...(19): siRNA sense strand
gugcaagcgcuuugagagu

SEQ ID NO: 2494978 - RNA, 19 nt, Homo sapiens
  misc_RNA (1)...(19): siRNA sense strand
ugcacaacauggugaaauu

SEQ ID NO: 2494979 - RNA, 19 nt, Homo sapiens
  misc_RNA (1)...(19): siRNA sense strand
auguuuaccugguucgaua

SEQ ID NO: 2494980 - RNA, 19 nt, Homo sapiens
  misc_RNA (1)...(19): siRNA sense strand
uggccaugucagagaaaga

SEQ ID NO: 2494981 - RNA, 19 nt, Homo sapiens
  misc_RNA (1)...(19): siRNA sense strand
auccagagcagaaggaaau

SEQ ID NO: 2494982 - RNA, 19 nt, Homo sapiens
  misc_RNA (1)...(19): siRNA sense strand
guacaagauuuauuaggca

SEQ ID NO: 2494983 - RNA, 19 nt, Homo sapiens
  misc_RNA (1)...(19): siRNA sense strand
caggaaaagcaaagcaaga

SEQ ID NO: 2494984 - RNA, 19 nt, Homo sapiens
  misc_RNA (1)...(19): siRNA sense strand
aaguaugcccggacagaau

SEQ ID NO: 2494985 - RNA, 19 nt, Homo sapiens
  misc_RNA (1)...(19): siRNA sense strand
ggggagaaggaaaaugaaa

SEQ ID NO: 2494986 - RNA, 19 nt, Homo sapiens
  misc_RNA (1)...(19): siRNA sense strand
ggcugaucuugaagguuua

SEQ ID NO: 2494987 - RNA, 19 nt, Homo sapiens
  misc_RNA (1)...(19): siRNA sense strand
uuggaaagagggugaugaa

SEQ ID NO: 2494988 - RNA, 19 nt, Homo sapiens
  misc_RNA (1)...(19): siRNA sense strand
guccaacagggaugaaaua

SEQ ID NO: 2494989 - RNA, 19 nt, Homo sapiens
  misc_RNA (1)...(19): siRNA sense strand
augaaauaguuguugcuga

SEQ ID NO: 2494990 - RNA, 19 nt, Homo sapiens
  misc_RNA (1)...(19): siRNA sense strand
uuagagagcaacaaagauu

SEQ ID NO: 2494991 - RNA, 19 nt, Homo sapiens
  misc_RNA (1)...(19): siRNA sense strand
uauuaaaucugggagcaaa

SEQ ID NO: 2494992 - RNA, 19 nt, Homo sapiens
  misc_RNA (1)...(19): siRNA sense strand
agaguggagcuuuaaguaa

SEQ ID NO: 2494993 - RNA, 19 nt, Homo sapiens
  misc_RNA (1)...(19): siRNA sense strand
agugaaucuggaagugaaa

SEQ ID NO: 2494994 - RNA, 19 nt, Homo sapiens
  misc_RNA (1)...(19): siRNA sense strand
gaugcuugcuauuaaggaa

SEQ ID NO: 2494995 - RNA, 19 nt, Homo sapiens
  misc_RNA (1)...(19): siRNA sense strand
caacuaugaucaagacacu

SEQ ID NO: 2494996 - RNA, 19 nt, Homo sapiens
  misc_RNA (1)...(19): siRNA sense strand
ugugauggcuuuugaagaa

SEQ ID NO: 2494997 - RNA, 19 nt, Homo sapiens
  misc_RNA (1)...(19): siRNA sense strand
gagaucaagaaguugguau

SEQ ID NO: 2494998 - RNA, 19 nt, Homo sapiens
  misc_RNA (1)...(19): siRNA sense strand
acugaucgaaagauagaaa

SEQ ID NO: 2494999 - RNA, 19 nt, Homo sapiens
  misc_RNA (1)...(19): siRNA sense strand
agucaggccuagaaaacaa

SEQ ID NO: 2495000 - RNA, 19 nt, Homo sapiens
  misc_RNA (1)...(19): siRNA sense strand
agagagaaguuaaaggcaa

SEQ ID NO: 2495001 - RNA, 19 nt, Homo sapiens
  misc_RNA (1)...(19): siRNA sense strand
ccugaauugcugaaggaaa

SEQ ID NO: 2495002 - RNA, 19 nt, Homo sapiens
  misc_RNA (1)...(19): siRNA sense strand
ggauauuugcaaugaguca

SEQ ID NO: 2495003 - RNA, 19 nt, Homo sapiens
  misc_RNA (1)...(19): siRNA sense strand
gcaucagagagaaguuaaa

SEQ ID NO: 2495004 - RNA, 19 nt, Homo sapiens
  misc_RNA (1)...(19): siRNA sense strand
cugaauugcugaaggaaac

SEQ ID NO: 2495005 - RNA, 19 nt, Homo sapiens
  misc_RNA (1)...(19): siRNA sense strand
acaaugaagcagagagacu

SEQ ID NO: 2495006 - RNA, 19 nt, Homo sapiens
  misc_RNA (1)...(19): siRNA sense strand
auacaagaucacugggaga

SEQ ID NO: 2495007 - RNA, 19 nt, Homo sapiens
  misc_RNA (1)...(19): siRNA sense strand
ggcccaagagcgagaaaga

SEQ ID NO: 2495008 - RNA, 19 nt, Homo sapiens
  misc_RNA (1)...(19): siRNA sense strand
ugcaauacauagagugaca

SEQ ID NO: 2495009 - RNA, 19 nt, Homo sapiens
  misc_RNA (1)...(19): siRNA sense strand
ggacaaaacuggagcaagc

SEQ ID NO: 2495010 - RNA, 19 nt, Homo sapiens
  misc_RNA (1)...(19): siRNA sense strand
uggauguaguaaugaaaga

SEQ ID NO: 2495011 - RNA, 19 nt, Homo sapiens
  misc_RNA (1)...(19): siRNA sense strand
gagaaaagaagcacagaca

SEQ ID NO: 2495012 - RNA, 19 nt, Homo sapiens
  misc_RNA (1)...(19): siRNA sense strand
uugaccaacuugaggauau

SEQ ID NO: 2495013 - RNA, 19 nt, Homo sapiens
  misc_RNA (1)...(19): siRNA sense strand
cuucauugacugcugguaa

SEQ ID NO: 2495014 - RNA, 19 nt, Homo sapiens
  misc_RNA (1)...(19): siRNA sense strand
cagauuuggaugaugaauu

SEQ ID NO: 2495015 - RNA, 19 nt, Homo sapiens
  misc_RNA (1)...(19): siRNA sense strand
gguggauguaguaaugaaa

SEQ ID NO: 2495016 - RNA, 19 nt, Homo sapiens
  misc_RNA (1)...(19): siRNA sense strand
uguugaugauggagacaca

SEQ ID NO: 2495017 - RNA, 19 nt, Homo sapiens
  misc_RNA (1)...(19): siRNA sense strand
agagcgagaaagaggcauu

SEQ ID NO: 2495018 - RNA, 19 nt, Homo sapiens
  misc_RNA (1)...(19): siRNA sense strand
gcuuaaacauacugccacu

SEQ ID NO: 2495019 - RNA, 19 nt, Homo sapiens
  misc_RNA (1)...(19): siRNA sense strand
cuuuaaguaugcaguugaa

SEQ ID NO: 2495020 - RNA, 19 nt, Homo sapiens
  misc_RNA (1)...(19): siRNA sense strand
ggaaacaacugaagcaagg

SEQ ID NO: 2495021 - RNA, 19 nt, Homo sapiens
  misc_RNA (1)...(19): siRNA sense strand
ugacagauuucauggccca

SEQ ID NO: 2495022 - RNA, 19 nt, Homo sapiens
  misc_RNA (1)...(19): siRNA sense strand
acauuugauuggaaagguu

SEQ ID NO: 2495023 - RNA, 19 nt, Homo sapiens
  misc_RNA (1)...(19): siRNA sense strand
ugauggagacacagugaca

SEQ ID NO: 2495024 - RNA, 19 nt, Homo sapiens
  misc_RNA (1)...(19): siRNA sense strand
uuucauggcccaagagcga

SEQ ID NO: 2495025 - RNA, 19 nt, Homo sapiens
  misc_RNA (1)...(19): siRNA sense strand
cauuugauuggaaagguua

SEQ ID NO: 2495026 - RNA, 19 nt, Homo sapiens
  misc_RNA (1)...(19): siRNA sense strand
ugguggauguaguaaugaa

SEQ ID NO: 2495027 - RNA, 19 nt, Homo sapiens
  misc_RNA (1)...(19): siRNA sense strand
auccaaguccagugcauua

SEQ ID NO: 2495028 - RNA, 19 nt, Homo sapiens
  misc_RNA (1)...(19): siRNA sense strand
gagauguugaugauggaga

SEQ ID NO: 2495029 - RNA, 19 nt, Homo sapiens
  misc_RNA (1)...(19): siRNA sense strand
ugaaagcaucagagagaag

SEQ ID NO: 2495030 - RNA, 19 nt, Homo sapiens
  misc_RNA (1)...(19): siRNA sense strand
ggauguaguaaugaaagaa

SEQ ID NO: 2495031 - RNA, 19 nt, Homo sapiens
  misc_RNA (1)...(19): siRNA sense strand
agagagaaguuaaaggcaa

SEQ ID NO: 2495032 - RNA, 19 nt, Homo sapiens
  misc_RNA (1)...(19): siRNA sense strand
ccugaauugcugaaggaaa

SEQ ID NO: 2495033 - RNA, 19 nt, Homo sapiens
  misc_RNA (1)...(19): siRNA sense strand
ggauauuugcaaugaguca

SEQ ID NO: 2495034 - RNA, 19 nt, Homo sapiens
  misc_RNA (1)...(19): siRNA sense strand
gcaucagagagaaguuaaa

SEQ ID NO: 2495035 - RNA, 19 nt, Homo sapiens
  misc_RNA (1)...(19): siRNA sense strand
cugaauugcugaaggaaac

SEQ ID NO: 2495036 - RNA, 19 nt, Homo sapiens
  misc_RNA (1)...(19): siRNA sense strand
acaaugaagcagagagacu

SEQ ID NO: 2495037 - RNA, 19 nt, Homo sapiens
  misc_RNA (1)...(19): siRNA sense strand
auacaagaucacugggaga

SEQ ID NO: 2495038 - RNA, 19 nt, Homo sapiens
  misc_RNA (1)...(19): siRNA sense strand
ggcccaagagcgagaaaga

SEQ ID NO: 2495039 - RNA, 19 nt, Homo sapiens
  misc_RNA (1)...(19): siRNA sense strand
ugcaauacauagagugaca

SEQ ID NO: 2495040 - RNA, 19 nt, Homo sapiens
  misc_RNA (1)...(19): siRNA sense strand
ggacaaaacuggagcaagc

SEQ ID NO: 2495041 - RNA, 19 nt, Homo sapiens
  misc_RNA (1)...(19): siRNA sense strand
uggauguaguaaugaaaga

SEQ ID NO: 2495042 - RNA, 19 nt, Homo sapiens
  misc_RNA (1)...(19): siRNA sense strand
gagaaaagaagcacagaca

SEQ ID NO: 2495043 - RNA, 19 nt, Homo sapiens
  misc_RNA (1)...(19): siRNA sense strand
uugaccaacuugaggauau

SEQ ID NO: 2495044 - RNA, 19 nt, Homo sapiens
  misc_RNA (1)...(19): siRNA sense strand
cuucauugacugcugguaa

SEQ ID NO: 2495045 - RNA, 19 nt, Homo sapiens
  misc_RNA (1)...(19): siRNA sense strand
cagauuuggaugaugaauu

SEQ ID NO: 2495046 - RNA, 19 nt, Homo sapiens
  misc_RNA (1)...(19): siRNA sense strand
gguggauguaguaaugaaa

SEQ ID NO: 2495047 - RNA, 19 nt, Homo sapiens
  misc_RNA (1)...(19): siRNA sense strand
uguugaugauggagacaca

SEQ ID NO: 2495048 - RNA, 19 nt, Homo sapiens
  misc_RNA (1)...(19): siRNA sense strand
agagcgagaaagaggcauu

SEQ ID NO: 2495049 - RNA, 19 nt, Homo sapiens
  misc_RNA (1)...(19): siRNA sense strand
gcuuaaacauacugccacu

SEQ ID NO: 2495050 - RNA, 19 nt, Homo sapiens
  misc_RNA (1)...(19): siRNA sense strand
cuuuaaguaugcaguugaa

SEQ ID NO: 2495051 - RNA, 19 nt, Homo sapiens
  misc_RNA (1)...(19): siRNA sense strand
ggaaacaacugaagcaagg

SEQ ID NO: 2495052 - RNA, 19 nt, Homo sapiens
  misc_RNA (1)...(19): siRNA sense strand
ugacagauuucauggccca

SEQ ID NO: 2495053 - RNA, 19 nt, Homo sapiens
  misc_RNA (1)...(19): siRNA sense strand
acauuugauuggaaagguu

SEQ ID NO: 2495054 - RNA, 19 nt, Homo sapiens
  misc_RNA (1)...(19): siRNA sense strand
ugauggagacacagugaca

SEQ ID NO: 2495055 - RNA, 19 nt, Homo sapiens
  misc_RNA (1)...(19): siRNA sense strand
uuucauggcccaagagcga

SEQ ID NO: 2495056 - RNA, 19 nt, Homo sapiens
  misc_RNA (1)...(19): siRNA sense strand
cauuugauuggaaagguua

SEQ ID NO: 2495057 - RNA, 19 nt, Homo sapiens
  misc_RNA (1)...(19): siRNA sense strand
ugguggauguaguaaugaa

SEQ ID NO: 2495058 - RNA, 19 nt, Homo sapiens
  misc_RNA (1)...(19): siRNA sense strand
auccaaguccagugcauua

SEQ ID NO: 2495059 - RNA, 19 nt, Homo sapiens
  misc_RNA (1)...(19): siRNA sense strand
gagauguugaugauggaga

SEQ ID NO: 2495060 - RNA, 19 nt, Homo sapiens
  misc_RNA (1)...(19): siRNA sense strand
ugaaagcaucagagagaag

SEQ ID NO: 2495061 - RNA, 19 nt, Homo sapiens
  misc_RNA (1)...(19): siRNA sense strand
ggauguaguaaugaaagaa

SEQ ID NO: 2495062 - RNA, 19 nt, Homo sapiens
  misc_RNA (1)...(19): siRNA sense strand
agagagaaguuaaaggcaa

SEQ ID NO: 2495063 - RNA, 19 nt, Homo sapiens
  misc_RNA (1)...(19): siRNA sense strand
ccugaauugcugaaggaaa

SEQ ID NO: 2495064 - RNA, 19 nt, Homo sapiens
  misc_RNA (1)...(19): siRNA sense strand
ggauauuugcaaugaguca

SEQ ID NO: 2495065 - RNA, 19 nt, Homo sapiens
  misc_RNA (1)...(19): siRNA sense strand
gcaucagagagaaguuaaa

SEQ ID NO: 2495066 - RNA, 19 nt, Homo sapiens
  misc_RNA (1)...(19): siRNA sense strand
cugaauugcugaaggaaac

SEQ ID NO: 2495067 - RNA, 19 nt, Homo sapiens
  misc_RNA (1)...(19): siRNA sense strand
acaaugaagcagagagacu

SEQ ID NO: 2495068 - RNA, 19 nt, Homo sapiens
  misc_RNA (1)...(19): siRNA sense strand
auacaagaucacugggaga

SEQ ID NO: 2495069 - RNA, 19 nt, Homo sapiens
  misc_RNA (1)...(19): siRNA sense strand
ggcccaagagcgagaaaga

SEQ ID NO: 2495070 - RNA, 19 nt, Homo sapiens
  misc_RNA (1)...(19): siRNA sense strand
ugcaauacauagagugaca

SEQ ID NO: 2495071 - RNA, 19 nt, Homo sapiens
  misc_RNA (1)...(19): siRNA sense strand
ggacaaaacuggagcaagc

SEQ ID NO: 2495072 - RNA, 19 nt, Homo sapiens
  misc_RNA (1)...(19): siRNA sense strand
uggauguaguaaugaaaga

SEQ ID NO: 2495073 - RNA, 19 nt, Homo sapiens
  misc_RNA (1)...(19): siRNA sense strand
gagaaaagaagcacagaca

SEQ ID NO: 2495074 - RNA, 19 nt, Homo sapiens
  misc_RNA (1)...(19): siRNA sense strand
uugaccaacuugaggauau

SEQ ID NO: 2495075 - RNA, 19 nt, Homo sapiens
  misc_RNA (1)...(19): siRNA sense strand
cuucauugacugcugguaa

SEQ ID NO: 2495076 - RNA, 19 nt, Homo sapiens
  misc_RNA (1)...(19): siRNA sense strand
cagauuuggaugaugaauu

SEQ ID NO: 2495077 - RNA, 19 nt, Homo sapiens
  misc_RNA (1)...(19): siRNA sense strand
gguggauguaguaaugaaa

SEQ ID NO: 2495078 - RNA, 19 nt, Homo sapiens
  misc_RNA (1)...(19): siRNA sense strand
uguugaugauggagacaca

SEQ ID NO: 2495079 - RNA, 19 nt, Homo sapiens
  misc_RNA (1)...(19): siRNA sense strand
agagcgagaaagaggcauu

SEQ ID NO: 2495080 - RNA, 19 nt, Homo sapiens
  misc_RNA (1)...(19): siRNA sense strand
gcuuaaacauacugccacu

SEQ ID NO: 2495081 - RNA, 19 nt, Homo sapiens
  misc_RNA (1)...(19): siRNA sense strand
cuuuaaguaugcaguugaa

SEQ ID NO: 2495082 - RNA, 19 nt, Homo sapiens
  misc_RNA (1)...(19): siRNA sense strand
ggaaacaacugaagcaagg

SEQ ID NO: 2495083 - RNA, 19 nt, Homo sapiens
  misc_RNA (1)...(19): siRNA sense strand
ugacagauuucauggccca

SEQ ID NO: 2495084 - RNA, 19 nt, Homo sapiens
  misc_RNA (1)...(19): siRNA sense strand
acauuugauuggaaagguu

SEQ ID NO: 2495085 - RNA, 19 nt, Homo sapiens
  misc_RNA (1)...(19): siRNA sense strand
ugauggagacacagugaca

SEQ ID NO: 2495086 - RNA, 19 nt, Homo sapiens
  misc_RNA (1)...(19): siRNA sense strand
uuucauggcccaagagcga

SEQ ID NO: 2495087 - RNA, 19 nt, Homo sapiens
  misc_RNA (1)...(19): siRNA sense strand
cauuugauuggaaagguua

SEQ ID NO: 2495088 - RNA, 19 nt, Homo sapiens
  misc_RNA (1)...(19): siRNA sense strand
ugguggauguaguaaugaa

SEQ ID NO: 2495089 - RNA, 19 nt, Homo sapiens
  misc_RNA (1)...(19): siRNA sense strand
auccaaguccagugcauua

SEQ ID NO: 2495090 - RNA, 19 nt, Homo sapiens
  misc_RNA (1)...(19): siRNA sense strand
gagauguugaugauggaga

SEQ ID NO: 2495091 - RNA, 19 nt, Homo sapiens
  misc_RNA (1)...(19): siRNA sense strand
ugaaagcaucagagagaag

SEQ ID NO: 2495092 - RNA, 19 nt, Homo sapiens
  misc_RNA (1)...(19): siRNA sense strand
ggauguaguaaugaaagaa

SEQ ID NO: 2495093 - RNA, 19 nt, Homo sapiens
  misc_RNA (1)...(19): siRNA sense strand
ccaauaugaucaaggggaa

SEQ ID NO: 2495094 - RNA, 19 nt, Homo sapiens
  misc_RNA (1)...(19): siRNA sense strand
uguuggaagauuugggaau

SEQ ID NO: 2495095 - RNA, 19 nt, Homo sapiens
  misc_RNA (1)...(19): siRNA sense strand
gaauggaugaugaaggaga

SEQ ID NO: 2495096 - RNA, 19 nt, Homo sapiens
  misc_RNA (1)...(19): siRNA sense strand
ggaugaugaaggagaugau

SEQ ID NO: 2495097 - RNA, 19 nt, Homo sapiens
  misc_RNA (1)...(19): siRNA sense strand
auuugaaguugauguggaa

SEQ ID NO: 2495098 - RNA, 19 nt, Homo sapiens
  misc_RNA (1)...(19): siRNA sense strand
uugaaguugauguggaaau

SEQ ID NO: 2495099 - RNA, 19 nt, Homo sapiens
  misc_RNA (1)...(19): siRNA sense strand
cugcaaacuacuuagacau

SEQ ID NO: 2495100 - RNA, 19 nt, Homo sapiens
  misc_RNA (1)...(19): siRNA sense strand
cugaagaggaggaagccca

SEQ ID NO: 2495101 - RNA, 19 nt, Homo sapiens
  misc_RNA (1)...(19): siRNA sense strand
ugaaggagaugaugaccca

SEQ ID NO: 2495102 - RNA, 19 nt, Homo sapiens
  misc_RNA (1)...(19): siRNA sense strand
ugauguggaaauugccaaa

SEQ ID NO: 2495103 - RNA, 19 nt, Homo sapiens
  misc_RNA (1)...(19): siRNA sense strand
caauaugaucaaggggaaa

SEQ ID NO: 2495104 - RNA, 19 nt, Homo sapiens
  misc_RNA (1)...(19): siRNA sense strand
ccaauaugaucaaggggaa

SEQ ID NO: 2495105 - RNA, 19 nt, Homo sapiens
  misc_RNA (1)...(19): siRNA sense strand
uguuggaagauuugggaau

SEQ ID NO: 2495106 - RNA, 19 nt, Homo sapiens
  misc_RNA (1)...(19): siRNA sense strand
gaauggaugaugaaggaga

SEQ ID NO: 2495107 - RNA, 19 nt, Homo sapiens
  misc_RNA (1)...(19): siRNA sense strand
ggaugaugaaggagaugau

SEQ ID NO: 2495108 - RNA, 19 nt, Homo sapiens
  misc_RNA (1)...(19): siRNA sense strand
auuugaaguugauguggaa

SEQ ID NO: 2495109 - RNA, 19 nt, Homo sapiens
  misc_RNA (1)...(19): siRNA sense strand
uugaaguugauguggaaau

SEQ ID NO: 2495110 - RNA, 19 nt, Homo sapiens
  misc_RNA (1)...(19): siRNA sense strand
cugcaaacuacuuagacau

SEQ ID NO: 2495111 - RNA, 19 nt, Homo sapiens
  misc_RNA (1)...(19): siRNA sense strand
cugaagaggaggaagccca

SEQ ID NO: 2495112 - RNA, 19 nt, Homo sapiens
  misc_RNA (1)...(19): siRNA sense strand
ugaaggagaugaugaccca

SEQ ID NO: 2495113 - RNA, 19 nt, Homo sapiens
  misc_RNA (1)...(19): siRNA sense strand
ugauguggaaauugccaaa

SEQ ID NO: 2495114 - RNA, 19 nt, Homo sapiens
  misc_RNA (1)...(19): siRNA sense strand
caauaugaucaaggggaaa

SEQ ID NO: 2495115 - RNA, 19 nt, Homo sapiens
  misc_RNA (1)...(19): siRNA sense strand
augaagaggaggagcagaa

SEQ ID NO: 2495116 - RNA, 19 nt, Homo sapiens
  misc_RNA (1)...(19): siRNA sense strand
aggaagaggaggagccauu

SEQ ID NO: 2495117 - RNA, 19 nt, Homo sapiens
  misc_RNA (1)...(19): siRNA sense strand
aggaagaggaagaggagga

SEQ ID NO: 2495118 - RNA, 19 nt, Homo sapiens
  misc_RNA (1)...(19): siRNA sense strand
gagcaggagaugauggaga

SEQ ID NO: 2495119 - RNA, 19 nt, Homo sapiens
  misc_RNA (1)...(19): siRNA sense strand
caagaagauugaaggggaa

SEQ ID NO: 2495120 - RNA, 19 nt, Homo sapiens
  misc_RNA (1)...(19): siRNA sense strand
ccaugagagugaagaggga

SEQ ID NO: 2495121 - RNA, 19 nt, Homo sapiens
  misc_RNA (1)...(19): siRNA sense strand
cugugaaagaggaggcaga

SEQ ID NO: 2495122 - RNA, 19 nt, Homo sapiens
  misc_RNA (1)...(19): siRNA sense strand
augaaagcucagugaagaa

SEQ ID NO: 2495123 - RNA, 19 nt, Homo sapiens
  misc_RNA (1)...(19): siRNA sense strand
aggaguaugcagagaacau

SEQ ID NO: 2495124 - RNA, 19 nt, Homo sapiens
  misc_RNA (1)...(19): siRNA sense strand
gggaugaugaagaggagga

SEQ ID NO: 2495125 - RNA, 19 nt, Homo sapiens
  misc_RNA (1)...(19): siRNA sense strand
gaaacaaacugguacucga

SEQ ID NO: 2495126 - RNA, 19 nt, Homo sapiens
  misc_RNA (1)...(19): siRNA sense strand
cggcugaggagcaggagau

SEQ ID NO: 2495127 - RNA, 19 nt, Homo sapiens
  misc_RNA (1)...(19): siRNA sense strand
gcagugaagugcuggccau

SEQ ID NO: 2495128 - RNA, 19 nt, Homo sapiens
  misc_RNA (1)...(19): siRNA sense strand
acaccgaggaggaguucua

SEQ ID NO: 2495129 - RNA, 19 nt, Homo sapiens
  misc_RNA (1)...(19): siRNA sense strand
aaucucaugcucagggaaa

SEQ ID NO: 2495130 - RNA, 19 nt, Homo sapiens
  misc_RNA (1)...(19): siRNA sense strand
cugagaaggaacaugaaga

SEQ ID NO: 2495131 - RNA, 19 nt, Homo sapiens
  misc_RNA (1)...(19): siRNA sense strand
aggaagcggaugaugacaa

SEQ ID NO: 2495132 - RNA, 19 nt, Homo sapiens
  misc_RNA (1)...(19): siRNA sense strand
cugaggagcaggagaugau

SEQ ID NO: 2495133 - RNA, 19 nt, Homo sapiens
  misc_RNA (1)...(19): siRNA sense strand
augaaaucucccaggaaga

SEQ ID NO: 2495134 - RNA, 19 nt, Homo sapiens
  misc_RNA (1)...(19): siRNA sense strand
ccgcuaucgggaagaagaa

SEQ ID NO: 2495135 - RNA, 19 nt, Homo sapiens
  misc_RNA (1)...(19): siRNA sense strand
uggaggaagcggaugauga

SEQ ID NO: 2495136 - RNA, 19 nt, Homo sapiens
  misc_RNA (1)...(19): siRNA sense strand
gcuccaggacaaugaugaa

SEQ ID NO: 2495137 - RNA, 19 nt, Homo sapiens
  misc_RNA (1)...(19): siRNA sense strand
agaucaagaaagugggaac

SEQ ID NO: 2495138 - RNA, 19 nt, Homo sapiens
  misc_RNA (1)...(19): siRNA sense strand
aagaaaugacuguggugga

SEQ ID NO: 2495139 - RNA, 19 nt, Homo sapiens
  misc_RNA (1)...(19): siRNA sense strand
aagaggaggagcagaagau

SEQ ID NO: 2495140 - RNA, 19 nt, Homo sapiens
  misc_RNA (1)...(19): siRNA sense strand
gcugcagauuauugacaga

SEQ ID NO: 2495141 - RNA, 19 nt, Homo sapiens
  misc_RNA (1)...(19): siRNA sense strand
acaaugacaccgaggagga

SEQ ID NO: 2495142 - RNA, 19 nt, Homo sapiens
  misc_RNA (1)...(19): siRNA sense strand
gagauggggaagaggaaga

SEQ ID NO: 2495143 - RNA, 19 nt, Homo sapiens
  misc_RNA (1)...(19): siRNA sense strand
agaaggaacaugaagagca

SEQ ID NO: 2495144 - RNA, 19 nt, Homo sapiens
  misc_RNA (1)...(19): siRNA sense strand
caucaaaauugucaggcau

SEQ ID NO: 2495145 - RNA, 19 nt, Homo sapiens
  misc_RNA (1)...(19): siRNA sense strand
ugggcuugcuggagaacuu

SEQ ID NO: 2495146 - RNA, 19 nt, Homo sapiens
  misc_RNA (1)...(19): siRNA sense strand
gcuaucgggaagaagaaau

SEQ ID NO: 2495147 - RNA, 19 nt, Homo sapiens
  misc_RNA (1)...(19): siRNA sense strand
aggcagauggcguccacaa

SEQ ID NO: 2495148 - RNA, 19 nt, Homo sapiens
  misc_RNA (1)...(19): siRNA sense strand
cagaagaugcgucggaaac

SEQ ID NO: 2495149 - RNA, 19 nt, Homo sapiens
  misc_RNA (1)...(19): siRNA sense strand
acaagaagauugaagggga

SEQ ID NO: 2495150 - RNA, 19 nt, Homo sapiens
  misc_RNA (1)...(19): siRNA sense strand
augaugaagaggaggagca

SEQ ID NO: 2495151 - RNA, 19 nt, Homo sapiens
  misc_RNA (1)...(19): siRNA sense strand
aggcauaucaucaaggagu

SEQ ID NO: 2495152 - RNA, 19 nt, Homo sapiens
  misc_RNA (1)...(19): siRNA sense strand
cccugaaagugcuggacca

SEQ ID NO: 2495153 - RNA, 19 nt, Homo sapiens
  misc_RNA (1)...(19): siRNA sense strand
ugguggaggaagcggauga

SEQ ID NO: 2495154 - RNA, 19 nt, Homo sapiens
  misc_RNA (1)...(19): siRNA sense strand
gugaagagggagcagaagu

SEQ ID NO: 2495155 - RNA, 19 nt, Homo sapiens
  misc_RNA (1)...(19): siRNA sense strand
ccuggaugagucugugaaa

SEQ ID NO: 2495156 - RNA, 19 nt, Homo sapiens
  misc_RNA (1)...(19): siRNA sense strand
cagagauggggaagaggaa

SEQ ID NO: 2495157 - RNA, 19 nt, Homo sapiens
  misc_RNA (1)...(19): siRNA sense strand
gagcagaagaugcgucgga

SEQ ID NO: 2495158 - RNA, 19 nt, Homo sapiens
  misc_RNA (1)...(19): siRNA sense strand
guuccaaucgugagcgcuu

SEQ ID NO: 2495159 - RNA, 19 nt, Homo sapiens
  misc_RNA (1)...(19): siRNA sense strand
gaguauaagaagagggugc

SEQ ID NO: 2495160 - RNA, 19 nt, Homo sapiens
  misc_RNA (1)...(19): siRNA sense strand
ccgcgaucgaacagaagaa

SEQ ID NO: 2495161 - RNA, 19 nt, Homo sapiens
  misc_RNA (1)...(19): siRNA sense strand
ucggagaaugucugaggaa

SEQ ID NO: 2495162 - RNA, 19 nt, Homo sapiens
  misc_RNA (1)...(19): siRNA sense strand
ggagaaugucugaggaagg

SEQ ID NO: 2495163 - RNA, 19 nt, Homo sapiens
  misc_RNA (1)...(19): siRNA sense strand
ugaugguggucuucggaga

SEQ ID NO: 2495164 - RNA, 19 nt, Homo sapiens
  misc_RNA (1)...(19): siRNA sense strand
gaguauaagaagagggugc

SEQ ID NO: 2495165 - RNA, 19 nt, Homo sapiens
  misc_RNA (1)...(19): siRNA sense strand
ccgcgaucgaacagaagaa

SEQ ID NO: 2495166 - RNA, 19 nt, Homo sapiens
  misc_RNA (1)...(19): siRNA sense strand
ucggagaaugucugaggaa

SEQ ID NO: 2495167 - RNA, 19 nt, Homo sapiens
  misc_RNA (1)...(19): siRNA sense strand
ggagaaugucugaggaagg

SEQ ID NO: 2495168 - RNA, 19 nt, Homo sapiens
  misc_RNA (1)...(19): siRNA sense strand
ugaugguggucuucggaga

SEQ ID NO: 2495169 - RNA, 19 nt, Homo sapiens
  misc_RNA (1)...(19): siRNA sense strand
ggacaagauuagagaauac

SEQ ID NO: 2495170 - RNA, 19 nt, Homo sapiens
  misc_RNA (1)...(19): siRNA sense strand
agcaagagcuggagaggga

SEQ ID NO: 2495171 - RNA, 19 nt, Homo sapiens
  misc_RNA (1)...(19): siRNA sense strand
guggacaagauuagagaau

SEQ ID NO: 2495172 - RNA, 19 nt, Homo sapiens
  misc_RNA (1)...(19): siRNA sense strand
acuugauccuauacagaaa

SEQ ID NO: 2495173 - RNA, 19 nt, Homo sapiens
  misc_RNA (1)...(19): siRNA sense strand
uggacaagauuagagaaua

SEQ ID NO: 2495174 - RNA, 19 nt, Homo sapiens
  misc_RNA (1)...(19): siRNA sense strand
aauacaaaucuaagcgaca

SEQ ID NO: 2495175 - RNA, 19 nt, Homo sapiens
  misc_RNA (1)...(19): siRNA sense strand
ugaugcuaguucagaguau

SEQ ID NO: 2495176 - RNA, 19 nt, Homo sapiens
  misc_RNA (1)...(19): siRNA sense strand
aggcaaacguccaagcuga

SEQ ID NO: 2495177 - RNA, 19 nt, Homo sapiens
  misc_RNA (1)...(19): siRNA sense strand
accagaaggccaagggauu

SEQ ID NO: 2495178 - RNA, 19 nt, Homo sapiens
  misc_RNA (1)...(19): siRNA sense strand
ggaugaaagagucgaggca

SEQ ID NO: 2495179 - RNA, 19 nt, Homo sapiens
  misc_RNA (1)...(19): siRNA sense strand
agaaggaccagaaggccaa

SEQ ID NO: 2495180 - RNA, 19 nt, Homo sapiens
  misc_RNA (1)...(19): siRNA sense strand
aguacaagaaggaccagaa

SEQ ID NO: 2495181 - RNA, 19 nt, Homo sapiens
  misc_RNA (1)...(19): siRNA sense strand
aagaaggaccagaaggcca

SEQ ID NO: 2495182 - RNA, 19 nt, Homo sapiens
  misc_RNA (1)...(19): siRNA sense strand
gcaaggagcucaacggcag

SEQ ID NO: 2495183 - RNA, 19 nt, Homo sapiens
  misc_RNA (1)...(19): siRNA sense strand
aggaagagaaggacagaga

SEQ ID NO: 2495184 - RNA, 19 nt, Homo sapiens
  misc_RNA (1)...(19): siRNA sense strand
acgaggaggaggaggaaga

SEQ ID NO: 2495185 - RNA, 19 nt, Homo sapiens
  misc_RNA (1)...(19): siRNA sense strand
cugaggaggagaagaaaga

SEQ ID NO: 2495186 - RNA, 19 nt, Homo sapiens
  misc_RNA (1)...(19): siRNA sense strand
aggaggaggaggaagagaa

SEQ ID NO: 2495187 - RNA, 19 nt, Homo sapiens
  misc_RNA (1)...(19): siRNA sense strand
gcauugauguagauggcau

SEQ ID NO: 2495188 - RNA, 19 nt, Homo sapiens
  misc_RNA (1)...(19): siRNA sense strand
aggaggaggaagagaagga

SEQ ID NO: 2495189 - RNA, 19 nt, Homo sapiens
  misc_RNA (1)...(19): siRNA sense strand
gcaugugguuugugggaag

SEQ ID NO: 2495190 - RNA, 19 nt, Homo sapiens
  misc_RNA (1)...(19): siRNA sense strand
agagaaggacagagaaauc

SEQ ID NO: 2495191 - RNA, 19 nt, Homo sapiens
  misc_RNA (1)...(19): siRNA sense strand
ggaggaagccuguggcaac

SEQ ID NO: 2495192 - RNA, 19 nt, Homo sapiens
  misc_RNA (1)...(19): siRNA sense strand
gccaaagccuagagccuca

SEQ ID NO: 2495193 - RNA, 19 nt, Homo sapiens
  misc_RNA (1)...(19): siRNA sense strand
ccucaguggcugcagagaa

SEQ ID NO: 2495194 - RNA, 19 nt, Homo sapiens
  misc_RNA (1)...(19): siRNA sense strand
gggaaaaggaagucaccau

SEQ ID NO: 2495195 - RNA, 19 nt, Homo sapiens
  misc_RNA (1)...(19): siRNA sense strand
cugauugagaaguuugaaa

SEQ ID NO: 2495196 - RNA, 19 nt, Homo sapiens
  misc_RNA (1)...(19): siRNA sense strand
acagugaccuggaggagga

SEQ ID NO: 2495197 - RNA, 19 nt, Homo sapiens
  misc_RNA (1)...(19): siRNA sense strand
cauggagaaggguggcaaa

SEQ ID NO: 2495198 - RNA, 19 nt, Homo sapiens
  misc_RNA (1)...(19): siRNA sense strand
acgacgaggaggaggagga

SEQ ID NO: 2495199 - RNA, 19 nt, Homo sapiens
  misc_RNA (1)...(19): siRNA sense strand
gcauggagcuaaaggagag

SEQ ID NO: 2495200 - RNA, 19 nt, Homo sapiens
  misc_RNA (1)...(19): siRNA sense strand
aggaggacgacgaggagga

SEQ ID NO: 2495201 - RNA, 19 nt, Homo sapiens
  misc_RNA (1)...(19): siRNA sense strand
gaggaggaagagaaggaca

SEQ ID NO: 2495202 - RNA, 19 nt, Homo sapiens
  misc_RNA (1)...(19): siRNA sense strand
auggugaguaugugaagaa

SEQ ID NO: 2495203 - RNA, 19 nt, Homo sapiens
  misc_RNA (1)...(19): siRNA sense strand
gaggagaccugcuucguca

SEQ ID NO: 2495204 - RNA, 19 nt, Homo sapiens
  misc_RNA (1)...(19): siRNA sense strand
gaggaggagaagaaagacu

SEQ ID NO: 2495205 - RNA, 19 nt, Homo sapiens
  misc_RNA (1)...(19): siRNA sense strand
aggacgacgaggaggagga

SEQ ID NO: 2495206 - RNA, 19 nt, Homo sapiens
  misc_RNA (1)...(19): siRNA sense strand
ccaggacugaggaggagaa

SEQ ID NO: 2495207 - RNA, 19 nt, Homo sapiens
  misc_RNA (1)...(19): siRNA sense strand
uggccaaagccuagagccu

SEQ ID NO: 2495208 - RNA, 19 nt, Homo sapiens
  misc_RNA (1)...(19): siRNA sense strand
aggccaggacugaggagga

SEQ ID NO: 2495209 - RNA, 19 nt, Homo sapiens
  misc_RNA (1)...(19): siRNA sense strand
gcccugagacagaggaacu

SEQ ID NO: 2495210 - RNA, 19 nt, Homo sapiens
  misc_RNA (1)...(19): siRNA sense strand
agguaaggcaagugggauu

SEQ ID NO: 2495211 - RNA, 19 nt, Homo sapiens
  misc_RNA (1)...(19): siRNA sense strand
gaacaaggauguaugugcu

SEQ ID NO: 2495212 - RNA, 19 nt, Homo sapiens
  misc_RNA (1)...(19): siRNA sense strand
ggauguaugugcugccagu

SEQ ID NO: 2495213 - RNA, 19 nt, Homo sapiens
  misc_RNA (1)...(19): siRNA sense strand
agguaaggcaagugggauu

SEQ ID NO: 2495214 - RNA, 19 nt, Homo sapiens
  misc_RNA (1)...(19): siRNA sense strand
gaacaaggauguaugugcu

SEQ ID NO: 2495215 - RNA, 19 nt, Homo sapiens
  misc_RNA (1)...(19): siRNA sense strand
ggauguaugugcugccagu

SEQ ID NO: 2495216 - RNA, 19 nt, Homo sapiens
  misc_RNA (1)...(19): siRNA sense strand
cuagaagaaucgaaggcca

SEQ ID NO: 2495217 - RNA, 19 nt, Homo sapiens
  misc_RNA (1)...(19): siRNA sense strand
ccaccauccaugagaacau

SEQ ID NO: 2495218 - RNA, 19 nt, Homo sapiens
  misc_RNA (1)...(19): siRNA sense strand
aagccaaaguugaugcuga

SEQ ID NO: 2495219 - RNA, 19 nt, Homo sapiens
  misc_RNA (1)...(19): siRNA sense strand
aggaaaaguacaagagcca

SEQ ID NO: 2495220 - RNA, 19 nt, Homo sapiens
  misc_RNA (1)...(19): siRNA sense strand
ccuggugagcacugugaaa

SEQ ID NO: 2495221 - RNA, 19 nt, Homo sapiens
  misc_RNA (1)...(19): siRNA sense strand
ccuccaagccaaaguugau

SEQ ID NO: 2495222 - RNA, 19 nt, Homo sapiens
  misc_RNA (1)...(19): siRNA sense strand
cuuagaaugaguagcaaua

SEQ ID NO: 2495223 - RNA, 19 nt, Homo sapiens
  misc_RNA (1)...(19): siRNA sense strand
cccugaaaucauagaguua

SEQ ID NO: 2495224 - RNA, 19 nt, Homo sapiens
  misc_RNA (1)...(19): siRNA sense strand
gaaagaaggugaugacgca

SEQ ID NO: 2495225 - RNA, 19 nt, Homo sapiens
  misc_RNA (1)...(19): siRNA sense strand
uugcaagagucaagauaga

SEQ ID NO: 2495226 - RNA, 19 nt, Homo sapiens
  misc_RNA (1)...(19): siRNA sense strand
acccaaggagauagagaaa

SEQ ID NO: 2495227 - RNA, 19 nt, Homo sapiens
  misc_RNA (1)...(19): siRNA sense strand
ggaauuggaaagaagguga

SEQ ID NO: 2495228 - RNA, 19 nt, Homo sapiens
  misc_RNA (1)...(19): siRNA sense strand
gguucuggcuggaagugaa

SEQ ID NO: 2495229 - RNA, 19 nt, Homo sapiens
  misc_RNA (1)...(19): siRNA sense strand
gcucucaccuacugggaau

SEQ ID NO: 2495230 - RNA, 19 nt, Homo sapiens
  misc_RNA (1)...(19): siRNA sense strand
aauaggaaaccgcaagaaa

SEQ ID NO: 2495231 - RNA, 19 nt, Homo sapiens
  misc_RNA (1)...(19): siRNA sense strand
cugcaaacggcuugaagau

SEQ ID NO: 2495232 - RNA, 19 nt, Homo sapiens
  misc_RNA (1)...(19): siRNA sense strand
ucaucaaacccaauagaau

SEQ ID NO: 2495233 - RNA, 19 nt, Homo sapiens
  misc_RNA (1)...(19): siRNA sense strand
cauccgaagauaagaauca

SEQ ID NO: 2495234 - RNA, 19 nt, Homo sapiens
  misc_RNA (1)...(19): siRNA sense strand
ccucgaauaucaugagagu

SEQ ID NO: 2495235 - RNA, 19 nt, Homo sapiens
  misc_RNA (1)...(19): siRNA sense strand
gaggaagacacauggcaga

SEQ ID NO: 2495236 - RNA, 19 nt, Homo sapiens
  misc_RNA (1)...(19): siRNA sense strand
ggaauggaggcaugcggaa

SEQ ID NO: 2495237 - RNA, 19 nt, Homo sapiens
  misc_RNA (1)...(19): siRNA sense strand
gaguaaucuccauaaagaa

SEQ ID NO: 2495238 - RNA, 19 nt, Homo sapiens
  misc_RNA (1)...(19): siRNA sense strand
cauccugacucgaagugaa

SEQ ID NO: 2495239 - RNA, 19 nt, Homo sapiens
  misc_RNA (1)...(19): siRNA sense strand
ccaauagaauccugccaga

SEQ ID NO: 2495240 - RNA, 19 nt, Homo sapiens
  misc_RNA (1)...(19): siRNA sense strand
caacgcauguggugggcuu

SEQ ID NO: 2495241 - RNA, 19 nt, Homo sapiens
  misc_RNA (1)...(19): siRNA sense strand
aaggaggcccagaagauua

SEQ ID NO: 2495242 - RNA, 19 nt, Homo sapiens
  misc_RNA (1)...(19): siRNA sense strand
gauaagaaucaucacucaa

SEQ ID NO: 2495243 - RNA, 19 nt, Homo sapiens
  misc_RNA (1)...(19): siRNA sense strand
cucaaaugcugcaguauca

SEQ ID NO: 2495244 - RNA, 19 nt, Homo sapiens
  misc_RNA (1)...(19): siRNA sense strand
ucgcaguccuccagcaaga

SEQ ID NO: 2495245 - RNA, 19 nt, Homo sapiens
  misc_RNA (1)...(19): siRNA sense strand
cagaaauacuacuuggaag

SEQ ID NO: 2495246 - RNA, 19 nt, Homo sapiens
  misc_RNA (1)...(19): siRNA sense strand
cuuguuaauuccuggcaau

SEQ ID NO: 2495247 - RNA, 19 nt, Homo sapiens
  misc_RNA (1)...(19): siRNA sense strand
agauaagaaucaucacuca

SEQ ID NO: 2495248 - RNA, 19 nt, Homo sapiens
  misc_RNA (1)...(19): siRNA sense strand
ucggagucuugcaggcuaa

SEQ ID NO: 2495249 - RNA, 19 nt, Homo sapiens
  misc_RNA (1)...(19): siRNA sense strand
gaagauuaacaauggcuca

SEQ ID NO: 2495250 - RNA, 19 nt, Homo sapiens
  misc_RNA (1)...(19): siRNA sense strand
ugucagccaaucagaauaa

SEQ ID NO: 2495251 - RNA, 19 nt, Homo sapiens
  misc_RNA (1)...(19): siRNA sense strand
auaggaaaccgcaagaaau

SEQ ID NO: 2495252 - RNA, 19 nt, Homo sapiens
  misc_RNA (1)...(19): siRNA sense strand
gaagaugagcagccgucaa

SEQ ID NO: 2495253 - RNA, 19 nt, Homo sapiens
  misc_RNA (1)...(19): siRNA sense strand
gcccuuugccugugggaca

SEQ ID NO: 2495254 - RNA, 19 nt, Homo sapiens
  misc_RNA (1)...(19): siRNA sense strand
ggcucugauugcugaggaa

SEQ ID NO: 2495255 - RNA, 19 nt, Homo sapiens
  misc_RNA (1)...(19): siRNA sense strand
ccucaauccacaugaucuu

SEQ ID NO: 2495256 - RNA, 19 nt, Homo sapiens
  misc_RNA (1)...(19): siRNA sense strand
aauuaauccuggaaaccau

SEQ ID NO: 2495257 - RNA, 19 nt, Homo sapiens
  misc_RNA (1)...(19): siRNA sense strand
gggaaugggagacgcuuca

SEQ ID NO: 2495258 - RNA, 19 nt, Homo sapiens
  misc_RNA (1)...(19): siRNA sense strand
cgucaaccauccaucacaa

SEQ ID NO: 2495259 - RNA, 19 nt, Homo sapiens
  misc_RNA (1)...(19): siRNA sense strand
agacgaaggaggcccagaa

SEQ ID NO: 2495260 - RNA, 19 nt, Homo sapiens
  misc_RNA (1)...(19): siRNA sense strand
aagacacauggcagaaaua

SEQ ID NO: 2495261 - RNA, 19 nt, Homo sapiens
  misc_RNA (1)...(19): siRNA sense strand
gcacccaaggagauagaga

SEQ ID NO: 2495262 - RNA, 19 nt, Homo sapiens
  misc_RNA (1)...(19): siRNA sense strand
gcgacguacuucaaugaca

SEQ ID NO: 2495263 - RNA, 19 nt, Homo sapiens
  misc_RNA (1)...(19): siRNA sense strand
aguuaauaggaaaccgcaa

SEQ ID NO: 2495264 - RNA, 19 nt, Homo sapiens
  misc_RNA (1)...(19): siRNA sense strand
cagaguugaaguugggcuu

SEQ ID NO: 2495265 - RNA, 19 nt, Homo sapiens
  misc_RNA (1)...(19): siRNA sense strand
gcaacggaauggaggcaug

SEQ ID NO: 2495266 - RNA, 19 nt, Homo sapiens
  misc_RNA (1)...(19): siRNA sense strand
gcuuaaugcaguuugacca

SEQ ID NO: 2495267 - RNA, 19 nt, Homo sapiens
  misc_RNA (1)...(19): siRNA sense strand
gggacaaacagaaguacgu

SEQ ID NO: 2495268 - RNA, 19 nt, Homo sapiens
  misc_RNA (1)...(19): siRNA sense strand
cucucaaaccaguggauga

SEQ ID NO: 2495269 - RNA, 19 nt, Homo sapiens
  misc_RNA (1)...(19): siRNA sense strand
ggacacaucacucuggaga

SEQ ID NO: 2495270 - RNA, 19 nt, Homo sapiens
  misc_RNA (1)...(19): siRNA sense strand
ucacagaucccaaaagaau

SEQ ID NO: 2495271 - RNA, 19 nt, Homo sapiens
  misc_RNA (1)...(19): siRNA sense strand
gcaauauccacgcgaacca

SEQ ID NO: 2495272 - RNA, 19 nt, Homo sapiens
  misc_RNA (1)...(19): siRNA sense strand
aauagaauccugccagaau

SEQ ID NO: 2495273 - RNA, 19 nt, Homo sapiens
  misc_RNA (1)...(19): siRNA sense strand
gggaugacgucaaugugga

SEQ ID NO: 2495274 - RNA, 19 nt, Homo sapiens
  misc_RNA (1)...(19): siRNA sense strand
gcaagagucaagauagagu

SEQ ID NO: 2495275 - RNA, 19 nt, Homo sapiens
  misc_RNA (1)...(19): siRNA sense strand
acuagugucccgagagaau

SEQ ID NO: 2495276 - RNA, 19 nt, Homo sapiens
  misc_RNA (1)...(19): siRNA sense strand
ggaaaugggagggcggaga

SEQ ID NO: 2495277 - RNA, 19 nt, Homo sapiens
  misc_RNA (1)...(19): siRNA sense strand
caguaaauggaaagacgau

SEQ ID NO: 2495278 - RNA, 19 nt, Homo sapiens
  misc_RNA (1)...(19): siRNA sense strand
ccuugaagacccagcuaga

SEQ ID NO: 2495279 - RNA, 19 nt, Homo sapiens
  misc_RNA (1)...(19): siRNA sense strand
ccagugacccugaggccau

SEQ ID NO: 2495280 - RNA, 19 nt, Homo sapiens
  misc_RNA (1)...(19): siRNA sense strand
agacccagcuagaggcagu

SEQ ID NO: 2495281 - RNA, 19 nt, Homo sapiens
  misc_RNA (1)...(19): siRNA sense strand
cagagaugcaagcaggaga

SEQ ID NO: 2495282 - RNA, 19 nt, Homo sapiens
  misc_RNA (1)...(19): siRNA sense strand
ucauugacuucuaccgcaa

SEQ ID NO: 2495283 - RNA, 19 nt, Homo sapiens
  misc_RNA (1)...(19): siRNA sense strand
gcaucuucggcgaggacuu

SEQ ID NO: 2495284 - RNA, 19 nt, Homo sapiens
  misc_RNA (1)...(19): siRNA sense strand
ccgacgucuucgagcgcuu

SEQ ID NO: 2495285 - RNA, 19 nt, Homo sapiens
  misc_RNA (1)...(19): siRNA sense strand
ccgacaaccuauagggaca

SEQ ID NO: 2495286 - RNA, 19 nt, Homo sapiens
  misc_RNA (1)...(19): siRNA sense strand
guguaguggcuguaggaaa

SEQ ID NO: 2495287 - RNA, 19 nt, Homo sapiens
  misc_RNA (1)...(19): siRNA sense strand
cagcaucacuucuugggaa

SEQ ID NO: 2495288 - RNA, 19 nt, Homo sapiens
  misc_RNA (1)...(19): siRNA sense strand
cuccaaagagaguggcaau

SEQ ID NO: 2495289 - RNA, 19 nt, Homo sapiens
  misc_RNA (1)...(19): siRNA sense strand
caacaaguguguagccugu

SEQ ID NO: 2495290 - RNA, 19 nt, Homo sapiens
  misc_RNA (1)...(19): siRNA sense strand
cugucuccuugguggguaa

SEQ ID NO: 2495291 - RNA, 19 nt, Homo sapiens
  misc_RNA (1)...(19): siRNA sense strand
gugugagaauugccgacaa

SEQ ID NO: 2495292 - RNA, 19 nt, Homo sapiens
  misc_RNA (1)...(19): siRNA sense strand
ugacccagaacaaggaaau

SEQ ID NO: 2495293 - RNA, 19 nt, Homo sapiens
  misc_RNA (1)...(19): siRNA sense strand
guaaaggcuuccugaccca

SEQ ID NO: 2495294 - RNA, 19 nt, Homo sapiens
  misc_RNA (1)...(19): siRNA sense strand
cuguaauucaagagaggaa

SEQ ID NO: 2495295 - RNA, 19 nt, Homo sapiens
  misc_RNA (1)...(19): siRNA sense strand
ccagauuaucagaaagcaa

SEQ ID NO: 2495296 - RNA, 19 nt, Homo sapiens
  misc_RNA (1)...(19): siRNA sense strand
ccacaagaacauggauaca

SEQ ID NO: 2495297 - RNA, 19 nt, Homo sapiens
  misc_RNA (1)...(19): siRNA sense strand
gucuguuguagcagggaua

SEQ ID NO: 2495298 - RNA, 19 nt, Homo sapiens
  misc_RNA (1)...(19): siRNA sense strand
acccacaagaacauggaua

SEQ ID NO: 2495299 - RNA, 19 nt, Homo sapiens
  misc_RNA (1)...(19): siRNA sense strand
ccuacaguacggaggagua

SEQ ID NO: 2495300 - RNA, 19 nt, Homo sapiens
  misc_RNA (1)...(19): siRNA sense strand
gcgugaacuccuuagagaa

SEQ ID NO: 2495301 - RNA, 19 nt, Homo sapiens
  misc_RNA (1)...(19): siRNA sense strand
ccucagaauugcucagcca

SEQ ID NO: 2495302 - RNA, 19 nt, Homo sapiens
  misc_RNA (1)...(19): siRNA sense strand
ucuacaacccugugagcuu

SEQ ID NO: 2495303 - RNA, 19 nt, Homo sapiens
  misc_RNA (1)...(19): siRNA sense strand
cuggaaaggccaucggcuu

SEQ ID NO: 2495304 - RNA, 19 nt, Homo sapiens
  misc_RNA (1)...(19): siRNA sense strand
agcaacuggaggaagauaa

SEQ ID NO: 2495305 - RNA, 19 nt, Homo sapiens
  misc_RNA (1)...(19): siRNA sense strand
ggaggaagauaaacgccca

SEQ ID NO: 2495306 - RNA, 19 nt, Homo sapiens
  misc_RNA (1)...(19): siRNA sense strand
aagcgaugguggaggcugu

SEQ ID NO: 2495307 - RNA, 19 nt, Homo sapiens
  misc_RNA (1)...(19): siRNA sense strand
caguacuggcuguugggua

SEQ ID NO: 2495308 - RNA, 19 nt, Homo sapiens
  misc_RNA (1)...(19): siRNA sense strand
ugucaaggauguagccaac

SEQ ID NO: 2495309 - RNA, 19 nt, Homo sapiens
  misc_RNA (1)...(19): siRNA sense strand
ccuacaguacggaggagua

SEQ ID NO: 2495310 - RNA, 19 nt, Homo sapiens
  misc_RNA (1)...(19): siRNA sense strand
gcgugaacuccuuagagaa

SEQ ID NO: 2495311 - RNA, 19 nt, Homo sapiens
  misc_RNA (1)...(19): siRNA sense strand
ccucagaauugcucagcca

SEQ ID NO: 2495312 - RNA, 19 nt, Homo sapiens
  misc_RNA (1)...(19): siRNA sense strand
ucuacaacccugugagcuu

SEQ ID NO: 2495313 - RNA, 19 nt, Homo sapiens
  misc_RNA (1)...(19): siRNA sense strand
cuggaaaggccaucggcuu

SEQ ID NO: 2495314 - RNA, 19 nt, Homo sapiens
  misc_RNA (1)...(19): siRNA sense strand
agcaacuggaggaagauaa

SEQ ID NO: 2495315 - RNA, 19 nt, Homo sapiens
  misc_RNA (1)...(19): siRNA sense strand
ggaggaagauaaacgccca

SEQ ID NO: 2495316 - RNA, 19 nt, Homo sapiens
  misc_RNA (1)...(19): siRNA sense strand
aagcgaugguggaggcugu

SEQ ID NO: 2495317 - RNA, 19 nt, Homo sapiens
  misc_RNA (1)...(19): siRNA sense strand
caguacuggcuguugggua

SEQ ID NO: 2495318 - RNA, 19 nt, Homo sapiens
  misc_RNA (1)...(19): siRNA sense strand
ugucaaggauguagccaac

SEQ ID NO: 2495319 - RNA, 19 nt, Homo sapiens
  misc_RNA (1)...(19): siRNA sense strand
cugauaauauugagccgaa

SEQ ID NO: 2495320 - RNA, 19 nt, Homo sapiens
  misc_RNA (1)...(19): siRNA sense strand
acucaaagccccuugcaaa

SEQ ID NO: 2495321 - RNA, 19 nt, Homo sapiens
  misc_RNA (1)...(19): siRNA sense strand
cgcaauaucaggaggagaa

SEQ ID NO: 2495322 - RNA, 19 nt, Homo sapiens
  misc_RNA (1)...(19): siRNA sense strand
uguacaagaauuugagcaa

SEQ ID NO: 2495323 - RNA, 19 nt, Homo sapiens
  misc_RNA (1)...(19): siRNA sense strand
ggguaaagucacaaaagaa

SEQ ID NO: 2495324 - RNA, 19 nt, Homo sapiens
  misc_RNA (1)...(19): siRNA sense strand
ccaaauggacugaagcuga

SEQ ID NO: 2495325 - RNA, 19 nt, Homo sapiens
  misc_RNA (1)...(19): siRNA sense strand
caucaagaaacaaggagau

SEQ ID NO: 2495326 - RNA, 19 nt, Homo sapiens
  misc_RNA (1)...(19): siRNA sense strand
agaacuacgaggagcaaga

SEQ ID NO: 2495327 - RNA, 19 nt, Homo sapiens
  misc_RNA (1)...(19): siRNA sense strand
cuccacaaauccaggcaaa

SEQ ID NO: 2495328 - RNA, 19 nt, Homo sapiens
  misc_RNA (1)...(19): siRNA sense strand
cugugacaauauaaggaua

SEQ ID NO: 2495329 - RNA, 19 nt, Homo sapiens
  misc_RNA (1)...(19): siRNA sense strand
cugucuaugugcugaagaa

SEQ ID NO: 2495330 - RNA, 19 nt, Homo sapiens
  misc_RNA (1)...(19): siRNA sense strand
uguauuaugaacagggauu

SEQ ID NO: 2495331 - RNA, 19 nt, Homo sapiens
  misc_RNA (1)...(19): siRNA sense strand
agucacaaaagaaggaaaa

SEQ ID NO: 2495332 - RNA, 19 nt, Homo sapiens
  misc_RNA (1)...(19): siRNA sense strand
cuuaagguccugugacaau

SEQ ID NO: 2495333 - RNA, 19 nt, Homo sapiens
  misc_RNA (1)...(19): siRNA sense strand
agaucggcuuccagacaaa

SEQ ID NO: 2495334 - RNA, 19 nt, Homo sapiens
  misc_RNA (1)...(19): siRNA sense strand
ccugagaagaagaauauga

SEQ ID NO: 2495335 - RNA, 19 nt, Homo sapiens
  misc_RNA (1)...(19): siRNA sense strand
cuucaguguagcaggaaaa

SEQ ID NO: 2495336 - RNA, 19 nt, Homo sapiens
  misc_RNA (1)...(19): siRNA sense strand
guggacaacuuuuggggua

SEQ ID NO: 2495337 - RNA, 19 nt, Homo sapiens
  misc_RNA (1)...(19): siRNA sense strand
agaaacaaggagaugccua

SEQ ID NO: 2495338 - RNA, 19 nt, Homo sapiens
  misc_RNA (1)...(19): siRNA sense strand
uggaggaggagcugaugaa

SEQ ID NO: 2495339 - RNA, 19 nt, Homo sapiens
  misc_RNA (1)...(19): siRNA sense strand
agaugaaguuaauccucaa

SEQ ID NO: 2495340 - RNA, 19 nt, Homo sapiens
  misc_RNA (1)...(19): siRNA sense strand
caacuauaucugugagaag

SEQ ID NO: 2495341 - RNA, 19 nt, Homo sapiens
  misc_RNA (1)...(19): siRNA sense strand
acuucaguguagcaggaaa

SEQ ID NO: 2495342 - RNA, 19 nt, Homo sapiens
  misc_RNA (1)...(19): siRNA sense strand
uuggaaagaugaaggcagu

SEQ ID NO: 2495343 - RNA, 19 nt, Homo sapiens
  misc_RNA (1)...(19): siRNA sense strand
acuacgaggagcaagaaau

SEQ ID NO: 2495344 - RNA, 19 nt, Homo sapiens
  misc_RNA (1)...(19): siRNA sense strand
gugaaugggaaccuggaau

SEQ ID NO: 2495345 - RNA, 19 nt, Homo sapiens
  misc_RNA (1)...(19): siRNA sense strand
gccuaggauuccaaaguga

SEQ ID NO: 2495346 - RNA, 19 nt, Homo sapiens
  misc_RNA (1)...(19): siRNA sense strand
ucaucaagaaacaaggaga

SEQ ID NO: 2495347 - RNA, 19 nt, Homo sapiens
  misc_RNA (1)...(19): siRNA sense strand
gaacuucaguguagcagga

SEQ ID NO: 2495348 - RNA, 19 nt, Homo sapiens
  misc_RNA (1)...(19): siRNA sense strand
ggacaacuuuugggguaaa

SEQ ID NO: 2495349 - RNA, 19 nt, Homo sapiens
  misc_RNA (1)...(19): siRNA sense strand
cguuucaagacuuuguaua

SEQ ID NO: 2495350 - RNA, 19 nt, Homo sapiens
  misc_RNA (1)...(19): siRNA sense strand
acauccagguugaaauaga

SEQ ID NO: 2495351 - RNA, 19 nt, Homo sapiens
  misc_RNA (1)...(19): siRNA sense strand
auggagaagacccagauaa

SEQ ID NO: 2495352 - RNA, 19 nt, Homo sapiens
  misc_RNA (1)...(19): siRNA sense strand
guauuaugaacagggauua

SEQ ID NO: 2495353 - RNA, 19 nt, Homo sapiens
  misc_RNA (1)...(19): siRNA sense strand
cugugaagauugaacaugu

SEQ ID NO: 2495354 - RNA, 19 nt, Homo sapiens
  misc_RNA (1)...(19): siRNA sense strand
gcuuuauccuauuccagaa

SEQ ID NO: 2495355 - RNA, 19 nt, Homo sapiens
  misc_RNA (1)...(19): siRNA sense strand
aguaggucuuccagaugaa

SEQ ID NO: 2495356 - RNA, 19 nt, Homo sapiens
  misc_RNA (1)...(19): siRNA sense strand
ucuaugugcugaagaaaau

SEQ ID NO: 2495357 - RNA, 19 nt, Homo sapiens
  misc_RNA (1)...(19): siRNA sense strand
aguuuugccuggaggaauu

SEQ ID NO: 2495358 - RNA, 19 nt, Homo sapiens
  misc_RNA (1)...(19): siRNA sense strand
cagaugaaguuaauccuca

SEQ ID NO: 2495359 - RNA, 19 nt, Homo sapiens
  misc_RNA (1)...(19): siRNA sense strand
gaggaauuuugcagaugua

SEQ ID NO: 2495360 - RNA, 19 nt, Homo sapiens
  misc_RNA (1)...(19): siRNA sense strand
gaggaggagcugaugaagu

SEQ ID NO: 2495361 - RNA, 19 nt, Homo sapiens
  misc_RNA (1)...(19): siRNA sense strand
cuggaaaguacgaggagaa

SEQ ID NO: 2495362 - RNA, 19 nt, Homo sapiens
  misc_RNA (1)...(19): siRNA sense strand
caacaaaugcuguggccuu

SEQ ID NO: 2495363 - RNA, 19 nt, Homo sapiens
  misc_RNA (1)...(19): siRNA sense strand
ggguuuagccauugagucu

SEQ ID NO: 2495364 - RNA, 19 nt, Homo sapiens
  misc_RNA (1)...(19): siRNA sense strand
acuaaaccgcauagaagaa

SEQ ID NO: 2495365 - RNA, 19 nt, Homo sapiens
  misc_RNA (1)...(19): siRNA sense strand
gggcaguauccugggaaau

SEQ ID NO: 2495366 - RNA, 19 nt, Homo sapiens
  misc_RNA (1)...(19): siRNA sense strand
gaccaaauaaauaaggaca

SEQ ID NO: 2495367 - RNA, 19 nt, Homo sapiens
  misc_RNA (1)...(19): siRNA sense strand
ugggcaguauccugggaaa

SEQ ID NO: 2495368 - RNA, 19 nt, Homo sapiens
  misc_RNA (1)...(19): siRNA sense strand
uagaagaaggcuuggacca

SEQ ID NO: 2495369 - RNA, 19 nt, Homo sapiens
  misc_RNA (1)...(19): siRNA sense strand
aggaacaacuaaaccgcau

SEQ ID NO: 2495370 - RNA, 19 nt, Homo sapiens
  misc_RNA (1)...(19): siRNA sense strand
augcaggaaucaagaccau

SEQ ID NO: 2495371 - RNA, 19 nt, Homo sapiens
  misc_RNA (1)...(19): siRNA sense strand
ccgcauagaagaaggcuug

SEQ ID NO: 2495372 - RNA, 19 nt, Homo sapiens
  misc_RNA (1)...(19): siRNA sense strand
agaugaaauggaagagaac

SEQ ID NO: 2495373 - RNA, 19 nt, Homo sapiens
  misc_RNA (1)...(19): siRNA sense strand
augaaauggaagagaaccu

SEQ ID NO: 2495374 - RNA, 19 nt, Homo sapiens
  misc_RNA (1)...(19): siRNA sense strand
aggacaugagagagacaga

SEQ ID NO: 2495375 - RNA, 19 nt, Homo sapiens
  misc_RNA (1)...(19): siRNA sense strand
cuggaaaguacgaggagaa

SEQ ID NO: 2495376 - RNA, 19 nt, Homo sapiens
  misc_RNA (1)...(19): siRNA sense strand
caacaaaugcuguggccuu

SEQ ID NO: 2495377 - RNA, 19 nt, Homo sapiens
  misc_RNA (1)...(19): siRNA sense strand
ggguuuagccauugagucu

SEQ ID NO: 2495378 - RNA, 19 nt, Homo sapiens
  misc_RNA (1)...(19): siRNA sense strand
acuaaaccgcauagaagaa

SEQ ID NO: 2495379 - RNA, 19 nt, Homo sapiens
  misc_RNA (1)...(19): siRNA sense strand
gggcaguauccugggaaau

SEQ ID NO: 2495380 - RNA, 19 nt, Homo sapiens
  misc_RNA (1)...(19): siRNA sense strand
gaccaaauaaauaaggaca

SEQ ID NO: 2495381 - RNA, 19 nt, Homo sapiens
  misc_RNA (1)...(19): siRNA sense strand
ugggcaguauccugggaaa

SEQ ID NO: 2495382 - RNA, 19 nt, Homo sapiens
  misc_RNA (1)...(19): siRNA sense strand
uagaagaaggcuuggacca

SEQ ID NO: 2495383 - RNA, 19 nt, Homo sapiens
  misc_RNA (1)...(19): siRNA sense strand
aggaacaacuaaaccgcau

SEQ ID NO: 2495384 - RNA, 19 nt, Homo sapiens
  misc_RNA (1)...(19): siRNA sense strand
augcaggaaucaagaccau

SEQ ID NO: 2495385 - RNA, 19 nt, Homo sapiens
  misc_RNA (1)...(19): siRNA sense strand
ccgcauagaagaaggcuug

SEQ ID NO: 2495386 - RNA, 19 nt, Homo sapiens
  misc_RNA (1)...(19): siRNA sense strand
agaugaaauggaagagaac

SEQ ID NO: 2495387 - RNA, 19 nt, Homo sapiens
  misc_RNA (1)...(19): siRNA sense strand
augaaauggaagagaaccu

SEQ ID NO: 2495388 - RNA, 19 nt, Homo sapiens
  misc_RNA (1)...(19): siRNA sense strand
aggacaugagagagacaga

SEQ ID NO: 2495389 - RNA, 19 nt, Homo sapiens
  misc_RNA (1)...(19): siRNA sense strand
gggaaguacuccagaggca

SEQ ID NO: 2495390 - RNA, 19 nt, Homo sapiens
  misc_RNA (1)...(19): siRNA sense strand
uggaugaauuuaagcgcaa

SEQ ID NO: 2495391 - RNA, 19 nt, Homo sapiens
  misc_RNA (1)...(19): siRNA sense strand
agagaaggguucacgggaa

SEQ ID NO: 2495392 - RNA, 19 nt, Homo sapiens
  misc_RNA (1)...(19): siRNA sense strand
gcaaauuuccugccggcaa

SEQ ID NO: 2495393 - RNA, 19 nt, Homo sapiens
  misc_RNA (1)...(19): siRNA sense strand
cuggacaagcugaggaaga

SEQ ID NO: 2495394 - RNA, 19 nt, Homo sapiens
  misc_RNA (1)...(19): siRNA sense strand
ugucuugggcgaagugaaa

SEQ ID NO: 2495395 - RNA, 19 nt, Homo sapiens
  misc_RNA (1)...(19): siRNA sense strand
cugcugagcccaaggccaa

SEQ ID NO: 2495396 - RNA, 19 nt, Homo sapiens
  misc_RNA (1)...(19): siRNA sense strand
gggcaagaucuucaaguga

SEQ ID NO: 2495397 - RNA, 19 nt, Homo sapiens
  misc_RNA (1)...(19): siRNA sense strand
ucuguguguuugagagcaa

SEQ ID NO: 2495398 - RNA, 19 nt, Homo sapiens
  misc_RNA (1)...(19): siRNA sense strand
ccuuccagcaugugggcaa

SEQ ID NO: 2495399 - RNA, 19 nt, Homo sapiens
  misc_RNA (1)...(19): siRNA sense strand
gcgaagugaaacuguguga

SEQ ID NO: 2495400 - RNA, 19 nt, Homo sapiens
  misc_RNA (1)...(19): siRNA sense strand
ccugaaaacuggagggccu

SEQ ID NO: 2495401 - RNA, 19 nt, Homo sapiens
  misc_RNA (1)...(19): siRNA sense strand
gagaaggguucacgggaag

SEQ ID NO: 2495402 - RNA, 19 nt, Homo sapiens
  misc_RNA (1)...(19): siRNA sense strand
cugagaaugcaaaggagga

SEQ ID NO: 2495403 - RNA, 19 nt, Homo sapiens
  misc_RNA (1)...(19): siRNA sense strand
aggaggaagugaggcgaau

SEQ ID NO: 2495404 - RNA, 19 nt, Homo sapiens
  misc_RNA (1)...(19): siRNA sense strand
ccacggaaagagaaggguu

SEQ ID NO: 2495405 - RNA, 19 nt, Homo sapiens
  misc_RNA (1)...(19): siRNA sense strand
cuguacacguauccugaaa

SEQ ID NO: 2495406 - RNA, 19 nt, Homo sapiens
  misc_RNA (1)...(19): siRNA sense strand
ggacaagcugaggaagaau

SEQ ID NO: 2495407 - RNA, 19 nt, Homo sapiens
  misc_RNA (1)...(19): siRNA sense strand
ggacuuuucuggugggcga

SEQ ID NO: 2495408 - RNA, 19 nt, Homo sapiens
  misc_RNA (1)...(19): siRNA sense strand
aggagauggaugaauguga

SEQ ID NO: 2495409 - RNA, 19 nt, Homo sapiens
  misc_RNA (1)...(19): siRNA sense strand
ugaaacugugugagaagau

SEQ ID NO: 2495410 - RNA, 19 nt, Homo sapiens
  misc_RNA (1)...(19): siRNA sense strand
auauuauggcugaacguaa

SEQ ID NO: 2495411 - RNA, 19 nt, Homo sapiens
  misc_RNA (1)...(19): siRNA sense strand
ccaguguauuggaggcaga

SEQ ID NO: 2495412 - RNA, 19 nt, Homo sapiens
  misc_RNA (1)...(19): siRNA sense strand
ccauauucuguguguguau

SEQ ID NO: 2495413 - RNA, 19 nt, Homo sapiens
  misc_RNA (1)...(19): siRNA sense strand
uaaacaaagacgagcagga

SEQ ID NO: 2495414 - RNA, 19 nt, Homo sapiens
  misc_RNA (1)...(19): siRNA sense strand
gcugaaauugcuagugcau

SEQ ID NO: 2495415 - RNA, 19 nt, Homo sapiens
  misc_RNA (1)...(19): siRNA sense strand
uugcuagugcauuggguua

SEQ ID NO: 2495416 - RNA, 19 nt, Homo sapiens
  misc_RNA (1)...(19): siRNA sense strand
accauggacuacaaggaaa

SEQ ID NO: 2495417 - RNA, 19 nt, Homo sapiens
  misc_RNA (1)...(19): siRNA sense strand
gguuugucuucaggagaua

SEQ ID NO: 2495418 - RNA, 19 nt, Homo sapiens
  misc_RNA (1)...(19): siRNA sense strand
ucaacagaaaagagcaaaa

SEQ ID NO: 2495419 - RNA, 19 nt, Homo sapiens
  misc_RNA (1)...(19): siRNA sense strand
acggaaacuggauggaaaa

SEQ ID NO: 2495420 - RNA, 19 nt, Homo sapiens
  misc_RNA (1)...(19): siRNA sense strand
cuggaagaacuccuagaaa

SEQ ID NO: 2495421 - RNA, 19 nt, Homo sapiens
  misc_RNA (1)...(19): siRNA sense strand
agauaugcagaguuugaua

SEQ ID NO: 2495422 - RNA, 19 nt, Homo sapiens
  misc_RNA (1)...(19): siRNA sense strand
ccagaugauaucagaaacu

SEQ ID NO: 2495423 - RNA, 19 nt, Homo sapiens
  misc_RNA (1)...(19): siRNA sense strand
cguaaugugcucuugaaaa

SEQ ID NO: 2495424 - RNA, 19 nt, Homo sapiens
  misc_RNA (1)...(19): siRNA sense strand
aggccaggagugagucuua

SEQ ID NO: 2495425 - RNA, 19 nt, Homo sapiens
  misc_RNA (1)...(19): siRNA sense strand
guguauuggaggcagauga

SEQ ID NO: 2495426 - RNA, 19 nt, Homo sapiens
  misc_RNA (1)...(19): siRNA sense strand
cuggaaauccucaugccaa

SEQ ID NO: 2495427 - RNA, 19 nt, Homo sapiens
  misc_RNA (1)...(19): siRNA sense strand
cuuaacagauuuugggcuu

SEQ ID NO: 2495428 - RNA, 19 nt, Homo sapiens
  misc_RNA (1)...(19): siRNA sense strand
auauuauggcugaacguaa

SEQ ID NO: 2495429 - RNA, 19 nt, Homo sapiens
  misc_RNA (1)...(19): siRNA sense strand
ccaguguauuggaggcaga

SEQ ID NO: 2495430 - RNA, 19 nt, Homo sapiens
  misc_RNA (1)...(19): siRNA sense strand
ccauauucuguguguguau

SEQ ID NO: 2495431 - RNA, 19 nt, Homo sapiens
  misc_RNA (1)...(19): siRNA sense strand
uaaacaaagacgagcagga

SEQ ID NO: 2495432 - RNA, 19 nt, Homo sapiens
  misc_RNA (1)...(19): siRNA sense strand
gcugaaauugcuagugcau

SEQ ID NO: 2495433 - RNA, 19 nt, Homo sapiens
  misc_RNA (1)...(19): siRNA sense strand
uugcuagugcauuggguua

SEQ ID NO: 2495434 - RNA, 19 nt, Homo sapiens
  misc_RNA (1)...(19): siRNA sense strand
accauggacuacaaggaaa

SEQ ID NO: 2495435 - RNA, 19 nt, Homo sapiens
  misc_RNA (1)...(19): siRNA sense strand
gguuugucuucaggagaua

SEQ ID NO: 2495436 - RNA, 19 nt, Homo sapiens
  misc_RNA (1)...(19): siRNA sense strand
ucaacagaaaagagcaaaa

SEQ ID NO: 2495437 - RNA, 19 nt, Homo sapiens
  misc_RNA (1)...(19): siRNA sense strand
acggaaacuggauggaaaa

SEQ ID NO: 2495438 - RNA, 19 nt, Homo sapiens
  misc_RNA (1)...(19): siRNA sense strand
cuggaagaacuccuagaaa

SEQ ID NO: 2495439 - RNA, 19 nt, Homo sapiens
  misc_RNA (1)...(19): siRNA sense strand
agauaugcagaguuugaua

SEQ ID NO: 2495440 - RNA, 19 nt, Homo sapiens
  misc_RNA (1)...(19): siRNA sense strand
ccagaugauaucagaaacu

SEQ ID NO: 2495441 - RNA, 19 nt, Homo sapiens
  misc_RNA (1)...(19): siRNA sense strand
cguaaugugcucuugaaaa

SEQ ID NO: 2495442 - RNA, 19 nt, Homo sapiens
  misc_RNA (1)...(19): siRNA sense strand
aggccaggagugagucuua

SEQ ID NO: 2495443 - RNA, 19 nt, Homo sapiens
  misc_RNA (1)...(19): siRNA sense strand
guguauuggaggcagauga

SEQ ID NO: 2495444 - RNA, 19 nt, Homo sapiens
  misc_RNA (1)...(19): siRNA sense strand
cuggaaauccucaugccaa

SEQ ID NO: 2495445 - RNA, 19 nt, Homo sapiens
  misc_RNA (1)...(19): siRNA sense strand
cuuaacagauuuugggcuu

SEQ ID NO: 2495446 - RNA, 19 nt, Homo sapiens
  misc_RNA (1)...(19): siRNA sense strand
cccaugaggauguggacaa

SEQ ID NO: 2495447 - RNA, 19 nt, Homo sapiens
  misc_RNA (1)...(19): siRNA sense strand
ccuuggagacccuggacaa

SEQ ID NO: 2495448 - RNA, 19 nt, Homo sapiens
  misc_RNA (1)...(19): siRNA sense strand
agaggagguuguugggaga

SEQ ID NO: 2495449 - RNA, 19 nt, Homo sapiens
  misc_RNA (1)...(19): siRNA sense strand
uuaagaagauccucggcua

SEQ ID NO: 2495450 - RNA, 19 nt, Homo sapiens
  misc_RNA (1)...(19): siRNA sense strand
uggauugggccguggaaca

SEQ ID NO: 2495451 - RNA, 19 nt, Homo sapiens
  misc_RNA (1)...(19): siRNA sense strand
cugauaaguaccacgggaa

SEQ ID NO: 2495452 - RNA, 19 nt, Homo sapiens
  misc_RNA (1)...(19): siRNA sense strand
ggaccuucgugcaggagga

SEQ ID NO: 2495453 - RNA, 19 nt, Homo sapiens
  misc_RNA (1)...(19): siRNA sense strand
ucgccaaggaggagaucuu

SEQ ID NO: 2495454 - RNA, 19 nt, Homo sapiens
  misc_RNA (1)...(19): siRNA sense strand
gggcauugcugcugaccgu

SEQ ID NO: 2495455 - RNA, 19 nt, Homo sapiens
  misc_RNA (1)...(19): siRNA sense strand
gggacaaggaagaugugga

SEQ ID NO: 2495456 - RNA, 19 nt, Homo sapiens
  misc_RNA (1)...(19): siRNA sense strand
cugaaggggacaaggaaga

SEQ ID NO: 2495457 - RNA, 19 nt, Homo sapiens
  misc_RNA (1)...(19): siRNA sense strand
gagaugugcaggauggcau

SEQ ID NO: 2495458 - RNA, 19 nt, Homo sapiens
  misc_RNA (1)...(19): siRNA sense strand
gauaaguaccacgggaaaa

SEQ ID NO: 2495459 - RNA, 19 nt, Homo sapiens
  misc_RNA (1)...(19): siRNA sense strand
guucaagaccauagaggag

SEQ ID NO: 2495460 - RNA, 19 nt, Homo sapiens
  misc_RNA (1)...(19): siRNA sense strand
ccuucgugcaggaggacau

SEQ ID NO: 2495461 - RNA, 19 nt, Homo sapiens
  misc_RNA (1)...(19): siRNA sense strand
cagccuuggcaacuggaaa

SEQ ID NO: 2495462 - RNA, 19 nt, Homo sapiens
  misc_RNA (1)...(19): siRNA sense strand
aggaaaagucugcgggaaa

SEQ ID NO: 2495463 - RNA, 19 nt, Homo sapiens
  misc_RNA (1)...(19): siRNA sense strand
uggcaaaggaggagauuca

SEQ ID NO: 2495464 - RNA, 19 nt, Homo sapiens
  misc_RNA (1)...(19): siRNA sense strand
ggugaacauauaagggaaa

SEQ ID NO: 2495465 - RNA, 19 nt, Homo sapiens
  misc_RNA (1)...(19): siRNA sense strand
gggugaacauauaagggaa

SEQ ID NO: 2495466 - RNA, 19 nt, Homo sapiens
  misc_RNA (1)...(19): siRNA sense strand
gggaagaagaagaugacca

SEQ ID NO: 2495467 - RNA, 19 nt, Homo sapiens
  misc_RNA (1)...(19): siRNA sense strand
uguacauaguguugggcua

SEQ ID NO: 2495468 - RNA, 19 nt, Homo sapiens
  misc_RNA (1)...(19): siRNA sense strand
gcaugguauccaagugaaa

SEQ ID NO: 2495469 - RNA, 19 nt, Homo sapiens
  misc_RNA (1)...(19): siRNA sense strand
ucagaaaaguccugggauu

SEQ ID NO: 2495470 - RNA, 19 nt, Homo sapiens
  misc_RNA (1)...(19): siRNA sense strand
uguagcacuuauaggaaua

SEQ ID NO: 2495471 - RNA, 19 nt, Homo sapiens
  misc_RNA (1)...(19): siRNA sense strand
caauaaaggaagggcguau

SEQ ID NO: 2495472 - RNA, 19 nt, Homo sapiens
  misc_RNA (1)...(19): siRNA sense strand
gcuuuguacucgagaagau

SEQ ID NO: 2495473 - RNA, 19 nt, Homo sapiens
  misc_RNA (1)...(19): siRNA sense strand
agaaagaauuacagcugau

SEQ ID NO: 2495474 - RNA, 19 nt, Homo sapiens
  misc_RNA (1)...(19): siRNA sense strand
cagacaacguaaucagaau

SEQ ID NO: 2495475 - RNA, 19 nt, Homo sapiens
  misc_RNA (1)...(19): siRNA sense strand
uggagaagguguugagucu

SEQ ID NO: 2495476 - RNA, 19 nt, Homo sapiens
  misc_RNA (1)...(19): siRNA sense strand
agggaaauggugaagcaaa

SEQ ID NO: 2495477 - RNA, 19 nt, Homo sapiens
  misc_RNA (1)...(19): siRNA sense strand
cagagauugcuuugcauaa

SEQ ID NO: 2495478 - RNA, 19 nt, Homo sapiens
  misc_RNA (1)...(19): siRNA sense strand
gcuagaaggggaagaagaa

SEQ ID NO: 2495479 - RNA, 19 nt, Homo sapiens
  misc_RNA (1)...(19): siRNA sense strand
gggucaaauuauuauguga

SEQ ID NO: 2495480 - RNA, 19 nt, Homo sapiens
  misc_RNA (1)...(19): siRNA sense strand
cgagacaugaagaaagaau

SEQ ID NO: 2495481 - RNA, 19 nt, Homo sapiens
  misc_RNA (1)...(19): siRNA sense strand
aggaaagucuaguacucaa

SEQ ID NO: 2495482 - RNA, 19 nt, Homo sapiens
  misc_RNA (1)...(19): siRNA sense strand
agucaaacuucauagagau

SEQ ID NO: 2495483 - RNA, 19 nt, Homo sapiens
  misc_RNA (1)...(19): siRNA sense strand
gagauucagcggaggguca

SEQ ID NO: 2495484 - RNA, 19 nt, Homo sapiens
  misc_RNA (1)...(19): siRNA sense strand
auauaagggaaauggugaa

SEQ ID NO: 2495485 - RNA, 19 nt, Homo sapiens
  misc_RNA (1)...(19): siRNA sense strand
ccgcaguugcugacgagaa

SEQ ID NO: 2495486 - RNA, 19 nt, Homo sapiens
  misc_RNA (1)...(19): siRNA sense strand
guuauuaaguacaguccau

SEQ ID NO: 2495487 - RNA, 19 nt, Homo sapiens
  misc_RNA (1)...(19): siRNA sense strand
ccaucaaacagguuacuau

SEQ ID NO: 2495488 - RNA, 19 nt, Homo sapiens
  misc_RNA (1)...(19): siRNA sense strand
cauauaagggaaaugguga

SEQ ID NO: 2495489 - RNA, 19 nt, Homo sapiens
  misc_RNA (1)...(19): siRNA sense strand
gagacaugaagaaagaauu

SEQ ID NO: 2495490 - RNA, 19 nt, Homo sapiens
  misc_RNA (1)...(19): siRNA sense strand
cgugauaauacuuucagaa

SEQ ID NO: 2495491 - RNA, 19 nt, Homo sapiens
  misc_RNA (1)...(19): siRNA sense strand
uggaaaaucaacagugaau

SEQ ID NO: 2495492 - RNA, 19 nt, Homo sapiens
  misc_RNA (1)...(19): siRNA sense strand
agcgagacaugaagaaaga

SEQ ID NO: 2495493 - RNA, 19 nt, Homo sapiens
  misc_RNA (1)...(19): siRNA sense strand
uucagaagccgaagaggaa

SEQ ID NO: 2495494 - RNA, 19 nt, Homo sapiens
  misc_RNA (1)...(19): siRNA sense strand
uaugaggaagcuaaagaaa

SEQ ID NO: 2495495 - RNA, 19 nt, Homo sapiens
  misc_RNA (1)...(19): siRNA sense strand
cuagaagaucucaguuauu

SEQ ID NO: 2495496 - RNA, 19 nt, Homo sapiens
  misc_RNA (1)...(19): siRNA sense strand
ugucgagaagagaggaaaa

SEQ ID NO: 2495497 - RNA, 19 nt, Homo sapiens
  misc_RNA (1)...(19): siRNA sense strand
aggauuaucaacagcaaaa

SEQ ID NO: 2495498 - RNA, 19 nt, Homo sapiens
  misc_RNA (1)...(19): siRNA sense strand
augaagaagauaaggauag

SEQ ID NO: 2495499 - RNA, 19 nt, Homo sapiens
  misc_RNA (1)...(19): siRNA sense strand
uggcauacccacuguacau

SEQ ID NO: 2495500 - RNA, 19 nt, Homo sapiens
  misc_RNA (1)...(19): siRNA sense strand
cagaugaagaagauaagga

SEQ ID NO: 2495501 - RNA, 19 nt, Homo sapiens
  misc_RNA (1)...(19): siRNA sense strand
agaagauguugaaguggca

SEQ ID NO: 2495502 - RNA, 19 nt, Homo sapiens
  misc_RNA (1)...(19): siRNA sense strand
auaugaaaauggagagacu

SEQ ID NO: 2495503 - RNA, 19 nt, Homo sapiens
  misc_RNA (1)...(19): siRNA sense strand
guuacacagcccuggaaau

SEQ ID NO: 2495504 - RNA, 19 nt, Homo sapiens
  misc_RNA (1)...(19): siRNA sense strand
ucugauagugagcgagaca

SEQ ID NO: 2495505 - RNA, 19 nt, Homo sapiens
  misc_RNA (1)...(19): siRNA sense strand
uuucagaagccgaagagga

SEQ ID NO: 2495506 - RNA, 19 nt, Homo sapiens
  misc_RNA (1)...(19): siRNA sense strand
gguggaaaaucaacaguga

SEQ ID NO: 2495507 - RNA, 19 nt, Homo sapiens
  misc_RNA (1)...(19): siRNA sense strand
ggaagggcguauaccgcau

SEQ ID NO: 2495508 - RNA, 19 nt, Homo sapiens
  misc_RNA (1)...(19): siRNA sense strand
augaggaagcuaaagaaaa

SEQ ID NO: 2495509 - RNA, 19 nt, Homo sapiens
  misc_RNA (1)...(19): siRNA sense strand
acaaaacggcaaagaugaa

SEQ ID NO: 2495510 - RNA, 19 nt, Homo sapiens
  misc_RNA (1)...(19): siRNA sense strand
agaugaagaagauaaggau

SEQ ID NO: 2495511 - RNA, 19 nt, Homo sapiens
  misc_RNA (1)...(19): siRNA sense strand
aagaggagggugaacauau

SEQ ID NO: 2495512 - RNA, 19 nt, Homo sapiens
  misc_RNA (1)...(19): siRNA sense strand
gugaacauauaagggaaau

SEQ ID NO: 2495513 - RNA, 19 nt, Homo sapiens
  misc_RNA (1)...(19): siRNA sense strand
ggaaagucuaguacucaau

SEQ ID NO: 2495514 - RNA, 19 nt, Homo sapiens
  misc_RNA (1)...(19): siRNA sense strand
uggaaauauuggaaagcug

SEQ ID NO: 2495515 - RNA, 19 nt, Homo sapiens
  misc_RNA (1)...(19): siRNA sense strand
ccauaguauccaagacaaa

SEQ ID NO: 2495516 - RNA, 19 nt, Homo sapiens
  misc_RNA (1)...(19): siRNA sense strand
gagaaagauguuagagcca

SEQ ID NO: 2495517 - RNA, 19 nt, Homo sapiens
  misc_RNA (1)...(19): siRNA sense strand
gcaacauagaauuuggcaa

SEQ ID NO: 2495518 - RNA, 19 nt, Homo sapiens
  misc_RNA (1)...(19): siRNA sense strand
ccucaaguggagauacaaa

SEQ ID NO: 2495519 - RNA, 19 nt, Homo sapiens
  misc_RNA (1)...(19): siRNA sense strand
ggguguugacagaaaguau

SEQ ID NO: 2495520 - RNA, 19 nt, Homo sapiens
  misc_RNA (1)...(19): siRNA sense strand
ccaagacaaaggaagggaa

SEQ ID NO: 2495521 - RNA, 19 nt, Homo sapiens
  misc_RNA (1)...(19): siRNA sense strand
agggaaauaccgaguggau

SEQ ID NO: 2495522 - RNA, 19 nt, Homo sapiens
  misc_RNA (1)...(19): siRNA sense strand
guggcuaaucucaggaaga

SEQ ID NO: 2495523 - RNA, 19 nt, Homo sapiens
  misc_RNA (1)...(19): siRNA sense strand
caggaugaagagaggcuau

SEQ ID NO: 2495524 - RNA, 19 nt, Homo sapiens
  misc_RNA (1)...(19): siRNA sense strand
cggcaaagagcaaggcuag

SEQ ID NO: 2495525 - RNA, 19 nt, Homo sapiens
  misc_RNA (1)...(19): siRNA sense strand
ugaagagaggcuaugacaa

SEQ ID NO: 2495526 - RNA, 19 nt, Homo sapiens
  misc_RNA (1)...(19): siRNA sense strand
gucagaagucaaugaaaca

SEQ ID NO: 2495527 - RNA, 19 nt, Homo sapiens
  misc_RNA (1)...(19): siRNA sense strand
ggagaauauuaauggcuug

SEQ ID NO: 2495528 - RNA, 19 nt, Homo sapiens
  misc_RNA (1)...(19): siRNA sense strand
uguaguugacgcugggaau

SEQ ID NO: 2495529 - RNA, 19 nt, Homo sapiens
  misc_RNA (1)...(19): siRNA sense strand
gccaagaucuccaggccca

SEQ ID NO: 2495530 - RNA, 19 nt, Homo sapiens
  misc_RNA (1)...(19): siRNA sense strand
acuuugaauuagugguguu

SEQ ID NO: 2495531 - RNA, 19 nt, Homo sapiens
  misc_RNA (1)...(19): siRNA sense strand
cauucucggcaaagagcaa

SEQ ID NO: 2495532 - RNA, 19 nt, Homo sapiens
  misc_RNA (1)...(19): siRNA sense strand
gcaagacaguggaagugga

SEQ ID NO: 2495533 - RNA, 19 nt, Homo sapiens
  misc_RNA (1)...(19): siRNA sense strand
uggagaauauuaauggcuu

SEQ ID NO: 2495534 - RNA, 19 nt, Homo sapiens
  misc_RNA (1)...(19): siRNA sense strand
ggauauggauucaggugug

SEQ ID NO: 2495535 - RNA, 19 nt, Homo sapiens
  misc_RNA (1)...(19): siRNA sense strand
cucaagugaccauuggaua

SEQ ID NO: 2495536 - RNA, 19 nt, Homo sapiens
  misc_RNA (1)...(19): siRNA sense strand
ccaaagauggaaggugcaa

SEQ ID NO: 2495537 - RNA, 19 nt, Homo sapiens
  misc_RNA (1)...(19): siRNA sense strand
cagcaaacggggagggaag

SEQ ID NO: 2495538 - RNA, 19 nt, Homo sapiens
  misc_RNA (1)...(19): siRNA sense strand
ccauaguauccaagacaaa

SEQ ID NO: 2495539 - RNA, 19 nt, Homo sapiens
  misc_RNA (1)...(19): siRNA sense strand
gagaaagauguuagagcca

SEQ ID NO: 2495540 - RNA, 19 nt, Homo sapiens
  misc_RNA (1)...(19): siRNA sense strand
gcaacauagaauuuggcaa

SEQ ID NO: 2495541 - RNA, 19 nt, Homo sapiens
  misc_RNA (1)...(19): siRNA sense strand
ccucaaguggagauacaaa

SEQ ID NO: 2495542 - RNA, 19 nt, Homo sapiens
  misc_RNA (1)...(19): siRNA sense strand
ccaagacaaaggaagggaa

SEQ ID NO: 2495543 - RNA, 19 nt, Homo sapiens
  misc_RNA (1)...(19): siRNA sense strand
agggaaauaccgaguggau

SEQ ID NO: 2495544 - RNA, 19 nt, Homo sapiens
  misc_RNA (1)...(19): siRNA sense strand
guggcuaaucucaggaaga

SEQ ID NO: 2495545 - RNA, 19 nt, Homo sapiens
  misc_RNA (1)...(19): siRNA sense strand
caggaugaagagaggcuau

SEQ ID NO: 2495546 - RNA, 19 nt, Homo sapiens
  misc_RNA (1)...(19): siRNA sense strand
cggcaaagagcaaggcuag

SEQ ID NO: 2495547 - RNA, 19 nt, Homo sapiens
  misc_RNA (1)...(19): siRNA sense strand
ugaagagaggcuaugacaa

SEQ ID NO: 2495548 - RNA, 19 nt, Homo sapiens
  misc_RNA (1)...(19): siRNA sense strand
gucagaagucaaugaaaca

SEQ ID NO: 2495549 - RNA, 19 nt, Homo sapiens
  misc_RNA (1)...(19): siRNA sense strand
ggagaauauuaauggcuug

SEQ ID NO: 2495550 - RNA, 19 nt, Homo sapiens
  misc_RNA (1)...(19): siRNA sense strand
uguaguugacgcugggaau

SEQ ID NO: 2495551 - RNA, 19 nt, Homo sapiens
  misc_RNA (1)...(19): siRNA sense strand
gccaagaucuccaggccca

SEQ ID NO: 2495552 - RNA, 19 nt, Homo sapiens
  misc_RNA (1)...(19): siRNA sense strand
acuuugaauuagugguguu

SEQ ID NO: 2495553 - RNA, 19 nt, Homo sapiens
  misc_RNA (1)...(19): siRNA sense strand
cauucucggcaaagagcaa

SEQ ID NO: 2495554 - RNA, 19 nt, Homo sapiens
  misc_RNA (1)...(19): siRNA sense strand
gcaagacaguggaagugga

SEQ ID NO: 2495555 - RNA, 19 nt, Homo sapiens
  misc_RNA (1)...(19): siRNA sense strand
uggagaauauuaauggcuu

SEQ ID NO: 2495556 - RNA, 19 nt, Homo sapiens
  misc_RNA (1)...(19): siRNA sense strand
ggauauggauucaggugug

SEQ ID NO: 2495557 - RNA, 19 nt, Homo sapiens
  misc_RNA (1)...(19): siRNA sense strand
cucaagugaccauuggaua

SEQ ID NO: 2495558 - RNA, 19 nt, Homo sapiens
  misc_RNA (1)...(19): siRNA sense strand
ccaaagauggaaggugcaa

SEQ ID NO: 2495559 - RNA, 19 nt, Homo sapiens
  misc_RNA (1)...(19): siRNA sense strand
cagcaaacggggagggaag

SEQ ID NO: 2495560 - RNA, 19 nt, Homo sapiens
  misc_RNA (1)...(19): siRNA sense strand
ccauaguauccaagacaaa

SEQ ID NO: 2495561 - RNA, 19 nt, Homo sapiens
  misc_RNA (1)...(19): siRNA sense strand
gagaaagauguuagagcca

SEQ ID NO: 2495562 - RNA, 19 nt, Homo sapiens
  misc_RNA (1)...(19): siRNA sense strand
gcaacauagaauuuggcaa

SEQ ID NO: 2495563 - RNA, 19 nt, Homo sapiens
  misc_RNA (1)...(19): siRNA sense strand
ccucaaguggagauacaaa

SEQ ID NO: 2495564 - RNA, 19 nt, Homo sapiens
  misc_RNA (1)...(19): siRNA sense strand
ggguguugacagaaaguau

SEQ ID NO: 2495565 - RNA, 19 nt, Homo sapiens
  misc_RNA (1)...(19): siRNA sense strand
ccaagacaaaggaagggaa

SEQ ID NO: 2495566 - RNA, 19 nt, Homo sapiens
  misc_RNA (1)...(19): siRNA sense strand
agggaaauaccgaguggau

SEQ ID NO: 2495567 - RNA, 19 nt, Homo sapiens
  misc_RNA (1)...(19): siRNA sense strand
guggcuaaucucaggaaga

SEQ ID NO: 2495568 - RNA, 19 nt, Homo sapiens
  misc_RNA (1)...(19): siRNA sense strand
caggaugaagagaggcuau

SEQ ID NO: 2495569 - RNA, 19 nt, Homo sapiens
  misc_RNA (1)...(19): siRNA sense strand
cggcaaagagcaaggcuag

SEQ ID NO: 2495570 - RNA, 19 nt, Homo sapiens
  misc_RNA (1)...(19): siRNA sense strand
ugaagagaggcuaugacaa

SEQ ID NO: 2495571 - RNA, 19 nt, Homo sapiens
  misc_RNA (1)...(19): siRNA sense strand
gucagaagucaaugaaaca

SEQ ID NO: 2495572 - RNA, 19 nt, Homo sapiens
  misc_RNA (1)...(19): siRNA sense strand
ggagaauauuaauggcuug

SEQ ID NO: 2495573 - RNA, 19 nt, Homo sapiens
  misc_RNA (1)...(19): siRNA sense strand
uguaguugacgcugggaau

SEQ ID NO: 2495574 - RNA, 19 nt, Homo sapiens
  misc_RNA (1)...(19): siRNA sense strand
gccaagaucuccaggccca

SEQ ID NO: 2495575 - RNA, 19 nt, Homo sapiens
  misc_RNA (1)...(19): siRNA sense strand
acuuugaauuagugguguu

SEQ ID NO: 2495576 - RNA, 19 nt, Homo sapiens
  misc_RNA (1)...(19): siRNA sense strand
cauucucggcaaagagcaa

SEQ ID NO: 2495577 - RNA, 19 nt, Homo sapiens
  misc_RNA (1)...(19): siRNA sense strand
gcaagacaguggaagugga

SEQ ID NO: 2495578 - RNA, 19 nt, Homo sapiens
  misc_RNA (1)...(19): siRNA sense strand
uggagaauauuaauggcuu

SEQ ID NO: 2495579 - RNA, 19 nt, Homo sapiens
  misc_RNA (1)...(19): siRNA sense strand
ggauauggauucaggugug

SEQ ID NO: 2495580 - RNA, 19 nt, Homo sapiens
  misc_RNA (1)...(19): siRNA sense strand
cucaagugaccauuggaua

SEQ ID NO: 2495581 - RNA, 19 nt, Homo sapiens
  misc_RNA (1)...(19): siRNA sense strand
ccaaagauggaaggugcaa

SEQ ID NO: 2495582 - RNA, 19 nt, Homo sapiens
  misc_RNA (1)...(19): siRNA sense strand
cagcaaacggggagggaag

SEQ ID NO: 2495583 - RNA, 19 nt, Homo sapiens
  misc_RNA (1)...(19): siRNA sense strand
ccauaguauccaagacaaa

SEQ ID NO: 2495584 - RNA, 19 nt, Homo sapiens
  misc_RNA (1)...(19): siRNA sense strand
gagaaagauguuagagcca

SEQ ID NO: 2495585 - RNA, 19 nt, Homo sapiens
  misc_RNA (1)...(19): siRNA sense strand
gcaacauagaauuuggcaa

SEQ ID NO: 2495586 - RNA, 19 nt, Homo sapiens
  misc_RNA (1)...(19): siRNA sense strand
ccucaaguggagauacaaa

SEQ ID NO: 2495587 - RNA, 19 nt, Homo sapiens
  misc_RNA (1)...(19): siRNA sense strand
ccaagacaaaggaagggaa

SEQ ID NO: 2495588 - RNA, 19 nt, Homo sapiens
  misc_RNA (1)...(19): siRNA sense strand
agggaaauaccgaguggau

SEQ ID NO: 2495589 - RNA, 19 nt, Homo sapiens
  misc_RNA (1)...(19): siRNA sense strand
guggcuaaucucaggaaga

SEQ ID NO: 2495590 - RNA, 19 nt, Homo sapiens
  misc_RNA (1)...(19): siRNA sense strand
caggaugaagagaggcuau

SEQ ID NO: 2495591 - RNA, 19 nt, Homo sapiens
  misc_RNA (1)...(19): siRNA sense strand
cggcaaagagcaaggcuag

SEQ ID NO: 2495592 - RNA, 19 nt, Homo sapiens
  misc_RNA (1)...(19): siRNA sense strand
ugaagagaggcuaugacaa

SEQ ID NO: 2495593 - RNA, 19 nt, Homo sapiens
  misc_RNA (1)...(19): siRNA sense strand
gucagaagucaaugaaaca

SEQ ID NO: 2495594 - RNA, 19 nt, Homo sapiens
  misc_RNA (1)...(19): siRNA sense strand
ggagaauauuaauggcuug

SEQ ID NO: 2495595 - RNA, 19 nt, Homo sapiens
  misc_RNA (1)...(19): siRNA sense strand
uguaguugacgcugggaau

SEQ ID NO: 2495596 - RNA, 19 nt, Homo sapiens
  misc_RNA (1)...(19): siRNA sense strand
gccaagaucuccaggccca

SEQ ID NO: 2495597 - RNA, 19 nt, Homo sapiens
  misc_RNA (1)...(19): siRNA sense strand
acuuugaauuagugguguu

SEQ ID NO: 2495598 - RNA, 19 nt, Homo sapiens
  misc_RNA (1)...(19): siRNA sense strand
cauucucggcaaagagcaa

SEQ ID NO: 2495599 - RNA, 19 nt, Homo sapiens
  misc_RNA (1)...(19): siRNA sense strand
gcaagacaguggaagugga

SEQ ID NO: 2495600 - RNA, 19 nt, Homo sapiens
  misc_RNA (1)...(19): siRNA sense strand
uggagaauauuaauggcuu

SEQ ID NO: 2495601 - RNA, 19 nt, Homo sapiens
  misc_RNA (1)...(19): siRNA sense strand
ggauauggauucaggugug

SEQ ID NO: 2495602 - RNA, 19 nt, Homo sapiens
  misc_RNA (1)...(19): siRNA sense strand
cucaagugaccauuggaua

SEQ ID NO: 2495603 - RNA, 19 nt, Homo sapiens
  misc_RNA (1)...(19): siRNA sense strand
ccaaagauggaaggugcaa

SEQ ID NO: 2495604 - RNA, 19 nt, Homo sapiens
  misc_RNA (1)...(19): siRNA sense strand
cagcaaacggggagggaag

SEQ ID NO: 2495605 - RNA, 19 nt, Homo sapiens
  misc_RNA (1)...(19): siRNA sense strand
ccauaguauccaagacaaa

SEQ ID NO: 2495606 - RNA, 19 nt, Homo sapiens
  misc_RNA (1)...(19): siRNA sense strand
gagaaagauguuagagcca

SEQ ID NO: 2495607 - RNA, 19 nt, Homo sapiens
  misc_RNA (1)...(19): siRNA sense strand
gcaacauagaauuuggcaa

SEQ ID NO: 2495608 - RNA, 19 nt, Homo sapiens
  misc_RNA (1)...(19): siRNA sense strand
ccucaaguggagauacaaa

SEQ ID NO: 2495609 - RNA, 19 nt, Homo sapiens
  misc_RNA (1)...(19): siRNA sense strand
ccaagacaaaggaagggaa

SEQ ID NO: 2495610 - RNA, 19 nt, Homo sapiens
  misc_RNA (1)...(19): siRNA sense strand
agggaaauaccgaguggau

SEQ ID NO: 2495611 - RNA, 19 nt, Homo sapiens
  misc_RNA (1)...(19): siRNA sense strand
guggcuaaucucaggaaga

SEQ ID NO: 2495612 - RNA, 19 nt, Homo sapiens
  misc_RNA (1)...(19): siRNA sense strand
caggaugaagagaggcuau

SEQ ID NO: 2495613 - RNA, 19 nt, Homo sapiens
  misc_RNA (1)...(19): siRNA sense strand
cggcaaagagcaaggcuag

SEQ ID NO: 2495614 - RNA, 19 nt, Homo sapiens
  misc_RNA (1)...(19): siRNA sense strand
ugaagagaggcuaugacaa

SEQ ID NO: 2495615 - RNA, 19 nt, Homo sapiens
  misc_RNA (1)...(19): siRNA sense strand
gucagaagucaaugaaaca

SEQ ID NO: 2495616 - RNA, 19 nt, Homo sapiens
  misc_RNA (1)...(19): siRNA sense strand
ggagaauauuaauggcuug

SEQ ID NO: 2495617 - RNA, 19 nt, Homo sapiens
  misc_RNA (1)...(19): siRNA sense strand
uguaguugacgcugggaau

SEQ ID NO: 2495618 - RNA, 19 nt, Homo sapiens
  misc_RNA (1)...(19): siRNA sense strand
gccaagaucuccaggccca

SEQ ID NO: 2495619 - RNA, 19 nt, Homo sapiens
  misc_RNA (1)...(19): siRNA sense strand
acuuugaauuagugguguu

SEQ ID NO: 2495620 - RNA, 19 nt, Homo sapiens
  misc_RNA (1)...(19): siRNA sense strand
cauucucggcaaagagcaa

SEQ ID NO: 2495621 - RNA, 19 nt, Homo sapiens
  misc_RNA (1)...(19): siRNA sense strand
gcaagacaguggaagugga

SEQ ID NO: 2495622 - RNA, 19 nt, Homo sapiens
  misc_RNA (1)...(19): siRNA sense strand
uggagaauauuaauggcuu

SEQ ID NO: 2495623 - RNA, 19 nt, Homo sapiens
  misc_RNA (1)...(19): siRNA sense strand
ggauauggauucaggugug

SEQ ID NO: 2495624 - RNA, 19 nt, Homo sapiens
  misc_RNA (1)...(19): siRNA sense strand
cucaagugaccauuggaua

SEQ ID NO: 2495625 - RNA, 19 nt, Homo sapiens
  misc_RNA (1)...(19): siRNA sense strand
ccaaagauggaaggugcaa

SEQ ID NO: 2495626 - RNA, 19 nt, Homo sapiens
  misc_RNA (1)...(19): siRNA sense strand
cagcaaacggggagggaag

SEQ ID NO: 2495627 - RNA, 19 nt, Homo sapiens
  misc_RNA (1)...(19): siRNA sense strand
ugaauaaggagcagggcaa

SEQ ID NO: 2495628 - RNA, 19 nt, Homo sapiens
  misc_RNA (1)...(19): siRNA sense strand
cggaugaaaaugaagaaaa

SEQ ID NO: 2495629 - RNA, 19 nt, Homo sapiens
  misc_RNA (1)...(19): siRNA sense strand
cccgaguacaguuuggaaa

SEQ ID NO: 2495630 - RNA, 19 nt, Homo sapiens
  misc_RNA (1)...(19): siRNA sense strand
cgggaaauacaaagggaaa

SEQ ID NO: 2495631 - RNA, 19 nt, Homo sapiens
  misc_RNA (1)...(19): siRNA sense strand
gggaaauacaaagggaaau

SEQ ID NO: 2495632 - RNA, 19 nt, Homo sapiens
  misc_RNA (1)...(19): siRNA sense strand
uugaaagagacaaggauuu

SEQ ID NO: 2495633 - RNA, 19 nt, Homo sapiens
  misc_RNA (1)...(19): siRNA sense strand
uuauaacacaagugagcaa

SEQ ID NO: 2495634 - RNA, 19 nt, Homo sapiens
  misc_RNA (1)...(19): siRNA sense strand
ucaucaaggaauacacaaa

SEQ ID NO: 2495635 - RNA, 19 nt, Homo sapiens
  misc_RNA (1)...(19): siRNA sense strand
ggacuggauuauagcacca

SEQ ID NO: 2495636 - RNA, 19 nt, Homo sapiens
  misc_RNA (1)...(19): siRNA sense strand
acgaaagacgggaaauaca

SEQ ID NO: 2495637 - RNA, 19 nt, Homo sapiens
  misc_RNA (1)...(19): siRNA sense strand
caaccaaauuaaaugccau

SEQ ID NO: 2495638 - RNA, 19 nt, Homo sapiens
  misc_RNA (1)...(19): siRNA sense strand
acacaaauagggaugcaga

SEQ ID NO: 2495639 - RNA, 19 nt, Homo sapiens
  misc_RNA (1)...(19): siRNA sense strand
ugccaugaccaaugaagaa

SEQ ID NO: 2495640 - RNA, 19 nt, Homo sapiens
  misc_RNA (1)...(19): siRNA sense strand
ucuaguggguuaugcaaaa

SEQ ID NO: 2495641 - RNA, 19 nt, Homo sapiens
  misc_RNA (1)...(19): siRNA sense strand
gaaccacgaaagacgggaa

SEQ ID NO: 2495642 - RNA, 19 nt, Homo sapiens
  misc_RNA (1)...(19): siRNA sense strand
ccucacagacccagaccau

SEQ ID NO: 2495643 - RNA, 19 nt, Homo sapiens
  misc_RNA (1)...(19): siRNA sense strand
ucuacaaugccaugaccaa

SEQ ID NO: 2495644 - RNA, 19 nt, Homo sapiens
  misc_RNA (1)...(19): siRNA sense strand
acgggaaauacaaagggaa

SEQ ID NO: 2495645 - RNA, 19 nt, Homo sapiens
  misc_RNA (1)...(19): siRNA sense strand
aggaauacacaaauaggga

SEQ ID NO: 2495646 - RNA, 19 nt, Homo sapiens
  misc_RNA (1)...(19): siRNA sense strand
guuggagauuauaacacaa

SEQ ID NO: 2495647 - RNA, 19 nt, Homo sapiens
  misc_RNA (1)...(19): siRNA sense strand
ccaaauuccucauggagag

SEQ ID NO: 2495648 - RNA, 19 nt, Homo sapiens
  misc_RNA (1)...(19): siRNA sense strand
gaauacacaaauagggaug

SEQ ID NO: 2495649 - RNA, 19 nt, Homo sapiens
  misc_RNA (1)...(19): siRNA sense strand
ccgugagagcagccaacaa

SEQ ID NO: 2495650 - RNA, 19 nt, Homo sapiens
  misc_RNA (1)...(19): siRNA sense strand
ggaagaaccacgaggagga

SEQ ID NO: 2495651 - RNA, 19 nt, Homo sapiens
  misc_RNA (1)...(19): siRNA sense strand
ggaccaaguaugagcacga

SEQ ID NO: 2495652 - RNA, 19 nt, Homo sapiens
  misc_RNA (1)...(19): siRNA sense strand
ccaucgaggaccugaggaa

SEQ ID NO: 2495653 - RNA, 19 nt, Homo sapiens
  misc_RNA (1)...(19): siRNA sense strand
cgagcagauggcagagaaa

SEQ ID NO: 2495654 - RNA, 19 nt, Homo sapiens
  misc_RNA (1)...(19): siRNA sense strand
aggauauggugguggccuu

SEQ ID NO: 2495655 - RNA, 19 nt, Homo sapiens
  misc_RNA (1)...(19): siRNA sense strand
ugaaggaggagcuggccua

SEQ ID NO: 2495656 - RNA, 19 nt, Homo sapiens
  misc_RNA (1)...(19): siRNA sense strand
agauggagcagcagagcca

SEQ ID NO: 2495657 - RNA, 19 nt, Homo sapiens
  misc_RNA (1)...(19): siRNA sense strand
cuguggaggccgacgucaa

SEQ ID NO: 2495658 - RNA, 19 nt, Homo sapiens
  misc_RNA (1)...(19): siRNA sense strand
ucgaaggccugaaggagga

SEQ ID NO: 2495659 - RNA, 19 nt, Homo sapiens
  misc_RNA (1)...(19): siRNA sense strand
augugaacguggagaugga

SEQ ID NO: 2495660 - RNA, 19 nt, Homo sapiens
  misc_RNA (1)...(19): siRNA sense strand
gccgaugacuucaggacca

SEQ ID NO: 2495661 - RNA, 19 nt, Homo sapiens
  misc_RNA (1)...(19): siRNA sense strand
gagaacagccuggaggaga

SEQ ID NO: 2495662 - RNA, 19 nt, Homo sapiens
  misc_RNA (1)...(19): siRNA sense strand
aguacgagcagauggcaga

SEQ ID NO: 2495663 - RNA, 19 nt, Homo sapiens
  misc_RNA (1)...(19): siRNA sense strand
gcugagaccugguuccuga

SEQ ID NO: 2495664 - RNA, 19 nt, Homo sapiens
  misc_RNA (1)...(19): siRNA sense strand
cggcguuuaauuugggaaa

SEQ ID NO: 2495665 - RNA, 19 nt, Homo sapiens
  misc_RNA (1)...(19): siRNA sense strand
cgguuuuggcagugggaua

SEQ ID NO: 2495666 - RNA, 19 nt, Homo sapiens
  misc_RNA (1)...(19): siRNA sense strand
ggguauugacucugaagau

SEQ ID NO: 2495667 - RNA, 19 nt, Homo sapiens
  misc_RNA (1)...(19): siRNA sense strand
ggauugugugucugagaau

SEQ ID NO: 2495668 - RNA, 19 nt, Homo sapiens
  misc_RNA (1)...(19): siRNA sense strand
gaugaaaucucucggcguu

SEQ ID NO: 2495669 - RNA, 19 nt, Homo sapiens
  misc_RNA (1)...(19): siRNA sense strand
ggggagaaaacuggggaaa

SEQ ID NO: 2495670 - RNA, 19 nt, Homo sapiens
  misc_RNA (1)...(19): siRNA sense strand
auaacaacaagguggauga

SEQ ID NO: 2495671 - RNA, 19 nt, Homo sapiens
  misc_RNA (1)...(19): siRNA sense strand
auacauaugaacuggcuau

SEQ ID NO: 2495672 - RNA, 19 nt, Homo sapiens
  misc_RNA (1)...(19): siRNA sense strand
ugcagaggguacagagaga

SEQ ID NO: 2495673 - RNA, 19 nt, Homo sapiens
  misc_RNA (1)...(19): siRNA sense strand
caagaagaaaacuggcaaa

SEQ ID NO: 2495674 - RNA, 19 nt, Homo sapiens
  misc_RNA (1)...(19): siRNA sense strand
uggcagugggauauggaau

SEQ ID NO: 2495675 - RNA, 19 nt, Homo sapiens
  misc_RNA (1)...(19): siRNA sense strand
gggccaacucaagaagaaa

SEQ ID NO: 2495676 - RNA, 19 nt, Homo sapiens
  misc_RNA (1)...(19): siRNA sense strand
cgaaauaagaacaacgccu

SEQ ID NO: 2495677 - RNA, 19 nt, Homo sapiens
  misc_RNA (1)...(19): siRNA sense strand
gugcagaagaaccggggua

SEQ ID NO: 2495678 - RNA, 19 nt, Homo sapiens
  misc_RNA (1)...(19): siRNA sense strand
cauaugugggacaggaaga

SEQ ID NO: 2495679 - RNA, 19 nt, Homo sapiens
  misc_RNA (1)...(19): siRNA sense strand
gcagcuaaaugcagagggu

SEQ ID NO: 2495680 - RNA, 19 nt, Homo sapiens
  misc_RNA (1)...(19): siRNA sense strand
gcuaaaugcagaggguaca

SEQ ID NO: 2495681 - RNA, 19 nt, Homo sapiens
  misc_RNA (1)...(19): siRNA sense strand
agcuaaaugcagaggguac

SEQ ID NO: 2495682 - RNA, 19 nt, Homo sapiens
  misc_RNA (1)...(19): siRNA sense strand
aggagaggacagaaagcaa

SEQ ID NO: 2495683 - RNA, 19 nt, Homo sapiens
  misc_RNA (1)...(19): siRNA sense strand
cugcggacaaagaggguga

SEQ ID NO: 2495684 - RNA, 19 nt, Homo sapiens
  misc_RNA (1)...(19): siRNA sense strand
cagugggagccaugaagaa

SEQ ID NO: 2495685 - RNA, 19 nt, Homo sapiens
  misc_RNA (1)...(19): siRNA sense strand
cggccaucagcuugggcua

SEQ ID NO: 2495686 - RNA, 19 nt, Homo sapiens
  misc_RNA (1)...(19): siRNA sense strand
gagccaugaagaagggagu

SEQ ID NO: 2495687 - RNA, 19 nt, Homo sapiens
  misc_RNA (1)...(19): siRNA sense strand
ggacagaaagcaaaggcac

SEQ ID NO: 2495688 - RNA, 19 nt, Homo sapiens
  misc_RNA (1)...(19): siRNA sense strand
gggaauacagccaagggaa

SEQ ID NO: 2495689 - RNA, 19 nt, Homo sapiens
  misc_RNA (1)...(19): siRNA sense strand
uagccaaagacaagaacaa

SEQ ID NO: 2495690 - RNA, 19 nt, Homo sapiens
  misc_RNA (1)...(19): siRNA sense strand
aggagagcagugugggaaa

SEQ ID NO: 2495691 - RNA, 19 nt, Homo sapiens
  misc_RNA (1)...(19): siRNA sense strand
gaagaaggauggaggagag

SEQ ID NO: 2495692 - RNA, 19 nt, Homo sapiens
  misc_RNA (1)...(19): siRNA sense strand
cauauguagcaguggauga

SEQ ID NO: 2495693 - RNA, 19 nt, Homo sapiens
  misc_RNA (1)...(19): siRNA sense strand
gugaagaaucagaaacagu

SEQ ID NO: 2495694 - RNA, 19 nt, Homo sapiens
  misc_RNA (1)...(19): siRNA sense strand
auguagcaguggaugaaau

SEQ ID NO: 2495695 - RNA, 19 nt, Homo sapiens
  misc_RNA (1)...(19): siRNA sense strand
gauacaaagugguaccagu

SEQ ID NO: 2495696 - RNA, 19 nt, Homo sapiens
  misc_RNA (1)...(19): siRNA sense strand
agaaagaaaggcuacguga

SEQ ID NO: 2495697 - RNA, 19 nt, Homo sapiens
  misc_RNA (1)...(19): siRNA sense strand
ugguaccaguggaaggcaa

SEQ ID NO: 2495698 - RNA, 19 nt, Homo sapiens
  misc_RNA (1)...(19): siRNA sense strand
acgugacgccagugaagaa

SEQ ID NO: 2495699 - RNA, 19 nt, Homo sapiens
  misc_RNA (1)...(19): siRNA sense strand
aggccuggacucugaggaa

SEQ ID NO: 2495700 - RNA, 19 nt, Homo sapiens
  misc_RNA (1)...(19): siRNA sense strand
ggaggagagcaguguggga

SEQ ID NO: 2495701 - RNA, 19 nt, Homo sapiens
  misc_RNA (1)...(19): siRNA sense strand
ugaagaaggauggaggaga

SEQ ID NO: 2495702 - RNA, 19 nt, Homo sapiens
  misc_RNA (1)...(19): siRNA sense strand
gcgcgaaugaagaaggaug

SEQ ID NO: 2495703 - RNA, 19 nt, Homo sapiens
  misc_RNA (1)...(19): siRNA sense strand
aguacagaccugagaauuc

SEQ ID NO: 2495704 - RNA, 19 nt, Homo sapiens
  misc_RNA (1)...(19): siRNA sense strand
ccagaggggcugagugaaa

SEQ ID NO: 2495705 - RNA, 19 nt, Homo sapiens
  misc_RNA (1)...(19): siRNA sense strand
accgagagauagagggaga

SEQ ID NO: 2495706 - RNA, 19 nt, Homo sapiens
  misc_RNA (1)...(19): siRNA sense strand
gagaagaaggagcggcaca

SEQ ID NO: 2495707 - RNA, 19 nt, Homo sapiens
  misc_RNA (1)...(19): siRNA sense strand
ggauauuggcuguggcacu

SEQ ID NO: 2495708 - RNA, 19 nt, Homo sapiens
  misc_RNA (1)...(19): siRNA sense strand
gggauaugggccagggcau

SEQ ID NO: 2495709 - RNA, 19 nt, Homo sapiens
  misc_RNA (1)...(19): siRNA sense strand
ggaccgagagauagaggga

SEQ ID NO: 2495710 - RNA, 19 nt, Homo sapiens
  misc_RNA (1)...(19): siRNA sense strand
ccuaacagugccaaagcaa

SEQ ID NO: 2495711 - RNA, 19 nt, Homo sapiens
  misc_RNA (1)...(19): siRNA sense strand
gugaggaagagucgggcau

SEQ ID NO: 2495712 - RNA, 19 nt, Homo sapiens
  misc_RNA (1)...(19): siRNA sense strand
uggagaagaaggagcggca

SEQ ID NO: 2495713 - RNA, 19 nt, Homo sapiens
  misc_RNA (1)...(19): siRNA sense strand
gagacagaagcccggaaau

SEQ ID NO: 2495714 - RNA, 19 nt, Homo sapiens
  misc_RNA (1)...(19): siRNA sense strand
gcccaguggcugaggugaa

SEQ ID NO: 2495715 - RNA, 19 nt, Homo sapiens
  misc_RNA (1)...(19): siRNA sense strand
aggaggaugaugaggucaa

SEQ ID NO: 2495716 - RNA, 19 nt, Homo sapiens
  misc_RNA (1)...(19): siRNA sense strand
ccaccaugagccugggcaa

SEQ ID NO: 2495717 - RNA, 19 nt, Homo sapiens
  misc_RNA (1)...(19): siRNA sense strand
uguccaguucacagggaaa

SEQ ID NO: 2495718 - RNA, 19 nt, Homo sapiens
  misc_RNA (1)...(19): siRNA sense strand
ggucaugagccucccagaa

SEQ ID NO: 2495719 - RNA, 19 nt, Homo sapiens
  misc_RNA (1)...(19): siRNA sense strand
cugcagacaugaucagcca

SEQ ID NO: 2495720 - RNA, 19 nt, Homo sapiens
  misc_RNA (1)...(19): siRNA sense strand
gcccaguggcugaggugaa

SEQ ID NO: 2495721 - RNA, 19 nt, Homo sapiens
  misc_RNA (1)...(19): siRNA sense strand
aggaggaugaugaggucaa

SEQ ID NO: 2495722 - RNA, 19 nt, Homo sapiens
  misc_RNA (1)...(19): siRNA sense strand
ccaccaugagccugggcaa

SEQ ID NO: 2495723 - RNA, 19 nt, Homo sapiens
  misc_RNA (1)...(19): siRNA sense strand
uguccaguucacagggaaa

SEQ ID NO: 2495724 - RNA, 19 nt, Homo sapiens
  misc_RNA (1)...(19): siRNA sense strand
cugcagacaugaucagcca

SEQ ID NO: 2495725 - RNA, 19 nt, Homo sapiens
  misc_RNA (1)...(19): siRNA sense strand
gguuguaagugcuugccaa

SEQ ID NO: 2495726 - RNA, 19 nt, Homo sapiens
  misc_RNA (1)...(19): siRNA sense strand
cauccagaucccugaagaa

SEQ ID NO: 2495727 - RNA, 19 nt, Homo sapiens
  misc_RNA (1)...(19): siRNA sense strand
caguaaugaacauggacca

SEQ ID NO: 2495728 - RNA, 19 nt, Homo sapiens
  misc_RNA (1)...(19): siRNA sense strand
cuguggagaugcaggcuga

SEQ ID NO: 2495729 - RNA, 19 nt, Homo sapiens
  misc_RNA (1)...(19): siRNA sense strand
auugacaugcuaugggaua

SEQ ID NO: 2495730 - RNA, 19 nt, Homo sapiens
  misc_RNA (1)...(19): siRNA sense strand
auagaugaagaauggcaaa

SEQ ID NO: 2495731 - RNA, 19 nt, Homo sapiens
  misc_RNA (1)...(19): siRNA sense strand
ccaaagaucuaauccagca

SEQ ID NO: 2495732 - RNA, 19 nt, Homo sapiens
  misc_RNA (1)...(19): siRNA sense strand
ggguaguggugaauguuuu

SEQ ID NO: 2495733 - RNA, 19 nt, Homo sapiens
  misc_RNA (1)...(19): siRNA sense strand
gacuggaagcuguggagau

SEQ ID NO: 2495734 - RNA, 19 nt, Homo sapiens
  misc_RNA (1)...(19): siRNA sense strand
cggacaaguucaauggugu

SEQ ID NO: 2495735 - RNA, 19 nt, Homo sapiens
  misc_RNA (1)...(19): siRNA sense strand
caauggugucugaggugaa

SEQ ID NO: 2495736 - RNA, 19 nt, Homo sapiens
  misc_RNA (1)...(19): siRNA sense strand
cagcagagaacaaggccga

SEQ ID NO: 2495737 - RNA, 19 nt, Homo sapiens
  misc_RNA (1)...(19): siRNA sense strand
gcaaacagcuggugcagac

SEQ ID NO: 2495738 - RNA, 19 nt, Homo sapiens
  misc_RNA (1)...(19): siRNA sense strand
ggaaguggcggaagccgua

SEQ ID NO: 2495739 - RNA, 19 nt, Homo sapiens
  misc_RNA (1)...(19): siRNA sense strand
gcaaccuccucaagcggaa

SEQ ID NO: 2495740 - RNA, 19 nt, Homo sapiens
  misc_RNA (1)...(19): siRNA sense strand
ugggcauccuggugugcaa

SEQ ID NO: 2495741 - RNA, 19 nt, Homo sapiens
  misc_RNA (1)...(19): siRNA sense strand
agguggaggcaguggaauc

SEQ ID NO: 2495742 - RNA, 19 nt, Homo sapiens
  misc_RNA (1)...(19): siRNA sense strand
cggacaaguucaauggugu

SEQ ID NO: 2495743 - RNA, 19 nt, Homo sapiens
  misc_RNA (1)...(19): siRNA sense strand
caauggugucugaggugaa

SEQ ID NO: 2495744 - RNA, 19 nt, Homo sapiens
  misc_RNA (1)...(19): siRNA sense strand
cagcagagaacaaggccga

SEQ ID NO: 2495745 - RNA, 19 nt, Homo sapiens
  misc_RNA (1)...(19): siRNA sense strand
gcaaacagcuggugcagac

SEQ ID NO: 2495746 - RNA, 19 nt, Homo sapiens
  misc_RNA (1)...(19): siRNA sense strand
ggaaguggcggaagccgua

SEQ ID NO: 2495747 - RNA, 19 nt, Homo sapiens
  misc_RNA (1)...(19): siRNA sense strand
gcaaccuccucaagcggaa

SEQ ID NO: 2495748 - RNA, 19 nt, Homo sapiens
  misc_RNA (1)...(19): siRNA sense strand
ugggcauccuggugugcaa

SEQ ID NO: 2495749 - RNA, 19 nt, Homo sapiens
  misc_RNA (1)...(19): siRNA sense strand
agguggaggcaguggaauc

SEQ ID NO: 2495750 - RNA, 19 nt, Homo sapiens
  misc_RNA (1)...(19): siRNA sense strand
aguugaacaccuugaggaa

SEQ ID NO: 2495751 - RNA, 19 nt, Homo sapiens
  misc_RNA (1)...(19): siRNA sense strand
aaaccagauuggaagaaaa

SEQ ID NO: 2495752 - RNA, 19 nt, Homo sapiens
  misc_RNA (1)...(19): siRNA sense strand
gcugaaaaccagauuggaa

SEQ ID NO: 2495753 - RNA, 19 nt, Homo sapiens
  misc_RNA (1)...(19): siRNA sense strand
augaagaaacacaugauca

SEQ ID NO: 2495754 - RNA, 19 nt, Homo sapiens
  misc_RNA (1)...(19): siRNA sense strand
aguugaacaccuugaggaa

SEQ ID NO: 2495755 - RNA, 19 nt, Homo sapiens
  misc_RNA (1)...(19): siRNA sense strand
aaaccagauuggaagaaaa

SEQ ID NO: 2495756 - RNA, 19 nt, Homo sapiens
  misc_RNA (1)...(19): siRNA sense strand
gcugaaaaccagauuggaa

SEQ ID NO: 2495757 - RNA, 19 nt, Homo sapiens
  misc_RNA (1)...(19): siRNA sense strand
augaagaaacacaugauca

SEQ ID NO: 2495758 - RNA, 19 nt, Homo sapiens
  misc_RNA (1)...(19): siRNA sense strand
aguugaacaccuugaggaa

SEQ ID NO: 2495759 - RNA, 19 nt, Homo sapiens
  misc_RNA (1)...(19): siRNA sense strand
aaaccagauuggaagaaaa

SEQ ID NO: 2495760 - RNA, 19 nt, Homo sapiens
  misc_RNA (1)...(19): siRNA sense strand
gcugaaaaccagauuggaa

SEQ ID NO: 2495761 - RNA, 19 nt, Homo sapiens
  misc_RNA (1)...(19): siRNA sense strand
augaagaaacacaugauca

SEQ ID NO: 2495762 - RNA, 19 nt, Homo sapiens
  misc_RNA (1)...(19): siRNA sense strand
aggaugaaacugaagaaaa

SEQ ID NO: 2495763 - RNA, 19 nt, Homo sapiens
  misc_RNA (1)...(19): siRNA sense strand
cggacagacaagugaaaau

SEQ ID NO: 2495764 - RNA, 19 nt, Homo sapiens
  misc_RNA (1)...(19): siRNA sense strand
agacacuggagcuggagaa

SEQ ID NO: 2495765 - RNA, 19 nt, Homo sapiens
  misc_RNA (1)...(19): siRNA sense strand
ggcaaagaguggucggaag

SEQ ID NO: 2495766 - RNA, 19 nt, Homo sapiens
  misc_RNA (1)...(19): siRNA sense strand
cggcaaagaguggucggaa

SEQ ID NO: 2495767 - RNA, 19 nt, Homo sapiens
  misc_RNA (1)...(19): siRNA sense strand
caggaugaaacugaagaaa

SEQ ID NO: 2495768 - RNA, 19 nt, Homo sapiens
  misc_RNA (1)...(19): siRNA sense strand
aggaugaaacugaagaaaa

SEQ ID NO: 2495769 - RNA, 19 nt, Homo sapiens
  misc_RNA (1)...(19): siRNA sense strand
cggacagacaagugaaaau

SEQ ID NO: 2495770 - RNA, 19 nt, Homo sapiens
  misc_RNA (1)...(19): siRNA sense strand
agacacuggagcuggagaa

SEQ ID NO: 2495771 - RNA, 19 nt, Homo sapiens
  misc_RNA (1)...(19): siRNA sense strand
ggcaaagaguggucggaag

SEQ ID NO: 2495772 - RNA, 19 nt, Homo sapiens
  misc_RNA (1)...(19): siRNA sense strand
cggcaaagaguggucggaa

SEQ ID NO: 2495773 - RNA, 19 nt, Homo sapiens
  misc_RNA (1)...(19): siRNA sense strand
caggaugaaacugaagaaa

SEQ ID NO: 2495774 - RNA, 19 nt, Homo sapiens
  misc_RNA (1)...(19): siRNA sense strand
ccucaaagucgcaggcaaa

SEQ ID NO: 2495775 - RNA, 19 nt, Homo sapiens
  misc_RNA (1)...(19): siRNA sense strand
aggaggagccagagaagaa

SEQ ID NO: 2495776 - RNA, 19 nt, Homo sapiens
  misc_RNA (1)...(19): siRNA sense strand
gggaaaaggagaaggccaa

SEQ ID NO: 2495777 - RNA, 19 nt, Homo sapiens
  misc_RNA (1)...(19): siRNA sense strand
gagcuaugggagaaggaaa

SEQ ID NO: 2495778 - RNA, 19 nt, Homo sapiens
  misc_RNA (1)...(19): siRNA sense strand
acccagagucccagagaaa

SEQ ID NO: 2495779 - RNA, 19 nt, Homo sapiens
  misc_RNA (1)...(19): siRNA sense strand
ccgagagacccaagggaau

SEQ ID NO: 2495780 - RNA, 19 nt, Homo sapiens
  misc_RNA (1)...(19): siRNA sense strand
aggcaaaccugagggcaaa

SEQ ID NO: 2495781 - RNA, 19 nt, Homo sapiens
  misc_RNA (1)...(19): siRNA sense strand
ccacagaagaagagacgga

SEQ ID NO: 2495782 - RNA, 19 nt, Homo sapiens
  misc_RNA (1)...(19): siRNA sense strand
cagaagaagagacggaaga

SEQ ID NO: 2495783 - RNA, 19 nt, Homo sapiens
  misc_RNA (1)...(19): siRNA sense strand
cugcuggauuugcgagaaa

SEQ ID NO: 2495784 - RNA, 19 nt, Homo sapiens
  misc_RNA (1)...(19): siRNA sense strand
gagccaaggaugggauaaa

SEQ ID NO: 2495785 - RNA, 19 nt, Homo sapiens
  misc_RNA (1)...(19): siRNA sense strand
ccagagucccagagaaaga

SEQ ID NO: 2495786 - RNA, 19 nt, Homo sapiens
  misc_RNA (1)...(19): siRNA sense strand
cuucggaucaagagacaaa

SEQ ID NO: 2495787 - RNA, 19 nt, Homo sapiens
  misc_RNA (1)...(19): siRNA sense strand
acuugaagcagcaggaauu

SEQ ID NO: 2495788 - RNA, 19 nt, Homo sapiens
  misc_RNA (1)...(19): siRNA sense strand
uagcaaggucaguggaaaa

SEQ ID NO: 2495789 - RNA, 19 nt, Homo sapiens
  misc_RNA (1)...(19): siRNA sense strand
ggaugcaaucugagcaaau

SEQ ID NO: 2495790 - RNA, 19 nt, Homo sapiens
  misc_RNA (1)...(19): siRNA sense strand
cagagacggccgaggagaa

SEQ ID NO: 2495791 - RNA, 19 nt, Homo sapiens
  misc_RNA (1)...(19): siRNA sense strand
ccggaagcuucguagggaa

SEQ ID NO: 2495792 - RNA, 19 nt, Homo sapiens
  misc_RNA (1)...(19): siRNA sense strand
acagugaccucaugggcaa

SEQ ID NO: 2495793 - RNA, 19 nt, Homo sapiens
  misc_RNA (1)...(19): siRNA sense strand
aaucagacagaucgggaaa

SEQ ID NO: 2495794 - RNA, 19 nt, Homo sapiens
  misc_RNA (1)...(19): siRNA sense strand
ccgaauggagcgacgauau

SEQ ID NO: 2495795 - RNA, 19 nt, Homo sapiens
  misc_RNA (1)...(19): siRNA sense strand
agaccaugacggaggauga

SEQ ID NO: 2495796 - RNA, 19 nt, Homo sapiens
  misc_RNA (1)...(19): siRNA sense strand
caucaguacuuguggucca

SEQ ID NO: 2495797 - RNA, 19 nt, Homo sapiens
  misc_RNA (1)...(19): siRNA sense strand
aggagaaggccaaagccaa

SEQ ID NO: 2495798 - RNA, 19 nt, Homo sapiens
  misc_RNA (1)...(19): siRNA sense strand
guggaaaaguugacuggaa

SEQ ID NO: 2495799 - RNA, 19 nt, Homo sapiens
  misc_RNA (1)...(19): siRNA sense strand
aagcuacagacaaggguaa

SEQ ID NO: 2495800 - RNA, 19 nt, Homo sapiens
  misc_RNA (1)...(19): siRNA sense strand
ucaacaaagcguucaguau

SEQ ID NO: 2495801 - RNA, 19 nt, Homo sapiens
  misc_RNA (1)...(19): siRNA sense strand
ccucauacucggauauaga

SEQ ID NO: 2495802 - RNA, 19 nt, Homo sapiens
  misc_RNA (1)...(19): siRNA sense strand
ccagauagaccgggaaaca

SEQ ID NO: 2495803 - RNA, 19 nt, Homo sapiens
  misc_RNA (1)...(19): siRNA sense strand
cggcagaaccuggaagaga

SEQ ID NO: 2495804 - RNA, 19 nt, Homo sapiens
  misc_RNA (1)...(19): siRNA sense strand
augcaaaugaggaggagga

SEQ ID NO: 2495805 - RNA, 19 nt, Homo sapiens
  misc_RNA (1)...(19): siRNA sense strand
cagcaucagccacgugaaa

SEQ ID NO: 2495806 - RNA, 19 nt, Homo sapiens
  misc_RNA (1)...(19): siRNA sense strand
cagcgaugccucagacaau

SEQ ID NO: 2495807 - RNA, 19 nt, Homo sapiens
  misc_RNA (1)...(19): siRNA sense strand
acauaagccuccugcugaa

SEQ ID NO: 2495808 - RNA, 19 nt, Homo sapiens
  misc_RNA (1)...(19): siRNA sense strand
gaggaugcaaucugagcaa

SEQ ID NO: 2495809 - RNA, 19 nt, Homo sapiens
  misc_RNA (1)...(19): siRNA sense strand
uccaaguguucaaggacua

SEQ ID NO: 2495810 - RNA, 19 nt, Homo sapiens
  misc_RNA (1)...(19): siRNA sense strand
caucaaugccaacaaggaa

SEQ ID NO: 2495811 - RNA, 19 nt, Homo sapiens
  misc_RNA (1)...(19): siRNA sense strand
gcaaggaugcugaugcgaa

SEQ ID NO: 2495812 - RNA, 19 nt, Homo sapiens
  misc_RNA (1)...(19): siRNA sense strand
ccauuggcauugaggacuu

SEQ ID NO: 2495813 - RNA, 19 nt, Homo sapiens
  misc_RNA (1)...(19): siRNA sense strand
ggaaacaggaauuggggau

SEQ ID NO: 2495814 - RNA, 19 nt, Homo sapiens
  misc_RNA (1)...(19): siRNA sense strand
uuagugaaucagaggagaa

SEQ ID NO: 2495815 - RNA, 19 nt, Homo sapiens
  misc_RNA (1)...(19): siRNA sense strand
cagagaagaaggagguauc

SEQ ID NO: 2495816 - RNA, 19 nt, Homo sapiens
  misc_RNA (1)...(19): siRNA sense strand
aggucaagccgcucagcaa

SEQ ID NO: 2495817 - RNA, 19 nt, Homo sapiens
  misc_RNA (1)...(19): siRNA sense strand
ggacgauguucacggcuca

SEQ ID NO: 2495818 - RNA, 19 nt, Homo sapiens
  misc_RNA (1)...(19): siRNA sense strand
acucggauauagaggagau

SEQ ID NO: 2495819 - RNA, 19 nt, Homo sapiens
  misc_RNA (1)...(19): siRNA sense strand
agcuaugggagaaggaaau

SEQ ID NO: 2495820 - RNA, 19 nt, Homo sapiens
  misc_RNA (1)...(19): siRNA sense strand
gaggaagcugguagaguca

SEQ ID NO: 2495821 - RNA, 19 nt, Homo sapiens
  misc_RNA (1)...(19): siRNA sense strand
gcccaaaggcuuaggcaag

SEQ ID NO: 2495822 - RNA, 19 nt, Homo sapiens
  misc_RNA (1)...(19): siRNA sense strand
cccucaaagucgcaggcaa

SEQ ID NO: 2495823 - RNA, 19 nt, Homo sapiens
  misc_RNA (1)...(19): siRNA sense strand
gagaugaccugcuacgaca

SEQ ID NO: 2495824 - RNA, 19 nt, Homo sapiens
  misc_RNA (1)...(19): siRNA sense strand
uggaaucaucccaggaaaa

SEQ ID NO: 2495825 - RNA, 19 nt, Homo sapiens
  misc_RNA (1)...(19): siRNA sense strand
agcagagccuggugaauau

SEQ ID NO: 2495826 - RNA, 19 nt, Homo sapiens
  misc_RNA (1)...(19): siRNA sense strand
gggagaaggaaaugaagcu

SEQ ID NO: 2495827 - RNA, 19 nt, Homo sapiens
  misc_RNA (1)...(19): siRNA sense strand
ggguaagcuugcagugaag

SEQ ID NO: 2495828 - RNA, 19 nt, Homo sapiens
  misc_RNA (1)...(19): siRNA sense strand
cucaaaggucugaaggaga

SEQ ID NO: 2495829 - RNA, 19 nt, Homo sapiens
  misc_RNA (1)...(19): siRNA sense strand
ugguagagucagacagcga

SEQ ID NO: 2495830 - RNA, 19 nt, Homo sapiens
  misc_RNA (1)...(19): siRNA sense strand
gggaggacccaguggaaug

SEQ ID NO: 2495831 - RNA, 19 nt, Homo sapiens
  misc_RNA (1)...(19): siRNA sense strand
cgaggauaggacagucaaa

SEQ ID NO: 2495832 - RNA, 19 nt, Homo sapiens
  misc_RNA (1)...(19): siRNA sense strand
gauauagaggagauugcua

SEQ ID NO: 2495833 - RNA, 19 nt, Homo sapiens
  misc_RNA (1)...(19): siRNA sense strand
ggucaggauccuuccgaga

SEQ ID NO: 2495834 - RNA, 19 nt, Homo sapiens
  misc_RNA (1)...(19): siRNA sense strand
agucagacagcgacaucaa

SEQ ID NO: 2495835 - RNA, 19 nt, Homo sapiens
  misc_RNA (1)...(19): siRNA sense strand
ggagcgacgauauggccaa

SEQ ID NO: 2495836 - RNA, 19 nt, Homo sapiens
  misc_RNA (1)...(19): siRNA sense strand
cgugagcgaagauggcaaa

SEQ ID NO: 2495837 - RNA, 19 nt, Homo sapiens
  misc_RNA (1)...(19): siRNA sense strand
cagcaaggccaaggcgcaa

SEQ ID NO: 2495838 - RNA, 19 nt, Homo sapiens
  misc_RNA (1)...(19): siRNA sense strand
cugagcugguuuagugaau

SEQ ID NO: 2495839 - RNA, 19 nt, Homo sapiens
  misc_RNA (1)...(19): siRNA sense strand
gggccacagcgaagagcuu

SEQ ID NO: 2495840 - RNA, 19 nt, Homo sapiens
  misc_RNA (1)...(19): siRNA sense strand
cagaagaaacuaaaggcau

SEQ ID NO: 2495841 - RNA, 19 nt, Homo sapiens
  misc_RNA (1)...(19): siRNA sense strand
ccaaggaggucaaguggca

SEQ ID NO: 2495842 - RNA, 19 nt, Homo sapiens
  misc_RNA (1)...(19): siRNA sense strand
gguauauggaugagggucu

SEQ ID NO: 2495843 - RNA, 19 nt, Homo sapiens
  misc_RNA (1)...(19): siRNA sense strand
agaagaaacuaaaggcaug

SEQ ID NO: 2495844 - RNA, 19 nt, Homo sapiens
  misc_RNA (1)...(19): siRNA sense strand
cggaagaagagugggcaga

SEQ ID NO: 2495845 - RNA, 19 nt, Homo sapiens
  misc_RNA (1)...(19): siRNA sense strand
ccuucaucauggugacauu

SEQ ID NO: 2495846 - RNA, 19 nt, Homo sapiens
  misc_RNA (1)...(19): siRNA sense strand
gcagaagaaacuaaaggca

SEQ ID NO: 2495847 - RNA, 19 nt, Homo sapiens
  misc_RNA (1)...(19): siRNA sense strand
ccuggaagagcuccggaaa

SEQ ID NO: 2495848 - RNA, 19 nt, Homo sapiens
  misc_RNA (1)...(19): siRNA sense strand
cugaaaucaaggaagacuu

SEQ ID NO: 2495849 - RNA, 19 nt, Homo sapiens
  misc_RNA (1)...(19): siRNA sense strand
cuggaagagcuccggaaaa

SEQ ID NO: 2495850 - RNA, 19 nt, Homo sapiens
  misc_RNA (1)...(19): siRNA sense strand
ccauguugcagaagaaacu

SEQ ID NO: 2495851 - RNA, 19 nt, Homo sapiens
  misc_RNA (1)...(19): siRNA sense strand
cagaagaaacuaaaggcau

SEQ ID NO: 2495852 - RNA, 19 nt, Homo sapiens
  misc_RNA (1)...(19): siRNA sense strand
ccaaggaggucaaguggca

SEQ ID NO: 2495853 - RNA, 19 nt, Homo sapiens
  misc_RNA (1)...(19): siRNA sense strand
gguauauggaugagggucu

SEQ ID NO: 2495854 - RNA, 19 nt, Homo sapiens
  misc_RNA (1)...(19): siRNA sense strand
agaagaaacuaaaggcaug

SEQ ID NO: 2495855 - RNA, 19 nt, Homo sapiens
  misc_RNA (1)...(19): siRNA sense strand
cggaagaagagugggcaga

SEQ ID NO: 2495856 - RNA, 19 nt, Homo sapiens
  misc_RNA (1)...(19): siRNA sense strand
ccuucaucauggugacauu

SEQ ID NO: 2495857 - RNA, 19 nt, Homo sapiens
  misc_RNA (1)...(19): siRNA sense strand
gcagaagaaacuaaaggca

SEQ ID NO: 2495858 - RNA, 19 nt, Homo sapiens
  misc_RNA (1)...(19): siRNA sense strand
ccuggaagagcuccggaaa

SEQ ID NO: 2495859 - RNA, 19 nt, Homo sapiens
  misc_RNA (1)...(19): siRNA sense strand
cugaaaucaaggaagacuu

SEQ ID NO: 2495860 - RNA, 19 nt, Homo sapiens
  misc_RNA (1)...(19): siRNA sense strand
cuggaagagcuccggaaaa

SEQ ID NO: 2495861 - RNA, 19 nt, Homo sapiens
  misc_RNA (1)...(19): siRNA sense strand
ccauguugcagaagaaacu

SEQ ID NO: 2495862 - RNA, 19 nt, Homo sapiens
  misc_RNA (1)...(19): siRNA sense strand
cugaaguaaaccaggauua

SEQ ID NO: 2495863 - RNA, 19 nt, Homo sapiens
  misc_RNA (1)...(19): siRNA sense strand
ggguaaaaccuaaggacau

SEQ ID NO: 2495864 - RNA, 19 nt, Homo sapiens
  misc_RNA (1)...(19): siRNA sense strand
gucauuagcaauagagcaa

SEQ ID NO: 2495865 - RNA, 19 nt, Homo sapiens
  misc_RNA (1)...(19): siRNA sense strand
gagaauugaucuugccuga

SEQ ID NO: 2495866 - RNA, 19 nt, Homo sapiens
  misc_RNA (1)...(19): siRNA sense strand
aauaaaagccagagcucaa

SEQ ID NO: 2495867 - RNA, 19 nt, Homo sapiens
  misc_RNA (1)...(19): siRNA sense strand
cgaauaaauuugaagcucu

SEQ ID NO: 2495868 - RNA, 19 nt, Homo sapiens
  misc_RNA (1)...(19): siRNA sense strand
ugaaauguuaggaggugaa

SEQ ID NO: 2495869 - RNA, 19 nt, Homo sapiens
  misc_RNA (1)...(19): siRNA sense strand
caguuugacgaauggguaa

SEQ ID NO: 2495870 - RNA, 19 nt, Homo sapiens
  misc_RNA (1)...(19): siRNA sense strand
augagguagcugaagguaa

SEQ ID NO: 2495871 - RNA, 19 nt, Homo sapiens
  misc_RNA (1)...(19): siRNA sense strand
gugaacuaaaggugccaaa

SEQ ID NO: 2495872 - RNA, 19 nt, Homo sapiens
  misc_RNA (1)...(19): siRNA sense strand
caucaagauuggacguacu

SEQ ID NO: 2495873 - RNA, 19 nt, Homo sapiens
  misc_RNA (1)...(19): siRNA sense strand
aggcacugcuguugguaca

SEQ ID NO: 2495874 - RNA, 19 nt, Homo sapiens
  misc_RNA (1)...(19): siRNA sense strand
gaccaugguugcagcccaa

SEQ ID NO: 2495875 - RNA, 19 nt, Homo sapiens
  misc_RNA (1)...(19): siRNA sense strand
gccaauacagaaaggauca

SEQ ID NO: 2495876 - RNA, 19 nt, Homo sapiens
  misc_RNA (1)...(19): siRNA sense strand
cagcagagcaguuugacga

SEQ ID NO: 2495877 - RNA, 19 nt, Homo sapiens
  misc_RNA (1)...(19): siRNA sense strand
agucugaugaagauagcaa

SEQ ID NO: 2495878 - RNA, 19 nt, Homo sapiens
  misc_RNA (1)...(19): siRNA sense strand
agaucuacgaugaacuuua

SEQ ID NO: 2495879 - RNA, 19 nt, Homo sapiens
  misc_RNA (1)...(19): siRNA sense strand
cagcaagauaccugugcau

SEQ ID NO: 2495880 - RNA, 19 nt, Homo sapiens
  misc_RNA (1)...(19): siRNA sense strand
ccaaaauuccuuccggaua

SEQ ID NO: 2495881 - RNA, 19 nt, Homo sapiens
  misc_RNA (1)...(19): siRNA sense strand
ggguaugacaaggcagcaa

SEQ ID NO: 2495882 - RNA, 19 nt, Homo sapiens
  misc_RNA (1)...(19): siRNA sense strand
uaagauuggaggugugaca

SEQ ID NO: 2495883 - RNA, 19 nt, Homo sapiens
  misc_RNA (1)...(19): siRNA sense strand
gugccaaaugauaaguauu

SEQ ID NO: 2495884 - RNA, 19 nt, Homo sapiens
  misc_RNA (1)...(19): siRNA sense strand
aauguuaggaggugaacuu

SEQ ID NO: 2495885 - RNA, 19 nt, Homo sapiens
  misc_RNA (1)...(19): siRNA sense strand
aaaacugcguggugggaau

SEQ ID NO: 2495886 - RNA, 19 nt, Homo sapiens
  misc_RNA (1)...(19): siRNA sense strand
acgaauggguaaaaccuaa

SEQ ID NO: 2495887 - RNA, 19 nt, Homo sapiens
  misc_RNA (1)...(19): siRNA sense strand
cugcaauagaaguucauga

SEQ ID NO: 2495888 - RNA, 19 nt, Homo sapiens
  misc_RNA (1)...(19): siRNA sense strand
caauaaugaaggcagcaga

SEQ ID NO: 2495889 - RNA, 19 nt, Homo sapiens
  misc_RNA (1)...(19): siRNA sense strand
uggugggaauccaggccaa

SEQ ID NO: 2495890 - RNA, 19 nt, Homo sapiens
  misc_RNA (1)...(19): siRNA sense strand
gaauaaauuugaagcucug

SEQ ID NO: 2495891 - RNA, 19 nt, Homo sapiens
  misc_RNA (1)...(19): siRNA sense strand
ugcaaaauccaaagaguuu

SEQ ID NO: 2495892 - RNA, 19 nt, Homo sapiens
  misc_RNA (1)...(19): siRNA sense strand
caauccucauauaggguau

SEQ ID NO: 2495893 - RNA, 19 nt, Homo sapiens
  misc_RNA (1)...(19): siRNA sense strand
gcaguuugacgaaugggua

SEQ ID NO: 2495894 - RNA, 19 nt, Homo sapiens
  misc_RNA (1)...(19): siRNA sense strand
aguacaaagccaagaagaa

SEQ ID NO: 2495895 - RNA, 19 nt, Homo sapiens
  misc_RNA (1)...(19): siRNA sense strand
agacuaugacagugacaaa

SEQ ID NO: 2495896 - RNA, 19 nt, Homo sapiens
  misc_RNA (1)...(19): siRNA sense strand
ggaaacaggugcaguggga

SEQ ID NO: 2495897 - RNA, 19 nt, Homo sapiens
  misc_RNA (1)...(19): siRNA sense strand
uuacaauggcaaaggaauu

SEQ ID NO: 2495898 - RNA, 19 nt, Homo sapiens
  misc_RNA (1)...(19): siRNA sense strand
cugaagaauuaucuggcaa

SEQ ID NO: 2495899 - RNA, 19 nt, Homo sapiens
  misc_RNA (1)...(19): siRNA sense strand
ugggaacacagcagggaaa

SEQ ID NO: 2495900 - RNA, 19 nt, Homo sapiens
  misc_RNA (1)...(19): siRNA sense strand
aggagcaauggaagggaaa

SEQ ID NO: 2495901 - RNA, 19 nt, Homo sapiens
  misc_RNA (1)...(19): siRNA sense strand
gguuugaaguccaugacau

SEQ ID NO: 2495902 - RNA, 19 nt, Homo sapiens
  misc_RNA (1)...(19): siRNA sense strand
gaggagcaauggaagggaa

SEQ ID NO: 2495903 - RNA, 19 nt, Homo sapiens
  misc_RNA (1)...(19): siRNA sense strand
gagcaauggaagggaaaca

SEQ ID NO: 2495904 - RNA, 19 nt, Homo sapiens
  misc_RNA (1)...(19): siRNA sense strand
uggcaaaggaauuaaacca

SEQ ID NO: 2495905 - RNA, 19 nt, Homo sapiens
  misc_RNA (1)...(19): siRNA sense strand
ggcaaaggaauuaaaccaa

SEQ ID NO: 2495906 - RNA, 19 nt, Homo sapiens
  misc_RNA (1)...(19): siRNA sense strand
cugccaacacacugggaau

SEQ ID NO: 2495907 - RNA, 19 nt, Homo sapiens
  misc_RNA (1)...(19): siRNA sense strand
cggugauugcugaagaauu

SEQ ID NO: 2495908 - RNA, 19 nt, Homo sapiens
  misc_RNA (1)...(19): siRNA sense strand
aauucaaggaguuguggaa

SEQ ID NO: 2495909 - RNA, 19 nt, Homo sapiens
  misc_RNA (1)...(19): siRNA sense strand
caaagagcgugcuggcuga

SEQ ID NO: 2495910 - RNA, 19 nt, Homo sapiens
  misc_RNA (1)...(19): siRNA sense strand
cacggaaauuggaugacaa

SEQ ID NO: 2495911 - RNA, 19 nt, Homo sapiens
  misc_RNA (1)...(19): siRNA sense strand
uuaccaacccaaugaguau

SEQ ID NO: 2495912 - RNA, 19 nt, Homo sapiens
  misc_RNA (1)...(19): siRNA sense strand
gugcaggaauucaaggagu

SEQ ID NO: 2495913 - RNA, 19 nt, Homo sapiens
  misc_RNA (1)...(19): siRNA sense strand
gccaagacuaugacaguga

SEQ ID NO: 2495914 - RNA, 19 nt, Homo sapiens
  misc_RNA (1)...(19): siRNA sense strand
ugaagaauuaucuggcaau

SEQ ID NO: 2495915 - RNA, 19 nt, Homo sapiens
  misc_RNA (1)...(19): siRNA sense strand
gccaagaagaagaauuaca

SEQ ID NO: 2495916 - RNA, 19 nt, Homo sapiens
  misc_RNA (1)...(19): siRNA sense strand
aaacaggugcagugggagu

SEQ ID NO: 2495917 - RNA, 19 nt, Homo sapiens
  misc_RNA (1)...(19): siRNA sense strand
cugcauaaacccaguguac

SEQ ID NO: 2495918 - RNA, 19 nt, Homo sapiens
  misc_RNA (1)...(19): siRNA sense strand
uguccaaauccuugcugaa

SEQ ID NO: 2495919 - RNA, 19 nt, Homo sapiens
  misc_RNA (1)...(19): siRNA sense strand
ccucgacauucaaggagau

SEQ ID NO: 2495920 - RNA, 19 nt, Homo sapiens
  misc_RNA (1)...(19): siRNA sense strand
gguuugagguugacaggac

SEQ ID NO: 2495921 - RNA, 19 nt, Homo sapiens
  misc_RNA (1)...(19): siRNA sense strand
cagcgucagaggaaacuaa

SEQ ID NO: 2495922 - RNA, 19 nt, Homo sapiens
  misc_RNA (1)...(19): siRNA sense strand
cagucaucaucgugggagu

SEQ ID NO: 2495923 - RNA, 19 nt, Homo sapiens
  misc_RNA (1)...(19): siRNA sense strand
aauuggaugacaaggauuu

SEQ ID NO: 2495924 - RNA, 19 nt, Homo sapiens
  misc_RNA (1)...(19): siRNA sense strand
auguaugaaucuuccagaa

SEQ ID NO: 2495925 - RNA, 19 nt, Homo sapiens
  misc_RNA (1)...(19): siRNA sense strand
gggaagugaaagaggaaau

SEQ ID NO: 2495926 - RNA, 19 nt, Homo sapiens
  misc_RNA (1)...(19): siRNA sense strand
aggaagaagaagaggaaga

SEQ ID NO: 2495927 - RNA, 19 nt, Homo sapiens
  misc_RNA (1)...(19): siRNA sense strand
aggaagaagaggaagaaga

SEQ ID NO: 2495928 - RNA, 19 nt, Homo sapiens
  misc_RNA (1)...(19): siRNA sense strand
cagcaaaggagaucggcua

SEQ ID NO: 2495929 - RNA, 19 nt, Homo sapiens
  misc_RNA (1)...(19): siRNA sense strand
aggaggaagaagaggaaga

SEQ ID NO: 2495930 - RNA, 19 nt, Homo sapiens
  misc_RNA (1)...(19): siRNA sense strand
agacaaagaucgucggaac

SEQ ID NO: 2495931 - RNA, 19 nt, Homo sapiens
  misc_RNA (1)...(19): siRNA sense strand
ggaucagaaaucacagaaa

SEQ ID NO: 2495932 - RNA, 19 nt, Homo sapiens
  misc_RNA (1)...(19): siRNA sense strand
augaagaugaggaggaaga

SEQ ID NO: 2495933 - RNA, 19 nt, Homo sapiens
  misc_RNA (1)...(19): siRNA sense strand
uggaggacgacauggauaa

SEQ ID NO: 2495934 - RNA, 19 nt, Homo sapiens
  misc_RNA (1)...(19): siRNA sense strand
gugauugggaagugaaaga

SEQ ID NO: 2495935 - RNA, 19 nt, Homo sapiens
  misc_RNA (1)...(19): siRNA sense strand
gugaaagaggaaauggauu

SEQ ID NO: 2495936 - RNA, 19 nt, Homo sapiens
  misc_RNA (1)...(19): siRNA sense strand
aaacagaaagagagagaac

SEQ ID NO: 2495937 - RNA, 19 nt, Homo sapiens
  misc_RNA (1)...(19): siRNA sense strand
cugaagaacaacagcuaca

SEQ ID NO: 2495938 - RNA, 19 nt, Homo sapiens
  misc_RNA (1)...(19): siRNA sense strand
cgucaugacuggagccaac

SEQ ID NO: 2495939 - RNA, 19 nt, Homo sapiens
  misc_RNA (1)...(19): siRNA sense strand
agaaagagagagaacgcau

SEQ ID NO: 2495940 - RNA, 19 nt, Homo sapiens
  misc_RNA (1)...(19): siRNA sense strand
cccucaagaugaagguaau

SEQ ID NO: 2495941 - RNA, 19 nt, Homo sapiens
  misc_RNA (1)...(19): siRNA sense strand
ugagauuugcccagaggaa

SEQ ID NO: 2495942 - RNA, 19 nt, Homo sapiens
  misc_RNA (1)...(19): siRNA sense strand
cugaugaagaugaggagga

SEQ ID NO: 2495943 - RNA, 19 nt, Homo sapiens
  misc_RNA (1)...(19): siRNA sense strand
aggaggaagaggaggagga

SEQ ID NO: 2495944 - RNA, 19 nt, Homo sapiens
  misc_RNA (1)...(19): siRNA sense strand
cagaaaugggaucagaaau

SEQ ID NO: 2495945 - RNA, 19 nt, Homo sapiens
  misc_RNA (1)...(19): siRNA sense strand
aagaagaagaggaagaaac

SEQ ID NO: 2495946 - RNA, 19 nt, Homo sapiens
  misc_RNA (1)...(19): siRNA sense strand
guuuggugguggaagucaa

SEQ ID NO: 2495947 - RNA, 19 nt, Homo sapiens
  misc_RNA (1)...(19): siRNA sense strand
gcacacagaagacggccua

SEQ ID NO: 2495948 - RNA, 19 nt, Homo sapiens
  misc_RNA (1)...(19): siRNA sense strand
ugaagcuggaggagggcaa

SEQ ID NO: 2495949 - RNA, 19 nt, Homo sapiens
  misc_RNA (1)...(19): siRNA sense strand
guggaggacgacauggaua

SEQ ID NO: 2495950 - RNA, 19 nt, Homo sapiens
  misc_RNA (1)...(19): siRNA sense strand
acgacauggauaagaauga

SEQ ID NO: 2495951 - RNA, 19 nt, Homo sapiens
  misc_RNA (1)...(19): siRNA sense strand
cccuagaauacuacgacaa

SEQ ID NO: 2495952 - RNA, 19 nt, Homo sapiens
  misc_RNA (1)...(19): siRNA sense strand
gacaaagaucgucggaaca

SEQ ID NO: 2495953 - RNA, 19 nt, Homo sapiens
  misc_RNA (1)...(19): siRNA sense strand
guugaaguucguagugauu

SEQ ID NO: 2495954 - RNA, 19 nt, Homo sapiens
  misc_RNA (1)...(19): siRNA sense strand
ugccaaacagaaagagaga

SEQ ID NO: 2495955 - RNA, 19 nt, Homo sapiens
  misc_RNA (1)...(19): siRNA sense strand
aguugaaguucguagugau

SEQ ID NO: 2495956 - RNA, 19 nt, Homo sapiens
  misc_RNA (1)...(19): siRNA sense strand
uggaaguaucagagccaca

SEQ ID NO: 2495957 - RNA, 19 nt, Homo sapiens
  misc_RNA (1)...(19): siRNA sense strand
ccgcagagacaaagaucgu

SEQ ID NO: 2495958 - RNA, 19 nt, Homo sapiens
  misc_RNA (1)...(19): siRNA sense strand
cgguggaccugcugugcuu

SEQ ID NO: 2495959 - RNA, 19 nt, Homo sapiens
  misc_RNA (1)...(19): siRNA sense strand
gcaugaagcuggaggaggg

SEQ ID NO: 2495960 - RNA, 19 nt, Homo sapiens
  misc_RNA (1)...(19): siRNA sense strand
augaggaggaagaggagga

SEQ ID NO: 2495961 - RNA, 19 nt, Homo sapiens
  misc_RNA (1)...(19): siRNA sense strand
aggaggaggaagaagagga

SEQ ID NO: 2495962 - RNA, 19 nt, Homo sapiens
  misc_RNA (1)...(19): siRNA sense strand
ccuaccagccguucagcaa

SEQ ID NO: 2495963 - RNA, 19 nt, Homo sapiens
  misc_RNA (1)...(19): siRNA sense strand
gacauggauaagaaugaaa

SEQ ID NO: 2495964 - RNA, 19 nt, Homo sapiens
  misc_RNA (1)...(19): siRNA sense strand
cacccgugauccaggacaa

SEQ ID NO: 2495965 - RNA, 19 nt, Homo sapiens
  misc_RNA (1)...(19): siRNA sense strand
ggcagaaaugggaucagaa

SEQ ID NO: 2495966 - RNA, 19 nt, Homo sapiens
  misc_RNA (1)...(19): siRNA sense strand
cuggauaaagcaagagcaa

SEQ ID NO: 2495967 - RNA, 19 nt, Homo sapiens
  misc_RNA (1)...(19): siRNA sense strand
cugcuaaaucugauagaau

SEQ ID NO: 2495968 - RNA, 19 nt, Homo sapiens
  misc_RNA (1)...(19): siRNA sense strand
uguuaaauggagacacaua

SEQ ID NO: 2495969 - RNA, 19 nt, Homo sapiens
  misc_RNA (1)...(19): siRNA sense strand
ucacaaagaugaaacagga

SEQ ID NO: 2495970 - RNA, 19 nt, Homo sapiens
  misc_RNA (1)...(19): siRNA sense strand
uggcaguguuaaauggaga

SEQ ID NO: 2495971 - RNA, 19 nt, Homo sapiens
  misc_RNA (1)...(19): siRNA sense strand
gaagcugaauauuuggcaa

SEQ ID NO: 2495972 - RNA, 19 nt, Homo sapiens
  misc_RNA (1)...(19): siRNA sense strand
aagcugaauauuuggcaau

SEQ ID NO: 2495973 - RNA, 19 nt, Homo sapiens
  misc_RNA (1)...(19): siRNA sense strand
gaguaaucguuucaggagu

SEQ ID NO: 2495974 - RNA, 19 nt, Homo sapiens
  misc_RNA (1)...(19): siRNA sense strand
caaagaugaaacaggaacu

SEQ ID NO: 2495975 - RNA, 19 nt, Homo sapiens
  misc_RNA (1)...(19): siRNA sense strand
aggaacuggaagcugaaua

SEQ ID NO: 2495976 - RNA, 19 nt, Homo sapiens
  misc_RNA (1)...(19): siRNA sense strand
ugugagugugcgaggaaaa

SEQ ID NO: 2495977 - RNA, 19 nt, Homo sapiens
  misc_RNA (1)...(19): siRNA sense strand
uggcaauauucaagaagac

SEQ ID NO: 2495978 - RNA, 19 nt, Homo sapiens
  misc_RNA (1)...(19): siRNA sense strand
uuucaggaguaaaggaugu

SEQ ID NO: 2495979 - RNA, 19 nt, Homo sapiens
  misc_RNA (1)...(19): siRNA sense strand
cugcaaaacaagaacuuau

SEQ ID NO: 2495980 - RNA, 19 nt, Homo sapiens
  misc_RNA (1)...(19): siRNA sense strand
cauuauaugcuuuaggaac

SEQ ID NO: 2495981 - RNA, 19 nt, Homo sapiens
  misc_RNA (1)...(19): siRNA sense strand
cuggauaaagcaagagcaa

SEQ ID NO: 2495982 - RNA, 19 nt, Homo sapiens
  misc_RNA (1)...(19): siRNA sense strand
acaaagaguucauugccaa

SEQ ID NO: 2495983 - RNA, 19 nt, Homo sapiens
  misc_RNA (1)...(19): siRNA sense strand
cugcuaaaucugauagaau

SEQ ID NO: 2495984 - RNA, 19 nt, Homo sapiens
  misc_RNA (1)...(19): siRNA sense strand
uguuaaauggagacacaua

SEQ ID NO: 2495985 - RNA, 19 nt, Homo sapiens
  misc_RNA (1)...(19): siRNA sense strand
uggugaaggagaaggguca

SEQ ID NO: 2495986 - RNA, 19 nt, Homo sapiens
  misc_RNA (1)...(19): siRNA sense strand
ucacaaagaugaaacagga

SEQ ID NO: 2495987 - RNA, 19 nt, Homo sapiens
  misc_RNA (1)...(19): siRNA sense strand
uggcaguguuaaauggaga

SEQ ID NO: 2495988 - RNA, 19 nt, Homo sapiens
  misc_RNA (1)...(19): siRNA sense strand
augaagacuaugcagguua

SEQ ID NO: 2495989 - RNA, 19 nt, Homo sapiens
  misc_RNA (1)...(19): siRNA sense strand
gaagcugaauauuuggcaa

SEQ ID NO: 2495990 - RNA, 19 nt, Homo sapiens
  misc_RNA (1)...(19): siRNA sense strand
aagcugaauauuuggcaau

SEQ ID NO: 2495991 - RNA, 19 nt, Homo sapiens
  misc_RNA (1)...(19): siRNA sense strand
caaagaugaaacaggaacu

SEQ ID NO: 2495992 - RNA, 19 nt, Homo sapiens
  misc_RNA (1)...(19): siRNA sense strand
aggaacuggaagcugaaua

SEQ ID NO: 2495993 - RNA, 19 nt, Homo sapiens
  misc_RNA (1)...(19): siRNA sense strand
gaguaaucguuucaggagu

SEQ ID NO: 2495994 - RNA, 19 nt, Homo sapiens
  misc_RNA (1)...(19): siRNA sense strand
agaagaggaccgcggacuu

SEQ ID NO: 2495995 - RNA, 19 nt, Homo sapiens
  misc_RNA (1)...(19): siRNA sense strand
ugugagugugcgaggaaaa

SEQ ID NO: 2495996 - RNA, 19 nt, Homo sapiens
  misc_RNA (1)...(19): siRNA sense strand
uggcaauauucaagaagac

SEQ ID NO: 2495997 - RNA, 19 nt, Homo sapiens
  misc_RNA (1)...(19): siRNA sense strand
uuucaggaguaaaggaugu

SEQ ID NO: 2495998 - RNA, 19 nt, Homo sapiens
  misc_RNA (1)...(19): siRNA sense strand
cugcaaaacaagaacuuau

SEQ ID NO: 2495999 - RNA, 19 nt, Homo sapiens
  misc_RNA (1)...(19): siRNA sense strand
agugagcgggauaaaguaa

SEQ ID NO: 2496000 - RNA, 19 nt, Homo sapiens
  misc_RNA (1)...(19): siRNA sense strand
cauuauaugcuuuaggaac

SEQ ID NO: 2496001 - RNA, 19 nt, Homo sapiens
  misc_RNA (1)...(19): siRNA sense strand
ucgaugagcuccagggcaa

SEQ ID NO: 2496002 - RNA, 19 nt, Homo sapiens
  misc_RNA (1)...(19): siRNA sense strand
ccauuaaauacgucagcca

SEQ ID NO: 2496003 - RNA, 19 nt, Homo sapiens
  misc_RNA (1)...(19): siRNA sense strand
gagaugagcagcacggcuu

SEQ ID NO: 2496004 - RNA, 19 nt, Homo sapiens
  misc_RNA (1)...(19): siRNA sense strand
cagcgugcucagaggauga

SEQ ID NO: 2496005 - RNA, 19 nt, Homo sapiens
  misc_RNA (1)...(19): siRNA sense strand
agggugagcaggcggaaga

SEQ ID NO: 2496006 - RNA, 19 nt, Homo sapiens
  misc_RNA (1)...(19): siRNA sense strand
ccgagaagcuccuggaagg

SEQ ID NO: 2496007 - RNA, 19 nt, Homo sapiens
  misc_RNA (1)...(19): siRNA sense strand
uguuugaggcagagcaguu

SEQ ID NO: 2496008 - RNA, 19 nt, Homo sapiens
  misc_RNA (1)...(19): siRNA sense strand
ucgaugagcuccagggcaa

SEQ ID NO: 2496009 - RNA, 19 nt, Homo sapiens
  misc_RNA (1)...(19): siRNA sense strand
ccauuaaauacgucagcca

SEQ ID NO: 2496010 - RNA, 19 nt, Homo sapiens
  misc_RNA (1)...(19): siRNA sense strand
gagaugagcagcacggcuu

SEQ ID NO: 2496011 - RNA, 19 nt, Homo sapiens
  misc_RNA (1)...(19): siRNA sense strand
cagcgugcucagaggauga

SEQ ID NO: 2496012 - RNA, 19 nt, Homo sapiens
  misc_RNA (1)...(19): siRNA sense strand
agggugagcaggcggaaga

SEQ ID NO: 2496013 - RNA, 19 nt, Homo sapiens
  misc_RNA (1)...(19): siRNA sense strand
ccgagaagcuccuggaagg

SEQ ID NO: 2496014 - RNA, 19 nt, Homo sapiens
  misc_RNA (1)...(19): siRNA sense strand
uguuugaggcagagcaguu

SEQ ID NO: 2496015 - RNA, 19 nt, Homo sapiens
  misc_RNA (1)...(19): siRNA sense strand
gggccaggaaagaagggaa

SEQ ID NO: 2496016 - RNA, 19 nt, Homo sapiens
  misc_RNA (1)...(19): siRNA sense strand
caacauaagagcaaggugu

SEQ ID NO: 2496017 - RNA, 19 nt, Homo sapiens
  misc_RNA (1)...(19): siRNA sense strand
ggccaggaaagaagggaau

SEQ ID NO: 2496018 - RNA, 19 nt, Homo sapiens
  misc_RNA (1)...(19): siRNA sense strand
gaguuuaagaugaugccua

SEQ ID NO: 2496019 - RNA, 19 nt, Homo sapiens
  misc_RNA (1)...(19): siRNA sense strand
ggcagcauuuagagagcaa

SEQ ID NO: 2496020 - RNA, 19 nt, Homo sapiens
  misc_RNA (1)...(19): siRNA sense strand
aggcucauuaucaggguaa

SEQ ID NO: 2496021 - RNA, 19 nt, Homo sapiens
  misc_RNA (1)...(19): siRNA sense strand
gguacaggaaugagaugga

SEQ ID NO: 2496022 - RNA, 19 nt, Homo sapiens
  misc_RNA (1)...(19): siRNA sense strand
cuggcgaagagauggaauu

SEQ ID NO: 2496023 - RNA, 19 nt, Homo sapiens
  misc_RNA (1)...(19): siRNA sense strand
auuuagagagcaagcaaca

SEQ ID NO: 2496024 - RNA, 19 nt, Homo sapiens
  misc_RNA (1)...(19): siRNA sense strand
gaugaugccuaacaggaga

SEQ ID NO: 2496025 - RNA, 19 nt, Homo sapiens
  misc_RNA (1)...(19): siRNA sense strand
gggccaggaaagaagggaa

SEQ ID NO: 2496026 - RNA, 19 nt, Homo sapiens
  misc_RNA (1)...(19): siRNA sense strand
caacauaagagcaaggugu

SEQ ID NO: 2496027 - RNA, 19 nt, Homo sapiens
  misc_RNA (1)...(19): siRNA sense strand
ggccaggaaagaagggaau

SEQ ID NO: 2496028 - RNA, 19 nt, Homo sapiens
  misc_RNA (1)...(19): siRNA sense strand
gaguuuaagaugaugccua

SEQ ID NO: 2496029 - RNA, 19 nt, Homo sapiens
  misc_RNA (1)...(19): siRNA sense strand
ggcagcauuuagagagcaa

SEQ ID NO: 2496030 - RNA, 19 nt, Homo sapiens
  misc_RNA (1)...(19): siRNA sense strand
aggcucauuaucaggguaa

SEQ ID NO: 2496031 - RNA, 19 nt, Homo sapiens
  misc_RNA (1)...(19): siRNA sense strand
gguacaggaaugagaugga

SEQ ID NO: 2496032 - RNA, 19 nt, Homo sapiens
  misc_RNA (1)...(19): siRNA sense strand
cuggcgaagagauggaauu

SEQ ID NO: 2496033 - RNA, 19 nt, Homo sapiens
  misc_RNA (1)...(19): siRNA sense strand
auuuagagagcaagcaaca

SEQ ID NO: 2496034 - RNA, 19 nt, Homo sapiens
  misc_RNA (1)...(19): siRNA sense strand
gaugaugccuaacaggaga

SEQ ID NO: 2496035 - RNA, 19 nt, Homo sapiens
  misc_RNA (1)...(19): siRNA sense strand
cagaaaaguccuacagaau

SEQ ID NO: 2496036 - RNA, 19 nt, Homo sapiens
  misc_RNA (1)...(19): siRNA sense strand
agaagaugaagaaggaaaa

SEQ ID NO: 2496037 - RNA, 19 nt, Homo sapiens
  misc_RNA (1)...(19): siRNA sense strand
gguacaacugccagaacuu

SEQ ID NO: 2496038 - RNA, 19 nt, Homo sapiens
  misc_RNA (1)...(19): siRNA sense strand
aacaacagaaagaggaauu

SEQ ID NO: 2496039 - RNA, 19 nt, Homo sapiens
  misc_RNA (1)...(19): siRNA sense strand
cccugaagaagaugaagaa

SEQ ID NO: 2496040 - RNA, 19 nt, Homo sapiens
  misc_RNA (1)...(19): siRNA sense strand
cuguguacgaagaagauau

SEQ ID NO: 2496041 - RNA, 19 nt, Homo sapiens
  misc_RNA (1)...(19): siRNA sense strand
cggaacaacagaaagagga

SEQ ID NO: 2496042 - RNA, 19 nt, Homo sapiens
  misc_RNA (1)...(19): siRNA sense strand
cagaagacauugaggcgug

SEQ ID NO: 2496043 - RNA, 19 nt, Homo sapiens
  misc_RNA (1)...(19): siRNA sense strand
gggcaagggaggagaagca

SEQ ID NO: 2496044 - RNA, 19 nt, Homo sapiens
  misc_RNA (1)...(19): siRNA sense strand
cugcaaagauccuggccau

SEQ ID NO: 2496045 - RNA, 19 nt, Homo sapiens
  misc_RNA (1)...(19): siRNA sense strand
aggaagaaacugugggacu

SEQ ID NO: 2496046 - RNA, 19 nt, Homo sapiens
  misc_RNA (1)...(19): siRNA sense strand
cauaugaagaagagauuga

SEQ ID NO: 2496047 - RNA, 19 nt, Homo sapiens
  misc_RNA (1)...(19): siRNA sense strand
aggcagagacuaugcgaga

SEQ ID NO: 2496048 - RNA, 19 nt, Homo sapiens
  misc_RNA (1)...(19): siRNA sense strand
ggcgagaggcagagacuau

SEQ ID NO: 2496049 - RNA, 19 nt, Homo sapiens
  misc_RNA (1)...(19): siRNA sense strand
aggaaggcucugucggaaa

SEQ ID NO: 2496050 - RNA, 19 nt, Homo sapiens
  misc_RNA (1)...(19): siRNA sense strand
gcgagagcgagaaggagaa

SEQ ID NO: 2496051 - RNA, 19 nt, Homo sapiens
  misc_RNA (1)...(19): siRNA sense strand
aggagaagaguuugauaau

SEQ ID NO: 2496052 - RNA, 19 nt, Homo sapiens
  misc_RNA (1)...(19): siRNA sense strand
ggucacaacuguaggcaag

SEQ ID NO: 2496053 - RNA, 19 nt, Homo sapiens
  misc_RNA (1)...(19): siRNA sense strand
ggacauuauccggagcaaa

SEQ ID NO: 2496054 - RNA, 19 nt, Homo sapiens
  misc_RNA (1)...(19): siRNA sense strand
agagagaggaggagcuuca

SEQ ID NO: 2496055 - RNA, 19 nt, Homo sapiens
  misc_RNA (1)...(19): siRNA sense strand
aaauagaggcagugcacca

SEQ ID NO: 2496056 - RNA, 19 nt, Homo sapiens
  misc_RNA (1)...(19): siRNA sense strand
agacuaugcgagagcgaga

SEQ ID NO: 2496057 - RNA, 19 nt, Homo sapiens
  misc_RNA (1)...(19): siRNA sense strand
acuucaaggucgacacuuu

SEQ ID NO: 2496058 - RNA, 19 nt, Homo sapiens
  misc_RNA (1)...(19): siRNA sense strand
agauugaaauggaagaagu

SEQ ID NO: 2496059 - RNA, 19 nt, Homo sapiens
  misc_RNA (1)...(19): siRNA sense strand
gacuauaaucugaacgaga

SEQ ID NO: 2496060 - RNA, 19 nt, Homo sapiens
  misc_RNA (1)...(19): siRNA sense strand
agucaagaagggugcaaga

SEQ ID NO: 2496061 - RNA, 19 nt, Homo sapiens
  misc_RNA (1)...(19): siRNA sense strand
acgaagaacugaggcgaga

SEQ ID NO: 2496062 - RNA, 19 nt, Homo sapiens
  misc_RNA (1)...(19): siRNA sense strand
agaaacuggagaugcuaua

SEQ ID NO: 2496063 - RNA, 19 nt, Homo sapiens
  misc_RNA (1)...(19): siRNA sense strand
agaacaaaugaacgaagaa

SEQ ID NO: 2496064 - RNA, 19 nt, Homo sapiens
  misc_RNA (1)...(19): siRNA sense strand
acguggaggcuguguguau

SEQ ID NO: 2496065 - RNA, 19 nt, Homo sapiens
  misc_RNA (1)...(19): siRNA sense strand
cugcauaugaagaagagau

SEQ ID NO: 2496066 - RNA, 19 nt, Homo sapiens
  misc_RNA (1)...(19): siRNA sense strand
aggcggaguuacaaugaau

SEQ ID NO: 2496067 - RNA, 19 nt, Homo sapiens
  misc_RNA (1)...(19): siRNA sense strand
ugauauuguuucuggccau

SEQ ID NO: 2496068 - RNA, 19 nt, Homo sapiens
  misc_RNA (1)...(19): siRNA sense strand
gauaaucaccugucgccaa

SEQ ID NO: 2496069 - RNA, 19 nt, Homo sapiens
  misc_RNA (1)...(19): siRNA sense strand
ucgccaagccgguggaagu

SEQ ID NO: 2496070 - RNA, 19 nt, Homo sapiens
  misc_RNA (1)...(19): siRNA sense strand
ccgaggucauuguggacau

SEQ ID NO: 2496071 - RNA, 19 nt, Homo sapiens
  misc_RNA (1)...(19): siRNA sense strand
cuucacagagacagagaga

SEQ ID NO: 2496072 - RNA, 19 nt, Homo sapiens
  misc_RNA (1)...(19): siRNA sense strand
uggaagugugcgacgacua

SEQ ID NO: 2496073 - RNA, 19 nt, Homo sapiens
  misc_RNA (1)...(19): siRNA sense strand
gacauuauccggagcaaaa

SEQ ID NO: 2496074 - RNA, 19 nt, Homo sapiens
  misc_RNA (1)...(19): siRNA sense strand
acucaucaguggcugcaaa

SEQ ID NO: 2496075 - RNA, 19 nt, Homo sapiens
  misc_RNA (1)...(19): siRNA sense strand
acgccaagagaaagcaauu

SEQ ID NO: 2496076 - RNA, 19 nt, Homo sapiens
  misc_RNA (1)...(19): siRNA sense strand
ggcuuaaacaggaagacuu

SEQ ID NO: 2496077 - RNA, 19 nt, Homo sapiens
  misc_RNA (1)...(19): siRNA sense strand
ggugcaagauggaaaauca

SEQ ID NO: 2496078 - RNA, 19 nt, Homo sapiens
  misc_RNA (1)...(19): siRNA sense strand
cccacgagcagcugaacaa

SEQ ID NO: 2496079 - RNA, 19 nt, Homo sapiens
  misc_RNA (1)...(19): siRNA sense strand
agauguggcuguugagaag

SEQ ID NO: 2496080 - RNA, 19 nt, Homo sapiens
  misc_RNA (1)...(19): siRNA sense strand
ugaaauagauacuggugac

SEQ ID NO: 2496081 - RNA, 19 nt, Homo sapiens
  misc_RNA (1)...(19): siRNA sense strand
gggaggagaagcaggugga

SEQ ID NO: 2496082 - RNA, 19 nt, Homo sapiens
  misc_RNA (1)...(19): siRNA sense strand
caacuguaggcaagacauu

SEQ ID NO: 2496083 - RNA, 19 nt, Homo sapiens
  misc_RNA (1)...(19): siRNA sense strand
guguguauugcaugguuua

SEQ ID NO: 2496084 - RNA, 19 nt, Homo sapiens
  misc_RNA (1)...(19): siRNA sense strand
cacgaaguccuguggagaa

SEQ ID NO: 2496085 - RNA, 19 nt, Homo sapiens
  misc_RNA (1)...(19): siRNA sense strand
gauaaaaggaagaaacugu

SEQ ID NO: 2496086 - RNA, 19 nt, Homo sapiens
  misc_RNA (1)...(19): siRNA sense strand
gggacuugcuggagaaacc

SEQ ID NO: 2496087 - RNA, 19 nt, Homo sapiens
  misc_RNA (1)...(19): siRNA sense strand
aauaaguaccaggagguua

SEQ ID NO: 2496088 - RNA, 19 nt, Homo sapiens
  misc_RNA (1)...(19): siRNA sense strand
uggaguaccuuuugcgauu

SEQ ID NO: 2496089 - RNA, 19 nt, Homo sapiens
  misc_RNA (1)...(19): siRNA sense strand
caaugaaaucaccaagaca

SEQ ID NO: 2496090 - RNA, 19 nt, Homo sapiens
  misc_RNA (1)...(19): siRNA sense strand
ccucucacuugcagaugaa

SEQ ID NO: 2496091 - RNA, 19 nt, Homo sapiens
  misc_RNA (1)...(19): siRNA sense strand
uuggacaacucaaugacaa

SEQ ID NO: 2496092 - RNA, 19 nt, Homo sapiens
  misc_RNA (1)...(19): siRNA sense strand
agaauaaguaccaggaggu

SEQ ID NO: 2496093 - RNA, 19 nt, Homo sapiens
  misc_RNA (1)...(19): siRNA sense strand
augaaaucaccaagacaca

SEQ ID NO: 2496094 - RNA, 19 nt, Homo sapiens
  misc_RNA (1)...(19): siRNA sense strand
agauacuggugacgacgaa

SEQ ID NO: 2496095 - RNA, 19 nt, Homo sapiens
  misc_RNA (1)...(19): siRNA sense strand
agaacugaggcgagaggca

SEQ ID NO: 2496096 - RNA, 19 nt, Homo sapiens
  misc_RNA (1)...(19): siRNA sense strand
ucgaaguauggaacugaua

SEQ ID NO: 2496097 - RNA, 19 nt, Homo sapiens
  misc_RNA (1)...(19): siRNA sense strand
ggagaacgcuggacaggcu

SEQ ID NO: 2496098 - RNA, 19 nt, Homo sapiens
  misc_RNA (1)...(19): siRNA sense strand
cggagaaaguggauggaga

SEQ ID NO: 2496099 - RNA, 19 nt, Homo sapiens
  misc_RNA (1)...(19): siRNA sense strand
gaacaaaguccaagcgcca

SEQ ID NO: 2496100 - RNA, 19 nt, Homo sapiens
  misc_RNA (1)...(19): siRNA sense strand
ggaacgauguggaaggugu

SEQ ID NO: 2496101 - RNA, 19 nt, Homo sapiens
  misc_RNA (1)...(19): siRNA sense strand
ucguugugguuaugcgaaa

SEQ ID NO: 2496102 - RNA, 19 nt, Homo sapiens
  misc_RNA (1)...(19): siRNA sense strand
agcaacaacucaacgggaa

SEQ ID NO: 2496103 - RNA, 19 nt, Homo sapiens
  misc_RNA (1)...(19): siRNA sense strand
ggagaaaguggauggagac

SEQ ID NO: 2496104 - RNA, 19 nt, Homo sapiens
  misc_RNA (1)...(19): siRNA sense strand
agaagaugacacugagacu

SEQ ID NO: 2496105 - RNA, 19 nt, Homo sapiens
  misc_RNA (1)...(19): siRNA sense strand
gagaaaguggauggagaca

SEQ ID NO: 2496106 - RNA, 19 nt, Homo sapiens
  misc_RNA (1)...(19): siRNA sense strand
cggagaaaguggauggaga

SEQ ID NO: 2496107 - RNA, 19 nt, Homo sapiens
  misc_RNA (1)...(19): siRNA sense strand
gaacaaaguccaagcgcca

SEQ ID NO: 2496108 - RNA, 19 nt, Homo sapiens
  misc_RNA (1)...(19): siRNA sense strand
ggaacgauguggaaggugu

SEQ ID NO: 2496109 - RNA, 19 nt, Homo sapiens
  misc_RNA (1)...(19): siRNA sense strand
ucguugugguuaugcgaaa

SEQ ID NO: 2496110 - RNA, 19 nt, Homo sapiens
  misc_RNA (1)...(19): siRNA sense strand
agcaacaacucaacgggaa

SEQ ID NO: 2496111 - RNA, 19 nt, Homo sapiens
  misc_RNA (1)...(19): siRNA sense strand
ggagaaaguggauggagac

SEQ ID NO: 2496112 - RNA, 19 nt, Homo sapiens
  misc_RNA (1)...(19): siRNA sense strand
agaagaugacacugagacu

SEQ ID NO: 2496113 - RNA, 19 nt, Homo sapiens
  misc_RNA (1)...(19): siRNA sense strand
gagaaaguggauggagaca

SEQ ID NO: 2496114 - RNA, 19 nt, Homo sapiens
  misc_RNA (1)...(19): siRNA sense strand
gcggaugagcugagcguug

SEQ ID NO: 2496115 - RNA, 19 nt, Homo sapiens
  misc_RNA (1)...(19): siRNA sense strand
ccaauaacccagcagccaa

SEQ ID NO: 2496116 - RNA, 19 nt, Homo sapiens
  misc_RNA (1)...(19): siRNA sense strand
gcggaugagcugagcguug

SEQ ID NO: 2496117 - RNA, 19 nt, Homo sapiens
  misc_RNA (1)...(19): siRNA sense strand
ucaccgagaggcaggucaa

SEQ ID NO: 2496118 - RNA, 19 nt, Homo sapiens
  misc_RNA (1)...(19): siRNA sense strand
cugaagaccaagagaguga

SEQ ID NO: 2496119 - RNA, 19 nt, Homo sapiens
  misc_RNA (1)...(19): siRNA sense strand
agaccaagagagugaccaa

SEQ ID NO: 2496120 - RNA, 19 nt, Homo sapiens
  misc_RNA (1)...(19): siRNA sense strand
ccaagagagugaccaagaa

SEQ ID NO: 2496121 - RNA, 19 nt, Homo sapiens
  misc_RNA (1)...(19): siRNA sense strand
augugaugcugaagaccaa

SEQ ID NO: 2496122 - RNA, 19 nt, Homo sapiens
  misc_RNA (1)...(19): siRNA sense strand
agaucgaccuggagggcaa

SEQ ID NO: 2496123 - RNA, 19 nt, Homo sapiens
  misc_RNA (1)...(19): siRNA sense strand
ggaagaugcuggacgccaa

SEQ ID NO: 2496124 - RNA, 19 nt, Homo sapiens
  misc_RNA (1)...(19): siRNA sense strand
gugaagaaguccucgguga

SEQ ID NO: 2496125 - RNA, 19 nt, Homo sapiens
  misc_RNA (1)...(19): siRNA sense strand
ccaagaagagggagggcga

SEQ ID NO: 2496126 - RNA, 19 nt, Homo sapiens
  misc_RNA (1)...(19): siRNA sense strand
gggaggaagaggaggagga

SEQ ID NO: 2496127 - RNA, 19 nt, Homo sapiens
  misc_RNA (1)...(19): siRNA sense strand
gagcaggagaugacggaga

SEQ ID NO: 2496128 - RNA, 19 nt, Homo sapiens
  misc_RNA (1)...(19): siRNA sense strand
cagaguuggacgaggucaa

SEQ ID NO: 2496129 - RNA, 19 nt, Homo sapiens
  misc_RNA (1)...(19): siRNA sense strand
cggugaugcgugagaauga

SEQ ID NO: 2496130 - RNA, 19 nt, Homo sapiens
  misc_RNA (1)...(19): siRNA sense strand
gggcagaguuggacgaggu

SEQ ID NO: 2496131 - RNA, 19 nt, Homo sapiens
  misc_RNA (1)...(19): siRNA sense strand
gcgucagcaucgaggagau

SEQ ID NO: 2496132 - RNA, 19 nt, Homo sapiens
  misc_RNA (1)...(19): siRNA sense strand
gcagauagagauugggaag

SEQ ID NO: 2496133 - RNA, 19 nt, Homo sapiens
  misc_RNA (1)...(19): siRNA sense strand
ccuacaaguucacgcccaa

SEQ ID NO: 2496134 - RNA, 19 nt, Homo sapiens
  misc_RNA (1)...(19): siRNA sense strand
cccuggacauggagaucaa

SEQ ID NO: 2496135 - RNA, 19 nt, Homo sapiens
  misc_RNA (1)...(19): siRNA sense strand
acgccaaggagcaggagau

SEQ ID NO: 2496136 - RNA, 19 nt, Homo sapiens
  misc_RNA (1)...(19): siRNA sense strand
aggaagaggaggaggaagc

SEQ ID NO: 2496137 - RNA, 19 nt, Homo sapiens
  misc_RNA (1)...(19): siRNA sense strand
acauggagaucaacgccua

SEQ ID NO: 2496138 - RNA, 19 nt, Homo sapiens
  misc_RNA (1)...(19): siRNA sense strand
gagcagaccuaccaggcca

SEQ ID NO: 2496139 - RNA, 19 nt, Homo sapiens
  misc_RNA (1)...(19): siRNA sense strand
ggaagaguguguucgagga

SEQ ID NO: 2496140 - RNA, 19 nt, Homo sapiens
  misc_RNA (1)...(19): siRNA sense strand
gaggagaggcugaagcugu

SEQ ID NO: 2496141 - RNA, 19 nt, Homo sapiens
  misc_RNA (1)...(19): siRNA sense strand
agaucaacgccuaccggaa

SEQ ID NO: 2496142 - RNA, 19 nt, Homo sapiens
  misc_RNA (1)...(19): siRNA sense strand
cuggggaacuggagaauca

SEQ ID NO: 2496143 - RNA, 19 nt, Homo sapiens
  misc_RNA (1)...(19): siRNA sense strand
agaguguguucgaggagga

SEQ ID NO: 2496144 - RNA, 19 nt, Homo sapiens
  misc_RNA (1)...(19): siRNA sense strand
gagccagcacgacgagcaa

SEQ ID NO: 2496145 - RNA, 19 nt, Homo sapiens
  misc_RNA (1)...(19): siRNA sense strand
agaaggaggagcugcgcga

SEQ ID NO: 2496146 - RNA, 19 nt, Homo sapiens
  misc_RNA (1)...(19): siRNA sense strand
cuccauuguuugugggaaa

SEQ ID NO: 2496147 - RNA, 19 nt, Homo sapiens
  misc_RNA (1)...(19): siRNA sense strand
gggacagggagaagagaga

SEQ ID NO: 2496148 - RNA, 19 nt, Homo sapiens
  misc_RNA (1)...(19): siRNA sense strand
cuguaguaacuguaagaaa

SEQ ID NO: 2496149 - RNA, 19 nt, Homo sapiens
  misc_RNA (1)...(19): siRNA sense strand
cuccaaaugccgaaaggaa

SEQ ID NO: 2496150 - RNA, 19 nt, Homo sapiens
  misc_RNA (1)...(19): siRNA sense strand
gccgaaaggaaauggguca

SEQ ID NO: 2496151 - RNA, 19 nt, Homo sapiens
  misc_RNA (1)...(19): siRNA sense strand
gauacggacugcagggagu

SEQ ID NO: 2496152 - RNA, 19 nt, Homo sapiens
  misc_RNA (1)...(19): siRNA sense strand
uggagcuguuggugggaau

SEQ ID NO: 2496153 - RNA, 19 nt, Homo sapiens
  misc_RNA (1)...(19): siRNA sense strand
aggaaaugggucaggugga

SEQ ID NO: 2496154 - RNA, 19 nt, Homo sapiens
  misc_RNA (1)...(19): siRNA sense strand
ggaagaaccaguaccggca

SEQ ID NO: 2496155 - RNA, 19 nt, Homo sapiens
  misc_RNA (1)...(19): siRNA sense strand
cagaaaaccaccucagaca

SEQ ID NO: 2496156 - RNA, 19 nt, Homo sapiens
  misc_RNA (1)...(19): siRNA sense strand
ugaaggaugagaugggcaa

SEQ ID NO: 2496157 - RNA, 19 nt, Homo sapiens
  misc_RNA (1)...(19): siRNA sense strand
gagaugaaccugcuggaga

SEQ ID NO: 2496158 - RNA, 19 nt, Homo sapiens
  misc_RNA (1)...(19): siRNA sense strand
ucaagagcuucgagagcca

SEQ ID NO: 2496159 - RNA, 19 nt, Homo sapiens
  misc_RNA (1)...(19): siRNA sense strand
cccgaggagcugaggguuu

SEQ ID NO: 2496160 - RNA, 19 nt, Homo sapiens
  misc_RNA (1)...(19): siRNA sense strand
gagaaaacuggaagaagau

SEQ ID NO: 2496161 - RNA, 19 nt, Homo sapiens
  misc_RNA (1)...(19): siRNA sense strand
ccaaagacggcuugcagca

SEQ ID NO: 2496162 - RNA, 19 nt, Homo sapiens
  misc_RNA (1)...(19): siRNA sense strand
gccucaugcugguggacuu

SEQ ID NO: 2496163 - RNA, 19 nt, Homo sapiens
  misc_RNA (1)...(19): siRNA sense strand
caaagaaaggugagacccu

SEQ ID NO: 2496164 - RNA, 19 nt, Homo sapiens
  misc_RNA (1)...(19): siRNA sense strand
gggcuuugacauugggaac

SEQ ID NO: 2496165 - RNA, 19 nt, Homo sapiens
  misc_RNA (1)...(19): siRNA sense strand
cuggagauguacagccuga

SEQ ID NO: 2496166 - RNA, 19 nt, Homo sapiens
  misc_RNA (1)...(19): siRNA sense strand
cagucuaagugcccggaca

SEQ ID NO: 2496167 - RNA, 19 nt, Homo sapiens
  misc_RNA (1)...(19): siRNA sense strand
cccgaggagcugaggguuu

SEQ ID NO: 2496168 - RNA, 19 nt, Homo sapiens
  misc_RNA (1)...(19): siRNA sense strand
ccaaagacggcuugcagca

SEQ ID NO: 2496169 - RNA, 19 nt, Homo sapiens
  misc_RNA (1)...(19): siRNA sense strand
cagucuaagugcccggaca

SEQ ID NO: 2496170 - RNA, 19 nt, Homo sapiens
  misc_RNA (1)...(19): siRNA sense strand
uggcaaagaagaaagcuga

SEQ ID NO: 2496171 - RNA, 19 nt, Homo sapiens
  misc_RNA (1)...(19): siRNA sense strand
cuaaggaugagcuggguga

SEQ ID NO: 2496172 - RNA, 19 nt, Homo sapiens
  misc_RNA (1)...(19): siRNA sense strand
aagauaugugggagcagaa

SEQ ID NO: 2496173 - RNA, 19 nt, Homo sapiens
  misc_RNA (1)...(19): siRNA sense strand
ucgcauaacagaagcugau

SEQ ID NO: 2496174 - RNA, 19 nt, Homo sapiens
  misc_RNA (1)...(19): siRNA sense strand
ggggagacccuucgaggaa

SEQ ID NO: 2496175 - RNA, 19 nt, Homo sapiens
  misc_RNA (1)...(19): siRNA sense strand
auaugugggagcagaaauu

SEQ ID NO: 2496176 - RNA, 19 nt, Homo sapiens
  misc_RNA (1)...(19): siRNA sense strand
ucagagagaaguuuggaga

SEQ ID NO: 2496177 - RNA, 19 nt, Homo sapiens
  misc_RNA (1)...(19): siRNA sense strand
ggaugagcugggugacuau

SEQ ID NO: 2496178 - RNA, 19 nt, Homo sapiens
  misc_RNA (1)...(19): siRNA sense strand
ccuguuagucagagagaag

SEQ ID NO: 2496179 - RNA, 19 nt, Homo sapiens
  misc_RNA (1)...(19): siRNA sense strand
caggcaaugcggacagaga

SEQ ID NO: 2496180 - RNA, 19 nt, Homo sapiens
  misc_RNA (1)...(19): siRNA sense strand
augaugaagaagaugaaca

SEQ ID NO: 2496181 - RNA, 19 nt, Homo sapiens
  misc_RNA (1)...(19): siRNA sense strand
gaagauaugugggagcaga

SEQ ID NO: 2496182 - RNA, 19 nt, Homo sapiens
  misc_RNA (1)...(19): siRNA sense strand
ccuucgaggaacagcugaa

SEQ ID NO: 2496183 - RNA, 19 nt, Homo sapiens
  misc_RNA (1)...(19): siRNA sense strand
augaagaagaugaacagga

SEQ ID NO: 2496184 - RNA, 19 nt, Homo sapiens
  misc_RNA (1)...(19): siRNA sense strand
uggcgcaagauuuggaaga

SEQ ID NO: 2496185 - RNA, 19 nt, Homo sapiens
  misc_RNA (1)...(19): siRNA sense strand
acacagaugaugagggaca

SEQ ID NO: 2496186 - RNA, 19 nt, Homo sapiens
  misc_RNA (1)...(19): siRNA sense strand
cugagaaggaugaggacga

SEQ ID NO: 2496187 - RNA, 19 nt, Homo sapiens
  misc_RNA (1)...(19): siRNA sense strand
acgaggagcucaagcguga

SEQ ID NO: 2496188 - RNA, 19 nt, Homo sapiens
  misc_RNA (1)...(19): siRNA sense strand
uggagagagccaagaggaa

SEQ ID NO: 2496189 - RNA, 19 nt, Homo sapiens
  misc_RNA (1)...(19): siRNA sense strand
agagcaaaccaaaggaaga

SEQ ID NO: 2496190 - RNA, 19 nt, Homo sapiens
  misc_RNA (1)...(19): siRNA sense strand
agacaaaguacaagauaac

SEQ ID NO: 2496191 - RNA, 19 nt, Homo sapiens
  misc_RNA (1)...(19): siRNA sense strand
agugcaaacuugagaacca

SEQ ID NO: 2496192 - RNA, 19 nt, Homo sapiens
  misc_RNA (1)...(19): siRNA sense strand
agaauauggguaagaaaga

SEQ ID NO: 2496193 - RNA, 19 nt, Homo sapiens
  misc_RNA (1)...(19): siRNA sense strand
auaaggagcagaagagaca

SEQ ID NO: 2496194 - RNA, 19 nt, Homo sapiens
  misc_RNA (1)...(19): siRNA sense strand
gagcagaagagacaggaga

SEQ ID NO: 2496195 - RNA, 19 nt, Homo sapiens
  misc_RNA (1)...(19): siRNA sense strand
agaugaacgaggagcucaa

SEQ ID NO: 2496196 - RNA, 19 nt, Homo sapiens
  misc_RNA (1)...(19): siRNA sense strand
ccugagaaacacacagcaa

SEQ ID NO: 2496197 - RNA, 19 nt, Homo sapiens
  misc_RNA (1)...(19): siRNA sense strand
agacacagaugaugaggga

SEQ ID NO: 2496198 - RNA, 19 nt, Homo sapiens
  misc_RNA (1)...(19): siRNA sense strand
agucagcagcacagagcaa

SEQ ID NO: 2496199 - RNA, 19 nt, Homo sapiens
  misc_RNA (1)...(19): siRNA sense strand
aacuugaaauggagaguau

SEQ ID NO: 2496200 - RNA, 19 nt, Homo sapiens
  misc_RNA (1)...(19): siRNA sense strand
gcuacaaugaguugggcuu

SEQ ID NO: 2496201 - RNA, 19 nt, Homo sapiens
  misc_RNA (1)...(19): siRNA sense strand
cccaagaguuccaugaaaa

SEQ ID NO: 2496202 - RNA, 19 nt, Homo sapiens
  misc_RNA (1)...(19): siRNA sense strand
gggacaagaucggagaaaa

SEQ ID NO: 2496203 - RNA, 19 nt, Homo sapiens
  misc_RNA (1)...(19): siRNA sense strand
gcacacgagaucagagcau

SEQ ID NO: 2496204 - RNA, 19 nt, Homo sapiens
  misc_RNA (1)...(19): siRNA sense strand
ggaaauggacaaagaggac

SEQ ID NO: 2496205 - RNA, 19 nt, Homo sapiens
  misc_RNA (1)...(19): siRNA sense strand
ucaacuucauggaggguga

SEQ ID NO: 2496206 - RNA, 19 nt, Homo sapiens
  misc_RNA (1)...(19): siRNA sense strand
aggaugaggacgacaccaa

SEQ ID NO: 2496207 - RNA, 19 nt, Homo sapiens
  misc_RNA (1)...(19): siRNA sense strand
ucuccuaacaaauggaaau

SEQ ID NO: 2496208 - RNA, 19 nt, Homo sapiens
  misc_RNA (1)...(19): siRNA sense strand
aacaaauggaaauggacaa

SEQ ID NO: 2496209 - RNA, 19 nt, Homo sapiens
  misc_RNA (1)...(19): siRNA sense strand
guagguuuguggaggccaa

SEQ ID NO: 2496210 - RNA, 19 nt, Homo sapiens
  misc_RNA (1)...(19): siRNA sense strand
acuacagccucgacgacaa

SEQ ID NO: 2496211 - RNA, 19 nt, Homo sapiens
  misc_RNA (1)...(19): siRNA sense strand
acaaauggaaauggacaaa

SEQ ID NO: 2496212 - RNA, 19 nt, Homo sapiens
  misc_RNA (1)...(19): siRNA sense strand
cagcaauagcguucaacuu

SEQ ID NO: 2496213 - RNA, 19 nt, Homo sapiens
  misc_RNA (1)...(19): siRNA sense strand
uaacaaauggaaauggaca

SEQ ID NO: 2496214 - RNA, 19 nt, Homo sapiens
  misc_RNA (1)...(19): siRNA sense strand
acgcagacacagaugauga

SEQ ID NO: 2496215 - RNA, 19 nt, Homo sapiens
  misc_RNA (1)...(19): siRNA sense strand
uuggaagacauguacaaua

SEQ ID NO: 2496216 - RNA, 19 nt, Homo sapiens
  misc_RNA (1)...(19): siRNA sense strand
ccauugacuuguuggccau

SEQ ID NO: 2496217 - RNA, 19 nt, Homo sapiens
  misc_RNA (1)...(19): siRNA sense strand
gguaagaaagacaaaguac

SEQ ID NO: 2496218 - RNA, 19 nt, Homo sapiens
  misc_RNA (1)...(19): siRNA sense strand
aguuggaagacauguacaa

SEQ ID NO: 2496219 - RNA, 19 nt, Homo sapiens
  misc_RNA (1)...(19): siRNA sense strand
aggaauggcagcaucguau

SEQ ID NO: 2496220 - RNA, 19 nt, Homo sapiens
  misc_RNA (1)...(19): siRNA sense strand
ugccaguggugguagguuu

SEQ ID NO: 2496221 - RNA, 19 nt, Homo sapiens
  misc_RNA (1)...(19): siRNA sense strand
aaaccaaggaacagggauc

SEQ ID NO: 2496222 - RNA, 19 nt, Homo sapiens
  misc_RNA (1)...(19): siRNA sense strand
gggaaggcgaggaguucga

SEQ ID NO: 2496223 - RNA, 19 nt, Homo sapiens
  misc_RNA (1)...(19): siRNA sense strand
acaaaguacaagauaacca

SEQ ID NO: 2496224 - RNA, 19 nt, Homo sapiens
  misc_RNA (1)...(19): siRNA sense strand
agcagaagagacaggagaa

SEQ ID NO: 2496225 - RNA, 19 nt, Homo sapiens
  misc_RNA (1)...(19): siRNA sense strand
ccucaauaccaaggaguca

SEQ ID NO: 2496226 - RNA, 19 nt, Homo sapiens
  misc_RNA (1)...(19): siRNA sense strand
gcgaaguaugucaagcauu

SEQ ID NO: 2496227 - RNA, 19 nt, Homo sapiens
  misc_RNA (1)...(19): siRNA sense strand
uggacauugugguugagaa

SEQ ID NO: 2496228 - RNA, 19 nt, Homo sapiens
  misc_RNA (1)...(19): siRNA sense strand
uggaaauggacaaagagga

SEQ ID NO: 2496229 - RNA, 19 nt, Homo sapiens
  misc_RNA (1)...(19): siRNA sense strand
aaucaaacggcgagaggcu

SEQ ID NO: 2496230 - RNA, 19 nt, Homo sapiens
  misc_RNA (1)...(19): siRNA sense strand
acguggaggccgugugcau

SEQ ID NO: 2496231 - RNA, 19 nt, Homo sapiens
  misc_RNA (1)...(19): siRNA sense strand
aaggcgaggaguucgauaa

SEQ ID NO: 2496232 - RNA, 19 nt, Homo sapiens
  misc_RNA (1)...(19): siRNA sense strand
gcaucguauccaugaacau

SEQ ID NO: 2496233 - RNA, 19 nt, Homo sapiens
  misc_RNA (1)...(19): siRNA sense strand
ucguguauguggugggaaa

SEQ ID NO: 2496234 - RNA, 19 nt, Homo sapiens
  misc_RNA (1)...(19): siRNA sense strand
ggggcaagcaguuggaaaa

SEQ ID NO: 2496235 - RNA, 19 nt, Homo sapiens
  misc_RNA (1)...(19): siRNA sense strand
acugaaagccgaagagacu

SEQ ID NO: 2496236 - RNA, 19 nt, Homo sapiens
  misc_RNA (1)...(19): siRNA sense strand
ugguauuccuguuggauca

SEQ ID NO: 2496237 - RNA, 19 nt, Homo sapiens
  misc_RNA (1)...(19): siRNA sense strand
aauccaaagagaacacaaa

SEQ ID NO: 2496238 - RNA, 19 nt, Homo sapiens
  misc_RNA (1)...(19): siRNA sense strand
uggacagucacguggcaaa

SEQ ID NO: 2496239 - RNA, 19 nt, Homo sapiens
  misc_RNA (1)...(19): siRNA sense strand
aagacaaucucaaggacca

SEQ ID NO: 2496240 - RNA, 19 nt, Homo sapiens
  misc_RNA (1)...(19): siRNA sense strand
ugagagaccuggagcccau

SEQ ID NO: 2496241 - RNA, 19 nt, Homo sapiens
  misc_RNA (1)...(19): siRNA sense strand
augaauguaauguggcuua

SEQ ID NO: 2496242 - RNA, 19 nt, Homo sapiens
  misc_RNA (1)...(19): siRNA sense strand
aaagaaagcuccgagggua

SEQ ID NO: 2496243 - RNA, 19 nt, Homo sapiens
  misc_RNA (1)...(19): siRNA sense strand
uguaaaaggacuaauggaa

SEQ ID NO: 2496244 - RNA, 19 nt, Homo sapiens
  misc_RNA (1)...(19): siRNA sense strand
uccaaagagaacacaaaua

SEQ ID NO: 2496245 - RNA, 19 nt, Homo sapiens
  misc_RNA (1)...(19): siRNA sense strand
aauucauggucgaaguaau

SEQ ID NO: 2496246 - RNA, 19 nt, Homo sapiens
  misc_RNA (1)...(19): siRNA sense strand
ucuuauugauccuggcuuu

SEQ ID NO: 2496247 - RNA, 19 nt, Homo sapiens
  misc_RNA (1)...(19): siRNA sense strand
cuguguugcugcugaugaa

SEQ ID NO: 2496248 - RNA, 19 nt, Homo sapiens
  misc_RNA (1)...(19): siRNA sense strand
ugucaaggaucuuagacca

SEQ ID NO: 2496249 - RNA, 19 nt, Homo sapiens
  misc_RNA (1)...(19): siRNA sense strand
ucuuagaccacgagcuaga

SEQ ID NO: 2496250 - RNA, 19 nt, Homo sapiens
  misc_RNA (1)...(19): siRNA sense strand
cggccuuggugcuugguuu

SEQ ID NO: 2496251 - RNA, 19 nt, Homo sapiens
  misc_RNA (1)...(19): siRNA sense strand
ugauccuggcuuuggaaua

SEQ ID NO: 2496252 - RNA, 19 nt, Homo sapiens
  misc_RNA (1)...(19): siRNA sense strand
agguaaaugaauuggugga

SEQ ID NO: 2496253 - RNA, 19 nt, Homo sapiens
  misc_RNA (1)...(19): siRNA sense strand
ggcuaaacccuguucuaau

SEQ ID NO: 2496254 - RNA, 19 nt, Homo sapiens
  misc_RNA (1)...(19): siRNA sense strand
gguuugaagcacacauaca

SEQ ID NO: 2496255 - RNA, 19 nt, Homo sapiens
  misc_RNA (1)...(19): siRNA sense strand
cucuagaaaugaaugucaa

SEQ ID NO: 2496256 - RNA, 19 nt, Homo sapiens
  misc_RNA (1)...(19): siRNA sense strand
cgauugaggagcugcgcga

SEQ ID NO: 2496257 - RNA, 19 nt, Homo sapiens
  misc_RNA (1)...(19): siRNA sense strand
agcauaaauccaaagagaa

SEQ ID NO: 2496258 - RNA, 19 nt, Homo sapiens
  misc_RNA (1)...(19): siRNA sense strand
aagaaagcuccgaggguag

SEQ ID NO: 2496259 - RNA, 19 nt, Homo sapiens
  misc_RNA (1)...(19): siRNA sense strand
guggagacccagaaaagaa

SEQ ID NO: 2496260 - RNA, 19 nt, Homo sapiens
  misc_RNA (1)...(19): siRNA sense strand
ucguguauguggugggaaa

SEQ ID NO: 2496261 - RNA, 19 nt, Homo sapiens
  misc_RNA (1)...(19): siRNA sense strand
ggaagaagccuaaaggaca

SEQ ID NO: 2496262 - RNA, 19 nt, Homo sapiens
  misc_RNA (1)...(19): siRNA sense strand
cugaagaaggcaacagaua

SEQ ID NO: 2496263 - RNA, 19 nt, Homo sapiens
  misc_RNA (1)...(19): siRNA sense strand
gggaggaagaucagcaaau

SEQ ID NO: 2496264 - RNA, 19 nt, Homo sapiens
  misc_RNA (1)...(19): siRNA sense strand
ggggcaagcaguuggaaaa

SEQ ID NO: 2496265 - RNA, 19 nt, Homo sapiens
  misc_RNA (1)...(19): siRNA sense strand
ccuaaaggacagucaaaga

SEQ ID NO: 2496266 - RNA, 19 nt, Homo sapiens
  misc_RNA (1)...(19): siRNA sense strand
gcauuuauaagguggugaa

SEQ ID NO: 2496267 - RNA, 19 nt, Homo sapiens
  misc_RNA (1)...(19): siRNA sense strand
ccacaaugucuguaaagau

SEQ ID NO: 2496268 - RNA, 19 nt, Homo sapiens
  misc_RNA (1)...(19): siRNA sense strand
cagauaaagaagggaagaa

SEQ ID NO: 2496269 - RNA, 19 nt, Homo sapiens
  misc_RNA (1)...(19): siRNA sense strand
acugaaagccgaagagacu

SEQ ID NO: 2496270 - RNA, 19 nt, Homo sapiens
  misc_RNA (1)...(19): siRNA sense strand
cacuggaagcggugguaaa

SEQ ID NO: 2496271 - RNA, 19 nt, Homo sapiens
  misc_RNA (1)...(19): siRNA sense strand
ugguauuccuguuggauca

SEQ ID NO: 2496272 - RNA, 19 nt, Homo sapiens
  misc_RNA (1)...(19): siRNA sense strand
agguuacccuucagauaaa

SEQ ID NO: 2496273 - RNA, 19 nt, Homo sapiens
  misc_RNA (1)...(19): siRNA sense strand
aagaagggaagaagccuaa

SEQ ID NO: 2496274 - RNA, 19 nt, Homo sapiens
  misc_RNA (1)...(19): siRNA sense strand
gggaagaagccuaaaggac

SEQ ID NO: 2496275 - RNA, 19 nt, Homo sapiens
  misc_RNA (1)...(19): siRNA sense strand
aauccaaagagaacacaaa

SEQ ID NO: 2496276 - RNA, 19 nt, Homo sapiens
  misc_RNA (1)...(19): siRNA sense strand
caugauucccaaugagauu

SEQ ID NO: 2496277 - RNA, 19 nt, Homo sapiens
  misc_RNA (1)...(19): siRNA sense strand
uggacagucacguggcaaa

SEQ ID NO: 2496278 - RNA, 19 nt, Homo sapiens
  misc_RNA (1)...(19): siRNA sense strand
aagacaaucucaaggacca

SEQ ID NO: 2496279 - RNA, 19 nt, Homo sapiens
  misc_RNA (1)...(19): siRNA sense strand
ugagagaccuggagcccau

SEQ ID NO: 2496280 - RNA, 19 nt, Homo sapiens
  misc_RNA (1)...(19): siRNA sense strand
augaauguaauguggcuua

SEQ ID NO: 2496281 - RNA, 19 nt, Homo sapiens
  misc_RNA (1)...(19): siRNA sense strand
caucagagaagauugucaa

SEQ ID NO: 2496282 - RNA, 19 nt, Homo sapiens
  misc_RNA (1)...(19): siRNA sense strand
aaagaagggaagaagccua

SEQ ID NO: 2496283 - RNA, 19 nt, Homo sapiens
  misc_RNA (1)...(19): siRNA sense strand
aaagaaagcuccgagggua

SEQ ID NO: 2496284 - RNA, 19 nt, Homo sapiens
  misc_RNA (1)...(19): siRNA sense strand
uguaaaaggacuaauggaa

SEQ ID NO: 2496285 - RNA, 19 nt, Homo sapiens
  misc_RNA (1)...(19): siRNA sense strand
uccaaagagaacacaaaua

SEQ ID NO: 2496286 - RNA, 19 nt, Homo sapiens
  misc_RNA (1)...(19): siRNA sense strand
gaggaagaucagcaaauau

SEQ ID NO: 2496287 - RNA, 19 nt, Homo sapiens
  misc_RNA (1)...(19): siRNA sense strand
aauucauggucgaaguaau

SEQ ID NO: 2496288 - RNA, 19 nt, Homo sapiens
  misc_RNA (1)...(19): siRNA sense strand
uuuaaagggaggaagauca

SEQ ID NO: 2496289 - RNA, 19 nt, Homo sapiens
  misc_RNA (1)...(19): siRNA sense strand
gcaacagauaugauggcau

SEQ ID NO: 2496290 - RNA, 19 nt, Homo sapiens
  misc_RNA (1)...(19): siRNA sense strand
gcaugaucuuggccagaau

SEQ ID NO: 2496291 - RNA, 19 nt, Homo sapiens
  misc_RNA (1)...(19): siRNA sense strand
ucuuauugauccuggcuuu

SEQ ID NO: 2496292 - RNA, 19 nt, Homo sapiens
  misc_RNA (1)...(19): siRNA sense strand
cuguguugcugcugaugaa

SEQ ID NO: 2496293 - RNA, 19 nt, Homo sapiens
  misc_RNA (1)...(19): siRNA sense strand
ugucaaggaucuuagacca

SEQ ID NO: 2496294 - RNA, 19 nt, Homo sapiens
  misc_RNA (1)...(19): siRNA sense strand
ucuuagaccacgagcuaga

SEQ ID NO: 2496295 - RNA, 19 nt, Homo sapiens
  misc_RNA (1)...(19): siRNA sense strand
acaaacaugaacagggcau

SEQ ID NO: 2496296 - RNA, 19 nt, Homo sapiens
  misc_RNA (1)...(19): siRNA sense strand
cggccuuggugcuugguuu

SEQ ID NO: 2496297 - RNA, 19 nt, Homo sapiens
  misc_RNA (1)...(19): siRNA sense strand
auagaacggucaaggagau

SEQ ID NO: 2496298 - RNA, 19 nt, Homo sapiens
  misc_RNA (1)...(19): siRNA sense strand
ugauccuggcuuuggaaua

SEQ ID NO: 2496299 - RNA, 19 nt, Homo sapiens
  misc_RNA (1)...(19): siRNA sense strand
agguaaaugaauuggugga

SEQ ID NO: 2496300 - RNA, 19 nt, Homo sapiens
  misc_RNA (1)...(19): siRNA sense strand
ggcuaaacccuguucuaau

SEQ ID NO: 2496301 - RNA, 19 nt, Homo sapiens
  misc_RNA (1)...(19): siRNA sense strand
gguuugaagcacacauaca

SEQ ID NO: 2496302 - RNA, 19 nt, Homo sapiens
  misc_RNA (1)...(19): siRNA sense strand
ccucagagauggauggauc

SEQ ID NO: 2496303 - RNA, 19 nt, Homo sapiens
  misc_RNA (1)...(19): siRNA sense strand
uuugcauacugcugggaaa

SEQ ID NO: 2496304 - RNA, 19 nt, Homo sapiens
  misc_RNA (1)...(19): siRNA sense strand
ggggagagccugagugcuu

SEQ ID NO: 2496305 - RNA, 19 nt, Homo sapiens
  misc_RNA (1)...(19): siRNA sense strand
gugcaaugaaggucagcca

SEQ ID NO: 2496306 - RNA, 19 nt, Homo sapiens
  misc_RNA (1)...(19): siRNA sense strand
cggcauagccugugggaca

SEQ ID NO: 2496307 - RNA, 19 nt, Homo sapiens
  misc_RNA (1)...(19): siRNA sense strand
cuuagaagcucuuuggaaa

SEQ ID NO: 2496308 - RNA, 19 nt, Homo sapiens
  misc_RNA (1)...(19): siRNA sense strand
guguaaaccuaauggauuu

SEQ ID NO: 2496309 - RNA, 19 nt, Homo sapiens
  misc_RNA (1)...(19): siRNA sense strand
ggaucaagguguaggaacu

SEQ ID NO: 2496310 - RNA, 19 nt, Homo sapiens
  misc_RNA (1)...(19): siRNA sense strand
gucagaaacuaguaggaaa

SEQ ID NO: 2496311 - RNA, 19 nt, Homo sapiens
  misc_RNA (1)...(19): siRNA sense strand
gcuucaauauggaggagua

SEQ ID NO: 2496312 - RNA, 19 nt, Homo sapiens
  misc_RNA (1)...(19): siRNA sense strand
ggauaaggaaggaaccaaa

SEQ ID NO: 2496313 - RNA, 19 nt, Homo sapiens
  misc_RNA (1)...(19): siRNA sense strand
caguaaagcauuugcauuu

SEQ ID NO: 2496314 - RNA, 19 nt, Homo sapiens
  misc_RNA (1)...(19): siRNA sense strand
ccacaaagcaaguaaggau

SEQ ID NO: 2496315 - RNA, 19 nt, Homo sapiens
  misc_RNA (1)...(19): siRNA sense strand
cagaaacacugcuggaaau

SEQ ID NO: 2496316 - RNA, 19 nt, Homo sapiens
  misc_RNA (1)...(19): siRNA sense strand
gguauaaucagaaggguuu

SEQ ID NO: 2496317 - RNA, 19 nt, Homo sapiens
  misc_RNA (1)...(19): siRNA sense strand
gaaugauggacaaggcaaa

SEQ ID NO: 2496318 - RNA, 19 nt, Homo sapiens
  misc_RNA (1)...(19): siRNA sense strand
gugcagaaauuuuggcaua

SEQ ID NO: 2496319 - RNA, 19 nt, Homo sapiens
  misc_RNA (1)...(19): siRNA sense strand
gcggaaguuuagagaucaa

SEQ ID NO: 2496320 - RNA, 19 nt, Homo sapiens
  misc_RNA (1)...(19): siRNA sense strand
aguuugaagaagagagcaa

SEQ ID NO: 2496321 - RNA, 19 nt, Homo sapiens
  misc_RNA (1)...(19): siRNA sense strand
acuaaauacuggcaacaaa

SEQ ID NO: 2496322 - RNA, 19 nt, Homo sapiens
  misc_RNA (1)...(19): siRNA sense strand
cugcaagacaugaucgaaa

SEQ ID NO: 2496323 - RNA, 19 nt, Homo sapiens
  misc_RNA (1)...(19): siRNA sense strand
agucagagcugcagaacca

SEQ ID NO: 2496324 - RNA, 19 nt, Homo sapiens
  misc_RNA (1)...(19): siRNA sense strand
agauacagauagaagagua

SEQ ID NO: 2496325 - RNA, 19 nt, Homo sapiens
  misc_RNA (1)...(19): siRNA sense strand
caacgaagugauuuggaaa

SEQ ID NO: 2496326 - RNA, 19 nt, Homo sapiens
  misc_RNA (1)...(19): siRNA sense strand
ggaaagugugaucaggaaa

SEQ ID NO: 2496327 - RNA, 19 nt, Homo sapiens
  misc_RNA (1)...(19): siRNA sense strand
gagagaaccaagaaagaga

SEQ ID NO: 2496328 - RNA, 19 nt, Homo sapiens
  misc_RNA (1)...(19): siRNA sense strand
ggacaaacggugccgggaa

SEQ ID NO: 2496329 - RNA, 19 nt, Homo sapiens
  misc_RNA (1)...(19): siRNA sense strand
gucaaaucuucuaaggaua

SEQ ID NO: 2496330 - RNA, 19 nt, Homo sapiens
  misc_RNA (1)...(19): siRNA sense strand
uagaauaucaugugccaaa

SEQ ID NO: 2496331 - RNA, 19 nt, Homo sapiens
  misc_RNA (1)...(19): siRNA sense strand
uguaaacaguguaggcaau

SEQ ID NO: 2496332 - RNA, 19 nt, Homo sapiens
  misc_RNA (1)...(19): siRNA sense strand
gacaaacggugccgggaaa

SEQ ID NO: 2496333 - RNA, 19 nt, Homo sapiens
  misc_RNA (1)...(19): siRNA sense strand
agacauggcuuguguuaca

SEQ ID NO: 2496334 - RNA, 19 nt, Homo sapiens
  misc_RNA (1)...(19): siRNA sense strand
cugcagaaccacaggccua

SEQ ID NO: 2496335 - RNA, 19 nt, Homo sapiens
  misc_RNA (1)...(19): siRNA sense strand
cagcugaacugaaggagau

SEQ ID NO: 2496336 - RNA, 19 nt, Homo sapiens
  misc_RNA (1)...(19): siRNA sense strand
cucagaaacucuuggaauu

SEQ ID NO: 2496337 - RNA, 19 nt, Homo sapiens
  misc_RNA (1)...(19): siRNA sense strand
aaguacaagcagagaguuu

SEQ ID NO: 2496338 - RNA, 19 nt, Homo sapiens
  misc_RNA (1)...(19): siRNA sense strand
ucacaaaacagcacagaaa

SEQ ID NO: 2496339 - RNA, 19 nt, Homo sapiens
  misc_RNA (1)...(19): siRNA sense strand
gcucagaaacucuuggaau

SEQ ID NO: 2496340 - RNA, 19 nt, Homo sapiens
  misc_RNA (1)...(19): siRNA sense strand
ccugaaauaaugaaagcua

SEQ ID NO: 2496341 - RNA, 19 nt, Homo sapiens
  misc_RNA (1)...(19): siRNA sense strand
ccaagaaagagaugauuga

SEQ ID NO: 2496342 - RNA, 19 nt, Homo sapiens
  misc_RNA (1)...(19): siRNA sense strand
ccucagaagccauggagau

SEQ ID NO: 2496343 - RNA, 19 nt, Homo sapiens
  misc_RNA (1)...(19): siRNA sense strand
cuuaauaucccuagaagau

SEQ ID NO: 2496344 - RNA, 19 nt, Homo sapiens
  misc_RNA (1)...(19): siRNA sense strand
caacgaaaguacaagcaga

SEQ ID NO: 2496345 - RNA, 19 nt, Homo sapiens
  misc_RNA (1)...(19): siRNA sense strand
ucuaagaaacagagcaaca

SEQ ID NO: 2496346 - RNA, 19 nt, Homo sapiens
  misc_RNA (1)...(19): siRNA sense strand
ccacaggccuacaggacau

SEQ ID NO: 2496347 - RNA, 19 nt, Homo sapiens
  misc_RNA (1)...(19): siRNA sense strand
gaauucaguucaagggaca

SEQ ID NO: 2496348 - RNA, 19 nt, Homo sapiens
  misc_RNA (1)...(19): siRNA sense strand
ccaggaaauugaaaagaua

SEQ ID NO: 2496349 - RNA, 19 nt, Homo sapiens
  misc_RNA (1)...(19): siRNA sense strand
auuaauuugcccagaguua

SEQ ID NO: 2496350 - RNA, 19 nt, Homo sapiens
  misc_RNA (1)...(19): siRNA sense strand
ucgacauccuggagacuaa

SEQ ID NO: 2496351 - RNA, 19 nt, Homo sapiens
  misc_RNA (1)...(19): siRNA sense strand
acaagauccuggagagcau

SEQ ID NO: 2496352 - RNA, 19 nt, Homo sapiens
  misc_RNA (1)...(19): siRNA sense strand
gggaaauaauucaugaagu

SEQ ID NO: 2496353 - RNA, 19 nt, Homo sapiens
  misc_RNA (1)...(19): siRNA sense strand
gaaccaagaaagagaugau

SEQ ID NO: 2496354 - RNA, 19 nt, Homo sapiens
  misc_RNA (1)...(19): siRNA sense strand
ggaauaugcaaaugaggau

SEQ ID NO: 2496355 - RNA, 19 nt, Homo sapiens
  misc_RNA (1)...(19): siRNA sense strand
caacuuacgggaagaaauu

SEQ ID NO: 2496356 - RNA, 19 nt, Homo sapiens
  misc_RNA (1)...(19): siRNA sense strand
agaaauaccugggaggauu

SEQ ID NO: 2496357 - RNA, 19 nt, Homo sapiens
  misc_RNA (1)...(19): siRNA sense strand
ccauggagaugcugcagaa

SEQ ID NO: 2496358 - RNA, 19 nt, Homo sapiens
  misc_RNA (1)...(19): siRNA sense strand
ggaccgugguucuggauga

SEQ ID NO: 2496359 - RNA, 19 nt, Homo sapiens
  misc_RNA (1)...(19): siRNA sense strand
cagugaagcuggaggugca

SEQ ID NO: 2496360 - RNA, 19 nt, Homo sapiens
  misc_RNA (1)...(19): siRNA sense strand
agauauuaguuugggcaua

SEQ ID NO: 2496361 - RNA, 19 nt, Homo sapiens
  misc_RNA (1)...(19): siRNA sense strand
ggucauuacuuggcacaaa

SEQ ID NO: 2496362 - RNA, 19 nt, Homo sapiens
  misc_RNA (1)...(19): siRNA sense strand
aaugaaagcuacaggucuu

SEQ ID NO: 2496363 - RNA, 19 nt, Homo sapiens
  misc_RNA (1)...(19): siRNA sense strand
cuuguuggcuugauggaaa

SEQ ID NO: 2496364 - RNA, 19 nt, Homo sapiens
  misc_RNA (1)...(19): siRNA sense strand
cugaaaugaacaaaggaau

SEQ ID NO: 2496365 - RNA, 19 nt, Homo sapiens
  misc_RNA (1)...(19): siRNA sense strand
gagaaauuauuguugccua

SEQ ID NO: 2496366 - RNA, 19 nt, Homo sapiens
  misc_RNA (1)...(19): siRNA sense strand
acaaaacagcacagaaaua

SEQ ID NO: 2496367 - RNA, 19 nt, Homo sapiens
  misc_RNA (1)...(19): siRNA sense strand
ccuggaaggacaagagaca

SEQ ID NO: 2496368 - RNA, 19 nt, Homo sapiens
  misc_RNA (1)...(19): siRNA sense strand
gcagauggcccaaaagaua

SEQ ID NO: 2496369 - RNA, 19 nt, Homo sapiens
  misc_RNA (1)...(19): siRNA sense strand
auuggaagaugaugugaaa

SEQ ID NO: 2496370 - RNA, 19 nt, Homo sapiens
  misc_RNA (1)...(19): siRNA sense strand
aaauguaacucaagccaau

SEQ ID NO: 2496371 - RNA, 19 nt, Homo sapiens
  misc_RNA (1)...(19): siRNA sense strand
ucagaaacuaguaggaaaa

SEQ ID NO: 2496372 - RNA, 19 nt, Homo sapiens
  misc_RNA (1)...(19): siRNA sense strand
ccaaggacagugugaaauu

SEQ ID NO: 2496373 - RNA, 19 nt, Homo sapiens
  misc_RNA (1)...(19): siRNA sense strand
guggaugguacuugagcaa

SEQ ID NO: 2496374 - RNA, 19 nt, Homo sapiens
  misc_RNA (1)...(19): siRNA sense strand
ccaaggaauaugagggcca

SEQ ID NO: 2496375 - RNA, 19 nt, Homo sapiens
  misc_RNA (1)...(19): siRNA sense strand
agaacagacuauuggcuuu

SEQ ID NO: 2496376 - RNA, 19 nt, Homo sapiens
  misc_RNA (1)...(19): siRNA sense strand
uggaugaauuggaagauga

SEQ ID NO: 2496377 - RNA, 19 nt, Homo sapiens
  misc_RNA (1)...(19): siRNA sense strand
ugagcuaagagaagcaaua

SEQ ID NO: 2496378 - RNA, 19 nt, Homo sapiens
  misc_RNA (1)...(19): siRNA sense strand
caaguaaggaugaguauca

SEQ ID NO: 2496379 - RNA, 19 nt, Homo sapiens
  misc_RNA (1)...(19): siRNA sense strand
ugauaagggauguguucaa

SEQ ID NO: 2496380 - RNA, 19 nt, Homo sapiens
  misc_RNA (1)...(19): siRNA sense strand
cagagcaacauuagaaauu

SEQ ID NO: 2496381 - RNA, 19 nt, Homo sapiens
  misc_RNA (1)...(19): siRNA sense strand
aauauguggccgaugggaa

SEQ ID NO: 2496382 - RNA, 19 nt, Homo sapiens
  misc_RNA (1)...(19): siRNA sense strand
ggaaggaaccugaaggcau

SEQ ID NO: 2496383 - RNA, 19 nt, Homo sapiens
  misc_RNA (1)...(19): siRNA sense strand
ggaauuuaguuaagugcca

SEQ ID NO: 2496384 - RNA, 19 nt, Homo sapiens
  misc_RNA (1)...(19): siRNA sense strand
ggauccaggaggugcugaa

SEQ ID NO: 2496385 - RNA, 19 nt, Homo sapiens
  misc_RNA (1)...(19): siRNA sense strand
aggaacauggacugaagua

SEQ ID NO: 2496386 - RNA, 19 nt, Homo sapiens
  misc_RNA (1)...(19): siRNA sense strand
caguaggaggcgacacgaa

SEQ ID NO: 2496387 - RNA, 19 nt, Homo sapiens
  misc_RNA (1)...(19): siRNA sense strand
gcaaugaauucuucuguga

SEQ ID NO: 2496388 - RNA, 19 nt, Homo sapiens
  misc_RNA (1)...(19): siRNA sense strand
ccgacaagcucuagacaug

SEQ ID NO: 2496389 - RNA, 19 nt, Homo sapiens
  misc_RNA (1)...(19): siRNA sense strand
cugaugaagaacuggaaga

SEQ ID NO: 2496390 - RNA, 19 nt, Homo sapiens
  misc_RNA (1)...(19): siRNA sense strand
aagccauggugaagcucua

SEQ ID NO: 2496391 - RNA, 19 nt, Homo sapiens
  misc_RNA (1)...(19): siRNA sense strand
ucugugaaguggaugaaga

SEQ ID NO: 2496392 - RNA, 19 nt, Homo sapiens
  misc_RNA (1)...(19): siRNA sense strand
agcaaggagacuuugguua

SEQ ID NO: 2496393 - RNA, 19 nt, Homo sapiens
  misc_RNA (1)...(19): siRNA sense strand
ucgcccagauguuggaaaa

SEQ ID NO: 2496394 - RNA, 19 nt, Homo sapiens
  misc_RNA (1)...(19): siRNA sense strand
aagaaaggcuggaggaggu

SEQ ID NO: 2496395 - RNA, 19 nt, Homo sapiens
  misc_RNA (1)...(19): siRNA sense strand
ggaaaagcugaaacagaaa

SEQ ID NO: 2496396 - RNA, 19 nt, Homo sapiens
  misc_RNA (1)...(19): siRNA sense strand
uguaagugaagaagggaga

SEQ ID NO: 2496397 - RNA, 19 nt, Homo sapiens
  misc_RNA (1)...(19): siRNA sense strand
caaaauagguguuggcgca

SEQ ID NO: 2496398 - RNA, 19 nt, Homo sapiens
  misc_RNA (1)...(19): siRNA sense strand
ggucuuggaacauggguga

SEQ ID NO: 2496399 - RNA, 19 nt, Homo sapiens
  misc_RNA (1)...(19): siRNA sense strand
cuggaaaggcugaagugau

SEQ ID NO: 2496400 - RNA, 19 nt, Homo sapiens
  misc_RNA (1)...(19): siRNA sense strand
gugaacaagcugaguacca

SEQ ID NO: 2496401 - RNA, 19 nt, Homo sapiens
  misc_RNA (1)...(19): siRNA sense strand
uugauaacauacugcgcaa

SEQ ID NO: 2496402 - RNA, 19 nt, Homo sapiens
  misc_RNA (1)...(19): siRNA sense strand
uggaaucaucucaggaaaa

SEQ ID NO: 2496403 - RNA, 19 nt, Homo sapiens
  misc_RNA (1)...(19): siRNA sense strand
uaagugaagaagggagaaa

SEQ ID NO: 2496404 - RNA, 19 nt, Homo sapiens
  misc_RNA (1)...(19): siRNA sense strand
gguaaaugagauugauaac

SEQ ID NO: 2496405 - RNA, 19 nt, Homo sapiens
  misc_RNA (1)...(19): siRNA sense strand
ccuacagcaagaaggacua

SEQ ID NO: 2496406 - RNA, 19 nt, Homo sapiens
  misc_RNA (1)...(19): siRNA sense strand
guggaaaagcugaaacaga

SEQ ID NO: 2496407 - RNA, 19 nt, Homo sapiens
  misc_RNA (1)...(19): siRNA sense strand
acaugugguaaaugagauu

SEQ ID NO: 2496408 - RNA, 19 nt, Homo sapiens
  misc_RNA (1)...(19): siRNA sense strand
accucgagauggagugcua

SEQ ID NO: 2496409 - RNA, 19 nt, Homo sapiens
  misc_RNA (1)...(19): siRNA sense strand
uggagaucauggaagccua

SEQ ID NO: 2496410 - RNA, 19 nt, Homo sapiens
  misc_RNA (1)...(19): siRNA sense strand
aagaagaaaggcuggagga

SEQ ID NO: 2496411 - RNA, 19 nt, Homo sapiens
  misc_RNA (1)...(19): siRNA sense strand
aagucuaugcugcuggaaa

SEQ ID NO: 2496412 - RNA, 19 nt, Homo sapiens
  misc_RNA (1)...(19): siRNA sense strand
gggagaaaacagcaaaaca

SEQ ID NO: 2496413 - RNA, 19 nt, Homo sapiens
  misc_RNA (1)...(19): siRNA sense strand
uugcguggugccugagaaa

SEQ ID NO: 2496414 - RNA, 19 nt, Homo sapiens
  misc_RNA (1)...(19): siRNA sense strand
ccucuuugauacugccgaa

SEQ ID NO: 2496415 - RNA, 19 nt, Homo sapiens
  misc_RNA (1)...(19): siRNA sense strand
cugucaagaaagcauauua

SEQ ID NO: 2496416 - RNA, 19 nt, Homo sapiens
  misc_RNA (1)...(19): siRNA sense strand
agauggagugcuauggaga

SEQ ID NO: 2496417 - RNA, 19 nt, Homo sapiens
  misc_RNA (1)...(19): siRNA sense strand
aagaaaggcuggaggaggu

SEQ ID NO: 2496418 - RNA, 19 nt, Homo sapiens
  misc_RNA (1)...(19): siRNA sense strand
ggaaaagcugaaacagaaa

SEQ ID NO: 2496419 - RNA, 19 nt, Homo sapiens
  misc_RNA (1)...(19): siRNA sense strand
uguaagugaagaagggaga

SEQ ID NO: 2496420 - RNA, 19 nt, Homo sapiens
  misc_RNA (1)...(19): siRNA sense strand
caaaauagguguuggcgca

SEQ ID NO: 2496421 - RNA, 19 nt, Homo sapiens
  misc_RNA (1)...(19): siRNA sense strand
ggucuuggaacauggguga

SEQ ID NO: 2496422 - RNA, 19 nt, Homo sapiens
  misc_RNA (1)...(19): siRNA sense strand
cuggaaaggcugaagugau

SEQ ID NO: 2496423 - RNA, 19 nt, Homo sapiens
  misc_RNA (1)...(19): siRNA sense strand
gugaacaagcugaguacca

SEQ ID NO: 2496424 - RNA, 19 nt, Homo sapiens
  misc_RNA (1)...(19): siRNA sense strand
uugauaacauacugcgcaa

SEQ ID NO: 2496425 - RNA, 19 nt, Homo sapiens
  misc_RNA (1)...(19): siRNA sense strand
uggaaucaucucaggaaaa

SEQ ID NO: 2496426 - RNA, 19 nt, Homo sapiens
  misc_RNA (1)...(19): siRNA sense strand
uaagugaagaagggagaaa

SEQ ID NO: 2496427 - RNA, 19 nt, Homo sapiens
  misc_RNA (1)...(19): siRNA sense strand
gguaaaugagauugauaac

SEQ ID NO: 2496428 - RNA, 19 nt, Homo sapiens
  misc_RNA (1)...(19): siRNA sense strand
ccuacagcaagaaggacua

SEQ ID NO: 2496429 - RNA, 19 nt, Homo sapiens
  misc_RNA (1)...(19): siRNA sense strand
guggaaaagcugaaacaga

SEQ ID NO: 2496430 - RNA, 19 nt, Homo sapiens
  misc_RNA (1)...(19): siRNA sense strand
acaugugguaaaugagauu

SEQ ID NO: 2496431 - RNA, 19 nt, Homo sapiens
  misc_RNA (1)...(19): siRNA sense strand
accucgagauggagugcua

SEQ ID NO: 2496432 - RNA, 19 nt, Homo sapiens
  misc_RNA (1)...(19): siRNA sense strand
uggagaucauggaagccua

SEQ ID NO: 2496433 - RNA, 19 nt, Homo sapiens
  misc_RNA (1)...(19): siRNA sense strand
aagaagaaaggcuggagga

SEQ ID NO: 2496434 - RNA, 19 nt, Homo sapiens
  misc_RNA (1)...(19): siRNA sense strand
aagucuaugcugcuggaaa

SEQ ID NO: 2496435 - RNA, 19 nt, Homo sapiens
  misc_RNA (1)...(19): siRNA sense strand
gggagaaaacagcaaaaca

SEQ ID NO: 2496436 - RNA, 19 nt, Homo sapiens
  misc_RNA (1)...(19): siRNA sense strand
uugcguggugccugagaaa

SEQ ID NO: 2496437 - RNA, 19 nt, Homo sapiens
  misc_RNA (1)...(19): siRNA sense strand
ccucuuugauacugccgaa

SEQ ID NO: 2496438 - RNA, 19 nt, Homo sapiens
  misc_RNA (1)...(19): siRNA sense strand
cugucaagaaagcauauua

SEQ ID NO: 2496439 - RNA, 19 nt, Homo sapiens
  misc_RNA (1)...(19): siRNA sense strand
agauggagugcuauggaga

SEQ ID NO: 2496440 - RNA, 19 nt, Homo sapiens
  misc_RNA (1)...(19): siRNA sense strand
aagaaaggcuggaggaggu

SEQ ID NO: 2496441 - RNA, 19 nt, Homo sapiens
  misc_RNA (1)...(19): siRNA sense strand
ggaaaagcugaaacagaaa

SEQ ID NO: 2496442 - RNA, 19 nt, Homo sapiens
  misc_RNA (1)...(19): siRNA sense strand
uguaagugaagaagggaga

SEQ ID NO: 2496443 - RNA, 19 nt, Homo sapiens
  misc_RNA (1)...(19): siRNA sense strand
caaaauagguguuggcgca

SEQ ID NO: 2496444 - RNA, 19 nt, Homo sapiens
  misc_RNA (1)...(19): siRNA sense strand
ggucuuggaacauggguga

SEQ ID NO: 2496445 - RNA, 19 nt, Homo sapiens
  misc_RNA (1)...(19): siRNA sense strand
cuggaaaggcugaagugau

SEQ ID NO: 2496446 - RNA, 19 nt, Homo sapiens
  misc_RNA (1)...(19): siRNA sense strand
gugaacaagcugaguacca

SEQ ID NO: 2496447 - RNA, 19 nt, Homo sapiens
  misc_RNA (1)...(19): siRNA sense strand
uugauaacauacugcgcaa

SEQ ID NO: 2496448 - RNA, 19 nt, Homo sapiens
  misc_RNA (1)...(19): siRNA sense strand
uggaaucaucucaggaaaa

SEQ ID NO: 2496449 - RNA, 19 nt, Homo sapiens
  misc_RNA (1)...(19): siRNA sense strand
uaagugaagaagggagaaa

SEQ ID NO: 2496450 - RNA, 19 nt, Homo sapiens
  misc_RNA (1)...(19): siRNA sense strand
gguaaaugagauugauaac

SEQ ID NO: 2496451 - RNA, 19 nt, Homo sapiens
  misc_RNA (1)...(19): siRNA sense strand
ccuacagcaagaaggacua

SEQ ID NO: 2496452 - RNA, 19 nt, Homo sapiens
  misc_RNA (1)...(19): siRNA sense strand
guggaaaagcugaaacaga

SEQ ID NO: 2496453 - RNA, 19 nt, Homo sapiens
  misc_RNA (1)...(19): siRNA sense strand
acaugugguaaaugagauu

SEQ ID NO: 2496454 - RNA, 19 nt, Homo sapiens
  misc_RNA (1)...(19): siRNA sense strand
accucgagauggagugcua

SEQ ID NO: 2496455 - RNA, 19 nt, Homo sapiens
  misc_RNA (1)...(19): siRNA sense strand
uggagaucauggaagccua

SEQ ID NO: 2496456 - RNA, 19 nt, Homo sapiens
  misc_RNA (1)...(19): siRNA sense strand
aagaagaaaggcuggagga

SEQ ID NO: 2496457 - RNA, 19 nt, Homo sapiens
  misc_RNA (1)...(19): siRNA sense strand
aagucuaugcugcuggaaa

SEQ ID NO: 2496458 - RNA, 19 nt, Homo sapiens
  misc_RNA (1)...(19): siRNA sense strand
gggagaaaacagcaaaaca

SEQ ID NO: 2496459 - RNA, 19 nt, Homo sapiens
  misc_RNA (1)...(19): siRNA sense strand
uugcguggugccugagaaa

SEQ ID NO: 2496460 - RNA, 19 nt, Homo sapiens
  misc_RNA (1)...(19): siRNA sense strand
ccucuuugauacugccgaa

SEQ ID NO: 2496461 - RNA, 19 nt, Homo sapiens
  misc_RNA (1)...(19): siRNA sense strand
cugucaagaaagcauauua

SEQ ID NO: 2496462 - RNA, 19 nt, Homo sapiens
  misc_RNA (1)...(19): siRNA sense strand
agauggagugcuauggaga

SEQ ID NO: 2496463 - RNA, 19 nt, Homo sapiens
  misc_RNA (1)...(19): siRNA sense strand
aggaaugcacaguggaaua

SEQ ID NO: 2496464 - RNA, 19 nt, Homo sapiens
  misc_RNA (1)...(19): siRNA sense strand
aguaagaagcaaagugaau

SEQ ID NO: 2496465 - RNA, 19 nt, Homo sapiens
  misc_RNA (1)...(19): siRNA sense strand
gagugaguggagugauaaa

SEQ ID NO: 2496466 - RNA, 19 nt, Homo sapiens
  misc_RNA (1)...(19): siRNA sense strand
gguagugaaacauggaaga

SEQ ID NO: 2496467 - RNA, 19 nt, Homo sapiens
  misc_RNA (1)...(19): siRNA sense strand
guucaaaguuccugggcag

SEQ ID NO: 2496468 - RNA, 19 nt, Homo sapiens
  misc_RNA (1)...(19): siRNA sense strand
caguggaauaugaacuaaa

SEQ ID NO: 2496469 - RNA, 19 nt, Homo sapiens
  misc_RNA (1)...(19): siRNA sense strand
agugaaacauggaagacca

SEQ ID NO: 2496470 - RNA, 19 nt, Homo sapiens
  misc_RNA (1)...(19): siRNA sense strand
ugauaaacaaugcugggaa

SEQ ID NO: 2496471 - RNA, 19 nt, Homo sapiens
  misc_RNA (1)...(19): siRNA sense strand
gauaaacaaugcugggaag

SEQ ID NO: 2496472 - RNA, 19 nt, Homo sapiens
  misc_RNA (1)...(19): siRNA sense strand
aggaauuccagaaacuaaa

SEQ ID NO: 2496473 - RNA, 19 nt, Homo sapiens
  misc_RNA (1)...(19): siRNA sense strand
caggauauggauugcguau

SEQ ID NO: 2496474 - RNA, 19 nt, Homo sapiens
  misc_RNA (1)...(19): siRNA sense strand
aaggaauuccagaaacuaa

SEQ ID NO: 2496475 - RNA, 19 nt, Homo sapiens
  misc_RNA (1)...(19): siRNA sense strand
gcacaguggaauaugaacu

SEQ ID NO: 2496476 - RNA, 19 nt, Homo sapiens
  misc_RNA (1)...(19): siRNA sense strand
acauacaccuugaaaacaa

SEQ ID NO: 2496477 - RNA, 19 nt, Homo sapiens
  misc_RNA (1)...(19): siRNA sense strand
cacaaauggaucagaaguu

SEQ ID NO: 2496478 - RNA, 19 nt, Homo sapiens
  misc_RNA (1)...(19): siRNA sense strand
augcacaaauggaucagaa

SEQ ID NO: 2496479 - RNA, 19 nt, Homo sapiens
  misc_RNA (1)...(19): siRNA sense strand
acaaaugaaacccgacaau

SEQ ID NO: 2496480 - RNA, 19 nt, Homo sapiens
  misc_RNA (1)...(19): siRNA sense strand
auggaucaucagagaacaa

SEQ ID NO: 2496481 - RNA, 19 nt, Homo sapiens
  misc_RNA (1)...(19): siRNA sense strand
gaaacauacaccuugaaaa

SEQ ID NO: 2496482 - RNA, 19 nt, Homo sapiens
  misc_RNA (1)...(19): siRNA sense strand
acaccgagauaaaaguuaa

SEQ ID NO: 2496483 - RNA, 19 nt, Homo sapiens
  misc_RNA (1)...(19): siRNA sense strand
aggcaucagacuauaaaga

SEQ ID NO: 2496484 - RNA, 19 nt, Homo sapiens
  misc_RNA (1)...(19): siRNA sense strand
caacaaaugaaacccgaca

SEQ ID NO: 2496485 - RNA, 19 nt, Homo sapiens
  misc_RNA (1)...(19): siRNA sense strand
agccaaacaccuacccaaa

SEQ ID NO: 2496486 - RNA, 19 nt, Homo sapiens
  misc_RNA (1)...(19): siRNA sense strand
cagcaagguguuuugauua

SEQ ID NO: 2496487 - RNA, 19 nt, Homo sapiens
  misc_RNA (1)...(19): siRNA sense strand
gaguggagugauaaacaau

SEQ ID NO: 2496488 - RNA, 19 nt, Homo sapiens
  misc_RNA (1)...(19): siRNA sense strand
aauugagaucagagaagau

SEQ ID NO: 2496489 - RNA, 19 nt, Homo sapiens
  misc_RNA (1)...(19): siRNA sense strand
ugaaauugagaucagagaa

SEQ ID NO: 2496490 - RNA, 19 nt, Homo sapiens
  misc_RNA (1)...(19): siRNA sense strand
caucaaaagcauuguggaa

SEQ ID NO: 2496491 - RNA, 19 nt, Homo sapiens
  misc_RNA (1)...(19): siRNA sense strand
ggacagaugaggaagagga

SEQ ID NO: 2496492 - RNA, 19 nt, Homo sapiens
  misc_RNA (1)...(19): siRNA sense strand
agaacagucaccagguaaa

SEQ ID NO: 2496493 - RNA, 19 nt, Homo sapiens
  misc_RNA (1)...(19): siRNA sense strand
gcaaaucccuacuggacca

SEQ ID NO: 2496494 - RNA, 19 nt, Homo sapiens
  misc_RNA (1)...(19): siRNA sense strand
ggaagacagagcagggcuu

SEQ ID NO: 2496495 - RNA, 19 nt, Homo sapiens
  misc_RNA (1)...(19): siRNA sense strand
aagaucaggaagaggaaga

SEQ ID NO: 2496496 - RNA, 19 nt, Homo sapiens
  misc_RNA (1)...(19): siRNA sense strand
augaggaagaggaagaauu

SEQ ID NO: 2496497 - RNA, 19 nt, Homo sapiens
  misc_RNA (1)...(19): siRNA sense strand
cugaauaacuguaucucca

SEQ ID NO: 2496498 - RNA, 19 nt, Homo sapiens
  misc_RNA (1)...(19): siRNA sense strand
agaagaucaggaagaggaa

SEQ ID NO: 2496499 - RNA, 19 nt, Homo sapiens
  misc_RNA (1)...(19): siRNA sense strand
gugaguugcugcagcggau

SEQ ID NO: 2496500 - RNA, 19 nt, Homo sapiens
  misc_RNA (1)...(19): siRNA sense strand
aggaagaggaagaauucau

SEQ ID NO: 2496501 - RNA, 19 nt, Homo sapiens
  misc_RNA (1)...(19): siRNA sense strand
aagggaaggaagaaggaca

SEQ ID NO: 2496502 - RNA, 19 nt, Homo sapiens
  misc_RNA (1)...(19): siRNA sense strand
aggaagaaggacaccagua

SEQ ID NO: 2496503 - RNA, 19 nt, Homo sapiens
  misc_RNA (1)...(19): siRNA sense strand
aaggaagagcugagccaga

SEQ ID NO: 2496504 - RNA, 19 nt, Homo sapiens
  misc_RNA (1)...(19): siRNA sense strand
ucauugaagaagaagauca

SEQ ID NO: 2496505 - RNA, 19 nt, Homo sapiens
  misc_RNA (1)...(19): siRNA sense strand
agccauugacuuugggaca

SEQ ID NO: 2496506 - RNA, 19 nt, Homo sapiens
  misc_RNA (1)...(19): siRNA sense strand
aagaagaucaggaagagga

SEQ ID NO: 2496507 - RNA, 19 nt, Homo sapiens
  misc_RNA (1)...(19): siRNA sense strand
gugcaagguguuugggauc

SEQ ID NO: 2496508 - RNA, 19 nt, Homo sapiens
  misc_RNA (1)...(19): siRNA sense strand
guggagaacaucaucgaca

SEQ ID NO: 2496509 - RNA, 19 nt, Homo sapiens
  misc_RNA (1)...(19): siRNA sense strand
cuuuggauuuagagcacau

SEQ ID NO: 2496510 - RNA, 19 nt, Homo sapiens
  misc_RNA (1)...(19): siRNA sense strand
uaaaggaagagcugagcca

SEQ ID NO: 2496511 - RNA, 19 nt, Homo sapiens
  misc_RNA (1)...(19): siRNA sense strand
cuuugggacagaugaggaa

SEQ ID NO: 2496512 - RNA, 19 nt, Homo sapiens
  misc_RNA (1)...(19): siRNA sense strand
cuugaagaguguugggcuu

SEQ ID NO: 2496513 - RNA, 19 nt, Homo sapiens
  misc_RNA (1)...(19): siRNA sense strand
guauaaaggaaauggugca

SEQ ID NO: 2496514 - RNA, 19 nt, Homo sapiens
  misc_RNA (1)...(19): siRNA sense strand
guuuauggcauuugagcau

SEQ ID NO: 2496515 - RNA, 19 nt, Homo sapiens
  misc_RNA (1)...(19): siRNA sense strand
gcgaaugcaauuaggaacu

SEQ ID NO: 2496516 - RNA, 19 nt, Homo sapiens
  misc_RNA (1)...(19): siRNA sense strand
agacaauauccuacccauu

SEQ ID NO: 2496517 - RNA, 19 nt, Homo sapiens
  misc_RNA (1)...(19): siRNA sense strand
cuuucuggccggagguauu

SEQ ID NO: 2496518 - RNA, 19 nt, Homo sapiens
  misc_RNA (1)...(19): siRNA sense strand
cuuggauuguauaaaggaa

SEQ ID NO: 2496519 - RNA, 19 nt, Homo sapiens
  misc_RNA (1)...(19): siRNA sense strand
ucgagaagacccagaggau

SEQ ID NO: 2496520 - RNA, 19 nt, Homo sapiens
  misc_RNA (1)...(19): siRNA sense strand
cagaggaugcugagcggau

SEQ ID NO: 2496521 - RNA, 19 nt, Homo sapiens
  misc_RNA (1)...(19): siRNA sense strand
gagaagacccagaggaugc

SEQ ID NO: 2496522 - RNA, 19 nt, Homo sapiens
  misc_RNA (1)...(19): siRNA sense strand
aaucaaggucugugagaag

SEQ ID NO: 2496523 - RNA, 19 nt, Homo sapiens
  misc_RNA (1)...(19): siRNA sense strand
gggaacauuuguaugagca

SEQ ID NO: 2496524 - RNA, 19 nt, Homo sapiens
  misc_RNA (1)...(19): siRNA sense strand
ggaacauuuguaugagcau

SEQ ID NO: 2496525 - RNA, 19 nt, Homo sapiens
  misc_RNA (1)...(19): siRNA sense strand
ucuugugaaaggagggcaa

SEQ ID NO: 2496526 - RNA, 19 nt, Homo sapiens
  misc_RNA (1)...(19): siRNA sense strand
aaucaaggucugugagaag

SEQ ID NO: 2496527 - RNA, 19 nt, Homo sapiens
  misc_RNA (1)...(19): siRNA sense strand
gggaacauuuguaugagca

SEQ ID NO: 2496528 - RNA, 19 nt, Homo sapiens
  misc_RNA (1)...(19): siRNA sense strand
ggaacauuuguaugagcau

SEQ ID NO: 2496529 - RNA, 19 nt, Homo sapiens
  misc_RNA (1)...(19): siRNA sense strand
agaaauaguggcaggguca

SEQ ID NO: 2496530 - RNA, 19 nt, Homo sapiens
  misc_RNA (1)...(19): siRNA sense strand
augaagaggaaguuguaua

SEQ ID NO: 2496531 - RNA, 19 nt, Homo sapiens
  misc_RNA (1)...(19): siRNA sense strand
aaggaaagacacagauaau

SEQ ID NO: 2496532 - RNA, 19 nt, Homo sapiens
  misc_RNA (1)...(19): siRNA sense strand
augacauggugaagauuua

SEQ ID NO: 2496533 - RNA, 19 nt, Homo sapiens
  misc_RNA (1)...(19): siRNA sense strand
uggcagggucagaugauua

SEQ ID NO: 2496534 - RNA, 19 nt, Homo sapiens
  misc_RNA (1)...(19): siRNA sense strand
ucauggaaggagaagauaa

SEQ ID NO: 2496535 - RNA, 19 nt, Homo sapiens
  misc_RNA (1)...(19): siRNA sense strand
ugaugaagaaggaaagaca

SEQ ID NO: 2496536 - RNA, 19 nt, Homo sapiens
  misc_RNA (1)...(19): siRNA sense strand
cauggaaggagaagauaau

SEQ ID NO: 2496537 - RNA, 19 nt, Homo sapiens
  misc_RNA (1)...(19): siRNA sense strand
caaagaauguauaaggugu

SEQ ID NO: 2496538 - RNA, 19 nt, Homo sapiens
  misc_RNA (1)...(19): siRNA sense strand
caugugaugaagaaggaaa

SEQ ID NO: 2496539 - RNA, 19 nt, Homo sapiens
  misc_RNA (1)...(19): siRNA sense strand
aguugaaaccacauugaaa

SEQ ID NO: 2496540 - RNA, 19 nt, Homo sapiens
  misc_RNA (1)...(19): siRNA sense strand
acaaguggauagagcccaa

SEQ ID NO: 2496541 - RNA, 19 nt, Homo sapiens
  misc_RNA (1)...(19): siRNA sense strand
acuucaugguggauauuaa

SEQ ID NO: 2496542 - RNA, 19 nt, Homo sapiens
  misc_RNA (1)...(19): siRNA sense strand
gugcuaucauggaaggaga

SEQ ID NO: 2496543 - RNA, 19 nt, Homo sapiens
  misc_RNA (1)...(19): siRNA sense strand
ggcuggagguucugacaau

SEQ ID NO: 2496544 - RNA, 19 nt, Homo sapiens
  misc_RNA (1)...(19): siRNA sense strand
gagaagauaaugaagagga

SEQ ID NO: 2496545 - RNA, 19 nt, Homo sapiens
  misc_RNA (1)...(19): siRNA sense strand
uauaagucuucuacagcaa

SEQ ID NO: 2496546 - RNA, 19 nt, Homo sapiens
  misc_RNA (1)...(19): siRNA sense strand
augaagaaggaaagacaca

SEQ ID NO: 2496547 - RNA, 19 nt, Homo sapiens
  misc_RNA (1)...(19): siRNA sense strand
acaucaggucuauggcaaa

SEQ ID NO: 2496548 - RNA, 19 nt, Homo sapiens
  misc_RNA (1)...(19): siRNA sense strand
uaucauggaaggagaagau

SEQ ID NO: 2496549 - RNA, 19 nt, Homo sapiens
  misc_RNA (1)...(19): siRNA sense strand
uggaaggagaagauaauga

SEQ ID NO: 2496550 - RNA, 19 nt, Homo sapiens
  misc_RNA (1)...(19): siRNA sense strand
aagauaaugaagaggaagu

SEQ ID NO: 2496551 - RNA, 19 nt, Homo sapiens
  misc_RNA (1)...(19): siRNA sense strand
cugcuucaauguugggaau

SEQ ID NO: 2496552 - RNA, 19 nt, Homo sapiens
  misc_RNA (1)...(19): siRNA sense strand
agauaauguacaaguggau

SEQ ID NO: 2496553 - RNA, 19 nt, Homo sapiens
  misc_RNA (1)...(19): siRNA sense strand
cuucugaaaguaaggguuu

SEQ ID NO: 2496554 - RNA, 19 nt, Homo sapiens
  misc_RNA (1)...(19): siRNA sense strand
uguacuucaugguggauau

SEQ ID NO: 2496555 - RNA, 19 nt, Homo sapiens
  misc_RNA (1)...(19): siRNA sense strand
ugaacuaggaagaauaaca

SEQ ID NO: 2496556 - RNA, 19 nt, Homo sapiens
  misc_RNA (1)...(19): siRNA sense strand
agauggaaccaaagaaugu

SEQ ID NO: 2496557 - RNA, 19 nt, Homo sapiens
  misc_RNA (1)...(19): siRNA sense strand
acauugagaaagaaaccaa

SEQ ID NO: 2496558 - RNA, 19 nt, Homo sapiens
  misc_RNA (1)...(19): siRNA sense strand
gggcaugaggggaagaaga

SEQ ID NO: 2496559 - RNA, 19 nt, Homo sapiens
  misc_RNA (1)...(19): siRNA sense strand
accaaagaauguagaccau

SEQ ID NO: 2496560 - RNA, 19 nt, Homo sapiens
  misc_RNA (1)...(19): siRNA sense strand
cugugaaacgguugacuuu

SEQ ID NO: 2496561 - RNA, 19 nt, Homo sapiens
  misc_RNA (1)...(19): siRNA sense strand
gaucaacugcugugaaaau

SEQ ID NO: 2496562 - RNA, 19 nt, Homo sapiens
  misc_RNA (1)...(19): siRNA sense strand
aaggagaagauaaugaaga

SEQ ID NO: 2496563 - RNA, 19 nt, Homo sapiens
  misc_RNA (1)...(19): siRNA sense strand
caagauaauagacgguuca

SEQ ID NO: 2496564 - RNA, 19 nt, Homo sapiens
  misc_RNA (1)...(19): siRNA sense strand
aggccacuacauugagaaa

SEQ ID NO: 2496565 - RNA, 19 nt, Homo sapiens
  misc_RNA (1)...(19): siRNA sense strand
cauaggagucacaguugaa

SEQ ID NO: 2496566 - RNA, 19 nt, Homo sapiens
  misc_RNA (1)...(19): siRNA sense strand
guugaaaccacauugaaaa

SEQ ID NO: 2496567 - RNA, 19 nt, Homo sapiens
  misc_RNA (1)...(19): siRNA sense strand
ccauacuccaugugaugaa

SEQ ID NO: 2496568 - RNA, 19 nt, Homo sapiens
  misc_RNA (1)...(19): siRNA sense strand
ucagauggaaccaaagaau

SEQ ID NO: 2496569 - RNA, 19 nt, Homo sapiens
  misc_RNA (1)...(19): siRNA sense strand
cuggagaacuacaggcauc

SEQ ID NO: 2496570 - RNA, 19 nt, Homo sapiens
  misc_RNA (1)...(19): siRNA sense strand
uggcaaagaggcuuguauu

SEQ ID NO: 2496571 - RNA, 19 nt, Homo sapiens
  misc_RNA (1)...(19): siRNA sense strand
guaaugacgacuaacucaa

SEQ ID NO: 2496572 - RNA, 19 nt, Homo sapiens
  misc_RNA (1)...(19): siRNA sense strand
aaucaggaccauucgguuu

SEQ ID NO: 2496573 - RNA, 19 nt, Homo sapiens
  misc_RNA (1)...(19): siRNA sense strand
gcugcagacaguugugcua

SEQ ID NO: 2496574 - RNA, 19 nt, Homo sapiens
  misc_RNA (1)...(19): siRNA sense strand
acuaaucagggucaagaua

SEQ ID NO: 2496575 - RNA, 19 nt, Homo sapiens
  misc_RNA (1)...(19): siRNA sense strand
ugggcauuccagagaacua

SEQ ID NO: 2496576 - RNA, 19 nt, Homo sapiens
  misc_RNA (1)...(19): siRNA sense strand
cagauaauguacaagugga

SEQ ID NO: 2496577 - RNA, 19 nt, Homo sapiens
  misc_RNA (1)...(19): siRNA sense strand
gggaauucaaagugcgaug

SEQ ID NO: 2496578 - RNA, 19 nt, Homo sapiens
  misc_RNA (1)...(19): siRNA sense strand
guugggagguggcuggaga

SEQ ID NO: 2496579 - RNA, 19 nt, Homo sapiens
  misc_RNA (1)...(19): siRNA sense strand
ccagagaacuaaucagggu

SEQ ID NO: 2496580 - RNA, 19 nt, Homo sapiens
  misc_RNA (1)...(19): siRNA sense strand
ggucaagauaauagacggu

SEQ ID NO: 2496581 - RNA, 19 nt, Homo sapiens
  misc_RNA (1)...(19): siRNA sense strand
uguccauacaucaggucua

SEQ ID NO: 2496582 - RNA, 19 nt, Homo sapiens
  misc_RNA (1)...(19): siRNA sense strand
gaccauucgguuugcuaua

SEQ ID NO: 2496583 - RNA, 19 nt, Homo sapiens
  misc_RNA (1)...(19): siRNA sense strand
agguguaauccuacuaaau

SEQ ID NO: 2496584 - RNA, 19 nt, Homo sapiens
  misc_RNA (1)...(19): siRNA sense strand
uacuaaaucuggagcagga

SEQ ID NO: 2496585 - RNA, 19 nt, Homo sapiens
  misc_RNA (1)...(19): siRNA sense strand
cugagaaaggagccaaaga

SEQ ID NO: 2496586 - RNA, 19 nt, Homo sapiens
  misc_RNA (1)...(19): siRNA sense strand
guauaagguguaaagacga

SEQ ID NO: 2496587 - RNA, 19 nt, Homo sapiens
  misc_RNA (1)...(19): siRNA sense strand
guguaaagacgacucucaa

SEQ ID NO: 2496588 - RNA, 19 nt, Homo sapiens
  misc_RNA (1)...(19): siRNA sense strand
aaaccuuguauguguggaa

SEQ ID NO: 2496589 - RNA, 19 nt, Homo sapiens
  misc_RNA (1)...(19): siRNA sense strand
ggcaaaaggagaugcuaaa

SEQ ID NO: 2496590 - RNA, 19 nt, Homo sapiens
  misc_RNA (1)...(19): siRNA sense strand
cuggaaaggaugggaacaa

SEQ ID NO: 2496591 - RNA, 19 nt, Homo sapiens
  misc_RNA (1)...(19): siRNA sense strand
ggugauaaagcaaagguga

SEQ ID NO: 2496592 - RNA, 19 nt, Homo sapiens
  misc_RNA (1)...(19): siRNA sense strand
aggcaaaaggagaugcuaa

SEQ ID NO: 2496593 - RNA, 19 nt, Homo sapiens
  misc_RNA (1)...(19): siRNA sense strand
gagaaaggcaaaaggagau

SEQ ID NO: 2496594 - RNA, 19 nt, Homo sapiens
  misc_RNA (1)...(19): siRNA sense strand
aggagaugcuaaaggugau

SEQ ID NO: 2496595 - RNA, 19 nt, Homo sapiens
  misc_RNA (1)...(19): siRNA sense strand
aggugaaggaugagccaca

SEQ ID NO: 2496596 - RNA, 19 nt, Homo sapiens
  misc_RNA (1)...(19): siRNA sense strand
ccagaaagcggaaggcacu

SEQ ID NO: 2496597 - RNA, 19 nt, Homo sapiens
  misc_RNA (1)...(19): siRNA sense strand
agagaaaggcaaaaggaga

SEQ ID NO: 2496598 - RNA, 19 nt, Homo sapiens
  misc_RNA (1)...(19): siRNA sense strand
ccaaagggagaaaggggaa

SEQ ID NO: 2496599 - RNA, 19 nt, Homo sapiens
  misc_RNA (1)...(19): siRNA sense strand
cugcaaagaagggagagaa

SEQ ID NO: 2496600 - RNA, 19 nt, Homo sapiens
  misc_RNA (1)...(19): siRNA sense strand
aaaccagagcccaggccua

SEQ ID NO: 2496601 - RNA, 19 nt, Homo sapiens
  misc_RNA (1)...(19): siRNA sense strand
agaugcuaaaggugauaaa

SEQ ID NO: 2496602 - RNA, 19 nt, Homo sapiens
  misc_RNA (1)...(19): siRNA sense strand
ggagaaaggggaaagcaga

SEQ ID NO: 2496603 - RNA, 19 nt, Homo sapiens
  misc_RNA (1)...(19): siRNA sense strand
gaaugaagcugaugccaga

SEQ ID NO: 2496604 - RNA, 19 nt, Homo sapiens
  misc_RNA (1)...(19): siRNA sense strand
cuucaaugucagagaccua

SEQ ID NO: 2496605 - RNA, 19 nt, Homo sapiens
  misc_RNA (1)...(19): siRNA sense strand
agucaagggcugcggaaga

SEQ ID NO: 2496606 - RNA, 19 nt, Homo sapiens
  misc_RNA (1)...(19): siRNA sense strand
acgccauaguggaagacaa

SEQ ID NO: 2496607 - RNA, 19 nt, Homo sapiens
  misc_RNA (1)...(19): siRNA sense strand
cugaaauggccaagaaacu

SEQ ID NO: 2496608 - RNA, 19 nt, Homo sapiens
  misc_RNA (1)...(19): siRNA sense strand
guguagucuucaugggaga

SEQ ID NO: 2496609 - RNA, 19 nt, Homo sapiens
  misc_RNA (1)...(19): siRNA sense strand
cgccauaguggaagacaau

SEQ ID NO: 2496610 - RNA, 19 nt, Homo sapiens
  misc_RNA (1)...(19): siRNA sense strand
gccaagaaacuuagccaga

SEQ ID NO: 2496611 - RNA, 19 nt, Homo sapiens
  misc_RNA (1)...(19): siRNA sense strand
aaacuaagcuccuugcaga

SEQ ID NO: 2496612 - RNA, 19 nt, Homo sapiens
  misc_RNA (1)...(19): siRNA sense strand
gagucagacccgaggagga

SEQ ID NO: 2496613 - RNA, 19 nt, Homo sapiens
  misc_RNA (1)...(19): siRNA sense strand
accuagacacaguggacaa

SEQ ID NO: 2496614 - RNA, 19 nt, Homo sapiens
  misc_RNA (1)...(19): siRNA sense strand
gugaaugggacgugcugau

SEQ ID NO: 2496615 - RNA, 19 nt, Homo sapiens
  misc_RNA (1)...(19): siRNA sense strand
augcagccuucgugggauu

SEQ ID NO: 2496616 - RNA, 19 nt, Homo sapiens
  misc_RNA (1)...(19): siRNA sense strand
ccucuuuauccuugguauu

SEQ ID NO: 2496617 - RNA, 19 nt, Homo sapiens
  misc_RNA (1)...(19): siRNA sense strand
uauuugaggcugugggcuu

SEQ ID NO: 2496618 - RNA, 19 nt, Homo sapiens
  misc_RNA (1)...(19): siRNA sense strand
aagugauggcugagcuauu

SEQ ID NO: 2496619 - RNA, 19 nt, Homo sapiens
  misc_RNA (1)...(19): siRNA sense strand
ggacaguggugaaugggac

SEQ ID NO: 2496620 - RNA, 19 nt, Homo sapiens
  misc_RNA (1)...(19): siRNA sense strand
agucagacccgaggaggaa

SEQ ID NO: 2496621 - RNA, 19 nt, Homo sapiens
  misc_RNA (1)...(19): siRNA sense strand
gcugauagaugcucugcga

SEQ ID NO: 2496622 - RNA, 19 nt, Homo sapiens
  misc_RNA (1)...(19): siRNA sense strand
ccauaguggaagacaaucu

SEQ ID NO: 2496623 - RNA, 19 nt, Homo sapiens
  misc_RNA (1)...(19): siRNA sense strand
acacaguggacaauggcau

SEQ ID NO: 2496624 - RNA, 19 nt, Homo sapiens
  misc_RNA (1)...(19): siRNA sense strand
ggguuguguuggugcugau

SEQ ID NO: 2496625 - RNA, 19 nt, Homo sapiens
  misc_RNA (1)...(19): siRNA sense strand
cuuuauugaugcugguagu

SEQ ID NO: 2496626 - RNA, 19 nt, Homo sapiens
  misc_RNA (1)...(19): siRNA sense strand
gaaugaagcugaugccaga

SEQ ID NO: 2496627 - RNA, 19 nt, Homo sapiens
  misc_RNA (1)...(19): siRNA sense strand
cuucaaugucagagaccua

SEQ ID NO: 2496628 - RNA, 19 nt, Homo sapiens
  misc_RNA (1)...(19): siRNA sense strand
agucaagggcugcggaaga

SEQ ID NO: 2496629 - RNA, 19 nt, Homo sapiens
  misc_RNA (1)...(19): siRNA sense strand
acgccauaguggaagacaa

SEQ ID NO: 2496630 - RNA, 19 nt, Homo sapiens
  misc_RNA (1)...(19): siRNA sense strand
cugaaauggccaagaaacu

SEQ ID NO: 2496631 - RNA, 19 nt, Homo sapiens
  misc_RNA (1)...(19): siRNA sense strand
guguagucuucaugggaga

SEQ ID NO: 2496632 - RNA, 19 nt, Homo sapiens
  misc_RNA (1)...(19): siRNA sense strand
cgccauaguggaagacaau

SEQ ID NO: 2496633 - RNA, 19 nt, Homo sapiens
  misc_RNA (1)...(19): siRNA sense strand
gccaagaaacuuagccaga

SEQ ID NO: 2496634 - RNA, 19 nt, Homo sapiens
  misc_RNA (1)...(19): siRNA sense strand
aaacuaagcuccuugcaga

SEQ ID NO: 2496635 - RNA, 19 nt, Homo sapiens
  misc_RNA (1)...(19): siRNA sense strand
gagucagacccgaggagga

SEQ ID NO: 2496636 - RNA, 19 nt, Homo sapiens
  misc_RNA (1)...(19): siRNA sense strand
accuagacacaguggacaa

SEQ ID NO: 2496637 - RNA, 19 nt, Homo sapiens
  misc_RNA (1)...(19): siRNA sense strand
gugaaugggacgugcugau

SEQ ID NO: 2496638 - RNA, 19 nt, Homo sapiens
  misc_RNA (1)...(19): siRNA sense strand
augcagccuucgugggauu

SEQ ID NO: 2496639 - RNA, 19 nt, Homo sapiens
  misc_RNA (1)...(19): siRNA sense strand
ccucuuuauccuugguauu

SEQ ID NO: 2496640 - RNA, 19 nt, Homo sapiens
  misc_RNA (1)...(19): siRNA sense strand
uauuugaggcugugggcuu

SEQ ID NO: 2496641 - RNA, 19 nt, Homo sapiens
  misc_RNA (1)...(19): siRNA sense strand
aagugauggcugagcuauu

SEQ ID NO: 2496642 - RNA, 19 nt, Homo sapiens
  misc_RNA (1)...(19): siRNA sense strand
ggacaguggugaaugggac

SEQ ID NO: 2496643 - RNA, 19 nt, Homo sapiens
  misc_RNA (1)...(19): siRNA sense strand
agucagacccgaggaggaa

SEQ ID NO: 2496644 - RNA, 19 nt, Homo sapiens
  misc_RNA (1)...(19): siRNA sense strand
gcugauagaugcucugcga

SEQ ID NO: 2496645 - RNA, 19 nt, Homo sapiens
  misc_RNA (1)...(19): siRNA sense strand
ccauaguggaagacaaucu

SEQ ID NO: 2496646 - RNA, 19 nt, Homo sapiens
  misc_RNA (1)...(19): siRNA sense strand
acacaguggacaauggcau

SEQ ID NO: 2496647 - RNA, 19 nt, Homo sapiens
  misc_RNA (1)...(19): siRNA sense strand
ggguuguguuggugcugau

SEQ ID NO: 2496648 - RNA, 19 nt, Homo sapiens
  misc_RNA (1)...(19): siRNA sense strand
cuuuauugaugcugguagu

SEQ ID NO: 2496649 - RNA, 19 nt, Homo sapiens
  misc_RNA (1)...(19): siRNA sense strand
gaagugggagugagcggaa

SEQ ID NO: 2496650 - RNA, 19 nt, Homo sapiens
  misc_RNA (1)...(19): siRNA sense strand
agcaauagcucggacgcaa

SEQ ID NO: 2496651 - RNA, 19 nt, Homo sapiens
  misc_RNA (1)...(19): siRNA sense strand
gccgagagaacgagggcua

SEQ ID NO: 2496652 - RNA, 19 nt, Homo sapiens
  misc_RNA (1)...(19): siRNA sense strand
caguggagcugaagugcca

SEQ ID NO: 2496653 - RNA, 19 nt, Homo sapiens
  misc_RNA (1)...(19): siRNA sense strand
gccgagagaacgagggcua

SEQ ID NO: 2496654 - RNA, 19 nt, Homo sapiens
  misc_RNA (1)...(19): siRNA sense strand
caguggagcugaagugcca

SEQ ID NO: 2496655 - RNA, 19 nt, Homo sapiens
  misc_RNA (1)...(19): siRNA sense strand
gggugaagcuggagggcaa

SEQ ID NO: 2496656 - RNA, 19 nt, Homo sapiens
  misc_RNA (1)...(19): siRNA sense strand
ccaaaggguuccucggaga

SEQ ID NO: 2496657 - RNA, 19 nt, Homo sapiens
  misc_RNA (1)...(19): siRNA sense strand
uggagaugcucgaggccau

SEQ ID NO: 2496658 - RNA, 19 nt, Homo sapiens
  misc_RNA (1)...(19): siRNA sense strand
cugagaagcucuaugccau

SEQ ID NO: 2496659 - RNA, 19 nt, Homo sapiens
  misc_RNA (1)...(19): siRNA sense strand
gccacaaggaagaggagga

SEQ ID NO: 2496660 - RNA, 19 nt, Homo sapiens
  misc_RNA (1)...(19): siRNA sense strand
acuuaguccuggaugaaga

SEQ ID NO: 2496661 - RNA, 19 nt, Homo sapiens
  misc_RNA (1)...(19): siRNA sense strand
ugucaguacugcagagcgu

SEQ ID NO: 2496662 - RNA, 19 nt, Homo sapiens
  misc_RNA (1)...(19): siRNA sense strand
ucgaagaugccgaggcugu

SEQ ID NO: 2496663 - RNA, 19 nt, Homo sapiens
  misc_RNA (1)...(19): siRNA sense strand
ggauggaggugcuggugcu

SEQ ID NO: 2496664 - RNA, 19 nt, Homo sapiens
  misc_RNA (1)...(19): siRNA sense strand
cuguggagcagcugcgaga

SEQ ID NO: 2496665 - RNA, 19 nt, Homo sapiens
  misc_RNA (1)...(19): siRNA sense strand
aguacagaaugcagagaga

SEQ ID NO: 2496666 - RNA, 19 nt, Homo sapiens
  misc_RNA (1)...(19): siRNA sense strand
agaacaaacacuagggaag

SEQ ID NO: 2496667 - RNA, 19 nt, Homo sapiens
  misc_RNA (1)...(19): siRNA sense strand
aggaggaagcaaugguaga

SEQ ID NO: 2496668 - RNA, 19 nt, Homo sapiens
  misc_RNA (1)...(19): siRNA sense strand
caugugaacuacagagcca

SEQ ID NO: 2496669 - RNA, 19 nt, Homo sapiens
  misc_RNA (1)...(19): siRNA sense strand
aggacaagcuagaggaagc

SEQ ID NO: 2496670 - RNA, 19 nt, Homo sapiens
  misc_RNA (1)...(19): siRNA sense strand
aagccaaggaggaagcaau

SEQ ID NO: 2496671 - RNA, 19 nt, Homo sapiens
  misc_RNA (1)...(19): siRNA sense strand
uacaagaacuuaauggaca

SEQ ID NO: 2496672 - RNA, 19 nt, Homo sapiens
  misc_RNA (1)...(19): siRNA sense strand
agggaagauacaagaacuu

SEQ ID NO: 2496673 - RNA, 19 nt, Homo sapiens
  misc_RNA (1)...(19): siRNA sense strand
aagaacaaacacuagggaa

SEQ ID NO: 2496674 - RNA, 19 nt, Homo sapiens
  misc_RNA (1)...(19): siRNA sense strand
aaguauauggaaaguguga

SEQ ID NO: 2496675 - RNA, 19 nt, Homo sapiens
  misc_RNA (1)...(19): siRNA sense strand
ggaaagcgauugaagcaag

SEQ ID NO: 2496676 - RNA, 19 nt, Homo sapiens
  misc_RNA (1)...(19): siRNA sense strand
acaugaaaccagaaaucca

SEQ ID NO: 2496677 - RNA, 19 nt, Homo sapiens
  misc_RNA (1)...(19): siRNA sense strand
auauggaaagugugaugaa

SEQ ID NO: 2496678 - RNA, 19 nt, Homo sapiens
  misc_RNA (1)...(19): siRNA sense strand
gagauaaagaguuucgacu

SEQ ID NO: 2496679 - RNA, 19 nt, Homo sapiens
  misc_RNA (1)...(19): siRNA sense strand
cucagaugaaauagaagaa

SEQ ID NO: 2496680 - RNA, 19 nt, Homo sapiens
  misc_RNA (1)...(19): siRNA sense strand
aggaggaagcaaugguaga

SEQ ID NO: 2496681 - RNA, 19 nt, Homo sapiens
  misc_RNA (1)...(19): siRNA sense strand
aggacaagcuagaggaagc

SEQ ID NO: 2496682 - RNA, 19 nt, Homo sapiens
  misc_RNA (1)...(19): siRNA sense strand
aagccaaggaggaagcaau

SEQ ID NO: 2496683 - RNA, 19 nt, Homo sapiens
  misc_RNA (1)...(19): siRNA sense strand
ggaaagcgauugaagcaag

SEQ ID NO: 2496684 - RNA, 19 nt, Homo sapiens
  misc_RNA (1)...(19): siRNA sense strand
ugaagauauuagugagcua

SEQ ID NO: 2496685 - RNA, 19 nt, Homo sapiens
  misc_RNA (1)...(19): siRNA sense strand
gcacaauacaagaggaaac

SEQ ID NO: 2496686 - RNA, 19 nt, Homo sapiens
  misc_RNA (1)...(19): siRNA sense strand
ugguagaaucauugcauaa

SEQ ID NO: 2496687 - RNA, 19 nt, Homo sapiens
  misc_RNA (1)...(19): siRNA sense strand
guucaagaucagaugacua

SEQ ID NO: 2496688 - RNA, 19 nt, Homo sapiens
  misc_RNA (1)...(19): siRNA sense strand
caggaaauucaaaggaaga

SEQ ID NO: 2496689 - RNA, 19 nt, Homo sapiens
  misc_RNA (1)...(19): siRNA sense strand
gggaacaggaaaaggguau

SEQ ID NO: 2496690 - RNA, 19 nt, Homo sapiens
  misc_RNA (1)...(19): siRNA sense strand
aguccaaccagcugauaaa

SEQ ID NO: 2496691 - RNA, 19 nt, Homo sapiens
  misc_RNA (1)...(19): siRNA sense strand
auucaaaggaagagugguu

SEQ ID NO: 2496692 - RNA, 19 nt, Homo sapiens
  misc_RNA (1)...(19): siRNA sense strand
gguauuacauagaugcaga

SEQ ID NO: 2496693 - RNA, 19 nt, Homo sapiens
  misc_RNA (1)...(19): siRNA sense strand
cuguaaauguagagggcac

SEQ ID NO: 2496694 - RNA, 19 nt, Homo sapiens
  misc_RNA (1)...(19): siRNA sense strand
ggaaucaacugcaggccuu

SEQ ID NO: 2496695 - RNA, 19 nt, Homo sapiens
  misc_RNA (1)...(19): siRNA sense strand
guuuggaggauuugggaca

SEQ ID NO: 2496696 - RNA, 19 nt, Homo sapiens
  misc_RNA (1)...(19): siRNA sense strand
gauucgaagccaacaacaa

SEQ ID NO: 2496697 - RNA, 19 nt, Homo sapiens
  misc_RNA (1)...(19): siRNA sense strand
auuuaaggcaguagguuau

SEQ ID NO: 2496698 - RNA, 19 nt, Homo sapiens
  misc_RNA (1)...(19): siRNA sense strand
gguuauaguugcaugccca

SEQ ID NO: 2496699 - RNA, 19 nt, Homo sapiens
  misc_RNA (1)...(19): siRNA sense strand
ccauagaacuuuacagguc

SEQ ID NO: 2496700 - RNA, 19 nt, Homo sapiens
  misc_RNA (1)...(19): siRNA sense strand
acugggauuuggaggauuu

SEQ ID NO: 2496701 - RNA, 19 nt, Homo sapiens
  misc_RNA (1)...(19): siRNA sense strand
ucaaaggaagagugguuau

SEQ ID NO: 2496702 - RNA, 19 nt, Homo sapiens
  misc_RNA (1)...(19): siRNA sense strand
uugcacaauacaagaggaa

SEQ ID NO: 2496703 - RNA, 19 nt, Homo sapiens
  misc_RNA (1)...(19): siRNA sense strand
cuuuacagguccuaaucaa

SEQ ID NO: 2496704 - RNA, 19 nt, Homo sapiens
  misc_RNA (1)...(19): siRNA sense strand
uguugggagaugagagaga

SEQ ID NO: 2496705 - RNA, 19 nt, Homo sapiens
  misc_RNA (1)...(19): siRNA sense strand
uugcaugcccaguaauaaa

SEQ ID NO: 2496706 - RNA, 19 nt, Homo sapiens
  misc_RNA (1)...(19): siRNA sense strand
caauacaagaggaaacuca

SEQ ID NO: 2496707 - RNA, 19 nt, Homo sapiens
  misc_RNA (1)...(19): siRNA sense strand
uggauacgauucaggguga

SEQ ID NO: 2496708 - RNA, 19 nt, Homo sapiens
  misc_RNA (1)...(19): siRNA sense strand
cugcaggccuuuuggggaa

SEQ ID NO: 2496709 - RNA, 19 nt, Homo sapiens
  misc_RNA (1)...(19): siRNA sense strand
guggaauucacacaagaaa

SEQ ID NO: 2496710 - RNA, 19 nt, Homo sapiens
  misc_RNA (1)...(19): siRNA sense strand
augcagaucuguuacgaga

SEQ ID NO: 2496711 - RNA, 19 nt, Homo sapiens
  misc_RNA (1)...(19): siRNA sense strand
caucauuaaagacgaucua

SEQ ID NO: 2496712 - RNA, 19 nt, Homo sapiens
  misc_RNA (1)...(19): siRNA sense strand
gcuguugggagaugagaga

SEQ ID NO: 2496713 - RNA, 19 nt, Homo sapiens
  misc_RNA (1)...(19): siRNA sense strand
augaagagcaguugcgagu

SEQ ID NO: 2496714 - RNA, 19 nt, Homo sapiens
  misc_RNA (1)...(19): siRNA sense strand
ucucaaaucaggaugcaga

SEQ ID NO: 2496715 - RNA, 19 nt, Homo sapiens
  misc_RNA (1)...(19): siRNA sense strand
ccaguaauaaagaugaaga

SEQ ID NO: 2496716 - RNA, 19 nt, Homo sapiens
  misc_RNA (1)...(19): siRNA sense strand
gggauuuggaggauuuaau

SEQ ID NO: 2496717 - RNA, 19 nt, Homo sapiens
  misc_RNA (1)...(19): siRNA sense strand
gcauaaaguuuugggagga

SEQ ID NO: 2496718 - RNA, 19 nt, Homo sapiens
  misc_RNA (1)...(19): siRNA sense strand
acacagcagcagcagcaaa

SEQ ID NO: 2496719 - RNA, 19 nt, Homo sapiens
  misc_RNA (1)...(19): siRNA sense strand
cagcagcagcagcaaacua

SEQ ID NO: 2496720 - RNA, 19 nt, Homo sapiens
  misc_RNA (1)...(19): siRNA sense strand
gcacuaaaacauugccaga

SEQ ID NO: 2496721 - RNA, 19 nt, Homo sapiens
  misc_RNA (1)...(19): siRNA sense strand
ccaacuaacacaggcacua

SEQ ID NO: 2496722 - RNA, 19 nt, Homo sapiens
  misc_RNA (1)...(19): siRNA sense strand
ucauuaaagacgaucuaga

SEQ ID NO: 2496723 - RNA, 19 nt, Homo sapiens
  misc_RNA (1)...(19): siRNA sense strand
gggcaaagaagaagggcaa

SEQ ID NO: 2496724 - RNA, 19 nt, Homo sapiens
  misc_RNA (1)...(19): siRNA sense strand
gagaaagcgaagcaggaga

SEQ ID NO: 2496725 - RNA, 19 nt, Homo sapiens
  misc_RNA (1)...(19): siRNA sense strand
uggcaagcguggagcagga

SEQ ID NO: 2496726 - RNA, 19 nt, Homo sapiens
  misc_RNA (1)...(19): siRNA sense strand
gcgacuacguccagagcac

SEQ ID NO: 2496727 - RNA, 19 nt, Homo sapiens
  misc_RNA (1)...(19): siRNA sense strand
aggcuggagaagaggacuu

SEQ ID NO: 2496728 - RNA, 19 nt, Homo sapiens
  misc_RNA (1)...(19): siRNA sense strand
augaugagcuccaacguga

SEQ ID NO: 2496729 - RNA, 19 nt, Homo sapiens
  misc_RNA (1)...(19): siRNA sense strand
ccacauuugaggcuggaga

SEQ ID NO: 2496730 - RNA, 19 nt, Homo sapiens
  misc_RNA (1)...(19): siRNA sense strand
gaaaugauccggaaccuga

SEQ ID NO: 2496731 - RNA, 19 nt, Homo sapiens
  misc_RNA (1)...(19): siRNA sense strand
acucgguccuccagcacaa

SEQ ID NO: 2496732 - RNA, 19 nt, Homo sapiens
  misc_RNA (1)...(19): siRNA sense strand
gcaucuacgugguggaagc

SEQ ID NO: 2496733 - RNA, 19 nt, Homo sapiens
  misc_RNA (1)...(19): siRNA sense strand
gaaguagagcagugggcuu

SEQ ID NO: 2496734 - RNA, 19 nt, Homo sapiens
  misc_RNA (1)...(19): siRNA sense strand
cugucaaugcuguaacaaa

SEQ ID NO: 2496735 - RNA, 19 nt, Homo sapiens
  misc_RNA (1)...(19): siRNA sense strand
acuccagaaacaugauaua

SEQ ID NO: 2496736 - RNA, 19 nt, Homo sapiens
  misc_RNA (1)...(19): siRNA sense strand
ccaccuuccaccugggaga

SEQ ID NO: 2496737 - RNA, 19 nt, Homo sapiens
  misc_RNA (1)...(19): siRNA sense strand
ucuuaaacuuacugggaaa

SEQ ID NO: 2496738 - RNA, 19 nt, Homo sapiens
  misc_RNA (1)...(19): siRNA sense strand
cgggaaggauuuuggguaa

SEQ ID NO: 2496739 - RNA, 19 nt, Homo sapiens
  misc_RNA (1)...(19): siRNA sense strand
uuacaaaacccuaggggaa

SEQ ID NO: 2496740 - RNA, 19 nt, Homo sapiens
  misc_RNA (1)...(19): siRNA sense strand
ccuuaauggaguugguaau

SEQ ID NO: 2496741 - RNA, 19 nt, Homo sapiens
  misc_RNA (1)...(19): siRNA sense strand
agguaaaguggaaacguua

SEQ ID NO: 2496742 - RNA, 19 nt, Homo sapiens
  misc_RNA (1)...(19): siRNA sense strand
agaaauaaguugaugacuc

SEQ ID NO: 2496743 - RNA, 19 nt, Homo sapiens
  misc_RNA (1)...(19): siRNA sense strand
ccuugaggaacuugagauu

SEQ ID NO: 2496744 - RNA, 19 nt, Homo sapiens
  misc_RNA (1)...(19): siRNA sense strand
aaucaguaggaaugcaaua

SEQ ID NO: 2496745 - RNA, 19 nt, Homo sapiens
  misc_RNA (1)...(19): siRNA sense strand
gggaaggauuuuggguaaa

SEQ ID NO: 2496746 - RNA, 19 nt, Homo sapiens
  misc_RNA (1)...(19): siRNA sense strand
cauuagaauacuuggaucu

SEQ ID NO: 2496747 - RNA, 19 nt, Homo sapiens
  misc_RNA (1)...(19): siRNA sense strand
uguuuggaacugcgagaua

SEQ ID NO: 2496748 - RNA, 19 nt, Homo sapiens
  misc_RNA (1)...(19): siRNA sense strand
uuaacacaauagaggaaga

SEQ ID NO: 2496749 - RNA, 19 nt, Homo sapiens
  misc_RNA (1)...(19): siRNA sense strand
cuacagagcuaugagccaa

SEQ ID NO: 2496750 - RNA, 19 nt, Homo sapiens
  misc_RNA (1)...(19): siRNA sense strand
gaguuauagauccagguaa

SEQ ID NO: 2496751 - RNA, 19 nt, Homo sapiens
  misc_RNA (1)...(19): siRNA sense strand
ucuggagcccauugagaaa

SEQ ID NO: 2496752 - RNA, 19 nt, Homo sapiens
  misc_RNA (1)...(19): siRNA sense strand
agaacuauccacuggugaa

SEQ ID NO: 2496753 - RNA, 19 nt, Homo sapiens
  misc_RNA (1)...(19): siRNA sense strand
gugaagagugaguggugca

SEQ ID NO: 2496754 - RNA, 19 nt, Homo sapiens
  misc_RNA (1)...(19): siRNA sense strand
gcugcauauuccaagguuu

SEQ ID NO: 2496755 - RNA, 19 nt, Homo sapiens
  misc_RNA (1)...(19): siRNA sense strand
cauuagcaacagugaccua

SEQ ID NO: 2496756 - RNA, 19 nt, Homo sapiens
  misc_RNA (1)...(19): siRNA sense strand
cgagauacugauuuggaca

SEQ ID NO: 2496757 - RNA, 19 nt, Homo sapiens
  misc_RNA (1)...(19): siRNA sense strand
ccuacuggguggagaaccu

SEQ ID NO: 2496758 - RNA, 19 nt, Homo sapiens
  misc_RNA (1)...(19): siRNA sense strand
acacaauagaggaagauuc

SEQ ID NO: 2496759 - RNA, 19 nt, Homo sapiens
  misc_RNA (1)...(19): siRNA sense strand
ucacaguagaaaacaguaa

SEQ ID NO: 2496760 - RNA, 19 nt, Homo sapiens
  misc_RNA (1)...(19): siRNA sense strand
guugguaauuuuagagcau

SEQ ID NO: 2496761 - RNA, 19 nt, Homo sapiens
  misc_RNA (1)...(19): siRNA sense strand
aaauucagccugugaggau

SEQ ID NO: 2496762 - RNA, 19 nt, Homo sapiens
  misc_RNA (1)...(19): siRNA sense strand
aguaggaaugcaauaacua

SEQ ID NO: 2496763 - RNA, 19 nt, Homo sapiens
  misc_RNA (1)...(19): siRNA sense strand
gugugaaccuccaggcucu

SEQ ID NO: 2496764 - RNA, 19 nt, Homo sapiens
  misc_RNA (1)...(19): siRNA sense strand
acuugucaguggccagaaa

SEQ ID NO: 2496765 - RNA, 19 nt, Homo sapiens
  misc_RNA (1)...(19): siRNA sense strand
ggccugugguauaugaaaa

SEQ ID NO: 2496766 - RNA, 19 nt, Homo sapiens
  misc_RNA (1)...(19): siRNA sense strand
gcaaacuacaucaagggaa

SEQ ID NO: 2496767 - RNA, 19 nt, Homo sapiens
  misc_RNA (1)...(19): siRNA sense strand
caaacuacaucaagggaac

SEQ ID NO: 2496768 - RNA, 19 nt, Homo sapiens
  misc_RNA (1)...(19): siRNA sense strand
cggaagauaagaagaccca

SEQ ID NO: 2496769 - RNA, 19 nt, Homo sapiens
  misc_RNA (1)...(19): siRNA sense strand
ccuaugaucacguggaacu

SEQ ID NO: 2496770 - RNA, 19 nt, Homo sapiens
  misc_RNA (1)...(19): siRNA sense strand
ccuacuacccaccggaaga

SEQ ID NO: 2496771 - RNA, 19 nt, Homo sapiens
  misc_RNA (1)...(19): siRNA sense strand
gaagauaagaagacccagu

SEQ ID NO: 2496772 - RNA, 19 nt, Homo sapiens
  misc_RNA (1)...(19): siRNA sense strand
caucaagggaacagugaag

SEQ ID NO: 2496773 - RNA, 19 nt, Homo sapiens
  misc_RNA (1)...(19): siRNA sense strand
agaaagagcauaaggacga

SEQ ID NO: 2496774 - RNA, 19 nt, Homo sapiens
  misc_RNA (1)...(19): siRNA sense strand
aguggaagaaagagcauaa

SEQ ID NO: 2496775 - RNA, 19 nt, Homo sapiens
  misc_RNA (1)...(19): siRNA sense strand
cgaugaugaagaagaggaa

SEQ ID NO: 2496776 - RNA, 19 nt, Homo sapiens
  misc_RNA (1)...(19): siRNA sense strand
augaugaagaagaggaaga

SEQ ID NO: 2496777 - RNA, 19 nt, Homo sapiens
  misc_RNA (1)...(19): siRNA sense strand
aggaagacgaggaggaaug

SEQ ID NO: 2496778 - RNA, 19 nt, Homo sapiens
  misc_RNA (1)...(19): siRNA sense strand
ccgacgaggaggacgauga

SEQ ID NO: 2496779 - RNA, 19 nt, Homo sapiens
  misc_RNA (1)...(19): siRNA sense strand
augaagaagaggaagacga

SEQ ID NO: 2496780 - RNA, 19 nt, Homo sapiens
  misc_RNA (1)...(19): siRNA sense strand
aagaagaggaagacgagga

SEQ ID NO: 2496781 - RNA, 19 nt, Homo sapiens
  misc_RNA (1)...(19): siRNA sense strand
aagaggaagacgaggagga

SEQ ID NO: 2496782 - RNA, 19 nt, Homo sapiens
  misc_RNA (1)...(19): siRNA sense strand
ccgcaugaaguggaagaaa

SEQ ID NO: 2496783 - RNA, 19 nt, Homo sapiens
  misc_RNA (1)...(19): siRNA sense strand
cugcagugaccucgccaaa

SEQ ID NO: 2496784 - RNA, 19 nt, Homo sapiens
  misc_RNA (1)...(19): siRNA sense strand
aggaggacgaugaugaaga

SEQ ID NO: 2496785 - RNA, 19 nt, Homo sapiens
  misc_RNA (1)...(19): siRNA sense strand
aggacgaugaugaagaaga

SEQ ID NO: 2496786 - RNA, 19 nt, Homo sapiens
  misc_RNA (1)...(19): siRNA sense strand
cgaaagacucagagcggga

SEQ ID NO: 2496787 - RNA, 19 nt, Homo sapiens
  misc_RNA (1)...(19): siRNA sense strand
ccgccagguauuugugaaa

SEQ ID NO: 2496788 - RNA, 19 nt, Homo sapiens
  misc_RNA (1)...(19): siRNA sense strand
acucagagcgggaagguca

SEQ ID NO: 2496789 - RNA, 19 nt, Homo sapiens
  misc_RNA (1)...(19): siRNA sense strand
agacgaagcuggaggccgu

SEQ ID NO: 2496790 - RNA, 19 nt, Homo sapiens
  misc_RNA (1)...(19): siRNA sense strand
ggacaguggaggagagcag

SEQ ID NO: 2496791 - RNA, 19 nt, Homo sapiens
  misc_RNA (1)...(19): siRNA sense strand
aagcauuugucaagaggga

SEQ ID NO: 2496792 - RNA, 19 nt, Homo sapiens
  misc_RNA (1)...(19): siRNA sense strand
ccggagaacaucugggugu

SEQ ID NO: 2496793 - RNA, 19 nt, Homo sapiens
  misc_RNA (1)...(19): siRNA sense strand
uaguaagaucccuggccaa

SEQ ID NO: 2496794 - RNA, 19 nt, Homo sapiens
  misc_RNA (1)...(19): siRNA sense strand
cgaaugauguauuugacca

SEQ ID NO: 2496795 - RNA, 19 nt, Homo sapiens
  misc_RNA (1)...(19): siRNA sense strand
auggcgaauacgagggcaa

SEQ ID NO: 2496796 - RNA, 19 nt, Homo sapiens
  misc_RNA (1)...(19): siRNA sense strand
agcuggaggccgugagaga

SEQ ID NO: 2496797 - RNA, 19 nt, Homo sapiens
  misc_RNA (1)...(19): siRNA sense strand
cuggaggccgugagagaca

SEQ ID NO: 2496798 - RNA, 19 nt, Homo sapiens
  misc_RNA (1)...(19): siRNA sense strand
ucaaggaggugaacgggca

SEQ ID NO: 2496799 - RNA, 19 nt, Homo sapiens
  misc_RNA (1)...(19): siRNA sense strand
cggugaaggugcuacgaac

SEQ ID NO: 2496800 - RNA, 19 nt, Homo sapiens
  misc_RNA (1)...(19): siRNA sense strand
uggauaaacuaguacgaga

SEQ ID NO: 2496801 - RNA, 19 nt, Homo sapiens
  misc_RNA (1)...(19): siRNA sense strand
aggugguauuuguuggaaa

SEQ ID NO: 2496802 - RNA, 19 nt, Homo sapiens
  misc_RNA (1)...(19): siRNA sense strand
gauaauuacaaacggguca

SEQ ID NO: 2496803 - RNA, 19 nt, Homo sapiens
  misc_RNA (1)...(19): siRNA sense strand
uugcaaacuggaugaacua

SEQ ID NO: 2496804 - RNA, 19 nt, Homo sapiens
  misc_RNA (1)...(19): siRNA sense strand
gaacauuggcucagggguu

SEQ ID NO: 2496805 - RNA, 19 nt, Homo sapiens
  misc_RNA (1)...(19): siRNA sense strand
ugagcaaggagaagcgaga

SEQ ID NO: 2496806 - RNA, 19 nt, Homo sapiens
  misc_RNA (1)...(19): siRNA sense strand
acaugaugagcaaggagaa

SEQ ID NO: 2496807 - RNA, 19 nt, Homo sapiens
  misc_RNA (1)...(19): siRNA sense strand
cggauucaauggacgguca

SEQ ID NO: 2496808 - RNA, 19 nt, Homo sapiens
  misc_RNA (1)...(19): siRNA sense strand
aggagaagcgagaggcugu

SEQ ID NO: 2496809 - RNA, 19 nt, Homo sapiens
  misc_RNA (1)...(19): siRNA sense strand
agguacuagucuuggagga

SEQ ID NO: 2496810 - RNA, 19 nt, Homo sapiens
  misc_RNA (1)...(19): siRNA sense strand
uggauaaacuaguacgaga

SEQ ID NO: 2496811 - RNA, 19 nt, Homo sapiens
  misc_RNA (1)...(19): siRNA sense strand
aggugguauuuguuggaaa

SEQ ID NO: 2496812 - RNA, 19 nt, Homo sapiens
  misc_RNA (1)...(19): siRNA sense strand
ugagcaaggagaagcgaga

SEQ ID NO: 2496813 - RNA, 19 nt, Homo sapiens
  misc_RNA (1)...(19): siRNA sense strand
acaugaugagcaaggagaa

SEQ ID NO: 2496814 - RNA, 19 nt, Homo sapiens
  misc_RNA (1)...(19): siRNA sense strand
aggagaagcgagaggcugu

SEQ ID NO: 2496815 - RNA, 19 nt, Homo sapiens
  misc_RNA (1)...(19): siRNA sense strand
cugaagaagaagaggaaga

SEQ ID NO: 2496816 - RNA, 19 nt, Homo sapiens
  misc_RNA (1)...(19): siRNA sense strand
uggauaaacuaguacgaga

SEQ ID NO: 2496817 - RNA, 19 nt, Homo sapiens
  misc_RNA (1)...(19): siRNA sense strand
aggugguauuuguuggaaa

SEQ ID NO: 2496818 - RNA, 19 nt, Homo sapiens
  misc_RNA (1)...(19): siRNA sense strand
gcuuaugggucuacaggca

SEQ ID NO: 2496819 - RNA, 19 nt, Homo sapiens
  misc_RNA (1)...(19): siRNA sense strand
gauaauuacaaacggguca

SEQ ID NO: 2496820 - RNA, 19 nt, Homo sapiens
  misc_RNA (1)...(19): siRNA sense strand
uugcaaacuggaugaacua

SEQ ID NO: 2496821 - RNA, 19 nt, Homo sapiens
  misc_RNA (1)...(19): siRNA sense strand
gaacauuggcucagggguu

SEQ ID NO: 2496822 - RNA, 19 nt, Homo sapiens
  misc_RNA (1)...(19): siRNA sense strand
ugagcaaggagaagcgaga

SEQ ID NO: 2496823 - RNA, 19 nt, Homo sapiens
  misc_RNA (1)...(19): siRNA sense strand
caauguggcuuaugggucu

SEQ ID NO: 2496824 - RNA, 19 nt, Homo sapiens
  misc_RNA (1)...(19): siRNA sense strand
acaugaugagcaaggagaa

SEQ ID NO: 2496825 - RNA, 19 nt, Homo sapiens
  misc_RNA (1)...(19): siRNA sense strand
cggauucaauggacgguca

SEQ ID NO: 2496826 - RNA, 19 nt, Homo sapiens
  misc_RNA (1)...(19): siRNA sense strand
ugcugaagaagaagaggaa

SEQ ID NO: 2496827 - RNA, 19 nt, Homo sapiens
  misc_RNA (1)...(19): siRNA sense strand
ccaaagacaucacugcuga

SEQ ID NO: 2496828 - RNA, 19 nt, Homo sapiens
  misc_RNA (1)...(19): siRNA sense strand
aggagaagcgagaggcugu

SEQ ID NO: 2496829 - RNA, 19 nt, Homo sapiens
  misc_RNA (1)...(19): siRNA sense strand
agguacuagucuuggagga

SEQ ID NO: 2496830 - RNA, 19 nt, Homo sapiens
  misc_RNA (1)...(19): siRNA sense strand
cugaagaagaagaggaaga

SEQ ID NO: 2496831 - RNA, 19 nt, Homo sapiens
  misc_RNA (1)...(19): siRNA sense strand
gcuuaugggucuacaggca

SEQ ID NO: 2496832 - RNA, 19 nt, Homo sapiens
  misc_RNA (1)...(19): siRNA sense strand
caauguggcuuaugggucu

SEQ ID NO: 2496833 - RNA, 19 nt, Homo sapiens
  misc_RNA (1)...(19): siRNA sense strand
ugcugaagaagaagaggaa

SEQ ID NO: 2496834 - RNA, 19 nt, Homo sapiens
  misc_RNA (1)...(19): siRNA sense strand
ccaaagacaucacugcuga

SEQ ID NO: 2496835 - RNA, 19 nt, Homo sapiens
  misc_RNA (1)...(19): siRNA sense strand
uggauaaacuaguacgaga

SEQ ID NO: 2496836 - RNA, 19 nt, Homo sapiens
  misc_RNA (1)...(19): siRNA sense strand
aggugguauuuguuggaaa

SEQ ID NO: 2496837 - RNA, 19 nt, Homo sapiens
  misc_RNA (1)...(19): siRNA sense strand
gauaauuacaaacggguca

SEQ ID NO: 2496838 - RNA, 19 nt, Homo sapiens
  misc_RNA (1)...(19): siRNA sense strand
uugcaaacuggaugaacua

SEQ ID NO: 2496839 - RNA, 19 nt, Homo sapiens
  misc_RNA (1)...(19): siRNA sense strand
gaacauuggcucagggguu

SEQ ID NO: 2496840 - RNA, 19 nt, Homo sapiens
  misc_RNA (1)...(19): siRNA sense strand
ugagcaaggagaagcgaga

SEQ ID NO: 2496841 - RNA, 19 nt, Homo sapiens
  misc_RNA (1)...(19): siRNA sense strand
acaugaugagcaaggagaa

SEQ ID NO: 2496842 - RNA, 19 nt, Homo sapiens
  misc_RNA (1)...(19): siRNA sense strand
cggauucaauggacgguca

SEQ ID NO: 2496843 - RNA, 19 nt, Homo sapiens
  misc_RNA (1)...(19): siRNA sense strand
aggagaagcgagaggcugu

SEQ ID NO: 2496844 - RNA, 19 nt, Homo sapiens
  misc_RNA (1)...(19): siRNA sense strand
agguacuagucuuggagga

SEQ ID NO: 2496845 - RNA, 19 nt, Homo sapiens
  misc_RNA (1)...(19): siRNA sense strand
uggauaaacuaguacgaga

SEQ ID NO: 2496846 - RNA, 19 nt, Homo sapiens
  misc_RNA (1)...(19): siRNA sense strand
aggugguauuuguuggaaa

SEQ ID NO: 2496847 - RNA, 19 nt, Homo sapiens
  misc_RNA (1)...(19): siRNA sense strand
ugagcaaggagaagcgaga

SEQ ID NO: 2496848 - RNA, 19 nt, Homo sapiens
  misc_RNA (1)...(19): siRNA sense strand
acaugaugagcaaggagaa

SEQ ID NO: 2496849 - RNA, 19 nt, Homo sapiens
  misc_RNA (1)...(19): siRNA sense strand
aggagaagcgagaggcugu

SEQ ID NO: 2496850 - RNA, 19 nt, Homo sapiens
  misc_RNA (1)...(19): siRNA sense strand
cugugaagauggaagggca

SEQ ID NO: 2496851 - RNA, 19 nt, Homo sapiens
  misc_RNA (1)...(19): siRNA sense strand
gggcaugaaaccagcgacu

SEQ ID NO: 2496852 - RNA, 19 nt, Homo sapiens
  misc_RNA (1)...(19): siRNA sense strand
cagacacgcaggaggccua

SEQ ID NO: 2496853 - RNA, 19 nt, Homo sapiens
  misc_RNA (1)...(19): siRNA sense strand
agcuggacuucaaggcaua

SEQ ID NO: 2496854 - RNA, 19 nt, Homo sapiens
  misc_RNA (1)...(19): siRNA sense strand
acuucaaggcauacgaaca

SEQ ID NO: 2496855 - RNA, 19 nt, Homo sapiens
  misc_RNA (1)...(19): siRNA sense strand
aggcauacgaacaggcacu

SEQ ID NO: 2496856 - RNA, 19 nt, Homo sapiens
  misc_RNA (1)...(19): siRNA sense strand
cggagaaugaaguggaaaa

SEQ ID NO: 2496857 - RNA, 19 nt, Homo sapiens
  misc_RNA (1)...(19): siRNA sense strand
gaggauugaaauagcacau

SEQ ID NO: 2496858 - RNA, 19 nt, Homo sapiens
  misc_RNA (1)...(19): siRNA sense strand
gcagguacggcuacggcua

SEQ ID NO: 2496859 - RNA, 19 nt, Homo sapiens
  misc_RNA (1)...(19): siRNA sense strand
acauaagucaugacaacau

SEQ ID NO: 2496860 - RNA, 19 nt, Homo sapiens
  misc_RNA (1)...(19): siRNA sense strand
uuucauaacuaaugggagu

SEQ ID NO: 2496861 - RNA, 19 nt, Homo sapiens
  misc_RNA (1)...(19): siRNA sense strand
cuccagaaggccagacaaa

SEQ ID NO: 2496862 - RNA, 19 nt, Homo sapiens
  misc_RNA (1)...(19): siRNA sense strand
ccuguuuaccauuggaauu

SEQ ID NO: 2496863 - RNA, 19 nt, Homo sapiens
  misc_RNA (1)...(19): siRNA sense strand
agguggaguucaagaccau

SEQ ID NO: 2496864 - RNA, 19 nt, Homo sapiens
  misc_RNA (1)...(19): siRNA sense strand
agauguaccagguggaguu

SEQ ID NO: 2496865 - RNA, 19 nt, Homo sapiens
  misc_RNA (1)...(19): siRNA sense strand
caagaaugagaguugccua

SEQ ID NO: 2496866 - RNA, 19 nt, Homo sapiens
  misc_RNA (1)...(19): siRNA sense strand
ggaugaugucacuggagaa

SEQ ID NO: 2496867 - RNA, 19 nt, Homo sapiens
  misc_RNA (1)...(19): siRNA sense strand
aggccauccuggaggguga

SEQ ID NO: 2496868 - RNA, 19 nt, Homo sapiens
  misc_RNA (1)...(19): siRNA sense strand
ccuucaaaguggaaccaga

SEQ ID NO: 2496869 - RNA, 19 nt, Homo sapiens
  misc_RNA (1)...(19): siRNA sense strand
aggacuuggcugcgcguaa

SEQ ID NO: 2496870 - RNA, 19 nt, Homo sapiens
  misc_RNA (1)...(19): siRNA sense strand
ccucggaagcugagaucca

SEQ ID NO: 2496871 - RNA, 19 nt, Homo sapiens
  misc_RNA (1)...(19): siRNA sense strand
gggaugaugucacuggaga

SEQ ID NO: 2496872 - RNA, 19 nt, Homo sapiens
  misc_RNA (1)...(19): siRNA sense strand
augaugaaguacuggcaga

SEQ ID NO: 2496873 - RNA, 19 nt, Homo sapiens
  misc_RNA (1)...(19): siRNA sense strand
acgugguaguagcgaggua

SEQ ID NO: 2496874 - RNA, 19 nt, Homo sapiens
  misc_RNA (1)...(19): siRNA sense strand
ccagagugggugacagaca

SEQ ID NO: 2496875 - RNA, 19 nt, Homo sapiens
  misc_RNA (1)...(19): siRNA sense strand
gcgcguaacugccugguca

SEQ ID NO: 2496876 - RNA, 19 nt, Homo sapiens
  misc_RNA (1)...(19): siRNA sense strand
caacaaacgccacagcaca

SEQ ID NO: 2496877 - RNA, 19 nt, Homo sapiens
  misc_RNA (1)...(19): siRNA sense strand
gggucuaccagaagggcca

SEQ ID NO: 2496878 - RNA, 19 nt, Homo sapiens
  misc_RNA (1)...(19): siRNA sense strand
cgagguaugaggaggccau

SEQ ID NO: 2496879 - RNA, 19 nt, Homo sapiens
  misc_RNA (1)...(19): siRNA sense strand
ccaagagcaaggaugaaaa

SEQ ID NO: 2496880 - RNA, 19 nt, Homo sapiens
  misc_RNA (1)...(19): siRNA sense strand
gcuuugugcauaaggacuu

SEQ ID NO: 2496881 - RNA, 19 nt, Homo sapiens
  misc_RNA (1)...(19): siRNA sense strand
ugaggauuuccaagagcaa

SEQ ID NO: 2496882 - RNA, 19 nt, Homo sapiens
  misc_RNA (1)...(19): siRNA sense strand
gaagaagcccgcagugcca

SEQ ID NO: 2496883 - RNA, 19 nt, Homo sapiens
  misc_RNA (1)...(19): siRNA sense strand
cuucaacaucaaauggauu

SEQ ID NO: 2496884 - RNA, 19 nt, Homo sapiens
  misc_RNA (1)...(19): siRNA sense strand
agcagagauccaagaagaa

SEQ ID NO: 2496885 - RNA, 19 nt, Homo sapiens
  misc_RNA (1)...(19): siRNA sense strand
ggucuagccugcagcccau

SEQ ID NO: 2496886 - RNA, 19 nt, Homo sapiens
  misc_RNA (1)...(19): siRNA sense strand
ggaugaugucacuggagaa

SEQ ID NO: 2496887 - RNA, 19 nt, Homo sapiens
  misc_RNA (1)...(19): siRNA sense strand
aggccauccuggaggguga

SEQ ID NO: 2496888 - RNA, 19 nt, Homo sapiens
  misc_RNA (1)...(19): siRNA sense strand
ccuucaaaguggaaccaga

SEQ ID NO: 2496889 - RNA, 19 nt, Homo sapiens
  misc_RNA (1)...(19): siRNA sense strand
aggacuuggcugcgcguaa

SEQ ID NO: 2496890 - RNA, 19 nt, Homo sapiens
  misc_RNA (1)...(19): siRNA sense strand
ccucggaagcugagaucca

SEQ ID NO: 2496891 - RNA, 19 nt, Homo sapiens
  misc_RNA (1)...(19): siRNA sense strand
gggaugaugucacuggaga

SEQ ID NO: 2496892 - RNA, 19 nt, Homo sapiens
  misc_RNA (1)...(19): siRNA sense strand
augaugaaguacuggcaga

SEQ ID NO: 2496893 - RNA, 19 nt, Homo sapiens
  misc_RNA (1)...(19): siRNA sense strand
acgugguaguagcgaggua

SEQ ID NO: 2496894 - RNA, 19 nt, Homo sapiens
  misc_RNA (1)...(19): siRNA sense strand
ccagagugggugacagaca

SEQ ID NO: 2496895 - RNA, 19 nt, Homo sapiens
  misc_RNA (1)...(19): siRNA sense strand
gcgcguaacugccugguca

SEQ ID NO: 2496896 - RNA, 19 nt, Homo sapiens
  misc_RNA (1)...(19): siRNA sense strand
caacaaacgccacagcaca

SEQ ID NO: 2496897 - RNA, 19 nt, Homo sapiens
  misc_RNA (1)...(19): siRNA sense strand
gggucuaccagaagggcca

SEQ ID NO: 2496898 - RNA, 19 nt, Homo sapiens
  misc_RNA (1)...(19): siRNA sense strand
cgagguaugaggaggccau

SEQ ID NO: 2496899 - RNA, 19 nt, Homo sapiens
  misc_RNA (1)...(19): siRNA sense strand
ccaagagcaaggaugaaaa

SEQ ID NO: 2496900 - RNA, 19 nt, Homo sapiens
  misc_RNA (1)...(19): siRNA sense strand
gcuuugugcauaaggacuu

SEQ ID NO: 2496901 - RNA, 19 nt, Homo sapiens
  misc_RNA (1)...(19): siRNA sense strand
ugaggauuuccaagagcaa

SEQ ID NO: 2496902 - RNA, 19 nt, Homo sapiens
  misc_RNA (1)...(19): siRNA sense strand
gaagaagcccgcagugcca

SEQ ID NO: 2496903 - RNA, 19 nt, Homo sapiens
  misc_RNA (1)...(19): siRNA sense strand
cuucaacaucaaauggauu

SEQ ID NO: 2496904 - RNA, 19 nt, Homo sapiens
  misc_RNA (1)...(19): siRNA sense strand
agcagagauccaagaagaa

SEQ ID NO: 2496905 - RNA, 19 nt, Homo sapiens
  misc_RNA (1)...(19): siRNA sense strand
ggucuagccugcagcccau

SEQ ID NO: 2496906 - RNA, 19 nt, Homo sapiens
  misc_RNA (1)...(19): siRNA sense strand
ggaugaugucacuggagaa

SEQ ID NO: 2496907 - RNA, 19 nt, Homo sapiens
  misc_RNA (1)...(19): siRNA sense strand
aggccauccuggaggguga

SEQ ID NO: 2496908 - RNA, 19 nt, Homo sapiens
  misc_RNA (1)...(19): siRNA sense strand
ccuucaaaguggaaccaga

SEQ ID NO: 2496909 - RNA, 19 nt, Homo sapiens
  misc_RNA (1)...(19): siRNA sense strand
aggacuuggcugcgcguaa

SEQ ID NO: 2496910 - RNA, 19 nt, Homo sapiens
  misc_RNA (1)...(19): siRNA sense strand
ccucggaagcugagaucca

SEQ ID NO: 2496911 - RNA, 19 nt, Homo sapiens
  misc_RNA (1)...(19): siRNA sense strand
gggaugaugucacuggaga

SEQ ID NO: 2496912 - RNA, 19 nt, Homo sapiens
  misc_RNA (1)...(19): siRNA sense strand
augaugaaguacuggcaga

SEQ ID NO: 2496913 - RNA, 19 nt, Homo sapiens
  misc_RNA (1)...(19): siRNA sense strand
acgugguaguagcgaggua

SEQ ID NO: 2496914 - RNA, 19 nt, Homo sapiens
  misc_RNA (1)...(19): siRNA sense strand
ccagagugggugacagaca

SEQ ID NO: 2496915 - RNA, 19 nt, Homo sapiens
  misc_RNA (1)...(19): siRNA sense strand
gcgcguaacugccugguca

SEQ ID NO: 2496916 - RNA, 19 nt, Homo sapiens
  misc_RNA (1)...(19): siRNA sense strand
caacaaacgccacagcaca

SEQ ID NO: 2496917 - RNA, 19 nt, Homo sapiens
  misc_RNA (1)...(19): siRNA sense strand
gggucuaccagaagggcca

SEQ ID NO: 2496918 - RNA, 19 nt, Homo sapiens
  misc_RNA (1)...(19): siRNA sense strand
cgagguaugaggaggccau

SEQ ID NO: 2496919 - RNA, 19 nt, Homo sapiens
  misc_RNA (1)...(19): siRNA sense strand
ccaagagcaaggaugaaaa

SEQ ID NO: 2496920 - RNA, 19 nt, Homo sapiens
  misc_RNA (1)...(19): siRNA sense strand
gcuuugugcauaaggacuu

SEQ ID NO: 2496921 - RNA, 19 nt, Homo sapiens
  misc_RNA (1)...(19): siRNA sense strand
ugaggauuuccaagagcaa

SEQ ID NO: 2496922 - RNA, 19 nt, Homo sapiens
  misc_RNA (1)...(19): siRNA sense strand
gaagaagcccgcagugcca

SEQ ID NO: 2496923 - RNA, 19 nt, Homo sapiens
  misc_RNA (1)...(19): siRNA sense strand
cuucaacaucaaauggauu

SEQ ID NO: 2496924 - RNA, 19 nt, Homo sapiens
  misc_RNA (1)...(19): siRNA sense strand
agcagagauccaagaagaa

SEQ ID NO: 2496925 - RNA, 19 nt, Homo sapiens
  misc_RNA (1)...(19): siRNA sense strand
ggucuagccugcagcccau

SEQ ID NO: 2496926 - RNA, 19 nt, Homo sapiens
  misc_RNA (1)...(19): siRNA sense strand
ggaugaugucacuggagaa

SEQ ID NO: 2496927 - RNA, 19 nt, Homo sapiens
  misc_RNA (1)...(19): siRNA sense strand
aggccauccuggaggguga

SEQ ID NO: 2496928 - RNA, 19 nt, Homo sapiens
  misc_RNA (1)...(19): siRNA sense strand
ccuucaaaguggaaccaga

SEQ ID NO: 2496929 - RNA, 19 nt, Homo sapiens
  misc_RNA (1)...(19): siRNA sense strand
aggacuuggcugcgcguaa

SEQ ID NO: 2496930 - RNA, 19 nt, Homo sapiens
  misc_RNA (1)...(19): siRNA sense strand
ccucggaagcugagaucca

SEQ ID NO: 2496931 - RNA, 19 nt, Homo sapiens
  misc_RNA (1)...(19): siRNA sense strand
gggaugaugucacuggaga

SEQ ID NO: 2496932 - RNA, 19 nt, Homo sapiens
  misc_RNA (1)...(19): siRNA sense strand
augaugaaguacuggcaga

SEQ ID NO: 2496933 - RNA, 19 nt, Homo sapiens
  misc_RNA (1)...(19): siRNA sense strand
acgugguaguagcgaggua

SEQ ID NO: 2496934 - RNA, 19 nt, Homo sapiens
  misc_RNA (1)...(19): siRNA sense strand
ccagagugggugacagaca

SEQ ID NO: 2496935 - RNA, 19 nt, Homo sapiens
  misc_RNA (1)...(19): siRNA sense strand
gcgcguaacugccugguca

SEQ ID NO: 2496936 - RNA, 19 nt, Homo sapiens
  misc_RNA (1)...(19): siRNA sense strand
caacaaacgccacagcaca

SEQ ID NO: 2496937 - RNA, 19 nt, Homo sapiens
  misc_RNA (1)...(19): siRNA sense strand
gggucuaccagaagggcca

SEQ ID NO: 2496938 - RNA, 19 nt, Homo sapiens
  misc_RNA (1)...(19): siRNA sense strand
cgagguaugaggaggccau

SEQ ID NO: 2496939 - RNA, 19 nt, Homo sapiens
  misc_RNA (1)...(19): siRNA sense strand
ccaagagcaaggaugaaaa

SEQ ID NO: 2496940 - RNA, 19 nt, Homo sapiens
  misc_RNA (1)...(19): siRNA sense strand
gcuuugugcauaaggacuu

SEQ ID NO: 2496941 - RNA, 19 nt, Homo sapiens
  misc_RNA (1)...(19): siRNA sense strand
ugaggauuuccaagagcaa

SEQ ID NO: 2496942 - RNA, 19 nt, Homo sapiens
  misc_RNA (1)...(19): siRNA sense strand
gaagaagcccgcagugcca

SEQ ID NO: 2496943 - RNA, 19 nt, Homo sapiens
  misc_RNA (1)...(19): siRNA sense strand
cuucaacaucaaauggauu

SEQ ID NO: 2496944 - RNA, 19 nt, Homo sapiens
  misc_RNA (1)...(19): siRNA sense strand
agcagagauccaagaagaa

SEQ ID NO: 2496945 - RNA, 19 nt, Homo sapiens
  misc_RNA (1)...(19): siRNA sense strand
ggucuagccugcagcccau

SEQ ID NO: 2496946 - RNA, 19 nt, Homo sapiens
  misc_RNA (1)...(19): siRNA sense strand
ggaugaugucacuggagaa

SEQ ID NO: 2496947 - RNA, 19 nt, Homo sapiens
  misc_RNA (1)...(19): siRNA sense strand
ccuucaaaguggaaccaga

SEQ ID NO: 2496948 - RNA, 19 nt, Homo sapiens
  misc_RNA (1)...(19): siRNA sense strand
ccucggaagcugagaucca

SEQ ID NO: 2496949 - RNA, 19 nt, Homo sapiens
  misc_RNA (1)...(19): siRNA sense strand
gggaugaugucacuggaga

SEQ ID NO: 2496950 - RNA, 19 nt, Homo sapiens
  misc_RNA (1)...(19): siRNA sense strand
acgugguaguagcgaggua

SEQ ID NO: 2496951 - RNA, 19 nt, Homo sapiens
  misc_RNA (1)...(19): siRNA sense strand
ccagagugggugacagaca

SEQ ID NO: 2496952 - RNA, 19 nt, Homo sapiens
  misc_RNA (1)...(19): siRNA sense strand
caacaaacgccacagcaca

SEQ ID NO: 2496953 - RNA, 19 nt, Homo sapiens
  misc_RNA (1)...(19): siRNA sense strand
gggucuaccagaagggcca

SEQ ID NO: 2496954 - RNA, 19 nt, Homo sapiens
  misc_RNA (1)...(19): siRNA sense strand
cgagguaugaggaggccau

SEQ ID NO: 2496955 - RNA, 19 nt, Homo sapiens
  misc_RNA (1)...(19): siRNA sense strand
ugaggauuuccaagagcaa

SEQ ID NO: 2496956 - RNA, 19 nt, Homo sapiens
  misc_RNA (1)...(19): siRNA sense strand
gaagaagcccgcagugcca

SEQ ID NO: 2496957 - RNA, 19 nt, Homo sapiens
  misc_RNA (1)...(19): siRNA sense strand
cuucaacaucaaauggauu

SEQ ID NO: 2496958 - RNA, 19 nt, Homo sapiens
  misc_RNA (1)...(19): siRNA sense strand
agcagagauccaagaagaa

SEQ ID NO: 2496959 - RNA, 19 nt, Homo sapiens
  misc_RNA (1)...(19): siRNA sense strand
ggucuagccugcagcccau

SEQ ID NO: 2496960 - RNA, 19 nt, Homo sapiens
  misc_RNA (1)...(19): siRNA sense strand
accuagacuuagagaagaa

SEQ ID NO: 2496961 - RNA, 19 nt, Homo sapiens
  misc_RNA (1)...(19): siRNA sense strand
aaagagaaggagaagaaaa

SEQ ID NO: 2496962 - RNA, 19 nt, Homo sapiens
  misc_RNA (1)...(19): siRNA sense strand
ccauauuccaguuuggcaa

SEQ ID NO: 2496963 - RNA, 19 nt, Homo sapiens
  misc_RNA (1)...(19): siRNA sense strand
gcguuuggguugaaagcca

SEQ ID NO: 2496964 - RNA, 19 nt, Homo sapiens
  misc_RNA (1)...(19): siRNA sense strand
cccucaaagagaaggagaa

SEQ ID NO: 2496965 - RNA, 19 nt, Homo sapiens
  misc_RNA (1)...(19): siRNA sense strand
uagcaguggcaguggacau

SEQ ID NO: 2496966 - RNA, 19 nt, Homo sapiens
  misc_RNA (1)...(19): siRNA sense strand
caacauucccuuuggcuca

SEQ ID NO: 2496967 - RNA, 19 nt, Homo sapiens
  misc_RNA (1)...(19): siRNA sense strand
cagcaaagaaaauaagaga

SEQ ID NO: 2496968 - RNA, 19 nt, Homo sapiens
  misc_RNA (1)...(19): siRNA sense strand
gcauaaacagugugagcag

SEQ ID NO: 2496969 - RNA, 19 nt, Homo sapiens
  misc_RNA (1)...(19): siRNA sense strand
uggaggaagaagaccaaau

SEQ ID NO: 2496970 - RNA, 19 nt, Homo sapiens
  misc_RNA (1)...(19): siRNA sense strand
ggacagagugggagcacag

SEQ ID NO: 2496971 - RNA, 19 nt, Homo sapiens
  misc_RNA (1)...(19): siRNA sense strand
aaauauuccuugauggcca

SEQ ID NO: 2496972 - RNA, 19 nt, Homo sapiens
  misc_RNA (1)...(19): siRNA sense strand
aaauaagagaagaggagcu

SEQ ID NO: 2496973 - RNA, 19 nt, Homo sapiens
  misc_RNA (1)...(19): siRNA sense strand
agaaaaggacaguggagga

SEQ ID NO: 2496974 - RNA, 19 nt, Homo sapiens
  misc_RNA (1)...(19): siRNA sense strand
gaaaauaagagaagaggag

SEQ ID NO: 2496975 - RNA, 19 nt, Homo sapiens
  misc_RNA (1)...(19): siRNA sense strand
cgauaccagagcagauaau

SEQ ID NO: 2496976 - RNA, 19 nt, Homo sapiens
  misc_RNA (1)...(19): siRNA sense strand
ccaugauagcaguggcagu

SEQ ID NO: 2496977 - RNA, 19 nt, Homo sapiens
  misc_RNA (1)...(19): siRNA sense strand
caguggaggaagaagacca

SEQ ID NO: 2496978 - RNA, 19 nt, Homo sapiens
  misc_RNA (1)...(19): siRNA sense strand
agcaggaaugagaaggaaa

SEQ ID NO: 2496979 - RNA, 19 nt, Homo sapiens
  misc_RNA (1)...(19): siRNA sense strand
gccacaaguucaugcgcuu

SEQ ID NO: 2496980 - RNA, 19 nt, Homo sapiens
  misc_RNA (1)...(19): siRNA sense strand
acaacaagccggaagugga

SEQ ID NO: 2496981 - RNA, 19 nt, Homo sapiens
  misc_RNA (1)...(19): siRNA sense strand
aggagaucagugagaugaa

SEQ ID NO: 2496982 - RNA, 19 nt, Homo sapiens
  misc_RNA (1)...(19): siRNA sense strand
uguuacaaccugugaccau

SEQ ID NO: 2496983 - RNA, 19 nt, Homo sapiens
  misc_RNA (1)...(19): siRNA sense strand
acuucauggaggagauuga

SEQ ID NO: 2496984 - RNA, 19 nt, Homo sapiens
  misc_RNA (1)...(19): siRNA sense strand
ucauggaggagauugacaa

SEQ ID NO: 2496985 - RNA, 19 nt, Homo sapiens
  misc_RNA (1)...(19): siRNA sense strand
gaggagauugacaaggaga

SEQ ID NO: 2496986 - RNA, 19 nt, Homo sapiens
  misc_RNA (1)...(19): siRNA sense strand
gccuagagcugaaggacga

SEQ ID NO: 2496987 - RNA, 19 nt, Homo sapiens
  misc_RNA (1)...(19): siRNA sense strand
gccagagauauguggguaa

SEQ ID NO: 2496988 - RNA, 19 nt, Homo sapiens
  misc_RNA (1)...(19): siRNA sense strand
ugaagguggaagagggaga

SEQ ID NO: 2496989 - RNA, 19 nt, Homo sapiens
  misc_RNA (1)...(19): siRNA sense strand
ucuuaugagaacauggaua

SEQ ID NO: 2496990 - RNA, 19 nt, Homo sapiens
  misc_RNA (1)...(19): siRNA sense strand
gggcccagaagaagaggaa

SEQ ID NO: 2496991 - RNA, 19 nt, Homo sapiens
  misc_RNA (1)...(19): siRNA sense strand
aggaaaagaaagcgaauga

SEQ ID NO: 2496992 - RNA, 19 nt, Homo sapiens
  misc_RNA (1)...(19): siRNA sense strand
uaugaggauaugagaggaa

SEQ ID NO: 2496993 - RNA, 19 nt, Homo sapiens
  misc_RNA (1)...(19): siRNA sense strand
gggccuaagucauugcuga

SEQ ID NO: 2496994 - RNA, 19 nt, Homo sapiens
  misc_RNA (1)...(19): siRNA sense strand
ggugaagguggaagaggga

SEQ ID NO: 2496995 - RNA, 19 nt, Homo sapiens
  misc_RNA (1)...(19): siRNA sense strand
aagaggaaggggagggcua

SEQ ID NO: 2496996 - RNA, 19 nt, Homo sapiens
  misc_RNA (1)...(19): siRNA sense strand
augcagacucuuaugagaa

SEQ ID NO: 2496997 - RNA, 19 nt, Homo sapiens
  misc_RNA (1)...(19): siRNA sense strand
cugagaucugggagggaga

SEQ ID NO: 2496998 - RNA, 19 nt, Homo sapiens
  misc_RNA (1)...(19): siRNA sense strand
ggaggaaaagaaagcgaau

SEQ ID NO: 2496999 - RNA, 19 nt, Homo sapiens
  misc_RNA (1)...(19): siRNA sense strand
cagaagaagaggaagggga

SEQ ID NO: 2497000 - RNA, 19 nt, Homo sapiens
  misc_RNA (1)...(19): siRNA sense strand
gaacgaggaugaagagcug

SEQ ID NO: 2497001 - RNA, 19 nt, Homo sapiens
  misc_RNA (1)...(19): siRNA sense strand
augagaacgaggaugaaga

SEQ ID NO: 2497002 - RNA, 19 nt, Homo sapiens
  misc_RNA (1)...(19): siRNA sense strand
gagauaacgcugugcugca

SEQ ID NO: 2497003 - RNA, 19 nt, Homo sapiens
  misc_RNA (1)...(19): siRNA sense strand
cagucaauguggagggcag

SEQ ID NO: 2497004 - RNA, 19 nt, Homo sapiens
  misc_RNA (1)...(19): siRNA sense strand
cuggaaaguauuauuguca

SEQ ID NO: 2497005 - RNA, 19 nt, Homo sapiens
  misc_RNA (1)...(19): siRNA sense strand
gguggaagagggagauaac

SEQ ID NO: 2497006 - RNA, 19 nt, Homo sapiens
  misc_RNA (1)...(19): siRNA sense strand
cuacgagaacccugaggau

SEQ ID NO: 2497007 - RNA, 19 nt, Homo sapiens
  misc_RNA (1)...(19): siRNA sense strand
ggccagagauaugugggua

SEQ ID NO: 2497008 - RNA, 19 nt, Homo sapiens
  misc_RNA (1)...(19): siRNA sense strand
ccucaguguuuguggugga

SEQ ID NO: 2497009 - RNA, 19 nt, Homo sapiens
  misc_RNA (1)...(19): siRNA sense strand
uguuugugguggauggaca

SEQ ID NO: 2497010 - RNA, 19 nt, Homo sapiens
  misc_RNA (1)...(19): siRNA sense strand
gauacaagagcgaaggucu

SEQ ID NO: 2497011 - RNA, 19 nt, Homo sapiens
  misc_RNA (1)...(19): siRNA sense strand
ggucaacccagcagcgcau

SEQ ID NO: 2497012 - RNA, 19 nt, Homo sapiens
  misc_RNA (1)...(19): siRNA sense strand
ccucaguguuuguggugga

SEQ ID NO: 2497013 - RNA, 19 nt, Homo sapiens
  misc_RNA (1)...(19): siRNA sense strand
uguuugugguggauggaca

SEQ ID NO: 2497014 - RNA, 19 nt, Homo sapiens
  misc_RNA (1)...(19): siRNA sense strand
gauacaagagcgaaggucu

SEQ ID NO: 2497015 - RNA, 19 nt, Homo sapiens
  misc_RNA (1)...(19): siRNA sense strand
ggucaacccagcagcgcau

SEQ ID NO: 2497016 - RNA, 19 nt, Homo sapiens
  misc_RNA (1)...(19): siRNA sense strand
aguuauauuugcaggagau

SEQ ID NO: 2497017 - RNA, 19 nt, Homo sapiens
  misc_RNA (1)...(19): siRNA sense strand
ggagagcaccagagggcau

SEQ ID NO: 2497018 - RNA, 19 nt, Homo sapiens
  misc_RNA (1)...(19): siRNA sense strand
cagcagcagaagagggaca

SEQ ID NO: 2497019 - RNA, 19 nt, Homo sapiens
  misc_RNA (1)...(19): siRNA sense strand
aggaagagggcgagccuga

SEQ ID NO: 2497020 - RNA, 19 nt, Homo sapiens
  misc_RNA (1)...(19): siRNA sense strand
gauacaaaucuaagggauc

SEQ ID NO: 2497021 - RNA, 19 nt, Homo sapiens
  misc_RNA (1)...(19): siRNA sense strand
agggcgagccugaggugaa

SEQ ID NO: 2497022 - RNA, 19 nt, Homo sapiens
  misc_RNA (1)...(19): siRNA sense strand
ugccaguauacaugggaua

SEQ ID NO: 2497023 - RNA, 19 nt, Homo sapiens
  misc_RNA (1)...(19): siRNA sense strand
uaccuaaagaagagaucaa

SEQ ID NO: 2497024 - RNA, 19 nt, Homo sapiens
  misc_RNA (1)...(19): siRNA sense strand
ccgcaguggcucagugcuu

SEQ ID NO: 2497025 - RNA, 19 nt, Homo sapiens
  misc_RNA (1)...(19): siRNA sense strand
ugagauuauuacaggucau

SEQ ID NO: 2497026 - RNA, 19 nt, Homo sapiens
  misc_RNA (1)...(19): siRNA sense strand
caguuauauuugcaggaga

SEQ ID NO: 2497027 - RNA, 19 nt, Homo sapiens
  misc_RNA (1)...(19): siRNA sense strand
ccauauuauagcuaccuaa

SEQ ID NO: 2497028 - RNA, 19 nt, Homo sapiens
  misc_RNA (1)...(19): siRNA sense strand
aggucaugaagaaggauau

SEQ ID NO: 2497029 - RNA, 19 nt, Homo sapiens
  misc_RNA (1)...(19): siRNA sense strand
gccgagaacgacugggaga

SEQ ID NO: 2497030 - RNA, 19 nt, Homo sapiens
  misc_RNA (1)...(19): siRNA sense strand
aggauauuucacagcuaua

SEQ ID NO: 2497031 - RNA, 19 nt, Homo sapiens
  misc_RNA (1)...(19): siRNA sense strand
caggucaugaagaaggaua

SEQ ID NO: 2497032 - RNA, 19 nt, Homo sapiens
  misc_RNA (1)...(19): siRNA sense strand
uauauuugcaggagauaca

SEQ ID NO: 2497033 - RNA, 19 nt, Homo sapiens
  misc_RNA (1)...(19): siRNA sense strand
cugcggaacgaaugaauca

SEQ ID NO: 2497034 - RNA, 19 nt, Homo sapiens
  misc_RNA (1)...(19): siRNA sense strand
cagagggcaugcugcggaa

SEQ ID NO: 2497035 - RNA, 19 nt, Homo sapiens
  misc_RNA (1)...(19): siRNA sense strand
accuaaacauugccaguau

SEQ ID NO: 2497036 - RNA, 19 nt, Homo sapiens
  misc_RNA (1)...(19): siRNA sense strand
cuucugugcaacuuagaua

SEQ ID NO: 2497037 - RNA, 19 nt, Homo sapiens
  misc_RNA (1)...(19): siRNA sense strand
cggaggaugaaguggaaaa

SEQ ID NO: 2497038 - RNA, 19 nt, Homo sapiens
  misc_RNA (1)...(19): siRNA sense strand
ggaugaagaaggugcacgu

SEQ ID NO: 2497039 - RNA, 19 nt, Homo sapiens
  misc_RNA (1)...(19): siRNA sense strand
caacuacaccgguggggaa

SEQ ID NO: 2497040 - RNA, 19 nt, Homo sapiens
  misc_RNA (1)...(19): siRNA sense strand
gcaaggaggaggaggugga

SEQ ID NO: 2497041 - RNA, 19 nt, Homo sapiens
  misc_RNA (1)...(19): siRNA sense strand
gugcuguggacuuggagaa

SEQ ID NO: 2497042 - RNA, 19 nt, Homo sapiens
  misc_RNA (1)...(19): siRNA sense strand
aguaauugcucucgccuga

SEQ ID NO: 2497043 - RNA, 19 nt, Homo sapiens
  misc_RNA (1)...(19): siRNA sense strand
agccagacaguuugagcaa

SEQ ID NO: 2497044 - RNA, 19 nt, Homo sapiens
  misc_RNA (1)...(19): siRNA sense strand
aggacuguguguucagcaa

SEQ ID NO: 2497045 - RNA, 19 nt, Homo sapiens
  misc_RNA (1)...(19): siRNA sense strand
gagaauauuccguuugcca

SEQ ID NO: 2497046 - RNA, 19 nt, Homo sapiens
  misc_RNA (1)...(19): siRNA sense strand
gaauauuccguuugccaga

SEQ ID NO: 2497047 - RNA, 19 nt, Homo sapiens
  misc_RNA (1)...(19): siRNA sense strand
ggcuaaagaugaacggaga

SEQ ID NO: 2497048 - RNA, 19 nt, Homo sapiens
  misc_RNA (1)...(19): siRNA sense strand
agauacaggccgaggacau

SEQ ID NO: 2497049 - RNA, 19 nt, Homo sapiens
  misc_RNA (1)...(19): siRNA sense strand
aaaccauauugcaggacaa

SEQ ID NO: 2497050 - RNA, 19 nt, Homo sapiens
  misc_RNA (1)...(19): siRNA sense strand
guacuucaauguugggcaa

SEQ ID NO: 2497051 - RNA, 19 nt, Homo sapiens
  misc_RNA (1)...(19): siRNA sense strand
gucaagaauuuauagggaa

SEQ ID NO: 2497052 - RNA, 19 nt, Homo sapiens
  misc_RNA (1)...(19): siRNA sense strand
acgacgaggaagaggauga

SEQ ID NO: 2497053 - RNA, 19 nt, Homo sapiens
  misc_RNA (1)...(19): siRNA sense strand
gcuaaagaugaacggagaa

SEQ ID NO: 2497054 - RNA, 19 nt, Homo sapiens
  misc_RNA (1)...(19): siRNA sense strand
aagaagagauacaggccga

SEQ ID NO: 2497055 - RNA, 19 nt, Homo sapiens
  misc_RNA (1)...(19): siRNA sense strand
agauguagauuaugggagu

SEQ ID NO: 2497056 - RNA, 19 nt, Homo sapiens
  misc_RNA (1)...(19): siRNA sense strand
acagaaugaagaaggaaaa

SEQ ID NO: 2497057 - RNA, 19 nt, Homo sapiens
  misc_RNA (1)...(19): siRNA sense strand
cgcaacaggcggcaggaaa

SEQ ID NO: 2497058 - RNA, 19 nt, Homo sapiens
  misc_RNA (1)...(19): siRNA sense strand
gagaauaaacaguggggca

SEQ ID NO: 2497059 - RNA, 19 nt, Homo sapiens
  misc_RNA (1)...(19): siRNA sense strand
augaguacgacgaggaaga

SEQ ID NO: 2497060 - RNA, 19 nt, Homo sapiens
  misc_RNA (1)...(19): siRNA sense strand
augccagcucugagaauaa

SEQ ID NO: 2497061 - RNA, 19 nt, Homo sapiens
  misc_RNA (1)...(19): siRNA sense strand
aacagaaugaagaaggaaa

SEQ ID NO: 2497062 - RNA, 19 nt, Homo sapiens
  misc_RNA (1)...(19): siRNA sense strand
agucaagaauuuauaggga

SEQ ID NO: 2497063 - RNA, 19 nt, Homo sapiens
  misc_RNA (1)...(19): siRNA sense strand
ugaaaggagaggagccaca

SEQ ID NO: 2497064 - RNA, 19 nt, Homo sapiens
  misc_RNA (1)...(19): siRNA sense strand
ccgaggacaucaauggaga

SEQ ID NO: 2497065 - RNA, 19 nt, Homo sapiens
  misc_RNA (1)...(19): siRNA sense strand
aaguacaagcccaggccaa

SEQ ID NO: 2497066 - RNA, 19 nt, Homo sapiens
  misc_RNA (1)...(19): siRNA sense strand
guagauuaugggagugaca

SEQ ID NO: 2497067 - RNA, 19 nt, Homo sapiens
  misc_RNA (1)...(19): siRNA sense strand
augcaaugauggauuucaa

SEQ ID NO: 2497068 - RNA, 19 nt, Homo sapiens
  misc_RNA (1)...(19): siRNA sense strand
ccucaaagccucuguccca

SEQ ID NO: 2497069 - RNA, 19 nt, Homo sapiens
  misc_RNA (1)...(19): siRNA sense strand
ggcaaaugaaggagcaacu

SEQ ID NO: 2497070 - RNA, 19 nt, Homo sapiens
  misc_RNA (1)...(19): siRNA sense strand
aggaaaugcggcaguacuu

SEQ ID NO: 2497071 - RNA, 19 nt, Homo sapiens
  misc_RNA (1)...(19): siRNA sense strand
ccuucauggugugggcuaa

SEQ ID NO: 2497072 - RNA, 19 nt, Homo sapiens
  misc_RNA (1)...(19): siRNA sense strand
accuagagaaacagccaua

SEQ ID NO: 2497073 - RNA, 19 nt, Homo sapiens
  misc_RNA (1)...(19): siRNA sense strand
ccgagggcgugguagcaau

SEQ ID NO: 2497074 - RNA, 19 nt, Homo sapiens
  misc_RNA (1)...(19): siRNA sense strand
ccaacaucagcaagauauu

SEQ ID NO: 2497075 - RNA, 19 nt, Homo sapiens
  misc_RNA (1)...(19): siRNA sense strand
ucagcaagauauugggauc

SEQ ID NO: 2497076 - RNA, 19 nt, Homo sapiens
  misc_RNA (1)...(19): siRNA sense strand
gaaagauccuucaagccuu

SEQ ID NO: 2497077 - RNA, 19 nt, Homo sapiens
  misc_RNA (1)...(19): siRNA sense strand
acaaggcaaucaugcgcaa

SEQ ID NO: 2497078 - RNA, 19 nt, Homo sapiens
  misc_RNA (1)...(19): siRNA sense strand
ccaagaccucugauggcaa

SEQ ID NO: 2497079 - RNA, 19 nt, Homo sapiens
  misc_RNA (1)...(19): siRNA sense strand
aguccuucagccagaguua

SEQ ID NO: 2497080 - RNA, 19 nt, Homo sapiens
  misc_RNA (1)...(19): siRNA sense strand
gacuauaaguacaagccca

SEQ ID NO: 2497081 - RNA, 19 nt, Homo sapiens
  misc_RNA (1)...(19): siRNA sense strand
cgaggacaucaauggagaa

SEQ ID NO: 2497082 - RNA, 19 nt, Homo sapiens
  misc_RNA (1)...(19): siRNA sense strand
ggcuaaagaugaacggaga

SEQ ID NO: 2497083 - RNA, 19 nt, Homo sapiens
  misc_RNA (1)...(19): siRNA sense strand
agauacaggccgaggacau

SEQ ID NO: 2497084 - RNA, 19 nt, Homo sapiens
  misc_RNA (1)...(19): siRNA sense strand
aaaccauauugcaggacaa

SEQ ID NO: 2497085 - RNA, 19 nt, Homo sapiens
  misc_RNA (1)...(19): siRNA sense strand
guacuucaauguugggcaa

SEQ ID NO: 2497086 - RNA, 19 nt, Homo sapiens
  misc_RNA (1)...(19): siRNA sense strand
gucaagaauuuauagggaa

SEQ ID NO: 2497087 - RNA, 19 nt, Homo sapiens
  misc_RNA (1)...(19): siRNA sense strand
acgacgaggaagaggauga

SEQ ID NO: 2497088 - RNA, 19 nt, Homo sapiens
  misc_RNA (1)...(19): siRNA sense strand
gcuaaagaugaacggagaa

SEQ ID NO: 2497089 - RNA, 19 nt, Homo sapiens
  misc_RNA (1)...(19): siRNA sense strand
aagaagagauacaggccga

SEQ ID NO: 2497090 - RNA, 19 nt, Homo sapiens
  misc_RNA (1)...(19): siRNA sense strand
agauguagauuaugggagu

SEQ ID NO: 2497091 - RNA, 19 nt, Homo sapiens
  misc_RNA (1)...(19): siRNA sense strand
acagaaugaagaaggaaaa

SEQ ID NO: 2497092 - RNA, 19 nt, Homo sapiens
  misc_RNA (1)...(19): siRNA sense strand
cgcaacaggcggcaggaaa

SEQ ID NO: 2497093 - RNA, 19 nt, Homo sapiens
  misc_RNA (1)...(19): siRNA sense strand
gagaauaaacaguggggca

SEQ ID NO: 2497094 - RNA, 19 nt, Homo sapiens
  misc_RNA (1)...(19): siRNA sense strand
augaguacgacgaggaaga

SEQ ID NO: 2497095 - RNA, 19 nt, Homo sapiens
  misc_RNA (1)...(19): siRNA sense strand
augccagcucugagaauaa

SEQ ID NO: 2497096 - RNA, 19 nt, Homo sapiens
  misc_RNA (1)...(19): siRNA sense strand
aacagaaugaagaaggaaa

SEQ ID NO: 2497097 - RNA, 19 nt, Homo sapiens
  misc_RNA (1)...(19): siRNA sense strand
agucaagaauuuauaggga

SEQ ID NO: 2497098 - RNA, 19 nt, Homo sapiens
  misc_RNA (1)...(19): siRNA sense strand
ugaaaggagaggagccaca

SEQ ID NO: 2497099 - RNA, 19 nt, Homo sapiens
  misc_RNA (1)...(19): siRNA sense strand
ccgaggacaucaauggaga

SEQ ID NO: 2497100 - RNA, 19 nt, Homo sapiens
  misc_RNA (1)...(19): siRNA sense strand
aaguacaagcccaggccaa

SEQ ID NO: 2497101 - RNA, 19 nt, Homo sapiens
  misc_RNA (1)...(19): siRNA sense strand
guagauuaugggagugaca

SEQ ID NO: 2497102 - RNA, 19 nt, Homo sapiens
  misc_RNA (1)...(19): siRNA sense strand
augcaaugauggauuucaa

SEQ ID NO: 2497103 - RNA, 19 nt, Homo sapiens
  misc_RNA (1)...(19): siRNA sense strand
ccucaaagccucuguccca

SEQ ID NO: 2497104 - RNA, 19 nt, Homo sapiens
  misc_RNA (1)...(19): siRNA sense strand
ggcaaaugaaggagcaacu

SEQ ID NO: 2497105 - RNA, 19 nt, Homo sapiens
  misc_RNA (1)...(19): siRNA sense strand
aggaaaugcggcaguacuu

SEQ ID NO: 2497106 - RNA, 19 nt, Homo sapiens
  misc_RNA (1)...(19): siRNA sense strand
ccuucauggugugggcuaa

SEQ ID NO: 2497107 - RNA, 19 nt, Homo sapiens
  misc_RNA (1)...(19): siRNA sense strand
accuagagaaacagccaua

SEQ ID NO: 2497108 - RNA, 19 nt, Homo sapiens
  misc_RNA (1)...(19): siRNA sense strand
ccgagggcgugguagcaau

SEQ ID NO: 2497109 - RNA, 19 nt, Homo sapiens
  misc_RNA (1)...(19): siRNA sense strand
ccaacaucagcaagauauu

SEQ ID NO: 2497110 - RNA, 19 nt, Homo sapiens
  misc_RNA (1)...(19): siRNA sense strand
ucagcaagauauugggauc

SEQ ID NO: 2497111 - RNA, 19 nt, Homo sapiens
  misc_RNA (1)...(19): siRNA sense strand
gaaagauccuucaagccuu

SEQ ID NO: 2497112 - RNA, 19 nt, Homo sapiens
  misc_RNA (1)...(19): siRNA sense strand
acaaggcaaucaugcgcaa

SEQ ID NO: 2497113 - RNA, 19 nt, Homo sapiens
  misc_RNA (1)...(19): siRNA sense strand
ccaagaccucugauggcaa

SEQ ID NO: 2497114 - RNA, 19 nt, Homo sapiens
  misc_RNA (1)...(19): siRNA sense strand
aguccuucagccagaguua

SEQ ID NO: 2497115 - RNA, 19 nt, Homo sapiens
  misc_RNA (1)...(19): siRNA sense strand
gacuauaaguacaagccca

SEQ ID NO: 2497116 - RNA, 19 nt, Homo sapiens
  misc_RNA (1)...(19): siRNA sense strand
cgaggacaucaauggagaa

SEQ ID NO: 2497117 - RNA, 19 nt, Homo sapiens
  misc_RNA (1)...(19): siRNA sense strand
ggcuaaagaugaacggaga

SEQ ID NO: 2497118 - RNA, 19 nt, Homo sapiens
  misc_RNA (1)...(19): siRNA sense strand
agauacaggccgaggacau

SEQ ID NO: 2497119 - RNA, 19 nt, Homo sapiens
  misc_RNA (1)...(19): siRNA sense strand
aaaccauauugcaggacaa

SEQ ID NO: 2497120 - RNA, 19 nt, Homo sapiens
  misc_RNA (1)...(19): siRNA sense strand
guacuucaauguugggcaa

SEQ ID NO: 2497121 - RNA, 19 nt, Homo sapiens
  misc_RNA (1)...(19): siRNA sense strand
gucaagaauuuauagggaa

SEQ ID NO: 2497122 - RNA, 19 nt, Homo sapiens
  misc_RNA (1)...(19): siRNA sense strand
acgacgaggaagaggauga

SEQ ID NO: 2497123 - RNA, 19 nt, Homo sapiens
  misc_RNA (1)...(19): siRNA sense strand
gcuaaagaugaacggagaa

SEQ ID NO: 2497124 - RNA, 19 nt, Homo sapiens
  misc_RNA (1)...(19): siRNA sense strand
aagaagagauacaggccga

SEQ ID NO: 2497125 - RNA, 19 nt, Homo sapiens
  misc_RNA (1)...(19): siRNA sense strand
agauguagauuaugggagu

SEQ ID NO: 2497126 - RNA, 19 nt, Homo sapiens
  misc_RNA (1)...(19): siRNA sense strand
acagaaugaagaaggaaaa

SEQ ID NO: 2497127 - RNA, 19 nt, Homo sapiens
  misc_RNA (1)...(19): siRNA sense strand
cgcaacaggcggcaggaaa

SEQ ID NO: 2497128 - RNA, 19 nt, Homo sapiens
  misc_RNA (1)...(19): siRNA sense strand
gagaauaaacaguggggca

SEQ ID NO: 2497129 - RNA, 19 nt, Homo sapiens
  misc_RNA (1)...(19): siRNA sense strand
augaguacgacgaggaaga

SEQ ID NO: 2497130 - RNA, 19 nt, Homo sapiens
  misc_RNA (1)...(19): siRNA sense strand
augccagcucugagaauaa

SEQ ID NO: 2497131 - RNA, 19 nt, Homo sapiens
  misc_RNA (1)...(19): siRNA sense strand
aacagaaugaagaaggaaa

SEQ ID NO: 2497132 - RNA, 19 nt, Homo sapiens
  misc_RNA (1)...(19): siRNA sense strand
agucaagaauuuauaggga

SEQ ID NO: 2497133 - RNA, 19 nt, Homo sapiens
  misc_RNA (1)...(19): siRNA sense strand
ugaaaggagaggagccaca

SEQ ID NO: 2497134 - RNA, 19 nt, Homo sapiens
  misc_RNA (1)...(19): siRNA sense strand
ccgaggacaucaauggaga

SEQ ID NO: 2497135 - RNA, 19 nt, Homo sapiens
  misc_RNA (1)...(19): siRNA sense strand
aaguacaagcccaggccaa

SEQ ID NO: 2497136 - RNA, 19 nt, Homo sapiens
  misc_RNA (1)...(19): siRNA sense strand
guagauuaugggagugaca

SEQ ID NO: 2497137 - RNA, 19 nt, Homo sapiens
  misc_RNA (1)...(19): siRNA sense strand
augcaaugauggauuucaa

SEQ ID NO: 2497138 - RNA, 19 nt, Homo sapiens
  misc_RNA (1)...(19): siRNA sense strand
ccucaaagccucuguccca

SEQ ID NO: 2497139 - RNA, 19 nt, Homo sapiens
  misc_RNA (1)...(19): siRNA sense strand
ggcaaaugaaggagcaacu

SEQ ID NO: 2497140 - RNA, 19 nt, Homo sapiens
  misc_RNA (1)...(19): siRNA sense strand
aggaaaugcggcaguacuu

SEQ ID NO: 2497141 - RNA, 19 nt, Homo sapiens
  misc_RNA (1)...(19): siRNA sense strand
ccuucauggugugggcuaa

SEQ ID NO: 2497142 - RNA, 19 nt, Homo sapiens
  misc_RNA (1)...(19): siRNA sense strand
accuagagaaacagccaua

SEQ ID NO: 2497143 - RNA, 19 nt, Homo sapiens
  misc_RNA (1)...(19): siRNA sense strand
ccgagggcgugguagcaau

SEQ ID NO: 2497144 - RNA, 19 nt, Homo sapiens
  misc_RNA (1)...(19): siRNA sense strand
ccaacaucagcaagauauu

SEQ ID NO: 2497145 - RNA, 19 nt, Homo sapiens
  misc_RNA (1)...(19): siRNA sense strand
ucagcaagauauugggauc

SEQ ID NO: 2497146 - RNA, 19 nt, Homo sapiens
  misc_RNA (1)...(19): siRNA sense strand
gaaagauccuucaagccuu

SEQ ID NO: 2497147 - RNA, 19 nt, Homo sapiens
  misc_RNA (1)...(19): siRNA sense strand
acaaggcaaucaugcgcaa

SEQ ID NO: 2497148 - RNA, 19 nt, Homo sapiens
  misc_RNA (1)...(19): siRNA sense strand
ccaagaccucugauggcaa

SEQ ID NO: 2497149 - RNA, 19 nt, Homo sapiens
  misc_RNA (1)...(19): siRNA sense strand
aguccuucagccagaguua

SEQ ID NO: 2497150 - RNA, 19 nt, Homo sapiens
  misc_RNA (1)...(19): siRNA sense strand
gacuauaaguacaagccca

SEQ ID NO: 2497151 - RNA, 19 nt, Homo sapiens
  misc_RNA (1)...(19): siRNA sense strand
cgaggacaucaauggagaa

SEQ ID NO: 2497152 - RNA, 19 nt, Homo sapiens
  misc_RNA (1)...(19): siRNA sense strand
gggcaaucaaguuggcaaa

SEQ ID NO: 2497153 - RNA, 19 nt, Homo sapiens
  misc_RNA (1)...(19): siRNA sense strand
ggcaauauuuggaggcgua

SEQ ID NO: 2497154 - RNA, 19 nt, Homo sapiens
  misc_RNA (1)...(19): siRNA sense strand
caguauagaaagugguaca

SEQ ID NO: 2497155 - RNA, 19 nt, Homo sapiens
  misc_RNA (1)...(19): siRNA sense strand
caguaaagaaggagaucca

SEQ ID NO: 2497156 - RNA, 19 nt, Homo sapiens
  misc_RNA (1)...(19): siRNA sense strand
gcguagaagggcacagaga

SEQ ID NO: 2497157 - RNA, 19 nt, Homo sapiens
  misc_RNA (1)...(19): siRNA sense strand
ggaaggaaaaguuggggaa

SEQ ID NO: 2497158 - RNA, 19 nt, Homo sapiens
  misc_RNA (1)...(19): siRNA sense strand
ggaaaauggaagucaaaga

SEQ ID NO: 2497159 - RNA, 19 nt, Homo sapiens
  misc_RNA (1)...(19): siRNA sense strand
aguucuaagugcugauuau

SEQ ID NO: 2497160 - RNA, 19 nt, Homo sapiens
  misc_RNA (1)...(19): siRNA sense strand
cuuaaacuuuggaggauca

SEQ ID NO: 2497161 - RNA, 19 nt, Homo sapiens
  misc_RNA (1)...(19): siRNA sense strand
gggauuuagaaguagaaga

SEQ ID NO: 2497162 - RNA, 19 nt, Homo sapiens
  misc_RNA (1)...(19): siRNA sense strand
guaaauagucucaaggaag

SEQ ID NO: 2497163 - RNA, 19 nt, Homo sapiens
  misc_RNA (1)...(19): siRNA sense strand
agcuggaucuagaggcaua

SEQ ID NO: 2497164 - RNA, 19 nt, Homo sapiens
  misc_RNA (1)...(19): siRNA sense strand
aauuaaacccagugaaucu

SEQ ID NO: 2497165 - RNA, 19 nt, Homo sapiens
  misc_RNA (1)...(19): siRNA sense strand
gccaagaagcagaagcuga

SEQ ID NO: 2497166 - RNA, 19 nt, Homo sapiens
  misc_RNA (1)...(19): siRNA sense strand
cuauguuggccauggaaau

SEQ ID NO: 2497167 - RNA, 19 nt, Homo sapiens
  misc_RNA (1)...(19): siRNA sense strand
cuaucaaugagcugaaauu

SEQ ID NO: 2497168 - RNA, 19 nt, Homo sapiens
  misc_RNA (1)...(19): siRNA sense strand
ucuauggauuucuggcaaa

SEQ ID NO: 2497169 - RNA, 19 nt, Homo sapiens
  misc_RNA (1)...(19): siRNA sense strand
agagacauacauaggaauu

SEQ ID NO: 2497170 - RNA, 19 nt, Homo sapiens
  misc_RNA (1)...(19): siRNA sense strand
aggaucaauucaaagagaa

SEQ ID NO: 2497171 - RNA, 19 nt, Homo sapiens
  misc_RNA (1)...(19): siRNA sense strand
aagagaaugaugaaugcaa

SEQ ID NO: 2497172 - RNA, 19 nt, Homo sapiens
  misc_RNA (1)...(19): siRNA sense strand
ccugauacaccuacaaaca

SEQ ID NO: 2497173 - RNA, 19 nt, Homo sapiens
  misc_RNA (1)...(19): siRNA sense strand
gucaguaaguaaagaucau

SEQ ID NO: 2497174 - RNA, 19 nt, Homo sapiens
  misc_RNA (1)...(19): siRNA sense strand
cggacacucugguggcaau

SEQ ID NO: 2497175 - RNA, 19 nt, Homo sapiens
  misc_RNA (1)...(19): siRNA sense strand
cagacaugccugcggccaa

SEQ ID NO: 2497176 - RNA, 19 nt, Homo sapiens
  misc_RNA (1)...(19): siRNA sense strand
agauggaagaugauauaga

SEQ ID NO: 2497177 - RNA, 19 nt, Homo sapiens
  misc_RNA (1)...(19): siRNA sense strand
agaagggcacagagaugaa

SEQ ID NO: 2497178 - RNA, 19 nt, Homo sapiens
  misc_RNA (1)...(19): siRNA sense strand
auagaaagugguacaaaca

SEQ ID NO: 2497179 - RNA, 19 nt, Homo sapiens
  misc_RNA (1)...(19): siRNA sense strand
agaggcauaauuaggauaa

SEQ ID NO: 2497180 - RNA, 19 nt, Homo sapiens
  misc_RNA (1)...(19): siRNA sense strand
gucucaaggaagaucauaa

SEQ ID NO: 2497181 - RNA, 19 nt, Homo sapiens
  misc_RNA (1)...(19): siRNA sense strand
ggggaaagggaaaauggaa

SEQ ID NO: 2497182 - RNA, 19 nt, Homo sapiens
  misc_RNA (1)...(19): siRNA sense strand
aggagauccauuaguguuu

SEQ ID NO: 2497183 - RNA, 19 nt, Homo sapiens
  misc_RNA (1)...(19): siRNA sense strand
aaguagaagauccucauaa

SEQ ID NO: 2497184 - RNA, 19 nt, Homo sapiens
  misc_RNA (1)...(19): siRNA sense strand
ugauugugugcgaugguua

SEQ ID NO: 2497185 - RNA, 19 nt, Homo sapiens
  misc_RNA (1)...(19): siRNA sense strand
agggaaaauggaagucaaa

SEQ ID NO: 2497186 - RNA, 19 nt, Homo sapiens
  misc_RNA (1)...(19): siRNA sense strand
ugucauucacaaggagaaa

SEQ ID NO: 2497187 - RNA, 19 nt, Homo sapiens
  misc_RNA (1)...(19): siRNA sense strand
cagugaaucuaaugugacu

SEQ ID NO: 2497188 - RNA, 19 nt, Homo sapiens
  misc_RNA (1)...(19): siRNA sense strand
guagcuggaucuagaggca

SEQ ID NO: 2497189 - RNA, 19 nt, Homo sapiens
  misc_RNA (1)...(19): siRNA sense strand
ggaaagggaaaauggaagu

SEQ ID NO: 2497190 - RNA, 19 nt, Homo sapiens
  misc_RNA (1)...(19): siRNA sense strand
aaucuuacguggaugcuga

SEQ ID NO: 2497191 - RNA, 19 nt, Homo sapiens
  misc_RNA (1)...(19): siRNA sense strand
gggcaaucaaguuggcaaa

SEQ ID NO: 2497192 - RNA, 19 nt, Homo sapiens
  misc_RNA (1)...(19): siRNA sense strand
ggcaauauuuggaggcgua

SEQ ID NO: 2497193 - RNA, 19 nt, Homo sapiens
  misc_RNA (1)...(19): siRNA sense strand
caguauagaaagugguaca

SEQ ID NO: 2497194 - RNA, 19 nt, Homo sapiens
  misc_RNA (1)...(19): siRNA sense strand
caguaaagaaggagaucca

SEQ ID NO: 2497195 - RNA, 19 nt, Homo sapiens
  misc_RNA (1)...(19): siRNA sense strand
gcguagaagggcacagaga

SEQ ID NO: 2497196 - RNA, 19 nt, Homo sapiens
  misc_RNA (1)...(19): siRNA sense strand
ggaaggaaaaguuggggaa

SEQ ID NO: 2497197 - RNA, 19 nt, Homo sapiens
  misc_RNA (1)...(19): siRNA sense strand
ggaaaauggaagucaaaga

SEQ ID NO: 2497198 - RNA, 19 nt, Homo sapiens
  misc_RNA (1)...(19): siRNA sense strand
aguucuaagugcugauuau

SEQ ID NO: 2497199 - RNA, 19 nt, Homo sapiens
  misc_RNA (1)...(19): siRNA sense strand
cuuaaacuuuggaggauca

SEQ ID NO: 2497200 - RNA, 19 nt, Homo sapiens
  misc_RNA (1)...(19): siRNA sense strand
gggauuuagaaguagaaga

SEQ ID NO: 2497201 - RNA, 19 nt, Homo sapiens
  misc_RNA (1)...(19): siRNA sense strand
guaaauagucucaaggaag

SEQ ID NO: 2497202 - RNA, 19 nt, Homo sapiens
  misc_RNA (1)...(19): siRNA sense strand
agcuggaucuagaggcaua

SEQ ID NO: 2497203 - RNA, 19 nt, Homo sapiens
  misc_RNA (1)...(19): siRNA sense strand
aauuaaacccagugaaucu

SEQ ID NO: 2497204 - RNA, 19 nt, Homo sapiens
  misc_RNA (1)...(19): siRNA sense strand
gccaagaagcagaagcuga

SEQ ID NO: 2497205 - RNA, 19 nt, Homo sapiens
  misc_RNA (1)...(19): siRNA sense strand
cuauguuggccauggaaau

SEQ ID NO: 2497206 - RNA, 19 nt, Homo sapiens
  misc_RNA (1)...(19): siRNA sense strand
cuaucaaugagcugaaauu

SEQ ID NO: 2497207 - RNA, 19 nt, Homo sapiens
  misc_RNA (1)...(19): siRNA sense strand
ucuauggauuucuggcaaa

SEQ ID NO: 2497208 - RNA, 19 nt, Homo sapiens
  misc_RNA (1)...(19): siRNA sense strand
agagacauacauaggaauu

SEQ ID NO: 2497209 - RNA, 19 nt, Homo sapiens
  misc_RNA (1)...(19): siRNA sense strand
aggaucaauucaaagagaa

SEQ ID NO: 2497210 - RNA, 19 nt, Homo sapiens
  misc_RNA (1)...(19): siRNA sense strand
aagagaaugaugaaugcaa

SEQ ID NO: 2497211 - RNA, 19 nt, Homo sapiens
  misc_RNA (1)...(19): siRNA sense strand
ccugauacaccuacaaaca

SEQ ID NO: 2497212 - RNA, 19 nt, Homo sapiens
  misc_RNA (1)...(19): siRNA sense strand
gucaguaaguaaagaucau

SEQ ID NO: 2497213 - RNA, 19 nt, Homo sapiens
  misc_RNA (1)...(19): siRNA sense strand
cggacacucugguggcaau

SEQ ID NO: 2497214 - RNA, 19 nt, Homo sapiens
  misc_RNA (1)...(19): siRNA sense strand
cagacaugccugcggccaa

SEQ ID NO: 2497215 - RNA, 19 nt, Homo sapiens
  misc_RNA (1)...(19): siRNA sense strand
agauggaagaugauauaga

SEQ ID NO: 2497216 - RNA, 19 nt, Homo sapiens
  misc_RNA (1)...(19): siRNA sense strand
agaagggcacagagaugaa

SEQ ID NO: 2497217 - RNA, 19 nt, Homo sapiens
  misc_RNA (1)...(19): siRNA sense strand
auagaaagugguacaaaca

SEQ ID NO: 2497218 - RNA, 19 nt, Homo sapiens
  misc_RNA (1)...(19): siRNA sense strand
agaggcauaauuaggauaa

SEQ ID NO: 2497219 - RNA, 19 nt, Homo sapiens
  misc_RNA (1)...(19): siRNA sense strand
gucucaaggaagaucauaa

SEQ ID NO: 2497220 - RNA, 19 nt, Homo sapiens
  misc_RNA (1)...(19): siRNA sense strand
ggggaaagggaaaauggaa

SEQ ID NO: 2497221 - RNA, 19 nt, Homo sapiens
  misc_RNA (1)...(19): siRNA sense strand
aggagauccauuaguguuu

SEQ ID NO: 2497222 - RNA, 19 nt, Homo sapiens
  misc_RNA (1)...(19): siRNA sense strand
aaguagaagauccucauaa

SEQ ID NO: 2497223 - RNA, 19 nt, Homo sapiens
  misc_RNA (1)...(19): siRNA sense strand
ugauugugugcgaugguua

SEQ ID NO: 2497224 - RNA, 19 nt, Homo sapiens
  misc_RNA (1)...(19): siRNA sense strand
agggaaaauggaagucaaa

SEQ ID NO: 2497225 - RNA, 19 nt, Homo sapiens
  misc_RNA (1)...(19): siRNA sense strand
ugucauucacaaggagaaa

SEQ ID NO: 2497226 - RNA, 19 nt, Homo sapiens
  misc_RNA (1)...(19): siRNA sense strand
cagugaaucuaaugugacu

SEQ ID NO: 2497227 - RNA, 19 nt, Homo sapiens
  misc_RNA (1)...(19): siRNA sense strand
guagcuggaucuagaggca

SEQ ID NO: 2497228 - RNA, 19 nt, Homo sapiens
  misc_RNA (1)...(19): siRNA sense strand
ggaaagggaaaauggaagu

SEQ ID NO: 2497229 - RNA, 19 nt, Homo sapiens
  misc_RNA (1)...(19): siRNA sense strand
aaucuuacguggaugcuga

SEQ ID NO: 2497230 - RNA, 19 nt, Homo sapiens
  misc_RNA (1)...(19): siRNA sense strand
cgccaaugacucagaggaa

SEQ ID NO: 2497231 - RNA, 19 nt, Homo sapiens
  misc_RNA (1)...(19): siRNA sense strand
gaagaaaucaucaagccua

SEQ ID NO: 2497232 - RNA, 19 nt, Homo sapiens
  misc_RNA (1)...(19): siRNA sense strand
aagcaagacuacugggugu

SEQ ID NO: 2497233 - RNA, 19 nt, Homo sapiens
  misc_RNA (1)...(19): siRNA sense strand
uguuugaagaccugaagaa

SEQ ID NO: 2497234 - RNA, 19 nt, Homo sapiens
  misc_RNA (1)...(19): siRNA sense strand
acucagaggaagaaaucau

SEQ ID NO: 2497235 - RNA, 19 nt, Homo sapiens
  misc_RNA (1)...(19): siRNA sense strand
cuuccugagcaaugugaaa

SEQ ID NO: 2497236 - RNA, 19 nt, Homo sapiens
  misc_RNA (1)...(19): siRNA sense strand
ccuucuaucauguaagcua

SEQ ID NO: 2497237 - RNA, 19 nt, Homo sapiens
  misc_RNA (1)...(19): siRNA sense strand
augaugaccuggaggccau

SEQ ID NO: 2497238 - RNA, 19 nt, Homo sapiens
  misc_RNA (1)...(19): siRNA sense strand
cagaggaagaaaucaucaa

SEQ ID NO: 2497239 - RNA, 19 nt, Homo sapiens
  misc_RNA (1)...(19): siRNA sense strand
ggaucaucaaauacgaauu

SEQ ID NO: 2497240 - RNA, 19 nt, Homo sapiens
  misc_RNA (1)...(19): siRNA sense strand
ucuggaugaagcagugaaa

SEQ ID NO: 2497241 - RNA, 19 nt, Homo sapiens
  misc_RNA (1)...(19): siRNA sense strand
ggauaaauauguaagugga

SEQ ID NO: 2497242 - RNA, 19 nt, Homo sapiens
  misc_RNA (1)...(19): siRNA sense strand
auucaguacaugagaagaa

SEQ ID NO: 2497243 - RNA, 19 nt, Homo sapiens
  misc_RNA (1)...(19): siRNA sense strand
aauugaaggaagaggacau

SEQ ID NO: 2497244 - RNA, 19 nt, Homo sapiens
  misc_RNA (1)...(19): siRNA sense strand
aaggaagcccagagagaga

SEQ ID NO: 2497245 - RNA, 19 nt, Homo sapiens
  misc_RNA (1)...(19): siRNA sense strand
aggaagaggacauggccau

SEQ ID NO: 2497246 - RNA, 19 nt, Homo sapiens
  misc_RNA (1)...(19): siRNA sense strand
gugaaaacuugggcagaaa

SEQ ID NO: 2497247 - RNA, 19 nt, Homo sapiens
  misc_RNA (1)...(19): siRNA sense strand
ccagagagagaaaagaaaa

SEQ ID NO: 2497248 - RNA, 19 nt, Homo sapiens
  misc_RNA (1)...(19): siRNA sense strand
cucaaaggaccaaggaaga

SEQ ID NO: 2497249 - RNA, 19 nt, Homo sapiens
  misc_RNA (1)...(19): siRNA sense strand
ccauuacacaugagaacau

SEQ ID NO: 2497250 - RNA, 19 nt, Homo sapiens
  misc_RNA (1)...(19): siRNA sense strand
ggaagaacggucuagccaa

SEQ ID NO: 2497251 - RNA, 19 nt, Homo sapiens
  misc_RNA (1)...(19): siRNA sense strand
agaaaggagaagacagcca

SEQ ID NO: 2497252 - RNA, 19 nt, Homo sapiens
  misc_RNA (1)...(19): siRNA sense strand
gagaaaggauugcgccaac

SEQ ID NO: 2497253 - RNA, 19 nt, Homo sapiens
  misc_RNA (1)...(19): siRNA sense strand
ugaaauugaaggaagagga

SEQ ID NO: 2497254 - RNA, 19 nt, Homo sapiens
  misc_RNA (1)...(19): siRNA sense strand
agaaagauuugucaggagu

SEQ ID NO: 2497255 - RNA, 19 nt, Homo sapiens
  misc_RNA (1)...(19): siRNA sense strand
ucucaaaggaccaaggaag

SEQ ID NO: 2497256 - RNA, 19 nt, Homo sapiens
  misc_RNA (1)...(19): siRNA sense strand
gguguuuaagcgagcauau

SEQ ID NO: 2497257 - RNA, 19 nt, Homo sapiens
  misc_RNA (1)...(19): siRNA sense strand
auucuauaccagacuguua

SEQ ID NO: 2497258 - RNA, 19 nt, Homo sapiens
  misc_RNA (1)...(19): siRNA sense strand
guguucaaagaucgggaua

SEQ ID NO: 2497259 - RNA, 19 nt, Homo sapiens
  misc_RNA (1)...(19): siRNA sense strand
uguucaaagaucgggauaa

SEQ ID NO: 2497260 - RNA, 19 nt, Homo sapiens
  misc_RNA (1)...(19): siRNA sense strand
gagaagacagccaagacga

SEQ ID NO: 2497261 - RNA, 19 nt, Homo sapiens
  misc_RNA (1)...(19): siRNA sense strand
gaaaggagaagacagccaa

SEQ ID NO: 2497262 - RNA, 19 nt, Homo sapiens
  misc_RNA (1)...(19): siRNA sense strand
auucaguacaugagaagaa

SEQ ID NO: 2497263 - RNA, 19 nt, Homo sapiens
  misc_RNA (1)...(19): siRNA sense strand
aauugaaggaagaggacau

SEQ ID NO: 2497264 - RNA, 19 nt, Homo sapiens
  misc_RNA (1)...(19): siRNA sense strand
aaggaagcccagagagaga

SEQ ID NO: 2497265 - RNA, 19 nt, Homo sapiens
  misc_RNA (1)...(19): siRNA sense strand
aggaagaggacauggccau

SEQ ID NO: 2497266 - RNA, 19 nt, Homo sapiens
  misc_RNA (1)...(19): siRNA sense strand
gugaaaacuugggcagaaa

SEQ ID NO: 2497267 - RNA, 19 nt, Homo sapiens
  misc_RNA (1)...(19): siRNA sense strand
ccagagagagaaaagaaaa

SEQ ID NO: 2497268 - RNA, 19 nt, Homo sapiens
  misc_RNA (1)...(19): siRNA sense strand
cucaaaggaccaaggaaga

SEQ ID NO: 2497269 - RNA, 19 nt, Homo sapiens
  misc_RNA (1)...(19): siRNA sense strand
ccauuacacaugagaacau

SEQ ID NO: 2497270 - RNA, 19 nt, Homo sapiens
  misc_RNA (1)...(19): siRNA sense strand
ggaagaacggucuagccaa

SEQ ID NO: 2497271 - RNA, 19 nt, Homo sapiens
  misc_RNA (1)...(19): siRNA sense strand
agaaaggagaagacagcca

SEQ ID NO: 2497272 - RNA, 19 nt, Homo sapiens
  misc_RNA (1)...(19): siRNA sense strand
gagaaaggauugcgccaac

SEQ ID NO: 2497273 - RNA, 19 nt, Homo sapiens
  misc_RNA (1)...(19): siRNA sense strand
ugaaauugaaggaagagga

SEQ ID NO: 2497274 - RNA, 19 nt, Homo sapiens
  misc_RNA (1)...(19): siRNA sense strand
agaaagauuugucaggagu

SEQ ID NO: 2497275 - RNA, 19 nt, Homo sapiens
  misc_RNA (1)...(19): siRNA sense strand
ucucaaaggaccaaggaag

SEQ ID NO: 2497276 - RNA, 19 nt, Homo sapiens
  misc_RNA (1)...(19): siRNA sense strand
gguguuuaagcgagcauau

SEQ ID NO: 2497277 - RNA, 19 nt, Homo sapiens
  misc_RNA (1)...(19): siRNA sense strand
auucuauaccagacuguua

SEQ ID NO: 2497278 - RNA, 19 nt, Homo sapiens
  misc_RNA (1)...(19): siRNA sense strand
gagaagacagccaagacga

SEQ ID NO: 2497279 - RNA, 19 nt, Homo sapiens
  misc_RNA (1)...(19): siRNA sense strand
gaaaggagaagacagccaa

SEQ ID NO: 2497280 - RNA, 19 nt, Homo sapiens
  misc_RNA (1)...(19): siRNA sense strand
gggaugaacucaagcggca

SEQ ID NO: 2497281 - RNA, 19 nt, Homo sapiens
  misc_RNA (1)...(19): siRNA sense strand
ucgucaaggaugagcacaa

SEQ ID NO: 2497282 - RNA, 19 nt, Homo sapiens
  misc_RNA (1)...(19): siRNA sense strand
gggaugugaugcuggccaa

SEQ ID NO: 2497283 - RNA, 19 nt, Homo sapiens
  misc_RNA (1)...(19): siRNA sense strand
ugaagaaguuuauugccua

SEQ ID NO: 2497284 - RNA, 19 nt, Homo sapiens
  misc_RNA (1)...(19): siRNA sense strand
ggguauacacgucugggaa

SEQ ID NO: 2497285 - RNA, 19 nt, Homo sapiens
  misc_RNA (1)...(19): siRNA sense strand
agaugaagcugcagcccuu

SEQ ID NO: 2497286 - RNA, 19 nt, Homo sapiens
  misc_RNA (1)...(19): siRNA sense strand
gcaucgagaagcagcucaa

SEQ ID NO: 2497287 - RNA, 19 nt, Homo sapiens
  misc_RNA (1)...(19): siRNA sense strand
ugucagggguggagggcuu

SEQ ID NO: 2497288 - RNA, 19 nt, Homo sapiens
  misc_RNA (1)...(19): siRNA sense strand
cuguggagggcgagauuga

SEQ ID NO: 2497289 - RNA, 19 nt, Homo sapiens
  misc_RNA (1)...(19): siRNA sense strand
gcgagauugaccuggccaa

SEQ ID NO: 2497290 - RNA, 19 nt, Homo sapiens
  misc_RNA (1)...(19): siRNA sense strand
ggagguagcugaugaggug

SEQ ID NO: 2497291 - RNA, 19 nt, Homo sapiens
  misc_RNA (1)...(19): siRNA sense strand
cccaggaggaggaggaguu

SEQ ID NO: 2497292 - RNA, 19 nt, Homo sapiens
  misc_RNA (1)...(19): siRNA sense strand
aagaugaccguguggcaau

SEQ ID NO: 2497293 - RNA, 19 nt, Homo sapiens
  misc_RNA (1)...(19): siRNA sense strand
aguacuggauugaggugga

SEQ ID NO: 2497294 - RNA, 19 nt, Homo sapiens
  misc_RNA (1)...(19): siRNA sense strand
gcgcacugacacagacaca

SEQ ID NO: 2497295 - RNA, 19 nt, Homo sapiens
  misc_RNA (1)...(19): siRNA sense strand
ucgcggaagcccucagcaa

SEQ ID NO: 2497296 - RNA, 19 nt, Homo sapiens
  misc_RNA (1)...(19): siRNA sense strand
gccaggaggaccaggagau

SEQ ID NO: 2497297 - RNA, 19 nt, Homo sapiens
  misc_RNA (1)...(19): siRNA sense strand
cugaagaaguuuauugccu

SEQ ID NO: 2497298 - RNA, 19 nt, Homo sapiens
  misc_RNA (1)...(19): siRNA sense strand
ucaucaaggacuucaccaa

SEQ ID NO: 2497299 - RNA, 19 nt, Homo sapiens
  misc_RNA (1)...(19): siRNA sense strand
ccaguaaaugagaagacau

SEQ ID NO: 2497300 - RNA, 19 nt, Homo sapiens
  misc_RNA (1)...(19): siRNA sense strand
guguuguaucuauggcuaa

SEQ ID NO: 2497301 - RNA, 19 nt, Homo sapiens
  misc_RNA (1)...(19): siRNA sense strand
gaaagguaauagauggucu

SEQ ID NO: 2497302 - RNA, 19 nt, Homo sapiens
  misc_RNA (1)...(19): siRNA sense strand
gguguuguaucuauggcua

SEQ ID NO: 2497303 - RNA, 19 nt, Homo sapiens
  misc_RNA (1)...(19): siRNA sense strand
cucuagaugaguuggagaa

SEQ ID NO: 2497304 - RNA, 19 nt, Homo sapiens
  misc_RNA (1)...(19): siRNA sense strand
ccaguaaaugagaagacau

SEQ ID NO: 2497305 - RNA, 19 nt, Homo sapiens
  misc_RNA (1)...(19): siRNA sense strand
guguuguaucuauggcuaa

SEQ ID NO: 2497306 - RNA, 19 nt, Homo sapiens
  misc_RNA (1)...(19): siRNA sense strand
gaaagguaauagauggucu

SEQ ID NO: 2497307 - RNA, 19 nt, Homo sapiens
  misc_RNA (1)...(19): siRNA sense strand
gguguuguaucuauggcua

SEQ ID NO: 2497308 - RNA, 19 nt, Homo sapiens
  misc_RNA (1)...(19): siRNA sense strand
cucuagaugaguuggagaa

SEQ ID NO: 2497309 - RNA, 19 nt, Homo sapiens
  misc_RNA (1)...(19): siRNA sense strand
ccaguaaaugagaagacau

SEQ ID NO: 2497310 - RNA, 19 nt, Homo sapiens
  misc_RNA (1)...(19): siRNA sense strand
guguuguaucuauggcuaa

SEQ ID NO: 2497311 - RNA, 19 nt, Homo sapiens
  misc_RNA (1)...(19): siRNA sense strand
gaaagguaauagauggucu

SEQ ID NO: 2497312 - RNA, 19 nt, Homo sapiens
  misc_RNA (1)...(19): siRNA sense strand
gguguuguaucuauggcua

SEQ ID NO: 2497313 - RNA, 19 nt, Homo sapiens
  misc_RNA (1)...(19): siRNA sense strand
cucuagaugaguuggagaa

SEQ ID NO: 2497314 - RNA, 19 nt, Homo sapiens
  misc_RNA (1)...(19): siRNA sense strand
uggaagaguuggacgguga

SEQ ID NO: 2497315 - RNA, 19 nt, Homo sapiens
  misc_RNA (1)...(19): siRNA sense strand
cagccauguuugaggcaau

SEQ ID NO: 2497316 - RNA, 19 nt, Homo sapiens
  misc_RNA (1)...(19): siRNA sense strand
cugcagaagagcuuagcaa

SEQ ID NO: 2497317 - RNA, 19 nt, Homo sapiens
  misc_RNA (1)...(19): siRNA sense strand
acccagacuucgugcgcaa

SEQ ID NO: 2497318 - RNA, 19 nt, Homo sapiens
  misc_RNA (1)...(19): siRNA sense strand
cuacaggagcaaugaggau

SEQ ID NO: 2497319 - RNA, 19 nt, Homo sapiens
  misc_RNA (1)...(19): siRNA sense strand
cccucaaggcagugggaga

SEQ ID NO: 2497320 - RNA, 19 nt, Homo sapiens
  misc_RNA (1)...(19): siRNA sense strand
uguuugaggcaauggaaga

SEQ ID NO: 2497321 - RNA, 19 nt, Homo sapiens
  misc_RNA (1)...(19): siRNA sense strand
aggcagugggagagaucau

SEQ ID NO: 2497322 - RNA, 19 nt, Homo sapiens
  misc_RNA (1)...(19): siRNA sense strand
ggcaagaagugugggacca

SEQ ID NO: 2497323 - RNA, 19 nt, Homo sapiens
  misc_RNA (1)...(19): siRNA sense strand
ccauauugcugacugcaga

SEQ ID NO: 2497324 - RNA, 19 nt, Homo sapiens
  misc_RNA (1)...(19): siRNA sense strand
gaacaacaaugaugaggac

SEQ ID NO: 2497325 - RNA, 19 nt, Homo sapiens
  misc_RNA (1)...(19): siRNA sense strand
cugacaugacgcagaccaa

SEQ ID NO: 2497326 - RNA, 19 nt, Homo sapiens
  misc_RNA (1)...(19): siRNA sense strand
ccaaggaugugcuggccga

SEQ ID NO: 2497327 - RNA, 19 nt, Homo sapiens
  misc_RNA (1)...(19): siRNA sense strand
aggcaauggaagaguugga

SEQ ID NO: 2497328 - RNA, 19 nt, Homo sapiens
  misc_RNA (1)...(19): siRNA sense strand
ugagcaaggcccagaacca

SEQ ID NO: 2497329 - RNA, 19 nt, Homo sapiens
  misc_RNA (1)...(19): siRNA sense strand
uuacaucaagggagggaca

SEQ ID NO: 2497330 - RNA, 19 nt, Homo sapiens
  misc_RNA (1)...(19): siRNA sense strand
gcuaccgggagcugagcaa

SEQ ID NO: 2497331 - RNA, 19 nt, Homo sapiens
  misc_RNA (1)...(19): siRNA sense strand
acaaaguguuccuggccaa

SEQ ID NO: 2497332 - RNA, 19 nt, Homo sapiens
  misc_RNA (1)...(19): siRNA sense strand
gcuacauggcccagcucaa

SEQ ID NO: 2497333 - RNA, 19 nt, Homo sapiens
  misc_RNA (1)...(19): siRNA sense strand
cagcagaagccggaagaca

SEQ ID NO: 2497334 - RNA, 19 nt, Homo sapiens
  misc_RNA (1)...(19): siRNA sense strand
acgagcaacucaagggcga

SEQ ID NO: 2497335 - RNA, 19 nt, Homo sapiens
  misc_RNA (1)...(19): siRNA sense strand
gggaagagcugggucgacu

SEQ ID NO: 2497336 - RNA, 19 nt, Homo sapiens
  misc_RNA (1)...(19): siRNA sense strand
gagcucaacuucuugccaa

SEQ ID NO: 2497337 - RNA, 19 nt, Homo sapiens
  misc_RNA (1)...(19): siRNA sense strand
uggccgaacgacagggcaa

SEQ ID NO: 2497338 - RNA, 19 nt, Homo sapiens
  misc_RNA (1)...(19): siRNA sense strand
cagccgaggagcuccgaaa

SEQ ID NO: 2497339 - RNA, 19 nt, Homo sapiens
  misc_RNA (1)...(19): siRNA sense strand
ugguaagggucuuccgcau

SEQ ID NO: 2497340 - RNA, 19 nt, Homo sapiens
  misc_RNA (1)...(19): siRNA sense strand
gcuucgagacgcagcugaa

SEQ ID NO: 2497341 - RNA, 19 nt, Homo sapiens
  misc_RNA (1)...(19): siRNA sense strand
gacagaaggggaagagcaa

SEQ ID NO: 2497342 - RNA, 19 nt, Homo sapiens
  misc_RNA (1)...(19): siRNA sense strand
cugcagauccucgggcaaa

SEQ ID NO: 2497343 - RNA, 19 nt, Homo sapiens
  misc_RNA (1)...(19): siRNA sense strand
gcugcagauccucgggcaa

SEQ ID NO: 2497344 - RNA, 19 nt, Homo sapiens
  misc_RNA (1)...(19): siRNA sense strand
cauucgaagcagccggcaa

SEQ ID NO: 2497345 - RNA, 19 nt, Homo sapiens
  misc_RNA (1)...(19): siRNA sense strand
caacaguggguuacggcga

SEQ ID NO: 2497346 - RNA, 19 nt, Homo sapiens
  misc_RNA (1)...(19): siRNA sense strand
ggggcaagauugugggauc

SEQ ID NO: 2497347 - RNA, 19 nt, Homo sapiens
  misc_RNA (1)...(19): siRNA sense strand
ucgaacugcuggugcgguu

SEQ ID NO: 2497348 - RNA, 19 nt, Homo sapiens
  misc_RNA (1)...(19): siRNA sense strand
cgaaacaucaugaaccuga

SEQ ID NO: 2497349 - RNA, 19 nt, Homo sapiens
  misc_RNA (1)...(19): siRNA sense strand
aggaagaguccaacaacaa

SEQ ID NO: 2497350 - RNA, 19 nt, Homo sapiens
  misc_RNA (1)...(19): siRNA sense strand
acaaagucgaugagaguga

SEQ ID NO: 2497351 - RNA, 19 nt, Homo sapiens
  misc_RNA (1)...(19): siRNA sense strand
gccaaaugcuucagggagu

SEQ ID NO: 2497352 - RNA, 19 nt, Homo sapiens
  misc_RNA (1)...(19): siRNA sense strand
gcauagaaucugcugccaa

SEQ ID NO: 2497353 - RNA, 19 nt, Homo sapiens
  misc_RNA (1)...(19): siRNA sense strand
augauugggcacuggauua

SEQ ID NO: 2497354 - RNA, 19 nt, Homo sapiens
  misc_RNA (1)...(19): siRNA sense strand
augcuauggaggaggaaga

SEQ ID NO: 2497355 - RNA, 19 nt, Homo sapiens
  misc_RNA (1)...(19): siRNA sense strand
agaauauugccaaguacaa

SEQ ID NO: 2497356 - RNA, 19 nt, Homo sapiens
  misc_RNA (1)...(19): siRNA sense strand
caagauuuggugugggaca

SEQ ID NO: 2497357 - RNA, 19 nt, Homo sapiens
  misc_RNA (1)...(19): siRNA sense strand
acucaagcuuuauuggcua

SEQ ID NO: 2497358 - RNA, 19 nt, Homo sapiens
  misc_RNA (1)...(19): siRNA sense strand
cgaagcaggcgguuggaga

SEQ ID NO: 2497359 - RNA, 19 nt, Homo sapiens
  misc_RNA (1)...(19): siRNA sense strand
ggcagaaagcaguugugaa

SEQ ID NO: 2497360 - RNA, 19 nt, Homo sapiens
  misc_RNA (1)...(19): siRNA sense strand
cguuaugcuuggcagaaaa

SEQ ID NO: 2497361 - RNA, 19 nt, Homo sapiens
  misc_RNA (1)...(19): siRNA sense strand
caggaauugaaguguguuu

SEQ ID NO: 2497362 - RNA, 19 nt, Homo sapiens
  misc_RNA (1)...(19): siRNA sense strand
ggagaagguggguggcguu

SEQ ID NO: 2497363 - RNA, 19 nt, Homo sapiens
  misc_RNA (1)...(19): siRNA sense strand
gggaauucacugaugagga

SEQ ID NO: 2497364 - RNA, 19 nt, Homo sapiens
  misc_RNA (1)...(19): siRNA sense strand
ggaugaagacagccagcga

SEQ ID NO: 2497365 - RNA, 19 nt, Homo sapiens
  misc_RNA (1)...(19): siRNA sense strand
gaugcaauuagaagggaca

SEQ ID NO: 2497366 - RNA, 19 nt, Homo sapiens
  misc_RNA (1)...(19): siRNA sense strand
ccuaaaagaccccaaagaa

SEQ ID NO: 2497367 - RNA, 19 nt, Homo sapiens
  misc_RNA (1)...(19): siRNA sense strand
ucgaugagagugaggagau

SEQ ID NO: 2497368 - RNA, 19 nt, Homo sapiens
  misc_RNA (1)...(19): siRNA sense strand
ucguuaugcuuggcagaaa

SEQ ID NO: 2497369 - RNA, 19 nt, Homo sapiens
  misc_RNA (1)...(19): siRNA sense strand
ggugaagauccgaggcaug

SEQ ID NO: 2497370 - RNA, 19 nt, Homo sapiens
  misc_RNA (1)...(19): siRNA sense strand
aagauuuggugugggacaa

SEQ ID NO: 2497371 - RNA, 19 nt, Homo sapiens
  misc_RNA (1)...(19): siRNA sense strand
agaugucauugcugggaga

SEQ ID NO: 2497372 - RNA, 19 nt, Homo sapiens
  misc_RNA (1)...(19): siRNA sense strand
cagaauauugccaaguaca

SEQ ID NO: 2497373 - RNA, 19 nt, Homo sapiens
  misc_RNA (1)...(19): siRNA sense strand
uugccaaguacaaggugaa

SEQ ID NO: 2497374 - RNA, 19 nt, Homo sapiens
  misc_RNA (1)...(19): siRNA sense strand
aggaggaagaguccaacaa

SEQ ID NO: 2497375 - RNA, 19 nt, Homo sapiens
  misc_RNA (1)...(19): siRNA sense strand
ucauauugaggaucugaaa

SEQ ID NO: 2497376 - RNA, 19 nt, Homo sapiens
  misc_RNA (1)...(19): siRNA sense strand
agacaggagcuuggaucua

SEQ ID NO: 2497377 - RNA, 19 nt, Homo sapiens
  misc_RNA (1)...(19): siRNA sense strand
cuuuauuggcuaugucauu

SEQ ID NO: 2497378 - RNA, 19 nt, Homo sapiens
  misc_RNA (1)...(19): siRNA sense strand
aagaagaggcagaaagcag

SEQ ID NO: 2497379 - RNA, 19 nt, Homo sapiens
  misc_RNA (1)...(19): siRNA sense strand
acaacaagcuauagggaac

SEQ ID NO: 2497380 - RNA, 19 nt, Homo sapiens
  misc_RNA (1)...(19): siRNA sense strand
uguacaaggaguuggaaau

SEQ ID NO: 2497381 - RNA, 19 nt, Homo sapiens
  misc_RNA (1)...(19): siRNA sense strand
gugcgaacaaauuggacaa

SEQ ID NO: 2497382 - RNA, 19 nt, Homo sapiens
  misc_RNA (1)...(19): siRNA sense strand
caagauuaugacagugaua

SEQ ID NO: 2497383 - RNA, 19 nt, Homo sapiens
  misc_RNA (1)...(19): siRNA sense strand
acguauaugagguggugaa

SEQ ID NO: 2497384 - RNA, 19 nt, Homo sapiens
  misc_RNA (1)...(19): siRNA sense strand
aggaaaauaugcugaaaga

SEQ ID NO: 2497385 - RNA, 19 nt, Homo sapiens
  misc_RNA (1)...(19): siRNA sense strand
acaaauuggacaagaagga

SEQ ID NO: 2497386 - RNA, 19 nt, Homo sapiens
  misc_RNA (1)...(19): siRNA sense strand
cauacuuacagcagaggaa

SEQ ID NO: 2497387 - RNA, 19 nt, Homo sapiens
  misc_RNA (1)...(19): siRNA sense strand
guuuggaagaacugaagua

SEQ ID NO: 2497388 - RNA, 19 nt, Homo sapiens
  misc_RNA (1)...(19): siRNA sense strand
gcuuauuacaggagucuga

SEQ ID NO: 2497389 - RNA, 19 nt, Homo sapiens
  misc_RNA (1)...(19): siRNA sense strand
uauaguagguguuggacca

SEQ ID NO: 2497390 - RNA, 19 nt, Homo sapiens
  misc_RNA (1)...(19): siRNA sense strand
cuaaagauguccuagcuga

SEQ ID NO: 2497391 - RNA, 19 nt, Homo sapiens
  misc_RNA (1)...(19): siRNA sense strand
gggagagaucguugguuca

SEQ ID NO: 2497392 - RNA, 19 nt, Homo sapiens
  misc_RNA (1)...(19): siRNA sense strand
uggaaauaaagaauggaga

SEQ ID NO: 2497393 - RNA, 19 nt, Homo sapiens
  misc_RNA (1)...(19): siRNA sense strand
ucuaaauccaguauggcaa

SEQ ID NO: 2497394 - RNA, 19 nt, Homo sapiens
  misc_RNA (1)...(19): siRNA sense strand
uggucgaauuggauggaga

SEQ ID NO: 2497395 - RNA, 19 nt, Homo sapiens
  misc_RNA (1)...(19): siRNA sense strand
auguacaaggaguuggaaa

SEQ ID NO: 2497396 - RNA, 19 nt, Homo sapiens
  misc_RNA (1)...(19): siRNA sense strand
agggaagaaaugugguaca

SEQ ID NO: 2497397 - RNA, 19 nt, Homo sapiens
  misc_RNA (1)...(19): siRNA sense strand
ggagacuaugacagaacaa

SEQ ID NO: 2497398 - RNA, 19 nt, Homo sapiens
  misc_RNA (1)...(19): siRNA sense strand
ggaaauaaagaauggagag

SEQ ID NO: 2497399 - RNA, 19 nt, Homo sapiens
  misc_RNA (1)...(19): siRNA sense strand
ccagggaagaaauguggua

SEQ ID NO: 2497400 - RNA, 19 nt, Homo sapiens
  misc_RNA (1)...(19): siRNA sense strand
cagucagagcauuauguaa

SEQ ID NO: 2497401 - RNA, 19 nt, Homo sapiens
  misc_RNA (1)...(19): siRNA sense strand
acuaauucuggaacaguaa

SEQ ID NO: 2497402 - RNA, 19 nt, Homo sapiens
  misc_RNA (1)...(19): siRNA sense strand
ggagaugauguaagagucu

SEQ ID NO: 2497403 - RNA, 19 nt, Homo sapiens
  misc_RNA (1)...(19): siRNA sense strand
uggagagaguuuggaagaa

SEQ ID NO: 2497404 - RNA, 19 nt, Homo sapiens
  misc_RNA (1)...(19): siRNA sense strand
ucuuauauguacaaggagu

SEQ ID NO: 2497405 - RNA, 19 nt, Homo sapiens
  misc_RNA (1)...(19): siRNA sense strand
auggagagaguuuggaaga

SEQ ID NO: 2497406 - RNA, 19 nt, Homo sapiens
  misc_RNA (1)...(19): siRNA sense strand
uugaagaaagagagaaucu

SEQ ID NO: 2497407 - RNA, 19 nt, Homo sapiens
  misc_RNA (1)...(19): siRNA sense strand
aaauaugcugaaagagaca

SEQ ID NO: 2497408 - RNA, 19 nt, Homo sapiens
  misc_RNA (1)...(19): siRNA sense strand
ggaacuuucuagagggcag

SEQ ID NO: 2497409 - RNA, 19 nt, Homo sapiens
  misc_RNA (1)...(19): siRNA sense strand
auuaagggagggacgcaaa

SEQ ID NO: 2497410 - RNA, 19 nt, Homo sapiens
  misc_RNA (1)...(19): siRNA sense strand
guccauaguuaaugccuca

SEQ ID NO: 2497411 - RNA, 19 nt, Homo sapiens
  misc_RNA (1)...(19): siRNA sense strand
aagaaaugugguacaauca

SEQ ID NO: 2497412 - RNA, 19 nt, Homo sapiens
  misc_RNA (1)...(19): siRNA sense strand
uguuggaccagcagaauuu

SEQ ID NO: 2497413 - RNA, 19 nt, Homo sapiens
  misc_RNA (1)...(19): siRNA sense strand
ggucgaauuggauggagau

SEQ ID NO: 2497414 - RNA, 19 nt, Homo sapiens
  misc_RNA (1)...(19): siRNA sense strand
guacauugggagagaucgu

SEQ ID NO: 2497415 - RNA, 19 nt, Homo sapiens
  misc_RNA (1)...(19): siRNA sense strand
gggucauggaggcuuauua

SEQ ID NO: 2497416 - RNA, 19 nt, Homo sapiens
  misc_RNA (1)...(19): siRNA sense strand
acuuacagcagaggaauua

SEQ ID NO: 2497417 - RNA, 19 nt, Homo sapiens
  misc_RNA (1)...(19): siRNA sense strand
acuaaaagcagugggagaa

SEQ ID NO: 2497418 - RNA, 19 nt, Homo sapiens
  misc_RNA (1)...(19): siRNA sense strand
aggaguuggaaauaaagaa

SEQ ID NO: 2497419 - RNA, 19 nt, Homo sapiens
  misc_RNA (1)...(19): siRNA sense strand
cagugaagauggaggccca

SEQ ID NO: 2497420 - RNA, 19 nt, Homo sapiens
  misc_RNA (1)...(19): siRNA sense strand
cuuacuaccgggagaauca

SEQ ID NO: 2497421 - RNA, 19 nt, Homo sapiens
  misc_RNA (1)...(19): siRNA sense strand
agggaacauguuugagaau

SEQ ID NO: 2497422 - RNA, 19 nt, Homo sapiens
  misc_RNA (1)...(19): siRNA sense strand
aggagaugccgaaggggua

SEQ ID NO: 2497423 - RNA, 19 nt, Homo sapiens
  misc_RNA (1)...(19): siRNA sense strand
gugaaaucuaccaguggau

SEQ ID NO: 2497424 - RNA, 19 nt, Homo sapiens
  misc_RNA (1)...(19): siRNA sense strand
aggaggagcugguggcaga

SEQ ID NO: 2497425 - RNA, 19 nt, Homo sapiens
  misc_RNA (1)...(19): siRNA sense strand
gcaccuaaaggccggaaaa

SEQ ID NO: 2497426 - RNA, 19 nt, Homo sapiens
  misc_RNA (1)...(19): siRNA sense strand
aggaggagcugguggcaga

SEQ ID NO: 2497427 - RNA, 19 nt, Homo sapiens
  misc_RNA (1)...(19): siRNA sense strand
gcaccuaaaggccggaaaa

SEQ ID NO: 2497428 - RNA, 19 nt, Homo sapiens
  misc_RNA (1)...(19): siRNA sense strand
acgugaagcuacaggguca

SEQ ID NO: 2497429 - RNA, 19 nt, Homo sapiens
  misc_RNA (1)...(19): siRNA sense strand
uggaauggcccaaggaaaa

SEQ ID NO: 2497430 - RNA, 19 nt, Homo sapiens
  misc_RNA (1)...(19): siRNA sense strand
ccuaaguauucuggcgaaa

SEQ ID NO: 2497431 - RNA, 19 nt, Homo sapiens
  misc_RNA (1)...(19): siRNA sense strand
gccuauaugcaaagaguuu

SEQ ID NO: 2497432 - RNA, 19 nt, Homo sapiens
  misc_RNA (1)...(19): siRNA sense strand
uggcaagagcauuguggaa

SEQ ID NO: 2497433 - RNA, 19 nt, Homo sapiens
  misc_RNA (1)...(19): siRNA sense strand
ucaaccaggaauuggaaua

SEQ ID NO: 2497434 - RNA, 19 nt, Homo sapiens
  misc_RNA (1)...(19): siRNA sense strand
ugccagaagaugaggucaa

SEQ ID NO: 2497435 - RNA, 19 nt, Homo sapiens
  misc_RNA (1)...(19): siRNA sense strand
gagaagaguuacaagucca

SEQ ID NO: 2497436 - RNA, 19 nt, Homo sapiens
  misc_RNA (1)...(19): siRNA sense strand
ggagagacuuauggggaaa

SEQ ID NO: 2497437 - RNA, 19 nt, Homo sapiens
  misc_RNA (1)...(19): siRNA sense strand
caauaaaagcaggggacaa

SEQ ID NO: 2497438 - RNA, 19 nt, Homo sapiens
  misc_RNA (1)...(19): siRNA sense strand
agaaagaagguaugcagau

SEQ ID NO: 2497439 - RNA, 19 nt, Homo sapiens
  misc_RNA (1)...(19): siRNA sense strand
cauugaaacaacuuggaau

SEQ ID NO: 2497440 - RNA, 19 nt, Homo sapiens
  misc_RNA (1)...(19): siRNA sense strand
aggagagacuuauggggaa

SEQ ID NO: 2497441 - RNA, 19 nt, Homo sapiens
  misc_RNA (1)...(19): siRNA sense strand
agaugaagucucugcaaca

SEQ ID NO: 2497442 - RNA, 19 nt, Homo sapiens
  misc_RNA (1)...(19): siRNA sense strand
aggaggacuuauuuggaau

SEQ ID NO: 2497443 - RNA, 19 nt, Homo sapiens
  misc_RNA (1)...(19): siRNA sense strand
ccugcauugagaagaguua

SEQ ID NO: 2497444 - RNA, 19 nt, Homo sapiens
  misc_RNA (1)...(19): siRNA sense strand
ucuaauagcuuaauccuga

SEQ ID NO: 2497445 - RNA, 19 nt, Homo sapiens
  misc_RNA (1)...(19): siRNA sense strand
gugaaguguuagagggcug

SEQ ID NO: 2497446 - RNA, 19 nt, Homo sapiens
  misc_RNA (1)...(19): siRNA sense strand
gagaaagaagguaugcaga

SEQ ID NO: 2497447 - RNA, 19 nt, Homo sapiens
  misc_RNA (1)...(19): siRNA sense strand
agaccaaguaucaagugaa

SEQ ID NO: 2497448 - RNA, 19 nt, Homo sapiens
  misc_RNA (1)...(19): siRNA sense strand
ggcccaaggaaaagagcaa

SEQ ID NO: 2497449 - RNA, 19 nt, Homo sapiens
  misc_RNA (1)...(19): siRNA sense strand
cugucaaaacugaggauuu

SEQ ID NO: 2497450 - RNA, 19 nt, Homo sapiens
  misc_RNA (1)...(19): siRNA sense strand
gaaggaucuaauagcuuaa

SEQ ID NO: 2497451 - RNA, 19 nt, Homo sapiens
  misc_RNA (1)...(19): siRNA sense strand
uauuaagcugacagagcaa

SEQ ID NO: 2497452 - RNA, 19 nt, Homo sapiens
  misc_RNA (1)...(19): siRNA sense strand
cugugagcuaggagaauuu

SEQ ID NO: 2497453 - RNA, 19 nt, Homo sapiens
  misc_RNA (1)...(19): siRNA sense strand
ccacaaacaaagaauucca

SEQ ID NO: 2497454 - RNA, 19 nt, Homo sapiens
  misc_RNA (1)...(19): siRNA sense strand
caaaugugugcuagaagau

SEQ ID NO: 2497455 - RNA, 19 nt, Homo sapiens
  misc_RNA (1)...(19): siRNA sense strand
uuacugaguuggagacacu

SEQ ID NO: 2497456 - RNA, 19 nt, Homo sapiens
  misc_RNA (1)...(19): siRNA sense strand
cuguaagcuaugaugaaaa

SEQ ID NO: 2497457 - RNA, 19 nt, Homo sapiens
  misc_RNA (1)...(19): siRNA sense strand
acuuuaacacugagagucu

SEQ ID NO: 2497458 - RNA, 19 nt, Homo sapiens
  misc_RNA (1)...(19): siRNA sense strand
cuucagaucagaauacaau

SEQ ID NO: 2497459 - RNA, 19 nt, Homo sapiens
  misc_RNA (1)...(19): siRNA sense strand
ucauauagugggcacgauu

SEQ ID NO: 2497460 - RNA, 19 nt, Homo sapiens
  misc_RNA (1)...(19): siRNA sense strand
gacagagcaagcaaagaaa

SEQ ID NO: 2497461 - RNA, 19 nt, Homo sapiens
  misc_RNA (1)...(19): siRNA sense strand
agaagaugaggucaauaaa

SEQ ID NO: 2497462 - RNA, 19 nt, Homo sapiens
  misc_RNA (1)...(19): siRNA sense strand
uggcaauaugucucaacua

SEQ ID NO: 2497463 - RNA, 19 nt, Homo sapiens
  misc_RNA (1)...(19): siRNA sense strand
gaaacuuuguuccuggcaa

SEQ ID NO: 2497464 - RNA, 19 nt, Homo sapiens
  misc_RNA (1)...(19): siRNA sense strand
gagaagaaccggaagcuca

SEQ ID NO: 2497465 - RNA, 19 nt, Homo sapiens
  misc_RNA (1)...(19): siRNA sense strand
uaucagagguggaggugga

SEQ ID NO: 2497466 - RNA, 19 nt, Homo sapiens
  misc_RNA (1)...(19): siRNA sense strand
caagaugggcuuugcggua

SEQ ID NO: 2497467 - RNA, 19 nt, Homo sapiens
  misc_RNA (1)...(19): siRNA sense strand
uguauguggcagagaagaa

SEQ ID NO: 2497468 - RNA, 19 nt, Homo sapiens
  misc_RNA (1)...(19): siRNA sense strand
gcugaagaagccagaccaa

SEQ ID NO: 2497469 - RNA, 19 nt, Homo sapiens
  misc_RNA (1)...(19): siRNA sense strand
ccagagaccuacagggccu

SEQ ID NO: 2497470 - RNA, 19 nt, Homo sapiens
  misc_RNA (1)...(19): siRNA sense strand
ugaaagcugugcugcgcaa

SEQ ID NO: 2497471 - RNA, 19 nt, Homo sapiens
  misc_RNA (1)...(19): siRNA sense strand
uggaacgcauggagaacau

SEQ ID NO: 2497472 - RNA, 19 nt, Homo sapiens
  misc_RNA (1)...(19): siRNA sense strand
cgucagugccagcgaugau

SEQ ID NO: 2497473 - RNA, 19 nt, Homo sapiens
  misc_RNA (1)...(19): siRNA sense strand
uaugaagacuggggagaaa

SEQ ID NO: 2497474 - RNA, 19 nt, Homo sapiens
  misc_RNA (1)...(19): siRNA sense strand
acgcauuaucagaggugga

SEQ ID NO: 2497475 - RNA, 19 nt, Homo sapiens
  misc_RNA (1)...(19): siRNA sense strand
cagucaguguugugggugu

SEQ ID NO: 2497476 - RNA, 19 nt, Homo sapiens
  misc_RNA (1)...(19): siRNA sense strand
ucuucaaggaugaggagaa

SEQ ID NO: 2497477 - RNA, 19 nt, Homo sapiens
  misc_RNA (1)...(19): siRNA sense strand
cguuguaaggagcggguga

SEQ ID NO: 2497478 - RNA, 19 nt, Homo sapiens
  misc_RNA (1)...(19): siRNA sense strand
gggugaacgcuuuggccau

SEQ ID NO: 2497479 - RNA, 19 nt, Homo sapiens
  misc_RNA (1)...(19): siRNA sense strand
acgcgguucuggagaguca

SEQ ID NO: 2497480 - RNA, 19 nt, Homo sapiens
  misc_RNA (1)...(19): siRNA sense strand
ccuuaagaaaagagaagaa

SEQ ID NO: 2497481 - RNA, 19 nt, Homo sapiens
  misc_RNA (1)...(19): siRNA sense strand
gaaaugaaacugaaggagu

SEQ ID NO: 2497482 - RNA, 19 nt, Homo sapiens
  misc_RNA (1)...(19): siRNA sense strand
aaauaucacuggauggaga

SEQ ID NO: 2497483 - RNA, 19 nt, Homo sapiens
  misc_RNA (1)...(19): siRNA sense strand
agaccuacgccaugggaca

SEQ ID NO: 2497484 - RNA, 19 nt, Homo sapiens
  misc_RNA (1)...(19): siRNA sense strand
acuggaagaaggagaugaa

SEQ ID NO: 2497485 - RNA, 19 nt, Homo sapiens
  misc_RNA (1)...(19): siRNA sense strand
ugcaauaccaagagaaaau

SEQ ID NO: 2497486 - RNA, 19 nt, Homo sapiens
  misc_RNA (1)...(19): siRNA sense strand
gcacaaauaucacuggaug

SEQ ID NO: 2497487 - RNA, 19 nt, Homo sapiens
  misc_RNA (1)...(19): siRNA sense strand
uggaagaaggagaugaacu

SEQ ID NO: 2497488 - RNA, 19 nt, Homo sapiens
  misc_RNA (1)...(19): siRNA sense strand
aagaaaugaaacugaagga

SEQ ID NO: 2497489 - RNA, 19 nt, Homo sapiens
  misc_RNA (1)...(19): siRNA sense strand
uggucaaagaaacugguua

SEQ ID NO: 2497490 - RNA, 19 nt, Homo sapiens
  misc_RNA (1)...(19): siRNA sense strand
aaaugaaacugaaggagug

SEQ ID NO: 2497491 - RNA, 19 nt, Homo sapiens
  misc_RNA (1)...(19): siRNA sense strand
cugauugcagacagugaaa

SEQ ID NO: 2497492 - RNA, 19 nt, Homo sapiens
  misc_RNA (1)...(19): siRNA sense strand
acaaauuuaggguggaaga

SEQ ID NO: 2497493 - RNA, 19 nt, Homo sapiens
  misc_RNA (1)...(19): siRNA sense strand
acugcuaccaugagggcaa

SEQ ID NO: 2497494 - RNA, 19 nt, Homo sapiens
  misc_RNA (1)...(19): siRNA sense strand
ccuauggauccgugaccaa

SEQ ID NO: 2497495 - RNA, 19 nt, Homo sapiens
  misc_RNA (1)...(19): siRNA sense strand
ggacaaaauuaaaagacug

SEQ ID NO: 2497496 - RNA, 19 nt, Homo sapiens
  misc_RNA (1)...(19): siRNA sense strand
cggacaaaauuaaaagacu

SEQ ID NO: 2497497 - RNA, 19 nt, Homo sapiens
  misc_RNA (1)...(19): siRNA sense strand
acugcuaccaugagggcaa

SEQ ID NO: 2497498 - RNA, 19 nt, Homo sapiens
  misc_RNA (1)...(19): siRNA sense strand
ggagauaagccaagggcac

SEQ ID NO: 2497499 - RNA, 19 nt, Homo sapiens
  misc_RNA (1)...(19): siRNA sense strand
ccaagguaacagacagcua

SEQ ID NO: 2497500 - RNA, 19 nt, Homo sapiens
  misc_RNA (1)...(19): siRNA sense strand
ggaccaagucuguaugcga

SEQ ID NO: 2497501 - RNA, 19 nt, Homo sapiens
  misc_RNA (1)...(19): siRNA sense strand
gggacugagcuuuggggaa

SEQ ID NO: 2497502 - RNA, 19 nt, Homo sapiens
  misc_RNA (1)...(19): siRNA sense strand
accucugagugcagugaaa

SEQ ID NO: 2497503 - RNA, 19 nt, Homo sapiens
  misc_RNA (1)...(19): siRNA sense strand
gaccaagucuguaugcgaa

SEQ ID NO: 2497504 - RNA, 19 nt, Homo sapiens
  misc_RNA (1)...(19): siRNA sense strand
guguggaaaugcugccaga

SEQ ID NO: 2497505 - RNA, 19 nt, Homo sapiens
  misc_RNA (1)...(19): siRNA sense strand
gugcagugaaaucagacaa

SEQ ID NO: 2497506 - RNA, 19 nt, Homo sapiens
  misc_RNA (1)...(19): siRNA sense strand
gagauaagccaagggcaca

SEQ ID NO: 2497507 - RNA, 19 nt, Homo sapiens
  misc_RNA (1)...(19): siRNA sense strand
ggucacauuccgugggaug

SEQ ID NO: 2497508 - RNA, 19 nt, Homo sapiens
  misc_RNA (1)...(19): siRNA sense strand
cagugaaaucagacaagca

SEQ ID NO: 2497509 - RNA, 19 nt, Homo sapiens
  misc_RNA (1)...(19): siRNA sense strand
cgaccaaacaagccagacu

SEQ ID NO: 2497510 - RNA, 19 nt, Homo sapiens
  misc_RNA (1)...(19): siRNA sense strand
gaaucaaacacaagggcuc

SEQ ID NO: 2497511 - RNA, 19 nt, Homo sapiens
  misc_RNA (1)...(19): siRNA sense strand
uuguacagcuugugggaaa

SEQ ID NO: 2497512 - RNA, 19 nt, Homo sapiens
  misc_RNA (1)...(19): siRNA sense strand
aggaaauucugcaggaaga

SEQ ID NO: 2497513 - RNA, 19 nt, Homo sapiens
  misc_RNA (1)...(19): siRNA sense strand
acugaaagauggugaggca

SEQ ID NO: 2497514 - RNA, 19 nt, Homo sapiens
  misc_RNA (1)...(19): siRNA sense strand
gggugaaaugucuuggaaa

SEQ ID NO: 2497515 - RNA, 19 nt, Homo sapiens
  misc_RNA (1)...(19): siRNA sense strand
cuauguaggauguggugaa

SEQ ID NO: 2497516 - RNA, 19 nt, Homo sapiens
  misc_RNA (1)...(19): siRNA sense strand
agauaagaaacuagcucaa

SEQ ID NO: 2497517 - RNA, 19 nt, Homo sapiens
  misc_RNA (1)...(19): siRNA sense strand
aggacgaaagcuaaggaaa

SEQ ID NO: 2497518 - RNA, 19 nt, Homo sapiens
  misc_RNA (1)...(19): siRNA sense strand
ggauguggugaaagaggaa

SEQ ID NO: 2497519 - RNA, 19 nt, Homo sapiens
  misc_RNA (1)...(19): siRNA sense strand
aagaagaagaccuggcaga

SEQ ID NO: 2497520 - RNA, 19 nt, Homo sapiens
  misc_RNA (1)...(19): siRNA sense strand
uugaagguguaaaggagaa

SEQ ID NO: 2497521 - RNA, 19 nt, Homo sapiens
  misc_RNA (1)...(19): siRNA sense strand
augguaagguagagucaau

SEQ ID NO: 2497522 - RNA, 19 nt, Homo sapiens
  misc_RNA (1)...(19): siRNA sense strand
agaaacuagcucaacguaa

SEQ ID NO: 2497523 - RNA, 19 nt, Homo sapiens
  misc_RNA (1)...(19): siRNA sense strand
ccaccugggaauuaugaua

SEQ ID NO: 2497524 - RNA, 19 nt, Homo sapiens
  misc_RNA (1)...(19): siRNA sense strand
cagcauuguaggagcaguu

SEQ ID NO: 2497525 - RNA, 19 nt, Homo sapiens
  misc_RNA (1)...(19): siRNA sense strand
aggcaaagaucaaaagcga

SEQ ID NO: 2497526 - RNA, 19 nt, Homo sapiens
  misc_RNA (1)...(19): siRNA sense strand
guggaaagacagugauauc

SEQ ID NO: 2497527 - RNA, 19 nt, Homo sapiens
  misc_RNA (1)...(19): siRNA sense strand
uuggaaauccugaaagaga

SEQ ID NO: 2497528 - RNA, 19 nt, Homo sapiens
  misc_RNA (1)...(19): siRNA sense strand
cgaugaagauaaagaaagc

SEQ ID NO: 2497529 - RNA, 19 nt, Homo sapiens
  misc_RNA (1)...(19): siRNA sense strand
caguagggaugcuguccaa

SEQ ID NO: 2497530 - RNA, 19 nt, Homo sapiens
  misc_RNA (1)...(19): siRNA sense strand
uggaauugucagugagaac

SEQ ID NO: 2497531 - RNA, 19 nt, Homo sapiens
  misc_RNA (1)...(19): siRNA sense strand
uggaugaauacuaugacaa

SEQ ID NO: 2497532 - RNA, 19 nt, Homo sapiens
  misc_RNA (1)...(19): siRNA sense strand
uggcagaaacagauaaaau

SEQ ID NO: 2497533 - RNA, 19 nt, Homo sapiens
  misc_RNA (1)...(19): siRNA sense strand
gcgaauugguuggagagau

SEQ ID NO: 2497534 - RNA, 19 nt, Homo sapiens
  misc_RNA (1)...(19): siRNA sense strand
gguguaaaggagaaguuca

SEQ ID NO: 2497535 - RNA, 19 nt, Homo sapiens
  misc_RNA (1)...(19): siRNA sense strand
agguagagucaauuaugaa

SEQ ID NO: 2497536 - RNA, 19 nt, Homo sapiens
  misc_RNA (1)...(19): siRNA sense strand
gccugcagauaguggauau

SEQ ID NO: 2497537 - RNA, 19 nt, Homo sapiens
  misc_RNA (1)...(19): siRNA sense strand
caaaauacucgaugaagau

SEQ ID NO: 2497538 - RNA, 19 nt, Homo sapiens
  misc_RNA (1)...(19): siRNA sense strand
gagaagggagugucagcau

SEQ ID NO: 2497539 - RNA, 19 nt, Homo sapiens
  misc_RNA (1)...(19): siRNA sense strand
agagauaucaaaugggacu

SEQ ID NO: 2497540 - RNA, 19 nt, Homo sapiens
  misc_RNA (1)...(19): siRNA sense strand
acagcgaauugguuggaga

SEQ ID NO: 2497541 - RNA, 19 nt, Homo sapiens
  misc_RNA (1)...(19): siRNA sense strand
gaacgagcaggcaggguga

SEQ ID NO: 2497542 - RNA, 19 nt, Homo sapiens
  misc_RNA (1)...(19): siRNA sense strand
cuaaggaaauucugcagga

SEQ ID NO: 2497543 - RNA, 19 nt, Homo sapiens
  misc_RNA (1)...(19): siRNA sense strand
cagaaauuguacagcuugu

SEQ ID NO: 2497544 - RNA, 19 nt, Homo sapiens
  misc_RNA (1)...(19): siRNA sense strand
gugaaagaggaaaugagau

SEQ ID NO: 2497545 - RNA, 19 nt, Homo sapiens
  misc_RNA (1)...(19): siRNA sense strand
agaagaagaccuggcagaa

SEQ ID NO: 2497546 - RNA, 19 nt, Homo sapiens
  misc_RNA (1)...(19): siRNA sense strand
gcagagauaucaaauggga

SEQ ID NO: 2497547 - RNA, 19 nt, Homo sapiens
  misc_RNA (1)...(19): siRNA sense strand
uaucacuggcggagacauu

SEQ ID NO: 2497548 - RNA, 19 nt, Homo sapiens
  misc_RNA (1)...(19): siRNA sense strand
uguacuucgcacugguaaa

SEQ ID NO: 2497549 - RNA, 19 nt, Homo sapiens
  misc_RNA (1)...(19): siRNA sense strand
agagcuugguccuggcauu

SEQ ID NO: 2497550 - RNA, 19 nt, Homo sapiens
  misc_RNA (1)...(19): siRNA sense strand
auggugaggcaaagaucaa

SEQ ID NO: 2497551 - RNA, 19 nt, Homo sapiens
  misc_RNA (1)...(19): siRNA sense strand
auguggugaaagaggaaau

SEQ ID NO: 2497552 - RNA, 19 nt, Homo sapiens
  misc_RNA (1)...(19): siRNA sense strand
gaaccuagcugguaagcca

SEQ ID NO: 2497553 - RNA, 19 nt, Homo sapiens
  misc_RNA (1)...(19): siRNA sense strand
cgccuacaacagagagaaa

SEQ ID NO: 2497554 - RNA, 19 nt, Homo sapiens
  misc_RNA (1)...(19): siRNA sense strand
ccgaaauggugccagggau

SEQ ID NO: 2497555 - RNA, 19 nt, Homo sapiens
  misc_RNA (1)...(19): siRNA sense strand
cugaagaaggugaccaaca

SEQ ID NO: 2497556 - RNA, 19 nt, Homo sapiens
  misc_RNA (1)...(19): siRNA sense strand
caacauuaaugaucggagu

SEQ ID NO: 2497557 - RNA, 19 nt, Homo sapiens
  misc_RNA (1)...(19): siRNA sense strand
cucgagaagccgaaaggaa

SEQ ID NO: 2497558 - RNA, 19 nt, Homo sapiens
  misc_RNA (1)...(19): siRNA sense strand
cgaaauggugccagggaug

SEQ ID NO: 2497559 - RNA, 19 nt, Homo sapiens
  misc_RNA (1)...(19): siRNA sense strand
gaauaucagaacaggacca

SEQ ID NO: 2497560 - RNA, 19 nt, Homo sapiens
  misc_RNA (1)...(19): siRNA sense strand
aaacacuuucagaggauau

SEQ ID NO: 2497561 - RNA, 19 nt, Homo sapiens
  misc_RNA (1)...(19): siRNA sense strand
ccucaggaugauacagaca

SEQ ID NO: 2497562 - RNA, 19 nt, Homo sapiens
  misc_RNA (1)...(19): siRNA sense strand
agcugaagaaggugaccaa

SEQ ID NO: 2497563 - RNA, 19 nt, Homo sapiens
  misc_RNA (1)...(19): siRNA sense strand
cuccagaagaauauaaaca

SEQ ID NO: 2497564 - RNA, 19 nt, Homo sapiens
  misc_RNA (1)...(19): siRNA sense strand
agguaauggauuugaggaa

SEQ ID NO: 2497565 - RNA, 19 nt, Homo sapiens
  misc_RNA (1)...(19): siRNA sense strand
cgguagaaaagguggagaa

SEQ ID NO: 2497566 - RNA, 19 nt, Homo sapiens
  misc_RNA (1)...(19): siRNA sense strand
cguugugacagguggaaaa

SEQ ID NO: 2497567 - RNA, 19 nt, Homo sapiens
  misc_RNA (1)...(19): siRNA sense strand
gguucaacaacuacaggaa

SEQ ID NO: 2497568 - RNA, 19 nt, Homo sapiens
  misc_RNA (1)...(19): siRNA sense strand
ccaugaugccuuuguaaaa

SEQ ID NO: 2497569 - RNA, 19 nt, Homo sapiens
  misc_RNA (1)...(19): siRNA sense strand
ugaaggaggcacauggaga

SEQ ID NO: 2497570 - RNA, 19 nt, Homo sapiens
  misc_RNA (1)...(19): siRNA sense strand
gaaagauccuguugcacca

SEQ ID NO: 2497571 - RNA, 19 nt, Homo sapiens
  misc_RNA (1)...(19): siRNA sense strand
cgaaagaaugccaaggaag

SEQ ID NO: 2497572 - RNA, 19 nt, Homo sapiens
  misc_RNA (1)...(19): siRNA sense strand
gguagaaaagguggagaaa

SEQ ID NO: 2497573 - RNA, 19 nt, Homo sapiens
  misc_RNA (1)...(19): siRNA sense strand
agguggagaaacaggugaa

SEQ ID NO: 2497574 - RNA, 19 nt, Homo sapiens
  misc_RNA (1)...(19): siRNA sense strand
aagcauucgccgaggccau

SEQ ID NO: 2497575 - RNA, 19 nt, Homo sapiens
  misc_RNA (1)...(19): siRNA sense strand
aacucaaguauguguguua

SEQ ID NO: 2497576 - RNA, 19 nt, Homo sapiens
  misc_RNA (1)...(19): siRNA sense strand
aggaggaggcuauagcaau

SEQ ID NO: 2497577 - RNA, 19 nt, Homo sapiens
  misc_RNA (1)...(19): siRNA sense strand
agcugaaaguggaaagcca

SEQ ID NO: 2497578 - RNA, 19 nt, Homo sapiens
  misc_RNA (1)...(19): siRNA sense strand
aggaaguaggggaggcaau

SEQ ID NO: 2497579 - RNA, 19 nt, Homo sapiens
  misc_RNA (1)...(19): siRNA sense strand
uggugaagccugccgaaga

SEQ ID NO: 2497580 - RNA, 19 nt, Homo sapiens
  misc_RNA (1)...(19): siRNA sense strand
agguaauggauuugaggaa

SEQ ID NO: 2497581 - RNA, 19 nt, Homo sapiens
  misc_RNA (1)...(19): siRNA sense strand
cgguagaaaagguggagaa

SEQ ID NO: 2497582 - RNA, 19 nt, Homo sapiens
  misc_RNA (1)...(19): siRNA sense strand
cguugugacagguggaaaa

SEQ ID NO: 2497583 - RNA, 19 nt, Homo sapiens
  misc_RNA (1)...(19): siRNA sense strand
gguucaacaacuacaggaa

SEQ ID NO: 2497584 - RNA, 19 nt, Homo sapiens
  misc_RNA (1)...(19): siRNA sense strand
ccaugaugccuuuguaaaa

SEQ ID NO: 2497585 - RNA, 19 nt, Homo sapiens
  misc_RNA (1)...(19): siRNA sense strand
ugaaggaggcacauggaga

SEQ ID NO: 2497586 - RNA, 19 nt, Homo sapiens
  misc_RNA (1)...(19): siRNA sense strand
gaaagauccuguugcacca

SEQ ID NO: 2497587 - RNA, 19 nt, Homo sapiens
  misc_RNA (1)...(19): siRNA sense strand
cgaaagaaugccaaggaag

SEQ ID NO: 2497588 - RNA, 19 nt, Homo sapiens
  misc_RNA (1)...(19): siRNA sense strand
gguagaaaagguggagaaa

SEQ ID NO: 2497589 - RNA, 19 nt, Homo sapiens
  misc_RNA (1)...(19): siRNA sense strand
agguggagaaacaggugaa

SEQ ID NO: 2497590 - RNA, 19 nt, Homo sapiens
  misc_RNA (1)...(19): siRNA sense strand
aagcauucgccgaggccau

SEQ ID NO: 2497591 - RNA, 19 nt, Homo sapiens
  misc_RNA (1)...(19): siRNA sense strand
aacucaaguauguguguua

SEQ ID NO: 2497592 - RNA, 19 nt, Homo sapiens
  misc_RNA (1)...(19): siRNA sense strand
aggaggaggcuauagcaau

SEQ ID NO: 2497593 - RNA, 19 nt, Homo sapiens
  misc_RNA (1)...(19): siRNA sense strand
agcugaaaguggaaagcca

SEQ ID NO: 2497594 - RNA, 19 nt, Homo sapiens
  misc_RNA (1)...(19): siRNA sense strand
aggaaguaggggaggcaau

SEQ ID NO: 2497595 - RNA, 19 nt, Homo sapiens
  misc_RNA (1)...(19): siRNA sense strand
uggugaagccugccgaaga

SEQ ID NO: 2497596 - RNA, 19 nt, Homo sapiens
  misc_RNA (1)...(19): siRNA sense strand
ggugaaacgcuuagcaagu

SEQ ID NO: 2497597 - RNA, 19 nt, Homo sapiens
  misc_RNA (1)...(19): siRNA sense strand
aaguguuaguaauggcaaa

SEQ ID NO: 2497598 - RNA, 19 nt, Homo sapiens
  misc_RNA (1)...(19): siRNA sense strand
caggagaccaaguagcaaa

SEQ ID NO: 2497599 - RNA, 19 nt, Homo sapiens
  misc_RNA (1)...(19): siRNA sense strand
aguuauugucucaggauga

SEQ ID NO: 2497600 - RNA, 19 nt, Homo sapiens
  misc_RNA (1)...(19): siRNA sense strand
cuucuguaauuaugggauu

SEQ ID NO: 2497601 - RNA, 19 nt, Homo sapiens
  misc_RNA (1)...(19): siRNA sense strand
cagaaaucagacagcaauu

SEQ ID NO: 2497602 - RNA, 19 nt, Homo sapiens
  misc_RNA (1)...(19): siRNA sense strand
ccauaguggagcuggcaga

SEQ ID NO: 2497603 - RNA, 19 nt, Homo sapiens
  misc_RNA (1)...(19): siRNA sense strand
agcagaaaucagacagcaa

SEQ ID NO: 2497604 - RNA, 19 nt, Homo sapiens
  misc_RNA (1)...(19): siRNA sense strand
ucgacaagcagcagaagau

SEQ ID NO: 2497605 - RNA, 19 nt, Homo sapiens
  misc_RNA (1)...(19): siRNA sense strand
uggcuuggcucguggacca

SEQ ID NO: 2497606 - RNA, 19 nt, Homo sapiens
  misc_RNA (1)...(19): siRNA sense strand
agauggagaugauucgcua

SEQ ID NO: 2497607 - RNA, 19 nt, Homo sapiens
  misc_RNA (1)...(19): siRNA sense strand
acuuaaagacugugaagcu

SEQ ID NO: 2497608 - RNA, 19 nt, Homo sapiens
  misc_RNA (1)...(19): siRNA sense strand
cauugaagauagagagacc

SEQ ID NO: 2497609 - RNA, 19 nt, Homo sapiens
  misc_RNA (1)...(19): siRNA sense strand
uggccaucauugaguauau

SEQ ID NO: 2497610 - RNA, 19 nt, Homo sapiens
  misc_RNA (1)...(19): siRNA sense strand
cuguggagucccugagaca

SEQ ID NO: 2497611 - RNA, 19 nt, Homo sapiens
  misc_RNA (1)...(19): siRNA sense strand
guggagucccugagacaga

SEQ ID NO: 2497612 - RNA, 19 nt, Homo sapiens
  misc_RNA (1)...(19): siRNA sense strand
gcagaaaucagacagcaau

SEQ ID NO: 2497613 - RNA, 19 nt, Homo sapiens
  misc_RNA (1)...(19): siRNA sense strand
agggagaagugaagccagu

SEQ ID NO: 2497614 - RNA, 19 nt, Homo sapiens
  misc_RNA (1)...(19): siRNA sense strand
uguuaaagcagaaaucaga

SEQ ID NO: 2497615 - RNA, 19 nt, Homo sapiens
  misc_RNA (1)...(19): siRNA sense strand
ucuagauaccaaugcuuua

SEQ ID NO: 2497616 - RNA, 19 nt, Homo sapiens
  misc_RNA (1)...(19): siRNA sense strand
ccaaugcuuuacagggaga

SEQ ID NO: 2497617 - RNA, 19 nt, Homo sapiens
  misc_RNA (1)...(19): siRNA sense strand
cgaagugaauuguugccau

SEQ ID NO: 2497618 - RNA, 19 nt, Homo sapiens
  misc_RNA (1)...(19): siRNA sense strand
agccaguacuacagaaguu

SEQ ID NO: 2497619 - RNA, 19 nt, Homo sapiens
  misc_RNA (1)...(19): siRNA sense strand
gauaaaucuuggcgcguuc

SEQ ID NO: 2497620 - RNA, 19 nt, Homo sapiens
  misc_RNA (1)...(19): siRNA sense strand
uguuaguaauggcaaauga

SEQ ID NO: 2497621 - RNA, 19 nt, Homo sapiens
  misc_RNA (1)...(19): siRNA sense strand
gcaaugaagacgugcagcu

SEQ ID NO: 2497622 - RNA, 19 nt, Homo sapiens
  misc_RNA (1)...(19): siRNA sense strand
gcugcugcccacaaaguaa

SEQ ID NO: 2497623 - RNA, 19 nt, Homo sapiens
  misc_RNA (1)...(19): siRNA sense strand
gggcaaagaaaauaccauu

SEQ ID NO: 2497624 - RNA, 19 nt, Homo sapiens
  misc_RNA (1)...(19): siRNA sense strand
agaagugaagccaguacua

SEQ ID NO: 2497625 - RNA, 19 nt, Homo sapiens
  misc_RNA (1)...(19): siRNA sense strand
acuacagaaguuaggucaa

SEQ ID NO: 2497626 - RNA, 19 nt, Homo sapiens
  misc_RNA (1)...(19): siRNA sense strand
gguacagagugggcccaaa

SEQ ID NO: 2497627 - RNA, 19 nt, Homo sapiens
  misc_RNA (1)...(19): siRNA sense strand
ggugaaacgcuuagcaagu

SEQ ID NO: 2497628 - RNA, 19 nt, Homo sapiens
  misc_RNA (1)...(19): siRNA sense strand
aaguguuaguaauggcaaa

SEQ ID NO: 2497629 - RNA, 19 nt, Homo sapiens
  misc_RNA (1)...(19): siRNA sense strand
caggagaccaaguagcaaa

SEQ ID NO: 2497630 - RNA, 19 nt, Homo sapiens
  misc_RNA (1)...(19): siRNA sense strand
aguuauugucucaggauga

SEQ ID NO: 2497631 - RNA, 19 nt, Homo sapiens
  misc_RNA (1)...(19): siRNA sense strand
cuucuguaauuaugggauu

SEQ ID NO: 2497632 - RNA, 19 nt, Homo sapiens
  misc_RNA (1)...(19): siRNA sense strand
cagaaaucagacagcaauu

SEQ ID NO: 2497633 - RNA, 19 nt, Homo sapiens
  misc_RNA (1)...(19): siRNA sense strand
ccauaguggagcuggcaga

SEQ ID NO: 2497634 - RNA, 19 nt, Homo sapiens
  misc_RNA (1)...(19): siRNA sense strand
agcagaaaucagacagcaa

SEQ ID NO: 2497635 - RNA, 19 nt, Homo sapiens
  misc_RNA (1)...(19): siRNA sense strand
ucgacaagcagcagaagau

SEQ ID NO: 2497636 - RNA, 19 nt, Homo sapiens
  misc_RNA (1)...(19): siRNA sense strand
uggcuuggcucguggacca

SEQ ID NO: 2497637 - RNA, 19 nt, Homo sapiens
  misc_RNA (1)...(19): siRNA sense strand
agauggagaugauucgcua

SEQ ID NO: 2497638 - RNA, 19 nt, Homo sapiens
  misc_RNA (1)...(19): siRNA sense strand
acuuaaagacugugaagcu

SEQ ID NO: 2497639 - RNA, 19 nt, Homo sapiens
  misc_RNA (1)...(19): siRNA sense strand
cauugaagauagagagacc

SEQ ID NO: 2497640 - RNA, 19 nt, Homo sapiens
  misc_RNA (1)...(19): siRNA sense strand
uggccaucauugaguauau

SEQ ID NO: 2497641 - RNA, 19 nt, Homo sapiens
  misc_RNA (1)...(19): siRNA sense strand
cuguggagucccugagaca

SEQ ID NO: 2497642 - RNA, 19 nt, Homo sapiens
  misc_RNA (1)...(19): siRNA sense strand
guggagucccugagacaga

SEQ ID NO: 2497643 - RNA, 19 nt, Homo sapiens
  misc_RNA (1)...(19): siRNA sense strand
gcagaaaucagacagcaau

SEQ ID NO: 2497644 - RNA, 19 nt, Homo sapiens
  misc_RNA (1)...(19): siRNA sense strand
agggagaagugaagccagu

SEQ ID NO: 2497645 - RNA, 19 nt, Homo sapiens
  misc_RNA (1)...(19): siRNA sense strand
uguuaaagcagaaaucaga

SEQ ID NO: 2497646 - RNA, 19 nt, Homo sapiens
  misc_RNA (1)...(19): siRNA sense strand
ucuagauaccaaugcuuua

SEQ ID NO: 2497647 - RNA, 19 nt, Homo sapiens
  misc_RNA (1)...(19): siRNA sense strand
ccaaugcuuuacagggaga

SEQ ID NO: 2497648 - RNA, 19 nt, Homo sapiens
  misc_RNA (1)...(19): siRNA sense strand
cgaagugaauuguugccau

SEQ ID NO: 2497649 - RNA, 19 nt, Homo sapiens
  misc_RNA (1)...(19): siRNA sense strand
agccaguacuacagaaguu

SEQ ID NO: 2497650 - RNA, 19 nt, Homo sapiens
  misc_RNA (1)...(19): siRNA sense strand
gauaaaucuuggcgcguuc

SEQ ID NO: 2497651 - RNA, 19 nt, Homo sapiens
  misc_RNA (1)...(19): siRNA sense strand
uguuaguaauggcaaauga

SEQ ID NO: 2497652 - RNA, 19 nt, Homo sapiens
  misc_RNA (1)...(19): siRNA sense strand
gcaaugaagacgugcagcu

SEQ ID NO: 2497653 - RNA, 19 nt, Homo sapiens
  misc_RNA (1)...(19): siRNA sense strand
gcugcugcccacaaaguaa

SEQ ID NO: 2497654 - RNA, 19 nt, Homo sapiens
  misc_RNA (1)...(19): siRNA sense strand
gggcaaagaaaauaccauu

SEQ ID NO: 2497655 - RNA, 19 nt, Homo sapiens
  misc_RNA (1)...(19): siRNA sense strand
agaagugaagccaguacua

SEQ ID NO: 2497656 - RNA, 19 nt, Homo sapiens
  misc_RNA (1)...(19): siRNA sense strand
acuacagaaguuaggucaa

SEQ ID NO: 2497657 - RNA, 19 nt, Homo sapiens
  misc_RNA (1)...(19): siRNA sense strand
gguacagagugggcccaaa

SEQ ID NO: 2497658 - RNA, 19 nt, Homo sapiens
  misc_RNA (1)...(19): siRNA sense strand
caacauaaaugaaugcgaa

SEQ ID NO: 2497659 - RNA, 19 nt, Homo sapiens
  misc_RNA (1)...(19): siRNA sense strand
gauggaaagacuugggcaa

SEQ ID NO: 2497660 - RNA, 19 nt, Homo sapiens
  misc_RNA (1)...(19): siRNA sense strand
caguaaugauggaaagacu

SEQ ID NO: 2497661 - RNA, 19 nt, Homo sapiens
  misc_RNA (1)...(19): siRNA sense strand
gggcaauguacaaagugaa

SEQ ID NO: 2497662 - RNA, 19 nt, Homo sapiens
  misc_RNA (1)...(19): siRNA sense strand
ggguaugaaaucaggacau

SEQ ID NO: 2497663 - RNA, 19 nt, Homo sapiens
  misc_RNA (1)...(19): siRNA sense strand
ggaugaaaagcaaagaaaa

SEQ ID NO: 2497664 - RNA, 19 nt, Homo sapiens
  misc_RNA (1)...(19): siRNA sense strand
cagcaaugauggagaacac

SEQ ID NO: 2497665 - RNA, 19 nt, Homo sapiens
  misc_RNA (1)...(19): siRNA sense strand
cauuacacaaggagcuaaa

SEQ ID NO: 2497666 - RNA, 19 nt, Homo sapiens
  misc_RNA (1)...(19): siRNA sense strand
gggauacauucauaggcua

SEQ ID NO: 2497667 - RNA, 19 nt, Homo sapiens
  misc_RNA (1)...(19): siRNA sense strand
cuguauaccaggaugaaaa

SEQ ID NO: 2497668 - RNA, 19 nt, Homo sapiens
  misc_RNA (1)...(19): siRNA sense strand
ccuacaguaaugauggaaa

SEQ ID NO: 2497669 - RNA, 19 nt, Homo sapiens
  misc_RNA (1)...(19): siRNA sense strand
ggacuguauaccaggauga

SEQ ID NO: 2497670 - RNA, 19 nt, Homo sapiens
  misc_RNA (1)...(19): siRNA sense strand
acaaaauugccuacaguaa

SEQ ID NO: 2497671 - RNA, 19 nt, Homo sapiens
  misc_RNA (1)...(19): siRNA sense strand
ggacauguucacuugggaa

SEQ ID NO: 2497672 - RNA, 19 nt, Homo sapiens
  misc_RNA (1)...(19): siRNA sense strand
acaaacuggcuuacagcaa

SEQ ID NO: 2497673 - RNA, 19 nt, Homo sapiens
  misc_RNA (1)...(19): siRNA sense strand
agacuugggcaauguacaa

SEQ ID NO: 2497674 - RNA, 19 nt, Homo sapiens
  misc_RNA (1)...(19): siRNA sense strand
caaccaaagugacuggcau

SEQ ID NO: 2497675 - RNA, 19 nt, Homo sapiens
  misc_RNA (1)...(19): siRNA sense strand
aggaugaaaagcaaagaaa

SEQ ID NO: 2497676 - RNA, 19 nt, Homo sapiens
  misc_RNA (1)...(19): siRNA sense strand
acuccuaauccaugccaua

SEQ ID NO: 2497677 - RNA, 19 nt, Homo sapiens
  misc_RNA (1)...(19): siRNA sense strand
agacauugcacuuugcgaa

SEQ ID NO: 2497678 - RNA, 19 nt, Homo sapiens
  misc_RNA (1)...(19): siRNA sense strand
gcuuauaaaugcguggaca

SEQ ID NO: 2497679 - RNA, 19 nt, Homo sapiens
  misc_RNA (1)...(19): siRNA sense strand
cccaaggagccaagaggau

SEQ ID NO: 2497680 - RNA, 19 nt, Homo sapiens
  misc_RNA (1)...(19): siRNA sense strand
cugugaaauaagugaagca

SEQ ID NO: 2497681 - RNA, 19 nt, Homo sapiens
  misc_RNA (1)...(19): siRNA sense strand
ccguggauucagauaaauu

SEQ ID NO: 2497682 - RNA, 19 nt, Homo sapiens
  misc_RNA (1)...(19): siRNA sense strand
auacaaaugcucaggccca

SEQ ID NO: 2497683 - RNA, 19 nt, Homo sapiens
  misc_RNA (1)...(19): siRNA sense strand
gaugaaaagcaaagaaaag

SEQ ID NO: 2497684 - RNA, 19 nt, Homo sapiens
  misc_RNA (1)...(19): siRNA sense strand
ccagggaaauuuugacaau

SEQ ID NO: 2497685 - RNA, 19 nt, Homo sapiens
  misc_RNA (1)...(19): siRNA sense strand
cgaaguugagccuugcaaa

SEQ ID NO: 2497686 - RNA, 19 nt, Homo sapiens
  misc_RNA (1)...(19): siRNA sense strand
agugaaaggcaccaaugaa

SEQ ID NO: 2497687 - RNA, 19 nt, Homo sapiens
  misc_RNA (1)...(19): siRNA sense strand
aggacauauacaagacuau

SEQ ID NO: 2497688 - RNA, 19 nt, Homo sapiens
  misc_RNA (1)...(19): siRNA sense strand
agggaaauuuugacaauga

SEQ ID NO: 2497689 - RNA, 19 nt, Homo sapiens
  misc_RNA (1)...(19): siRNA sense strand
cagaaagguggaagaagaa

SEQ ID NO: 2497690 - RNA, 19 nt, Homo sapiens
  misc_RNA (1)...(19): siRNA sense strand
uggaagaagaagaggacga

SEQ ID NO: 2497691 - RNA, 19 nt, Homo sapiens
  misc_RNA (1)...(19): siRNA sense strand
gcuacaaugaagacauaaa

SEQ ID NO: 2497692 - RNA, 19 nt, Homo sapiens
  misc_RNA (1)...(19): siRNA sense strand
gggaaagagcucagagaug

SEQ ID NO: 2497693 - RNA, 19 nt, Homo sapiens
  misc_RNA (1)...(19): siRNA sense strand
ugugaaagaaugggagaaa

SEQ ID NO: 2497694 - RNA, 19 nt, Homo sapiens
  misc_RNA (1)...(19): siRNA sense strand
uggcaaugaugaaguaaaa

SEQ ID NO: 2497695 - RNA, 19 nt, Homo sapiens
  misc_RNA (1)...(19): siRNA sense strand
ugaaagaaugggagaaagu

SEQ ID NO: 2497696 - RNA, 19 nt, Homo sapiens
  misc_RNA (1)...(19): siRNA sense strand
agauagacucugaagaaga

SEQ ID NO: 2497697 - RNA, 19 nt, Homo sapiens
  misc_RNA (1)...(19): siRNA sense strand
aagucuucauggaggauua

SEQ ID NO: 2497698 - RNA, 19 nt, Homo sapiens
  misc_RNA (1)...(19): siRNA sense strand
acacaagauucgagagcuc

SEQ ID NO: 2497699 - RNA, 19 nt, Homo sapiens
  misc_RNA (1)...(19): siRNA sense strand
gggcugaagcuguggaauc

SEQ ID NO: 2497700 - RNA, 19 nt, Homo sapiens
  misc_RNA (1)...(19): siRNA sense strand
gauaugagacagaaggcau

SEQ ID NO: 2497701 - RNA, 19 nt, Homo sapiens
  misc_RNA (1)...(19): siRNA sense strand
cagagggaagugagagcua

SEQ ID NO: 2497702 - RNA, 19 nt, Homo sapiens
  misc_RNA (1)...(19): siRNA sense strand
accaaaugacugugaaaga

SEQ ID NO: 2497703 - RNA, 19 nt, Homo sapiens
  misc_RNA (1)...(19): siRNA sense strand
gucaaagaccguaaagaga

SEQ ID NO: 2497704 - RNA, 19 nt, Homo sapiens
  misc_RNA (1)...(19): siRNA sense strand
caagauuuccaaagaguca

SEQ ID NO: 2497705 - RNA, 19 nt, Homo sapiens
  misc_RNA (1)...(19): siRNA sense strand
gagcuuugauguuggcuga

SEQ ID NO: 2497706 - RNA, 19 nt, Homo sapiens
  misc_RNA (1)...(19): siRNA sense strand
acugguacuugaaggaaau

SEQ ID NO: 2497707 - RNA, 19 nt, Homo sapiens
  misc_RNA (1)...(19): siRNA sense strand
ugauucguccugagagaaa

SEQ ID NO: 2497708 - RNA, 19 nt, Homo sapiens
  misc_RNA (1)...(19): siRNA sense strand
cagugguguugauggauau

SEQ ID NO: 2497709 - RNA, 19 nt, Homo sapiens
  misc_RNA (1)...(19): siRNA sense strand
acugauucguccugagaga

SEQ ID NO: 2497710 - RNA, 19 nt, Homo sapiens
  misc_RNA (1)...(19): siRNA sense strand
ggacacuaugacagaucaa

SEQ ID NO: 2497711 - RNA, 19 nt, Homo sapiens
  misc_RNA (1)...(19): siRNA sense strand
agagaaaguuauucaucga

SEQ ID NO: 2497712 - RNA, 19 nt, Homo sapiens
  misc_RNA (1)...(19): siRNA sense strand
uccaaagacaacaggagaa

SEQ ID NO: 2497713 - RNA, 19 nt, Homo sapiens
  misc_RNA (1)...(19): siRNA sense strand
uggaaacaccugaugucaa

SEQ ID NO: 2497714 - RNA, 19 nt, Homo sapiens
  misc_RNA (1)...(19): siRNA sense strand
aacugguacuugaaggaaa

SEQ ID NO: 2497715 - RNA, 19 nt, Homo sapiens
  misc_RNA (1)...(19): siRNA sense strand
agaaacuguuccuggacuu

SEQ ID NO: 2497716 - RNA, 19 nt, Homo sapiens
  misc_RNA (1)...(19): siRNA sense strand
ccgagaagugccagaaacu

SEQ ID NO: 2497717 - RNA, 19 nt, Homo sapiens
  misc_RNA (1)...(19): siRNA sense strand
aggagauucuuacuggaua

SEQ ID NO: 2497718 - RNA, 19 nt, Homo sapiens
  misc_RNA (1)...(19): siRNA sense strand
cuuugauguuggcugauaa

SEQ ID NO: 2497719 - RNA, 19 nt, Homo sapiens
  misc_RNA (1)...(19): siRNA sense strand
agaagaagaggacgaguca

SEQ ID NO: 2497720 - RNA, 19 nt, Homo sapiens
  misc_RNA (1)...(19): siRNA sense strand
ccucagaaagguggaagaa

SEQ ID NO: 2497721 - RNA, 19 nt, Homo sapiens
  misc_RNA (1)...(19): siRNA sense strand
ccauucaagaggaguucua

SEQ ID NO: 2497722 - RNA, 19 nt, Homo sapiens
  misc_RNA (1)...(19): siRNA sense strand
gcgcauaguagauuugcau

SEQ ID NO: 2497723 - RNA, 19 nt, Homo sapiens
  misc_RNA (1)...(19): siRNA sense strand
ugaacgggaucaauggcua

SEQ ID NO: 2497724 - RNA, 19 nt, Homo sapiens
  misc_RNA (1)...(19): siRNA sense strand
cagcgauggagaaauuaaa

SEQ ID NO: 2497725 - RNA, 19 nt, Homo sapiens
  misc_RNA (1)...(19): siRNA sense strand
cagccaaacaucugccgaa

SEQ ID NO: 2497726 - RNA, 19 nt, Homo sapiens
  misc_RNA (1)...(19): siRNA sense strand
ugucagugguguugaugga

SEQ ID NO: 2497727 - RNA, 19 nt, Homo sapiens
  misc_RNA (1)...(19): siRNA sense strand
ccaccauucaagaggaguu

SEQ ID NO: 2497728 - RNA, 19 nt, Homo sapiens
  misc_RNA (1)...(19): siRNA sense strand
ccgcaguuuagaaguaauu

SEQ ID NO: 2497729 - RNA, 19 nt, Homo sapiens
  misc_RNA (1)...(19): siRNA sense strand
ugcgacagcuugagagcau

SEQ ID NO: 2497730 - RNA, 19 nt, Homo sapiens
  misc_RNA (1)...(19): siRNA sense strand
cgucaaagaccguaaagag

SEQ ID NO: 2497731 - RNA, 19 nt, Homo sapiens
  misc_RNA (1)...(19): siRNA sense strand
ggagauucuuacuggauac

SEQ ID NO: 2497732 - RNA, 19 nt, Homo sapiens
  misc_RNA (1)...(19): siRNA sense strand
caagacaguuuaaacccaa

SEQ ID NO: 2497733 - RNA, 19 nt, Homo sapiens
  misc_RNA (1)...(19): siRNA sense strand
aagaggaguucuauagagu

SEQ ID NO: 2497734 - RNA, 19 nt, Homo sapiens
  misc_RNA (1)...(19): siRNA sense strand
ggaucaaguugcuauucau

SEQ ID NO: 2497735 - RNA, 19 nt, Homo sapiens
  misc_RNA (1)...(19): siRNA sense strand
agagaugguucuggaguga

SEQ ID NO: 2497736 - RNA, 19 nt, Homo sapiens
  misc_RNA (1)...(19): siRNA sense strand
uguugauggauaugagaca

SEQ ID NO: 2497737 - RNA, 19 nt, Homo sapiens
  misc_RNA (1)...(19): siRNA sense strand
agaaaguguuugagaugag

SEQ ID NO: 2497738 - RNA, 19 nt, Homo sapiens
  misc_RNA (1)...(19): siRNA sense strand
gguaaagcguccagugcug

SEQ ID NO: 2497739 - RNA, 19 nt, Homo sapiens
  misc_RNA (1)...(19): siRNA sense strand
gcauuaaagaggagcgagc

SEQ ID NO: 2497740 - RNA, 19 nt, Homo sapiens
  misc_RNA (1)...(19): siRNA sense strand
cuaacuacuugcucgaaga

SEQ ID NO: 2497741 - RNA, 19 nt, Homo sapiens
  misc_RNA (1)...(19): siRNA sense strand
guucaaauacacacagcca

SEQ ID NO: 2497742 - RNA, 19 nt, Homo sapiens
  misc_RNA (1)...(19): siRNA sense strand
guagauuugcauucaagaa

SEQ ID NO: 2497743 - RNA, 19 nt, Homo sapiens
  misc_RNA (1)...(19): siRNA sense strand
ccucgaugauaucagaaga

SEQ ID NO: 2497744 - RNA, 19 nt, Homo sapiens
  misc_RNA (1)...(19): siRNA sense strand
ggaggauuacagugcgaca

SEQ ID NO: 2497745 - RNA, 19 nt, Homo sapiens
  misc_RNA (1)...(19): siRNA sense strand
uguugugagagaugaagaa

SEQ ID NO: 2497746 - RNA, 19 nt, Homo sapiens
  misc_RNA (1)...(19): siRNA sense strand
agagaaacacauugguugu

SEQ ID NO: 2497747 - RNA, 19 nt, Homo sapiens
  misc_RNA (1)...(19): siRNA sense strand
agacaaacauguaugccaa

SEQ ID NO: 2497748 - RNA, 19 nt, Homo sapiens
  misc_RNA (1)...(19): siRNA sense strand
ucagagagcugcugggcuu

SEQ ID NO: 2497749 - RNA, 19 nt, Homo sapiens
  misc_RNA (1)...(19): siRNA sense strand
aaaucaagaugaaggggaa

SEQ ID NO: 2497750 - RNA, 19 nt, Homo sapiens
  misc_RNA (1)...(19): siRNA sense strand
aagcaaccacagagcuaaa

SEQ ID NO: 2497751 - RNA, 19 nt, Homo sapiens
  misc_RNA (1)...(19): siRNA sense strand
cuacagaacucgagcucuc

SEQ ID NO: 2497752 - RNA, 19 nt, Homo sapiens
  misc_RNA (1)...(19): siRNA sense strand
guuugagaagcaagggauu

SEQ ID NO: 2497753 - RNA, 19 nt, Homo sapiens
  misc_RNA (1)...(19): siRNA sense strand
ugacggagaugaaggcguu

SEQ ID NO: 2497754 - RNA, 19 nt, Homo sapiens
  misc_RNA (1)...(19): siRNA sense strand
ucaagaacaugguggugca

SEQ ID NO: 2497755 - RNA, 19 nt, Homo sapiens
  misc_RNA (1)...(19): siRNA sense strand
ugaaggcguuccugggcua

SEQ ID NO: 2497756 - RNA, 19 nt, Homo sapiens
  misc_RNA (1)...(19): siRNA sense strand
gggagcugcgaaagaggaa

SEQ ID NO: 2497757 - RNA, 19 nt, Homo sapiens
  misc_RNA (1)...(19): siRNA sense strand
gaggugacgcugacggaga

SEQ ID NO: 2497758 - RNA, 19 nt, Homo sapiens
  misc_RNA (1)...(19): siRNA sense strand
gagcugcgaaagaggaaaa

SEQ ID NO: 2497759 - RNA, 19 nt, Homo sapiens
  misc_RNA (1)...(19): siRNA sense strand
cgacagcuguggauggagu

SEQ ID NO: 2497760 - RNA, 19 nt, Homo sapiens
  misc_RNA (1)...(19): siRNA sense strand
cagagcgggagcugcgaaa

SEQ ID NO: 2497761 - RNA, 19 nt, Homo sapiens
  misc_RNA (1)...(19): siRNA sense strand
acgaugacaaauacagcaa

SEQ ID NO: 2497762 - RNA, 19 nt, Homo sapiens
  misc_RNA (1)...(19): siRNA sense strand
ggcgcaguuuggagagaga

SEQ ID NO: 2497763 - RNA, 19 nt, Homo sapiens
  misc_RNA (1)...(19): siRNA sense strand
guacagaacaccaacgaca

SEQ ID NO: 2497764 - RNA, 19 nt, Homo sapiens
  misc_RNA (1)...(19): siRNA sense strand
gggacaauggcuuggguca

SEQ ID NO: 2497765 - RNA, 19 nt, Homo sapiens
  misc_RNA (1)...(19): siRNA sense strand
ccuuggagguggugggaac

SEQ ID NO: 2497766 - RNA, 19 nt, Homo sapiens
  misc_RNA (1)...(19): siRNA sense strand
aggauugagcucugaguau

SEQ ID NO: 2497767 - RNA, 19 nt, Homo sapiens
  misc_RNA (1)...(19): siRNA sense strand
cugaaagugacaauaacaa

SEQ ID NO: 2497768 - RNA, 19 nt, Homo sapiens
  misc_RNA (1)...(19): siRNA sense strand
cagucugggagguggauuu

SEQ ID NO: 2497769 - RNA, 19 nt, Homo sapiens
  misc_RNA (1)...(19): siRNA sense strand
cuggagugacugugaucaa

SEQ ID NO: 2497770 - RNA, 19 nt, Homo sapiens
  misc_RNA (1)...(19): siRNA sense strand
guuacugguuggagggauc

SEQ ID NO: 2497771 - RNA, 19 nt, Homo sapiens
  misc_RNA (1)...(19): siRNA sense strand
cauuaauguuacacaacca

SEQ ID NO: 2497772 - RNA, 19 nt, Homo sapiens
  misc_RNA (1)...(19): siRNA sense strand
agaaaggauuggagagacg

SEQ ID NO: 2497773 - RNA, 19 nt, Homo sapiens
  misc_RNA (1)...(19): siRNA sense strand
ccuuauugcuggaggucuc

SEQ ID NO: 2497774 - RNA, 19 nt, Homo sapiens
  misc_RNA (1)...(19): siRNA sense strand
ggauaauaacacugaggac

SEQ ID NO: 2497775 - RNA, 19 nt, Homo sapiens
  misc_RNA (1)...(19): siRNA sense strand
aagcagaaaggauuggaga

SEQ ID NO: 2497776 - RNA, 19 nt, Homo sapiens
  misc_RNA (1)...(19): siRNA sense strand
gugcaggaggauuuggaga

SEQ ID NO: 2497777 - RNA, 19 nt, Homo sapiens
  misc_RNA (1)...(19): siRNA sense strand
caaauaggcaguuguggga

SEQ ID NO: 2497778 - RNA, 19 nt, Homo sapiens
  misc_RNA (1)...(19): siRNA sense strand
ccugaaagugacaauaaca

SEQ ID NO: 2497779 - RNA, 19 nt, Homo sapiens
  misc_RNA (1)...(19): siRNA sense strand
uggacaaggccaugagaaa

SEQ ID NO: 2497780 - RNA, 19 nt, Homo sapiens
  misc_RNA (1)...(19): siRNA sense strand
agauauuaacagaggagaa

SEQ ID NO: 2497781 - RNA, 19 nt, Homo sapiens
  misc_RNA (1)...(19): siRNA sense strand
gaaacaaauuggaaggcga

SEQ ID NO: 2497782 - RNA, 19 nt, Homo sapiens
  misc_RNA (1)...(19): siRNA sense strand
gggagaaggaggagcggau

SEQ ID NO: 2497783 - RNA, 19 nt, Homo sapiens
  misc_RNA (1)...(19): siRNA sense strand
ccgcagagaaacuggagaa

SEQ ID NO: 2497784 - RNA, 19 nt, Homo sapiens
  misc_RNA (1)...(19): siRNA sense strand
ccaaaaucauagagaaaga

SEQ ID NO: 2497785 - RNA, 19 nt, Homo sapiens
  misc_RNA (1)...(19): siRNA sense strand
ccacuuacgaggaggccaa

SEQ ID NO: 2497786 - RNA, 19 nt, Homo sapiens
  misc_RNA (1)...(19): siRNA sense strand
gccaagaaccgcaggguca

SEQ ID NO: 2497787 - RNA, 19 nt, Homo sapiens
  misc_RNA (1)...(19): siRNA sense strand
ugccaaaaucauagagaaa

SEQ ID NO: 2497788 - RNA, 19 nt, Homo sapiens
  misc_RNA (1)...(19): siRNA sense strand
accaguagcaucagggaaa

SEQ ID NO: 2497789 - RNA, 19 nt, Homo sapiens
  misc_RNA (1)...(19): siRNA sense strand
acgaagggcaugaagacaa

SEQ ID NO: 2497790 - RNA, 19 nt, Homo sapiens
  misc_RNA (1)...(19): siRNA sense strand
aggaaaagaaggaagagaa

SEQ ID NO: 2497791 - RNA, 19 nt, Homo sapiens
  misc_RNA (1)...(19): siRNA sense strand
ccuucaagaccaagcaaau

SEQ ID NO: 2497792 - RNA, 19 nt, Homo sapiens
  misc_RNA (1)...(19): siRNA sense strand
caacuauccagcagggaau

SEQ ID NO: 2497793 - RNA, 19 nt, Homo sapiens
  misc_RNA (1)...(19): siRNA sense strand
ggaucucagagguggaaau

SEQ ID NO: 2497794 - RNA, 19 nt, Homo sapiens
  misc_RNA (1)...(19): siRNA sense strand
uggaagaggaguuacgaga

SEQ ID NO: 2497795 - RNA, 19 nt, Homo sapiens
  misc_RNA (1)...(19): siRNA sense strand
aggagguggugcaggccaa

SEQ ID NO: 2497796 - RNA, 19 nt, Homo sapiens
  misc_RNA (1)...(19): siRNA sense strand
gcaacuauccagcagggaa

SEQ ID NO: 2497797 - RNA, 19 nt, Homo sapiens
  misc_RNA (1)...(19): siRNA sense strand
acgagauggucaagcccua

SEQ ID NO: 2497798 - RNA, 19 nt, Homo sapiens
  misc_RNA (1)...(19): siRNA sense strand
ugaaggaaaaggagaaauu

SEQ ID NO: 2497799 - RNA, 19 nt, Homo sapiens
  misc_RNA (1)...(19): siRNA sense strand
ucaucaagcuggaagagga

SEQ ID NO: 2497800 - RNA, 19 nt, Homo sapiens
  misc_RNA (1)...(19): siRNA sense strand
gggaauacgaagggcauga

SEQ ID NO: 2497801 - RNA, 19 nt, Homo sapiens
  misc_RNA (1)...(19): siRNA sense strand
aggagaaauuagaaaugga

SEQ ID NO: 2497802 - RNA, 19 nt, Homo sapiens
  misc_RNA (1)...(19): siRNA sense strand
gagaagaccuggaagggga

SEQ ID NO: 2497803 - RNA, 19 nt, Homo sapiens
  misc_RNA (1)...(19): siRNA sense strand
gacaauacggugauggaga

SEQ ID NO: 2497804 - RNA, 19 nt, Homo sapiens
  misc_RNA (1)...(19): siRNA sense strand
uggaccaggcuuugagcaa

SEQ ID NO: 2497805 - RNA, 19 nt, Homo sapiens
  misc_RNA (1)...(19): siRNA sense strand
ggcaagaggaggaggaggu

SEQ ID NO: 2497806 - RNA, 19 nt, Homo sapiens
  misc_RNA (1)...(19): siRNA sense strand
ccuaugaaagucuggucaa

SEQ ID NO: 2497807 - RNA, 19 nt, Homo sapiens
  misc_RNA (1)...(19): siRNA sense strand
agagagagcuggaugcacu

SEQ ID NO: 2497808 - RNA, 19 nt, Homo sapiens
  misc_RNA (1)...(19): siRNA sense strand
ugauuaagguccugcagca

SEQ ID NO: 2497809 - RNA, 19 nt, Homo sapiens
  misc_RNA (1)...(19): siRNA sense strand
ccagcaaaugguggagaua

SEQ ID NO: 2497810 - RNA, 19 nt, Homo sapiens
  misc_RNA (1)...(19): siRNA sense strand
aggcgagauuagaagacuu

SEQ ID NO: 2497811 - RNA, 19 nt, Homo sapiens
  misc_RNA (1)...(19): siRNA sense strand
uugagaaaguugagaagcu

SEQ ID NO: 2497812 - RNA, 19 nt, Homo sapiens
  misc_RNA (1)...(19): siRNA sense strand
ccagcagaaacauggaaau

SEQ ID NO: 2497813 - RNA, 19 nt, Homo sapiens
  misc_RNA (1)...(19): siRNA sense strand
ucguaaagaugccgggaag

SEQ ID NO: 2497814 - RNA, 19 nt, Homo sapiens
  misc_RNA (1)...(19): siRNA sense strand
ugaaacacccagcggccaa

SEQ ID NO: 2497815 - RNA, 19 nt, Homo sapiens
  misc_RNA (1)...(19): siRNA sense strand
auggagagaugauggaagu

SEQ ID NO: 2497816 - RNA, 19 nt, Homo sapiens
  misc_RNA (1)...(19): siRNA sense strand
cugcaugugagaagcgaga

SEQ ID NO: 2497817 - RNA, 19 nt, Homo sapiens
  misc_RNA (1)...(19): siRNA sense strand
agaaguaccuggaggagag

SEQ ID NO: 2497818 - RNA, 19 nt, Homo sapiens
  misc_RNA (1)...(19): siRNA sense strand
gagaacagauggagcggag

SEQ ID NO: 2497819 - RNA, 19 nt, Homo sapiens
  misc_RNA (1)...(19): siRNA sense strand
ggaaggagcaccaugagca

SEQ ID NO: 2497820 - RNA, 19 nt, Homo sapiens
  misc_RNA (1)...(19): siRNA sense strand
gugagaagcgagaacagau

SEQ ID NO: 2497821 - RNA, 19 nt, Homo sapiens
  misc_RNA (1)...(19): siRNA sense strand
gaacaguauugcagcggcu

SEQ ID NO: 2497822 - RNA, 19 nt, Homo sapiens
  misc_RNA (1)...(19): siRNA sense strand
ccgagaucgacuagagacu

SEQ ID NO: 2497823 - RNA, 19 nt, Homo sapiens
  misc_RNA (1)...(19): siRNA sense strand
gcaugaagacaaagcugca

SEQ ID NO: 2497824 - RNA, 19 nt, Homo sapiens
  misc_RNA (1)...(19): siRNA sense strand
acaucgagauccuggacca

SEQ ID NO: 2497825 - RNA, 19 nt, Homo sapiens
  misc_RNA (1)...(19): siRNA sense strand
ggaaaagaaggaagagaag

SEQ ID NO: 2497826 - RNA, 19 nt, Homo sapiens
  misc_RNA (1)...(19): siRNA sense strand
ccgaguucccugauggaga

SEQ ID NO: 2497827 - RNA, 19 nt, Homo sapiens
  misc_RNA (1)...(19): siRNA sense strand
cagggaauacgaagggcau

SEQ ID NO: 2497828 - RNA, 19 nt, Homo sapiens
  misc_RNA (1)...(19): siRNA sense strand
ugcccagccugcagguaaa

SEQ ID NO: 2497829 - RNA, 19 nt, Homo sapiens
  misc_RNA (1)...(19): siRNA sense strand
agagaauuucggaagccua

SEQ ID NO: 2497830 - RNA, 19 nt, Homo sapiens
  misc_RNA (1)...(19): siRNA sense strand
agaaauggaguuagcagca

SEQ ID NO: 2497831 - RNA, 19 nt, Homo sapiens
  misc_RNA (1)...(19): siRNA sense strand
acaugaacuugcuggccau

SEQ ID NO: 2497832 - RNA, 19 nt, Homo sapiens
  misc_RNA (1)...(19): siRNA sense strand
cagcaaaugguggagauau

SEQ ID NO: 2497833 - RNA, 19 nt, Homo sapiens
  misc_RNA (1)...(19): siRNA sense strand
ucuugaaggaaaaggagaa

SEQ ID NO: 2497834 - RNA, 19 nt, Homo sapiens
  misc_RNA (1)...(19): siRNA sense strand
gggucaucaagcuggaaga

SEQ ID NO: 2497835 - RNA, 19 nt, Homo sapiens
  misc_RNA (1)...(19): siRNA sense strand
acugagaacccagcagaaa

SEQ ID NO: 2497836 - RNA, 19 nt, Homo sapiens
  misc_RNA (1)...(19): siRNA sense strand
caucauaaggccaagggaa

SEQ ID NO: 2497837 - RNA, 19 nt, Homo sapiens
  misc_RNA (1)...(19): siRNA sense strand
aucauaaggccaagggaaa

SEQ ID NO: 2497838 - RNA, 19 nt, Homo sapiens
  misc_RNA (1)...(19): siRNA sense strand
cgguaaagcucgcgccaag

SEQ ID NO: 2497839 - RNA, 19 nt, Homo sapiens
  misc_RNA (1)...(19): siRNA sense strand
cuaagaaaacugagagcca

SEQ ID NO: 2497840 - RNA, 19 nt, Homo sapiens
  misc_RNA (1)...(19): siRNA sense strand
gcggcaaacaaggcgguaa

SEQ ID NO: 2497841 - RNA, 19 nt, Homo sapiens
  misc_RNA (1)...(19): siRNA sense strand
gggaaaauguagagacuau

SEQ ID NO: 2497842 - RNA, 19 nt, Homo sapiens
  misc_RNA (1)...(19): siRNA sense strand
ccuuauauuugcagggaau

SEQ ID NO: 2497843 - RNA, 19 nt, Homo sapiens
  misc_RNA (1)...(19): siRNA sense strand
agagaaaccucaagggcau

SEQ ID NO: 2497844 - RNA, 19 nt, Homo sapiens
  misc_RNA (1)...(19): siRNA sense strand
aggacagaggagagagaaa

SEQ ID NO: 2497845 - RNA, 19 nt, Homo sapiens
  misc_RNA (1)...(19): siRNA sense strand
gggcgaggcuuuagcgaga

SEQ ID NO: 2497846 - RNA, 19 nt, Homo sapiens
  misc_RNA (1)...(19): siRNA sense strand
ccaaaaucauaaagcgaaa

SEQ ID NO: 2497847 - RNA, 19 nt, Homo sapiens
  misc_RNA (1)...(19): siRNA sense strand
gcagaauggaagagacuga

SEQ ID NO: 2497848 - RNA, 19 nt, Homo sapiens
  misc_RNA (1)...(19): siRNA sense strand
gugcagggagugugggcaa

SEQ ID NO: 2497849 - RNA, 19 nt, Homo sapiens
  misc_RNA (1)...(19): siRNA sense strand
gggcuuaugugcagaaaau

SEQ ID NO: 2497850 - RNA, 19 nt, Homo sapiens
  misc_RNA (1)...(19): siRNA sense strand
ggacucacucagaggagaa

SEQ ID NO: 2497851 - RNA, 19 nt, Homo sapiens
  misc_RNA (1)...(19): siRNA sense strand
auguagagacuaugaagaa

SEQ ID NO: 2497852 - RNA, 19 nt, Homo sapiens
  misc_RNA (1)...(19): siRNA sense strand
ccauguaagcuguugguuu

SEQ ID NO: 2497853 - RNA, 19 nt, Homo sapiens
  misc_RNA (1)...(19): siRNA sense strand
guagagacuaugaagaaau

SEQ ID NO: 2497854 - RNA, 19 nt, Homo sapiens
  misc_RNA (1)...(19): siRNA sense strand
auucagaagagaagccuua

SEQ ID NO: 2497855 - RNA, 19 nt, Homo sapiens
  misc_RNA (1)...(19): siRNA sense strand
cguauacacucgauggaga

SEQ ID NO: 2497856 - RNA, 19 nt, Homo sapiens
  misc_RNA (1)...(19): siRNA sense strand
acaaagaagugaugcugga

SEQ ID NO: 2497857 - RNA, 19 nt, Homo sapiens
  misc_RNA (1)...(19): siRNA sense strand
cuccaaagacagucagcaa

SEQ ID NO: 2497858 - RNA, 19 nt, Homo sapiens
  misc_RNA (1)...(19): siRNA sense strand
acucagaggagaagcccua

SEQ ID NO: 2497859 - RNA, 19 nt, Homo sapiens
  misc_RNA (1)...(19): siRNA sense strand
gagugugggcaaagcuuua

SEQ ID NO: 2497860 - RNA, 19 nt, Homo sapiens
  misc_RNA (1)...(19): siRNA sense strand
ccuuauuugugcagggagu

SEQ ID NO: 2497861 - RNA, 19 nt, Homo sapiens
  misc_RNA (1)...(19): siRNA sense strand
cauuauguuuguagggagu

SEQ ID NO: 2497862 - RNA, 19 nt, Homo sapiens
  misc_RNA (1)...(19): siRNA sense strand
cauuaugucugcagggagu

SEQ ID NO: 2497863 - RNA, 19 nt, Homo sapiens
  misc_RNA (1)...(19): siRNA sense strand
guauacacucgauggagaa

SEQ ID NO: 2497864 - RNA, 19 nt, Homo sapiens
  misc_RNA (1)...(19): siRNA sense strand
acucaggagagaagccuua

SEQ ID NO: 2497865 - RNA, 19 nt, Homo sapiens
  misc_RNA (1)...(19): siRNA sense strand
gagagaaaccucaagggca

SEQ ID NO: 2497866 - RNA, 19 nt, Homo sapiens
  misc_RNA (1)...(19): siRNA sense strand
cuggagaauuacaggaauc

SEQ ID NO: 2497867 - RNA, 19 nt, Homo sapiens
  misc_RNA (1)...(19): siRNA sense strand
caaggacagaggagagaga

SEQ ID NO: 2497868 - RNA, 19 nt, Homo sapiens
  misc_RNA (1)...(19): siRNA sense strand
uguagagacuaugaagaaa

SEQ ID NO: 2497869 - RNA, 19 nt, Homo sapiens
  misc_RNA (1)...(19): siRNA sense strand
ccuuauguuugcagggagu

SEQ ID NO: 2497870 - RNA, 19 nt, Homo sapiens
  misc_RNA (1)...(19): siRNA sense strand
ccuuauguuugcagggagu

SEQ ID NO: 2497871 - RNA, 19 nt, Homo sapiens
  misc_RNA (1)...(19): siRNA sense strand
uugcagugauugugggcga

SEQ ID NO: 2497872 - RNA, 19 nt, Homo sapiens
  misc_RNA (1)...(19): siRNA sense strand
gcuuuagucauaagucaaa

SEQ ID NO: 2497873 - RNA, 19 nt, Homo sapiens
  misc_RNA (1)...(19): siRNA sense strand
gggcgaggcuuuugugaca

SEQ ID NO: 2497874 - RNA, 19 nt, Homo sapiens
  misc_RNA (1)...(19): siRNA sense strand
gguuuuagccagaagucaa

SEQ ID NO: 2497875 - RNA, 19 nt, Homo sapiens
  misc_RNA (1)...(19): siRNA sense strand
gggcgaggcuuuugugaca

SEQ ID NO: 2497876 - RNA, 19 nt, Homo sapiens
  misc_RNA (1)...(19): siRNA sense strand
ggagagaagccuuacgugu

SEQ ID NO: 2497877 - RNA, 19 nt, Homo sapiens
  misc_RNA (1)...(19): siRNA sense strand
gggaugugacugugaucuu

SEQ ID NO: 2497878 - RNA, 19 nt, Homo sapiens
  misc_RNA (1)...(19): siRNA sense strand
aagcagaauggaagagacu

SEQ ID NO: 2497879 - RNA, 19 nt, Homo sapiens
  misc_RNA (1)...(19): siRNA sense strand
gcagaaccaaagccagaaa

SEQ ID NO: 2497880 - RNA, 19 nt, Homo sapiens
  misc_RNA (1)...(19): siRNA sense strand
ggcuugaaggaauuagaaa

SEQ ID NO: 2497881 - RNA, 19 nt, Homo sapiens
  misc_RNA (1)...(19): siRNA sense strand
gagacuaugaagaaauuga

SEQ ID NO: 2497882 - RNA, 19 nt, Homo sapiens
  misc_RNA (1)...(19): siRNA sense strand
ccaaagacagucagcaagu

SEQ ID NO: 2497883 - RNA, 19 nt, Homo sapiens
  misc_RNA (1)...(19): siRNA sense strand
cagcacugggagaucaaua

SEQ ID NO: 2497884 - RNA, 19 nt, Homo sapiens
  misc_RNA (1)...(19): siRNA sense strand
aaggcaacauggugguaga

SEQ ID NO: 2497885 - RNA, 19 nt, Homo sapiens
  misc_RNA (1)...(19): siRNA sense strand
aggcuuuagucauaaguca

SEQ ID NO: 2497886 - RNA, 19 nt, Homo sapiens
  misc_RNA (1)...(19): siRNA sense strand
acucgauggagaagccuua

SEQ ID NO: 2497887 - RNA, 19 nt, Homo sapiens
  misc_RNA (1)...(19): siRNA sense strand
ccuuaugugugcagugagu

SEQ ID NO: 2497888 - RNA, 19 nt, Homo sapiens
  misc_RNA (1)...(19): siRNA sense strand
acauggugguagaaacaga

SEQ ID NO: 2497889 - RNA, 19 nt, Homo sapiens
  misc_RNA (1)...(19): siRNA sense strand
ggagaucaauacugggaag

SEQ ID NO: 2497890 - RNA, 19 nt, Homo sapiens
  misc_RNA (1)...(19): siRNA sense strand
ucagaaaacaccagaggau

SEQ ID NO: 2497891 - RNA, 19 nt, Homo sapiens
  misc_RNA (1)...(19): siRNA sense strand
agaaguaaguccauccuca

SEQ ID NO: 2497892 - RNA, 19 nt, Homo sapiens
  misc_RNA (1)...(19): siRNA sense strand
caauaaagauaauggacca

SEQ ID NO: 2497893 - RNA, 19 nt, Homo sapiens
  misc_RNA (1)...(19): siRNA sense strand
ggagaaaagcaaagcccaa

SEQ ID NO: 2497894 - RNA, 19 nt, Homo sapiens
  misc_RNA (1)...(19): siRNA sense strand
gcaacuggauggcuggcua

SEQ ID NO: 2497895 - RNA, 19 nt, Homo sapiens
  misc_RNA (1)...(19): siRNA sense strand
ccagaagaacgguggcgau

SEQ ID NO: 2497896 - RNA, 19 nt, Homo sapiens
  misc_RNA (1)...(19): siRNA sense strand
uggugaaugcugagcugua

SEQ ID NO: 2497897 - RNA, 19 nt, Homo sapiens
  misc_RNA (1)...(19): siRNA sense strand
cgccgagaaccuugggaga

SEQ ID NO: 2497898 - RNA, 19 nt, Homo sapiens
  misc_RNA (1)...(19): siRNA sense strand
caaaugaucugccugguga

SEQ ID NO: 2497899 - RNA, 19 nt, Homo sapiens
  misc_RNA (1)...(19): siRNA sense strand
caauaaagauaauggacca

SEQ ID NO: 2497900 - RNA, 19 nt, Homo sapiens
  misc_RNA (1)...(19): siRNA sense strand
ggagaaaagcaaagcccaa

SEQ ID NO: 2497901 - RNA, 19 nt, Homo sapiens
  misc_RNA (1)...(19): siRNA sense strand
gcaacuggauggcuggcua

SEQ ID NO: 2497902 - RNA, 19 nt, Homo sapiens
  misc_RNA (1)...(19): siRNA sense strand
ccagaagaacgguggcgau

SEQ ID NO: 2497903 - RNA, 19 nt, Homo sapiens
  misc_RNA (1)...(19): siRNA sense strand
uggugaaugcugagcugua

SEQ ID NO: 2497904 - RNA, 19 nt, Homo sapiens
  misc_RNA (1)...(19): siRNA sense strand
cgccgagaaccuugggaga

SEQ ID NO: 2497905 - RNA, 19 nt, Homo sapiens
  misc_RNA (1)...(19): siRNA sense strand
caaaugaucugccugguga

SEQ ID NO: 2497906 - RNA, 19 nt, Homo sapiens
  misc_RNA (1)...(19): siRNA sense strand
gagaggagcugguggggaa

SEQ ID NO: 2497907 - RNA, 19 nt, Homo sapiens
  misc_RNA (1)...(19): siRNA sense strand
acacagucucaccgggaaa

SEQ ID NO: 2497908 - RNA, 19 nt, Homo sapiens
  misc_RNA (1)...(19): siRNA sense strand
gaguagaaaaucacugaaa

SEQ ID NO: 2497909 - RNA, 19 nt, Homo sapiens
  misc_RNA (1)...(19): siRNA sense strand
caccagagaacuuugggaa

SEQ ID NO: 2497910 - RNA, 19 nt, Homo sapiens
  misc_RNA (1)...(19): siRNA sense strand
acaccaaagacuggagaga

SEQ ID NO: 2497911 - RNA, 19 nt, Homo sapiens
  misc_RNA (1)...(19): siRNA sense strand
ugaauaaaguccugccuga

SEQ ID NO: 2497912 - RNA, 19 nt, Homo sapiens
  misc_RNA (1)...(19): siRNA sense strand
aaaucuuagcugugagaga

SEQ ID NO: 2497913 - RNA, 19 nt, Homo sapiens
  misc_RNA (1)...(19): siRNA sense strand
uugcaggaagcuugacaaa

SEQ ID NO: 2497914 - RNA, 19 nt, Homo sapiens
  misc_RNA (1)...(19): siRNA sense strand
ccugaagccuggaggaggu

SEQ ID NO: 2497915 - RNA, 19 nt, Homo sapiens
  misc_RNA (1)...(19): siRNA sense strand
gugcaagucuguugaggcu

SEQ ID NO: 2497916 - RNA, 19 nt, Homo sapiens
  misc_RNA (1)...(19): siRNA sense strand
cugcagaaaucuuagcugu

SEQ ID NO: 2497917 - RNA, 19 nt, Homo sapiens
  misc_RNA (1)...(19): siRNA sense strand
ugaauaaaguccugccuga

SEQ ID NO: 2497918 - RNA, 19 nt, Homo sapiens
  misc_RNA (1)...(19): siRNA sense strand
aaaucuuagcugugagaga

SEQ ID NO: 2497919 - RNA, 19 nt, Homo sapiens
  misc_RNA (1)...(19): siRNA sense strand
uugcaggaagcuugacaaa

SEQ ID NO: 2497920 - RNA, 19 nt, Homo sapiens
  misc_RNA (1)...(19): siRNA sense strand
ccugaagccuggaggaggu

SEQ ID NO: 2497921 - RNA, 19 nt, Homo sapiens
  misc_RNA (1)...(19): siRNA sense strand
gugcaagucuguugaggcu

SEQ ID NO: 2497922 - RNA, 19 nt, Homo sapiens
  misc_RNA (1)...(19): siRNA sense strand
cugcagaaaucuuagcugu

SEQ ID NO: 2497923 - RNA, 19 nt, Homo sapiens
  misc_RNA (1)...(19): siRNA sense strand
agaaggaaggagaggaaga

SEQ ID NO: 2497924 - RNA, 19 nt, Homo sapiens
  misc_RNA (1)...(19): siRNA sense strand
cagagaagaaggaaggaga

SEQ ID NO: 2497925 - RNA, 19 nt, Homo sapiens
  misc_RNA (1)...(19): siRNA sense strand
aggaagaagaggagaauac

SEQ ID NO: 2497926 - RNA, 19 nt, Homo sapiens
  misc_RNA (1)...(19): siRNA sense strand
aggccuugcugaagaggaa

SEQ ID NO: 2497927 - RNA, 19 nt, Homo sapiens
  misc_RNA (1)...(19): siRNA sense strand
gauuguggcuccagggaca

SEQ ID NO: 2497928 - RNA, 19 nt, Homo sapiens
  misc_RNA (1)...(19): siRNA sense strand
gagaggaagaagaaagcau

SEQ ID NO: 2497929 - RNA, 19 nt, Homo sapiens
  misc_RNA (1)...(19): siRNA sense strand
aggaaggagaggaagaaga

SEQ ID NO: 2497930 - RNA, 19 nt, Homo sapiens
  misc_RNA (1)...(19): siRNA sense strand
agugcaaauugaagaaguu

SEQ ID NO: 2497931 - RNA, 19 nt, Homo sapiens
  misc_RNA (1)...(19): siRNA sense strand
guggaaagccuaagagcac

SEQ ID NO: 2497932 - RNA, 19 nt, Homo sapiens
  misc_RNA (1)...(19): siRNA sense strand
cccuagaacagcaggacau

SEQ ID NO: 2497933 - RNA, 19 nt, Homo sapiens
  misc_RNA (1)...(19): siRNA sense strand
ugacagaggccguggucgu

SEQ ID NO: 2497934 - RNA, 19 nt, Homo sapiens
  misc_RNA (1)...(19): siRNA sense strand
agggacauuugaagugcaa

SEQ ID NO: 2497935 - RNA, 19 nt, Homo sapiens
  misc_RNA (1)...(19): siRNA sense strand
ugaaauaucuaccugggau

SEQ ID NO: 2497936 - RNA, 19 nt, Homo sapiens
  misc_RNA (1)...(19): siRNA sense strand
aagaagaaagcauggaaac

SEQ ID NO: 2497937 - RNA, 19 nt, Homo sapiens
  misc_RNA (1)...(19): siRNA sense strand
gacuucuauuugugugaaa

SEQ ID NO: 2497938 - RNA, 19 nt, Homo sapiens
  misc_RNA (1)...(19): siRNA sense strand
gggaacaaagucguggaaa

SEQ ID NO: 2497939 - RNA, 19 nt, Homo sapiens
  misc_RNA (1)...(19): siRNA sense strand
aaggagaggaagaagagga

SEQ ID NO: 2497940 - RNA, 19 nt, Homo sapiens
  misc_RNA (1)...(19): siRNA sense strand
cguggaaagccuaagagca

SEQ ID NO: 2497941 - RNA, 19 nt, Homo sapiens
  misc_RNA (1)...(19): siRNA sense strand
agaagccaccagagaagaa

SEQ ID NO: 2497942 - RNA, 19 nt, Homo sapiens
  misc_RNA (1)...(19): siRNA sense strand
cggcacuggucauggaaaa

SEQ ID NO: 2497943 - RNA, 19 nt, Homo sapiens
  misc_RNA (1)...(19): siRNA sense strand
gcaagaaacgcgugcccua

SEQ ID NO: 2497944 - RNA, 19 nt, Homo sapiens
  misc_RNA (1)...(19): siRNA sense strand
aggaauacgcggcuagcaa

SEQ ID NO: 2497945 - RNA, 19 nt, Homo sapiens
  misc_RNA (1)...(19): siRNA sense strand
aggagcuagagaaggaaua

SEQ ID NO: 2497946 - RNA, 19 nt, Homo sapiens
  misc_RNA (1)...(19): siRNA sense strand
gggucaaagagaagaaggu

SEQ ID NO: 2497947 - RNA, 19 nt, Homo sapiens
  misc_RNA (1)...(19): siRNA sense strand
cagcagaagccuugcgccu

SEQ ID NO: 2497948 - RNA, 19 nt, Homo sapiens
  misc_RNA (1)...(19): siRNA sense strand
gagaaggaauacgcggcua

SEQ ID NO: 2497949 - RNA, 19 nt, Homo sapiens
  misc_RNA (1)...(19): siRNA sense strand
cggauaacgaagcgaaaga

SEQ ID NO: 2497950 - RNA, 19 nt, Homo sapiens
  misc_RNA (1)...(19): siRNA sense strand
cgcuggaauuggagaaaga

SEQ ID NO: 2497951 - RNA, 19 nt, Homo sapiens
  misc_RNA (1)...(19): siRNA sense strand
ccaaugaaaucaagacgga

SEQ ID NO: 2497952 - RNA, 19 nt, Homo sapiens
  misc_RNA (1)...(19): siRNA sense strand
aagaggagauaaaggcaga

SEQ ID NO: 2497953 - RNA, 19 nt, Homo sapiens
  misc_RNA (1)...(19): siRNA sense strand
gugucaaggaggagaaugu

SEQ ID NO: 2497954 - RNA, 19 nt, Homo sapiens
  misc_RNA (1)...(19): siRNA sense strand
cagaaaacaccacaggaaa

SEQ ID NO: 2497955 - RNA, 19 nt, Homo sapiens
  misc_RNA (1)...(19): siRNA sense strand
agaaaacaccacaggaaau

SEQ ID NO: 2497956 - RNA, 19 nt, Homo sapiens
  misc_RNA (1)...(19): siRNA sense strand
ucaaaaucgcagaaugaaa

SEQ ID NO: 2497957 - RNA, 19 nt, Homo sapiens
  misc_RNA (1)...(19): siRNA sense strand
cuggaauuggagaaagaau

SEQ ID NO: 2497958 - RNA, 19 nt, Homo sapiens
  misc_RNA (1)...(19): siRNA sense strand
gcgaaaaggagagggccaa

SEQ ID NO: 2497959 - RNA, 19 nt, Homo sapiens
  misc_RNA (1)...(19): siRNA sense strand
uuucaaaaucgcagaauga

SEQ ID NO: 2497960 - RNA, 19 nt, Homo sapiens
  misc_RNA (1)...(19): siRNA sense strand
acgaagcgaaagaggagau

SEQ ID NO: 2497961 - RNA, 19 nt, Homo sapiens
  misc_RNA (1)...(19): siRNA sense strand
cugacagcaaagagcggaa

SEQ ID NO: 2497962 - RNA, 19 nt, Homo sapiens
  misc_RNA (1)...(19): siRNA sense strand
cugcaguauuucucgggaa

SEQ ID NO: 2497963 - RNA, 19 nt, Homo sapiens
  misc_RNA (1)...(19): siRNA sense strand
ggaugaaagaaaagaaacu

SEQ ID NO: 2497964 - RNA, 19 nt, Homo sapiens
  misc_RNA (1)...(19): siRNA sense strand
gcugaggaggagaacacaa

SEQ ID NO: 2497965 - RNA, 19 nt, Homo sapiens
  misc_RNA (1)...(19): siRNA sense strand
gcaaguggcaccaucggaa

SEQ ID NO: 2497966 - RNA, 19 nt, Homo sapiens
  misc_RNA (1)...(19): siRNA sense strand
agaacagaaggaugaaaga

SEQ ID NO: 2497967 - RNA, 19 nt, Homo sapiens
  misc_RNA (1)...(19): siRNA sense strand
ucuucaacguguauaucaa

SEQ ID NO: 2497968 - RNA, 19 nt, Homo sapiens
  misc_RNA (1)...(19): siRNA sense strand
cggaggcugaggaggagaa

SEQ ID NO: 2497969 - RNA, 19 nt, Homo sapiens
  misc_RNA (1)...(19): siRNA sense strand
agguagaggcugagggcua

SEQ ID NO: 2497970 - RNA, 19 nt, Homo sapiens
  misc_RNA (1)...(19): siRNA sense strand
cggaagaggaugaggacuu

SEQ ID NO: 2497971 - RNA, 19 nt, Homo sapiens
  misc_RNA (1)...(19): siRNA sense strand
ugguggaaggcgaggauua

SEQ ID NO: 2497972 - RNA, 19 nt, Homo sapiens
  misc_RNA (1)...(19): siRNA sense strand
ggacgauggggaugagaaa

SEQ ID NO: 2497973 - RNA, 19 nt, Homo sapiens
  misc_RNA (1)...(19): siRNA sense strand
gagauaaacuggcgccuca

SEQ ID NO: 2497974 - RNA, 19 nt, Homo sapiens
  misc_RNA (1)...(19): siRNA sense strand
agaaagaagaugacgagga

SEQ ID NO: 2497975 - RNA, 19 nt, Homo sapiens
  misc_RNA (1)...(19): siRNA sense strand
ggcacaaugauuugggcaa

SEQ ID NO: 2497976 - RNA, 19 nt, Homo sapiens
  misc_RNA (1)...(19): siRNA sense strand
aagaagaugacgaggagga

SEQ ID NO: 2497977 - RNA, 19 nt, Homo sapiens
  misc_RNA (1)...(19): siRNA sense strand
augacgagguagaggcuga

SEQ ID NO: 2497978 - RNA, 19 nt, Homo sapiens
  misc_RNA (1)...(19): siRNA sense strand
cugguauggucuagagcau

SEQ ID NO: 2497979 - RNA, 19 nt, Homo sapiens
  misc_RNA (1)...(19): siRNA sense strand
gggcaugaagggugagauc

SEQ ID NO: 2497980 - RNA, 19 nt, Homo sapiens
  misc_RNA (1)...(19): siRNA sense strand
gugagaucgcagaggccua

SEQ ID NO: 2497981 - RNA, 19 nt, Homo sapiens
  misc_RNA (1)...(19): siRNA sense strand
guuacuaugacgagguaga

SEQ ID NO: 2497982 - RNA, 19 nt, Homo sapiens
  misc_RNA (1)...(19): siRNA sense strand
cuguggagacccuggagaa

SEQ ID NO: 2497983 - RNA, 19 nt, Homo sapiens
  misc_RNA (1)...(19): siRNA sense strand
caguggcgccagauagaaa

SEQ ID NO: 2497984 - RNA, 19 nt, Homo sapiens
  misc_RNA (1)...(19): siRNA sense strand
augaggacuucaaggguca

SEQ ID NO: 2497985 - RNA, 19 nt, Homo sapiens
  misc_RNA (1)...(19): siRNA sense strand
ucgcagaggccuaugcaga

SEQ ID NO: 2497986 - RNA, 19 nt, Homo sapiens
  misc_RNA (1)...(19): siRNA sense strand
auaagcagugggaggcaua

SEQ ID NO: 2497987 - RNA, 19 nt, Homo sapiens
  misc_RNA (1)...(19): siRNA sense strand
cggaucaggagguggcaca

SEQ ID NO: 2497988 - RNA, 19 nt, Homo sapiens
  misc_RNA (1)...(19): siRNA sense strand
agaggaugaugguggcuga

SEQ ID NO: 2497989 - RNA, 19 nt, Homo sapiens
  misc_RNA (1)...(19): siRNA sense strand
cugaagaaguccaugccca

SEQ ID NO: 2497990 - RNA, 19 nt, Homo sapiens
  misc_RNA (1)...(19): siRNA sense strand
ccauugaacgcaaggucau

SEQ ID NO: 2497991 - RNA, 19 nt, Homo sapiens
  misc_RNA (1)...(19): siRNA sense strand
gcaauguaucugugaccuu

SEQ ID NO: 2497992 - RNA, 19 nt, Homo sapiens
  misc_RNA (1)...(19): siRNA sense strand
gagagaagcuggacacccu

SEQ ID NO: 2497993 - RNA, 19 nt, Homo sapiens
  misc_RNA (1)...(19): siRNA sense strand
gggcaugcgugauggacac

SEQ ID NO: 2497994 - RNA, 19 nt, Homo sapiens
  misc_RNA (1)...(19): siRNA sense strand
gacugaggauagagagcca

SEQ ID NO: 2497995 - RNA, 19 nt, Homo sapiens
  misc_RNA (1)...(19): siRNA sense strand
gaaagaagaugacgaggag

SEQ ID NO: 2497996 - RNA, 19 nt, Homo sapiens
  misc_RNA (1)...(19): siRNA sense strand
ggauaaagaugacgucccu

SEQ ID NO: 2497997 - RNA, 19 nt, Homo sapiens
  misc_RNA (1)...(19): siRNA sense strand
gcgucggguacgugaugaa

SEQ ID NO: 2497998 - RNA, 19 nt, Homo sapiens
  misc_RNA (1)...(19): siRNA sense strand
cuuaaucgggugaagaaga

SEQ ID NO: 2497999 - RNA, 19 nt, Homo sapiens
  misc_RNA (1)...(19): siRNA sense strand
aggcauacgugcagggagg

SEQ ID NO: 2498000 - RNA, 19 nt, Homo sapiens
  misc_RNA (1)...(19): siRNA sense strand
augacgaggaggauaaaga

SEQ ID NO: 2498001 - RNA, 19 nt, Homo sapiens
  misc_RNA (1)...(19): siRNA sense strand
agggcuacgugaagcauga

SEQ ID NO: 2498002 - RNA, 19 nt, Homo sapiens
  misc_RNA (1)...(19): siRNA sense strand
ccacagaaugagucgaauc

SEQ ID NO: 2498003 - RNA, 19 nt, Homo sapiens
  misc_RNA (1)...(19): siRNA sense strand
cgagagugggcgagaacgu

SEQ ID NO: 2498004 - RNA, 19 nt, Homo sapiens
  misc_RNA (1)...(19): siRNA sense strand
cgggugaagaagaaggagu

SEQ ID NO: 2498005 - RNA, 19 nt, Homo sapiens
  misc_RNA (1)...(19): siRNA sense strand
cugcguuggcuguagaaga

SEQ ID NO: 2498006 - RNA, 19 nt, Homo sapiens
  misc_RNA (1)...(19): siRNA sense strand
ggauagguuguaugacaca

SEQ ID NO: 2498007 - RNA, 19 nt, Homo sapiens
  misc_RNA (1)...(19): siRNA sense strand
ggaaauaguuggaccgaca

SEQ ID NO: 2498008 - RNA, 19 nt, Homo sapiens
  misc_RNA (1)...(19): siRNA sense strand
gcaaacuggaauugagaaa

SEQ ID NO: 2498009 - RNA, 19 nt, Homo sapiens
  misc_RNA (1)...(19): siRNA sense strand
ggauaaagaagaacggaca

SEQ ID NO: 2498010 - RNA, 19 nt, Homo sapiens
  misc_RNA (1)...(19): siRNA sense strand
gaauauugauaguaggaga

SEQ ID NO: 2498011 - RNA, 19 nt, Homo sapiens
  misc_RNA (1)...(19): siRNA sense strand
ggauaaaagaguagcauuu

SEQ ID NO: 2498012 - RNA, 19 nt, Homo sapiens
  misc_RNA (1)...(19): siRNA sense strand
cuugaagacucuaggaaga

SEQ ID NO: 2498013 - RNA, 19 nt, Homo sapiens
  misc_RNA (1)...(19): siRNA sense strand
cuauaccacuagugagaaa

SEQ ID NO: 2498014 - RNA, 19 nt, Homo sapiens
  misc_RNA (1)...(19): siRNA sense strand
gcgucgaaguuguaggauu

SEQ ID NO: 2498015 - RNA, 19 nt, Homo sapiens
  misc_RNA (1)...(19): siRNA sense strand
agugaaacgacuagaagaa

SEQ ID NO: 2498016 - RNA, 19 nt, Homo sapiens
  misc_RNA (1)...(19): siRNA sense strand
agauagagauccuggagau

SEQ ID NO: 2498017 - RNA, 19 nt, Homo sapiens
  misc_RNA (1)...(19): siRNA sense strand
ucgcaaggaccaugauaaa

SEQ ID NO: 2498018 - RNA, 19 nt, Homo sapiens
  misc_RNA (1)...(19): siRNA sense strand
gggugaagaccaagaacau

SEQ ID NO: 2498019 - RNA, 19 nt, Homo sapiens
  misc_RNA (1)...(19): siRNA sense strand
ugaaagacuauuugagaga

SEQ ID NO: 2498020 - RNA, 19 nt, Homo sapiens
  misc_RNA (1)...(19): siRNA sense strand
cagagaagacaaagugauu

SEQ ID NO: 2498021 - RNA, 19 nt, Homo sapiens
  misc_RNA (1)...(19): siRNA sense strand
ccgugauuauggagagauu

SEQ ID NO: 2498022 - RNA, 19 nt, Homo sapiens
  misc_RNA (1)...(19): siRNA sense strand
ggaagauuucacaggcaaa

SEQ ID NO: 2498023 - RNA, 19 nt, Homo sapiens
  misc_RNA (1)...(19): siRNA sense strand
aaguaaauggguaggagaa

SEQ ID NO: 2498024 - RNA, 19 nt, Homo sapiens
  misc_RNA (1)...(19): siRNA sense strand
acuagaagaacaagaagaa

SEQ ID NO: 2498025 - RNA, 19 nt, Homo sapiens
  misc_RNA (1)...(19): siRNA sense strand
agauaauggugauguugaa

SEQ ID NO: 2498026 - RNA, 19 nt, Homo sapiens
  misc_RNA (1)...(19): siRNA sense strand
acaugaagaugauggugaa

SEQ ID NO: 2498027 - RNA, 19 nt, Homo sapiens
  misc_RNA (1)...(19): siRNA sense strand
aagagaaucagaagcgaua

SEQ ID NO: 2498028 - RNA, 19 nt, Homo sapiens
  misc_RNA (1)...(19): siRNA sense strand
uagaagaacaagaagaaga

SEQ ID NO: 2498029 - RNA, 19 nt, Homo sapiens
  misc_RNA (1)...(19): siRNA sense strand
ugagagugauacagaggaa

SEQ ID NO: 2498030 - RNA, 19 nt, Homo sapiens
  misc_RNA (1)...(19): siRNA sense strand
uguacagaauugagagaca

SEQ ID NO: 2498031 - RNA, 19 nt, Homo sapiens
  misc_RNA (1)...(19): siRNA sense strand
agaugauggugaagaugaa

SEQ ID NO: 2498032 - RNA, 19 nt, Homo sapiens
  misc_RNA (1)...(19): siRNA sense strand
gaaacgacuagaagaacaa

SEQ ID NO: 2498033 - RNA, 19 nt, Homo sapiens
  misc_RNA (1)...(19): siRNA sense strand
agauggagaagaagagaau

SEQ ID NO: 2498034 - RNA, 19 nt, Homo sapiens
  misc_RNA (1)...(19): siRNA sense strand
gcucaguugaagaggaaaa

SEQ ID NO: 2498035 - RNA, 19 nt, Homo sapiens
  misc_RNA (1)...(19): siRNA sense strand
ggucauugagggcuagaaa

SEQ ID NO: 2498036 - RNA, 19 nt, Homo sapiens
  misc_RNA (1)...(19): siRNA sense strand
agaugaagaagauggagaa

SEQ ID NO: 2498037 - RNA, 19 nt, Homo sapiens
  misc_RNA (1)...(19): siRNA sense strand
uagaagagcuagcagaaaa

SEQ ID NO: 2498038 - RNA, 19 nt, Homo sapiens
  misc_RNA (1)...(19): siRNA sense strand
aggaaaaggagucguaaua

SEQ ID NO: 2498039 - RNA, 19 nt, Homo sapiens
  misc_RNA (1)...(19): siRNA sense strand
aggcaaaggaugauagcca

SEQ ID NO: 2498040 - RNA, 19 nt, Homo sapiens
  misc_RNA (1)...(19): siRNA sense strand
uugagaagaauguggaaau

SEQ ID NO: 2498041 - RNA, 19 nt, Homo sapiens
  misc_RNA (1)...(19): siRNA sense strand
ugaagaugauggugaagau

SEQ ID NO: 2498042 - RNA, 19 nt, Homo sapiens
  misc_RNA (1)...(19): siRNA sense strand
gauaaagaagaacggacaa

SEQ ID NO: 2498043 - RNA, 19 nt, Homo sapiens
  misc_RNA (1)...(19): siRNA sense strand
cagaagaagugaaacgacu

SEQ ID NO: 2498044 - RNA, 19 nt, Homo sapiens
  misc_RNA (1)...(19): siRNA sense strand
agaacaagaagaagauaca

SEQ ID NO: 2498045 - RNA, 19 nt, Homo sapiens
  misc_RNA (1)...(19): siRNA sense strand
uuugagaggcggaggaaaa

SEQ ID NO: 2498046 - RNA, 19 nt, Homo sapiens
  misc_RNA (1)...(19): siRNA sense strand
cggaaacacaggagagucu

SEQ ID NO: 2498047 - RNA, 19 nt, Homo sapiens
  misc_RNA (1)...(19): siRNA sense strand
gugaagaugaagaugauga

SEQ ID NO: 2498048 - RNA, 19 nt, Homo sapiens
  misc_RNA (1)...(19): siRNA sense strand
auggagaagaagagaauca

SEQ ID NO: 2498049 - RNA, 19 nt, Homo sapiens
  misc_RNA (1)...(19): siRNA sense strand
ugaaacgacuagaagaaca

SEQ ID NO: 2498050 - RNA, 19 nt, Homo sapiens
  misc_RNA (1)...(19): siRNA sense strand
cugauaaagaggcucgaaa

SEQ ID NO: 2498051 - RNA, 19 nt, Homo sapiens
  misc_RNA (1)...(19): siRNA sense strand
cagaaaacuguguuggaua

SEQ ID NO: 2498052 - RNA, 19 nt, Homo sapiens
  misc_RNA (1)...(19): siRNA sense strand
caugcagaauucagaacaa

SEQ ID NO: 2498053 - RNA, 19 nt, Homo sapiens
  misc_RNA (1)...(19): siRNA sense strand
cugcucaguugaagaggaa

SEQ ID NO: 2498054 - RNA, 19 nt, Homo sapiens
  misc_RNA (1)...(19): siRNA sense strand
gccugugcuuuaagagaua

SEQ ID NO: 2498055 - RNA, 19 nt, Homo sapiens
  misc_RNA (1)...(19): siRNA sense strand
aggaagauuucacaggcaa

SEQ ID NO: 2498056 - RNA, 19 nt, Homo sapiens
  misc_RNA (1)...(19): siRNA sense strand
agaggaaaacagaaagaua

SEQ ID NO: 2498057 - RNA, 19 nt, Homo sapiens
  misc_RNA (1)...(19): siRNA sense strand
cagagaaagcccaacauau

SEQ ID NO: 2498058 - RNA, 19 nt, Homo sapiens
  misc_RNA (1)...(19): siRNA sense strand
agaccaagauaccgauuau

SEQ ID NO: 2498059 - RNA, 19 nt, Homo sapiens
  misc_RNA (1)...(19): siRNA sense strand
gcugauugucuaaguaaau

SEQ ID NO: 2498060 - RNA, 19 nt, Homo sapiens
  misc_RNA (1)...(19): siRNA sense strand
aaauggagcaagagguaga

SEQ ID NO: 2498061 - RNA, 19 nt, Homo sapiens
  misc_RNA (1)...(19): siRNA sense strand
aguaggagaaccaggauuu

SEQ ID NO: 2498062 - RNA, 19 nt, Homo sapiens
  misc_RNA (1)...(19): siRNA sense strand
agaaccaggauuugggcaa

SEQ ID NO: 2498063 - RNA, 19 nt, Homo sapiens
  misc_RNA (1)...(19): siRNA sense strand
gggacaaagucauagcugu

SEQ ID NO: 2498064 - RNA, 19 nt, Homo sapiens
  misc_RNA (1)...(19): siRNA sense strand
ggaacguggggcagacaaa

SEQ ID NO: 2498065 - RNA, 19 nt, Homo sapiens
  misc_RNA (1)...(19): siRNA sense strand
cacucaggcugcagcacaa

SEQ ID NO: 2498066 - RNA, 19 nt, Homo sapiens
  misc_RNA (1)...(19): siRNA sense strand
ugacacagaaagugccaca

SEQ ID NO: 2498067 - RNA, 19 nt, Homo sapiens
  misc_RNA (1)...(19): siRNA sense strand
gugucaaauccaagcuuaa

SEQ ID NO: 2498068 - RNA, 19 nt, Homo sapiens
  misc_RNA (1)...(19): siRNA sense strand
gauuagagauagcucgcau

SEQ ID NO: 2498069 - RNA, 19 nt, Homo sapiens
  misc_RNA (1)...(19): siRNA sense strand
gggaaguaugacuguuaau

SEQ ID NO: 2498070 - RNA, 19 nt, Homo sapiens
  misc_RNA (1)...(19): siRNA sense strand
cagcaucucuguaggcuca

SEQ ID NO: 2498071 - RNA, 19 nt, Homo sapiens
  misc_RNA (1)...(19): siRNA sense strand
augaagccaaagagaaauu

SEQ ID NO: 2498072 - RNA, 19 nt, Homo sapiens
  misc_RNA (1)...(19): siRNA sense strand
cggcaagaaaucaaggaau

SEQ ID NO: 2498073 - RNA, 19 nt, Homo sapiens
  misc_RNA (1)...(19): siRNA sense strand
gcauggaggugcugaccga

SEQ ID NO: 2498074 - RNA, 19 nt, Homo sapiens
  misc_RNA (1)...(19): siRNA sense strand
gcauccacgucaagcgcua

SEQ ID NO: 2498075 - RNA, 19 nt, Homo sapiens
  misc_RNA (1)...(19): siRNA sense strand
aauugauggcugaagcaaa

SEQ ID NO: 2498076 - RNA, 19 nt, Homo sapiens
  misc_RNA (1)...(19): siRNA sense strand
agggaggaggguugggcaa

SEQ ID NO: 2498077 - RNA, 19 nt, Homo sapiens
  misc_RNA (1)...(19): siRNA sense strand
cgacaaagaaggcuggauc

SEQ ID NO: 2498078 - RNA, 19 nt, Homo sapiens
  misc_RNA (1)...(19): siRNA sense strand
ccuaccagccugugugcaa

SEQ ID NO: 2498079 - RNA, 19 nt, Homo sapiens
  misc_RNA (1)...(19): siRNA sense strand
cuucaagggaggaggguug

SEQ ID NO: 2498080 - RNA, 19 nt, Homo sapiens
  misc_RNA (1)...(19): siRNA sense strand
acaccaugcucaaggccau

SEQ ID NO: 2498081 - RNA, 19 nt, Homo sapiens
  misc_RNA (1)...(19): siRNA sense strand
ccucauagaccguugugga

SEQ ID NO: 2498082 - RNA, 19 nt, Homo sapiens
  misc_RNA (1)...(19): siRNA sense strand
gaaucuaugaggagacacu

SEQ ID NO: 2498083 - RNA, 19 nt, Homo sapiens
  misc_RNA (1)...(19): siRNA sense strand
aaagaaggcuggauccuca

SEQ ID NO: 2498084 - RNA, 19 nt, Homo sapiens
  misc_RNA (1)...(19): siRNA sense strand
ucaaggaugucauugguga

SEQ ID NO: 2498085 - RNA, 19 nt, Homo sapiens
  misc_RNA (1)...(19): siRNA sense strand
cugcaggacaagaaggacu

SEQ ID NO: 2498086 - RNA, 19 nt, Homo sapiens
  misc_RNA (1)...(19): siRNA sense strand
auggauaaauggaaagaca

SEQ ID NO: 2498087 - RNA, 19 nt, Homo sapiens
  misc_RNA (1)...(19): siRNA sense strand
uugaaagaaugcuggaaaa

SEQ ID NO: 2498088 - RNA, 19 nt, Homo sapiens
  misc_RNA (1)...(19): siRNA sense strand
gcaaauuaugacuggugaa

SEQ ID NO: 2498089 - RNA, 19 nt, Homo sapiens
  misc_RNA (1)...(19): siRNA sense strand
ugaaauggugugacggcaa

SEQ ID NO: 2498090 - RNA, 19 nt, Homo sapiens
  misc_RNA (1)...(19): siRNA sense strand
cgacaaaacgaguacgauu

SEQ ID NO: 2498091 - RNA, 19 nt, Homo sapiens
  misc_RNA (1)...(19): siRNA sense strand
ggauaaauggaaagacacu

SEQ ID NO: 2498092 - RNA, 19 nt, Homo sapiens
  misc_RNA (1)...(19): siRNA sense strand
cggaaagaaacgcgcuauu

SEQ ID NO: 2498093 - RNA, 19 nt, Homo sapiens
  misc_RNA (1)...(19): siRNA sense strand
auugaaagaaugcuggaaa

SEQ ID NO: 2498094 - RNA, 19 nt, Homo sapiens
  misc_RNA (1)...(19): siRNA sense strand
cuuuagaagccgauaagau

SEQ ID NO: 2498095 - RNA, 19 nt, Homo sapiens
  misc_RNA (1)...(19): siRNA sense strand
cugaggaauuaguuucaaa

SEQ ID NO: 2498096 - RNA, 19 nt, Homo sapiens
  misc_RNA (1)...(19): siRNA sense strand
cggcacaccuggcagaaaa

SEQ ID NO: 2498097 - RNA, 19 nt, Homo sapiens
  misc_RNA (1)...(19): siRNA sense strand
cugacaaugacgagcucaa

SEQ ID NO: 2498098 - RNA, 19 nt, Homo sapiens
  misc_RNA (1)...(19): siRNA sense strand
acaccuuaucucaggcaaa

SEQ ID NO: 2498099 - RNA, 19 nt, Homo sapiens
  misc_RNA (1)...(19): siRNA sense strand
auggaaagacacugacaau

SEQ ID NO: 2498100 - RNA, 19 nt, Homo sapiens
  misc_RNA (1)...(19): siRNA sense strand
uuucauugcagaagaucaa

SEQ ID NO: 2498101 - RNA, 19 nt, Homo sapiens
  misc_RNA (1)...(19): siRNA sense strand
gugucauuguggauuauaa

SEQ ID NO: 2498102 - RNA, 19 nt, Homo sapiens
  misc_RNA (1)...(19): siRNA sense strand
acggcaaggaggugacaau

SEQ ID NO: 2498103 - RNA, 19 nt, Homo sapiens
  misc_RNA (1)...(19): siRNA sense strand
cggaaauagaugauucuga

SEQ ID NO: 2498104 - RNA, 19 nt, Homo sapiens
  misc_RNA (1)...(19): siRNA sense strand
uggcaagaagauccggaaa

SEQ ID NO: 2498105 - RNA, 19 nt, Homo sapiens
  misc_RNA (1)...(19): siRNA sense strand
gcggauggccugaaaucau

SEQ ID NO: 2498106 - RNA, 19 nt, Homo sapiens
  misc_RNA (1)...(19): siRNA sense strand
uagagaaacaaaugcccaa

SEQ ID NO: 2498107 - RNA, 19 nt, Homo sapiens
  misc_RNA (1)...(19): siRNA sense strand
cgauuuggucugaagcuau

SEQ ID NO: 2498108 - RNA, 19 nt, Homo sapiens
  misc_RNA (1)...(19): siRNA sense strand
gagcaguggacucggcuga

SEQ ID NO: 2498109 - RNA, 19 nt, Homo sapiens
  misc_RNA (1)...(19): siRNA sense strand
cuggagauguuuuggucaa

SEQ ID NO: 2498110 - RNA, 19 nt, Homo sapiens
  misc_RNA (1)...(19): siRNA sense strand
aaagaaaacuaaaaggcca

SEQ ID NO: 2498111 - RNA, 19 nt, Homo sapiens
  misc_RNA (1)...(19): siRNA sense strand
cgcaaaagacacaagguuu

SEQ ID NO: 2498112 - RNA, 19 nt, Homo sapiens
  misc_RNA (1)...(19): siRNA sense strand
cccaagagcauaccagcaa

SEQ ID NO: 2498113 - RNA, 19 nt, Homo sapiens
  misc_RNA (1)...(19): siRNA sense strand
gauuccacgucaaagguau

SEQ ID NO: 2498114 - RNA, 19 nt, Homo sapiens
  misc_RNA (1)...(19): siRNA sense strand
ggauuuucgcgaauggaua

SEQ ID NO: 2498115 - RNA, 19 nt, Homo sapiens
  misc_RNA (1)...(19): siRNA sense strand
caaugaccuucuuggccaa

SEQ ID NO: 2498116 - RNA, 19 nt, Homo sapiens
  misc_RNA (1)...(19): siRNA sense strand
agaucaaaccuguguucga

SEQ ID NO: 2498117 - RNA, 19 nt, Homo sapiens
  misc_RNA (1)...(19): siRNA sense strand
ggccauuagcuaugaagca

SEQ ID NO: 2498118 - RNA, 19 nt, Homo sapiens
  misc_RNA (1)...(19): siRNA sense strand
acacgaugagccauauaaa

SEQ ID NO: 2498119 - RNA, 19 nt, Homo sapiens
  misc_RNA (1)...(19): siRNA sense strand
uggaaagagcucuacauca

SEQ ID NO: 2498120 - RNA, 19 nt, Homo sapiens
  misc_RNA (1)...(19): siRNA sense strand
gcuauauguacuuugugaa

SEQ ID NO: 2498121 - RNA, 19 nt, Homo sapiens
  misc_RNA (1)...(19): siRNA sense strand
gcaacaucuucgaggucgu

SEQ ID NO: 2498122 - RNA, 19 nt, Homo sapiens
  misc_RNA (1)...(19): siRNA sense strand
ccaacuggucgcugcaaaa

SEQ ID NO: 2498123 - RNA, 19 nt, Homo sapiens
  misc_RNA (1)...(19): siRNA sense strand
ggaugacggcagugggcuu

SEQ ID NO: 2498124 - RNA, 19 nt, Homo sapiens
  misc_RNA (1)...(19): siRNA sense strand
caaucguggccaaguggaa

SEQ ID NO: 2498125 - RNA, 19 nt, Homo sapiens
  misc_RNA (1)...(19): siRNA sense strand
ccuugaacucucugggcuu

SEQ ID NO: 2498126 - RNA, 19 nt, Homo sapiens
  misc_RNA (1)...(19): siRNA sense strand
ggaugacggcagugggcuu

SEQ ID NO: 2498127 - RNA, 19 nt, Homo sapiens
  misc_RNA (1)...(19): siRNA sense strand
ccuugaacucucugggcuu

SEQ ID NO: 2498128 - RNA, 19 nt, Homo sapiens
  misc_RNA (1)...(19): siRNA sense strand
guggagaaauggaagggaa

SEQ ID NO: 2498129 - RNA, 19 nt, Homo sapiens
  misc_RNA (1)...(19): siRNA sense strand
uggagaaauggaagggaaa

SEQ ID NO: 2498130 - RNA, 19 nt, Homo sapiens
  misc_RNA (1)...(19): siRNA sense strand
ccucagaugacaagggaau

SEQ ID NO: 2498131 - RNA, 19 nt, Homo sapiens
  misc_RNA (1)...(19): siRNA sense strand
cugucaaagaugagaggaa

SEQ ID NO: 2498132 - RNA, 19 nt, Homo sapiens
  misc_RNA (1)...(19): siRNA sense strand
aggaaagccuggagcugaa

SEQ ID NO: 2498133 - RNA, 19 nt, Homo sapiens
  misc_RNA (1)...(19): siRNA sense strand
ugucauugucaaagaagaa

SEQ ID NO: 2498134 - RNA, 19 nt, Homo sapiens
  misc_RNA (1)...(19): siRNA sense strand
ggauauuauuggcagacau

SEQ ID NO: 2498135 - RNA, 19 nt, Homo sapiens
  misc_RNA (1)...(19): siRNA sense strand
cccaagcagcaaagggaaa

SEQ ID NO: 2498136 - RNA, 19 nt, Homo sapiens
  misc_RNA (1)...(19): siRNA sense strand
agaugcaggcccagauaaa

SEQ ID NO: 2498137 - RNA, 19 nt, Homo sapiens
  misc_RNA (1)...(19): siRNA sense strand
gagaaauggaagggaaaca

SEQ ID NO: 2498138 - RNA, 19 nt, Homo sapiens
  misc_RNA (1)...(19): siRNA sense strand
aagggaaagugguggagau

SEQ ID NO: 2498139 - RNA, 19 nt, Homo sapiens
  misc_RNA (1)...(19): siRNA sense strand
aaggaaaacccaagaggaa

SEQ ID NO: 2498140 - RNA, 19 nt, Homo sapiens
  misc_RNA (1)...(19): siRNA sense strand
gcucagaugaucagaaaau

SEQ ID NO: 2498141 - RNA, 19 nt, Homo sapiens
  misc_RNA (1)...(19): siRNA sense strand
cagcaagagcucagaugau

SEQ ID NO: 2498142 - RNA, 19 nt, Homo sapiens
  misc_RNA (1)...(19): siRNA sense strand
cuguaugaauucaaaguga

SEQ ID NO: 2498143 - RNA, 19 nt, Homo sapiens
  misc_RNA (1)...(19): siRNA sense strand
ucaaaaugcccauggggaa

SEQ ID NO: 2498144 - RNA, 19 nt, Homo sapiens
  misc_RNA (1)...(19): siRNA sense strand
cugcagaugauuugggcuu

SEQ ID NO: 2498145 - RNA, 19 nt, Homo sapiens
  misc_RNA (1)...(19): siRNA sense strand
gcaaagggaaaguggugga

SEQ ID NO: 2498146 - RNA, 19 nt, Homo sapiens
  misc_RNA (1)...(19): siRNA sense strand
aguuacaccuauagugaca

SEQ ID NO: 2498147 - RNA, 19 nt, Homo sapiens
  misc_RNA (1)...(19): siRNA sense strand
cagcagagcuuaaucagga

SEQ ID NO: 2498148 - RNA, 19 nt, Homo sapiens
  misc_RNA (1)...(19): siRNA sense strand
aaagaauguaucagugcaa

SEQ ID NO: 2498149 - RNA, 19 nt, Homo sapiens
  misc_RNA (1)...(19): siRNA sense strand
aagugauuguagaggguca

SEQ ID NO: 2498150 - RNA, 19 nt, Homo sapiens
  misc_RNA (1)...(19): siRNA sense strand
uguuguuguaagaggcaaa

SEQ ID NO: 2498151 - RNA, 19 nt, Homo sapiens
  misc_RNA (1)...(19): siRNA sense strand
ggaugugcauucaggcaga

SEQ ID NO: 2498152 - RNA, 19 nt, Homo sapiens
  misc_RNA (1)...(19): siRNA sense strand
ccgacaucauugugcaaaa

SEQ ID NO: 2498153 - RNA, 19 nt, Homo sapiens
  misc_RNA (1)...(19): siRNA sense strand
caggagaucucuuugccaa

SEQ ID NO: 2498154 - RNA, 19 nt, Homo sapiens
  misc_RNA (1)...(19): siRNA sense strand
gaaauaaacaaaccaccua

SEQ ID NO: 2498155 - RNA, 19 nt, Homo sapiens
  misc_RNA (1)...(19): siRNA sense strand
cagcaggggagguguuaaa

SEQ ID NO: 2498156 - RNA, 19 nt, Homo sapiens
  misc_RNA (1)...(19): siRNA sense strand
aggaaaagcaaguacaaga

SEQ ID NO: 2498157 - RNA, 19 nt, Homo sapiens
  misc_RNA (1)...(19): siRNA sense strand
cugcgaugcaagaaggaga

SEQ ID NO: 2498158 - RNA, 19 nt, Homo sapiens
  misc_RNA (1)...(19): siRNA sense strand
ucucauaucucugggaaaa

SEQ ID NO: 2498159 - RNA, 19 nt, Homo sapiens
  misc_RNA (1)...(19): siRNA sense strand
ccacagaccugacugcaga

SEQ ID NO: 2498160 - RNA, 19 nt, Homo sapiens
  misc_RNA (1)...(19): siRNA sense strand
cuacaguggagaaauggaa

SEQ ID NO: 2498161 - RNA, 19 nt, Homo sapiens
  misc_RNA (1)...(19): siRNA sense strand
caaaccugacagugaacaa

SEQ ID NO: 2498162 - RNA, 19 nt, Homo sapiens
  misc_RNA (1)...(19): siRNA sense strand
auuccaaacugcagaugau

SEQ ID NO: 2498163 - RNA, 19 nt, Homo sapiens
  misc_RNA (1)...(19): siRNA sense strand
agguagucccagugacgua

SEQ ID NO: 2498164 - RNA, 19 nt, Homo sapiens
  misc_RNA (1)...(19): siRNA sense strand
agccaagauaacugggaau

SEQ ID NO: 2498165 - RNA, 19 nt, Homo sapiens
  misc_RNA (1)...(19): siRNA sense strand
ugaccgaugcaaaggguga

SEQ ID NO: 2498166 - RNA, 19 nt, Homo sapiens
  misc_RNA (1)...(19): siRNA sense strand
gaagagagguagucccagu

SEQ ID NO: 2498167 - RNA, 19 nt, Homo sapiens
  misc_RNA (1)...(19): siRNA sense strand
caaagugauuguagagggu

SEQ ID NO: 2498168 - RNA, 19 nt, Homo sapiens
  misc_RNA (1)...(19): siRNA sense strand
cuaagagaagagaagauuu

SEQ ID NO: 2498169 - RNA, 19 nt, Homo sapiens
  misc_RNA (1)...(19): siRNA sense strand
gcaagagcucagaugauca

SEQ ID NO: 2498170 - RNA, 19 nt, Homo sapiens
  misc_RNA (1)...(19): siRNA sense strand
aaaacaaccugguggagau

SEQ ID NO: 2498171 - RNA, 19 nt, Homo sapiens
  misc_RNA (1)...(19): siRNA sense strand
ugguggagaugcagggugu

SEQ ID NO: 2498172 - RNA, 19 nt, Homo sapiens
  misc_RNA (1)...(19): siRNA sense strand
guucaguaccauugggaag

SEQ ID NO: 2498173 - RNA, 19 nt, Homo sapiens
  misc_RNA (1)...(19): siRNA sense strand
guggagaugcaggguguua

SEQ ID NO: 2498174 - RNA, 19 nt, Homo sapiens
  misc_RNA (1)...(19): siRNA sense strand
aaggagaaaccuacaccua

SEQ ID NO: 2498175 - RNA, 19 nt, Homo sapiens
  misc_RNA (1)...(19): siRNA sense strand
gcacugaugaugauaaaau

SEQ ID NO: 2498176 - RNA, 19 nt, Homo sapiens
  misc_RNA (1)...(19): siRNA sense strand
cuucaaaggccaugaggug

SEQ ID NO: 2498177 - RNA, 19 nt, Homo sapiens
  misc_RNA (1)...(19): siRNA sense strand
ccagugaccagcagagcuu

SEQ ID NO: 2498178 - RNA, 19 nt, Homo sapiens
  misc_RNA (1)...(19): siRNA sense strand
auacccaguuauaaaggaa

SEQ ID NO: 2498179 - RNA, 19 nt, Homo sapiens
  misc_RNA (1)...(19): siRNA sense strand
gaaccagagcacugaugau

SEQ ID NO: 2498180 - RNA, 19 nt, Homo sapiens
  misc_RNA (1)...(19): siRNA sense strand
cuaaagugaaugacuccaa

SEQ ID NO: 2498181 - RNA, 19 nt, Homo sapiens
  misc_RNA (1)...(19): siRNA sense strand
gcgaagugguugagaagcc

SEQ ID NO: 2498182 - RNA, 19 nt, Homo sapiens
  misc_RNA (1)...(19): siRNA sense strand
gggaaggcuaugugaacgu

SEQ ID NO: 2498183 - RNA, 19 nt, Homo sapiens
  misc_RNA (1)...(19): siRNA sense strand
ucugcgaagugguugagaa

SEQ ID NO: 2498184 - RNA, 19 nt, Homo sapiens
  misc_RNA (1)...(19): siRNA sense strand
cuuucuaccugaagaugau

SEQ ID NO: 2498185 - RNA, 19 nt, Homo sapiens
  misc_RNA (1)...(19): siRNA sense strand
cagaagagagguaguccca

SEQ ID NO: 2498186 - RNA, 19 nt, Homo sapiens
  misc_RNA (1)...(19): siRNA sense strand
agugacuguuauugugcaa

SEQ ID NO: 2498187 - RNA, 19 nt, Homo sapiens
  misc_RNA (1)...(19): siRNA sense strand
agaggaaccugcaaagcca

SEQ ID NO: 2498188 - RNA, 19 nt, Homo sapiens
  misc_RNA (1)...(19): siRNA sense strand
guuaaaucacucugaccau

SEQ ID NO: 2498189 - RNA, 19 nt, Homo sapiens
  misc_RNA (1)...(19): siRNA sense strand
uaucaacgucagucagcua

SEQ ID NO: 2498190 - RNA, 19 nt, Homo sapiens
  misc_RNA (1)...(19): siRNA sense strand
guggagaaauggaagggaa

SEQ ID NO: 2498191 - RNA, 19 nt, Homo sapiens
  misc_RNA (1)...(19): siRNA sense strand
uggagaaauggaagggaaa

SEQ ID NO: 2498192 - RNA, 19 nt, Homo sapiens
  misc_RNA (1)...(19): siRNA sense strand
ccucagaugacaagggaau

SEQ ID NO: 2498193 - RNA, 19 nt, Homo sapiens
  misc_RNA (1)...(19): siRNA sense strand
cugucaaagaugagaggaa

SEQ ID NO: 2498194 - RNA, 19 nt, Homo sapiens
  misc_RNA (1)...(19): siRNA sense strand
aggaaagccuggagcugaa

SEQ ID NO: 2498195 - RNA, 19 nt, Homo sapiens
  misc_RNA (1)...(19): siRNA sense strand
ugucauugucaaagaagaa

SEQ ID NO: 2498196 - RNA, 19 nt, Homo sapiens
  misc_RNA (1)...(19): siRNA sense strand
ggauauuauuggcagacau

SEQ ID NO: 2498197 - RNA, 19 nt, Homo sapiens
  misc_RNA (1)...(19): siRNA sense strand
cccaagcagcaaagggaaa

SEQ ID NO: 2498198 - RNA, 19 nt, Homo sapiens
  misc_RNA (1)...(19): siRNA sense strand
agaugcaggcccagauaaa

SEQ ID NO: 2498199 - RNA, 19 nt, Homo sapiens
  misc_RNA (1)...(19): siRNA sense strand
gagaaauggaagggaaaca

SEQ ID NO: 2498200 - RNA, 19 nt, Homo sapiens
  misc_RNA (1)...(19): siRNA sense strand
aagggaaagugguggagau

SEQ ID NO: 2498201 - RNA, 19 nt, Homo sapiens
  misc_RNA (1)...(19): siRNA sense strand
aaggaaaacccaagaggaa

SEQ ID NO: 2498202 - RNA, 19 nt, Homo sapiens
  misc_RNA (1)...(19): siRNA sense strand
gcucagaugaucagaaaau

SEQ ID NO: 2498203 - RNA, 19 nt, Homo sapiens
  misc_RNA (1)...(19): siRNA sense strand
cagcaagagcucagaugau

SEQ ID NO: 2498204 - RNA, 19 nt, Homo sapiens
  misc_RNA (1)...(19): siRNA sense strand
cuguaugaauucaaaguga

SEQ ID NO: 2498205 - RNA, 19 nt, Homo sapiens
  misc_RNA (1)...(19): siRNA sense strand
ucaaaaugcccauggggaa

SEQ ID NO: 2498206 - RNA, 19 nt, Homo sapiens
  misc_RNA (1)...(19): siRNA sense strand
cugcagaugauuugggcuu

SEQ ID NO: 2498207 - RNA, 19 nt, Homo sapiens
  misc_RNA (1)...(19): siRNA sense strand
gcaaagggaaaguggugga

SEQ ID NO: 2498208 - RNA, 19 nt, Homo sapiens
  misc_RNA (1)...(19): siRNA sense strand
aguuacaccuauagugaca

SEQ ID NO: 2498209 - RNA, 19 nt, Homo sapiens
  misc_RNA (1)...(19): siRNA sense strand
cagcagagcuuaaucagga

SEQ ID NO: 2498210 - RNA, 19 nt, Homo sapiens
  misc_RNA (1)...(19): siRNA sense strand
aaagaauguaucagugcaa

SEQ ID NO: 2498211 - RNA, 19 nt, Homo sapiens
  misc_RNA (1)...(19): siRNA sense strand
aagugauuguagaggguca

SEQ ID NO: 2498212 - RNA, 19 nt, Homo sapiens
  misc_RNA (1)...(19): siRNA sense strand
uguuguuguaagaggcaaa

SEQ ID NO: 2498213 - RNA, 19 nt, Homo sapiens
  misc_RNA (1)...(19): siRNA sense strand
ggaugugcauucaggcaga

SEQ ID NO: 2498214 - RNA, 19 nt, Homo sapiens
  misc_RNA (1)...(19): siRNA sense strand
ccgacaucauugugcaaaa

SEQ ID NO: 2498215 - RNA, 19 nt, Homo sapiens
  misc_RNA (1)...(19): siRNA sense strand
caggagaucucuuugccaa

SEQ ID NO: 2498216 - RNA, 19 nt, Homo sapiens
  misc_RNA (1)...(19): siRNA sense strand
gaaauaaacaaaccaccua

SEQ ID NO: 2498217 - RNA, 19 nt, Homo sapiens
  misc_RNA (1)...(19): siRNA sense strand
cagcaggggagguguuaaa

SEQ ID NO: 2498218 - RNA, 19 nt, Homo sapiens
  misc_RNA (1)...(19): siRNA sense strand
aggaaaagcaaguacaaga

SEQ ID NO: 2498219 - RNA, 19 nt, Homo sapiens
  misc_RNA (1)...(19): siRNA sense strand
cugcgaugcaagaaggaga

SEQ ID NO: 2498220 - RNA, 19 nt, Homo sapiens
  misc_RNA (1)...(19): siRNA sense strand
ucucauaucucugggaaaa

SEQ ID NO: 2498221 - RNA, 19 nt, Homo sapiens
  misc_RNA (1)...(19): siRNA sense strand
ccacagaccugacugcaga

SEQ ID NO: 2498222 - RNA, 19 nt, Homo sapiens
  misc_RNA (1)...(19): siRNA sense strand
cuacaguggagaaauggaa

SEQ ID NO: 2498223 - RNA, 19 nt, Homo sapiens
  misc_RNA (1)...(19): siRNA sense strand
caaaccugacagugaacaa

SEQ ID NO: 2498224 - RNA, 19 nt, Homo sapiens
  misc_RNA (1)...(19): siRNA sense strand
auuccaaacugcagaugau

SEQ ID NO: 2498225 - RNA, 19 nt, Homo sapiens
  misc_RNA (1)...(19): siRNA sense strand
agguagucccagugacgua

SEQ ID NO: 2498226 - RNA, 19 nt, Homo sapiens
  misc_RNA (1)...(19): siRNA sense strand
agccaagauaacugggaau

SEQ ID NO: 2498227 - RNA, 19 nt, Homo sapiens
  misc_RNA (1)...(19): siRNA sense strand
ugaccgaugcaaaggguga

SEQ ID NO: 2498228 - RNA, 19 nt, Homo sapiens
  misc_RNA (1)...(19): siRNA sense strand
gaagagagguagucccagu

SEQ ID NO: 2498229 - RNA, 19 nt, Homo sapiens
  misc_RNA (1)...(19): siRNA sense strand
caaagugauuguagagggu

SEQ ID NO: 2498230 - RNA, 19 nt, Homo sapiens
  misc_RNA (1)...(19): siRNA sense strand
cuaagagaagagaagauuu

SEQ ID NO: 2498231 - RNA, 19 nt, Homo sapiens
  misc_RNA (1)...(19): siRNA sense strand
gcaagagcucagaugauca

SEQ ID NO: 2498232 - RNA, 19 nt, Homo sapiens
  misc_RNA (1)...(19): siRNA sense strand
aaaacaaccugguggagau

SEQ ID NO: 2498233 - RNA, 19 nt, Homo sapiens
  misc_RNA (1)...(19): siRNA sense strand
ugguggagaugcagggugu

SEQ ID NO: 2498234 - RNA, 19 nt, Homo sapiens
  misc_RNA (1)...(19): siRNA sense strand
guucaguaccauugggaag

SEQ ID NO: 2498235 - RNA, 19 nt, Homo sapiens
  misc_RNA (1)...(19): siRNA sense strand
guggagaugcaggguguua

SEQ ID NO: 2498236 - RNA, 19 nt, Homo sapiens
  misc_RNA (1)...(19): siRNA sense strand
aaggagaaaccuacaccua

SEQ ID NO: 2498237 - RNA, 19 nt, Homo sapiens
  misc_RNA (1)...(19): siRNA sense strand
gcacugaugaugauaaaau

SEQ ID NO: 2498238 - RNA, 19 nt, Homo sapiens
  misc_RNA (1)...(19): siRNA sense strand
cuucaaaggccaugaggug

SEQ ID NO: 2498239 - RNA, 19 nt, Homo sapiens
  misc_RNA (1)...(19): siRNA sense strand
ccagugaccagcagagcuu

SEQ ID NO: 2498240 - RNA, 19 nt, Homo sapiens
  misc_RNA (1)...(19): siRNA sense strand
auacccaguuauaaaggaa

SEQ ID NO: 2498241 - RNA, 19 nt, Homo sapiens
  misc_RNA (1)...(19): siRNA sense strand
gaaccagagcacugaugau

SEQ ID NO: 2498242 - RNA, 19 nt, Homo sapiens
  misc_RNA (1)...(19): siRNA sense strand
cuaaagugaaugacuccaa

SEQ ID NO: 2498243 - RNA, 19 nt, Homo sapiens
  misc_RNA (1)...(19): siRNA sense strand
gcgaagugguugagaagcc

SEQ ID NO: 2498244 - RNA, 19 nt, Homo sapiens
  misc_RNA (1)...(19): siRNA sense strand
gggaaggcuaugugaacgu

SEQ ID NO: 2498245 - RNA, 19 nt, Homo sapiens
  misc_RNA (1)...(19): siRNA sense strand
ucugcgaagugguugagaa

SEQ ID NO: 2498246 - RNA, 19 nt, Homo sapiens
  misc_RNA (1)...(19): siRNA sense strand
cuuucuaccugaagaugau

SEQ ID NO: 2498247 - RNA, 19 nt, Homo sapiens
  misc_RNA (1)...(19): siRNA sense strand
cagaagagagguaguccca

SEQ ID NO: 2498248 - RNA, 19 nt, Homo sapiens
  misc_RNA (1)...(19): siRNA sense strand
agugacuguuauugugcaa

SEQ ID NO: 2498249 - RNA, 19 nt, Homo sapiens
  misc_RNA (1)...(19): siRNA sense strand
agaggaaccugcaaagcca

SEQ ID NO: 2498250 - RNA, 19 nt, Homo sapiens
  misc_RNA (1)...(19): siRNA sense strand
guuaaaucacucugaccau

SEQ ID NO: 2498251 - RNA, 19 nt, Homo sapiens
  misc_RNA (1)...(19): siRNA sense strand
uaucaacgucagucagcua

SEQ ID NO: 2498252 - RNA, 19 nt, Homo sapiens
  misc_RNA (1)...(19): siRNA sense strand
ggauaaagcaagagagcgg

SEQ ID NO: 2498253 - RNA, 19 nt, Homo sapiens
  misc_RNA (1)...(19): siRNA sense strand
agggacaccaucagggcua

SEQ ID NO: 2498254 - RNA, 19 nt, Homo sapiens
  misc_RNA (1)...(19): siRNA sense strand
cagacgcagcuuagagaga

SEQ ID NO: 2498255 - RNA, 19 nt, Homo sapiens
  misc_RNA (1)...(19): siRNA sense strand
ugaaaaggaagauccgaaa

SEQ ID NO: 2498256 - RNA, 19 nt, Homo sapiens
  misc_RNA (1)...(19): siRNA sense strand
cugacaaagaugaaggaaa

SEQ ID NO: 2498257 - RNA, 19 nt, Homo sapiens
  misc_RNA (1)...(19): siRNA sense strand
acggaaaagucgagauaau

SEQ ID NO: 2498258 - RNA, 19 nt, Homo sapiens
  misc_RNA (1)...(19): siRNA sense strand
gugccaugacaaaggauaa

SEQ ID NO: 2498259 - RNA, 19 nt, Homo sapiens
  misc_RNA (1)...(19): siRNA sense strand
aaguagaauacaagggaga

SEQ ID NO: 2498260 - RNA, 19 nt, Homo sapiens
  misc_RNA (1)...(19): siRNA sense strand
agguuggagcagaaagaaa

SEQ ID NO: 2498261 - RNA, 19 nt, Homo sapiens
  misc_RNA (1)...(19): siRNA sense strand
aauacaagggagagaccaa

SEQ ID NO: 2498262 - RNA, 19 nt, Homo sapiens
  misc_RNA (1)...(19): siRNA sense strand
cggugaugccgcaaagaau

SEQ ID NO: 2498263 - RNA, 19 nt, Homo sapiens
  misc_RNA (1)...(19): siRNA sense strand
aggaaauugcagaagccua

SEQ ID NO: 2498264 - RNA, 19 nt, Homo sapiens
  misc_RNA (1)...(19): siRNA sense strand
cagaaagaaacgugcucau

SEQ ID NO: 2498265 - RNA, 19 nt, Homo sapiens
  misc_RNA (1)...(19): siRNA sense strand
auaacaaccugcuuggcaa

SEQ ID NO: 2498266 - RNA, 19 nt, Homo sapiens
  misc_RNA (1)...(19): siRNA sense strand
aggacaucagugagaacaa

SEQ ID NO: 2498267 - RNA, 19 nt, Homo sapiens
  misc_RNA (1)...(19): siRNA sense strand
guagaauacaagggagaga

SEQ ID NO: 2498268 - RNA, 19 nt, Homo sapiens
  misc_RNA (1)...(19): siRNA sense strand
uugaagaacugaaugcuga

SEQ ID NO: 2498269 - RNA, 19 nt, Homo sapiens
  misc_RNA (1)...(19): siRNA sense strand
gggauuuccugguggugga

SEQ ID NO: 2498270 - RNA, 19 nt, Homo sapiens
  misc_RNA (1)...(19): siRNA sense strand
ggaaauugcagaagccuac

SEQ ID NO: 2498271 - RNA, 19 nt, Homo sapiens
  misc_RNA (1)...(19): siRNA sense strand
ccaccauugaagagguuga

SEQ ID NO: 2498272 - RNA, 19 nt, Homo sapiens
  misc_RNA (1)...(19): siRNA sense strand
uagacaagucacagauuca

SEQ ID NO: 2498273 - RNA, 19 nt, Homo sapiens
  misc_RNA (1)...(19): siRNA sense strand
agguccaaguagaauacaa

SEQ ID NO: 2498274 - RNA, 19 nt, Homo sapiens
  misc_RNA (1)...(19): siRNA sense strand
ccauuuuauugcugaguuu

SEQ ID NO: 2498275 - RNA, 19 nt, Homo sapiens
  misc_RNA (1)...(19): siRNA sense strand
ccaugacaaaggauaacaa

SEQ ID NO: 2498276 - RNA, 19 nt, Homo sapiens
  misc_RNA (1)...(19): siRNA sense strand
ucacuauugaggauggaau

SEQ ID NO: 2498277 - RNA, 19 nt, Homo sapiens
  misc_RNA (1)...(19): siRNA sense strand
aggcaugccaggaggaaug

SEQ ID NO: 2498278 - RNA, 19 nt, Homo sapiens
  misc_RNA (1)...(19): siRNA sense strand
gcgagcgugccaugacaaa

SEQ ID NO: 2498279 - RNA, 19 nt, Homo sapiens
  misc_RNA (1)...(19): siRNA sense strand
cugacaaagaugaaggaaa

SEQ ID NO: 2498280 - RNA, 19 nt, Homo sapiens
  misc_RNA (1)...(19): siRNA sense strand
acggaaaagucgagauaau

SEQ ID NO: 2498281 - RNA, 19 nt, Homo sapiens
  misc_RNA (1)...(19): siRNA sense strand
gugccaugacaaaggauaa

SEQ ID NO: 2498282 - RNA, 19 nt, Homo sapiens
  misc_RNA (1)...(19): siRNA sense strand
aaguagaauacaagggaga

SEQ ID NO: 2498283 - RNA, 19 nt, Homo sapiens
  misc_RNA (1)...(19): siRNA sense strand
agguuggagcagaaagaaa

SEQ ID NO: 2498284 - RNA, 19 nt, Homo sapiens
  misc_RNA (1)...(19): siRNA sense strand
aauacaagggagagaccaa

SEQ ID NO: 2498285 - RNA, 19 nt, Homo sapiens
  misc_RNA (1)...(19): siRNA sense strand
cggugaugccgcaaagaau

SEQ ID NO: 2498286 - RNA, 19 nt, Homo sapiens
  misc_RNA (1)...(19): siRNA sense strand
aggaaauugcagaagccua

SEQ ID NO: 2498287 - RNA, 19 nt, Homo sapiens
  misc_RNA (1)...(19): siRNA sense strand
cagaaagaaacgugcucau

SEQ ID NO: 2498288 - RNA, 19 nt, Homo sapiens
  misc_RNA (1)...(19): siRNA sense strand
auaacaaccugcuuggcaa

SEQ ID NO: 2498289 - RNA, 19 nt, Homo sapiens
  misc_RNA (1)...(19): siRNA sense strand
aggacaucagugagaacaa

SEQ ID NO: 2498290 - RNA, 19 nt, Homo sapiens
  misc_RNA (1)...(19): siRNA sense strand
guagaauacaagggagaga

SEQ ID NO: 2498291 - RNA, 19 nt, Homo sapiens
  misc_RNA (1)...(19): siRNA sense strand
uugaagaacugaaugcuga

SEQ ID NO: 2498292 - RNA, 19 nt, Homo sapiens
  misc_RNA (1)...(19): siRNA sense strand
gggauuuccugguggugga

SEQ ID NO: 2498293 - RNA, 19 nt, Homo sapiens
  misc_RNA (1)...(19): siRNA sense strand
ggaaauugcagaagccuac

SEQ ID NO: 2498294 - RNA, 19 nt, Homo sapiens
  misc_RNA (1)...(19): siRNA sense strand
ccaccauugaagagguuga

SEQ ID NO: 2498295 - RNA, 19 nt, Homo sapiens
  misc_RNA (1)...(19): siRNA sense strand
uagacaagucacagauuca

SEQ ID NO: 2498296 - RNA, 19 nt, Homo sapiens
  misc_RNA (1)...(19): siRNA sense strand
agguccaaguagaauacaa

SEQ ID NO: 2498297 - RNA, 19 nt, Homo sapiens
  misc_RNA (1)...(19): siRNA sense strand
ccauuuuauugcugaguuu

SEQ ID NO: 2498298 - RNA, 19 nt, Homo sapiens
  misc_RNA (1)...(19): siRNA sense strand
ccaugacaaaggauaacaa

SEQ ID NO: 2498299 - RNA, 19 nt, Homo sapiens
  misc_RNA (1)...(19): siRNA sense strand
ucacuauugaggauggaau

SEQ ID NO: 2498300 - RNA, 19 nt, Homo sapiens
  misc_RNA (1)...(19): siRNA sense strand
aggcaugccaggaggaaug

SEQ ID NO: 2498301 - RNA, 19 nt, Homo sapiens
  misc_RNA (1)...(19): siRNA sense strand
gcgagcgugccaugacaaa

SEQ ID NO: 2498302 - RNA, 19 nt, Homo sapiens
  misc_RNA (1)...(19): siRNA sense strand
gagaagauuuagagaggcu

SEQ ID NO: 2498303 - RNA, 19 nt, Homo sapiens
  misc_RNA (1)...(19): siRNA sense strand
acaagagacucaauggaga

SEQ ID NO: 2498304 - RNA, 19 nt, Homo sapiens
  misc_RNA (1)...(19): siRNA sense strand
caauggagacagaagaaaa

SEQ ID NO: 2498305 - RNA, 19 nt, Homo sapiens
  misc_RNA (1)...(19): siRNA sense strand
gggacuacgacgaggugau

SEQ ID NO: 2498306 - RNA, 19 nt, Homo sapiens
  misc_RNA (1)...(19): siRNA sense strand
cuucauacuaggaacagaa

SEQ ID NO: 2498307 - RNA, 19 nt, Homo sapiens
  misc_RNA (1)...(19): siRNA sense strand
cagagaagauuuagagagg

SEQ ID NO: 2498308 - RNA, 19 nt, Homo sapiens
  misc_RNA (1)...(19): siRNA sense strand
cuguucaggacucggaaua

SEQ ID NO: 2498309 - RNA, 19 nt, Homo sapiens
  misc_RNA (1)...(19): siRNA sense strand
cugauaucccagagaagau

SEQ ID NO: 2498310 - RNA, 19 nt, Homo sapiens
  misc_RNA (1)...(19): siRNA sense strand
ccaacuaugugguagccuu

SEQ ID NO: 2498311 - RNA, 19 nt, Homo sapiens
  misc_RNA (1)...(19): siRNA sense strand
auucuguggaggagcuaaa

SEQ ID NO: 2498312 - RNA, 19 nt, Homo sapiens
  misc_RNA (1)...(19): siRNA sense strand
ccgucgugaccgaguggaa

SEQ ID NO: 2498313 - RNA, 19 nt, Homo sapiens
  misc_RNA (1)...(19): siRNA sense strand
acaacagaaugcugcccua

SEQ ID NO: 2498314 - RNA, 19 nt, Homo sapiens
  misc_RNA (1)...(19): siRNA sense strand
gaagauuuagagaggcuga

SEQ ID NO: 2498315 - RNA, 19 nt, Homo sapiens
  misc_RNA (1)...(19): siRNA sense strand
cucaauggagacagaagaa

SEQ ID NO: 2498316 - RNA, 19 nt, Homo sapiens
  misc_RNA (1)...(19): siRNA sense strand
gucuggucaugcugggaaa

SEQ ID NO: 2498317 - RNA, 19 nt, Homo sapiens
  misc_RNA (1)...(19): siRNA sense strand
gcagaaagugaaaugguuc

SEQ ID NO: 2498318 - RNA, 19 nt, Homo sapiens
  misc_RNA (1)...(19): siRNA sense strand
caucaaggugaaaggcaaa

SEQ ID NO: 2498319 - RNA, 19 nt, Homo sapiens
  misc_RNA (1)...(19): siRNA sense strand
ucaucaaggugaaaggcaa

SEQ ID NO: 2498320 - RNA, 19 nt, Homo sapiens
  misc_RNA (1)...(19): siRNA sense strand
ucaaugagcucuuuggcaa

SEQ ID NO: 2498321 - RNA, 19 nt, Homo sapiens
  misc_RNA (1)...(19): siRNA sense strand
ggaagaagaagcugaggca

SEQ ID NO: 2498322 - RNA, 19 nt, Homo sapiens
  misc_RNA (1)...(19): siRNA sense strand
agagagaaggagauggaga

SEQ ID NO: 2498323 - RNA, 19 nt, Homo sapiens
  misc_RNA (1)...(19): siRNA sense strand
gggcuuaugcuguggagga

SEQ ID NO: 2498324 - RNA, 19 nt, Homo sapiens
  misc_RNA (1)...(19): siRNA sense strand
gagacagagacgauggaga

SEQ ID NO: 2498325 - RNA, 19 nt, Homo sapiens
  misc_RNA (1)...(19): siRNA sense strand
aggagagggaggagacaga

SEQ ID NO: 2498326 - RNA, 19 nt, Homo sapiens
  misc_RNA (1)...(19): siRNA sense strand
ggugaaaggcaaagggcag

SEQ ID NO: 2498327 - RNA, 19 nt, Homo sapiens
  misc_RNA (1)...(19): siRNA sense strand
ggcuggacaccgagaagaa

SEQ ID NO: 2498328 - RNA, 19 nt, Homo sapiens
  misc_RNA (1)...(19): siRNA sense strand
agagaaggagauggagaaa

SEQ ID NO: 2498329 - RNA, 19 nt, Homo sapiens
  misc_RNA (1)...(19): siRNA sense strand
cccgagagaugaaggcaga

SEQ ID NO: 2498330 - RNA, 19 nt, Homo sapiens
  misc_RNA (1)...(19): siRNA sense strand
cagaaacaguggaagcagu

SEQ ID NO: 2498331 - RNA, 19 nt, Homo sapiens
  misc_RNA (1)...(19): siRNA sense strand
gcaaaauccaagugacuga

SEQ ID NO: 2498332 - RNA, 19 nt, Homo sapiens
  misc_RNA (1)...(19): siRNA sense strand
aggagauggagaaagagua

SEQ ID NO: 2498333 - RNA, 19 nt, Homo sapiens
  misc_RNA (1)...(19): siRNA sense strand
augcugacaucgugggcuu

SEQ ID NO: 2498334 - RNA, 19 nt, Homo sapiens
  misc_RNA (1)...(19): siRNA sense strand
gagagggaggagacagaga

SEQ ID NO: 2498335 - RNA, 19 nt, Homo sapiens
  misc_RNA (1)...(19): siRNA sense strand
ccaaguucuuccaggucau

SEQ ID NO: 2498336 - RNA, 19 nt, Homo sapiens
  misc_RNA (1)...(19): siRNA sense strand
gagaagaagcaccaggaac

SEQ ID NO: 2498337 - RNA, 19 nt, Homo sapiens
  misc_RNA (1)...(19): siRNA sense strand
ucaagaggcaccagggagu

SEQ ID NO: 2498338 - RNA, 19 nt, Homo sapiens
  misc_RNA (1)...(19): siRNA sense strand
cccuacagucccugggcua

SEQ ID NO: 2498339 - RNA, 19 nt, Homo sapiens
  misc_RNA (1)...(19): siRNA sense strand
ucaugagggccuagagugu

SEQ ID NO: 2498340 - RNA, 19 nt, Homo sapiens
  misc_RNA (1)...(19): siRNA sense strand
gagccuaccuaucugguca

SEQ ID NO: 2498341 - RNA, 19 nt, Homo sapiens
  misc_RNA (1)...(19): siRNA sense strand
ccaucaaggaggaggaaaa

SEQ ID NO: 2498342 - RNA, 19 nt, Homo sapiens
  misc_RNA (1)...(19): siRNA sense strand
agucaaacagggaaagcaa

SEQ ID NO: 2498343 - RNA, 19 nt, Homo sapiens
  misc_RNA (1)...(19): siRNA sense strand
agaugaagaagguggaaca

SEQ ID NO: 2498344 - RNA, 19 nt, Homo sapiens
  misc_RNA (1)...(19): siRNA sense strand
augagaaaccaguggauuu

SEQ ID NO: 2498345 - RNA, 19 nt, Homo sapiens
  misc_RNA (1)...(19): siRNA sense strand
ugauagucaaacagggaaa

SEQ ID NO: 2498346 - RNA, 19 nt, Homo sapiens
  misc_RNA (1)...(19): siRNA sense strand
acaaagaacagaugugcau

SEQ ID NO: 2498347 - RNA, 19 nt, Homo sapiens
  misc_RNA (1)...(19): siRNA sense strand
uuaucgaauugauggcaaa

SEQ ID NO: 2498348 - RNA, 19 nt, Homo sapiens
  misc_RNA (1)...(19): siRNA sense strand
agguagaguuacagcacca

SEQ ID NO: 2498349 - RNA, 19 nt, Homo sapiens
  misc_RNA (1)...(19): siRNA sense strand
cguggaaagaaaugguauu

SEQ ID NO: 2498350 - RNA, 19 nt, Homo sapiens
  misc_RNA (1)...(19): siRNA sense strand
cguagcagguagaguuaca

SEQ ID NO: 2498351 - RNA, 19 nt, Homo sapiens
  misc_RNA (1)...(19): siRNA sense strand
gcugaaugucauaagaaca

SEQ ID NO: 2498352 - RNA, 19 nt, Homo sapiens
  misc_RNA (1)...(19): siRNA sense strand
guacagugagaaaggauca

SEQ ID NO: 2498353 - RNA, 19 nt, Homo sapiens
  misc_RNA (1)...(19): siRNA sense strand
augagaacucccacagaaa

SEQ ID NO: 2498354 - RNA, 19 nt, Homo sapiens
  misc_RNA (1)...(19): siRNA sense strand
gaauugauggcaaaggcaa

SEQ ID NO: 2498355 - RNA, 19 nt, Homo sapiens
  misc_RNA (1)...(19): siRNA sense strand
ugaucaaaguguauaacca

SEQ ID NO: 2498356 - RNA, 19 nt, Homo sapiens
  misc_RNA (1)...(19): siRNA sense strand
cuuaaugagagaugcauga

SEQ ID NO: 2498357 - RNA, 19 nt, Homo sapiens
  misc_RNA (1)...(19): siRNA sense strand
aucaauccguggaaagaaa

SEQ ID NO: 2498358 - RNA, 19 nt, Homo sapiens
  misc_RNA (1)...(19): siRNA sense strand
ugucauaagaacacaacuu

SEQ ID NO: 2498359 - RNA, 19 nt, Homo sapiens
  misc_RNA (1)...(19): siRNA sense strand
cagauguagcuuuaaagaa

SEQ ID NO: 2498360 - RNA, 19 nt, Homo sapiens
  misc_RNA (1)...(19): siRNA sense strand
caugggaggcguagacaga

SEQ ID NO: 2498361 - RNA, 19 nt, Homo sapiens
  misc_RNA (1)...(19): siRNA sense strand
gauacaaccaccugaaaau

SEQ ID NO: 2498362 - RNA, 19 nt, Homo sapiens
  misc_RNA (1)...(19): siRNA sense strand
ucaaauguuuucugggaau

SEQ ID NO: 2498363 - RNA, 19 nt, Homo sapiens
  misc_RNA (1)...(19): siRNA sense strand
ccucauacgcaccuaaaga

SEQ ID NO: 2498364 - RNA, 19 nt, Homo sapiens
  misc_RNA (1)...(19): siRNA sense strand
gccauuaucuggagaccca

SEQ ID NO: 2498365 - RNA, 19 nt, Homo sapiens
  misc_RNA (1)...(19): siRNA sense strand
auaaauaaucugccagguu

SEQ ID NO: 2498366 - RNA, 19 nt, Homo sapiens
  misc_RNA (1)...(19): siRNA sense strand
ggaggaggaaaaugacaaa

SEQ ID NO: 2498367 - RNA, 19 nt, Homo sapiens
  misc_RNA (1)...(19): siRNA sense strand
gccucgaacacuaaguuua

SEQ ID NO: 2498368 - RNA, 19 nt, Homo sapiens
  misc_RNA (1)...(19): siRNA sense strand
aggaaucaggagaugaaga

SEQ ID NO: 2498369 - RNA, 19 nt, Homo sapiens
  misc_RNA (1)...(19): siRNA sense strand
acuuauaugcuugcaguaa

SEQ ID NO: 2498370 - RNA, 19 nt, Homo sapiens
  misc_RNA (1)...(19): siRNA sense strand
aggcguagacagagcugau

SEQ ID NO: 2498371 - RNA, 19 nt, Homo sapiens
  misc_RNA (1)...(19): siRNA sense strand
cguagacagagcugaugaa

SEQ ID NO: 2498372 - RNA, 19 nt, Homo sapiens
  misc_RNA (1)...(19): siRNA sense strand
uaaugagagaugcaugaaa

SEQ ID NO: 2498373 - RNA, 19 nt, Homo sapiens
  misc_RNA (1)...(19): siRNA sense strand
aggcaauauugucugcaga

SEQ ID NO: 2498374 - RNA, 19 nt, Homo sapiens
  misc_RNA (1)...(19): siRNA sense strand
ggcaauugcauaaaacaua

SEQ ID NO: 2498375 - RNA, 19 nt, Homo sapiens
  misc_RNA (1)...(19): siRNA sense strand
aaagauagcuguaugcuca

SEQ ID NO: 2498376 - RNA, 19 nt, Homo sapiens
  misc_RNA (1)...(19): siRNA sense strand
ucaccaaggccaugggcau

SEQ ID NO: 2498377 - RNA, 19 nt, Homo sapiens
  misc_RNA (1)...(19): siRNA sense strand
guggcaagugacaaagaua

SEQ ID NO: 2498378 - RNA, 19 nt, Homo sapiens
  misc_RNA (1)...(19): siRNA sense strand
ggccauugccagugcccua

SEQ ID NO: 2498379 - RNA, 19 nt, Homo sapiens
  misc_RNA (1)...(19): siRNA sense strand
gaguagaggucagugguga

SEQ ID NO: 2498380 - RNA, 19 nt, Homo sapiens
  misc_RNA (1)...(19): siRNA sense strand
aauccuacauccagagcau

SEQ ID NO: 2498381 - RNA, 19 nt, Homo sapiens
  misc_RNA (1)...(19): siRNA sense strand
ugccaugagccuagugaau

SEQ ID NO: 2498382 - RNA, 19 nt, Homo sapiens
  misc_RNA (1)...(19): siRNA sense strand
aguacgaggcacuguauau

SEQ ID NO: 2498383 - RNA, 19 nt, Homo sapiens
  misc_RNA (1)...(19): siRNA sense strand
gcuguaugcucaagugcca

SEQ ID NO: 2498384 - RNA, 19 nt, Homo sapiens
  misc_RNA (1)...(19): siRNA sense strand
ggucaguggugaugccucu

SEQ ID NO: 2498385 - RNA, 19 nt, Homo sapiens
  misc_RNA (1)...(19): siRNA sense strand
aggauuacaugcuggccau

SEQ ID NO: 2498386 - RNA, 19 nt, Homo sapiens
  misc_RNA (1)...(19): siRNA sense strand
aaagauagcuguaugcuca

SEQ ID NO: 2498387 - RNA, 19 nt, Homo sapiens
  misc_RNA (1)...(19): siRNA sense strand
ucaccaaggccaugggcau

SEQ ID NO: 2498388 - RNA, 19 nt, Homo sapiens
  misc_RNA (1)...(19): siRNA sense strand
guggcaagugacaaagaua

SEQ ID NO: 2498389 - RNA, 19 nt, Homo sapiens
  misc_RNA (1)...(19): siRNA sense strand
ggccauugccagugcccua

SEQ ID NO: 2498390 - RNA, 19 nt, Homo sapiens
  misc_RNA (1)...(19): siRNA sense strand
gaguagaggucagugguga

SEQ ID NO: 2498391 - RNA, 19 nt, Homo sapiens
  misc_RNA (1)...(19): siRNA sense strand
aauccuacauccagagcau

SEQ ID NO: 2498392 - RNA, 19 nt, Homo sapiens
  misc_RNA (1)...(19): siRNA sense strand
ugccaugagccuagugaau

SEQ ID NO: 2498393 - RNA, 19 nt, Homo sapiens
  misc_RNA (1)...(19): siRNA sense strand
aguacgaggcacuguauau

SEQ ID NO: 2498394 - RNA, 19 nt, Homo sapiens
  misc_RNA (1)...(19): siRNA sense strand
gcuguaugcucaagugcca

SEQ ID NO: 2498395 - RNA, 19 nt, Homo sapiens
  misc_RNA (1)...(19): siRNA sense strand
ggucaguggugaugccucu

SEQ ID NO: 2498396 - RNA, 19 nt, Homo sapiens
  misc_RNA (1)...(19): siRNA sense strand
aggauuacaugcuggccau

SEQ ID NO: 2498397 - RNA, 19 nt, Homo sapiens
  misc_RNA (1)...(19): siRNA sense strand
aaagauagcuguaugcuca

SEQ ID NO: 2498398 - RNA, 19 nt, Homo sapiens
  misc_RNA (1)...(19): siRNA sense strand
ucaccaaggccaugggcau

SEQ ID NO: 2498399 - RNA, 19 nt, Homo sapiens
  misc_RNA (1)...(19): siRNA sense strand
guggcaagugacaaagaua

SEQ ID NO: 2498400 - RNA, 19 nt, Homo sapiens
  misc_RNA (1)...(19): siRNA sense strand
ggccauugccagugcccua

SEQ ID NO: 2498401 - RNA, 19 nt, Homo sapiens
  misc_RNA (1)...(19): siRNA sense strand
gaguagaggucagugguga

SEQ ID NO: 2498402 - RNA, 19 nt, Homo sapiens
  misc_RNA (1)...(19): siRNA sense strand
aauccuacauccagagcau

SEQ ID NO: 2498403 - RNA, 19 nt, Homo sapiens
  misc_RNA (1)...(19): siRNA sense strand
ugccaugagccuagugaau

SEQ ID NO: 2498404 - RNA, 19 nt, Homo sapiens
  misc_RNA (1)...(19): siRNA sense strand
aguacgaggcacuguauau

SEQ ID NO: 2498405 - RNA, 19 nt, Homo sapiens
  misc_RNA (1)...(19): siRNA sense strand
gcuguaugcucaagugcca

SEQ ID NO: 2498406 - RNA, 19 nt, Homo sapiens
  misc_RNA (1)...(19): siRNA sense strand
ggucaguggugaugccucu

SEQ ID NO: 2498407 - RNA, 19 nt, Homo sapiens
  misc_RNA (1)...(19): siRNA sense strand
aggauuacaugcuggccau

SEQ ID NO: 2498408 - RNA, 19 nt, Homo sapiens
  misc_RNA (1)...(19): siRNA sense strand
aaagauagcuguaugcuca

SEQ ID NO: 2498409 - RNA, 19 nt, Homo sapiens
  misc_RNA (1)...(19): siRNA sense strand
ucaccaaggccaugggcau

SEQ ID NO: 2498410 - RNA, 19 nt, Homo sapiens
  misc_RNA (1)...(19): siRNA sense strand
guggcaagugacaaagaua

SEQ ID NO: 2498411 - RNA, 19 nt, Homo sapiens
  misc_RNA (1)...(19): siRNA sense strand
ggccauugccagugcccua

SEQ ID NO: 2498412 - RNA, 19 nt, Homo sapiens
  misc_RNA (1)...(19): siRNA sense strand
gaguagaggucagugguga

SEQ ID NO: 2498413 - RNA, 19 nt, Homo sapiens
  misc_RNA (1)...(19): siRNA sense strand
aauccuacauccagagcau

SEQ ID NO: 2498414 - RNA, 19 nt, Homo sapiens
  misc_RNA (1)...(19): siRNA sense strand
ugccaugagccuagugaau

SEQ ID NO: 2498415 - RNA, 19 nt, Homo sapiens
  misc_RNA (1)...(19): siRNA sense strand
aguacgaggcacuguauau

SEQ ID NO: 2498416 - RNA, 19 nt, Homo sapiens
  misc_RNA (1)...(19): siRNA sense strand
gcuguaugcucaagugcca

SEQ ID NO: 2498417 - RNA, 19 nt, Homo sapiens
  misc_RNA (1)...(19): siRNA sense strand
ggucaguggugaugccucu

SEQ ID NO: 2498418 - RNA, 19 nt, Homo sapiens
  misc_RNA (1)...(19): siRNA sense strand
aggauuacaugcuggccau

SEQ ID NO: 2498419 - RNA, 19 nt, Homo sapiens
  misc_RNA (1)...(19): siRNA sense strand
aauccuacauccagagcau

SEQ ID NO: 2498420 - RNA, 19 nt, Homo sapiens
  misc_RNA (1)...(19): siRNA sense strand
ugccaugagccuagugaau

SEQ ID NO: 2498421 - RNA, 19 nt, Homo sapiens
  misc_RNA (1)...(19): siRNA sense strand
aggauuacaugcuggccau

SEQ ID NO: 2498422 - RNA, 19 nt, Homo sapiens
  misc_RNA (1)...(19): siRNA sense strand
aauccuacauccagagcau

SEQ ID NO: 2498423 - RNA, 19 nt, Homo sapiens
  misc_RNA (1)...(19): siRNA sense strand
ugccaugagccuagugaau

SEQ ID NO: 2498424 - RNA, 19 nt, Homo sapiens
  misc_RNA (1)...(19): siRNA sense strand
aggauuacaugcuggccau

SEQ ID NO: 2498425 - RNA, 19 nt, Homo sapiens
  misc_RNA (1)...(19): siRNA sense strand
aagaagaguuggagggcca

SEQ ID NO: 2498426 - RNA, 19 nt, Homo sapiens
  misc_RNA (1)...(19): siRNA sense strand
gaaaacuggaagugggaaa

SEQ ID NO: 2498427 - RNA, 19 nt, Homo sapiens
  misc_RNA (1)...(19): siRNA sense strand
aggaagaaaaggagaaaga

SEQ ID NO: 2498428 - RNA, 19 nt, Homo sapiens
  misc_RNA (1)...(19): siRNA sense strand
gaucguucugguagggaaa

SEQ ID NO: 2498429 - RNA, 19 nt, Homo sapiens
  misc_RNA (1)...(19): siRNA sense strand
aguaaggcagagaaggaaa

SEQ ID NO: 2498430 - RNA, 19 nt, Homo sapiens
  misc_RNA (1)...(19): siRNA sense strand
gguggagcugauagagaaa

SEQ ID NO: 2498431 - RNA, 19 nt, Homo sapiens
  misc_RNA (1)...(19): siRNA sense strand
aacuaguagaagaggauaa

SEQ ID NO: 2498432 - RNA, 19 nt, Homo sapiens
  misc_RNA (1)...(19): siRNA sense strand
agcauaaaucagaggaaga

SEQ ID NO: 2498433 - RNA, 19 nt, Homo sapiens
  misc_RNA (1)...(19): siRNA sense strand
ggaucguucugguagggaa

SEQ ID NO: 2498434 - RNA, 19 nt, Homo sapiens
  misc_RNA (1)...(19): siRNA sense strand
cuucauagcagaugcggau

SEQ ID NO: 2498435 - RNA, 19 nt, Homo sapiens
  misc_RNA (1)...(19): siRNA sense strand
cagaggaagaaaaggagaa

SEQ ID NO: 2498436 - RNA, 19 nt, Homo sapiens
  misc_RNA (1)...(19): siRNA sense strand
ggaagugggaaaagugcaa

SEQ ID NO: 2498437 - RNA, 19 nt, Homo sapiens
  misc_RNA (1)...(19): siRNA sense strand
aggaguugguggagcugau

SEQ ID NO: 2498438 - RNA, 19 nt, Homo sapiens
  misc_RNA (1)...(19): siRNA sense strand
aagggaagaagcugagaga

SEQ ID NO: 2498439 - RNA, 19 nt, Homo sapiens
  misc_RNA (1)...(19): siRNA sense strand
cauaaaucagaggaagaaa

SEQ ID NO: 2498440 - RNA, 19 nt, Homo sapiens
  misc_RNA (1)...(19): siRNA sense strand
auauaagggaagaagcuga

SEQ ID NO: 2498441 - RNA, 19 nt, Homo sapiens
  misc_RNA (1)...(19): siRNA sense strand
gggaaaagugcaacagcga

SEQ ID NO: 2498442 - RNA, 19 nt, Homo sapiens
  misc_RNA (1)...(19): siRNA sense strand
cuuuagcaacagcaagaaa

SEQ ID NO: 2498443 - RNA, 19 nt, Homo sapiens
  misc_RNA (1)...(19): siRNA sense strand
gggaauggcaggggagaga

SEQ ID NO: 2498444 - RNA, 19 nt, Homo sapiens
  misc_RNA (1)...(19): siRNA sense strand
cgucaaggagugcgggaac

SEQ ID NO: 2498445 - RNA, 19 nt, Homo sapiens
  misc_RNA (1)...(19): siRNA sense strand
gaaggaaagucaagugcag

SEQ ID NO: 2498446 - RNA, 19 nt, Homo sapiens
  misc_RNA (1)...(19): siRNA sense strand
gaugacauauacaaggaca

SEQ ID NO: 2498447 - RNA, 19 nt, Homo sapiens
  misc_RNA (1)...(19): siRNA sense strand
gccuuuagcaacagcaaga

SEQ ID NO: 2498448 - RNA, 19 nt, Homo sapiens
  misc_RNA (1)...(19): siRNA sense strand
aaauauaagggaagaagcu

SEQ ID NO: 2498449 - RNA, 19 nt, Homo sapiens
  misc_RNA (1)...(19): siRNA sense strand
aguuggagggccagagcuu

SEQ ID NO: 2498450 - RNA, 19 nt, Homo sapiens
  misc_RNA (1)...(19): siRNA sense strand
caagaaaaccaguaaggca

SEQ ID NO: 2498451 - RNA, 19 nt, Homo sapiens
  misc_RNA (1)...(19): siRNA sense strand
aggaaagucaagugcagga

SEQ ID NO: 2498452 - RNA, 19 nt, Homo sapiens
  misc_RNA (1)...(19): siRNA sense strand
uaguagaagaggauaagca

SEQ ID NO: 2498453 - RNA, 19 nt, Homo sapiens
  misc_RNA (1)...(19): siRNA sense strand
aaagaaaggugguggccau

SEQ ID NO: 2498454 - RNA, 19 nt, Homo sapiens
  misc_RNA (1)...(19): siRNA sense strand
gcuggaaucuuuauggcaa

SEQ ID NO: 2498455 - RNA, 19 nt, Homo sapiens
  misc_RNA (1)...(19): siRNA sense strand
cuggaaucuuuauggcaaa

SEQ ID NO: 2498456 - RNA, 19 nt, Homo sapiens
  misc_RNA (1)...(19): siRNA sense strand
aauaaaaugugcugcguga

SEQ ID NO: 2498457 - RNA, 19 nt, Homo sapiens
  misc_RNA (1)...(19): siRNA sense strand
ggaagaauaauguaggaca

SEQ ID NO: 2498458 - RNA, 19 nt, Homo sapiens
  misc_RNA (1)...(19): siRNA sense strand
ugaauauacucgacgacca

SEQ ID NO: 2498459 - RNA, 19 nt, Homo sapiens
  misc_RNA (1)...(19): siRNA sense strand
gggaauacuauaagagcga

SEQ ID NO: 2498460 - RNA, 19 nt, Homo sapiens
  misc_RNA (1)...(19): siRNA sense strand
aaaccaaggaugugggaca

SEQ ID NO: 2498461 - RNA, 19 nt, Homo sapiens
  misc_RNA (1)...(19): siRNA sense strand
ccacgaucuaugaagguua

SEQ ID NO: 2498462 - RNA, 19 nt, Homo sapiens
  misc_RNA (1)...(19): siRNA sense strand
uguagagauuaccaggaaa

SEQ ID NO: 2498463 - RNA, 19 nt, Homo sapiens
  misc_RNA (1)...(19): siRNA sense strand
gggacagugauucgaacaa

SEQ ID NO: 2498464 - RNA, 19 nt, Homo sapiens
  misc_RNA (1)...(19): siRNA sense strand
gacugaugcuacaggaaca

SEQ ID NO: 2498465 - RNA, 19 nt, Homo sapiens
  misc_RNA (1)...(19): siRNA sense strand
ccucacuauuuacgggauu

SEQ ID NO: 2498466 - RNA, 19 nt, Homo sapiens
  misc_RNA (1)...(19): siRNA sense strand
ccaaguaaauaaugagcag

SEQ ID NO: 2498467 - RNA, 19 nt, Homo sapiens
  misc_RNA (1)...(19): siRNA sense strand
guggaagcccuuucagcaa

SEQ ID NO: 2498468 - RNA, 19 nt, Homo sapiens
  misc_RNA (1)...(19): siRNA sense strand
ugacucuguuugagaccaa

SEQ ID NO: 2498469 - RNA, 19 nt, Homo sapiens
  misc_RNA (1)...(19): siRNA sense strand
guccugagcuggugaggga

SEQ ID NO: 2498470 - RNA, 19 nt, Homo sapiens
  misc_RNA (1)...(19): siRNA sense strand
agguuauucuggaagauga

SEQ ID NO: 2498471 - RNA, 19 nt, Homo sapiens
  misc_RNA (1)...(19): siRNA sense strand
gcgcugugaaguggagaua

SEQ ID NO: 2498472 - RNA, 19 nt, Homo sapiens
  misc_RNA (1)...(19): siRNA sense strand
uuugagaccaacauggaaa

SEQ ID NO: 2498473 - RNA, 19 nt, Homo sapiens
  misc_RNA (1)...(19): siRNA sense strand
acauggaaaucggggaaua

SEQ ID NO: 2498474 - RNA, 19 nt, Homo sapiens
  misc_RNA (1)...(19): siRNA sense strand
caacauggaaaucggggaa

SEQ ID NO: 2498475 - RNA, 19 nt, Homo sapiens
  misc_RNA (1)...(19): siRNA sense strand
agcauguguuugugaucaa

SEQ ID NO: 2498476 - RNA, 19 nt, Homo sapiens
  misc_RNA (1)...(19): siRNA sense strand
cagugaagugcuuacaauu

SEQ ID NO: 2498477 - RNA, 19 nt, Homo sapiens
  misc_RNA (1)...(19): siRNA sense strand
aggaauguaauauuggcua

SEQ ID NO: 2498478 - RNA, 19 nt, Homo sapiens
  misc_RNA (1)...(19): siRNA sense strand
ggaauguaauauuggcuag

SEQ ID NO: 2498479 - RNA, 19 nt, Homo sapiens
  misc_RNA (1)...(19): siRNA sense strand
cgacaaacucaguggguuc

SEQ ID NO: 2498480 - RNA, 19 nt, Homo sapiens
  misc_RNA (1)...(19): siRNA sense strand
gcaucagccucaaccgcua

SEQ ID NO: 2498481 - RNA, 19 nt, Homo sapiens
  misc_RNA (1)...(19): siRNA sense strand
cggcagugaagcagacaua

SEQ ID NO: 2498482 - RNA, 19 nt, Homo sapiens
  misc_RNA (1)...(19): siRNA sense strand
ggucaaggcuguuacccua

SEQ ID NO: 2498483 - RNA, 19 nt, Homo sapiens
  misc_RNA (1)...(19): siRNA sense strand
uuucagaaguacagggcau

SEQ ID NO: 2498484 - RNA, 19 nt, Homo sapiens
  misc_RNA (1)...(19): siRNA sense strand
cagcagaacugguagccuu

SEQ ID NO: 2498485 - RNA, 19 nt, Homo sapiens
  misc_RNA (1)...(19): siRNA sense strand
ggaaaucagcccauggaga

SEQ ID NO: 2498486 - RNA, 19 nt, Homo sapiens
  misc_RNA (1)...(19): siRNA sense strand
agucaaaucugaaucgaca

SEQ ID NO: 2498487 - RNA, 19 nt, Homo sapiens
  misc_RNA (1)...(19): siRNA sense strand
agaaggaugaugacagcaa

SEQ ID NO: 2498488 - RNA, 19 nt, Homo sapiens
  misc_RNA (1)...(19): siRNA sense strand
ugcaagagaagcugggcaa

SEQ ID NO: 2498489 - RNA, 19 nt, Homo sapiens
  misc_RNA (1)...(19): siRNA sense strand
gggaugaguuugaaggccu

SEQ ID NO: 2498490 - RNA, 19 nt, Homo sapiens
  misc_RNA (1)...(19): siRNA sense strand
gggaugucacgaaguuaaa

SEQ ID NO: 2498491 - RNA, 19 nt, Homo sapiens
  misc_RNA (1)...(19): siRNA sense strand
uggccaaugcccuggacaa

SEQ ID NO: 2498492 - RNA, 19 nt, Homo sapiens
  misc_RNA (1)...(19): siRNA sense strand
gaguggacauugugggauc

SEQ ID NO: 2498493 - RNA, 19 nt, Homo sapiens
  misc_RNA (1)...(19): siRNA sense strand
caaccaacggaauggccaa

SEQ ID NO: 2498494 - RNA, 19 nt, Homo sapiens
  misc_RNA (1)...(19): siRNA sense strand
cagcagugcagcaaaauaa

SEQ ID NO: 2498495 - RNA, 19 nt, Homo sapiens
  misc_RNA (1)...(19): siRNA sense strand
gcaaugugcagguggugau

SEQ ID NO: 2498496 - RNA, 19 nt, Homo sapiens
  misc_RNA (1)...(19): siRNA sense strand
cugugacuuuggagaggaa

SEQ ID NO: 2498497 - RNA, 19 nt, Homo sapiens
  misc_RNA (1)...(19): siRNA sense strand
gugacuuuggagaggaaau

SEQ ID NO: 2498498 - RNA, 19 nt, Homo sapiens
  misc_RNA (1)...(19): siRNA sense strand
ggacauugugggaucgcuu

SEQ ID NO: 2498499 - RNA, 19 nt, Homo sapiens
  misc_RNA (1)...(19): siRNA sense strand
ccaaguuuguggagcgaac

SEQ ID NO: 2498500 - RNA, 19 nt, Homo sapiens
  misc_RNA (1)...(19): siRNA sense strand
ugggaugucacgaaguuaa

SEQ ID NO: 2498501 - RNA, 19 nt, Homo sapiens
  misc_RNA (1)...(19): siRNA sense strand
caagaacggcagugaagca

SEQ ID NO: 2498502 - RNA, 19 nt, Homo sapiens
  misc_RNA (1)...(19): siRNA sense strand
gggaucgcuuugagguaca

SEQ ID NO: 2498503 - RNA, 19 nt, Homo sapiens
  misc_RNA (1)...(19): siRNA sense strand
ccuccaacuucuccgacua

SEQ ID NO: 2498504 - RNA, 19 nt, Homo sapiens
  misc_RNA (1)...(19): siRNA sense strand
gggcagaaaacuaugacau

SEQ ID NO: 2498505 - RNA, 19 nt, Homo sapiens
  misc_RNA (1)...(19): siRNA sense strand
cgccaaaugaauccacaua

SEQ ID NO: 2498506 - RNA, 19 nt, Homo sapiens
  misc_RNA (1)...(19): siRNA sense strand
cagaccggcacaagagcaa

SEQ ID NO: 2498507 - RNA, 19 nt, Homo sapiens
  misc_RNA (1)...(19): siRNA sense strand
gugcuugagcugugcugua

SEQ ID NO: 2498508 - RNA, 19 nt, Homo sapiens
  misc_RNA (1)...(19): siRNA sense strand
gugggaucgcuuugaggua

SEQ ID NO: 2498509 - RNA, 19 nt, Homo sapiens
  misc_RNA (1)...(19): siRNA sense strand
guggagaucgcuaagaaca

SEQ ID NO: 2498510 - RNA, 19 nt, Homo sapiens
  misc_RNA (1)...(19): siRNA sense strand
cuucaagcagccagcagaa

SEQ ID NO: 2498511 - RNA, 19 nt, Homo sapiens
  misc_RNA (1)...(19): siRNA sense strand
cggcacaagagcaagcuga

SEQ ID NO: 2498512 - RNA, 19 nt, Homo sapiens
  misc_RNA (1)...(19): siRNA sense strand
uggagaucgcuaagaacau

SEQ ID NO: 2498513 - RNA, 19 nt, Homo sapiens
  misc_RNA (1)...(19): siRNA sense strand
cggcagugaagcagacaua

SEQ ID NO: 2498514 - RNA, 19 nt, Homo sapiens
  misc_RNA (1)...(19): siRNA sense strand
ggucaaggcuguuacccua

SEQ ID NO: 2498515 - RNA, 19 nt, Homo sapiens
  misc_RNA (1)...(19): siRNA sense strand
uuucagaaguacagggcau

SEQ ID NO: 2498516 - RNA, 19 nt, Homo sapiens
  misc_RNA (1)...(19): siRNA sense strand
cagcagaacugguagccuu

SEQ ID NO: 2498517 - RNA, 19 nt, Homo sapiens
  misc_RNA (1)...(19): siRNA sense strand
ggaaaucagcccauggaga

SEQ ID NO: 2498518 - RNA, 19 nt, Homo sapiens
  misc_RNA (1)...(19): siRNA sense strand
agucaaaucugaaucgaca

SEQ ID NO: 2498519 - RNA, 19 nt, Homo sapiens
  misc_RNA (1)...(19): siRNA sense strand
agaaggaugaugacagcaa

SEQ ID NO: 2498520 - RNA, 19 nt, Homo sapiens
  misc_RNA (1)...(19): siRNA sense strand
ugcaagagaagcugggcaa

SEQ ID NO: 2498521 - RNA, 19 nt, Homo sapiens
  misc_RNA (1)...(19): siRNA sense strand
gggaugaguuugaaggccu

SEQ ID NO: 2498522 - RNA, 19 nt, Homo sapiens
  misc_RNA (1)...(19): siRNA sense strand
gggaugucacgaaguuaaa

SEQ ID NO: 2498523 - RNA, 19 nt, Homo sapiens
  misc_RNA (1)...(19): siRNA sense strand
uggccaaugcccuggacaa

SEQ ID NO: 2498524 - RNA, 19 nt, Homo sapiens
  misc_RNA (1)...(19): siRNA sense strand
gaguggacauugugggauc

SEQ ID NO: 2498525 - RNA, 19 nt, Homo sapiens
  misc_RNA (1)...(19): siRNA sense strand
caaccaacggaauggccaa

SEQ ID NO: 2498526 - RNA, 19 nt, Homo sapiens
  misc_RNA (1)...(19): siRNA sense strand
cagcagugcagcaaaauaa

SEQ ID NO: 2498527 - RNA, 19 nt, Homo sapiens
  misc_RNA (1)...(19): siRNA sense strand
gcaaugugcagguggugau

SEQ ID NO: 2498528 - RNA, 19 nt, Homo sapiens
  misc_RNA (1)...(19): siRNA sense strand
cugugacuuuggagaggaa

SEQ ID NO: 2498529 - RNA, 19 nt, Homo sapiens
  misc_RNA (1)...(19): siRNA sense strand
gugacuuuggagaggaaau

SEQ ID NO: 2498530 - RNA, 19 nt, Homo sapiens
  misc_RNA (1)...(19): siRNA sense strand
ggacauugugggaucgcuu

SEQ ID NO: 2498531 - RNA, 19 nt, Homo sapiens
  misc_RNA (1)...(19): siRNA sense strand
ccaaguuuguggagcgaac

SEQ ID NO: 2498532 - RNA, 19 nt, Homo sapiens
  misc_RNA (1)...(19): siRNA sense strand
ugggaugucacgaaguuaa

SEQ ID NO: 2498533 - RNA, 19 nt, Homo sapiens
  misc_RNA (1)...(19): siRNA sense strand
caagaacggcagugaagca

SEQ ID NO: 2498534 - RNA, 19 nt, Homo sapiens
  misc_RNA (1)...(19): siRNA sense strand
gggaucgcuuugagguaca

SEQ ID NO: 2498535 - RNA, 19 nt, Homo sapiens
  misc_RNA (1)...(19): siRNA sense strand
ccuccaacuucuccgacua

SEQ ID NO: 2498536 - RNA, 19 nt, Homo sapiens
  misc_RNA (1)...(19): siRNA sense strand
gggcagaaaacuaugacau

SEQ ID NO: 2498537 - RNA, 19 nt, Homo sapiens
  misc_RNA (1)...(19): siRNA sense strand
cgccaaaugaauccacaua

SEQ ID NO: 2498538 - RNA, 19 nt, Homo sapiens
  misc_RNA (1)...(19): siRNA sense strand
cagaccggcacaagagcaa

SEQ ID NO: 2498539 - RNA, 19 nt, Homo sapiens
  misc_RNA (1)...(19): siRNA sense strand
gugcuugagcugugcugua

SEQ ID NO: 2498540 - RNA, 19 nt, Homo sapiens
  misc_RNA (1)...(19): siRNA sense strand
gugggaucgcuuugaggua

SEQ ID NO: 2498541 - RNA, 19 nt, Homo sapiens
  misc_RNA (1)...(19): siRNA sense strand
guggagaucgcuaagaaca

SEQ ID NO: 2498542 - RNA, 19 nt, Homo sapiens
  misc_RNA (1)...(19): siRNA sense strand
cuucaagcagccagcagaa

SEQ ID NO: 2498543 - RNA, 19 nt, Homo sapiens
  misc_RNA (1)...(19): siRNA sense strand
cggcacaagagcaagcuga

SEQ ID NO: 2498544 - RNA, 19 nt, Homo sapiens
  misc_RNA (1)...(19): siRNA sense strand
uggagaucgcuaagaacau

SEQ ID NO: 2498545 - RNA, 19 nt, Homo sapiens
  misc_RNA (1)...(19): siRNA sense strand
agguagaacaagaggagaa

SEQ ID NO: 2498546 - RNA, 19 nt, Homo sapiens
  misc_RNA (1)...(19): siRNA sense strand
ccgaaaugacuuugcacaa

SEQ ID NO: 2498547 - RNA, 19 nt, Homo sapiens
  misc_RNA (1)...(19): siRNA sense strand
acuaagggacaaagagauu

SEQ ID NO: 2498548 - RNA, 19 nt, Homo sapiens
  misc_RNA (1)...(19): siRNA sense strand
augaagagcuugaaggacu

SEQ ID NO: 2498549 - RNA, 19 nt, Homo sapiens
  misc_RNA (1)...(19): siRNA sense strand
agaugaagguagucggcuu

SEQ ID NO: 2498550 - RNA, 19 nt, Homo sapiens
  misc_RNA (1)...(19): siRNA sense strand
gguagaacaagaggagaaa

SEQ ID NO: 2498551 - RNA, 19 nt, Homo sapiens
  misc_RNA (1)...(19): siRNA sense strand
gaacaagaggagaaaacaa

SEQ ID NO: 2498552 - RNA, 19 nt, Homo sapiens
  misc_RNA (1)...(19): siRNA sense strand
cacuaagacucauggaaca

SEQ ID NO: 2498553 - RNA, 19 nt, Homo sapiens
  misc_RNA (1)...(19): siRNA sense strand
caccaaacaaggaguguau

SEQ ID NO: 2498554 - RNA, 19 nt, Homo sapiens
  misc_RNA (1)...(19): siRNA sense strand
aauuagaucaacagggaga

SEQ ID NO: 2498555 - RNA, 19 nt, Homo sapiens
  misc_RNA (1)...(19): siRNA sense strand
cauuaaagccacuccaaaa

SEQ ID NO: 2498556 - RNA, 19 nt, Homo sapiens
  misc_RNA (1)...(19): siRNA sense strand
cuccaaaagcuaagauuua

SEQ ID NO: 2498557 - RNA, 19 nt, Homo sapiens
  misc_RNA (1)...(19): siRNA sense strand
uugaaaaccugaaggccaa

SEQ ID NO: 2498558 - RNA, 19 nt, Homo sapiens
  misc_RNA (1)...(19): siRNA sense strand
acaaagagauuucugcaga

SEQ ID NO: 2498559 - RNA, 19 nt, Homo sapiens
  misc_RNA (1)...(19): siRNA sense strand
aagcaggaguauuugaaca

SEQ ID NO: 2498560 - RNA, 19 nt, Homo sapiens
  misc_RNA (1)...(19): siRNA sense strand
cagacuugucggaagaauu

SEQ ID NO: 2498561 - RNA, 19 nt, Homo sapiens
  misc_RNA (1)...(19): siRNA sense strand
ggacaaaauauuggaauca

SEQ ID NO: 2498562 - RNA, 19 nt, Homo sapiens
  misc_RNA (1)...(19): siRNA sense strand
gcuugaaggacugggauuu

SEQ ID NO: 2498563 - RNA, 19 nt, Homo sapiens
  misc_RNA (1)...(19): siRNA sense strand
gaaaacaaaaccaggccaa

SEQ ID NO: 2498564 - RNA, 19 nt, Homo sapiens
  misc_RNA (1)...(19): siRNA sense strand
ccauuaaagccacuccaaa

SEQ ID NO: 2498565 - RNA, 19 nt, Homo sapiens
  misc_RNA (1)...(19): siRNA sense strand
aaugaaugcaagagaaacu

SEQ ID NO: 2498566 - RNA, 19 nt, Homo sapiens
  misc_RNA (1)...(19): siRNA sense strand
cgugaaaagcccuccauua

SEQ ID NO: 2498567 - RNA, 19 nt, Homo sapiens
  misc_RNA (1)...(19): siRNA sense strand
gaacaaaucacuaagacuc

SEQ ID NO: 2498568 - RNA, 19 nt, Homo sapiens
  misc_RNA (1)...(19): siRNA sense strand
agcaggaguauuugaacaa

SEQ ID NO: 2498569 - RNA, 19 nt, Homo sapiens
  misc_RNA (1)...(19): siRNA sense strand
auuugagguuccuagauua

SEQ ID NO: 2498570 - RNA, 19 nt, Homo sapiens
  misc_RNA (1)...(19): siRNA sense strand
acucauauccaccaaacaa

SEQ ID NO: 2498571 - RNA, 19 nt, Homo sapiens
  misc_RNA (1)...(19): siRNA sense strand
agaguugaccuuugaugaa

SEQ ID NO: 2498572 - RNA, 19 nt, Homo sapiens
  misc_RNA (1)...(19): siRNA sense strand
acuaagacucauggaacaa

SEQ ID NO: 2498573 - RNA, 19 nt, Homo sapiens
  misc_RNA (1)...(19): siRNA sense strand
acugguaguggaagggauu

SEQ ID NO: 2498574 - RNA, 19 nt, Homo sapiens
  misc_RNA (1)...(19): siRNA sense strand
agaucaacagggagauuca

SEQ ID NO: 2498575 - RNA, 19 nt, Homo sapiens
  misc_RNA (1)...(19): siRNA sense strand
ggaaguucgagaugggcca

SEQ ID NO: 2498576 - RNA, 19 nt, Homo sapiens
  misc_RNA (1)...(19): siRNA sense strand
ccuccauuaauuagaucaa

SEQ ID NO: 2498577 - RNA, 19 nt, Homo sapiens
  misc_RNA (1)...(19): siRNA sense strand
agucuguaaugguguccaa

SEQ ID NO: 2498578 - RNA, 19 nt, Homo sapiens
  misc_RNA (1)...(19): siRNA sense strand
ccaaacaaggaguguaucu

SEQ ID NO: 2498579 - RNA, 19 nt, Homo sapiens
  misc_RNA (1)...(19): siRNA sense strand
aaagaauagaguugaccuu

SEQ ID NO: 2498580 - RNA, 19 nt, Homo sapiens
  misc_RNA (1)...(19): siRNA sense strand
ugaugaagagcuugaagga

SEQ ID NO: 2498581 - RNA, 19 nt, Homo sapiens
  misc_RNA (1)...(19): siRNA sense strand
agagaaacuucguugcagu

SEQ ID NO: 2498582 - RNA, 19 nt, Homo sapiens
  misc_RNA (1)...(19): siRNA sense strand
acugggauuucgagcaaaa

SEQ ID NO: 2498583 - RNA, 19 nt, Homo sapiens
  misc_RNA (1)...(19): siRNA sense strand
uuaauuagaucaacaggga

SEQ ID NO: 2498584 - RNA, 19 nt, Homo sapiens
  misc_RNA (1)...(19): siRNA sense strand
ucgaaugugggcagaugaa

SEQ ID NO: 2498585 - RNA, 19 nt, Homo sapiens
  misc_RNA (1)...(19): siRNA sense strand
ggacaaagagauuucugca

SEQ ID NO: 2498586 - RNA, 19 nt, Homo sapiens
  misc_RNA (1)...(19): siRNA sense strand
gugaagaaguggagcgaag

SEQ ID NO: 2498587 - RNA, 19 nt, Homo sapiens
  misc_RNA (1)...(19): siRNA sense strand
agaccaaauuagaggcuca

SEQ ID NO: 2498588 - RNA, 19 nt, Homo sapiens
  misc_RNA (1)...(19): siRNA sense strand
gggaggagcucaagccaga

SEQ ID NO: 2498589 - RNA, 19 nt, Homo sapiens
  misc_RNA (1)...(19): siRNA sense strand
aggacaaguuggaacagaa

SEQ ID NO: 2498590 - RNA, 19 nt, Homo sapiens
  misc_RNA (1)...(19): siRNA sense strand
cugaaagcgaagaaacuaa

SEQ ID NO: 2498591 - RNA, 19 nt, Homo sapiens
  misc_RNA (1)...(19): siRNA sense strand
ccucccaagucaaggacaa

SEQ ID NO: 2498592 - RNA, 19 nt, Homo sapiens
  misc_RNA (1)...(19): siRNA sense strand
ggggaagaaaauaaagaaa

SEQ ID NO: 2498593 - RNA, 19 nt, Homo sapiens
  misc_RNA (1)...(19): siRNA sense strand
cuggauacaucaagggcau

SEQ ID NO: 2498594 - RNA, 19 nt, Homo sapiens
  misc_RNA (1)...(19): siRNA sense strand
gguugaacgguuugagaca

SEQ ID NO: 2498595 - RNA, 19 nt, Homo sapiens
  misc_RNA (1)...(19): siRNA sense strand
guaaugagaacauggccaa

SEQ ID NO: 2498596 - RNA, 19 nt, Homo sapiens
  misc_RNA (1)...(19): siRNA sense strand
ugguuuagaggaagacaaa

SEQ ID NO: 2498597 - RNA, 19 nt, Homo sapiens
  misc_RNA (1)...(19): siRNA sense strand
gaaguggaguggagaggga

SEQ ID NO: 2498598 - RNA, 19 nt, Homo sapiens
  misc_RNA (1)...(19): siRNA sense strand
agccagaggaugacagcaa

SEQ ID NO: 2498599 - RNA, 19 nt, Homo sapiens
  misc_RNA (1)...(19): siRNA sense strand
ucagaaacagagagauuau

SEQ ID NO: 2498600 - RNA, 19 nt, Homo sapiens
  misc_RNA (1)...(19): siRNA sense strand
guucaaagcuuacaggugu

SEQ ID NO: 2498601 - RNA, 19 nt, Homo sapiens
  misc_RNA (1)...(19): siRNA sense strand
cugaaagagccuggagcua

SEQ ID NO: 2498602 - RNA, 19 nt, Homo sapiens
  misc_RNA (1)...(19): siRNA sense strand
gcguggaugccaagaccaa

SEQ ID NO: 2498603 - RNA, 19 nt, Homo sapiens
  misc_RNA (1)...(19): siRNA sense strand
cacucagacucgagccaaa

SEQ ID NO: 2498604 - RNA, 19 nt, Homo sapiens
  misc_RNA (1)...(19): siRNA sense strand
cagaggaauuggaacgcuu

SEQ ID NO: 2498605 - RNA, 19 nt, Homo sapiens
  misc_RNA (1)...(19): siRNA sense strand
ugaagcaugcagaggaauu

SEQ ID NO: 2498606 - RNA, 19 nt, Homo sapiens
  misc_RNA (1)...(19): siRNA sense strand
acacaaauucacagggaag

SEQ ID NO: 2498607 - RNA, 19 nt, Homo sapiens
  misc_RNA (1)...(19): siRNA sense strand
ccaacguguggaagagauu

SEQ ID NO: 2498608 - RNA, 19 nt, Homo sapiens
  misc_RNA (1)...(19): siRNA sense strand
gcagcaugguuuacggcau

SEQ ID NO: 2498609 - RNA, 19 nt, Homo sapiens
  misc_RNA (1)...(19): siRNA sense strand
cagaucagaaacagagaga

SEQ ID NO: 2498610 - RNA, 19 nt, Homo sapiens
  misc_RNA (1)...(19): siRNA sense strand
aguccuaugugcuggugaa

SEQ ID NO: 2498611 - RNA, 19 nt, Homo sapiens
  misc_RNA (1)...(19): siRNA sense strand
ccggaggggaagaaaauaa

SEQ ID NO: 2498612 - RNA, 19 nt, Homo sapiens
  misc_RNA (1)...(19): siRNA sense strand
uggaagagauuucacccaa

SEQ ID NO: 2498613 - RNA, 19 nt, Homo sapiens
  misc_RNA (1)...(19): siRNA sense strand
aaucaagcguaaugagaac

SEQ ID NO: 2498614 - RNA, 19 nt, Homo sapiens
  misc_RNA (1)...(19): siRNA sense strand
uugaacgguuugagacauu

SEQ ID NO: 2498615 - RNA, 19 nt, Homo sapiens
  misc_RNA (1)...(19): siRNA sense strand
cagggaagaaagugacuga

SEQ ID NO: 2498616 - RNA, 19 nt, Homo sapiens
  misc_RNA (1)...(19): siRNA sense strand
guauaaccaacguguggaa

SEQ ID NO: 2498617 - RNA, 19 nt, Homo sapiens
  misc_RNA (1)...(19): siRNA sense strand
ucaacuucaagauggguaa

SEQ ID NO: 2498618 - RNA, 19 nt, Homo sapiens
  misc_RNA (1)...(19): siRNA sense strand
ugaacaucaagaauggaaa

SEQ ID NO: 2498619 - RNA, 19 nt, Homo sapiens
  misc_RNA (1)...(19): siRNA sense strand
ggcugaaagcgaagaaacu

SEQ ID NO: 2498620 - RNA, 19 nt, Homo sapiens
  misc_RNA (1)...(19): siRNA sense strand
acucaagugcggucagaga

SEQ ID NO: 2498621 - RNA, 19 nt, Homo sapiens
  misc_RNA (1)...(19): siRNA sense strand
cccaagucaaggacaauaa

SEQ ID NO: 2498622 - RNA, 19 nt, Homo sapiens
  misc_RNA (1)...(19): siRNA sense strand
agacacaaauucacaggga

SEQ ID NO: 2498623 - RNA, 19 nt, Homo sapiens
  misc_RNA (1)...(19): siRNA sense strand
gacacaaauucacagggaa

SEQ ID NO: 2498624 - RNA, 19 nt, Homo sapiens
  misc_RNA (1)...(19): siRNA sense strand
gcucaggcuuacacagcuu

SEQ ID NO: 2498625 - RNA, 19 nt, Homo sapiens
  misc_RNA (1)...(19): siRNA sense strand
caucaagaauggaaagcug

SEQ ID NO: 2498626 - RNA, 19 nt, Homo sapiens
  misc_RNA (1)...(19): siRNA sense strand
gaaucaaugcucagcgagu

SEQ ID NO: 2498627 - RNA, 19 nt, Homo sapiens
  misc_RNA (1)...(19): siRNA sense strand
cguaaugagaacauggcca

SEQ ID NO: 2498628 - RNA, 19 nt, Homo sapiens
  misc_RNA (1)...(19): siRNA sense strand
aagacaaagccuuccagaa

SEQ ID NO: 2498629 - RNA, 19 nt, Homo sapiens
  misc_RNA (1)...(19): siRNA sense strand
gccuaaaggaccugccuga

SEQ ID NO: 2498630 - RNA, 19 nt, Homo sapiens
  misc_RNA (1)...(19): siRNA sense strand
gauaauagauacuugcuuc

SEQ ID NO: 2498631 - RNA, 19 nt, Homo sapiens
  misc_RNA (1)...(19): siRNA sense strand
ccgcuauugugcauauaau

SEQ ID NO: 2498632 - RNA, 19 nt, Homo sapiens
  misc_RNA (1)...(19): siRNA sense strand
acaaauucacagggaagaa

SEQ ID NO: 2498633 - RNA, 19 nt, Homo sapiens
  misc_RNA (1)...(19): siRNA sense strand
gauggguaacagacacaaa

SEQ ID NO: 2498634 - RNA, 19 nt, Homo sapiens
  misc_RNA (1)...(19): siRNA sense strand
gcaaucgcguggaugccaa

SEQ ID NO: 2498635 - RNA, 19 nt, Homo sapiens
  misc_RNA (1)...(19): siRNA sense strand
ccauugaggcuuuuaacaa

SEQ ID NO: 2498636 - RNA, 19 nt, Homo sapiens
  misc_RNA (1)...(19): siRNA sense strand
agagauaggccucaagacu

SEQ ID NO: 2498637 - RNA, 19 nt, Homo sapiens
  misc_RNA (1)...(19): siRNA sense strand
agauaggccucaagacucu

SEQ ID NO: 2498638 - RNA, 19 nt, Homo sapiens
  misc_RNA (1)...(19): siRNA sense strand
cagcaguccuugugggaga

SEQ ID NO: 2498639 - RNA, 19 nt, Homo sapiens
  misc_RNA (1)...(19): siRNA sense strand
gcaagaggguucaagccaa

SEQ ID NO: 2498640 - RNA, 19 nt, Homo sapiens
  misc_RNA (1)...(19): siRNA sense strand
auaacaacccauauggaaa

SEQ ID NO: 2498641 - RNA, 19 nt, Homo sapiens
  misc_RNA (1)...(19): siRNA sense strand
acaccaauuucuauggcaa

SEQ ID NO: 2498642 - RNA, 19 nt, Homo sapiens
  misc_RNA (1)...(19): siRNA sense strand
ggccaugguguguggaaau

SEQ ID NO: 2498643 - RNA, 19 nt, Homo sapiens
  misc_RNA (1)...(19): siRNA sense strand
ucugauugauaguggaaca

SEQ ID NO: 2498644 - RNA, 19 nt, Homo sapiens
  misc_RNA (1)...(19): siRNA sense strand
agugaaaggcuaugaaaau

SEQ ID NO: 2498645 - RNA, 19 nt, Homo sapiens
  misc_RNA (1)...(19): siRNA sense strand
agacauggcaagaggguuc

SEQ ID NO: 2498646 - RNA, 19 nt, Homo sapiens
  misc_RNA (1)...(19): siRNA sense strand
ucacauuggaacaagggaa

SEQ ID NO: 2498647 - RNA, 19 nt, Homo sapiens
  misc_RNA (1)...(19): siRNA sense strand
aguuaaucacauuggaaca

SEQ ID NO: 2498648 - RNA, 19 nt, Homo sapiens
  misc_RNA (1)...(19): siRNA sense strand
agauguauuucgaggccuu

SEQ ID NO: 2498649 - RNA, 19 nt, Homo sapiens
  misc_RNA (1)...(19): siRNA sense strand
ggaacaaaggagggagcuu

SEQ ID NO: 2498650 - RNA, 19 nt, Homo sapiens
  misc_RNA (1)...(19): siRNA sense strand
guuacaaagaggagauuuu

SEQ ID NO: 2498651 - RNA, 19 nt, Homo sapiens
  misc_RNA (1)...(19): siRNA sense strand
ccaccaaggcagaaaugga

SEQ ID NO: 2498652 - RNA, 19 nt, Homo sapiens
  misc_RNA (1)...(19): siRNA sense strand
caccaauuucuauggcaaa

SEQ ID NO: 2498653 - RNA, 19 nt, Homo sapiens
  misc_RNA (1)...(19): siRNA sense strand
ccuucuugauggacgaaaa

SEQ ID NO: 2498654 - RNA, 19 nt, Homo sapiens
  misc_RNA (1)...(19): siRNA sense strand
aaacauuggaugaagccau

SEQ ID NO: 2498655 - RNA, 19 nt, Homo sapiens
  misc_RNA (1)...(19): siRNA sense strand
uggacaggugggagugaau

SEQ ID NO: 2498656 - RNA, 19 nt, Homo sapiens
  misc_RNA (1)...(19): siRNA sense strand
aaugaaaccaucugagcga

SEQ ID NO: 2498657 - RNA, 19 nt, Homo sapiens
  misc_RNA (1)...(19): siRNA sense strand
ggaucaagacauggcaaga

SEQ ID NO: 2498658 - RNA, 19 nt, Homo sapiens
  misc_RNA (1)...(19): siRNA sense strand
ccaauaugggagccaagaa

SEQ ID NO: 2498659 - RNA, 19 nt, Homo sapiens
  misc_RNA (1)...(19): siRNA sense strand
aagugaaaggcuaugaaaa

SEQ ID NO: 2498660 - RNA, 19 nt, Homo sapiens
  misc_RNA (1)...(19): siRNA sense strand
uagcugaugcugaaggaga

SEQ ID NO: 2498661 - RNA, 19 nt, Homo sapiens
  misc_RNA (1)...(19): siRNA sense strand
gugacaaauggaucgauau

SEQ ID NO: 2498662 - RNA, 19 nt, Homo sapiens
  misc_RNA (1)...(19): siRNA sense strand
caaucagcuuugugggauc

SEQ ID NO: 2498663 - RNA, 19 nt, Homo sapiens
  misc_RNA (1)...(19): siRNA sense strand
ccuguuacaaagaggagau

SEQ ID NO: 2498664 - RNA, 19 nt, Homo sapiens
  misc_RNA (1)...(19): siRNA sense strand
cgucaguauuugaggagaa

SEQ ID NO: 2498665 - RNA, 19 nt, Homo sapiens
  misc_RNA (1)...(19): siRNA sense strand
ccacaggagaggaaggaaa

SEQ ID NO: 2498666 - RNA, 19 nt, Homo sapiens
  misc_RNA (1)...(19): siRNA sense strand
aguuagaagaugugaagaa

SEQ ID NO: 2498667 - RNA, 19 nt, Homo sapiens
  misc_RNA (1)...(19): siRNA sense strand
gcuucgauuuguugagaaa

SEQ ID NO: 2498668 - RNA, 19 nt, Homo sapiens
  misc_RNA (1)...(19): siRNA sense strand
ggagaaagcauuugggaac

SEQ ID NO: 2498669 - RNA, 19 nt, Homo sapiens
  misc_RNA (1)...(19): siRNA sense strand
agaacauaguagaugcuua

SEQ ID NO: 2498670 - RNA, 19 nt, Homo sapiens
  misc_RNA (1)...(19): siRNA sense strand
cgacagaggaggaugcuga

SEQ ID NO: 2498671 - RNA, 19 nt, Homo sapiens
  misc_RNA (1)...(19): siRNA sense strand
uggaacuuaccgagagaua

SEQ ID NO: 2498672 - RNA, 19 nt, Homo sapiens
  misc_RNA (1)...(19): siRNA sense strand
ugauugacuuagaggccaa

SEQ ID NO: 2498673 - RNA, 19 nt, Homo sapiens
  misc_RNA (1)...(19): siRNA sense strand
ugucagugaauuaggagaa

SEQ ID NO: 2498674 - RNA, 19 nt, Homo sapiens
  misc_RNA (1)...(19): siRNA sense strand
aggagaaagcauuugggaa

SEQ ID NO: 2498675 - RNA, 19 nt, Homo sapiens
  misc_RNA (1)...(19): siRNA sense strand
cccagaagaaugagaauga

SEQ ID NO: 2498676 - RNA, 19 nt, Homo sapiens
  misc_RNA (1)...(19): siRNA sense strand
cagaagaaugagaaugaga

SEQ ID NO: 2498677 - RNA, 19 nt, Homo sapiens
  misc_RNA (1)...(19): siRNA sense strand
gagccaagugagaugggaa

SEQ ID NO: 2498678 - RNA, 19 nt, Homo sapiens
  misc_RNA (1)...(19): siRNA sense strand
agggaaguuugaagaguga

SEQ ID NO: 2498679 - RNA, 19 nt, Homo sapiens
  misc_RNA (1)...(19): siRNA sense strand
gaaauguguuccugcgaca

SEQ ID NO: 2498680 - RNA, 19 nt, Homo sapiens
  misc_RNA (1)...(19): siRNA sense strand
aggaggaugcugagauuau

SEQ ID NO: 2498681 - RNA, 19 nt, Homo sapiens
  misc_RNA (1)...(19): siRNA sense strand
aggagaacuuggaaagguu

SEQ ID NO: 2498682 - RNA, 19 nt, Homo sapiens
  misc_RNA (1)...(19): siRNA sense strand
gugaaugaaguuagaagau

SEQ ID NO: 2498683 - RNA, 19 nt, Homo sapiens
  misc_RNA (1)...(19): siRNA sense strand
ggaaauggcuucuggagug

SEQ ID NO: 2498684 - RNA, 19 nt, Homo sapiens
  misc_RNA (1)...(19): siRNA sense strand
acuuaaauccagaugugaa

SEQ ID NO: 2498685 - RNA, 19 nt, Homo sapiens
  misc_RNA (1)...(19): siRNA sense strand
cagugaauuaggagaacuu

SEQ ID NO: 2498686 - RNA, 19 nt, Homo sapiens
  misc_RNA (1)...(19): siRNA sense strand
cuuaaauccagaugugaau

SEQ ID NO: 2498687 - RNA, 19 nt, Homo sapiens
  misc_RNA (1)...(19): siRNA sense strand
guugagaaagagauaagaa

SEQ ID NO: 2498688 - RNA, 19 nt, Homo sapiens
  misc_RNA (1)...(19): siRNA sense strand
agacaccacaggagaggaa

SEQ ID NO: 2498689 - RNA, 19 nt, Homo sapiens
  misc_RNA (1)...(19): siRNA sense strand
ucuuaauaucuuuggguca

SEQ ID NO: 2498690 - RNA, 19 nt, Homo sapiens
  misc_RNA (1)...(19): siRNA sense strand
aauuaggagaacuuggaaa

SEQ ID NO: 2498691 - RNA, 19 nt, Homo sapiens
  misc_RNA (1)...(19): siRNA sense strand
uccaaaugguucugaauca

SEQ ID NO: 2498692 - RNA, 19 nt, Homo sapiens
  misc_RNA (1)...(19): siRNA sense strand
uaguagaugcuuauggaau

SEQ ID NO: 2498693 - RNA, 19 nt, Homo sapiens
  misc_RNA (1)...(19): siRNA sense strand
ugaaucaaacggaggauca

SEQ ID NO: 2498694 - RNA, 19 nt, Homo sapiens
  misc_RNA (1)...(19): siRNA sense strand
cauagaugugacucagaaa

SEQ ID NO: 2498695 - RNA, 19 nt, Homo sapiens
  misc_RNA (1)...(19): siRNA sense strand
ccaacggaaauuugugaau

SEQ ID NO: 2498696 - RNA, 19 nt, Homo sapiens
  misc_RNA (1)...(19): siRNA sense strand
uuguugugucagugaauua

SEQ ID NO: 2498697 - RNA, 19 nt, Homo sapiens
  misc_RNA (1)...(19): siRNA sense strand
gauuauggacaccggugaa

SEQ ID NO: 2498698 - RNA, 19 nt, Homo sapiens
  misc_RNA (1)...(19): siRNA sense strand
uuguuuggcuauuugguua

SEQ ID NO: 2498699 - RNA, 19 nt, Homo sapiens
  misc_RNA (1)...(19): siRNA sense strand
aauaaauucuacagcggga

SEQ ID NO: 2498700 - RNA, 19 nt, Homo sapiens
  misc_RNA (1)...(19): siRNA sense strand
aacggaaauuugugaauga

SEQ ID NO: 2498701 - RNA, 19 nt, Homo sapiens
  misc_RNA (1)...(19): siRNA sense strand
gguucaucaaagugcggaa

SEQ ID NO: 2498702 - RNA, 19 nt, Homo sapiens
  misc_RNA (1)...(19): siRNA sense strand
ccuauggcuuucagaacau

SEQ ID NO: 2498703 - RNA, 19 nt, Homo sapiens
  misc_RNA (1)...(19): siRNA sense strand
acagaaaggaauucagugu

SEQ ID NO: 2498704 - RNA, 19 nt, Homo sapiens
  misc_RNA (1)...(19): siRNA sense strand
ggaccauggugauccacau

SEQ ID NO: 2498705 - RNA, 19 nt, Homo sapiens
  misc_RNA (1)...(19): siRNA sense strand
gugcggaagaugaaggcca

SEQ ID NO: 2498706 - RNA, 19 nt, Homo sapiens
  misc_RNA (1)...(19): siRNA sense strand
gauaaauccagcuccguau

SEQ ID NO: 2498707 - RNA, 19 nt, Homo sapiens
  misc_RNA (1)...(19): siRNA sense strand
gagaaagagauaagaaaag

SEQ ID NO: 2498708 - RNA, 19 nt, Homo sapiens
  misc_RNA (1)...(19): siRNA sense strand
cugaaggaaaucaacacaa

SEQ ID NO: 2498709 - RNA, 19 nt, Homo sapiens
  misc_RNA (1)...(19): siRNA sense strand
cacaggagaggaaggaaau

SEQ ID NO: 2498710 - RNA, 19 nt, Homo sapiens
  misc_RNA (1)...(19): siRNA sense strand
uggaugguacugagggaga

SEQ ID NO: 2498711 - RNA, 19 nt, Homo sapiens
  misc_RNA (1)...(19): siRNA sense strand
acacaaaccaggaagcucu

SEQ ID NO: 2498712 - RNA, 19 nt, Homo sapiens
  misc_RNA (1)...(19): siRNA sense strand
uggaacugaccgaauuaaa

SEQ ID NO: 2498713 - RNA, 19 nt, Homo sapiens
  misc_RNA (1)...(19): siRNA sense strand
agaaaugcuugauugcaga

SEQ ID NO: 2498714 - RNA, 19 nt, Homo sapiens
  misc_RNA (1)...(19): siRNA sense strand
acuuauaauuggacugaag

SEQ ID NO: 2498715 - RNA, 19 nt, Homo sapiens
  misc_RNA (1)...(19): siRNA sense strand
gaaauaaucuucaugaccu

SEQ ID NO: 2498716 - RNA, 19 nt, Homo sapiens
  misc_RNA (1)...(19): siRNA sense strand
gcauauucgggaagggaag

SEQ ID NO: 2498717 - RNA, 19 nt, Homo sapiens
  misc_RNA (1)...(19): siRNA sense strand
ucauuaaccgggagcgcau

SEQ ID NO: 2498718 - RNA, 19 nt, Homo sapiens
  misc_RNA (1)...(19): siRNA sense strand
gguccuucgccgucaguau

SEQ ID NO: 2498719 - RNA, 19 nt, Homo sapiens
  misc_RNA (1)...(19): siRNA sense strand
ugaaguuagaagaugugaa

SEQ ID NO: 2498720 - RNA, 19 nt, Homo sapiens
  misc_RNA (1)...(19): siRNA sense strand
aggccaauuuugagaagau

SEQ ID NO: 2498721 - RNA, 19 nt, Homo sapiens
  misc_RNA (1)...(19): siRNA sense strand
gagaggaaggaaauggcuu

SEQ ID NO: 2498722 - RNA, 19 nt, Homo sapiens
  misc_RNA (1)...(19): siRNA sense strand
cuuaauaucuuugggucau

SEQ ID NO: 2498723 - RNA, 19 nt, Homo sapiens
  misc_RNA (1)...(19): siRNA sense strand
gggucauccuggaguguac

SEQ ID NO: 2498724 - RNA, 19 nt, Homo sapiens
  misc_RNA (1)...(19): siRNA sense strand
gucaguauuugaggagaaa

SEQ ID NO: 2498725 - RNA, 19 nt, Homo sapiens
  misc_RNA (1)...(19): siRNA sense strand
gagaaagcauuugggaacu

SEQ ID NO: 2498726 - RNA, 19 nt, Homo sapiens
  misc_RNA (1)...(19): siRNA sense strand
guucaaaugucgaugcuac

SEQ ID NO: 2498727 - RNA, 19 nt, Homo sapiens
  misc_RNA (1)...(19): siRNA sense strand
guucaaaugucgaugcuac

SEQ ID NO: 2498728 - RNA, 19 nt, Homo sapiens
  misc_RNA (1)...(19): siRNA sense strand
guucaaaugucgaugcuac

SEQ ID NO: 2498729 - RNA, 19 nt, Homo sapiens
  misc_RNA (1)...(19): siRNA sense strand
guucaaaugucgaugcuac

SEQ ID NO: 2498730 - RNA, 19 nt, Homo sapiens
  misc_RNA (1)...(19): siRNA sense strand
guucaaaugucgaugcuac

SEQ ID NO: 2498731 - RNA, 19 nt, Homo sapiens
  misc_RNA (1)...(19): siRNA sense strand
guucaaaugucgaugcuac

SEQ ID NO: 2498732 - RNA, 19 nt, Homo sapiens
  misc_RNA (1)...(19): siRNA sense strand
guucaaaugucgaugcuac

SEQ ID NO: 2498733 - RNA, 19 nt, Homo sapiens
  misc_RNA (1)...(19): siRNA sense strand
gaaacuaugcagagcggau

SEQ ID NO: 2498734 - RNA, 19 nt, Homo sapiens
  misc_RNA (1)...(19): siRNA sense strand
cggcaguguuagaguaucu

SEQ ID NO: 2498735 - RNA, 19 nt, Homo sapiens
  misc_RNA (1)...(19): siRNA sense strand
ccauaaagcccaaagcaag

SEQ ID NO: 2498736 - RNA, 19 nt, Homo sapiens
  misc_RNA (1)...(19): siRNA sense strand
cgagggaagcagggaggaa

SEQ ID NO: 2498737 - RNA, 19 nt, Homo sapiens
  misc_RNA (1)...(19): siRNA sense strand
accauaaagcccaaagcaa

SEQ ID NO: 2498738 - RNA, 19 nt, Homo sapiens
  misc_RNA (1)...(19): siRNA sense strand
agggaagcagggaggaaaa

SEQ ID NO: 2498739 - RNA, 19 nt, Homo sapiens
  misc_RNA (1)...(19): siRNA sense strand
caacaaagaaguaugcuga

SEQ ID NO: 2498740 - RNA, 19 nt, Homo sapiens
  misc_RNA (1)...(19): siRNA sense strand
aagaaaucacugaagggaa

SEQ ID NO: 2498741 - RNA, 19 nt, Homo sapiens
  misc_RNA (1)...(19): siRNA sense strand
ccucggagcagaaggccaa

SEQ ID NO: 2498742 - RNA, 19 nt, Homo sapiens
  misc_RNA (1)...(19): siRNA sense strand
ccuccaaacggcagaccaa

SEQ ID NO: 2498743 - RNA, 19 nt, Homo sapiens
  misc_RNA (1)...(19): siRNA sense strand
gggaacagcuagcggcaag

SEQ ID NO: 2498744 - RNA, 19 nt, Homo sapiens
  misc_RNA (1)...(19): siRNA sense strand
gccagaagcagguggucau

SEQ ID NO: 2498745 - RNA, 19 nt, Homo sapiens
  misc_RNA (1)...(19): siRNA sense strand
gaucaucccuagaggugca

SEQ ID NO: 2498746 - RNA, 19 nt, Homo sapiens
  misc_RNA (1)...(19): siRNA sense strand
cgcagaguauuaagggaca

SEQ ID NO: 2498747 - RNA, 19 nt, Homo sapiens
  misc_RNA (1)...(19): siRNA sense strand
cucaaaacacucaaagaaa

SEQ ID NO: 2498748 - RNA, 19 nt, Homo sapiens
  misc_RNA (1)...(19): siRNA sense strand
gaggaauucugcuugccaa

SEQ ID NO: 2498749 - RNA, 19 nt, Homo sapiens
  misc_RNA (1)...(19): siRNA sense strand
gugcuaagaucgugcagcu

SEQ ID NO: 2498750 - RNA, 19 nt, Homo sapiens
  misc_RNA (1)...(19): siRNA sense strand
cgagagaggcagggaucuu

SEQ ID NO: 2498751 - RNA, 19 nt, Homo sapiens
  misc_RNA (1)...(19): siRNA sense strand
gauaugaaguccuggagca

SEQ ID NO: 2498752 - RNA, 19 nt, Homo sapiens
  misc_RNA (1)...(19): siRNA sense strand
cggccuugcuggauggagu

SEQ ID NO: 2498753 - RNA, 19 nt, Homo sapiens
  misc_RNA (1)...(19): siRNA sense strand
caaccagucuucaggagga

SEQ ID NO: 2498754 - RNA, 19 nt, Homo sapiens
  misc_RNA (1)...(19): siRNA sense strand
gcucagacagacagggaug

SEQ ID NO: 2498755 - RNA, 19 nt, Homo sapiens
  misc_RNA (1)...(19): siRNA sense strand
gcgugaugcugcuggcacu

SEQ ID NO: 2498756 - RNA, 19 nt, Homo sapiens
  misc_RNA (1)...(19): siRNA sense strand
gagcagaucaugaagucca

SEQ ID NO: 2498757 - RNA, 19 nt, Homo sapiens
  misc_RNA (1)...(19): siRNA sense strand
ggcacagccaagagcggua

SEQ ID NO: 2498758 - RNA, 19 nt, Homo sapiens
  misc_RNA (1)...(19): siRNA sense strand
aggauaugaacuugaggaa

SEQ ID NO: 2498759 - RNA, 19 nt, Homo sapiens
  misc_RNA (1)...(19): siRNA sense strand
gagccuuaucugaggauca

SEQ ID NO: 2498760 - RNA, 19 nt, Homo sapiens
  misc_RNA (1)...(19): siRNA sense strand
ccgcugugacccaggauau

SEQ ID NO: 2498761 - RNA, 19 nt, Homo sapiens
  misc_RNA (1)...(19): siRNA sense strand
caaugaggauggaaggucu

SEQ ID NO: 2498762 - RNA, 19 nt, Homo sapiens
  misc_RNA (1)...(19): siRNA sense strand
gaauuuuacaugcggcaaa

SEQ ID NO: 2498763 - RNA, 19 nt, Homo sapiens
  misc_RNA (1)...(19): siRNA sense strand
ggauggaaggucuugccaa

SEQ ID NO: 2498764 - RNA, 19 nt, Homo sapiens
  misc_RNA (1)...(19): siRNA sense strand
ccggacaaacccuguguau

SEQ ID NO: 2498765 - RNA, 19 nt, Homo sapiens
  misc_RNA (1)...(19): siRNA sense strand
aggccagugcuuagacauu

SEQ ID NO: 2498766 - RNA, 19 nt, Homo sapiens
  misc_RNA (1)...(19): siRNA sense strand
guuuaaaccacuagaacaa

SEQ ID NO: 2498767 - RNA, 19 nt, Homo sapiens
  misc_RNA (1)...(19): siRNA sense strand
aagaaagauuugacagcaa

SEQ ID NO: 2498768 - RNA, 19 nt, Homo sapiens
  misc_RNA (1)...(19): siRNA sense strand
gaagaaauaugcauggcaa

SEQ ID NO: 2498769 - RNA, 19 nt, Homo sapiens
  misc_RNA (1)...(19): siRNA sense strand
gagaaugaagagagaucaa

SEQ ID NO: 2498770 - RNA, 19 nt, Homo sapiens
  misc_RNA (1)...(19): siRNA sense strand
ccagaagagaccagaagaa

SEQ ID NO: 2498771 - RNA, 19 nt, Homo sapiens
  misc_RNA (1)...(19): siRNA sense strand
augcaaugguguaaagauu

SEQ ID NO: 2498772 - RNA, 19 nt, Homo sapiens
  misc_RNA (1)...(19): siRNA sense strand
caagagaaaagaagggaaa

SEQ ID NO: 2498773 - RNA, 19 nt, Homo sapiens
  misc_RNA (1)...(19): siRNA sense strand
ucguuagagauuagggaaa

SEQ ID NO: 2498774 - RNA, 19 nt, Homo sapiens
  misc_RNA (1)...(19): siRNA sense strand
ggauuacauuagaaggcaa

SEQ ID NO: 2498775 - RNA, 19 nt, Homo sapiens
  misc_RNA (1)...(19): siRNA sense strand
ggcaauagauggaguggca

SEQ ID NO: 2498776 - RNA, 19 nt, Homo sapiens
  misc_RNA (1)...(19): siRNA sense strand
gaagguuugccaagagaaa

SEQ ID NO: 2498777 - RNA, 19 nt, Homo sapiens
  misc_RNA (1)...(19): siRNA sense strand
ucaaggagguucagggcau

SEQ ID NO: 2498778 - RNA, 19 nt, Homo sapiens
  misc_RNA (1)...(19): siRNA sense strand
gcguggaagagaagccaaa

SEQ ID NO: 2498779 - RNA, 19 nt, Homo sapiens
  misc_RNA (1)...(19): siRNA sense strand
ggcaaagagcccagccuaa

SEQ ID NO: 2498780 - RNA, 19 nt, Homo sapiens
  misc_RNA (1)...(19): siRNA sense strand
agaagacgacagaaagaaa

SEQ ID NO: 2498781 - RNA, 19 nt, Homo sapiens
  misc_RNA (1)...(19): siRNA sense strand
aaaccuagugacugggaaa

SEQ ID NO: 2498782 - RNA, 19 nt, Homo sapiens
  misc_RNA (1)...(19): siRNA sense strand
gugcagaaggagaguuuau

SEQ ID NO: 2498783 - RNA, 19 nt, Homo sapiens
  misc_RNA (1)...(19): siRNA sense strand
aaccugagccagaggauaa

SEQ ID NO: 2498784 - RNA, 19 nt, Homo sapiens
  misc_RNA (1)...(19): siRNA sense strand
cuucgugaguauuuggaaa

SEQ ID NO: 2498785 - RNA, 19 nt, Homo sapiens
  misc_RNA (1)...(19): siRNA sense strand
ucccagagaaggaaggaaa

SEQ ID NO: 2498786 - RNA, 19 nt, Homo sapiens
  misc_RNA (1)...(19): siRNA sense strand
guggagggagacagggaua

SEQ ID NO: 2498787 - RNA, 19 nt, Homo sapiens
  misc_RNA (1)...(19): siRNA sense strand
cguuagagauuagggaaaa

SEQ ID NO: 2498788 - RNA, 19 nt, Homo sapiens
  misc_RNA (1)...(19): siRNA sense strand
ccagagaaggaaggaaaua

SEQ ID NO: 2498789 - RNA, 19 nt, Homo sapiens
  misc_RNA (1)...(19): siRNA sense strand
gauuacauuagaaggcaaa

SEQ ID NO: 2498790 - RNA, 19 nt, Homo sapiens
  misc_RNA (1)...(19): siRNA sense strand
ggaacugaauucauggaca

SEQ ID NO: 2498791 - RNA, 19 nt, Homo sapiens
  misc_RNA (1)...(19): siRNA sense strand
uggugaaggagaacauaaa

SEQ ID NO: 2498792 - RNA, 19 nt, Homo sapiens
  misc_RNA (1)...(19): siRNA sense strand
gaagagaagccaaaagaau

SEQ ID NO: 2498793 - RNA, 19 nt, Homo sapiens
  misc_RNA (1)...(19): siRNA sense strand
agagaaaggaugaugagga

SEQ ID NO: 2498794 - RNA, 19 nt, Homo sapiens
  misc_RNA (1)...(19): siRNA sense strand
gagaaaggaugaugaggac

SEQ ID NO: 2498795 - RNA, 19 nt, Homo sapiens
  misc_RNA (1)...(19): siRNA sense strand
augaaaugaugguugcaau

SEQ ID NO: 2498796 - RNA, 19 nt, Homo sapiens
  misc_RNA (1)...(19): siRNA sense strand
ugaaaugaugguugcaauu

SEQ ID NO: 2498797 - RNA, 19 nt, Homo sapiens
  misc_RNA (1)...(19): siRNA sense strand
ugugcuucuuugugggaaa

SEQ ID NO: 2498798 - RNA, 19 nt, Homo sapiens
  misc_RNA (1)...(19): siRNA sense strand
ccuuacagaaagugguuau

SEQ ID NO: 2498799 - RNA, 19 nt, Homo sapiens
  misc_RNA (1)...(19): siRNA sense strand
cguuuaaaccacuagaaca

SEQ ID NO: 2498800 - RNA, 19 nt, Homo sapiens
  misc_RNA (1)...(19): siRNA sense strand
gccaagaggcucaggaacu

SEQ ID NO: 2498801 - RNA, 19 nt, Homo sapiens
  misc_RNA (1)...(19): siRNA sense strand
gcgaaaagcagaagacagu

SEQ ID NO: 2498802 - RNA, 19 nt, Homo sapiens
  misc_RNA (1)...(19): siRNA sense strand
agacaaaccagcaccaaaa

SEQ ID NO: 2498803 - RNA, 19 nt, Homo sapiens
  misc_RNA (1)...(19): siRNA sense strand
uagaagagguauacccaga

SEQ ID NO: 2498804 - RNA, 19 nt, Homo sapiens
  misc_RNA (1)...(19): siRNA sense strand
uuuuagaagacgacagaaa

SEQ ID NO: 2498805 - RNA, 19 nt, Homo sapiens
  misc_RNA (1)...(19): siRNA sense strand
aggaagauacaauuggaau

SEQ ID NO: 2498806 - RNA, 19 nt, Homo sapiens
  misc_RNA (1)...(19): siRNA sense strand
uaauguucuucgugaguau

SEQ ID NO: 2498807 - RNA, 19 nt, Homo sapiens
  misc_RNA (1)...(19): siRNA sense strand
aagaaagccagcagcagua

SEQ ID NO: 2498808 - RNA, 19 nt, Homo sapiens
  misc_RNA (1)...(19): siRNA sense strand
uguaagaccaagaagacuu

SEQ ID NO: 2498809 - RNA, 19 nt, Homo sapiens
  misc_RNA (1)...(19): siRNA sense strand
cauguuagcaguuggugaa

SEQ ID NO: 2498810 - RNA, 19 nt, Homo sapiens
  misc_RNA (1)...(19): siRNA sense strand
ucaacugcguggaagagaa

SEQ ID NO: 2498811 - RNA, 19 nt, Homo sapiens
  misc_RNA (1)...(19): siRNA sense strand
agggaaagcaugaugaacu

SEQ ID NO: 2498812 - RNA, 19 nt, Homo sapiens
  misc_RNA (1)...(19): siRNA sense strand
cuacauggcaauagaugga

SEQ ID NO: 2498813 - RNA, 19 nt, Homo sapiens
  misc_RNA (1)...(19): siRNA sense strand
aagcagcagucgagaagca

SEQ ID NO: 2498814 - RNA, 19 nt, Homo sapiens
  misc_RNA (1)...(19): siRNA sense strand
ggaagaaauauuggcaaaa

SEQ ID NO: 2498815 - RNA, 19 nt, Homo sapiens
  misc_RNA (1)...(19): siRNA sense strand
agaacaaauuugaugugga

SEQ ID NO: 2498816 - RNA, 19 nt, Homo sapiens
  misc_RNA (1)...(19): siRNA sense strand
gagucagggaagaaauauu

SEQ ID NO: 2498817 - RNA, 19 nt, Homo sapiens
  misc_RNA (1)...(19): siRNA sense strand
aguuuggacaugaggucaa

SEQ ID NO: 2498818 - RNA, 19 nt, Homo sapiens
  misc_RNA (1)...(19): siRNA sense strand
uguaaagauuccaguugau

SEQ ID NO: 2498819 - RNA, 19 nt, Homo sapiens
  misc_RNA (1)...(19): siRNA sense strand
aggaugaugaggacaguuu

SEQ ID NO: 2498820 - RNA, 19 nt, Homo sapiens
  misc_RNA (1)...(19): siRNA sense strand
cuauugauuugaaugggaa

SEQ ID NO: 2498821 - RNA, 19 nt, Homo sapiens
  misc_RNA (1)...(19): siRNA sense strand
cagaaagugguuaugucaa

SEQ ID NO: 2498822 - RNA, 19 nt, Homo sapiens
  misc_RNA (1)...(19): siRNA sense strand
ugauuugaaugggaagaaa

SEQ ID NO: 2498823 - RNA, 19 nt, Homo sapiens
  misc_RNA (1)...(19): siRNA sense strand
gcaagaaggaagagggaga

SEQ ID NO: 2498824 - RNA, 19 nt, Homo sapiens
  misc_RNA (1)...(19): siRNA sense strand
caaagaagccaaagcagga

SEQ ID NO: 2498825 - RNA, 19 nt, Homo sapiens
  misc_RNA (1)...(19): siRNA sense strand
agccaaagcaggagccaga

SEQ ID NO: 2498826 - RNA, 19 nt, Homo sapiens
  misc_RNA (1)...(19): siRNA sense strand
aagaaggaagagggagaaa

SEQ ID NO: 2498827 - RNA, 19 nt, Homo sapiens
  misc_RNA (1)...(19): siRNA sense strand
cuaucgaagaccuggaaaa

SEQ ID NO: 2498828 - RNA, 19 nt, Homo sapiens
  misc_RNA (1)...(19): siRNA sense strand
uggcuauggguguggaaga

SEQ ID NO: 2498829 - RNA, 19 nt, Homo sapiens
  misc_RNA (1)...(19): siRNA sense strand
uggaagaauuuggagucaa

SEQ ID NO: 2498830 - RNA, 19 nt, Homo sapiens
  misc_RNA (1)...(19): siRNA sense strand
agugggacuuggugugcaa

SEQ ID NO: 2498831 - RNA, 19 nt, Homo sapiens
  misc_RNA (1)...(19): siRNA sense strand
ccaauaucaucuacgggau

SEQ ID NO: 2498832 - RNA, 19 nt, Homo sapiens
  misc_RNA (1)...(19): siRNA sense strand
gguuggucuugucuggaaa

SEQ ID NO: 2498833 - RNA, 19 nt, Homo sapiens
  misc_RNA (1)...(19): siRNA sense strand
uggcaagaaggaagaggga

SEQ ID NO: 2498834 - RNA, 19 nt, Homo sapiens
  misc_RNA (1)...(19): siRNA sense strand
cgggugagguacagcccuu

SEQ ID NO: 2498835 - RNA, 19 nt, Homo sapiens
  misc_RNA (1)...(19): siRNA sense strand
cggcaaugagccugagauu

SEQ ID NO: 2498836 - RNA, 19 nt, Homo sapiens
  misc_RNA (1)...(19): siRNA sense strand
caagaaugcugaugggacu

SEQ ID NO: 2498837 - RNA, 19 nt, Homo sapiens
  misc_RNA (1)...(19): siRNA sense strand
agcuaaaugcccugaacaa

SEQ ID NO: 2498838 - RNA, 19 nt, Homo sapiens
  misc_RNA (1)...(19): siRNA sense strand
cagaagagaugaagcagcu

SEQ ID NO: 2498839 - RNA, 19 nt, Homo sapiens
  misc_RNA (1)...(19): siRNA sense strand
aagagaugaagcagcuaaa

SEQ ID NO: 2498840 - RNA, 19 nt, Homo sapiens
  misc_RNA (1)...(19): siRNA sense strand
agguaaaagcagcuguuaa

SEQ ID NO: 2498841 - RNA, 19 nt, Homo sapiens
  misc_RNA (1)...(19): siRNA sense strand
gcuaauugcccacugccaa

SEQ ID NO: 2498842 - RNA, 19 nt, Homo sapiens
  misc_RNA (1)...(19): siRNA sense strand
uggcauuggcugaaaagua

SEQ ID NO: 2498843 - RNA, 19 nt, Homo sapiens
  misc_RNA (1)...(19): siRNA sense strand
cuucagaacaucaaggugu

SEQ ID NO: 2498844 - RNA, 19 nt, Homo sapiens
  misc_RNA (1)...(19): siRNA sense strand
cggcaaugagccugagauu

SEQ ID NO: 2498845 - RNA, 19 nt, Homo sapiens
  misc_RNA (1)...(19): siRNA sense strand
caagaaugcugaugggacu

SEQ ID NO: 2498846 - RNA, 19 nt, Homo sapiens
  misc_RNA (1)...(19): siRNA sense strand
agcuaaaugcccugaacaa

SEQ ID NO: 2498847 - RNA, 19 nt, Homo sapiens
  misc_RNA (1)...(19): siRNA sense strand
cagaagagaugaagcagcu

SEQ ID NO: 2498848 - RNA, 19 nt, Homo sapiens
  misc_RNA (1)...(19): siRNA sense strand
aagagaugaagcagcuaaa

SEQ ID NO: 2498849 - RNA, 19 nt, Homo sapiens
  misc_RNA (1)...(19): siRNA sense strand
agguaaaagcagcuguuaa

SEQ ID NO: 2498850 - RNA, 19 nt, Homo sapiens
  misc_RNA (1)...(19): siRNA sense strand
gcuaauugcccacugccaa

SEQ ID NO: 2498851 - RNA, 19 nt, Homo sapiens
  misc_RNA (1)...(19): siRNA sense strand
uggcauuggcugaaaagua

SEQ ID NO: 2498852 - RNA, 19 nt, Homo sapiens
  misc_RNA (1)...(19): siRNA sense strand
cuucagaacaucaaggugu

SEQ ID NO: 2498853 - RNA, 19 nt, Homo sapiens
  misc_RNA (1)...(19): siRNA sense strand
auauaaaggacgaggauga

SEQ ID NO: 2498854 - RNA, 19 nt, Homo sapiens
  misc_RNA (1)...(19): siRNA sense strand
gcaaagaacaagaagagga

SEQ ID NO: 2498855 - RNA, 19 nt, Homo sapiens
  misc_RNA (1)...(19): siRNA sense strand
guguaauaccacaggaaaa

SEQ ID NO: 2498856 - RNA, 19 nt, Homo sapiens
  misc_RNA (1)...(19): siRNA sense strand
ggaugaacgugaagccaga

SEQ ID NO: 2498857 - RNA, 19 nt, Homo sapiens
  misc_RNA (1)...(19): siRNA sense strand
ccuugaagcaaaagaguaa

SEQ ID NO: 2498858 - RNA, 19 nt, Homo sapiens
  misc_RNA (1)...(19): siRNA sense strand
ccaugaugaaaguguguua

SEQ ID NO: 2498859 - RNA, 19 nt, Homo sapiens
  misc_RNA (1)...(19): siRNA sense strand
cuguacuguuggagagauu

SEQ ID NO: 2498860 - RNA, 19 nt, Homo sapiens
  misc_RNA (1)...(19): siRNA sense strand
aggaagauauaaaggacga

SEQ ID NO: 2498861 - RNA, 19 nt, Homo sapiens
  misc_RNA (1)...(19): siRNA sense strand
uugaauacagagacagaaa

SEQ ID NO: 2498862 - RNA, 19 nt, Homo sapiens
  misc_RNA (1)...(19): siRNA sense strand
gguugaauacagagacaga

SEQ ID NO: 2498863 - RNA, 19 nt, Homo sapiens
  misc_RNA (1)...(19): siRNA sense strand
gcagauuguagaaaggcaa

SEQ ID NO: 2498864 - RNA, 19 nt, Homo sapiens
  misc_RNA (1)...(19): siRNA sense strand
gagagcaagaugaggccua

SEQ ID NO: 2498865 - RNA, 19 nt, Homo sapiens
  misc_RNA (1)...(19): siRNA sense strand
gaacaaaauaauugggacu

SEQ ID NO: 2498866 - RNA, 19 nt, Homo sapiens
  misc_RNA (1)...(19): siRNA sense strand
acgugaagccagagaaaau

SEQ ID NO: 2498867 - RNA, 19 nt, Homo sapiens
  misc_RNA (1)...(19): siRNA sense strand
guacuguuggagagauuaa

SEQ ID NO: 2498868 - RNA, 19 nt, Homo sapiens
  misc_RNA (1)...(19): siRNA sense strand
agacgggagauguggaaga

SEQ ID NO: 2498869 - RNA, 19 nt, Homo sapiens
  misc_RNA (1)...(19): siRNA sense strand
aaaugugaagagagagcaa

SEQ ID NO: 2498870 - RNA, 19 nt, Homo sapiens
  misc_RNA (1)...(19): siRNA sense strand
uggagagauuaaacagauu

SEQ ID NO: 2498871 - RNA, 19 nt, Homo sapiens
  misc_RNA (1)...(19): siRNA sense strand
ugaaugugauacaagggaa

SEQ ID NO: 2498872 - RNA, 19 nt, Homo sapiens
  misc_RNA (1)...(19): siRNA sense strand
augaaaguguguuaaccaa

SEQ ID NO: 2498873 - RNA, 19 nt, Homo sapiens
  misc_RNA (1)...(19): siRNA sense strand
caucuaaugaaguguugaa

SEQ ID NO: 2498874 - RNA, 19 nt, Homo sapiens
  misc_RNA (1)...(19): siRNA sense strand
agauauaaaggacgaggau

SEQ ID NO: 2498875 - RNA, 19 nt, Homo sapiens
  misc_RNA (1)...(19): siRNA sense strand
aggguugaauacagagaca

SEQ ID NO: 2498876 - RNA, 19 nt, Homo sapiens
  misc_RNA (1)...(19): siRNA sense strand
guuucuuaucugagucaaa

SEQ ID NO: 2498877 - RNA, 19 nt, Homo sapiens
  misc_RNA (1)...(19): siRNA sense strand
gggaaagcgaucaucuaau

SEQ ID NO: 2498878 - RNA, 19 nt, Homo sapiens
  misc_RNA (1)...(19): siRNA sense strand
agguaaaguuguucccuca

SEQ ID NO: 2498879 - RNA, 19 nt, Homo sapiens
  misc_RNA (1)...(19): siRNA sense strand
cccaacaacaggaagauau

SEQ ID NO: 2498880 - RNA, 19 nt, Homo sapiens
  misc_RNA (1)...(19): siRNA sense strand
gggacuuaguggcagcuau

SEQ ID NO: 2498881 - RNA, 19 nt, Homo sapiens
  misc_RNA (1)...(19): siRNA sense strand
gggagaugauccuggcgga

SEQ ID NO: 2498882 - RNA, 19 nt, Homo sapiens
  misc_RNA (1)...(19): siRNA sense strand
caauagacacuuuggcagu

SEQ ID NO: 2498883 - RNA, 19 nt, Homo sapiens
  misc_RNA (1)...(19): siRNA sense strand
cauuauuggagguaaaguu

SEQ ID NO: 2498884 - RNA, 19 nt, Homo sapiens
  misc_RNA (1)...(19): siRNA sense strand
gcacaaaccauucggacuc

SEQ ID NO: 2498885 - RNA, 19 nt, Homo sapiens
  misc_RNA (1)...(19): siRNA sense strand
ggaagaaaaugcugagccu

SEQ ID NO: 2498886 - RNA, 19 nt, Homo sapiens
  misc_RNA (1)...(19): siRNA sense strand
gauuauuaugggaaagcga

SEQ ID NO: 2498887 - RNA, 19 nt, Homo sapiens
  misc_RNA (1)...(19): siRNA sense strand
aggacgaggaugaacguga

SEQ ID NO: 2498888 - RNA, 19 nt, Homo sapiens
  misc_RNA (1)...(19): siRNA sense strand
ccggcuguccuuagagcaa

SEQ ID NO: 2498889 - RNA, 19 nt, Homo sapiens
  misc_RNA (1)...(19): siRNA sense strand
uguccaaaaugcuguuaaa

SEQ ID NO: 2498890 - RNA, 19 nt, Homo sapiens
  misc_RNA (1)...(19): siRNA sense strand
augugaagagagagcaaga

SEQ ID NO: 2498891 - RNA, 19 nt, Homo sapiens
  misc_RNA (1)...(19): siRNA sense strand
cagcccaacaacaggaaga

SEQ ID NO: 2498892 - RNA, 19 nt, Homo sapiens
  misc_RNA (1)...(19): siRNA sense strand
caaaggauuuccaugggau

SEQ ID NO: 2498893 - RNA, 19 nt, Homo sapiens
  misc_RNA (1)...(19): siRNA sense strand
gagagauggcagaacaguu

SEQ ID NO: 2498894 - RNA, 19 nt, Homo sapiens
  misc_RNA (1)...(19): siRNA sense strand
ugaagagagagcaagauga

SEQ ID NO: 2498895 - RNA, 19 nt, Homo sapiens
  misc_RNA (1)...(19): siRNA sense strand
aagaggaacgugaggccau

SEQ ID NO: 2498896 - RNA, 19 nt, Homo sapiens
  misc_RNA (1)...(19): siRNA sense strand
uccugauuauuaugggaaa

SEQ ID NO: 2498897 - RNA, 19 nt, Homo sapiens
  misc_RNA (1)...(19): siRNA sense strand
ugacagagcaaagagggaa

SEQ ID NO: 2498898 - RNA, 19 nt, Homo sapiens
  misc_RNA (1)...(19): siRNA sense strand
gaagcucacgagagagaga

SEQ ID NO: 2498899 - RNA, 19 nt, Homo sapiens
  misc_RNA (1)...(19): siRNA sense strand
aacaagaagaggaacguga

SEQ ID NO: 2498900 - RNA, 19 nt, Homo sapiens
  misc_RNA (1)...(19): siRNA sense strand
cugacagagcaaagaggga

SEQ ID NO: 2498901 - RNA, 19 nt, Homo sapiens
  misc_RNA (1)...(19): siRNA sense strand
auauaaaggacgaggauga

SEQ ID NO: 2498902 - RNA, 19 nt, Homo sapiens
  misc_RNA (1)...(19): siRNA sense strand
gcaaagaacaagaagagga

SEQ ID NO: 2498903 - RNA, 19 nt, Homo sapiens
  misc_RNA (1)...(19): siRNA sense strand
guguaauaccacaggaaaa

SEQ ID NO: 2498904 - RNA, 19 nt, Homo sapiens
  misc_RNA (1)...(19): siRNA sense strand
ggaugaacgugaagccaga

SEQ ID NO: 2498905 - RNA, 19 nt, Homo sapiens
  misc_RNA (1)...(19): siRNA sense strand
ccuugaagcaaaagaguaa

SEQ ID NO: 2498906 - RNA, 19 nt, Homo sapiens
  misc_RNA (1)...(19): siRNA sense strand
ccaugaugaaaguguguua

SEQ ID NO: 2498907 - RNA, 19 nt, Homo sapiens
  misc_RNA (1)...(19): siRNA sense strand
cuguacuguuggagagauu

SEQ ID NO: 2498908 - RNA, 19 nt, Homo sapiens
  misc_RNA (1)...(19): siRNA sense strand
aggaagauauaaaggacga

SEQ ID NO: 2498909 - RNA, 19 nt, Homo sapiens
  misc_RNA (1)...(19): siRNA sense strand
uugaauacagagacagaaa

SEQ ID NO: 2498910 - RNA, 19 nt, Homo sapiens
  misc_RNA (1)...(19): siRNA sense strand
gguugaauacagagacaga

SEQ ID NO: 2498911 - RNA, 19 nt, Homo sapiens
  misc_RNA (1)...(19): siRNA sense strand
gcagauuguagaaaggcaa

SEQ ID NO: 2498912 - RNA, 19 nt, Homo sapiens
  misc_RNA (1)...(19): siRNA sense strand
gagagcaagaugaggccua

SEQ ID NO: 2498913 - RNA, 19 nt, Homo sapiens
  misc_RNA (1)...(19): siRNA sense strand
gaacaaaauaauugggacu

SEQ ID NO: 2498914 - RNA, 19 nt, Homo sapiens
  misc_RNA (1)...(19): siRNA sense strand
acgugaagccagagaaaau

SEQ ID NO: 2498915 - RNA, 19 nt, Homo sapiens
  misc_RNA (1)...(19): siRNA sense strand
guacuguuggagagauuaa

SEQ ID NO: 2498916 - RNA, 19 nt, Homo sapiens
  misc_RNA (1)...(19): siRNA sense strand
agacgggagauguggaaga

SEQ ID NO: 2498917 - RNA, 19 nt, Homo sapiens
  misc_RNA (1)...(19): siRNA sense strand
aaaugugaagagagagcaa

SEQ ID NO: 2498918 - RNA, 19 nt, Homo sapiens
  misc_RNA (1)...(19): siRNA sense strand
uggagagauuaaacagauu

SEQ ID NO: 2498919 - RNA, 19 nt, Homo sapiens
  misc_RNA (1)...(19): siRNA sense strand
ugaaugugauacaagggaa

SEQ ID NO: 2498920 - RNA, 19 nt, Homo sapiens
  misc_RNA (1)...(19): siRNA sense strand
augaaaguguguuaaccaa

SEQ ID NO: 2498921 - RNA, 19 nt, Homo sapiens
  misc_RNA (1)...(19): siRNA sense strand
caucuaaugaaguguugaa

SEQ ID NO: 2498922 - RNA, 19 nt, Homo sapiens
  misc_RNA (1)...(19): siRNA sense strand
agauauaaaggacgaggau

SEQ ID NO: 2498923 - RNA, 19 nt, Homo sapiens
  misc_RNA (1)...(19): siRNA sense strand
aggguugaauacagagaca

SEQ ID NO: 2498924 - RNA, 19 nt, Homo sapiens
  misc_RNA (1)...(19): siRNA sense strand
guuucuuaucugagucaaa

SEQ ID NO: 2498925 - RNA, 19 nt, Homo sapiens
  misc_RNA (1)...(19): siRNA sense strand
gggaaagcgaucaucuaau

SEQ ID NO: 2498926 - RNA, 19 nt, Homo sapiens
  misc_RNA (1)...(19): siRNA sense strand
agguaaaguuguucccuca

SEQ ID NO: 2498927 - RNA, 19 nt, Homo sapiens
  misc_RNA (1)...(19): siRNA sense strand
cccaacaacaggaagauau

SEQ ID NO: 2498928 - RNA, 19 nt, Homo sapiens
  misc_RNA (1)...(19): siRNA sense strand
gggacuuaguggcagcuau

SEQ ID NO: 2498929 - RNA, 19 nt, Homo sapiens
  misc_RNA (1)...(19): siRNA sense strand
gggagaugauccuggcgga

SEQ ID NO: 2498930 - RNA, 19 nt, Homo sapiens
  misc_RNA (1)...(19): siRNA sense strand
caauagacacuuuggcagu

SEQ ID NO: 2498931 - RNA, 19 nt, Homo sapiens
  misc_RNA (1)...(19): siRNA sense strand
cauuauuggagguaaaguu

SEQ ID NO: 2498932 - RNA, 19 nt, Homo sapiens
  misc_RNA (1)...(19): siRNA sense strand
gcacaaaccauucggacuc

SEQ ID NO: 2498933 - RNA, 19 nt, Homo sapiens
  misc_RNA (1)...(19): siRNA sense strand
ggaagaaaaugcugagccu

SEQ ID NO: 2498934 - RNA, 19 nt, Homo sapiens
  misc_RNA (1)...(19): siRNA sense strand
gauuauuaugggaaagcga

SEQ ID NO: 2498935 - RNA, 19 nt, Homo sapiens
  misc_RNA (1)...(19): siRNA sense strand
aggacgaggaugaacguga

SEQ ID NO: 2498936 - RNA, 19 nt, Homo sapiens
  misc_RNA (1)...(19): siRNA sense strand
ccggcuguccuuagagcaa

SEQ ID NO: 2498937 - RNA, 19 nt, Homo sapiens
  misc_RNA (1)...(19): siRNA sense strand
uguccaaaaugcuguuaaa

SEQ ID NO: 2498938 - RNA, 19 nt, Homo sapiens
  misc_RNA (1)...(19): siRNA sense strand
augugaagagagagcaaga

SEQ ID NO: 2498939 - RNA, 19 nt, Homo sapiens
  misc_RNA (1)...(19): siRNA sense strand
cagcccaacaacaggaaga

SEQ ID NO: 2498940 - RNA, 19 nt, Homo sapiens
  misc_RNA (1)...(19): siRNA sense strand
caaaggauuuccaugggau

SEQ ID NO: 2498941 - RNA, 19 nt, Homo sapiens
  misc_RNA (1)...(19): siRNA sense strand
gagagauggcagaacaguu

SEQ ID NO: 2498942 - RNA, 19 nt, Homo sapiens
  misc_RNA (1)...(19): siRNA sense strand
ugaagagagagcaagauga

SEQ ID NO: 2498943 - RNA, 19 nt, Homo sapiens
  misc_RNA (1)...(19): siRNA sense strand
aagaggaacgugaggccau

SEQ ID NO: 2498944 - RNA, 19 nt, Homo sapiens
  misc_RNA (1)...(19): siRNA sense strand
uccugauuauuaugggaaa

SEQ ID NO: 2498945 - RNA, 19 nt, Homo sapiens
  misc_RNA (1)...(19): siRNA sense strand
ugacagagcaaagagggaa

SEQ ID NO: 2498946 - RNA, 19 nt, Homo sapiens
  misc_RNA (1)...(19): siRNA sense strand
gaagcucacgagagagaga

SEQ ID NO: 2498947 - RNA, 19 nt, Homo sapiens
  misc_RNA (1)...(19): siRNA sense strand
aacaagaagaggaacguga

SEQ ID NO: 2498948 - RNA, 19 nt, Homo sapiens
  misc_RNA (1)...(19): siRNA sense strand
cugacagagcaaagaggga

SEQ ID NO: 2498949 - RNA, 19 nt, Homo sapiens
  misc_RNA (1)...(19): siRNA sense strand
gggagaagaucaaggccaa

SEQ ID NO: 2498950 - RNA, 19 nt, Homo sapiens
  misc_RNA (1)...(19): siRNA sense strand
ggcagugggagaagaucaa

SEQ ID NO: 2498951 - RNA, 19 nt, Homo sapiens
  misc_RNA (1)...(19): siRNA sense strand
aagaaguggccgauagguu

SEQ ID NO: 2498952 - RNA, 19 nt, Homo sapiens
  misc_RNA (1)...(19): siRNA sense strand
cuggaaggaacaacaagaa

SEQ ID NO: 2498953 - RNA, 19 nt, Homo sapiens
  misc_RNA (1)...(19): siRNA sense strand
cuuucagaacacagaguuu

SEQ ID NO: 2498954 - RNA, 19 nt, Homo sapiens
  misc_RNA (1)...(19): siRNA sense strand
uggcagugggagaagauca

SEQ ID NO: 2498955 - RNA, 19 nt, Homo sapiens
  misc_RNA (1)...(19): siRNA sense strand
gaugaaaaugagcgugcaa

SEQ ID NO: 2498956 - RNA, 19 nt, Homo sapiens
  misc_RNA (1)...(19): siRNA sense strand
uggaaaccaaauugcacaa

SEQ ID NO: 2498957 - RNA, 19 nt, Homo sapiens
  misc_RNA (1)...(19): siRNA sense strand
gggagaagaucaaggccaa

SEQ ID NO: 2498958 - RNA, 19 nt, Homo sapiens
  misc_RNA (1)...(19): siRNA sense strand
ggcagugggagaagaucaa

SEQ ID NO: 2498959 - RNA, 19 nt, Homo sapiens
  misc_RNA (1)...(19): siRNA sense strand
aagaaguggccgauagguu

SEQ ID NO: 2498960 - RNA, 19 nt, Homo sapiens
  misc_RNA (1)...(19): siRNA sense strand
cuggaaggaacaacaagaa

SEQ ID NO: 2498961 - RNA, 19 nt, Homo sapiens
  misc_RNA (1)...(19): siRNA sense strand
cuuucagaacacagaguuu

SEQ ID NO: 2498962 - RNA, 19 nt, Homo sapiens
  misc_RNA (1)...(19): siRNA sense strand
uggcagugggagaagauca

SEQ ID NO: 2498963 - RNA, 19 nt, Homo sapiens
  misc_RNA (1)...(19): siRNA sense strand
gaugaaaaugagcgugcaa

SEQ ID NO: 2498964 - RNA, 19 nt, Homo sapiens
  misc_RNA (1)...(19): siRNA sense strand
uggaaaccaaauugcacaa

SEQ ID NO: 2498965 - RNA, 19 nt, Homo sapiens
  misc_RNA (1)...(19): siRNA sense strand
gaaccaaguuugagacgga

SEQ ID NO: 2498966 - RNA, 19 nt, Homo sapiens
  misc_RNA (1)...(19): siRNA sense strand
gagcagaaccggaaggaug

SEQ ID NO: 2498967 - RNA, 19 nt, Homo sapiens
  misc_RNA (1)...(19): siRNA sense strand
gcguggaggccgacaucaa

SEQ ID NO: 2498968 - RNA, 19 nt, Homo sapiens
  misc_RNA (1)...(19): siRNA sense strand
agaagaaccaugaggagga

SEQ ID NO: 2498969 - RNA, 19 nt, Homo sapiens
  misc_RNA (1)...(19): siRNA sense strand
acggcgagcuagaggugaa

SEQ ID NO: 2498970 - RNA, 19 nt, Homo sapiens
  misc_RNA (1)...(19): siRNA sense strand
cggaacaggcucugcgcau

SEQ ID NO: 2498971 - RNA, 19 nt, Homo sapiens
  misc_RNA (1)...(19): siRNA sense strand
aggucauggccgagcagaa

SEQ ID NO: 2498972 - RNA, 19 nt, Homo sapiens
  misc_RNA (1)...(19): siRNA sense strand
ugaaggaagagcuggccua

SEQ ID NO: 2498973 - RNA, 19 nt, Homo sapiens
  misc_RNA (1)...(19): siRNA sense strand
agaaccaugaggaggaaau

SEQ ID NO: 2498974 - RNA, 19 nt, Homo sapiens
  misc_RNA (1)...(19): siRNA sense strand
gcugauagugagcggcaga

SEQ ID NO: 2498975 - RNA, 19 nt, Homo sapiens
  misc_RNA (1)...(19): siRNA sense strand
uggaagacacacuggcaga

SEQ ID NO: 2498976 - RNA, 19 nt, Homo sapiens
  misc_RNA (1)...(19): siRNA sense strand
cugaagaauugaaccggga

SEQ ID NO: 2498977 - RNA, 19 nt, Homo sapiens
  misc_RNA (1)...(19): siRNA sense strand
ggugaaagcuauuggcauc

SEQ ID NO: 2498978 - RNA, 19 nt, Homo sapiens
  misc_RNA (1)...(19): siRNA sense strand
gcugagaacuuuaaggucu

SEQ ID NO: 2498979 - RNA, 19 nt, Homo sapiens
  misc_RNA (1)...(19): siRNA sense strand
ugagaagggccuggugaaa

SEQ ID NO: 2498980 - RNA, 19 nt, Homo sapiens
  misc_RNA (1)...(19): siRNA sense strand
agaggaacuugguggugau

SEQ ID NO: 2498981 - RNA, 19 nt, Homo sapiens
  misc_RNA (1)...(19): siRNA sense strand
augagaagggccuggugaa

SEQ ID NO: 2498982 - RNA, 19 nt, Homo sapiens
  misc_RNA (1)...(19): siRNA sense strand
cauuggaugagucgggcaa

SEQ ID NO: 2498983 - RNA, 19 nt, Homo sapiens
  misc_RNA (1)...(19): siRNA sense strand
uggaugaagggcuggugaa

SEQ ID NO: 2498984 - RNA, 19 nt, Homo sapiens
  misc_RNA (1)...(19): siRNA sense strand
aacaggaacuggagggucu

SEQ ID NO: 2498985 - RNA, 19 nt, Homo sapiens
  misc_RNA (1)...(19): siRNA sense strand
gugaaaggagccugccaga

SEQ ID NO: 2498986 - RNA, 19 nt, Homo sapiens
  misc_RNA (1)...(19): siRNA sense strand
cuuuaagccugggaaggaa

SEQ ID NO: 2498987 - RNA, 19 nt, Homo sapiens
  misc_RNA (1)...(19): siRNA sense strand
cagaggaacuuggugguga

SEQ ID NO: 2498988 - RNA, 19 nt, Homo sapiens
  misc_RNA (1)...(19): siRNA sense strand
ggacaauggcucugcgguu

SEQ ID NO: 2498989 - RNA, 19 nt, Homo sapiens
  misc_RNA (1)...(19): siRNA sense strand
gggaggaagccgaugcuga

SEQ ID NO: 2498990 - RNA, 19 nt, Homo sapiens
  misc_RNA (1)...(19): siRNA sense strand
ggcugauuauuaagggcaa

SEQ ID NO: 2498991 - RNA, 19 nt, Homo sapiens
  misc_RNA (1)...(19): siRNA sense strand
gcugauuauuaagggcaaa

SEQ ID NO: 2498992 - RNA, 19 nt, Homo sapiens
  misc_RNA (1)...(19): siRNA sense strand
ccaugacgguggugggaug

SEQ ID NO: 2498993 - RNA, 19 nt, Homo sapiens
  misc_RNA (1)...(19): siRNA sense strand
ggaugacagcagauggcau

SEQ ID NO: 2498994 - RNA, 19 nt, Homo sapiens
  misc_RNA (1)...(19): siRNA sense strand
ccaacaugcuggugccgca

SEQ ID NO: 2498995 - RNA, 19 nt, Homo sapiens
  misc_RNA (1)...(19): siRNA sense strand
cccaagaagcagaggaaga

SEQ ID NO: 2498996 - RNA, 19 nt, Homo sapiens
  misc_RNA (1)...(19): siRNA sense strand
caaaagagaccuuggccaa

SEQ ID NO: 2498997 - RNA, 19 nt, Homo sapiens
  misc_RNA (1)...(19): siRNA sense strand
agaaggaccucuuugggaa

SEQ ID NO: 2498998 - RNA, 19 nt, Homo sapiens
  misc_RNA (1)...(19): siRNA sense strand
gaacaauggcagauggauc

SEQ ID NO: 2498999 - RNA, 19 nt, Homo sapiens
  misc_RNA (1)...(19): siRNA sense strand
acgaauaucugucggccau

SEQ ID NO: 2499000 - RNA, 19 nt, Homo sapiens
  misc_RNA (1)...(19): siRNA sense strand
ggaauagacuuuacagccu

SEQ ID NO: 2499001 - RNA, 19 nt, Homo sapiens
  misc_RNA (1)...(19): siRNA sense strand
cagaggaagaagaagaacu

SEQ ID NO: 2499002 - RNA, 19 nt, Homo sapiens
  misc_RNA (1)...(19): siRNA sense strand
aagaagcagaggaagaaga

SEQ ID NO: 2499003 - RNA, 19 nt, Homo sapiens
  misc_RNA (1)...(19): siRNA sense strand
ccugcaagauaaaccgaga

SEQ ID NO: 2499004 - RNA, 19 nt, Homo sapiens
  misc_RNA (1)...(19): siRNA sense strand
caggacuacgacagugaua

SEQ ID NO: 2499005 - RNA, 19 nt, Homo sapiens
  misc_RNA (1)...(19): siRNA sense strand
ucaucgugggcgugggcaa

SEQ ID NO: 2499006 - RNA, 19 nt, Homo sapiens
  misc_RNA (1)...(19): siRNA sense strand
ccucuuugcacuauaucaa

SEQ ID NO: 2499007 - RNA, 19 nt, Homo sapiens
  misc_RNA (1)...(19): siRNA sense strand
aguauuagugaguggguaa

SEQ ID NO: 2499008 - RNA, 19 nt, Homo sapiens
  misc_RNA (1)...(19): siRNA sense strand
cugcaggggcauagacaaa

SEQ ID NO: 2499009 - RNA, 19 nt, Homo sapiens
  misc_RNA (1)...(19): siRNA sense strand
aagcaauacuucuacgaga

SEQ ID NO: 2499010 - RNA, 19 nt, Homo sapiens
  misc_RNA (1)...(19): siRNA sense strand
agcaaacauccgaggacaa

SEQ ID NO: 2499011 - RNA, 19 nt, Homo sapiens
  misc_RNA (1)...(19): siRNA sense strand
gggcauagacaaaaggcau

SEQ ID NO: 2499012 - RNA, 19 nt, Homo sapiens
  misc_RNA (1)...(19): siRNA sense strand
ccaugaaagaagcaaacau

SEQ ID NO: 2499013 - RNA, 19 nt, Homo sapiens
  misc_RNA (1)...(19): siRNA sense strand
ucuacgagaccaagugcaa

SEQ ID NO: 2499014 - RNA, 19 nt, Homo sapiens
  misc_RNA (1)...(19): siRNA sense strand
cuuucgaacacgugauaga

SEQ ID NO: 2499015 - RNA, 19 nt, Homo sapiens
  misc_RNA (1)...(19): siRNA sense strand
uggaugaggaccagaaagu

SEQ ID NO: 2499016 - RNA, 19 nt, Homo sapiens
  misc_RNA (1)...(19): siRNA sense strand
uuguacacguccaggguga

SEQ ID NO: 2499017 - RNA, 19 nt, Homo sapiens
  misc_RNA (1)...(19): siRNA sense strand
gcucaguagucaagugccu

SEQ ID NO: 2499018 - RNA, 19 nt, Homo sapiens
  misc_RNA (1)...(19): siRNA sense strand
ucgaacacgugauagaaga

SEQ ID NO: 2499019 - RNA, 19 nt, Homo sapiens
  misc_RNA (1)...(19): siRNA sense strand
ggugaugcucaguagucaa

SEQ ID NO: 2499020 - RNA, 19 nt, Homo sapiens
  misc_RNA (1)...(19): siRNA sense strand
gacaaaaggcauuggaacu

SEQ ID NO: 2499021 - RNA, 19 nt, Homo sapiens
  misc_RNA (1)...(19): siRNA sense strand
ccagaaaguucggcccaau

SEQ ID NO: 2499022 - RNA, 19 nt, Homo sapiens
  misc_RNA (1)...(19): siRNA sense strand
cuggcgauucauaaggaua

SEQ ID NO: 2499023 - RNA, 19 nt, Homo sapiens
  misc_RNA (1)...(19): siRNA sense strand
auucauaaggauagacacu

SEQ ID NO: 2499024 - RNA, 19 nt, Homo sapiens
  misc_RNA (1)...(19): siRNA sense strand
aguauuagugaguggguaa

SEQ ID NO: 2499025 - RNA, 19 nt, Homo sapiens
  misc_RNA (1)...(19): siRNA sense strand
cugcaggggcauagacaaa

SEQ ID NO: 2499026 - RNA, 19 nt, Homo sapiens
  misc_RNA (1)...(19): siRNA sense strand
aagcaauacuucuacgaga

SEQ ID NO: 2499027 - RNA, 19 nt, Homo sapiens
  misc_RNA (1)...(19): siRNA sense strand
agcaaacauccgaggacaa

SEQ ID NO: 2499028 - RNA, 19 nt, Homo sapiens
  misc_RNA (1)...(19): siRNA sense strand
gggcauagacaaaaggcau

SEQ ID NO: 2499029 - RNA, 19 nt, Homo sapiens
  misc_RNA (1)...(19): siRNA sense strand
ccaugaaagaagcaaacau

SEQ ID NO: 2499030 - RNA, 19 nt, Homo sapiens
  misc_RNA (1)...(19): siRNA sense strand
ucuacgagaccaagugcaa

SEQ ID NO: 2499031 - RNA, 19 nt, Homo sapiens
  misc_RNA (1)...(19): siRNA sense strand
uuguacacguccaggguga

SEQ ID NO: 2499032 - RNA, 19 nt, Homo sapiens
  misc_RNA (1)...(19): siRNA sense strand
gcucaguagucaagugccu

SEQ ID NO: 2499033 - RNA, 19 nt, Homo sapiens
  misc_RNA (1)...(19): siRNA sense strand
ggugaugcucaguagucaa

SEQ ID NO: 2499034 - RNA, 19 nt, Homo sapiens
  misc_RNA (1)...(19): siRNA sense strand
gacaaaaggcauuggaacu

SEQ ID NO: 2499035 - RNA, 19 nt, Homo sapiens
  misc_RNA (1)...(19): siRNA sense strand
cuggcgauucauaaggaua

SEQ ID NO: 2499036 - RNA, 19 nt, Homo sapiens
  misc_RNA (1)...(19): siRNA sense strand
auucauaaggauagacacu

SEQ ID NO: 2499037 - RNA, 19 nt, Homo sapiens
  misc_RNA (1)...(19): siRNA sense strand
aguauuagugaguggguaa

SEQ ID NO: 2499038 - RNA, 19 nt, Homo sapiens
  misc_RNA (1)...(19): siRNA sense strand
cugcaggggcauagacaaa

SEQ ID NO: 2499039 - RNA, 19 nt, Homo sapiens
  misc_RNA (1)...(19): siRNA sense strand
aagcaauacuucuacgaga

SEQ ID NO: 2499040 - RNA, 19 nt, Homo sapiens
  misc_RNA (1)...(19): siRNA sense strand
agcaaacauccgaggacaa

SEQ ID NO: 2499041 - RNA, 19 nt, Homo sapiens
  misc_RNA (1)...(19): siRNA sense strand
gggcauagacaaaaggcau

SEQ ID NO: 2499042 - RNA, 19 nt, Homo sapiens
  misc_RNA (1)...(19): siRNA sense strand
ccaugaaagaagcaaacau

SEQ ID NO: 2499043 - RNA, 19 nt, Homo sapiens
  misc_RNA (1)...(19): siRNA sense strand
ucuacgagaccaagugcaa

SEQ ID NO: 2499044 - RNA, 19 nt, Homo sapiens
  misc_RNA (1)...(19): siRNA sense strand
uuguacacguccaggguga

SEQ ID NO: 2499045 - RNA, 19 nt, Homo sapiens
  misc_RNA (1)...(19): siRNA sense strand
gcucaguagucaagugccu

SEQ ID NO: 2499046 - RNA, 19 nt, Homo sapiens
  misc_RNA (1)...(19): siRNA sense strand
ggugaugcucaguagucaa

SEQ ID NO: 2499047 - RNA, 19 nt, Homo sapiens
  misc_RNA (1)...(19): siRNA sense strand
gacaaaaggcauuggaacu

SEQ ID NO: 2499048 - RNA, 19 nt, Homo sapiens
  misc_RNA (1)...(19): siRNA sense strand
cuggcgauucauaaggaua

SEQ ID NO: 2499049 - RNA, 19 nt, Homo sapiens
  misc_RNA (1)...(19): siRNA sense strand
auucauaaggauagacacu

SEQ ID NO: 2499050 - RNA, 19 nt, Homo sapiens
  misc_RNA (1)...(19): siRNA sense strand
aguauuagugaguggguaa

SEQ ID NO: 2499051 - RNA, 19 nt, Homo sapiens
  misc_RNA (1)...(19): siRNA sense strand
cugcaggggcauagacaaa

SEQ ID NO: 2499052 - RNA, 19 nt, Homo sapiens
  misc_RNA (1)...(19): siRNA sense strand
aagcaauacuucuacgaga

SEQ ID NO: 2499053 - RNA, 19 nt, Homo sapiens
  misc_RNA (1)...(19): siRNA sense strand
agcaaacauccgaggacaa

SEQ ID NO: 2499054 - RNA, 19 nt, Homo sapiens
  misc_RNA (1)...(19): siRNA sense strand
gggcauagacaaaaggcau

SEQ ID NO: 2499055 - RNA, 19 nt, Homo sapiens
  misc_RNA (1)...(19): siRNA sense strand
ccaugaaagaagcaaacau

SEQ ID NO: 2499056 - RNA, 19 nt, Homo sapiens
  misc_RNA (1)...(19): siRNA sense strand
ucuacgagaccaagugcaa

SEQ ID NO: 2499057 - RNA, 19 nt, Homo sapiens
  misc_RNA (1)...(19): siRNA sense strand
cuuucgaacacgugauaga

SEQ ID NO: 2499058 - RNA, 19 nt, Homo sapiens
  misc_RNA (1)...(19): siRNA sense strand
uggaugaggaccagaaagu

SEQ ID NO: 2499059 - RNA, 19 nt, Homo sapiens
  misc_RNA (1)...(19): siRNA sense strand
uuguacacguccaggguga

SEQ ID NO: 2499060 - RNA, 19 nt, Homo sapiens
  misc_RNA (1)...(19): siRNA sense strand
gcucaguagucaagugccu

SEQ ID NO: 2499061 - RNA, 19 nt, Homo sapiens
  misc_RNA (1)...(19): siRNA sense strand
ucgaacacgugauagaaga

SEQ ID NO: 2499062 - RNA, 19 nt, Homo sapiens
  misc_RNA (1)...(19): siRNA sense strand
ggugaugcucaguagucaa

SEQ ID NO: 2499063 - RNA, 19 nt, Homo sapiens
  misc_RNA (1)...(19): siRNA sense strand
gacaaaaggcauuggaacu

SEQ ID NO: 2499064 - RNA, 19 nt, Homo sapiens
  misc_RNA (1)...(19): siRNA sense strand
ccagaaaguucggcccaau

SEQ ID NO: 2499065 - RNA, 19 nt, Homo sapiens
  misc_RNA (1)...(19): siRNA sense strand
cuggcgauucauaaggaua

SEQ ID NO: 2499066 - RNA, 19 nt, Homo sapiens
  misc_RNA (1)...(19): siRNA sense strand
auucauaaggauagacacu

SEQ ID NO: 2499067 - RNA, 19 nt, Homo sapiens
  misc_RNA (1)...(19): siRNA sense strand
aguauuagugaguggguaa

SEQ ID NO: 2499068 - RNA, 19 nt, Homo sapiens
  misc_RNA (1)...(19): siRNA sense strand
cugcaggggcauagacaaa

SEQ ID NO: 2499069 - RNA, 19 nt, Homo sapiens
  misc_RNA (1)...(19): siRNA sense strand
aagcaauacuucuacgaga

SEQ ID NO: 2499070 - RNA, 19 nt, Homo sapiens
  misc_RNA (1)...(19): siRNA sense strand
agcaaacauccgaggacaa

SEQ ID NO: 2499071 - RNA, 19 nt, Homo sapiens
  misc_RNA (1)...(19): siRNA sense strand
gggcauagacaaaaggcau

SEQ ID NO: 2499072 - RNA, 19 nt, Homo sapiens
  misc_RNA (1)...(19): siRNA sense strand
ccaugaaagaagcaaacau

SEQ ID NO: 2499073 - RNA, 19 nt, Homo sapiens
  misc_RNA (1)...(19): siRNA sense strand
ucuacgagaccaagugcaa

SEQ ID NO: 2499074 - RNA, 19 nt, Homo sapiens
  misc_RNA (1)...(19): siRNA sense strand
uuguacacguccaggguga

SEQ ID NO: 2499075 - RNA, 19 nt, Homo sapiens
  misc_RNA (1)...(19): siRNA sense strand
gcucaguagucaagugccu

SEQ ID NO: 2499076 - RNA, 19 nt, Homo sapiens
  misc_RNA (1)...(19): siRNA sense strand
ggugaugcucaguagucaa

SEQ ID NO: 2499077 - RNA, 19 nt, Homo sapiens
  misc_RNA (1)...(19): siRNA sense strand
gacaaaaggcauuggaacu

SEQ ID NO: 2499078 - RNA, 19 nt, Homo sapiens
  misc_RNA (1)...(19): siRNA sense strand
cuggcgauucauaaggaua

SEQ ID NO: 2499079 - RNA, 19 nt, Homo sapiens
  misc_RNA (1)...(19): siRNA sense strand
auucauaaggauagacacu

SEQ ID NO: 2499080 - RNA, 19 nt, Homo sapiens
  misc_RNA (1)...(19): siRNA sense strand
aguauuagugaguggguaa

SEQ ID NO: 2499081 - RNA, 19 nt, Homo sapiens
  misc_RNA (1)...(19): siRNA sense strand
cugcaggggcauagacaaa

SEQ ID NO: 2499082 - RNA, 19 nt, Homo sapiens
  misc_RNA (1)...(19): siRNA sense strand
aagcaauacuucuacgaga

SEQ ID NO: 2499083 - RNA, 19 nt, Homo sapiens
  misc_RNA (1)...(19): siRNA sense strand
agcaaacauccgaggacaa

SEQ ID NO: 2499084 - RNA, 19 nt, Homo sapiens
  misc_RNA (1)...(19): siRNA sense strand
gggcauagacaaaaggcau

SEQ ID NO: 2499085 - RNA, 19 nt, Homo sapiens
  misc_RNA (1)...(19): siRNA sense strand
ccaugaaagaagcaaacau

SEQ ID NO: 2499086 - RNA, 19 nt, Homo sapiens
  misc_RNA (1)...(19): siRNA sense strand
ucuacgagaccaagugcaa

SEQ ID NO: 2499087 - RNA, 19 nt, Homo sapiens
  misc_RNA (1)...(19): siRNA sense strand
uuguacacguccaggguga

SEQ ID NO: 2499088 - RNA, 19 nt, Homo sapiens
  misc_RNA (1)...(19): siRNA sense strand
gcucaguagucaagugccu

SEQ ID NO: 2499089 - RNA, 19 nt, Homo sapiens
  misc_RNA (1)...(19): siRNA sense strand
ggugaugcucaguagucaa

SEQ ID NO: 2499090 - RNA, 19 nt, Homo sapiens
  misc_RNA (1)...(19): siRNA sense strand
gacaaaaggcauuggaacu

SEQ ID NO: 2499091 - RNA, 19 nt, Homo sapiens
  misc_RNA (1)...(19): siRNA sense strand
cuggcgauucauaaggaua

SEQ ID NO: 2499092 - RNA, 19 nt, Homo sapiens
  misc_RNA (1)...(19): siRNA sense strand
auucauaaggauagacacu

SEQ ID NO: 2499093 - RNA, 19 nt, Homo sapiens
  misc_RNA (1)...(19): siRNA sense strand
acgacaaguacaaggaauu

SEQ ID NO: 2499094 - RNA, 19 nt, Homo sapiens
  misc_RNA (1)...(19): siRNA sense strand
auugagaagcagagacuuu

SEQ ID NO: 2499095 - RNA, 19 nt, Homo sapiens
  misc_RNA (1)...(19): siRNA sense strand
ccaucuacgacaaguacaa

SEQ ID NO: 2499096 - RNA, 19 nt, Homo sapiens
  misc_RNA (1)...(19): siRNA sense strand
ggcugaagaaaguguggaa

SEQ ID NO: 2499097 - RNA, 19 nt, Homo sapiens
  misc_RNA (1)...(19): siRNA sense strand
ccauugagaagcagagacu

SEQ ID NO: 2499098 - RNA, 19 nt, Homo sapiens
  misc_RNA (1)...(19): siRNA sense strand
ucccagaggaggaggcaga

SEQ ID NO: 2499099 - RNA, 19 nt, Homo sapiens
  misc_RNA (1)...(19): siRNA sense strand
gccaaauauaugccaacaa

SEQ ID NO: 2499100 - RNA, 19 nt, Homo sapiens
  misc_RNA (1)...(19): siRNA sense strand
cgaugaggcuuaugggcuc

SEQ ID NO: 2499101 - RNA, 19 nt, Homo sapiens
  misc_RNA (1)...(19): siRNA sense strand
uguuugagcgagaguucua

SEQ ID NO: 2499102 - RNA, 19 nt, Homo sapiens
  misc_RNA (1)...(19): siRNA sense strand
aagaaaagacacagagaag

SEQ ID NO: 2499103 - RNA, 19 nt, Homo sapiens
  misc_RNA (1)...(19): siRNA sense strand
cagaagaagugcauggauc

SEQ ID NO: 2499104 - RNA, 19 nt, Homo sapiens
  misc_RNA (1)...(19): siRNA sense strand
ggguuaugucccaaagaga

SEQ ID NO: 2499105 - RNA, 19 nt, Homo sapiens
  misc_RNA (1)...(19): siRNA sense strand
cagaagaagugcauggauc

SEQ ID NO: 2499106 - RNA, 19 nt, Homo sapiens
  misc_RNA (1)...(19): siRNA sense strand
ggguuaugucccaaagaga

SEQ ID NO: 2499107 - RNA, 19 nt, Homo sapiens
  misc_RNA (1)...(19): siRNA sense strand
cagaauauccugcgccaga

SEQ ID NO: 2499108 - RNA, 19 nt, Homo sapiens
  misc_RNA (1)...(19): siRNA sense strand
ucucgguguauguggauua

SEQ ID NO: 2499109 - RNA, 19 nt, Homo sapiens
  misc_RNA (1)...(19): siRNA sense strand
aguaucaggaggagaccua

SEQ ID NO: 2499110 - RNA, 19 nt, Homo sapiens
  misc_RNA (1)...(19): siRNA sense strand
gguccagccgucaggagaa

SEQ ID NO: 2499111 - RNA, 19 nt, Homo sapiens
  misc_RNA (1)...(19): siRNA sense strand
gcaagaucaucgagcguug

SEQ ID NO: 2499112 - RNA, 19 nt, Homo sapiens
  misc_RNA (1)...(19): siRNA sense strand
cgccagaaccagaggcuuc

SEQ ID NO: 2499113 - RNA, 19 nt, Homo sapiens
  misc_RNA (1)...(19): siRNA sense strand
auuucuacccugaggacaa

SEQ ID NO: 2499114 - RNA, 19 nt, Homo sapiens
  misc_RNA (1)...(19): siRNA sense strand
gagacagugagcaggguga

SEQ ID NO: 2499115 - RNA, 19 nt, Homo sapiens
  misc_RNA (1)...(19): siRNA sense strand
aaggaguagacgugaacaa

SEQ ID NO: 2499116 - RNA, 19 nt, Homo sapiens
  misc_RNA (1)...(19): siRNA sense strand
caacaaaggaguagacgug

SEQ ID NO: 2499117 - RNA, 19 nt, Homo sapiens
  misc_RNA (1)...(19): siRNA sense strand
agagagacguggagaggga

SEQ ID NO: 2499118 - RNA, 19 nt, Homo sapiens
  misc_RNA (1)...(19): siRNA sense strand
ucaaggaguaccaggccaa

SEQ ID NO: 2499119 - RNA, 19 nt, Homo sapiens
  misc_RNA (1)...(19): siRNA sense strand
aguaccaggccaaggagaa

SEQ ID NO: 2499120 - RNA, 19 nt, Homo sapiens
  misc_RNA (1)...(19): siRNA sense strand
cguaccuggcgcagaggaa

SEQ ID NO: 2499121 - RNA, 19 nt, Homo sapiens
  misc_RNA (1)...(19): siRNA sense strand
acgagcuguucgacguaaa

SEQ ID NO: 2499122 - RNA, 19 nt, Homo sapiens
  misc_RNA (1)...(19): siRNA sense strand
gauaguggcuacccagaga

SEQ ID NO: 2499123 - RNA, 19 nt, Homo sapiens
  misc_RNA (1)...(19): siRNA sense strand
agagagacguggagaggga

SEQ ID NO: 2499124 - RNA, 19 nt, Homo sapiens
  misc_RNA (1)...(19): siRNA sense strand
ucaaggaguaccaggccaa

SEQ ID NO: 2499125 - RNA, 19 nt, Homo sapiens
  misc_RNA (1)...(19): siRNA sense strand
aguaccaggccaaggagaa

SEQ ID NO: 2499126 - RNA, 19 nt, Homo sapiens
  misc_RNA (1)...(19): siRNA sense strand
cguaccuggcgcagaggaa

SEQ ID NO: 2499127 - RNA, 19 nt, Homo sapiens
  misc_RNA (1)...(19): siRNA sense strand
acgagcuguucgacguaaa

SEQ ID NO: 2499128 - RNA, 19 nt, Homo sapiens
  misc_RNA (1)...(19): siRNA sense strand
gauaguggcuacccagaga

SEQ ID NO: 2499129 - RNA, 19 nt, Homo sapiens
  misc_RNA (1)...(19): siRNA sense strand
agagagacguggagaggga

SEQ ID NO: 2499130 - RNA, 19 nt, Homo sapiens
  misc_RNA (1)...(19): siRNA sense strand
ucaaggaguaccaggccaa

SEQ ID NO: 2499131 - RNA, 19 nt, Homo sapiens
  misc_RNA (1)...(19): siRNA sense strand
aguaccaggccaaggagaa

SEQ ID NO: 2499132 - RNA, 19 nt, Homo sapiens
  misc_RNA (1)...(19): siRNA sense strand
cguaccuggcgcagaggaa

SEQ ID NO: 2499133 - RNA, 19 nt, Homo sapiens
  misc_RNA (1)...(19): siRNA sense strand
acgagcuguucgacguaaa

SEQ ID NO: 2499134 - RNA, 19 nt, Homo sapiens
  misc_RNA (1)...(19): siRNA sense strand
gauaguggcuacccagaga

SEQ ID NO: 2499135 - RNA, 19 nt, Homo sapiens
  misc_RNA (1)...(19): siRNA sense strand
cugagaaucguguggaaaa

SEQ ID NO: 2499136 - RNA, 19 nt, Homo sapiens
  misc_RNA (1)...(19): siRNA sense strand
gaggaaauggagacgguca

SEQ ID NO: 2499137 - RNA, 19 nt, Homo sapiens
  misc_RNA (1)...(19): siRNA sense strand
aggagauacugaaggagca

SEQ ID NO: 2499138 - RNA, 19 nt, Homo sapiens
  misc_RNA (1)...(19): siRNA sense strand
auacugaaggagcaggaaa

SEQ ID NO: 2499139 - RNA, 19 nt, Homo sapiens
  misc_RNA (1)...(19): siRNA sense strand
gagcagaggaaauggagac

SEQ ID NO: 2499140 - RNA, 19 nt, Homo sapiens
  misc_RNA (1)...(19): siRNA sense strand
cagaggaaauggagacggu

SEQ ID NO: 2499141 - RNA, 19 nt, Homo sapiens
  misc_RNA (1)...(19): siRNA sense strand
ccaaaagagcucuggucau

SEQ ID NO: 2499142 - RNA, 19 nt, Homo sapiens
  misc_RNA (1)...(19): siRNA sense strand
caugaggcgagcugggauu

SEQ ID NO: 2499143 - RNA, 19 nt, Homo sapiens
  misc_RNA (1)...(19): siRNA sense strand
gguuuuggaaguaaaguua

SEQ ID NO: 2499144 - RNA, 19 nt, Homo sapiens
  misc_RNA (1)...(19): siRNA sense strand
aggaaauggagacggucau

SEQ ID NO: 2499145 - RNA, 19 nt, Homo sapiens
  misc_RNA (1)...(19): siRNA sense strand
ccgaggaguucaaggccaa

SEQ ID NO: 2499146 - RNA, 19 nt, Homo sapiens
  misc_RNA (1)...(19): siRNA sense strand
cccaagaugagaagagaga

SEQ ID NO: 2499147 - RNA, 19 nt, Homo sapiens
  misc_RNA (1)...(19): siRNA sense strand
aggccaagguggaggcugu

SEQ ID NO: 2499148 - RNA, 19 nt, Homo sapiens
  misc_RNA (1)...(19): siRNA sense strand
gggcggaagaagaaagacu

SEQ ID NO: 2499149 - RNA, 19 nt, Homo sapiens
  misc_RNA (1)...(19): siRNA sense strand
gaagagagaugcugagcug

SEQ ID NO: 2499150 - RNA, 19 nt, Homo sapiens
  misc_RNA (1)...(19): siRNA sense strand
acagcaucuuugugggaga

SEQ ID NO: 2499151 - RNA, 19 nt, Homo sapiens
  misc_RNA (1)...(19): siRNA sense strand
aagcguaugcggaagucaa

SEQ ID NO: 2499152 - RNA, 19 nt, Homo sapiens
  misc_RNA (1)...(19): siRNA sense strand
ucaccaaccagaugagcau

SEQ ID NO: 2499153 - RNA, 19 nt, Homo sapiens
  misc_RNA (1)...(19): siRNA sense strand
aaguggagcuggucgcaga

SEQ ID NO: 2499154 - RNA, 19 nt, Homo sapiens
  misc_RNA (1)...(19): siRNA sense strand
acacacuguauuuggucaa

SEQ ID NO: 2499155 - RNA, 19 nt, Homo sapiens
  misc_RNA (1)...(19): siRNA sense strand
acgcaggcuuguaccggaa

SEQ ID NO: 2499156 - RNA, 19 nt, Homo sapiens
  misc_RNA (1)...(19): siRNA sense strand
ugguugucgcagugggauu

SEQ ID NO: 2499157 - RNA, 19 nt, Homo sapiens
  misc_RNA (1)...(19): siRNA sense strand
ggaccauauuugagggcau

SEQ ID NO: 2499158 - RNA, 19 nt, Homo sapiens
  misc_RNA (1)...(19): siRNA sense strand
gggaauucgggcugugaua

SEQ ID NO: 2499159 - RNA, 19 nt, Homo sapiens
  misc_RNA (1)...(19): siRNA sense strand
gcacaaguaauaaagggaa

SEQ ID NO: 2499160 - RNA, 19 nt, Homo sapiens
  misc_RNA (1)...(19): siRNA sense strand
agaaguggcuccuggguga

SEQ ID NO: 2499161 - RNA, 19 nt, Homo sapiens
  misc_RNA (1)...(19): siRNA sense strand
caucaaaagcagaaacaau

SEQ ID NO: 2499162 - RNA, 19 nt, Homo sapiens
  misc_RNA (1)...(19): siRNA sense strand
gggucugggacaaugguua

SEQ ID NO: 2499163 - RNA, 19 nt, Homo sapiens
  misc_RNA (1)...(19): siRNA sense strand
cagguguauucaauggaaa

SEQ ID NO: 2499164 - RNA, 19 nt, Homo sapiens
  misc_RNA (1)...(19): siRNA sense strand
cuauggaagacaugaugaa

SEQ ID NO: 2499165 - RNA, 19 nt, Homo sapiens
  misc_RNA (1)...(19): siRNA sense strand
aagcagaaacaaugagauc

SEQ ID NO: 2499166 - RNA, 19 nt, Homo sapiens
  misc_RNA (1)...(19): siRNA sense strand
cagcaagauccaggaauau

SEQ ID NO: 2499167 - RNA, 19 nt, Homo sapiens
  misc_RNA (1)...(19): siRNA sense strand
aaucuuugcaacaggguau

SEQ ID NO: 2499168 - RNA, 19 nt, Homo sapiens
  misc_RNA (1)...(19): siRNA sense strand
gaauucgggcugugauauu

SEQ ID NO: 2499169 - RNA, 19 nt, Homo sapiens
  misc_RNA (1)...(19): siRNA sense strand
gcacagcagaacaggucau

SEQ ID NO: 2499170 - RNA, 19 nt, Homo sapiens
  misc_RNA (1)...(19): siRNA sense strand
caagaacaauuuaccgaca

SEQ ID NO: 2499171 - RNA, 19 nt, Homo sapiens
  misc_RNA (1)...(19): siRNA sense strand
cuguguaaucuuugcaaca

SEQ ID NO: 2499172 - RNA, 19 nt, Homo sapiens
  misc_RNA (1)...(19): siRNA sense strand
cacaaguaauaaagggaac

SEQ ID NO: 2499173 - RNA, 19 nt, Homo sapiens
  misc_RNA (1)...(19): siRNA sense strand
ggucaugaucaguuccaga

SEQ ID NO: 2499174 - RNA, 19 nt, Homo sapiens
  misc_RNA (1)...(19): siRNA sense strand
acuuuaugcacaacagcaa

SEQ ID NO: 2499175 - RNA, 19 nt, Homo sapiens
  misc_RNA (1)...(19): siRNA sense strand
ccauagcagugauuggcuu

SEQ ID NO: 2499176 - RNA, 19 nt, Homo sapiens
  misc_RNA (1)...(19): siRNA sense strand
ccaaaguacaaguggcaaa

SEQ ID NO: 2499177 - RNA, 19 nt, Homo sapiens
  misc_RNA (1)...(19): siRNA sense strand
uggcaaacaaggucagaua

SEQ ID NO: 2499178 - RNA, 19 nt, Homo sapiens
  misc_RNA (1)...(19): siRNA sense strand
ccucauucauacaggagaa

SEQ ID NO: 2499179 - RNA, 19 nt, Homo sapiens
  misc_RNA (1)...(19): siRNA sense strand
acuacagagacaugagaaa

SEQ ID NO: 2499180 - RNA, 19 nt, Homo sapiens
  misc_RNA (1)...(19): siRNA sense strand
aagaaaggaagcagaaaga

SEQ ID NO: 2499181 - RNA, 19 nt, Homo sapiens
  misc_RNA (1)...(19): siRNA sense strand
agccaaagcaggacacuaa

SEQ ID NO: 2499182 - RNA, 19 nt, Homo sapiens
  misc_RNA (1)...(19): siRNA sense strand
uggugaagucauaguuaaa

SEQ ID NO: 2499183 - RNA, 19 nt, Homo sapiens
  misc_RNA (1)...(19): siRNA sense strand
gacauagagccuagaacaa

SEQ ID NO: 2499184 - RNA, 19 nt, Homo sapiens
  misc_RNA (1)...(19): siRNA sense strand
cuguguugucucagggaaa

SEQ ID NO: 2499185 - RNA, 19 nt, Homo sapiens
  misc_RNA (1)...(19): siRNA sense strand
cgguaaaacaaaugaauca

SEQ ID NO: 2499186 - RNA, 19 nt, Homo sapiens
  misc_RNA (1)...(19): siRNA sense strand
agcagaaagaauacagaua

SEQ ID NO: 2499187 - RNA, 19 nt, Homo sapiens
  misc_RNA (1)...(19): siRNA sense strand
aaucagaaagccagaaaga

SEQ ID NO: 2499188 - RNA, 19 nt, Homo sapiens
  misc_RNA (1)...(19): siRNA sense strand
agccagaaucucagggaau

SEQ ID NO: 2499189 - RNA, 19 nt, Homo sapiens
  misc_RNA (1)...(19): siRNA sense strand
cagaaguaccauauggaga

SEQ ID NO: 2499190 - RNA, 19 nt, Homo sapiens
  misc_RNA (1)...(19): siRNA sense strand
cauucauacaggagaaaga

SEQ ID NO: 2499191 - RNA, 19 nt, Homo sapiens
  misc_RNA (1)...(19): siRNA sense strand
ucaucaaaccauaccaaua

SEQ ID NO: 2499192 - RNA, 19 nt, Homo sapiens
  misc_RNA (1)...(19): siRNA sense strand
ccaacaaaucagaaagcca

SEQ ID NO: 2499193 - RNA, 19 nt, Homo sapiens
  misc_RNA (1)...(19): siRNA sense strand
acucagaauugguucaaga

SEQ ID NO: 2499194 - RNA, 19 nt, Homo sapiens
  misc_RNA (1)...(19): siRNA sense strand
gguuggagauggagaaggu

SEQ ID NO: 2499195 - RNA, 19 nt, Homo sapiens
  misc_RNA (1)...(19): siRNA sense strand
ggaacagaagaccgguaaa

SEQ ID NO: 2499196 - RNA, 19 nt, Homo sapiens
  misc_RNA (1)...(19): siRNA sense strand
uggaauuccugaugagguu

SEQ ID NO: 2499197 - RNA, 19 nt, Homo sapiens
  misc_RNA (1)...(19): siRNA sense strand
aaguacaaguggcaaacaa

SEQ ID NO: 2499198 - RNA, 19 nt, Homo sapiens
  misc_RNA (1)...(19): siRNA sense strand
agacauagagccuagaaca

SEQ ID NO: 2499199 - RNA, 19 nt, Homo sapiens
  misc_RNA (1)...(19): siRNA sense strand
ccuucaaaugauaaagcaa

SEQ ID NO: 2499200 - RNA, 19 nt, Homo sapiens
  misc_RNA (1)...(19): siRNA sense strand
gauugagaacuuugcacaa

SEQ ID NO: 2499201 - RNA, 19 nt, Homo sapiens
  misc_RNA (1)...(19): siRNA sense strand
uuucaaggacugauagauu

SEQ ID NO: 2499202 - RNA, 19 nt, Homo sapiens
  misc_RNA (1)...(19): siRNA sense strand
ggagugugguuucggccaa

SEQ ID NO: 2499203 - RNA, 19 nt, Homo sapiens
  misc_RNA (1)...(19): siRNA sense strand
cagaaauugacuagccaga

SEQ ID NO: 2499204 - RNA, 19 nt, Homo sapiens
  misc_RNA (1)...(19): siRNA sense strand
gggaaauacaaguucuuca

SEQ ID NO: 2499205 - RNA, 19 nt, Homo sapiens
  misc_RNA (1)...(19): siRNA sense strand
gauagauuguugaagcaca

SEQ ID NO: 2499206 - RNA, 19 nt, Homo sapiens
  misc_RNA (1)...(19): siRNA sense strand
aguaccauauggagagaca

SEQ ID NO: 2499207 - RNA, 19 nt, Homo sapiens
  misc_RNA (1)...(19): siRNA sense strand
uuuaagaaaggaagcagaa

SEQ ID NO: 2499208 - RNA, 19 nt, Homo sapiens
  misc_RNA (1)...(19): siRNA sense strand
ugucagauuucucagggua

SEQ ID NO: 2499209 - RNA, 19 nt, Homo sapiens
  misc_RNA (1)...(19): siRNA sense strand
cagugcagcaugaaguuua

SEQ ID NO: 2499210 - RNA, 19 nt, Homo sapiens
  misc_RNA (1)...(19): siRNA sense strand
gaacagaagaccgguaaaa

SEQ ID NO: 2499211 - RNA, 19 nt, Homo sapiens
  misc_RNA (1)...(19): siRNA sense strand
uuucaauauugcagaacca

SEQ ID NO: 2499212 - RNA, 19 nt, Homo sapiens
  misc_RNA (1)...(19): siRNA sense strand
cggacaugacuuucaagaa

SEQ ID NO: 2499213 - RNA, 19 nt, Homo sapiens
  misc_RNA (1)...(19): siRNA sense strand
ucagaagaacuuagagacu

SEQ ID NO: 2499214 - RNA, 19 nt, Homo sapiens
  misc_RNA (1)...(19): siRNA sense strand
ucagaaagacauagagccu

SEQ ID NO: 2499215 - RNA, 19 nt, Homo sapiens
  misc_RNA (1)...(19): siRNA sense strand
agaaagacauagagccuag

SEQ ID NO: 2499216 - RNA, 19 nt, Homo sapiens
  misc_RNA (1)...(19): siRNA sense strand
cugauagauuguugaagca

SEQ ID NO: 2499217 - RNA, 19 nt, Homo sapiens
  misc_RNA (1)...(19): siRNA sense strand
aggaacagaagaccgguaa

SEQ ID NO: 2499218 - RNA, 19 nt, Homo sapiens
  misc_RNA (1)...(19): siRNA sense strand
cagaagaccgguaaaacaa

SEQ ID NO: 2499219 - RNA, 19 nt, Homo sapiens
  misc_RNA (1)...(19): siRNA sense strand
gugccaaaauugaucuuua

SEQ ID NO: 2499220 - RNA, 19 nt, Homo sapiens
  misc_RNA (1)...(19): siRNA sense strand
auaauaguguggagaccau

SEQ ID NO: 2499221 - RNA, 19 nt, Homo sapiens
  misc_RNA (1)...(19): siRNA sense strand
agcucuaaaugcugaaauu

SEQ ID NO: 2499222 - RNA, 19 nt, Homo sapiens
  misc_RNA (1)...(19): siRNA sense strand
ggguauacaaauaugaugu

SEQ ID NO: 2499223 - RNA, 19 nt, Homo sapiens
  misc_RNA (1)...(19): siRNA sense strand
ugacuagccagaaggaaca

SEQ ID NO: 2499224 - RNA, 19 nt, Homo sapiens
  misc_RNA (1)...(19): siRNA sense strand
gcaucaaacaggagaaacc

SEQ ID NO: 2499225 - RNA, 19 nt, Homo sapiens
  misc_RNA (1)...(19): siRNA sense strand
gcaggagggcagagaugga

SEQ ID NO: 2499226 - RNA, 19 nt, Homo sapiens
  misc_RNA (1)...(19): siRNA sense strand
gagaaguggaccauagagu

SEQ ID NO: 2499227 - RNA, 19 nt, Homo sapiens
  misc_RNA (1)...(19): siRNA sense strand
ggaccauagaguaaggacu

SEQ ID NO: 2499228 - RNA, 19 nt, Homo sapiens
  misc_RNA (1)...(19): siRNA sense strand
aagaggaagccaagugcau

SEQ ID NO: 2499229 - RNA, 19 nt, Homo sapiens
  misc_RNA (1)...(19): siRNA sense strand
aauucauaguagagagaag

SEQ ID NO: 2499230 - RNA, 19 nt, Homo sapiens
  misc_RNA (1)...(19): siRNA sense strand
ugcaagaauacuccaaaua

SEQ ID NO: 2499231 - RNA, 19 nt, Homo sapiens
  misc_RNA (1)...(19): siRNA sense strand
gcuaugagcuaacuggaga

SEQ ID NO: 2499232 - RNA, 19 nt, Homo sapiens
  misc_RNA (1)...(19): siRNA sense strand
gaggacacccacagggaga

SEQ ID NO: 2499233 - RNA, 19 nt, Homo sapiens
  misc_RNA (1)...(19): siRNA sense strand
aagucaucauccugaacaa

SEQ ID NO: 2499234 - RNA, 19 nt, Homo sapiens
  misc_RNA (1)...(19): siRNA sense strand
aggagaaggaagucaucau

SEQ ID NO: 2499235 - RNA, 19 nt, Homo sapiens
  misc_RNA (1)...(19): siRNA sense strand
ccuuaaaugacuugggaaa

SEQ ID NO: 2499236 - RNA, 19 nt, Homo sapiens
  misc_RNA (1)...(19): siRNA sense strand
agucaaaggaacuggauaa

SEQ ID NO: 2499237 - RNA, 19 nt, Homo sapiens
  misc_RNA (1)...(19): siRNA sense strand
gcuucaagaacuaaagaaa

SEQ ID NO: 2499238 - RNA, 19 nt, Homo sapiens
  misc_RNA (1)...(19): siRNA sense strand
acgaauuccugcagugaaa

SEQ ID NO: 2499239 - RNA, 19 nt, Homo sapiens
  misc_RNA (1)...(19): siRNA sense strand
cuuaaagagacuucagaaa

SEQ ID NO: 2499240 - RNA, 19 nt, Homo sapiens
  misc_RNA (1)...(19): siRNA sense strand
cuccagaagacuugaguaa

SEQ ID NO: 2499241 - RNA, 19 nt, Homo sapiens
  misc_RNA (1)...(19): siRNA sense strand
gagagauggaaguggacua

SEQ ID NO: 2499242 - RNA, 19 nt, Homo sapiens
  misc_RNA (1)...(19): siRNA sense strand
gagcaugaagagagaccaa

SEQ ID NO: 2499243 - RNA, 19 nt, Homo sapiens
  misc_RNA (1)...(19): siRNA sense strand
ugcaagaggaugugcguua

SEQ ID NO: 2499244 - RNA, 19 nt, Homo sapiens
  misc_RNA (1)...(19): siRNA sense strand
cagaaaaugcuuugaagaa

SEQ ID NO: 2499245 - RNA, 19 nt, Homo sapiens
  misc_RNA (1)...(19): siRNA sense strand
agaugaaugcacagaacaa

SEQ ID NO: 2499246 - RNA, 19 nt, Homo sapiens
  misc_RNA (1)...(19): siRNA sense strand
agaaauaguagcaaaguca

SEQ ID NO: 2499247 - RNA, 19 nt, Homo sapiens
  misc_RNA (1)...(19): siRNA sense strand
ccuaugaacugcagaaaau

SEQ ID NO: 2499248 - RNA, 19 nt, Homo sapiens
  misc_RNA (1)...(19): siRNA sense strand
caucaguaauugagaagca

SEQ ID NO: 2499249 - RNA, 19 nt, Homo sapiens
  misc_RNA (1)...(19): siRNA sense strand
cucaagauccugugguaaa

SEQ ID NO: 2499250 - RNA, 19 nt, Homo sapiens
  misc_RNA (1)...(19): siRNA sense strand
ugaagaaaccaguggcuga

SEQ ID NO: 2499251 - RNA, 19 nt, Homo sapiens
  misc_RNA (1)...(19): siRNA sense strand
caguaauggaacaagcuaa

SEQ ID NO: 2499252 - RNA, 19 nt, Homo sapiens
  misc_RNA (1)...(19): siRNA sense strand
cuacauugcugucgcgaga

SEQ ID NO: 2499253 - RNA, 19 nt, Homo sapiens
  misc_RNA (1)...(19): siRNA sense strand
cuuacaacgugaagacauu

SEQ ID NO: 2499254 - RNA, 19 nt, Homo sapiens
  misc_RNA (1)...(19): siRNA sense strand
cgugaagacauuaguagua

SEQ ID NO: 2499255 - RNA, 19 nt, Homo sapiens
  misc_RNA (1)...(19): siRNA sense strand
cagaaguuccugaagacaa

SEQ ID NO: 2499256 - RNA, 19 nt, Homo sapiens
  misc_RNA (1)...(19): siRNA sense strand
gccaaugaguacagcgaca

SEQ ID NO: 2499257 - RNA, 19 nt, Homo sapiens
  misc_RNA (1)...(19): siRNA sense strand
gugcaaacugaaaggauca

SEQ ID NO: 2499258 - RNA, 19 nt, Homo sapiens
  misc_RNA (1)...(19): siRNA sense strand
cagacaaacaagaccgauu

SEQ ID NO: 2499259 - RNA, 19 nt, Homo sapiens
  misc_RNA (1)...(19): siRNA sense strand
ccguugaagaauauguaua

SEQ ID NO: 2499260 - RNA, 19 nt, Homo sapiens
  misc_RNA (1)...(19): siRNA sense strand
agaaauuguaggaggagca

SEQ ID NO: 2499261 - RNA, 19 nt, Homo sapiens
  misc_RNA (1)...(19): siRNA sense strand
uauagaaauuguaggagga

SEQ ID NO: 2499262 - RNA, 19 nt, Homo sapiens
  misc_RNA (1)...(19): siRNA sense strand
guguuaacauccauggaau

SEQ ID NO: 2499263 - RNA, 19 nt, Homo sapiens
  misc_RNA (1)...(19): siRNA sense strand
agaugaucaugcaagauaa

SEQ ID NO: 2499264 - RNA, 19 nt, Homo sapiens
  misc_RNA (1)...(19): siRNA sense strand
uagcaaagucaaaggaacu

SEQ ID NO: 2499265 - RNA, 19 nt, Homo sapiens
  misc_RNA (1)...(19): siRNA sense strand
gucacgaacguaagaaaua

SEQ ID NO: 2499266 - RNA, 19 nt, Homo sapiens
  misc_RNA (1)...(19): siRNA sense strand
cagaagaggaaauugauca

SEQ ID NO: 2499267 - RNA, 19 nt, Homo sapiens
  misc_RNA (1)...(19): siRNA sense strand
ugaucauacaggagccaaa

SEQ ID NO: 2499268 - RNA, 19 nt, Homo sapiens
  misc_RNA (1)...(19): siRNA sense strand
aucaagaacucgagccauu

SEQ ID NO: 2499269 - RNA, 19 nt, Homo sapiens
  misc_RNA (1)...(19): siRNA sense strand
cagcaaagagccagauagu

SEQ ID NO: 2499270 - RNA, 19 nt, Homo sapiens
  misc_RNA (1)...(19): siRNA sense strand
cagauagucacgaacguaa

SEQ ID NO: 2499271 - RNA, 19 nt, Homo sapiens
  misc_RNA (1)...(19): siRNA sense strand
ccuugauguuucuaguaaa

SEQ ID NO: 2499272 - RNA, 19 nt, Homo sapiens
  misc_RNA (1)...(19): siRNA sense strand
gcauuuaaagugcgugaau

SEQ ID NO: 2499273 - RNA, 19 nt, Homo sapiens
  misc_RNA (1)...(19): siRNA sense strand
ggaaauugaucauacagga

SEQ ID NO: 2499274 - RNA, 19 nt, Homo sapiens
  misc_RNA (1)...(19): siRNA sense strand
ggaacuuugaugaggcuuu

SEQ ID NO: 2499275 - RNA, 19 nt, Homo sapiens
  misc_RNA (1)...(19): siRNA sense strand
agaaauacggccagccuau

SEQ ID NO: 2499276 - RNA, 19 nt, Homo sapiens
  misc_RNA (1)...(19): siRNA sense strand
cuggaaugcuguuagccaa

SEQ ID NO: 2499277 - RNA, 19 nt, Homo sapiens
  misc_RNA (1)...(19): siRNA sense strand
ugaucaagaagaagggcau

SEQ ID NO: 2499278 - RNA, 19 nt, Homo sapiens
  misc_RNA (1)...(19): siRNA sense strand
cuaagaaugccguugaaga

SEQ ID NO: 2499279 - RNA, 19 nt, Homo sapiens
  misc_RNA (1)...(19): siRNA sense strand
gaagcuaaugagugcaaau

SEQ ID NO: 2499280 - RNA, 19 nt, Homo sapiens
  misc_RNA (1)...(19): siRNA sense strand
ggaucaagaacucgagcca

SEQ ID NO: 2499281 - RNA, 19 nt, Homo sapiens
  misc_RNA (1)...(19): siRNA sense strand
gcuuaaagagacuucagaa

SEQ ID NO: 2499282 - RNA, 19 nt, Homo sapiens
  misc_RNA (1)...(19): siRNA sense strand
aauuguaggaggagcaaca

SEQ ID NO: 2499283 - RNA, 19 nt, Homo sapiens
  misc_RNA (1)...(19): siRNA sense strand
caguaauugagaagcaaaa

SEQ ID NO: 2499284 - RNA, 19 nt, Homo sapiens
  misc_RNA (1)...(19): siRNA sense strand
acaacuaggccaagaucuu

SEQ ID NO: 2499285 - RNA, 19 nt, Homo sapiens
  misc_RNA (1)...(19): siRNA sense strand
gcaugaagagagaccaaaa

SEQ ID NO: 2499286 - RNA, 19 nt, Homo sapiens
  misc_RNA (1)...(19): siRNA sense strand
gauccuacugaaauggaaa

SEQ ID NO: 2499287 - RNA, 19 nt, Homo sapiens
  misc_RNA (1)...(19): siRNA sense strand
guuuauaucaggaauguga

SEQ ID NO: 2499288 - RNA, 19 nt, Homo sapiens
  misc_RNA (1)...(19): siRNA sense strand
cggagaggaccaaccuaaa

SEQ ID NO: 2499289 - RNA, 19 nt, Homo sapiens
  misc_RNA (1)...(19): siRNA sense strand
cagaaaaugccuaauggaa

SEQ ID NO: 2499290 - RNA, 19 nt, Homo sapiens
  misc_RNA (1)...(19): siRNA sense strand
gaguucaagaccaaauaua

SEQ ID NO: 2499291 - RNA, 19 nt, Homo sapiens
  misc_RNA (1)...(19): siRNA sense strand
gcaagaauugggagcuuca

SEQ ID NO: 2499292 - RNA, 19 nt, Homo sapiens
  misc_RNA (1)...(19): siRNA sense strand
augaaagaguuguagggaa

SEQ ID NO: 2499293 - RNA, 19 nt, Homo sapiens
  misc_RNA (1)...(19): siRNA sense strand
ugaaagaguuguagggaag

SEQ ID NO: 2499294 - RNA, 19 nt, Homo sapiens
  misc_RNA (1)...(19): siRNA sense strand
cugcaggaacggagcaauu

SEQ ID NO: 2499295 - RNA, 19 nt, Homo sapiens
  misc_RNA (1)...(19): siRNA sense strand
agggaaggaacaaggucaa

SEQ ID NO: 2499296 - RNA, 19 nt, Homo sapiens
  misc_RNA (1)...(19): siRNA sense strand
aguuaaagacacugaugau

SEQ ID NO: 2499297 - RNA, 19 nt, Homo sapiens
  misc_RNA (1)...(19): siRNA sense strand
aguugaaguagaugcacaa

SEQ ID NO: 2499298 - RNA, 19 nt, Homo sapiens
  misc_RNA (1)...(19): siRNA sense strand
cuagcaagacaauggaaca

SEQ ID NO: 2499299 - RNA, 19 nt, Homo sapiens
  misc_RNA (1)...(19): siRNA sense strand
aggucaaaaucuagcaaga

SEQ ID NO: 2499300 - RNA, 19 nt, Homo sapiens
  misc_RNA (1)...(19): siRNA sense strand
aaguugaaguagaugcaca

SEQ ID NO: 2499301 - RNA, 19 nt, Homo sapiens
  misc_RNA (1)...(19): siRNA sense strand
gaguuguagggaaggaaca

SEQ ID NO: 2499302 - RNA, 19 nt, Homo sapiens
  misc_RNA (1)...(19): siRNA sense strand
uagcaagacaauggaacaa

SEQ ID NO: 2499303 - RNA, 19 nt, Homo sapiens
  misc_RNA (1)...(19): siRNA sense strand
gcggcaaauuaacagaaaa

SEQ ID NO: 2499304 - RNA, 19 nt, Homo sapiens
  misc_RNA (1)...(19): siRNA sense strand
auuuacaagaccugagaga

SEQ ID NO: 2499305 - RNA, 19 nt, Homo sapiens
  misc_RNA (1)...(19): siRNA sense strand
caauggaacaacugugcau

SEQ ID NO: 2499306 - RNA, 19 nt, Homo sapiens
  misc_RNA (1)...(19): siRNA sense strand
agaccugagagaacagauu

SEQ ID NO: 2499307 - RNA, 19 nt, Homo sapiens
  misc_RNA (1)...(19): siRNA sense strand
agaccagccacguggaaga

SEQ ID NO: 2499308 - RNA, 19 nt, Homo sapiens
  misc_RNA (1)...(19): siRNA sense strand
acguggaagagaagccuua

SEQ ID NO: 2499309 - RNA, 19 nt, Homo sapiens
  misc_RNA (1)...(19): siRNA sense strand
cuaaaauugggcaaggaaa

SEQ ID NO: 2499310 - RNA, 19 nt, Homo sapiens
  misc_RNA (1)...(19): siRNA sense strand
uaaaauugggcaaggaaau

SEQ ID NO: 2499311 - RNA, 19 nt, Homo sapiens
  misc_RNA (1)...(19): siRNA sense strand
agagcugcauggugggaga

SEQ ID NO: 2499312 - RNA, 19 nt, Homo sapiens
  misc_RNA (1)...(19): siRNA sense strand
ggcaggaagaugcagacaa

SEQ ID NO: 2499313 - RNA, 19 nt, Homo sapiens
  misc_RNA (1)...(19): siRNA sense strand
ucacagaucuagaagaccu

SEQ ID NO: 2499314 - RNA, 19 nt, Homo sapiens
  misc_RNA (1)...(19): siRNA sense strand
gcuaaaauugggcaaggaa

SEQ ID NO: 2499315 - RNA, 19 nt, Homo sapiens
  misc_RNA (1)...(19): siRNA sense strand
cagcaacgauuguggcaga

SEQ ID NO: 2499316 - RNA, 19 nt, Homo sapiens
  misc_RNA (1)...(19): siRNA sense strand
acucagaagaagagguguu

SEQ ID NO: 2499317 - RNA, 19 nt, Homo sapiens
  misc_RNA (1)...(19): siRNA sense strand
gaaaggaaagccaagggua

SEQ ID NO: 2499318 - RNA, 19 nt, Homo sapiens
  misc_RNA (1)...(19): siRNA sense strand
uugcaaacucagaagaaga

SEQ ID NO: 2499319 - RNA, 19 nt, Homo sapiens
  misc_RNA (1)...(19): siRNA sense strand
gcuaaaugaaauugcaaac

SEQ ID NO: 2499320 - RNA, 19 nt, Homo sapiens
  misc_RNA (1)...(19): siRNA sense strand
cagauguggacuugugaga

SEQ ID NO: 2499321 - RNA, 19 nt, Homo sapiens
  misc_RNA (1)...(19): siRNA sense strand
gcuccuucccuguggcauu

SEQ ID NO: 2499322 - RNA, 19 nt, Homo sapiens
  misc_RNA (1)...(19): siRNA sense strand
gugcuaaaugaaauugcaa

SEQ ID NO: 2499323 - RNA, 19 nt, Homo sapiens
  misc_RNA (1)...(19): siRNA sense strand
agaacguuguggugaggga

SEQ ID NO: 2499324 - RNA, 19 nt, Homo sapiens
  misc_RNA (1)...(19): siRNA sense strand
guguauaaugccagcagca

SEQ ID NO: 2499325 - RNA, 19 nt, Homo sapiens
  misc_RNA (1)...(19): siRNA sense strand
aaaggaaagccaaggguac

SEQ ID NO: 2499326 - RNA, 19 nt, Homo sapiens
  misc_RNA (1)...(19): siRNA sense strand
ggaccauggcacaagaacu

SEQ ID NO: 2499327 - RNA, 19 nt, Homo sapiens
  misc_RNA (1)...(19): siRNA sense strand
cgggagcaaguguggaaga

SEQ ID NO: 2499328 - RNA, 19 nt, Homo sapiens
  misc_RNA (1)...(19): siRNA sense strand
guguggaagagaugcauca

SEQ ID NO: 2499329 - RNA, 19 nt, Homo sapiens
  misc_RNA (1)...(19): siRNA sense strand
gcaucaacauuuggcguga

SEQ ID NO: 2499330 - RNA, 19 nt, Homo sapiens
  misc_RNA (1)...(19): siRNA sense strand
cgagagaggcagcaggaga

SEQ ID NO: 2499331 - RNA, 19 nt, Homo sapiens
  misc_RNA (1)...(19): siRNA sense strand
agacagaggagaagcgcca

SEQ ID NO: 2499332 - RNA, 19 nt, Homo sapiens
  misc_RNA (1)...(19): siRNA sense strand
aggagaagcgccagcgaga

SEQ ID NO: 2499333 - RNA, 19 nt, Homo sapiens
  misc_RNA (1)...(19): siRNA sense strand
agaggcagcaggagagcaa

SEQ ID NO: 2499334 - RNA, 19 nt, Homo sapiens
  misc_RNA (1)...(19): siRNA sense strand
cgaugaugggccucaguaa

SEQ ID NO: 2499335 - RNA, 19 nt, Homo sapiens
  misc_RNA (1)...(19): siRNA sense strand
cagcaggagagcaaaauaa

SEQ ID NO: 2499336 - RNA, 19 nt, Homo sapiens
  misc_RNA (1)...(19): siRNA sense strand
agcagugguuagaggaaaa

SEQ ID NO: 2499337 - RNA, 19 nt, Homo sapiens
  misc_RNA (1)...(19): siRNA sense strand
aaauaauguuucagaggcu

SEQ ID NO: 2499338 - RNA, 19 nt, Homo sapiens
  misc_RNA (1)...(19): siRNA sense strand
cgauacugccagagccaca

SEQ ID NO: 2499339 - RNA, 19 nt, Homo sapiens
  misc_RNA (1)...(19): siRNA sense strand
aggcagcaggagagcaaaa

SEQ ID NO: 2499340 - RNA, 19 nt, Homo sapiens
  misc_RNA (1)...(19): siRNA sense strand
uaggaauaccacagaaagu

SEQ ID NO: 2499341 - RNA, 19 nt, Homo sapiens
  misc_RNA (1)...(19): siRNA sense strand
ggagaaugccugugccuca

SEQ ID NO: 2499342 - RNA, 19 nt, Homo sapiens
  misc_RNA (1)...(19): siRNA sense strand
cggucaucguccuggagaa

SEQ ID NO: 2499343 - RNA, 19 nt, Homo sapiens
  misc_RNA (1)...(19): siRNA sense strand
ugggaagagucacggcaga

SEQ ID NO: 2499344 - RNA, 19 nt, Homo sapiens
  misc_RNA (1)...(19): siRNA sense strand
uggaaauggaaaugccuga

SEQ ID NO: 2499345 - RNA, 19 nt, Homo sapiens
  misc_RNA (1)...(19): siRNA sense strand
cuugaaaauugcugggcga

SEQ ID NO: 2499346 - RNA, 19 nt, Homo sapiens
  misc_RNA (1)...(19): siRNA sense strand
aguuaaagcaagaaagacu

SEQ ID NO: 2499347 - RNA, 19 nt, Homo sapiens
  misc_RNA (1)...(19): siRNA sense strand
caaggaaagugaugggcca

SEQ ID NO: 2499348 - RNA, 19 nt, Homo sapiens
  misc_RNA (1)...(19): siRNA sense strand
gguuaaggaagcuggaagu

SEQ ID NO: 2499349 - RNA, 19 nt, Homo sapiens
  misc_RNA (1)...(19): siRNA sense strand
ggaagaaaccaaaagccaa

SEQ ID NO: 2499350 - RNA, 19 nt, Homo sapiens
  misc_RNA (1)...(19): siRNA sense strand
agaaucaaguguugggacu

SEQ ID NO: 2499351 - RNA, 19 nt, Homo sapiens
  misc_RNA (1)...(19): siRNA sense strand
aaugguaacuggagccgua

SEQ ID NO: 2499352 - RNA, 19 nt, Homo sapiens
  misc_RNA (1)...(19): siRNA sense strand
agggauggauggaaguaca

SEQ ID NO: 2499353 - RNA, 19 nt, Homo sapiens
  misc_RNA (1)...(19): siRNA sense strand
cuaugaaagacugggacaa

SEQ ID NO: 2499354 - RNA, 19 nt, Homo sapiens
  misc_RNA (1)...(19): siRNA sense strand
auaagaggcuggaguggga

SEQ ID NO: 2499355 - RNA, 19 nt, Homo sapiens
  misc_RNA (1)...(19): siRNA sense strand
gggauggauggaaguacaa

SEQ ID NO: 2499356 - RNA, 19 nt, Homo sapiens
  misc_RNA (1)...(19): siRNA sense strand
uggaaguacaaaugagacu

SEQ ID NO: 2499357 - RNA, 19 nt, Homo sapiens
  misc_RNA (1)...(19): siRNA sense strand
aagcugacagugaggguga

SEQ ID NO: 2499358 - RNA, 19 nt, Homo sapiens
  misc_RNA (1)...(19): siRNA sense strand
aggaagcuguggaucggaa

SEQ ID NO: 2499359 - RNA, 19 nt, Homo sapiens
  misc_RNA (1)...(19): siRNA sense strand
agaaaauaaaacagcguga

SEQ ID NO: 2499360 - RNA, 19 nt, Homo sapiens
  misc_RNA (1)...(19): siRNA sense strand
ggcagagagaagaggaaga

SEQ ID NO: 2499361 - RNA, 19 nt, Homo sapiens
  misc_RNA (1)...(19): siRNA sense strand
auaagaaggcagagagaag

SEQ ID NO: 2499362 - RNA, 19 nt, Homo sapiens
  misc_RNA (1)...(19): siRNA sense strand
agucuuggucuuuggaaau

SEQ ID NO: 2499363 - RNA, 19 nt, Homo sapiens
  misc_RNA (1)...(19): siRNA sense strand
ggaaauaucuuuuggagcu

SEQ ID NO: 2499364 - RNA, 19 nt, Homo sapiens
  misc_RNA (1)...(19): siRNA sense strand
aaggcagagagaagaggaa

SEQ ID NO: 2499365 - RNA, 19 nt, Homo sapiens
  misc_RNA (1)...(19): siRNA sense strand
ggcagagagaagaggaaga

SEQ ID NO: 2499366 - RNA, 19 nt, Homo sapiens
  misc_RNA (1)...(19): siRNA sense strand
auaagaaggcagagagaag

SEQ ID NO: 2499367 - RNA, 19 nt, Homo sapiens
  misc_RNA (1)...(19): siRNA sense strand
agucuuggucuuuggaaau

SEQ ID NO: 2499368 - RNA, 19 nt, Homo sapiens
  misc_RNA (1)...(19): siRNA sense strand
ggaaauaucuuuuggagcu

SEQ ID NO: 2499369 - RNA, 19 nt, Homo sapiens
  misc_RNA (1)...(19): siRNA sense strand
aaggcagagagaagaggaa

SEQ ID NO: 2499370 - RNA, 19 nt, Homo sapiens
  misc_RNA (1)...(19): siRNA sense strand
ggaugugaggucuggaaca

SEQ ID NO: 2499371 - RNA, 19 nt, Homo sapiens
  misc_RNA (1)...(19): siRNA sense strand
ccaugggaaaccugggaca

SEQ ID NO: 2499372 - RNA, 19 nt, Homo sapiens
  misc_RNA (1)...(19): siRNA sense strand
ggaugugaggucuggaaca

SEQ ID NO: 2499373 - RNA, 19 nt, Homo sapiens
  misc_RNA (1)...(19): siRNA sense strand
ccaugggaaaccugggaca

SEQ ID NO: 2499374 - RNA, 19 nt, Homo sapiens
  misc_RNA (1)...(19): siRNA sense strand
gaagaauguagguggcaga

SEQ ID NO: 2499375 - RNA, 19 nt, Homo sapiens
  misc_RNA (1)...(19): siRNA sense strand
agauucguuuggagaagaa

SEQ ID NO: 2499376 - RNA, 19 nt, Homo sapiens
  misc_RNA (1)...(19): siRNA sense strand
gcaucuucuccuuggcaaa

SEQ ID NO: 2499377 - RNA, 19 nt, Homo sapiens
  misc_RNA (1)...(19): siRNA sense strand
cuaaugacuuugagggaug

SEQ ID NO: 2499378 - RNA, 19 nt, Homo sapiens
  misc_RNA (1)...(19): siRNA sense strand
aggcaauauugguguccuu

SEQ ID NO: 2499379 - RNA, 19 nt, Homo sapiens
  misc_RNA (1)...(19): siRNA sense strand
agaacauggcagaaauuau

SEQ ID NO: 2499380 - RNA, 19 nt, Homo sapiens
  misc_RNA (1)...(19): siRNA sense strand
ucaagaggcuacaugguga

SEQ ID NO: 2499381 - RNA, 19 nt, Homo sapiens
  misc_RNA (1)...(19): siRNA sense strand
guugaaauuuaaucgccaa

SEQ ID NO: 2499382 - RNA, 19 nt, Homo sapiens
  misc_RNA (1)...(19): siRNA sense strand
acagacaauaagaggcuau

SEQ ID NO: 2499383 - RNA, 19 nt, Homo sapiens
  misc_RNA (1)...(19): siRNA sense strand
gccaauagcuaugccgcaa

SEQ ID NO: 2499384 - RNA, 19 nt, Homo sapiens
  misc_RNA (1)...(19): siRNA sense strand
aggucuaaguccauugaca

SEQ ID NO: 2499385 - RNA, 19 nt, Homo sapiens
  misc_RNA (1)...(19): siRNA sense strand
agucacaggucuaagucca

SEQ ID NO: 2499386 - RNA, 19 nt, Homo sapiens
  misc_RNA (1)...(19): siRNA sense strand
uauucaagacucugcaaau

SEQ ID NO: 2499387 - RNA, 19 nt, Homo sapiens
  misc_RNA (1)...(19): siRNA sense strand
gugacauggauaaaugauu

SEQ ID NO: 2499388 - RNA, 19 nt, Homo sapiens
  misc_RNA (1)...(19): siRNA sense strand
cagaagacaucgagcgguc

SEQ ID NO: 2499389 - RNA, 19 nt, Homo sapiens
  misc_RNA (1)...(19): siRNA sense strand
gguccauaccugaaaacaa

SEQ ID NO: 2499390 - RNA, 19 nt, Homo sapiens
  misc_RNA (1)...(19): siRNA sense strand
aagaggaacucaaaggaga

SEQ ID NO: 2499391 - RNA, 19 nt, Homo sapiens
  misc_RNA (1)...(19): siRNA sense strand
cggaccaaucagaggguga

SEQ ID NO: 2499392 - RNA, 19 nt, Homo sapiens
  misc_RNA (1)...(19): siRNA sense strand
uaguggaguggcugagaaa

SEQ ID NO: 2499393 - RNA, 19 nt, Homo sapiens
  misc_RNA (1)...(19): siRNA sense strand
uggugaagacgguggagga

SEQ ID NO: 2499394 - RNA, 19 nt, Homo sapiens
  misc_RNA (1)...(19): siRNA sense strand
cggccgaugugcaggaucu

SEQ ID NO: 2499395 - RNA, 19 nt, Homo sapiens
  misc_RNA (1)...(19): siRNA sense strand
gcagcagccaagaggacuu

SEQ ID NO: 2499396 - RNA, 19 nt, Homo sapiens
  misc_RNA (1)...(19): siRNA sense strand
cggucaagaggaacucaaa

SEQ ID NO: 2499397 - RNA, 19 nt, Homo sapiens
  misc_RNA (1)...(19): siRNA sense strand
agacccaggacgugaggaa

SEQ ID NO: 2499398 - RNA, 19 nt, Homo sapiens
  misc_RNA (1)...(19): siRNA sense strand
ccguggagucugugcagua

SEQ ID NO: 2499399 - RNA, 19 nt, Homo sapiens
  misc_RNA (1)...(19): siRNA sense strand
gcaaggaugucaacggcga

SEQ ID NO: 2499400 - RNA, 19 nt, Homo sapiens
  misc_RNA (1)...(19): siRNA sense strand
ccaaggaugaccaggagau

SEQ ID NO: 2499401 - RNA, 19 nt, Homo sapiens
  misc_RNA (1)...(19): siRNA sense strand
gggacagugcagaagguca

SEQ ID NO: 2499402 - RNA, 19 nt, Homo sapiens
  misc_RNA (1)...(19): siRNA sense strand
ucaaagagcugaaggccac

SEQ ID NO: 2499403 - RNA, 19 nt, Homo sapiens
  misc_RNA (1)...(19): siRNA sense strand
cgaggauggcauugagacu

SEQ ID NO: 2499404 - RNA, 19 nt, Homo sapiens
  misc_RNA (1)...(19): siRNA sense strand
gguucaacuccaaugccaa

SEQ ID NO: 2499405 - RNA, 19 nt, Homo sapiens
  misc_RNA (1)...(19): siRNA sense strand
acuccaaugccaacaagaa

SEQ ID NO: 2499406 - RNA, 19 nt, Homo sapiens
  misc_RNA (1)...(19): siRNA sense strand
uugcagaaauugugggaau

SEQ ID NO: 2499407 - RNA, 19 nt, Homo sapiens
  misc_RNA (1)...(19): siRNA sense strand
agaaagacuacuugagcaa

SEQ ID NO: 2499408 - RNA, 19 nt, Homo sapiens
  misc_RNA (1)...(19): siRNA sense strand
cgggaaaugaagagcaaca

SEQ ID NO: 2499409 - RNA, 19 nt, Homo sapiens
  misc_RNA (1)...(19): siRNA sense strand
ugguaaaacuggugcaaca

SEQ ID NO: 2499410 - RNA, 19 nt, Homo sapiens
  misc_RNA (1)...(19): siRNA sense strand
gugaaugugaagaguacua

SEQ ID NO: 2499411 - RNA, 19 nt, Homo sapiens
  misc_RNA (1)...(19): siRNA sense strand
cugacaaagagcuggagaa

SEQ ID NO: 2499412 - RNA, 19 nt, Homo sapiens
  misc_RNA (1)...(19): siRNA sense strand
agaucaaaguccuagaaga

SEQ ID NO: 2499413 - RNA, 19 nt, Homo sapiens
  misc_RNA (1)...(19): siRNA sense strand
gguacaaacaagaggugga

SEQ ID NO: 2499414 - RNA, 19 nt, Homo sapiens
  misc_RNA (1)...(19): siRNA sense strand
aagagaauguggaggacca

SEQ ID NO: 2499415 - RNA, 19 nt, Homo sapiens
  misc_RNA (1)...(19): siRNA sense strand
ggguggaggcugugaaugu

SEQ ID NO: 2499416 - RNA, 19 nt, Homo sapiens
  misc_RNA (1)...(19): siRNA sense strand
uguuguagcaagaggccaa

SEQ ID NO: 2499417 - RNA, 19 nt, Homo sapiens
  misc_RNA (1)...(19): siRNA sense strand
ccauggacuaugaggauga

SEQ ID NO: 2499418 - RNA, 19 nt, Homo sapiens
  misc_RNA (1)...(19): siRNA sense strand
agugaaggaggaagagaau

SEQ ID NO: 2499419 - RNA, 19 nt, Homo sapiens
  misc_RNA (1)...(19): siRNA sense strand
augaagcauuccugguaaa

SEQ ID NO: 2499420 - RNA, 19 nt, Homo sapiens
  misc_RNA (1)...(19): siRNA sense strand
uagugaaggaggaagagaa

SEQ ID NO: 2499421 - RNA, 19 nt, Homo sapiens
  misc_RNA (1)...(19): siRNA sense strand
ccagggaacucaugagcca

SEQ ID NO: 2499422 - RNA, 19 nt, Homo sapiens
  misc_RNA (1)...(19): siRNA sense strand
ugaaggaggaagagaaucu

SEQ ID NO: 2499423 - RNA, 19 nt, Homo sapiens
  misc_RNA (1)...(19): siRNA sense strand
gcacagcaauccugaggga

SEQ ID NO: 2499424 - RNA, 19 nt, Homo sapiens
  misc_RNA (1)...(19): siRNA sense strand
cugaagaaacccauugcua

SEQ ID NO: 2499425 - RNA, 19 nt, Homo sapiens
  misc_RNA (1)...(19): siRNA sense strand
gcacaaagcccguuccacu

SEQ ID NO: 2499426 - RNA, 19 nt, Homo sapiens
  misc_RNA (1)...(19): siRNA sense strand
gagucagauggcagugaua

SEQ ID NO: 2499427 - RNA, 19 nt, Homo sapiens
  misc_RNA (1)...(19): siRNA sense strand
agaaauugugggaauguau

SEQ ID NO: 2499428 - RNA, 19 nt, Homo sapiens
  misc_RNA (1)...(19): siRNA sense strand
uguauagacacuugcgcaa

SEQ ID NO: 2499429 - RNA, 19 nt, Homo sapiens
  misc_RNA (1)...(19): siRNA sense strand
gugaagaguacuaucccaa

SEQ ID NO: 2499430 - RNA, 19 nt, Homo sapiens
  misc_RNA (1)...(19): siRNA sense strand
ugaacauuguccugaaaca

SEQ ID NO: 2499431 - RNA, 19 nt, Homo sapiens
  misc_RNA (1)...(19): siRNA sense strand
gcacauacguugucgacag

SEQ ID NO: 2499432 - RNA, 19 nt, Homo sapiens
  misc_RNA (1)...(19): siRNA sense strand
ggucacguccauugcuaaa

SEQ ID NO: 2499433 - RNA, 19 nt, Homo sapiens
  misc_RNA (1)...(19): siRNA sense strand
acaaacaagagguggagca

SEQ ID NO: 2499434 - RNA, 19 nt, Homo sapiens
  misc_RNA (1)...(19): siRNA sense strand
aggucguguucaugggaau

SEQ ID NO: 2499435 - RNA, 19 nt, Homo sapiens
  misc_RNA (1)...(19): siRNA sense strand
cagaaagacuacuugagca

SEQ ID NO: 2499436 - RNA, 19 nt, Homo sapiens
  misc_RNA (1)...(19): siRNA sense strand
cauuggaauugguccggaa

SEQ ID NO: 2499437 - RNA, 19 nt, Homo sapiens
  misc_RNA (1)...(19): siRNA sense strand
uugauaagaaagagacuga

SEQ ID NO: 2499438 - RNA, 19 nt, Homo sapiens
  misc_RNA (1)...(19): siRNA sense strand
aggaacuagugaaggagga

SEQ ID NO: 2499439 - RNA, 19 nt, Homo sapiens
  misc_RNA (1)...(19): siRNA sense strand
agaaagagacugaggugac

SEQ ID NO: 2499440 - RNA, 19 nt, Homo sapiens
  misc_RNA (1)...(19): siRNA sense strand
ggaacuagugaaggaggaa

SEQ ID NO: 2499441 - RNA, 19 nt, Homo sapiens
  misc_RNA (1)...(19): siRNA sense strand
ucucacacaucaacagcaa

SEQ ID NO: 2499442 - RNA, 19 nt, Homo sapiens
  misc_RNA (1)...(19): siRNA sense strand
cugugaaugugaagaguac

SEQ ID NO: 2499443 - RNA, 19 nt, Homo sapiens
  misc_RNA (1)...(19): siRNA sense strand
cucgggaaaugaagagcaa

SEQ ID NO: 2499444 - RNA, 19 nt, Homo sapiens
  misc_RNA (1)...(19): siRNA sense strand
gccagugggcucagagaga

SEQ ID NO: 2499445 - RNA, 19 nt, Homo sapiens
  misc_RNA (1)...(19): siRNA sense strand
gggugagggaguagaguuc

SEQ ID NO: 2499446 - RNA, 19 nt, Homo sapiens
  misc_RNA (1)...(19): siRNA sense strand
gcugugaaugugaagagua

SEQ ID NO: 2499447 - RNA, 19 nt, Homo sapiens
  misc_RNA (1)...(19): siRNA sense strand
cugcagcacuugucgguga

SEQ ID NO: 2499448 - RNA, 19 nt, Homo sapiens
  misc_RNA (1)...(19): siRNA sense strand
gugaauucugguuggccaa

SEQ ID NO: 2499449 - RNA, 19 nt, Homo sapiens
  misc_RNA (1)...(19): siRNA sense strand
aggccaaacaguaagcaga

SEQ ID NO: 2499450 - RNA, 19 nt, Homo sapiens
  misc_RNA (1)...(19): siRNA sense strand
gggcacaaguuuggagauc

SEQ ID NO: 2499451 - RNA, 19 nt, Homo sapiens
  misc_RNA (1)...(19): siRNA sense strand
gggaagaaaacauggaucu

SEQ ID NO: 2499452 - RNA, 19 nt, Homo sapiens
  misc_RNA (1)...(19): siRNA sense strand
agcaagaggccaaacagua

SEQ ID NO: 2499453 - RNA, 19 nt, Homo sapiens
  misc_RNA (1)...(19): siRNA sense strand
gcaaaucgaagcaggguac

SEQ ID NO: 2499454 - RNA, 19 nt, Homo sapiens
  misc_RNA (1)...(19): siRNA sense strand
gagcgagagaagcgcaaca

SEQ ID NO: 2499455 - RNA, 19 nt, Homo sapiens
  misc_RNA (1)...(19): siRNA sense strand
ccaaacuccucuagaccca

SEQ ID NO: 2499456 - RNA, 19 nt, Homo sapiens
  misc_RNA (1)...(19): siRNA sense strand
aagccgagccacagcaaga

SEQ ID NO: 2499457 - RNA, 19 nt, Homo sapiens
  misc_RNA (1)...(19): siRNA sense strand
ccgcagugccucgggaaau

SEQ ID NO: 2499458 - RNA, 19 nt, Homo sapiens
  misc_RNA (1)...(19): siRNA sense strand
gggacagcuuccaagggau

SEQ ID NO: 2499459 - RNA, 19 nt, Homo sapiens
  misc_RNA (1)...(19): siRNA sense strand
ggccaaacgaagacaccau

SEQ ID NO: 2499460 - RNA, 19 nt, Homo sapiens
  misc_RNA (1)...(19): siRNA sense strand
gcuuugaccugcagaacgu

SEQ ID NO: 2499461 - RNA, 19 nt, Homo sapiens
  misc_RNA (1)...(19): siRNA sense strand
cuguaggagaagugggucu

SEQ ID NO: 2499462 - RNA, 19 nt, Homo sapiens
  misc_RNA (1)...(19): siRNA sense strand
ggcaaaucgaagcagggua

SEQ ID NO: 2499463 - RNA, 19 nt, Homo sapiens
  misc_RNA (1)...(19): siRNA sense strand
caucaacagcaacuacaaa

SEQ ID NO: 2499464 - RNA, 19 nt, Homo sapiens
  misc_RNA (1)...(19): siRNA sense strand
acaggacguuggagggcuu

SEQ ID NO: 2499465 - RNA, 19 nt, Homo sapiens
  misc_RNA (1)...(19): siRNA sense strand
guccagucauccaaagcaa

SEQ ID NO: 2499466 - RNA, 19 nt, Homo sapiens
  misc_RNA (1)...(19): siRNA sense strand
uggacuaugaggaugauuu

SEQ ID NO: 2499467 - RNA, 19 nt, Homo sapiens
  misc_RNA (1)...(19): siRNA sense strand
acuugucggugaugcuaaa

SEQ ID NO: 2499468 - RNA, 19 nt, Homo sapiens
  misc_RNA (1)...(19): siRNA sense strand
accaagagaauguggagga

SEQ ID NO: 2499469 - RNA, 19 nt, Homo sapiens
  misc_RNA (1)...(19): siRNA sense strand
ggccaaacaguaagcagau

SEQ ID NO: 2499470 - RNA, 19 nt, Homo sapiens
  misc_RNA (1)...(19): siRNA sense strand
ggcuauaacuacaaagcaa

SEQ ID NO: 2499471 - RNA, 19 nt, Homo sapiens
  misc_RNA (1)...(19): siRNA sense strand
agcuauagaugaagugaaa

SEQ ID NO: 2499472 - RNA, 19 nt, Homo sapiens
  misc_RNA (1)...(19): siRNA sense strand
gguacauaaugcuggaaau

SEQ ID NO: 2499473 - RNA, 19 nt, Homo sapiens
  misc_RNA (1)...(19): siRNA sense strand
augacagucuccagggaaa

SEQ ID NO: 2499474 - RNA, 19 nt, Homo sapiens
  misc_RNA (1)...(19): siRNA sense strand
aggaagaugcugagaaacu

SEQ ID NO: 2499475 - RNA, 19 nt, Homo sapiens
  misc_RNA (1)...(19): siRNA sense strand
gcuauaacuacaaagcaaa

SEQ ID NO: 2499476 - RNA, 19 nt, Homo sapiens
  misc_RNA (1)...(19): siRNA sense strand
gcuucuauuucuagccuaa

SEQ ID NO: 2499477 - RNA, 19 nt, Homo sapiens
  misc_RNA (1)...(19): siRNA sense strand
gcgaauggagauugugcua

SEQ ID NO: 2499478 - RNA, 19 nt, Homo sapiens
  misc_RNA (1)...(19): siRNA sense strand
aagaaaagcugaaggcuga

SEQ ID NO: 2499479 - RNA, 19 nt, Homo sapiens
  misc_RNA (1)...(19): siRNA sense strand
ggagcaagagcgacaacaa

SEQ ID NO: 2499480 - RNA, 19 nt, Homo sapiens
  misc_RNA (1)...(19): siRNA sense strand
gcuugagagucuucaggaa

SEQ ID NO: 2499481 - RNA, 19 nt, Homo sapiens
  misc_RNA (1)...(19): siRNA sense strand
agauguugaggaagaaaua

SEQ ID NO: 2499482 - RNA, 19 nt, Homo sapiens
  misc_RNA (1)...(19): siRNA sense strand
ccagaugccaaguggguuu

SEQ ID NO: 2499483 - RNA, 19 nt, Homo sapiens
  misc_RNA (1)...(19): siRNA sense strand
gauacuaaacugacagaca

SEQ ID NO: 2499484 - RNA, 19 nt, Homo sapiens
  misc_RNA (1)...(19): siRNA sense strand
cuaaagaggaggaucugaa

SEQ ID NO: 2499485 - RNA, 19 nt, Homo sapiens
  misc_RNA (1)...(19): siRNA sense strand
cagaauuagaugucaguga

SEQ ID NO: 2499486 - RNA, 19 nt, Homo sapiens
  misc_RNA (1)...(19): siRNA sense strand
agaagaaagaucaggagga

SEQ ID NO: 2499487 - RNA, 19 nt, Homo sapiens
  misc_RNA (1)...(19): siRNA sense strand
cggacaaugacauguuuaa

SEQ ID NO: 2499488 - RNA, 19 nt, Homo sapiens
  misc_RNA (1)...(19): siRNA sense strand
ugcuuuaacucaagaagaa

SEQ ID NO: 2499489 - RNA, 19 nt, Homo sapiens
  misc_RNA (1)...(19): siRNA sense strand
guuacaaggaauucagauu

SEQ ID NO: 2499490 - RNA, 19 nt, Homo sapiens
  misc_RNA (1)...(19): siRNA sense strand
uggaaauaaacuugguaga

SEQ ID NO: 2499491 - RNA, 19 nt, Homo sapiens
  misc_RNA (1)...(19): siRNA sense strand
gaggaucugaagaggcaaa

SEQ ID NO: 2499492 - RNA, 19 nt, Homo sapiens
  misc_RNA (1)...(19): siRNA sense strand
ggguagcagaauuggaaaa

SEQ ID NO: 2499493 - RNA, 19 nt, Homo sapiens
  misc_RNA (1)...(19): siRNA sense strand
cuugagagucuucaggaaa

SEQ ID NO: 2499494 - RNA, 19 nt, Homo sapiens
  misc_RNA (1)...(19): siRNA sense strand
guuuggaagagcaguuaaa

SEQ ID NO: 2499495 - RNA, 19 nt, Homo sapiens
  misc_RNA (1)...(19): siRNA sense strand
agguuaaagaacugaauca

SEQ ID NO: 2499496 - RNA, 19 nt, Homo sapiens
  misc_RNA (1)...(19): siRNA sense strand
ugagaaaucuuguaggacu

SEQ ID NO: 2499497 - RNA, 19 nt, Homo sapiens
  misc_RNA (1)...(19): siRNA sense strand
guugaagaacugaagaaga

SEQ ID NO: 2499498 - RNA, 19 nt, Homo sapiens
  misc_RNA (1)...(19): siRNA sense strand
ucaauaagagaaaggauca

SEQ ID NO: 2499499 - RNA, 19 nt, Homo sapiens
  misc_RNA (1)...(19): siRNA sense strand
ggcgaugacaccagaacaa

SEQ ID NO: 2499500 - RNA, 19 nt, Homo sapiens
  misc_RNA (1)...(19): siRNA sense strand
cuugguagacguugugaua

SEQ ID NO: 2499501 - RNA, 19 nt, Homo sapiens
  misc_RNA (1)...(19): siRNA sense strand
uggugagguuacagaaaga

SEQ ID NO: 2499502 - RNA, 19 nt, Homo sapiens
  misc_RNA (1)...(19): siRNA sense strand
ugaaagaaacaguucguga

SEQ ID NO: 2499503 - RNA, 19 nt, Homo sapiens
  misc_RNA (1)...(19): siRNA sense strand
acaaagacucaauaagaga

SEQ ID NO: 2499504 - RNA, 19 nt, Homo sapiens
  misc_RNA (1)...(19): siRNA sense strand
gguuacagaaagauaauga

SEQ ID NO: 2499505 - RNA, 19 nt, Homo sapiens
  misc_RNA (1)...(19): siRNA sense strand
ggagagaauccgggcaauu

SEQ ID NO: 2499506 - RNA, 19 nt, Homo sapiens
  misc_RNA (1)...(19): siRNA sense strand
cagagauggagaauauuaa

SEQ ID NO: 2499507 - RNA, 19 nt, Homo sapiens
  misc_RNA (1)...(19): siRNA sense strand
ggagaauauuaaggcgauu

SEQ ID NO: 2499508 - RNA, 19 nt, Homo sapiens
  misc_RNA (1)...(19): siRNA sense strand
uaucaaaugaagaggagca

SEQ ID NO: 2499509 - RNA, 19 nt, Homo sapiens
  misc_RNA (1)...(19): siRNA sense strand
aauccaaagcuuuaggcua

SEQ ID NO: 2499510 - RNA, 19 nt, Homo sapiens
  misc_RNA (1)...(19): siRNA sense strand
gugagguuacagaaagaua

SEQ ID NO: 2499511 - RNA, 19 nt, Homo sapiens
  misc_RNA (1)...(19): siRNA sense strand
auuagaugucagugagcaa

SEQ ID NO: 2499512 - RNA, 19 nt, Homo sapiens
  misc_RNA (1)...(19): siRNA sense strand
gcuccgacaaguugaagaa

SEQ ID NO: 2499513 - RNA, 19 nt, Homo sapiens
  misc_RNA (1)...(19): siRNA sense strand
uggcuaaagaggaggaucu

SEQ ID NO: 2499514 - RNA, 19 nt, Homo sapiens
  misc_RNA (1)...(19): siRNA sense strand
aagagcaguuaaagaaaga

SEQ ID NO: 2499515 - RNA, 19 nt, Homo sapiens
  misc_RNA (1)...(19): siRNA sense strand
gagcaguuaaagaaagaga

SEQ ID NO: 2499516 - RNA, 19 nt, Homo sapiens
  misc_RNA (1)...(19): siRNA sense strand
acaccaagcaagaagcuau

SEQ ID NO: 2499517 - RNA, 19 nt, Homo sapiens
  misc_RNA (1)...(19): siRNA sense strand
cacaagaugauuugggaca

SEQ ID NO: 2499518 - RNA, 19 nt, Homo sapiens
  misc_RNA (1)...(19): siRNA sense strand
cugagaaacugcggaaaga

SEQ ID NO: 2499519 - RNA, 19 nt, Homo sapiens
  misc_RNA (1)...(19): siRNA sense strand
aggaguuauauuuggcuaa

SEQ ID NO: 2499520 - RNA, 19 nt, Homo sapiens
  misc_RNA (1)...(19): siRNA sense strand
aggcaaagagggauguuca

SEQ ID NO: 2499521 - RNA, 19 nt, Homo sapiens
  misc_RNA (1)...(19): siRNA sense strand
cuaaacugacagacauuaa

SEQ ID NO: 2499522 - RNA, 19 nt, Homo sapiens
  misc_RNA (1)...(19): siRNA sense strand
gcucaagcagagauggaga

SEQ ID NO: 2499523 - RNA, 19 nt, Homo sapiens
  misc_RNA (1)...(19): siRNA sense strand
gcaaaaugcaguauuacaa

SEQ ID NO: 2499524 - RNA, 19 nt, Homo sapiens
  misc_RNA (1)...(19): siRNA sense strand
ggaugaugaacaacaaaga

SEQ ID NO: 2499525 - RNA, 19 nt, Homo sapiens
  misc_RNA (1)...(19): siRNA sense strand
gcuggugagguuacagaaa

SEQ ID NO: 2499526 - RNA, 19 nt, Homo sapiens
  misc_RNA (1)...(19): siRNA sense strand
cuacagaggcacugcggga

SEQ ID NO: 2499527 - RNA, 19 nt, Homo sapiens
  misc_RNA (1)...(19): siRNA sense strand
caaugaaagauaagcagga

SEQ ID NO: 2499528 - RNA, 19 nt, Homo sapiens
  misc_RNA (1)...(19): siRNA sense strand
aagcagauauugauggaga

SEQ ID NO: 2499529 - RNA, 19 nt, Homo sapiens
  misc_RNA (1)...(19): siRNA sense strand
agaagaaauccgugaggca

SEQ ID NO: 2499530 - RNA, 19 nt, Homo sapiens
  misc_RNA (1)...(19): siRNA sense strand
agauauugauggagacgga

SEQ ID NO: 2499531 - RNA, 19 nt, Homo sapiens
  misc_RNA (1)...(19): siRNA sense strand
ugaaaugaucagagaagca

SEQ ID NO: 2499532 - RNA, 19 nt, Homo sapiens
  misc_RNA (1)...(19): siRNA sense strand
aagaaauccgugaggcauu

SEQ ID NO: 2499533 - RNA, 19 nt, Homo sapiens
  misc_RNA (1)...(19): siRNA sense strand
caacaaaggaacuuggaac

SEQ ID NO: 2499534 - RNA, 19 nt, Homo sapiens
  misc_RNA (1)...(19): siRNA sense strand
ucaaugaaguggaugcuga

SEQ ID NO: 2499535 - RNA, 19 nt, Homo sapiens
  misc_RNA (1)...(19): siRNA sense strand
aaguggaugcugaugguaa

SEQ ID NO: 2499536 - RNA, 19 nt, Homo sapiens
  misc_RNA (1)...(19): siRNA sense strand
cagauagugaagaagaaau

SEQ ID NO: 2499537 - RNA, 19 nt, Homo sapiens
  misc_RNA (1)...(19): siRNA sense strand
gugaagaagaaauccguga

SEQ ID NO: 2499538 - RNA, 19 nt, Homo sapiens
  misc_RNA (1)...(19): siRNA sense strand
aagaauucguacagaugau

SEQ ID NO: 2499539 - RNA, 19 nt, Homo sapiens
  misc_RNA (1)...(19): siRNA sense strand
ccgaagaacagauugcuga

SEQ ID NO: 2499540 - RNA, 19 nt, Homo sapiens
  misc_RNA (1)...(19): siRNA sense strand
aguggaugcugaugguaau

SEQ ID NO: 2499541 - RNA, 19 nt, Homo sapiens
  misc_RNA (1)...(19): siRNA sense strand
acagauagugaagaagaaa

SEQ ID NO: 2499542 - RNA, 19 nt, Homo sapiens
  misc_RNA (1)...(19): siRNA sense strand
agauagugaagaagaaauc

SEQ ID NO: 2499543 - RNA, 19 nt, Homo sapiens
  misc_RNA (1)...(19): siRNA sense strand
cugaauugcaggauaugau

SEQ ID NO: 2499544 - RNA, 19 nt, Homo sapiens
  misc_RNA (1)...(19): siRNA sense strand
caucaaguauggacauuua

SEQ ID NO: 2499545 - RNA, 19 nt, Homo sapiens
  misc_RNA (1)...(19): siRNA sense strand
uggcaaaaggagaagaaaa

SEQ ID NO: 2499546 - RNA, 19 nt, Homo sapiens
  misc_RNA (1)...(19): siRNA sense strand
ggcaaaaggagaagaaaau

SEQ ID NO: 2499547 - RNA, 19 nt, Homo sapiens
  misc_RNA (1)...(19): siRNA sense strand
cccaagaugcagagagaga

SEQ ID NO: 2499548 - RNA, 19 nt, Homo sapiens
  misc_RNA (1)...(19): siRNA sense strand
gagaagaauuaaaugccau

SEQ ID NO: 2499549 - RNA, 19 nt, Homo sapiens
  misc_RNA (1)...(19): siRNA sense strand
ggagaagaauuaaaugcca

SEQ ID NO: 2499550 - RNA, 19 nt, Homo sapiens
  misc_RNA (1)...(19): siRNA sense strand
aggaaugagagauugagaa

SEQ ID NO: 2499551 - RNA, 19 nt, Homo sapiens
  misc_RNA (1)...(19): siRNA sense strand
aggaggaaugagagauuga

SEQ ID NO: 2499552 - RNA, 19 nt, Homo sapiens
  misc_RNA (1)...(19): siRNA sense strand
uggaaaauggagaagaauu

SEQ ID NO: 2499553 - RNA, 19 nt, Homo sapiens
  misc_RNA (1)...(19): siRNA sense strand
ugagagauugagaagggaa

SEQ ID NO: 2499554 - RNA, 19 nt, Homo sapiens
  misc_RNA (1)...(19): siRNA sense strand
guguuauccacgugaccaa

SEQ ID NO: 2499555 - RNA, 19 nt, Homo sapiens
  misc_RNA (1)...(19): siRNA sense strand
gccccaagaugcagagaga

SEQ ID NO: 2499556 - RNA, 19 nt, Homo sapiens
  misc_RNA (1)...(19): siRNA sense strand
ccuacaacuccaugaucaa

SEQ ID NO: 2499557 - RNA, 19 nt, Homo sapiens
  misc_RNA (1)...(19): siRNA sense strand
ccaugaaacagauuggcaa

SEQ ID NO: 2499558 - RNA, 19 nt, Homo sapiens
  misc_RNA (1)...(19): siRNA sense strand
gcaucgaccauaagggaca

SEQ ID NO: 2499559 - RNA, 19 nt, Homo sapiens
  misc_RNA (1)...(19): siRNA sense strand
agcaugugguggacggaaa

SEQ ID NO: 2499560 - RNA, 19 nt, Homo sapiens
  misc_RNA (1)...(19): siRNA sense strand
gggcugaagacaaggagca

SEQ ID NO: 2499561 - RNA, 19 nt, Homo sapiens
  misc_RNA (1)...(19): siRNA sense strand
gaaggaugcugcaggcuga

SEQ ID NO: 2499562 - RNA, 19 nt, Homo sapiens
  misc_RNA (1)...(19): siRNA sense strand
gaccaauugcugugaucaa

SEQ ID NO: 2499563 - RNA, 19 nt, Homo sapiens
  misc_RNA (1)...(19): siRNA sense strand
cauuaaacugagaccaauu

SEQ ID NO: 2499564 - RNA, 19 nt, Homo sapiens
  misc_RNA (1)...(19): siRNA sense strand
agaaauugauguuugagga

SEQ ID NO: 2499565 - RNA, 19 nt, Homo sapiens
  misc_RNA (1)...(19): siRNA sense strand
ggacggaaaggaacggaca

SEQ ID NO: 2499566 - RNA, 19 nt, Homo sapiens
  misc_RNA (1)...(19): siRNA sense strand
uggaggaggccuuggagau

SEQ ID NO: 2499567 - RNA, 19 nt, Homo sapiens
  misc_RNA (1)...(19): siRNA sense strand
ggaaucagcaagaaagcca

SEQ ID NO: 2499568 - RNA, 19 nt, Homo sapiens
  misc_RNA (1)...(19): siRNA sense strand
augcagaaauccagguugu

SEQ ID NO: 2499569 - RNA, 19 nt, Homo sapiens
  misc_RNA (1)...(19): siRNA sense strand
guuugaggaauuaaggaau

SEQ ID NO: 2499570 - RNA, 19 nt, Homo sapiens
  misc_RNA (1)...(19): siRNA sense strand
cugucgagguggugguguu

SEQ ID NO: 2499571 - RNA, 19 nt, Homo sapiens
  misc_RNA (1)...(19): siRNA sense strand
ccaugaagagagacaagau

SEQ ID NO: 2499572 - RNA, 19 nt, Homo sapiens
  misc_RNA (1)...(19): siRNA sense strand
ccaaaguggagcagcaugu

SEQ ID NO: 2499573 - RNA, 19 nt, Homo sapiens
  misc_RNA (1)...(19): siRNA sense strand
uguuugaggaauuaaggaa

SEQ ID NO: 2499574 - RNA, 19 nt, Homo sapiens
  misc_RNA (1)...(19): siRNA sense strand
ucaucgaucuauugggcuu

SEQ ID NO: 2499575 - RNA, 19 nt, Homo sapiens
  misc_RNA (1)...(19): siRNA sense strand
ggaacuaugccugggucaa

SEQ ID NO: 2499576 - RNA, 19 nt, Homo sapiens
  misc_RNA (1)...(19): siRNA sense strand
uugccaaaguggagcagca

SEQ ID NO: 2499577 - RNA, 19 nt, Homo sapiens
  misc_RNA (1)...(19): siRNA sense strand
caauaaaguuucugcaagg

SEQ ID NO: 2499578 - RNA, 19 nt, Homo sapiens
  misc_RNA (1)...(19): siRNA sense strand
caagacuaucugaagggaa

SEQ ID NO: 2499579 - RNA, 19 nt, Homo sapiens
  misc_RNA (1)...(19): siRNA sense strand
gcuauaaugaugagcugca

SEQ ID NO: 2499580 - RNA, 19 nt, Homo sapiens
  misc_RNA (1)...(19): siRNA sense strand
augugacagaugugguaaa

SEQ ID NO: 2499581 - RNA, 19 nt, Homo sapiens
  misc_RNA (1)...(19): siRNA sense strand
gggaacuaugccuggguca

SEQ ID NO: 2499582 - RNA, 19 nt, Homo sapiens
  misc_RNA (1)...(19): siRNA sense strand
agagacaagauuauaguca

SEQ ID NO: 2499583 - RNA, 19 nt, Homo sapiens
  misc_RNA (1)...(19): siRNA sense strand
gcaguuggcuugugcucga

SEQ ID NO: 2499584 - RNA, 19 nt, Homo sapiens
  misc_RNA (1)...(19): siRNA sense strand
cgugcauugucccgagcaa

SEQ ID NO: 2499585 - RNA, 19 nt, Homo sapiens
  misc_RNA (1)...(19): siRNA sense strand
ggaagaggcuccugagucc

SEQ ID NO: 2499586 - RNA, 19 nt, Homo sapiens
  misc_RNA (1)...(19): siRNA sense strand
agcaaaaucucgacguaau

SEQ ID NO: 2499587 - RNA, 19 nt, Homo sapiens
  misc_RNA (1)...(19): siRNA sense strand
auuuagauuuccaggaugu

SEQ ID NO: 2499588 - RNA, 19 nt, Homo sapiens
  misc_RNA (1)...(19): siRNA sense strand
ccagguuguggaugagauu

SEQ ID NO: 2499589 - RNA, 19 nt, Homo sapiens
  misc_RNA (1)...(19): siRNA sense strand
gacugagaccuuuggaaca

SEQ ID NO: 2499590 - RNA, 19 nt, Homo sapiens
  misc_RNA (1)...(19): siRNA sense strand
cugcgaaagcugugaccaa

SEQ ID NO: 2499591 - RNA, 19 nt, Homo sapiens
  misc_RNA (1)...(19): siRNA sense strand
auacaagggaaguguggaa

SEQ ID NO: 2499592 - RNA, 19 nt, Homo sapiens
  misc_RNA (1)...(19): siRNA sense strand
cagucagggaggaaauaaa

SEQ ID NO: 2499593 - RNA, 19 nt, Homo sapiens
  misc_RNA (1)...(19): siRNA sense strand
ccaucaaggaggcuguaaa

SEQ ID NO: 2499594 - RNA, 19 nt, Homo sapiens
  misc_RNA (1)...(19): siRNA sense strand
guguuaaggugguggcugu

SEQ ID NO: 2499595 - RNA, 19 nt, Homo sapiens
  misc_RNA (1)...(19): siRNA sense strand
guggaaggguugaugacca

SEQ ID NO: 2499596 - RNA, 19 nt, Homo sapiens
  misc_RNA (1)...(19): siRNA sense strand
acgacaacgaauauggcua

SEQ ID NO: 2499597 - RNA, 19 nt, Homo sapiens
  misc_RNA (1)...(19): siRNA sense strand
acgaauauggcuacaguca

SEQ ID NO: 2499598 - RNA, 19 nt, Homo sapiens
  misc_RNA (1)...(19): siRNA sense strand
aggugguggcugugaauga

SEQ ID NO: 2499599 - RNA, 19 nt, Homo sapiens
  misc_RNA (1)...(19): siRNA sense strand
ggagaaggguguuaaggug

SEQ ID NO: 2499600 - RNA, 19 nt, Homo sapiens
  misc_RNA (1)...(19): siRNA sense strand
gcgacaucguccucaccaa

SEQ ID NO: 2499601 - RNA, 19 nt, Homo sapiens
  misc_RNA (1)...(19): siRNA sense strand
gggagcugacugugggcau

SEQ ID NO: 2499602 - RNA, 19 nt, Homo sapiens
  misc_RNA (1)...(19): siRNA sense strand
caccagucagggaggaaau

SEQ ID NO: 2499603 - RNA, 19 nt, Homo sapiens
  misc_RNA (1)...(19): siRNA sense strand
gcacugaacccaagggaga

SEQ ID NO: 2499604 - RNA, 19 nt, Homo sapiens
  misc_RNA (1)...(19): siRNA sense strand
ccuaauagucaaagcccaa

SEQ ID NO: 2499605 - RNA, 19 nt, Homo sapiens
  misc_RNA (1)...(19): siRNA sense strand
uaguaaaggaagcgaucaa

SEQ ID NO: 2499606 - RNA, 19 nt, Homo sapiens
  misc_RNA (1)...(19): siRNA sense strand
augaaaucguaguggccaa

SEQ ID NO: 2499607 - RNA, 19 nt, Homo sapiens
  misc_RNA (1)...(19): siRNA sense strand
cggcagaaguuccugguga

SEQ ID NO: 2499608 - RNA, 19 nt, Homo sapiens
  misc_RNA (1)...(19): siRNA sense strand
ggauaauaaauguggccca

SEQ ID NO: 2499609 - RNA, 19 nt, Homo sapiens
  misc_RNA (1)...(19): siRNA sense strand
ucucagacgugauggcaga

SEQ ID NO: 2499610 - RNA, 19 nt, Homo sapiens
  misc_RNA (1)...(19): siRNA sense strand
ugggaagcucugugggcaa

SEQ ID NO: 2499611 - RNA, 19 nt, Homo sapiens
  misc_RNA (1)...(19): siRNA sense strand
agaaaugaguggagugcac

SEQ ID NO: 2499612 - RNA, 19 nt, Homo sapiens
  misc_RNA (1)...(19): siRNA sense strand
acagaaauggcuuuggcaa

SEQ ID NO: 2499613 - RNA, 19 nt, Homo sapiens
  misc_RNA (1)...(19): siRNA sense strand
ugucaagaucccagacuga

SEQ ID NO: 2499614 - RNA, 19 nt, Homo sapiens
  misc_RNA (1)...(19): siRNA sense strand
gcuaggucuuggauggaga

SEQ ID NO: 2499615 - RNA, 19 nt, Homo sapiens
  misc_RNA (1)...(19): siRNA sense strand
uagucaaagcccaaggauu

SEQ ID NO: 2499616 - RNA, 19 nt, Homo sapiens
  misc_RNA (1)...(19): siRNA sense strand
cuccaagaagacaaagaaa

SEQ ID NO: 2499617 - RNA, 19 nt, Homo sapiens
  misc_RNA (1)...(19): siRNA sense strand
ccuccgggaagcaggacaa

SEQ ID NO: 2499618 - RNA, 19 nt, Homo sapiens
  misc_RNA (1)...(19): siRNA sense strand
gguuagcaauaucugggaa

SEQ ID NO: 2499619 - RNA, 19 nt, Homo sapiens
  misc_RNA (1)...(19): siRNA sense strand
ccuaaugggugugggaacu

SEQ ID NO: 2499620 - RNA, 19 nt, Homo sapiens
  misc_RNA (1)...(19): siRNA sense strand
gagcaguggcugagguggu

SEQ ID NO: 2499621 - RNA, 19 nt, Homo sapiens
  misc_RNA (1)...(19): siRNA sense strand
ccaugaaaggagaaacagu

SEQ ID NO: 2499622 - RNA, 19 nt, Homo sapiens
  misc_RNA (1)...(19): siRNA sense strand
caggacaaacccaggcaga

SEQ ID NO: 2499623 - RNA, 19 nt, Homo sapiens
  misc_RNA (1)...(19): siRNA sense strand
uggcagagaaugcaggcuu

SEQ ID NO: 2499624 - RNA, 19 nt, Homo sapiens
  misc_RNA (1)...(19): siRNA sense strand
caggaaggggugugggaca

SEQ ID NO: 2499625 - RNA, 19 nt, Homo sapiens
  misc_RNA (1)...(19): siRNA sense strand
gugaauaaacagcuggaca

SEQ ID NO: 2499626 - RNA, 19 nt, Homo sapiens
  misc_RNA (1)...(19): siRNA sense strand
cuauguaaggacuaugaaa

SEQ ID NO: 2499627 - RNA, 19 nt, Homo sapiens
  misc_RNA (1)...(19): siRNA sense strand
ggacuaugaaaaugaugaa

SEQ ID NO: 2499628 - RNA, 19 nt, Homo sapiens
  misc_RNA (1)...(19): siRNA sense strand
ggucaaauguugggaggug

SEQ ID NO: 2499629 - RNA, 19 nt, Homo sapiens
  misc_RNA (1)...(19): siRNA sense strand
aaggagacggugugacaga

SEQ ID NO: 2499630 - RNA, 19 nt, Homo sapiens
  misc_RNA (1)...(19): siRNA sense strand
aagccaaggagaaggcaaa

SEQ ID NO: 2499631 - RNA, 19 nt, Homo sapiens
  misc_RNA (1)...(19): siRNA sense strand
gcaaacaugucuugacgga

SEQ ID NO: 2499632 - RNA, 19 nt, Homo sapiens
  misc_RNA (1)...(19): siRNA sense strand
uggcuaagcugcaaggcga

SEQ ID NO: 2499633 - RNA, 19 nt, Homo sapiens
  misc_RNA (1)...(19): siRNA sense strand
ccaagaagcagcagcagca

SEQ ID NO: 2499634 - RNA, 19 nt, Homo sapiens
  misc_RNA (1)...(19): siRNA sense strand
cagagaaggccaaggaccu

SEQ ID NO: 2499635 - RNA, 19 nt, Homo sapiens
  misc_RNA (1)...(19): siRNA sense strand
ugaaguauuuccugggcca

SEQ ID NO: 2499636 - RNA, 19 nt, Homo sapiens
  misc_RNA (1)...(19): siRNA sense strand
aaggagaaggcaaaggaga

SEQ ID NO: 2499637 - RNA, 19 nt, Homo sapiens
  misc_RNA (1)...(19): siRNA sense strand
ggcugauggugguggagga

SEQ ID NO: 2499638 - RNA, 19 nt, Homo sapiens
  misc_RNA (1)...(19): siRNA sense strand
cuaugaaggguuuugaaua

SEQ ID NO: 2499639 - RNA, 19 nt, Homo sapiens
  misc_RNA (1)...(19): siRNA sense strand
aggcaaaggagacggcacu

SEQ ID NO: 2499640 - RNA, 19 nt, Homo sapiens
  misc_RNA (1)...(19): siRNA sense strand
aaacaugucuugacggaag

SEQ ID NO: 2499641 - RNA, 19 nt, Homo sapiens
  misc_RNA (1)...(19): siRNA sense strand
gaagccaaggagaaggcaa

SEQ ID NO: 2499642 - RNA, 19 nt, Homo sapiens
  misc_RNA (1)...(19): siRNA sense strand
cagcuacagagaaggccaa

SEQ ID NO: 2499643 - RNA, 19 nt, Homo sapiens
  misc_RNA (1)...(19): siRNA sense strand
ccaccaagaagcagcagca

SEQ ID NO: 2499644 - RNA, 19 nt, Homo sapiens
  misc_RNA (1)...(19): siRNA sense strand
cgcaaggguaugaaggaaa

SEQ ID NO: 2499645 - RNA, 19 nt, Homo sapiens
  misc_RNA (1)...(19): siRNA sense strand
ccuaugaggagcuggccaa

SEQ ID NO: 2499646 - RNA, 19 nt, Homo sapiens
  misc_RNA (1)...(19): siRNA sense strand
gcaugaguuaugaggccaa

SEQ ID NO: 2499647 - RNA, 19 nt, Homo sapiens
  misc_RNA (1)...(19): siRNA sense strand
acgcaaggguaugaaggaa

SEQ ID NO: 2499648 - RNA, 19 nt, Homo sapiens
  misc_RNA (1)...(19): siRNA sense strand
ucaugaaacagguguggau

SEQ ID NO: 2499649 - RNA, 19 nt, Homo sapiens
  misc_RNA (1)...(19): siRNA sense strand
augaaacagguguggauga

SEQ ID NO: 2499650 - RNA, 19 nt, Homo sapiens
  misc_RNA (1)...(19): siRNA sense strand
aaagugagcuccuggcuga

SEQ ID NO: 2499651 - RNA, 19 nt, Homo sapiens
  misc_RNA (1)...(19): siRNA sense strand
ccagggaacucuaggagac

SEQ ID NO: 2499652 - RNA, 19 nt, Homo sapiens
  misc_RNA (1)...(19): siRNA sense strand
gcgcaagaagagagggaag

SEQ ID NO: 2499653 - RNA, 19 nt, Homo sapiens
  misc_RNA (1)...(19): siRNA sense strand
agguaaagucacugaucuu

SEQ ID NO: 2499654 - RNA, 19 nt, Homo sapiens
  misc_RNA (1)...(19): siRNA sense strand
ggccauaccaagaagguca

SEQ ID NO: 2499655 - RNA, 19 nt, Homo sapiens
  misc_RNA (1)...(19): siRNA sense strand
ccauggacucucagaucaa

SEQ ID NO: 2499656 - RNA, 19 nt, Homo sapiens
  misc_RNA (1)...(19): siRNA sense strand
gaugaucaguacugggcuu

SEQ ID NO: 2499657 - RNA, 19 nt, Homo sapiens
  misc_RNA (1)...(19): siRNA sense strand
caucaaaguugcucaccca

SEQ ID NO: 2499658 - RNA, 19 nt, Homo sapiens
  misc_RNA (1)...(19): siRNA sense strand
gagcgcaagaagagaggga

SEQ ID NO: 2499659 - RNA, 19 nt, Homo sapiens
  misc_RNA (1)...(19): siRNA sense strand
gagggaagacugugccuga

SEQ ID NO: 2499660 - RNA, 19 nt, Homo sapiens
  misc_RNA (1)...(19): siRNA sense strand
auucagaagcuucaagaca

SEQ ID NO: 2499661 - RNA, 19 nt, Homo sapiens
  misc_RNA (1)...(19): siRNA sense strand
agccagaagagcucagcaa

SEQ ID NO: 2499662 - RNA, 19 nt, Homo sapiens
  misc_RNA (1)...(19): siRNA sense strand
ugcaaacaauggacggaga

SEQ ID NO: 2499663 - RNA, 19 nt, Homo sapiens
  misc_RNA (1)...(19): siRNA sense strand
cuaacgaagugccggagca

SEQ ID NO: 2499664 - RNA, 19 nt, Homo sapiens
  misc_RNA (1)...(19): siRNA sense strand
aggaaauccaggugggcaa

SEQ ID NO: 2499665 - RNA, 19 nt, Homo sapiens
  misc_RNA (1)...(19): siRNA sense strand
gguauguggcagugggaau

SEQ ID NO: 2499666 - RNA, 19 nt, Homo sapiens
  misc_RNA (1)...(19): siRNA sense strand
caacaaaaucgcacagaca

SEQ ID NO: 2499667 - RNA, 19 nt, Homo sapiens
  misc_RNA (1)...(19): siRNA sense strand
ucgugugcauguugguaaa

SEQ ID NO: 2499668 - RNA, 19 nt, Homo sapiens
  misc_RNA (1)...(19): siRNA sense strand
ccauguaugugacuggcaa

SEQ ID NO: 2499669 - RNA, 19 nt, Homo sapiens
  misc_RNA (1)...(19): siRNA sense strand
ggcaaauggaacuacacaa

SEQ ID NO: 2499670 - RNA, 19 nt, Homo sapiens
  misc_RNA (1)...(19): siRNA sense strand
gggugcagguuaaggucca

SEQ ID NO: 2499671 - RNA, 19 nt, Homo sapiens
  misc_RNA (1)...(19): siRNA sense strand
cccaauaguuuacugguga

SEQ ID NO: 2499672 - RNA, 19 nt, Homo sapiens
  misc_RNA (1)...(19): siRNA sense strand
gagaacagagcuacgcaga

SEQ ID NO: 2499673 - RNA, 19 nt, Homo sapiens
  misc_RNA (1)...(19): siRNA sense strand
acgacaaagcagaaacaga

SEQ ID NO: 2499674 - RNA, 19 nt, Homo sapiens
  misc_RNA (1)...(19): siRNA sense strand
aagcagaaacagaggcauc

SEQ ID NO: 2499675 - RNA, 19 nt, Homo sapiens
  misc_RNA (1)...(19): siRNA sense strand
ugaaaaggaugguggggau

SEQ ID NO: 2499676 - RNA, 19 nt, Homo sapiens
  misc_RNA (1)...(19): siRNA sense strand
acgacaaagcagaaacaga

SEQ ID NO: 2499677 - RNA, 19 nt, Homo sapiens
  misc_RNA (1)...(19): siRNA sense strand
caguggagcagcugcggaa

SEQ ID NO: 2499678 - RNA, 19 nt, Homo sapiens
  misc_RNA (1)...(19): siRNA sense strand
caggagaaggugcgauaca

SEQ ID NO: 2499679 - RNA, 19 nt, Homo sapiens
  misc_RNA (1)...(19): siRNA sense strand
aagcagaaacagaggcauc

SEQ ID NO: 2499680 - RNA, 19 nt, Homo sapiens
  misc_RNA (1)...(19): siRNA sense strand
augccaaaguggaacagau

SEQ ID NO: 2499681 - RNA, 19 nt, Homo sapiens
  misc_RNA (1)...(19): siRNA sense strand
uguuggacccagaagagaa

SEQ ID NO: 2499682 - RNA, 19 nt, Homo sapiens
  misc_RNA (1)...(19): siRNA sense strand
guuuacuggacaugggaga

SEQ ID NO: 2499683 - RNA, 19 nt, Homo sapiens
  misc_RNA (1)...(19): siRNA sense strand
caguugaacaugagcagaa

SEQ ID NO: 2499684 - RNA, 19 nt, Homo sapiens
  misc_RNA (1)...(19): siRNA sense strand
aguuaaaugcgguugaauu

SEQ ID NO: 2499685 - RNA, 19 nt, Homo sapiens
  misc_RNA (1)...(19): siRNA sense strand
gccuuuaagcagaaugaaa

SEQ ID NO: 2499686 - RNA, 19 nt, Homo sapiens
  misc_RNA (1)...(19): siRNA sense strand
aagcagugcaagcgagaau

SEQ ID NO: 2499687 - RNA, 19 nt, Homo sapiens
  misc_RNA (1)...(19): siRNA sense strand
cuaaaggugcagacaggaa

SEQ ID NO: 2499688 - RNA, 19 nt, Homo sapiens
  misc_RNA (1)...(19): siRNA sense strand
ggugcagacaggaaacaaa

SEQ ID NO: 2499689 - RNA, 19 nt, Homo sapiens
  misc_RNA (1)...(19): siRNA sense strand
gcuacaauacacagagcau

SEQ ID NO: 2499690 - RNA, 19 nt, Homo sapiens
  misc_RNA (1)...(19): siRNA sense strand
cugcaucagcacagaauuu

SEQ ID NO: 2499691 - RNA, 19 nt, Homo sapiens
  misc_RNA (1)...(19): siRNA sense strand
ccuuuaagcagaaugaaaa

SEQ ID NO: 2499692 - RNA, 19 nt, Homo sapiens
  misc_RNA (1)...(19): siRNA sense strand
ccuuuaggauccagguuga

SEQ ID NO: 2499693 - RNA, 19 nt, Homo sapiens
  misc_RNA (1)...(19): siRNA sense strand
cugaagucaaggucgguua

SEQ ID NO: 2499694 - RNA, 19 nt, Homo sapiens
  misc_RNA (1)...(19): siRNA sense strand
ggaagaaaugauugccuca

SEQ ID NO: 2499695 - RNA, 19 nt, Homo sapiens
  misc_RNA (1)...(19): siRNA sense strand
ggagaagagaacagcucau

SEQ ID NO: 2499696 - RNA, 19 nt, Homo sapiens
  misc_RNA (1)...(19): siRNA sense strand
gccuauaauugaagaugca

SEQ ID NO: 2499697 - RNA, 19 nt, Homo sapiens
  misc_RNA (1)...(19): siRNA sense strand
ugaagaugcaguugaacau

SEQ ID NO: 2499698 - RNA, 19 nt, Homo sapiens
  misc_RNA (1)...(19): siRNA sense strand
gcagaaugaaaauggagaa

SEQ ID NO: 2499699 - RNA, 19 nt, Homo sapiens
  misc_RNA (1)...(19): siRNA sense strand
acggaagcacggaggugaa

SEQ ID NO: 2499700 - RNA, 19 nt, Homo sapiens
  misc_RNA (1)...(19): siRNA sense strand
agaagauggagaagagaac

SEQ ID NO: 2499701 - RNA, 19 nt, Homo sapiens
  misc_RNA (1)...(19): siRNA sense strand
aguucaaauuuguggugca

SEQ ID NO: 2499702 - RNA, 19 nt, Homo sapiens
  misc_RNA (1)...(19): siRNA sense strand
cgagagaagauggagaaga

SEQ ID NO: 2499703 - RNA, 19 nt, Homo sapiens
  misc_RNA (1)...(19): siRNA sense strand
augcaaucuacuuggaaga

SEQ ID NO: 2499704 - RNA, 19 nt, Homo sapiens
  misc_RNA (1)...(19): siRNA sense strand
gguuguauuccaugacaga

SEQ ID NO: 2499705 - RNA, 19 nt, Homo sapiens
  misc_RNA (1)...(19): siRNA sense strand
ucaagauggacgaggugau

SEQ ID NO: 2499706 - RNA, 19 nt, Homo sapiens
  misc_RNA (1)...(19): siRNA sense strand
gcaagcagugcaagcgaga

SEQ ID NO: 2499707 - RNA, 19 nt, Homo sapiens
  misc_RNA (1)...(19): siRNA sense strand
cagugaaagcugaaaguag

SEQ ID NO: 2499708 - RNA, 19 nt, Homo sapiens
  misc_RNA (1)...(19): siRNA sense strand
gauccaggaaacacagcaa

SEQ ID NO: 2499709 - RNA, 19 nt, Homo sapiens
  misc_RNA (1)...(19): siRNA sense strand
cgguugaauuucuguggga

SEQ ID NO: 2499710 - RNA, 19 nt, Homo sapiens
  misc_RNA (1)...(19): siRNA sense strand
aucagaugguucagaauuu

SEQ ID NO: 2499711 - RNA, 19 nt, Homo sapiens
  misc_RNA (1)...(19): siRNA sense strand
gcacggaggugaaaaggga

SEQ ID NO: 2499712 - RNA, 19 nt, Homo sapiens
  misc_RNA (1)...(19): siRNA sense strand
ggauccagguugacgccuu

SEQ ID NO: 2499713 - RNA, 19 nt, Homo sapiens
  misc_RNA (1)...(19): siRNA sense strand
uugaagaugcaguugaaca

SEQ ID NO: 2499714 - RNA, 19 nt, Homo sapiens
  misc_RNA (1)...(19): siRNA sense strand
cgagaauggcaguggggca

SEQ ID NO: 2499715 - RNA, 19 nt, Homo sapiens
  misc_RNA (1)...(19): siRNA sense strand
cugcaugaugaaacgcuua

SEQ ID NO: 2499716 - RNA, 19 nt, Homo sapiens
  misc_RNA (1)...(19): siRNA sense strand
gaaggauggaaguggaauc

SEQ ID NO: 2499717 - RNA, 19 nt, Homo sapiens
  misc_RNA (1)...(19): siRNA sense strand
aguugaacaugagcagaaa

SEQ ID NO: 2499718 - RNA, 19 nt, Homo sapiens
  misc_RNA (1)...(19): siRNA sense strand
gaagaaauguggagcggaa

SEQ ID NO: 2499719 - RNA, 19 nt, Homo sapiens
  misc_RNA (1)...(19): siRNA sense strand
cuuuagggccugauggcaa

SEQ ID NO: 2499720 - RNA, 19 nt, Homo sapiens
  misc_RNA (1)...(19): siRNA sense strand
ugagaagggucguggucca

SEQ ID NO: 2499721 - RNA, 19 nt, Homo sapiens
  misc_RNA (1)...(19): siRNA sense strand
aacucaggguagagaauuu

SEQ ID NO: 2499722 - RNA, 19 nt, Homo sapiens
  misc_RNA (1)...(19): siRNA sense strand
agaacucaggguagagaau

SEQ ID NO: 2499723 - RNA, 19 nt, Homo sapiens
  misc_RNA (1)...(19): siRNA sense strand
agauugaagaccuggcuuu

SEQ ID NO: 2499724 - RNA, 19 nt, Homo sapiens
  misc_RNA (1)...(19): siRNA sense strand
cuggaggaacagauggcua

SEQ ID NO: 2499725 - RNA, 19 nt, Homo sapiens
  misc_RNA (1)...(19): siRNA sense strand
cgacaaaggaagggagcag

SEQ ID NO: 2499726 - RNA, 19 nt, Homo sapiens
  misc_RNA (1)...(19): siRNA sense strand
gagcggaaacccagcacga

SEQ ID NO: 2499727 - RNA, 19 nt, Homo sapiens
  misc_RNA (1)...(19): siRNA sense strand
ccgccaagacaggcauaaa

SEQ ID NO: 2499728 - RNA, 19 nt, Homo sapiens
  misc_RNA (1)...(19): siRNA sense strand
gggcuagaacucaggguag

SEQ ID NO: 2499729 - RNA, 19 nt, Homo sapiens
  misc_RNA (1)...(19): siRNA sense strand
agaccuggcuuuagggccu

SEQ ID NO: 2499730 - RNA, 19 nt, Homo sapiens
  misc_RNA (1)...(19): siRNA sense strand
cagaaggaucagcugguga

SEQ ID NO: 2499731 - RNA, 19 nt, Homo sapiens
  misc_RNA (1)...(19): siRNA sense strand
gcguaagagacgaguugaa

SEQ ID NO: 2499732 - RNA, 19 nt, Homo sapiens
  misc_RNA (1)...(19): siRNA sense strand
agaaagaagcauuggagca

SEQ ID NO: 2499733 - RNA, 19 nt, Homo sapiens
  misc_RNA (1)...(19): siRNA sense strand
gggaagacuaugugcccua

SEQ ID NO: 2499734 - RNA, 19 nt, Homo sapiens
  misc_RNA (1)...(19): siRNA sense strand
caaauguggucaaagguga

SEQ ID NO: 2499735 - RNA, 19 nt, Homo sapiens
  misc_RNA (1)...(19): siRNA sense strand
cagaauuagaagaagcuuu

SEQ ID NO: 2499736 - RNA, 19 nt, Homo sapiens
  misc_RNA (1)...(19): siRNA sense strand
cagaaacagaacugaaaca

SEQ ID NO: 2499737 - RNA, 19 nt, Homo sapiens
  misc_RNA (1)...(19): siRNA sense strand
gagcauaaagacagggaag

SEQ ID NO: 2499738 - RNA, 19 nt, Homo sapiens
  misc_RNA (1)...(19): siRNA sense strand
aagaugagcuccuugggaa

SEQ ID NO: 2499739 - RNA, 19 nt, Homo sapiens
  misc_RNA (1)...(19): siRNA sense strand
gccauuugauagagagcau

SEQ ID NO: 2499740 - RNA, 19 nt, Homo sapiens
  misc_RNA (1)...(19): siRNA sense strand
cagcuguagaauuggaaau

SEQ ID NO: 2499741 - RNA, 19 nt, Homo sapiens
  misc_RNA (1)...(19): siRNA sense strand
gcacaauuugauaacgaau

SEQ ID NO: 2499742 - RNA, 19 nt, Homo sapiens
  misc_RNA (1)...(19): siRNA sense strand
agagacgaguugaaggaga

SEQ ID NO: 2499743 - RNA, 19 nt, Homo sapiens
  misc_RNA (1)...(19): siRNA sense strand
gcauuggagcauaaagaca

SEQ ID NO: 2499744 - RNA, 19 nt, Homo sapiens
  misc_RNA (1)...(19): siRNA sense strand
agaugagcuccuugggaau

SEQ ID NO: 2499745 - RNA, 19 nt, Homo sapiens
  misc_RNA (1)...(19): siRNA sense strand
ggaaaauauuuauccccaa

SEQ ID NO: 2499746 - RNA, 19 nt, Homo sapiens
  misc_RNA (1)...(19): siRNA sense strand
cggcagaagaaccagacau

SEQ ID NO: 2499747 - RNA, 19 nt, Homo sapiens
  misc_RNA (1)...(19): siRNA sense strand
ugauccagaauuagaagaa

SEQ ID NO: 2499748 - RNA, 19 nt, Homo sapiens
  misc_RNA (1)...(19): siRNA sense strand
uaucacgggaguugggauu

SEQ ID NO: 2499749 - RNA, 19 nt, Homo sapiens
  misc_RNA (1)...(19): siRNA sense strand
aguacaaagaccuugauga

SEQ ID NO: 2499750 - RNA, 19 nt, Homo sapiens
  misc_RNA (1)...(19): siRNA sense strand
aaauguggucaaaggugaa

SEQ ID NO: 2499751 - RNA, 19 nt, Homo sapiens
  misc_RNA (1)...(19): siRNA sense strand
cguuaagagauaaugaaac

SEQ ID NO: 2499752 - RNA, 19 nt, Homo sapiens
  misc_RNA (1)...(19): siRNA sense strand
auaaugaaacccuggcaga

SEQ ID NO: 2499753 - RNA, 19 nt, Homo sapiens
  misc_RNA (1)...(19): siRNA sense strand
cuuaaaaguucuugggaau

SEQ ID NO: 2499754 - RNA, 19 nt, Homo sapiens
  misc_RNA (1)...(19): siRNA sense strand
guaucaugccaaagggaaa

SEQ ID NO: 2499755 - RNA, 19 nt, Homo sapiens
  misc_RNA (1)...(19): siRNA sense strand
ccaaauucucagaggaaaa

SEQ ID NO: 2499756 - RNA, 19 nt, Homo sapiens
  misc_RNA (1)...(19): siRNA sense strand
gggagaagcaagagcacuu

SEQ ID NO: 2499757 - RNA, 19 nt, Homo sapiens
  misc_RNA (1)...(19): siRNA sense strand
aggagaauuuccagaagaa

SEQ ID NO: 2499758 - RNA, 19 nt, Homo sapiens
  misc_RNA (1)...(19): siRNA sense strand
cugaaaagcacuuggaaau

SEQ ID NO: 2499759 - RNA, 19 nt, Homo sapiens
  misc_RNA (1)...(19): siRNA sense strand
agcgaaagcuagugguaau

SEQ ID NO: 2499760 - RNA, 19 nt, Homo sapiens
  misc_RNA (1)...(19): siRNA sense strand
cgacaguaccagaugaaga

SEQ ID NO: 2499761 - RNA, 19 nt, Homo sapiens
  misc_RNA (1)...(19): siRNA sense strand
auacacagcacuaggaaau

SEQ ID NO: 2499762 - RNA, 19 nt, Homo sapiens
  misc_RNA (1)...(19): siRNA sense strand
acuaggaaaucaugaucaa

SEQ ID NO: 2499763 - RNA, 19 nt, Homo sapiens
  misc_RNA (1)...(19): siRNA sense strand
gcugaaaagcacuuggaaa

SEQ ID NO: 2499764 - RNA, 19 nt, Homo sapiens
  misc_RNA (1)...(19): siRNA sense strand
agauacuauuggagaugaa

SEQ ID NO: 2499765 - RNA, 19 nt, Homo sapiens
  misc_RNA (1)...(19): siRNA sense strand
ccuuaaaaguucuugggaa

SEQ ID NO: 2499766 - RNA, 19 nt, Homo sapiens
  misc_RNA (1)...(19): siRNA sense strand
agauauuuccagagagcuu

SEQ ID NO: 2499767 - RNA, 19 nt, Homo sapiens
  misc_RNA (1)...(19): siRNA sense strand
aaagaagagcauauagcaa

SEQ ID NO: 2499768 - RNA, 19 nt, Homo sapiens
  misc_RNA (1)...(19): siRNA sense strand
gaaugauagaauuggugaa

SEQ ID NO: 2499769 - RNA, 19 nt, Homo sapiens
  misc_RNA (1)...(19): siRNA sense strand
ccaggauguaggagaauuu

SEQ ID NO: 2499770 - RNA, 19 nt, Homo sapiens
  misc_RNA (1)...(19): siRNA sense strand
gggaaagagaauggaugaa

SEQ ID NO: 2499771 - RNA, 19 nt, Homo sapiens
  misc_RNA (1)...(19): siRNA sense strand
agggaaagagaauggauga

SEQ ID NO: 2499772 - RNA, 19 nt, Homo sapiens
  misc_RNA (1)...(19): siRNA sense strand
caagaaaagaacugccaua

SEQ ID NO: 2499773 - RNA, 19 nt, Homo sapiens
  misc_RNA (1)...(19): siRNA sense strand
agacacugacuuugggcua

SEQ ID NO: 2499774 - RNA, 19 nt, Homo sapiens
  misc_RNA (1)...(19): siRNA sense strand
augaaaaggccauugauua

SEQ ID NO: 2499775 - RNA, 19 nt, Homo sapiens
  misc_RNA (1)...(19): siRNA sense strand
augcuuuguuggaguuuaa

SEQ ID NO: 2499776 - RNA, 19 nt, Homo sapiens
  misc_RNA (1)...(19): siRNA sense strand
uggaaaucuuggaaacaca

SEQ ID NO: 2499777 - RNA, 19 nt, Homo sapiens
  misc_RNA (1)...(19): siRNA sense strand
ucggaauacuacaagaaga

SEQ ID NO: 2499778 - RNA, 19 nt, Homo sapiens
  misc_RNA (1)...(19): siRNA sense strand
ugacaaggugggagaagca

SEQ ID NO: 2499779 - RNA, 19 nt, Homo sapiens
  misc_RNA (1)...(19): siRNA sense strand
aggacgugccuuuggaaau

SEQ ID NO: 2499780 - RNA, 19 nt, Homo sapiens
  misc_RNA (1)...(19): siRNA sense strand
ugaaaaggccauugauuau

SEQ ID NO: 2499781 - RNA, 19 nt, Homo sapiens
  misc_RNA (1)...(19): siRNA sense strand
caucugaagcacuuagcaa

SEQ ID NO: 2499782 - RNA, 19 nt, Homo sapiens
  misc_RNA (1)...(19): siRNA sense strand
agggcuaguuucaguaauu

SEQ ID NO: 2499783 - RNA, 19 nt, Homo sapiens
  misc_RNA (1)...(19): siRNA sense strand
acuuuacaaucuugggaau

SEQ ID NO: 2499784 - RNA, 19 nt, Homo sapiens
  misc_RNA (1)...(19): siRNA sense strand
gagaauuuccagaagaagu

SEQ ID NO: 2499785 - RNA, 19 nt, Homo sapiens
  misc_RNA (1)...(19): siRNA sense strand
ccucggaauacuacaagaa

SEQ ID NO: 2499786 - RNA, 19 nt, Homo sapiens
  misc_RNA (1)...(19): siRNA sense strand
ucaacagacugaaggggaa

SEQ ID NO: 2499787 - RNA, 19 nt, Homo sapiens
  misc_RNA (1)...(19): siRNA sense strand
uuccagaagaagugagaga

SEQ ID NO: 2499788 - RNA, 19 nt, Homo sapiens
  misc_RNA (1)...(19): siRNA sense strand
ccagaagaagugagagaug

SEQ ID NO: 2499789 - RNA, 19 nt, Homo sapiens
  misc_RNA (1)...(19): siRNA sense strand
ggaaaucaugaucaagcaa

SEQ ID NO: 2499790 - RNA, 19 nt, Homo sapiens
  misc_RNA (1)...(19): siRNA sense strand
cagaaaagguacagaacug

SEQ ID NO: 2499791 - RNA, 19 nt, Homo sapiens
  misc_RNA (1)...(19): siRNA sense strand
ccacaaaggguccgacagu

SEQ ID NO: 2499792 - RNA, 19 nt, Homo sapiens
  misc_RNA (1)...(19): siRNA sense strand
cauacacagcacuaggaaa

SEQ ID NO: 2499793 - RNA, 19 nt, Homo sapiens
  misc_RNA (1)...(19): siRNA sense strand
cauacagcuucaacaacaa

SEQ ID NO: 2499794 - RNA, 19 nt, Homo sapiens
  misc_RNA (1)...(19): siRNA sense strand
ggaugcaguuauagcucau

SEQ ID NO: 2499795 - RNA, 19 nt, Homo sapiens
  misc_RNA (1)...(19): siRNA sense strand
agcugaaagaagagcauau

SEQ ID NO: 2499796 - RNA, 19 nt, Homo sapiens
  misc_RNA (1)...(19): siRNA sense strand
gugcagauacuauuggaga

SEQ ID NO: 2499797 - RNA, 19 nt, Homo sapiens
  misc_RNA (1)...(19): siRNA sense strand
uuaaugacaaggugggaga

SEQ ID NO: 2499798 - RNA, 19 nt, Homo sapiens
  misc_RNA (1)...(19): siRNA sense strand
cauauagcaaccuuggaaa

SEQ ID NO: 2499799 - RNA, 19 nt, Homo sapiens
  misc_RNA (1)...(19): siRNA sense strand
gaauggaugaacagagagu

SEQ ID NO: 2499800 - RNA, 19 nt, Homo sapiens
  misc_RNA (1)...(19): siRNA sense strand
uugaaacugccucggaaua

SEQ ID NO: 2499801 - RNA, 19 nt, Homo sapiens
  misc_RNA (1)...(19): siRNA sense strand
uguuacagucuuggaaaua

SEQ ID NO: 2499802 - RNA, 19 nt, Homo sapiens
  misc_RNA (1)...(19): siRNA sense strand
auguuggagcuuaggaaau

SEQ ID NO: 2499803 - RNA, 19 nt, Homo sapiens
  misc_RNA (1)...(19): siRNA sense strand
auauagcaaccuuggaaau

SEQ ID NO: 2499804 - RNA, 19 nt, Homo sapiens
  misc_RNA (1)...(19): siRNA sense strand
cggaauacuacaagaagac

SEQ ID NO: 2499805 - RNA, 19 nt, Homo sapiens
  misc_RNA (1)...(19): siRNA sense strand
uuguuacagucuuggaaau

SEQ ID NO: 2499806 - RNA, 19 nt, Homo sapiens
  misc_RNA (1)...(19): siRNA sense strand
gcauguuggagcuuaggaa

SEQ ID NO: 2499807 - RNA, 19 nt, Homo sapiens
  misc_RNA (1)...(19): siRNA sense strand
gaggaaaaucagugcagau

SEQ ID NO: 2499808 - RNA, 19 nt, Homo sapiens
  misc_RNA (1)...(19): siRNA sense strand
cuuuggaaaucuuggaaac

SEQ ID NO: 2499809 - RNA, 19 nt, Homo sapiens
  misc_RNA (1)...(19): siRNA sense strand
uggugaaggaagagcaugu

SEQ ID NO: 2499810 - RNA, 19 nt, Homo sapiens
  misc_RNA (1)...(19): siRNA sense strand
acacugacuuugggcuaaa

SEQ ID NO: 2499811 - RNA, 19 nt, Homo sapiens
  misc_RNA (1)...(19): siRNA sense strand
cacauuaccuccuuggcaa

SEQ ID NO: 2499812 - RNA, 19 nt, Homo sapiens
  misc_RNA (1)...(19): siRNA sense strand
ggauggaugaucagagaug

SEQ ID NO: 2499813 - RNA, 19 nt, Homo sapiens
  misc_RNA (1)...(19): siRNA sense strand
ccccuaaaaugaugcuaaa

SEQ ID NO: 2499814 - RNA, 19 nt, Homo sapiens
  misc_RNA (1)...(19): siRNA sense strand
gggcuucgucuaacacaaa

SEQ ID NO: 2499815 - RNA, 19 nt, Homo sapiens
  misc_RNA (1)...(19): siRNA sense strand
acaacaaagaggcugauga

SEQ ID NO: 2499816 - RNA, 19 nt, Homo sapiens
  misc_RNA (1)...(19): siRNA sense strand
agccaaugauguagcaaau

SEQ ID NO: 2499817 - RNA, 19 nt, Homo sapiens
  misc_RNA (1)...(19): siRNA sense strand
gggucuaggugacagaaaa

SEQ ID NO: 2499818 - RNA, 19 nt, Homo sapiens
  misc_RNA (1)...(19): siRNA sense strand
aggaagcuccagagagaga

SEQ ID NO: 2499819 - RNA, 19 nt, Homo sapiens
  misc_RNA (1)...(19): siRNA sense strand
gaagaaauggagaagcuga

SEQ ID NO: 2499820 - RNA, 19 nt, Homo sapiens
  misc_RNA (1)...(19): siRNA sense strand
gcuugaaagaagaccauga

SEQ ID NO: 2499821 - RNA, 19 nt, Homo sapiens
  misc_RNA (1)...(19): siRNA sense strand
ggauucauuccgugccaaa

SEQ ID NO: 2499822 - RNA, 19 nt, Homo sapiens
  misc_RNA (1)...(19): siRNA sense strand
uggcaaugacguaagcaau

SEQ ID NO: 2499823 - RNA, 19 nt, Homo sapiens
  misc_RNA (1)...(19): siRNA sense strand
gguuuaugacacaggagau

SEQ ID NO: 2499824 - RNA, 19 nt, Homo sapiens
  misc_RNA (1)...(19): siRNA sense strand
uugcauuugucuuggcauu

SEQ ID NO: 2499825 - RNA, 19 nt, Homo sapiens
  misc_RNA (1)...(19): siRNA sense strand
guuucucccucguggcaaa

SEQ ID NO: 2499826 - RNA, 19 nt, Homo sapiens
  misc_RNA (1)...(19): siRNA sense strand
aaguguaguccuucugaaa

SEQ ID NO: 2499827 - RNA, 19 nt, Homo sapiens
  misc_RNA (1)...(19): siRNA sense strand
ggaagaagaguuauccaga

SEQ ID NO: 2499828 - RNA, 19 nt, Homo sapiens
  misc_RNA (1)...(19): siRNA sense strand
aguaucacaccgugcauaa

SEQ ID NO: 2499829 - RNA, 19 nt, Homo sapiens
  misc_RNA (1)...(19): siRNA sense strand
ugacagaaaaggaaguaau

SEQ ID NO: 2499830 - RNA, 19 nt, Homo sapiens
  misc_RNA (1)...(19): siRNA sense strand
guggcaaugacguaagcaa

SEQ ID NO: 2499831 - RNA, 19 nt, Homo sapiens
  misc_RNA (1)...(19): siRNA sense strand
acaugagugucaaggcaga

SEQ ID NO: 2499832 - RNA, 19 nt, Homo sapiens
  misc_RNA (1)...(19): siRNA sense strand
caaaguugucuguugguga

SEQ ID NO: 2499833 - RNA, 19 nt, Homo sapiens
  misc_RNA (1)...(19): siRNA sense strand
ugaaagaggaaaccagcau

SEQ ID NO: 2499834 - RNA, 19 nt, Homo sapiens
  misc_RNA (1)...(19): siRNA sense strand
aggcgcaauaauagcuaua

SEQ ID NO: 2499835 - RNA, 19 nt, Homo sapiens
  misc_RNA (1)...(19): siRNA sense strand
gggaaggaucugacaccga

SEQ ID NO: 2499836 - RNA, 19 nt, Homo sapiens
  misc_RNA (1)...(19): siRNA sense strand
ccaaagugagcgaaaccau

SEQ ID NO: 2499837 - RNA, 19 nt, Homo sapiens
  misc_RNA (1)...(19): siRNA sense strand
ugacauggccuaaugcaga

SEQ ID NO: 2499838 - RNA, 19 nt, Homo sapiens
  misc_RNA (1)...(19): siRNA sense strand
aagaagaccaugaagaaac

SEQ ID NO: 2499839 - RNA, 19 nt, Homo sapiens
  misc_RNA (1)...(19): siRNA sense strand
caucauguauacuggagca

SEQ ID NO: 2499840 - RNA, 19 nt, Homo sapiens
  misc_RNA (1)...(19): siRNA sense strand
ccagcguggacuugaaaga

SEQ ID NO: 2499841 - RNA, 19 nt, Homo sapiens
  misc_RNA (1)...(19): siRNA sense strand
gcgcaauaauagcuauacu

SEQ ID NO: 2499842 - RNA, 19 nt, Homo sapiens
  misc_RNA (1)...(19): siRNA sense strand
ccaugguggcaaugacgua

SEQ ID NO: 2499843 - RNA, 19 nt, Homo sapiens
  misc_RNA (1)...(19): siRNA sense strand
acuuggagauuuggaggaa

SEQ ID NO: 2499844 - RNA, 19 nt, Homo sapiens
  misc_RNA (1)...(19): siRNA sense strand
gcuugauugacguggagau

SEQ ID NO: 2499845 - RNA, 19 nt, Homo sapiens
  misc_RNA (1)...(19): siRNA sense strand
cauagauagcaccgugaau

SEQ ID NO: 2499846 - RNA, 19 nt, Homo sapiens
  misc_RNA (1)...(19): siRNA sense strand
gagaagcugacauggccua

SEQ ID NO: 2499847 - RNA, 19 nt, Homo sapiens
  misc_RNA (1)...(19): siRNA sense strand
ugggaagaaaugagagaua

SEQ ID NO: 2499848 - RNA, 19 nt, Homo sapiens
  misc_RNA (1)...(19): siRNA sense strand
gagaaaauggagagaagaa

SEQ ID NO: 2499849 - RNA, 19 nt, Homo sapiens
  misc_RNA (1)...(19): siRNA sense strand
aggcauugaaacugaacaa

SEQ ID NO: 2499850 - RNA, 19 nt, Homo sapiens
  misc_RNA (1)...(19): siRNA sense strand
agucaaauaaacagagcuu

SEQ ID NO: 2499851 - RNA, 19 nt, Homo sapiens
  misc_RNA (1)...(19): siRNA sense strand
ggacuuuauaugucggcaa

SEQ ID NO: 2499852 - RNA, 19 nt, Homo sapiens
  misc_RNA (1)...(19): siRNA sense strand
cgaaaagcccaggggaaaa

SEQ ID NO: 2499853 - RNA, 19 nt, Homo sapiens
  misc_RNA (1)...(19): siRNA sense strand
uccaaaagcaagugcaaaa

SEQ ID NO: 2499854 - RNA, 19 nt, Homo sapiens
  misc_RNA (1)...(19): siRNA sense strand
gaaauaugcuaguugggca

SEQ ID NO: 2499855 - RNA, 19 nt, Homo sapiens
  misc_RNA (1)...(19): siRNA sense strand
cgaaggucucagagcuuua

SEQ ID NO: 2499856 - RNA, 19 nt, Homo sapiens
  misc_RNA (1)...(19): siRNA sense strand
ucgaaaagcccaggggaaa

SEQ ID NO: 2499857 - RNA, 19 nt, Homo sapiens
  misc_RNA (1)...(19): siRNA sense strand
ugaaugaguaucuggaaca

SEQ ID NO: 2499858 - RNA, 19 nt, Homo sapiens
  misc_RNA (1)...(19): siRNA sense strand
aguaagaaggaaaccaaau

SEQ ID NO: 2499859 - RNA, 19 nt, Homo sapiens
  misc_RNA (1)...(19): siRNA sense strand
gucgaagacauguuggaaa

SEQ ID NO: 2499860 - RNA, 19 nt, Homo sapiens
  misc_RNA (1)...(19): siRNA sense strand
gcaugagauuugaagccau

SEQ ID NO: 2499861 - RNA, 19 nt, Homo sapiens
  misc_RNA (1)...(19): siRNA sense strand
agauuugaagccauggaaa

SEQ ID NO: 2499862 - RNA, 19 nt, Homo sapiens
  misc_RNA (1)...(19): siRNA sense strand
ugcaagaaagcguaagauu

SEQ ID NO: 2499863 - RNA, 19 nt, Homo sapiens
  misc_RNA (1)...(19): siRNA sense strand
aacagaaauaugagagcuu

SEQ ID NO: 2499864 - RNA, 19 nt, Homo sapiens
  misc_RNA (1)...(19): siRNA sense strand
uggaaguuggagaagaauu

SEQ ID NO: 2499865 - RNA, 19 nt, Homo sapiens
  misc_RNA (1)...(19): siRNA sense strand
ggcgaaggucucagagcuu

SEQ ID NO: 2499866 - RNA, 19 nt, Homo sapiens
  misc_RNA (1)...(19): siRNA sense strand
cuugggaagaaaugagaga

SEQ ID NO: 2499867 - RNA, 19 nt, Homo sapiens
  misc_RNA (1)...(19): siRNA sense strand
gggagaugauauuuggauc

SEQ ID NO: 2499868 - RNA, 19 nt, Homo sapiens
  misc_RNA (1)...(19): siRNA sense strand
gauuugaagccauggaaag

SEQ ID NO: 2499869 - RNA, 19 nt, Homo sapiens
  misc_RNA (1)...(19): siRNA sense strand
aaguaagaaggaaaccaaa

SEQ ID NO: 2499870 - RNA, 19 nt, Homo sapiens
  misc_RNA (1)...(19): siRNA sense strand
ccauggaaagauaugauga

SEQ ID NO: 2499871 - RNA, 19 nt, Homo sapiens
  misc_RNA (1)...(19): siRNA sense strand
gcugcaagaaagcguaaga

SEQ ID NO: 2499872 - RNA, 19 nt, Homo sapiens
  misc_RNA (1)...(19): siRNA sense strand
augaacaugacuaugcaaa

SEQ ID NO: 2499873 - RNA, 19 nt, Homo sapiens
  misc_RNA (1)...(19): siRNA sense strand
ugaacaugacuaugcaaaa

SEQ ID NO: 2499874 - RNA, 19 nt, Homo sapiens
  misc_RNA (1)...(19): siRNA sense strand
ggauaacaguuuugagaaa

SEQ ID NO: 2499875 - RNA, 19 nt, Homo sapiens
  misc_RNA (1)...(19): siRNA sense strand
gcggaagagacuagaagaa

SEQ ID NO: 2499876 - RNA, 19 nt, Homo sapiens
  misc_RNA (1)...(19): siRNA sense strand
gggaaugccaaauaagaaa

SEQ ID NO: 2499877 - RNA, 19 nt, Homo sapiens
  misc_RNA (1)...(19): siRNA sense strand
aaauagaagagcaggagaa

SEQ ID NO: 2499878 - RNA, 19 nt, Homo sapiens
  misc_RNA (1)...(19): siRNA sense strand
gaucagugggagauggaaa

SEQ ID NO: 2499879 - RNA, 19 nt, Homo sapiens
  misc_RNA (1)...(19): siRNA sense strand
ccaaagaaagcgaggaguu

SEQ ID NO: 2499880 - RNA, 19 nt, Homo sapiens
  misc_RNA (1)...(19): siRNA sense strand
gagaaaaugcucaggcaaa

SEQ ID NO: 2499881 - RNA, 19 nt, Homo sapiens
  misc_RNA (1)...(19): siRNA sense strand
gggaguauaugcaggaaaa

SEQ ID NO: 2499882 - RNA, 19 nt, Homo sapiens
  misc_RNA (1)...(19): siRNA sense strand
agacuuaugcagacagaua

SEQ ID NO: 2499883 - RNA, 19 nt, Homo sapiens
  misc_RNA (1)...(19): siRNA sense strand
agaaguucgcaaagagaaa

SEQ ID NO: 2499884 - RNA, 19 nt, Homo sapiens
  misc_RNA (1)...(19): siRNA sense strand
ugagaaaguuaaacggaga

SEQ ID NO: 2499885 - RNA, 19 nt, Homo sapiens
  misc_RNA (1)...(19): siRNA sense strand
ggaacaagaaagacugcaa

SEQ ID NO: 2499886 - RNA, 19 nt, Homo sapiens
  misc_RNA (1)...(19): siRNA sense strand
cgacaauuuaagaagacaa

SEQ ID NO: 2499887 - RNA, 19 nt, Homo sapiens
  misc_RNA (1)...(19): siRNA sense strand
uguaaugagucuucagaau

SEQ ID NO: 2499888 - RNA, 19 nt, Homo sapiens
  misc_RNA (1)...(19): siRNA sense strand
aagcaagaaagcagguuaa

SEQ ID NO: 2499889 - RNA, 19 nt, Homo sapiens
  misc_RNA (1)...(19): siRNA sense strand
caggaaagggaacaagaaa

SEQ ID NO: 2499890 - RNA, 19 nt, Homo sapiens
  misc_RNA (1)...(19): siRNA sense strand
cgacaaacuguaaaagaua

SEQ ID NO: 2499891 - RNA, 19 nt, Homo sapiens
  misc_RNA (1)...(19): siRNA sense strand
cagaauuguuaaugagagu

SEQ ID NO: 2499892 - RNA, 19 nt, Homo sapiens
  misc_RNA (1)...(19): siRNA sense strand
uagaagagcaggagaaaau

SEQ ID NO: 2499893 - RNA, 19 nt, Homo sapiens
  misc_RNA (1)...(19): siRNA sense strand
uggaauagacuuagcuaga

SEQ ID NO: 2499894 - RNA, 19 nt, Homo sapiens
  misc_RNA (1)...(19): siRNA sense strand
aauuaagcccuaaaggaaa

SEQ ID NO: 2499895 - RNA, 19 nt, Homo sapiens
  misc_RNA (1)...(19): siRNA sense strand
ugauaagauagcugggauu

SEQ ID NO: 2499896 - RNA, 19 nt, Homo sapiens
  misc_RNA (1)...(19): siRNA sense strand
ggauuuugccauuggauaa

SEQ ID NO: 2499897 - RNA, 19 nt, Homo sapiens
  misc_RNA (1)...(19): siRNA sense strand
ccaauaaaugccugugaau

SEQ ID NO: 2499898 - RNA, 19 nt, Homo sapiens
  misc_RNA (1)...(19): siRNA sense strand
agauauugaugguuugcaa

SEQ ID NO: 2499899 - RNA, 19 nt, Homo sapiens
  misc_RNA (1)...(19): siRNA sense strand
uggaauuagaauggagaaa

SEQ ID NO: 2499900 - RNA, 19 nt, Homo sapiens
  misc_RNA (1)...(19): siRNA sense strand
cugaaaugggaaugccaaa

SEQ ID NO: 2499901 - RNA, 19 nt, Homo sapiens
  misc_RNA (1)...(19): siRNA sense strand
aaagaaaggaaaugcaaca

SEQ ID NO: 2499902 - RNA, 19 nt, Homo sapiens
  misc_RNA (1)...(19): siRNA sense strand
gagccaaguaugaguccua

SEQ ID NO: 2499903 - RNA, 19 nt, Homo sapiens
  misc_RNA (1)...(19): siRNA sense strand
cagaauacaagaagcauca

SEQ ID NO: 2499904 - RNA, 19 nt, Homo sapiens
  misc_RNA (1)...(19): siRNA sense strand
aggaaaugcaacaagaaaa

SEQ ID NO: 2499905 - RNA, 19 nt, Homo sapiens
  misc_RNA (1)...(19): siRNA sense strand
aaauaacugcaguggcaaa

SEQ ID NO: 2499906 - RNA, 19 nt, Homo sapiens
  misc_RNA (1)...(19): siRNA sense strand
agcaaagcuugauaagaua

SEQ ID NO: 2499907 - RNA, 19 nt, Homo sapiens
  misc_RNA (1)...(19): siRNA sense strand
ccgaagacguuccaggaca

SEQ ID NO: 2499908 - RNA, 19 nt, Homo sapiens
  misc_RNA (1)...(19): siRNA sense strand
gcaagguuuaugugggcaa

SEQ ID NO: 2499909 - RNA, 19 nt, Homo sapiens
  misc_RNA (1)...(19): siRNA sense strand
augucaaucuucaggaaau

SEQ ID NO: 2499910 - RNA, 19 nt, Homo sapiens
  misc_RNA (1)...(19): siRNA sense strand
agccaguauguuagagaaa

SEQ ID NO: 2499911 - RNA, 19 nt, Homo sapiens
  misc_RNA (1)...(19): siRNA sense strand
uguaauggaugcagcugaa

SEQ ID NO: 2499912 - RNA, 19 nt, Homo sapiens
  misc_RNA (1)...(19): siRNA sense strand
ccaggagauucuugacaau

SEQ ID NO: 2499913 - RNA, 19 nt, Homo sapiens
  misc_RNA (1)...(19): siRNA sense strand
gcaccuaaugccagugauu

SEQ ID NO: 2499914 - RNA, 19 nt, Homo sapiens
  misc_RNA (1)...(19): siRNA sense strand
uuaacaaugcaguggaauu

SEQ ID NO: 2499915 - RNA, 19 nt, Homo sapiens
  misc_RNA (1)...(19): siRNA sense strand
aggaaagaguguuagcuca

SEQ ID NO: 2499916 - RNA, 19 nt, Homo sapiens
  misc_RNA (1)...(19): siRNA sense strand
cgaagacguuccaggacau

SEQ ID NO: 2499917 - RNA, 19 nt, Homo sapiens
  misc_RNA (1)...(19): siRNA sense strand
caaaauaacugcaguggca

SEQ ID NO: 2499918 - RNA, 19 nt, Homo sapiens
  misc_RNA (1)...(19): siRNA sense strand
aaggaaaugcaacaagaaa

SEQ ID NO: 2499919 - RNA, 19 nt, Homo sapiens
  misc_RNA (1)...(19): siRNA sense strand
cuagagauucagaaggauu

SEQ ID NO: 2499920 - RNA, 19 nt, Homo sapiens
  misc_RNA (1)...(19): siRNA sense strand
aggaaauagaagagcagga

SEQ ID NO: 2499921 - RNA, 19 nt, Homo sapiens
  misc_RNA (1)...(19): siRNA sense strand
acaucaugaucgagaaguu

SEQ ID NO: 2499922 - RNA, 19 nt, Homo sapiens
  misc_RNA (1)...(19): siRNA sense strand
cauaagaaguuuucaguca

SEQ ID NO: 2499923 - RNA, 19 nt, Homo sapiens
  misc_RNA (1)...(19): siRNA sense strand
agguaaaucaaaucaggua

SEQ ID NO: 2499924 - RNA, 19 nt, Homo sapiens
  misc_RNA (1)...(19): siRNA sense strand
guuaacaggaagaaagcuu

SEQ ID NO: 2499925 - RNA, 19 nt, Homo sapiens
  misc_RNA (1)...(19): siRNA sense strand
agucaaagaagaugugguu

SEQ ID NO: 2499926 - RNA, 19 nt, Homo sapiens
  misc_RNA (1)...(19): siRNA sense strand
ucaaagaagaugugguuuu

SEQ ID NO: 2499927 - RNA, 19 nt, Homo sapiens
  misc_RNA (1)...(19): siRNA sense strand
cuaauucagaagucagaaa

SEQ ID NO: 2499928 - RNA, 19 nt, Homo sapiens
  misc_RNA (1)...(19): siRNA sense strand
auaaugaggaccaauguaa

SEQ ID NO: 2499929 - RNA, 19 nt, Homo sapiens
  misc_RNA (1)...(19): siRNA sense strand
aggcaauggacuuaauuau

SEQ ID NO: 2499930 - RNA, 19 nt, Homo sapiens
  misc_RNA (1)...(19): siRNA sense strand
gacucuaguuugcuggaaa

SEQ ID NO: 2499931 - RNA, 19 nt, Homo sapiens
  misc_RNA (1)...(19): siRNA sense strand
cuugauaggaagaaauaca

SEQ ID NO: 2499932 - RNA, 19 nt, Homo sapiens
  misc_RNA (1)...(19): siRNA sense strand
acaaaauccuucugaaaca

SEQ ID NO: 2499933 - RNA, 19 nt, Homo sapiens
  misc_RNA (1)...(19): siRNA sense strand
acuucaggaaagaguguua

SEQ ID NO: 2499934 - RNA, 19 nt, Homo sapiens
  misc_RNA (1)...(19): siRNA sense strand
gguaaaucaaaucagguau

SEQ ID NO: 2499935 - RNA, 19 nt, Homo sapiens
  misc_RNA (1)...(19): siRNA sense strand
acaugaaagcugcugaaau

SEQ ID NO: 2499936 - RNA, 19 nt, Homo sapiens
  misc_RNA (1)...(19): siRNA sense strand
cauaaauagcacaaagaca

SEQ ID NO: 2499937 - RNA, 19 nt, Homo sapiens
  misc_RNA (1)...(19): siRNA sense strand
cagugauauuggaugcaaa

SEQ ID NO: 2499938 - RNA, 19 nt, Homo sapiens
  misc_RNA (1)...(19): siRNA sense strand
gugacuggcaaguggaaca

SEQ ID NO: 2499939 - RNA, 19 nt, Homo sapiens
  misc_RNA (1)...(19): siRNA sense strand
gggcugugugcguuggcaa

SEQ ID NO: 2499940 - RNA, 19 nt, Homo sapiens
  misc_RNA (1)...(19): siRNA sense strand
auucugaacacgcugguaa

SEQ ID NO: 2499941 - RNA, 19 nt, Homo sapiens
  misc_RNA (1)...(19): siRNA sense strand
aggaaguaggagcagaauu

SEQ ID NO: 2499942 - RNA, 19 nt, Homo sapiens
  misc_RNA (1)...(19): siRNA sense strand
cacaaauacaucaggucuu

SEQ ID NO: 2499943 - RNA, 19 nt, Homo sapiens
  misc_RNA (1)...(19): siRNA sense strand
uaguguugcugcagggcua

SEQ ID NO: 2499944 - RNA, 19 nt, Homo sapiens
  misc_RNA (1)...(19): siRNA sense strand
ggguggauguuuugcaaga

SEQ ID NO: 2499945 - RNA, 19 nt, Homo sapiens
  misc_RNA (1)...(19): siRNA sense strand
cuccagagagccaggaaca

SEQ ID NO: 2499946 - RNA, 19 nt, Homo sapiens
  misc_RNA (1)...(19): siRNA sense strand
uacaacugaucuugggcaa

SEQ ID NO: 2499947 - RNA, 19 nt, Homo sapiens
  misc_RNA (1)...(19): siRNA sense strand
gaucaaggaccaagagcga

SEQ ID NO: 2499948 - RNA, 19 nt, Homo sapiens
  misc_RNA (1)...(19): siRNA sense strand
gcuuugaaguggaaggcca

SEQ ID NO: 2499949 - RNA, 19 nt, Homo sapiens
  misc_RNA (1)...(19): siRNA sense strand
agucuuugcuacugcacaa

SEQ ID NO: 2499950 - RNA, 19 nt, Homo sapiens
  misc_RNA (1)...(19): siRNA sense strand
agauguaccaggaggagau

SEQ ID NO: 2499951 - RNA, 19 nt, Homo sapiens
  misc_RNA (1)...(19): siRNA sense strand
cgaaugaacuacagccgca

SEQ ID NO: 2499952 - RNA, 19 nt, Homo sapiens
  misc_RNA (1)...(19): siRNA sense strand
aggaaaucuccaaagaaga

SEQ ID NO: 2499953 - RNA, 19 nt, Homo sapiens
  misc_RNA (1)...(19): siRNA sense strand
agcaagagcagcagcgaca

SEQ ID NO: 2499954 - RNA, 19 nt, Homo sapiens
  misc_RNA (1)...(19): siRNA sense strand
ggauccucguggagacauu

SEQ ID NO: 2499955 - RNA, 19 nt, Homo sapiens
  misc_RNA (1)...(19): siRNA sense strand
ccgugguggaggaaggcua

SEQ ID NO: 2499956 - RNA, 19 nt, Homo sapiens
  misc_RNA (1)...(19): siRNA sense strand
aggagauccaggaguggua

SEQ ID NO: 2499957 - RNA, 19 nt, Homo sapiens
  misc_RNA (1)...(19): siRNA sense strand
ccuuuauccucgaggccuu

SEQ ID NO: 2499958 - RNA, 19 nt, Homo sapiens
  misc_RNA (1)...(19): siRNA sense strand
ggagcaugccagggagcaa

SEQ ID NO: 2499959 - RNA, 19 nt, Homo sapiens
  misc_RNA (1)...(19): siRNA sense strand
uccaggaaggcgagaacaa

SEQ ID NO: 2499960 - RNA, 19 nt, Homo sapiens
  misc_RNA (1)...(19): siRNA sense strand
cuuugaaguggaaggccaa

SEQ ID NO: 2499961 - RNA, 19 nt, Homo sapiens
  misc_RNA (1)...(19): siRNA sense strand
gcaacaggaccguggugga

SEQ ID NO: 2499962 - RNA, 19 nt, Homo sapiens
  misc_RNA (1)...(19): siRNA sense strand
gggagaugaauuaccaaga

SEQ ID NO: 2499963 - RNA, 19 nt, Homo sapiens
  misc_RNA (1)...(19): siRNA sense strand
uuaaguugaaggagcgcua

SEQ ID NO: 2499964 - RNA, 19 nt, Homo sapiens
  misc_RNA (1)...(19): siRNA sense strand
ugaaggagcgcuaccgcaa

SEQ ID NO: 2499965 - RNA, 19 nt, Homo sapiens
  misc_RNA (1)...(19): siRNA sense strand
ggacggcgaucaaggacca

SEQ ID NO: 2499966 - RNA, 19 nt, Homo sapiens
  misc_RNA (1)...(19): siRNA sense strand
ccugauggugguaguguuu

SEQ ID NO: 2499967 - RNA, 19 nt, Homo sapiens
  misc_RNA (1)...(19): siRNA sense strand
cggccuaccucuuugcaca

SEQ ID NO: 2499968 - RNA, 19 nt, Homo sapiens
  misc_RNA (1)...(19): siRNA sense strand
guggagacauuuaugcuga

SEQ ID NO: 2499969 - RNA, 19 nt, Homo sapiens
  misc_RNA (1)...(19): siRNA sense strand
aguccaaggccuuccagua

SEQ ID NO: 2499970 - RNA, 19 nt, Homo sapiens
  misc_RNA (1)...(19): siRNA sense strand
caacacgaguacaguggca

SEQ ID NO: 2499971 - RNA, 19 nt, Homo sapiens
  misc_RNA (1)...(19): siRNA sense strand
ccaugguggugaugacgau

SEQ ID NO: 2499972 - RNA, 19 nt, Homo sapiens
  misc_RNA (1)...(19): siRNA sense strand
gaugaauuaccaagaggca

SEQ ID NO: 2499973 - RNA, 19 nt, Homo sapiens
  misc_RNA (1)...(19): siRNA sense strand
ggaaauaugaagagagucu

SEQ ID NO: 2499974 - RNA, 19 nt, Homo sapiens
  misc_RNA (1)...(19): siRNA sense strand
uggagaaauuggagcagaa

SEQ ID NO: 2499975 - RNA, 19 nt, Homo sapiens
  misc_RNA (1)...(19): siRNA sense strand
ccgaagugaagaagguaaa

SEQ ID NO: 2499976 - RNA, 19 nt, Homo sapiens
  misc_RNA (1)...(19): siRNA sense strand
ugauacgagaugagagaaa

SEQ ID NO: 2499977 - RNA, 19 nt, Homo sapiens
  misc_RNA (1)...(19): siRNA sense strand
uaggauuaguccaggauaa

SEQ ID NO: 2499978 - RNA, 19 nt, Homo sapiens
  misc_RNA (1)...(19): siRNA sense strand
gguauuuggucgaguaaaa

SEQ ID NO: 2499979 - RNA, 19 nt, Homo sapiens
  misc_RNA (1)...(19): siRNA sense strand
ccugauaguugcagacgaa

SEQ ID NO: 2499980 - RNA, 19 nt, Homo sapiens
  misc_RNA (1)...(19): siRNA sense strand
ccaaugaaauggugcccaa

SEQ ID NO: 2499981 - RNA, 19 nt, Homo sapiens
  misc_RNA (1)...(19): siRNA sense strand
gguaaaaccacgaaagauu

SEQ ID NO: 2499982 - RNA, 19 nt, Homo sapiens
  misc_RNA (1)...(19): siRNA sense strand
cugcuuaaccaguuggaaa

SEQ ID NO: 2499983 - RNA, 19 nt, Homo sapiens
  misc_RNA (1)...(19): siRNA sense strand
gggaagaacaaaaggaaga

SEQ ID NO: 2499984 - RNA, 19 nt, Homo sapiens
  misc_RNA (1)...(19): siRNA sense strand
gagaaagugcugaaggaga

SEQ ID NO: 2499985 - RNA, 19 nt, Homo sapiens
  misc_RNA (1)...(19): siRNA sense strand
guauaaugaucuagagaag

SEQ ID NO: 2499986 - RNA, 19 nt, Homo sapiens
  misc_RNA (1)...(19): siRNA sense strand
ccacgaaagauuuaaguau

SEQ ID NO: 2499987 - RNA, 19 nt, Homo sapiens
  misc_RNA (1)...(19): siRNA sense strand
gagucuaaaggcagaauua

SEQ ID NO: 2499988 - RNA, 19 nt, Homo sapiens
  misc_RNA (1)...(19): siRNA sense strand
gcguugaauuauagacaga

SEQ ID NO: 2499989 - RNA, 19 nt, Homo sapiens
  misc_RNA (1)...(19): siRNA sense strand
gggagauaccauuaugaaa

SEQ ID NO: 2499990 - RNA, 19 nt, Homo sapiens
  misc_RNA (1)...(19): siRNA sense strand
acaagaagaugaucggcaa

SEQ ID NO: 2499991 - RNA, 19 nt, Homo sapiens
  misc_RNA (1)...(19): siRNA sense strand
cuggaaacaagaagacaaa

SEQ ID NO: 2499992 - RNA, 19 nt, Homo sapiens
  misc_RNA (1)...(19): siRNA sense strand
agauggaagauuuguguaa

SEQ ID NO: 2499993 - RNA, 19 nt, Homo sapiens
  misc_RNA (1)...(19): siRNA sense strand
cauuugaauuugggagaua

SEQ ID NO: 2499994 - RNA, 19 nt, Homo sapiens
  misc_RNA (1)...(19): siRNA sense strand
gcacauaugcugaucaaaa

SEQ ID NO: 2499995 - RNA, 19 nt, Homo sapiens
  misc_RNA (1)...(19): siRNA sense strand
ugucuuagccuuugaacaa

SEQ ID NO: 2499996 - RNA, 19 nt, Homo sapiens
  misc_RNA (1)...(19): siRNA sense strand
ggugacagcuacuggaaca

SEQ ID NO: 2499997 - RNA, 19 nt, Homo sapiens
  misc_RNA (1)...(19): siRNA sense strand
agaccaaggcugaaauaau

SEQ ID NO: 2499998 - RNA, 19 nt, Homo sapiens
  misc_RNA (1)...(19): siRNA sense strand
ggaagaauaagcagaacau

SEQ ID NO: 2499999 - RNA, 19 nt, Homo sapiens
  misc_RNA (1)...(19): siRNA sense strand
uugaagagcaauugaaaga

SEQ ID NO: 2500000 - RNA, 19 nt, Homo sapiens
  misc_RNA (1)...(19): siRNA sense strand
ucucaagacguuauggaaa

SEQ ID NO: 2500001 - RNA, 19 nt, Homo sapiens
  misc_RNA (1)...(19): siRNA sense strand
ugauaaauuugcuggagau

SEQ ID NO: 2500002 - RNA, 19 nt, Homo sapiens
  misc_RNA (1)...(19): siRNA sense strand
cauaaguaauccugaacau

SEQ ID NO: 2500003 - RNA, 19 nt, Homo sapiens
  misc_RNA (1)...(19): siRNA sense strand
ugaaagaaaaggugaagaa

SEQ ID NO: 2500004 - RNA, 19 nt, Homo sapiens
  misc_RNA (1)...(19): siRNA sense strand
agaaagggguauuggauau

SEQ ID NO: 2500005 - RNA, 19 nt, Homo sapiens
  misc_RNA (1)...(19): siRNA sense strand
cuucaaggaugccgaguau

SEQ ID NO: 2500006 - RNA, 19 nt, Homo sapiens
  misc_RNA (1)...(19): siRNA sense strand
gucaagaccugaugggaga

SEQ ID NO: 2500007 - RNA, 19 nt, Homo sapiens
  misc_RNA (1)...(19): siRNA sense strand
ugauaaccgaggaaggaaa

SEQ ID NO: 2500008 - RNA, 19 nt, Homo sapiens
  misc_RNA (1)...(19): siRNA sense strand
aacaaaaggaagagcaaaa

SEQ ID NO: 2500009 - RNA, 19 nt, Homo sapiens
  misc_RNA (1)...(19): siRNA sense strand
cagaggauaccaaggcaaa

SEQ ID NO: 2500010 - RNA, 19 nt, Homo sapiens
  misc_RNA (1)...(19): siRNA sense strand
ucucaaagagcuugugcua

SEQ ID NO: 2500011 - RNA, 19 nt, Homo sapiens
  misc_RNA (1)...(19): siRNA sense strand
cugcaaggaaggaagagua

SEQ ID NO: 2500012 - RNA, 19 nt, Homo sapiens
  misc_RNA (1)...(19): siRNA sense strand
ccauguuacucuaggcaca

SEQ ID NO: 2500013 - RNA, 19 nt, Homo sapiens
  misc_RNA (1)...(19): siRNA sense strand
gugaacaguaauugcuuaa

SEQ ID NO: 2500014 - RNA, 19 nt, Homo sapiens
  misc_RNA (1)...(19): siRNA sense strand
cugaaauaauugcuagaga

SEQ ID NO: 2500015 - RNA, 19 nt, Homo sapiens
  misc_RNA (1)...(19): siRNA sense strand
ggaaacaagaagacaaaau

SEQ ID NO: 2500016 - RNA, 19 nt, Homo sapiens
  misc_RNA (1)...(19): siRNA sense strand
gggaaaaguuaaacaaagu

SEQ ID NO: 2500017 - RNA, 19 nt, Homo sapiens
  misc_RNA (1)...(19): siRNA sense strand
uggagaaagugcugaagga

SEQ ID NO: 2500018 - RNA, 19 nt, Homo sapiens
  misc_RNA (1)...(19): siRNA sense strand
gcugaauauuccaguuuau

SEQ ID NO: 2500019 - RNA, 19 nt, Homo sapiens
  misc_RNA (1)...(19): siRNA sense strand
cagaaugguacuucagaau

SEQ ID NO: 2500020 - RNA, 19 nt, Homo sapiens
  misc_RNA (1)...(19): siRNA sense strand
ggauaucaucacagugcua

SEQ ID NO: 2500021 - RNA, 19 nt, Homo sapiens
  misc_RNA (1)...(19): siRNA sense strand
gaaugaaggagaugcuuau

SEQ ID NO: 2500022 - RNA, 19 nt, Homo sapiens
  misc_RNA (1)...(19): siRNA sense strand
uaaaaguagcugugugaaa

SEQ ID NO: 2500023 - RNA, 19 nt, Homo sapiens
  misc_RNA (1)...(19): siRNA sense strand
uagagaagaaccuggaaau

SEQ ID NO: 2500024 - RNA, 19 nt, Homo sapiens
  misc_RNA (1)...(19): siRNA sense strand
gguauaaugaucuagagaa

SEQ ID NO: 2500025 - RNA, 19 nt, Homo sapiens
  misc_RNA (1)...(19): siRNA sense strand
gugaagaauugaaagccuu

SEQ ID NO: 2500026 - RNA, 19 nt, Homo sapiens
  misc_RNA (1)...(19): siRNA sense strand
gggagaugacccagaggau

SEQ ID NO: 2500027 - RNA, 19 nt, Homo sapiens
  misc_RNA (1)...(19): siRNA sense strand
caggaugaaugaaggagau

SEQ ID NO: 2500028 - RNA, 19 nt, Homo sapiens
  misc_RNA (1)...(19): siRNA sense strand
cucaagacguuauggaaaa

SEQ ID NO: 2500029 - RNA, 19 nt, Homo sapiens
  misc_RNA (1)...(19): siRNA sense strand
uagugaugcuuuagaugaa

SEQ ID NO: 2500030 - RNA, 19 nt, Homo sapiens
  misc_RNA (1)...(19): siRNA sense strand
aggaaaugucccaguuaau

SEQ ID NO: 2500031 - RNA, 19 nt, Homo sapiens
  misc_RNA (1)...(19): siRNA sense strand
agaaacagucucuucgaaa

SEQ ID NO: 2500032 - RNA, 19 nt, Homo sapiens
  misc_RNA (1)...(19): siRNA sense strand
gugaaaaugaagacgacaa

SEQ ID NO: 2500033 - RNA, 19 nt, Homo sapiens
  misc_RNA (1)...(19): siRNA sense strand
cuagagaagaaccuggaaa

SEQ ID NO: 2500034 - RNA, 19 nt, Homo sapiens
  misc_RNA (1)...(19): siRNA sense strand
gagcuuuuguugaagaaua

SEQ ID NO: 2500035 - RNA, 19 nt, Homo sapiens
  misc_RNA (1)...(19): siRNA sense strand
cgaaaaucaucgugacuca

SEQ ID NO: 2500036 - RNA, 19 nt, Homo sapiens
  misc_RNA (1)...(19): siRNA sense strand
gcuagagagaauaagaaaa

SEQ ID NO: 2500037 - RNA, 19 nt, Homo sapiens
  misc_RNA (1)...(19): siRNA sense strand
uugucuugguggagaaauu

SEQ ID NO: 2500038 - RNA, 19 nt, Homo sapiens
  misc_RNA (1)...(19): siRNA sense strand
ccagaaugguacuucagaa

SEQ ID NO: 2500039 - RNA, 19 nt, Homo sapiens
  misc_RNA (1)...(19): siRNA sense strand
ggaucaaagccuaauacau

SEQ ID NO: 2500040 - RNA, 19 nt, Homo sapiens
  misc_RNA (1)...(19): siRNA sense strand
uccaacaggugaacaguaa

SEQ ID NO: 2500041 - RNA, 19 nt, Homo sapiens
  misc_RNA (1)...(19): siRNA sense strand
gauaaauuugcuggagaua

SEQ ID NO: 2500042 - RNA, 19 nt, Homo sapiens
  misc_RNA (1)...(19): siRNA sense strand
uaguauuaguauuggcaca

SEQ ID NO: 2500043 - RNA, 19 nt, Homo sapiens
  misc_RNA (1)...(19): siRNA sense strand
ugaaugaaggagaugcuua

SEQ ID NO: 2500044 - RNA, 19 nt, Homo sapiens
  misc_RNA (1)...(19): siRNA sense strand
gcuuaacccugcaggagau

SEQ ID NO: 2500045 - RNA, 19 nt, Homo sapiens
  misc_RNA (1)...(19): siRNA sense strand
uccuugauguuguggauaa

SEQ ID NO: 2500046 - RNA, 19 nt, Homo sapiens
  misc_RNA (1)...(19): siRNA sense strand
acuggaaacaagaagacaa

SEQ ID NO: 2500047 - RNA, 19 nt, Homo sapiens
  misc_RNA (1)...(19): siRNA sense strand
uaggaaauaugaagagagu

SEQ ID NO: 2500048 - RNA, 19 nt, Homo sapiens
  misc_RNA (1)...(19): siRNA sense strand
augaagaaguugcugggaa

SEQ ID NO: 2500049 - RNA, 19 nt, Homo sapiens
  misc_RNA (1)...(19): siRNA sense strand
guaagaacuuggagcagga

SEQ ID NO: 2500050 - RNA, 19 nt, Homo sapiens
  misc_RNA (1)...(19): siRNA sense strand
ccugagaagcgaagggcca

SEQ ID NO: 2500051 - RNA, 19 nt, Homo sapiens
  misc_RNA (1)...(19): siRNA sense strand
ugaagaaguugcugggaag

SEQ ID NO: 2500052 - RNA, 19 nt, Homo sapiens
  misc_RNA (1)...(19): siRNA sense strand
uggaaguuugagaagaaua

SEQ ID NO: 2500053 - RNA, 19 nt, Homo sapiens
  misc_RNA (1)...(19): siRNA sense strand
aggagaucauccaguacaa

SEQ ID NO: 2500054 - RNA, 19 nt, Homo sapiens
  misc_RNA (1)...(19): siRNA sense strand
ccaggaagcugaagaggag

SEQ ID NO: 2500055 - RNA, 19 nt, Homo sapiens
  misc_RNA (1)...(19): siRNA sense strand
acuuggagcaggagaucau

SEQ ID NO: 2500056 - RNA, 19 nt, Homo sapiens
  misc_RNA (1)...(19): siRNA sense strand
cguuuauccugaagaccuu

SEQ ID NO: 2500057 - RNA, 19 nt, Homo sapiens
  misc_RNA (1)...(19): siRNA sense strand
caggaagagaacuggaagu

SEQ ID NO: 2500058 - RNA, 19 nt, Homo sapiens
  misc_RNA (1)...(19): siRNA sense strand
ggcaagacguuuauccuga

SEQ ID NO: 2500059 - RNA, 19 nt, Homo sapiens
  misc_RNA (1)...(19): siRNA sense strand
aggauggugcuguggaaca

SEQ ID NO: 2500060 - RNA, 19 nt, Homo sapiens
  misc_RNA (1)...(19): siRNA sense strand
agaacuuggagcaggagau

SEQ ID NO: 2500061 - RNA, 19 nt, Homo sapiens
  misc_RNA (1)...(19): siRNA sense strand
gccaugaaauugacgggaa

SEQ ID NO: 2500062 - RNA, 19 nt, Homo sapiens
  misc_RNA (1)...(19): siRNA sense strand
ccgacuuaaacaaggaaaa

SEQ ID NO: 2500063 - RNA, 19 nt, Homo sapiens
  misc_RNA (1)...(19): siRNA sense strand
ccaugaaauugacgggaag

SEQ ID NO: 2500064 - RNA, 19 nt, Homo sapiens
  misc_RNA (1)...(19): siRNA sense strand
gugucaaggcgugagaaua

SEQ ID NO: 2500065 - RNA, 19 nt, Homo sapiens
  misc_RNA (1)...(19): siRNA sense strand
caguugaaaaugacgguua

SEQ ID NO: 2500066 - RNA, 19 nt, Homo sapiens
  misc_RNA (1)...(19): siRNA sense strand
ccuuuugcauggaagaaua

SEQ ID NO: 2500067 - RNA, 19 nt, Homo sapiens
  misc_RNA (1)...(19): siRNA sense strand
ugacgguuacauagaggaa

SEQ ID NO: 2500068 - RNA, 19 nt, Homo sapiens
  misc_RNA (1)...(19): siRNA sense strand
cauaauugucagccguauu

SEQ ID NO: 2500069 - RNA, 19 nt, Homo sapiens
  misc_RNA (1)...(19): siRNA sense strand
acaaagagcagcuuggcaa

SEQ ID NO: 2500070 - RNA, 19 nt, Homo sapiens
  misc_RNA (1)...(19): siRNA sense strand
cuucugggcuggugggcua

SEQ ID NO: 2500071 - RNA, 19 nt, Homo sapiens
  misc_RNA (1)...(19): siRNA sense strand
uuaugaaccaggugagcaa

SEQ ID NO: 2500072 - RNA, 19 nt, Homo sapiens
  misc_RNA (1)...(19): siRNA sense strand
gugcuuaugucuuuggcuu

SEQ ID NO: 2500073 - RNA, 19 nt, Homo sapiens
  misc_RNA (1)...(19): siRNA sense strand
cugcggagaccgagucaca

SEQ ID NO: 2500074 - RNA, 19 nt, Homo sapiens
  misc_RNA (1)...(19): siRNA sense strand
cuucagaggauuuggagaa

SEQ ID NO: 2500075 - RNA, 19 nt, Homo sapiens
  misc_RNA (1)...(19): siRNA sense strand
gcauaauuuucaaggcaaa

SEQ ID NO: 2500076 - RNA, 19 nt, Homo sapiens
  misc_RNA (1)...(19): siRNA sense strand
caggaaaacaugagagaca

SEQ ID NO: 2500077 - RNA, 19 nt, Homo sapiens
  misc_RNA (1)...(19): siRNA sense strand
cucaaauacuggaagggaa

SEQ ID NO: 2500078 - RNA, 19 nt, Homo sapiens
  misc_RNA (1)...(19): siRNA sense strand
uguuugaaguggauggcaa

SEQ ID NO: 2500079 - RNA, 19 nt, Homo sapiens
  misc_RNA (1)...(19): siRNA sense strand
gugaugagauauaucgcaa

SEQ ID NO: 2500080 - RNA, 19 nt, Homo sapiens
  misc_RNA (1)...(19): siRNA sense strand
ccgcgaaggaagaggaaug

SEQ ID NO: 2500081 - RNA, 19 nt, Homo sapiens
  misc_RNA (1)...(19): siRNA sense strand
ugagcaaagaacagaaaga

SEQ ID NO: 2500082 - RNA, 19 nt, Homo sapiens
  misc_RNA (1)...(19): siRNA sense strand
ggauagccaaagaggccaa

SEQ ID NO: 2500083 - RNA, 19 nt, Homo sapiens
  misc_RNA (1)...(19): siRNA sense strand
cgggauaagcagauagaag

SEQ ID NO: 2500084 - RNA, 19 nt, Homo sapiens
  misc_RNA (1)...(19): siRNA sense strand
agggaagcaacaugauuaa

SEQ ID NO: 2500085 - RNA, 19 nt, Homo sapiens
  misc_RNA (1)...(19): siRNA sense strand
aguuaaggcugcaaggcca

SEQ ID NO: 2500086 - RNA, 19 nt, Homo sapiens
  misc_RNA (1)...(19): siRNA sense strand
aggcaguaguucagaugga

SEQ ID NO: 2500087 - RNA, 19 nt, Homo sapiens
  misc_RNA (1)...(19): siRNA sense strand
agcaaagaacagaaagaga

SEQ ID NO: 2500088 - RNA, 19 nt, Homo sapiens
  misc_RNA (1)...(19): siRNA sense strand
gaggauuuggagaaguuaa

SEQ ID NO: 2500089 - RNA, 19 nt, Homo sapiens
  misc_RNA (1)...(19): siRNA sense strand
ggaaaacaugagagacauu

SEQ ID NO: 2500090 - RNA, 19 nt, Homo sapiens
  misc_RNA (1)...(19): siRNA sense strand
cugugaauccuguggacau

SEQ ID NO: 2500091 - RNA, 19 nt, Homo sapiens
  misc_RNA (1)...(19): siRNA sense strand
cuacagaucucgagcacac

SEQ ID NO: 2500092 - RNA, 19 nt, Homo sapiens
  misc_RNA (1)...(19): siRNA sense strand
uggccaaauguguguggaa

SEQ ID NO: 2500093 - RNA, 19 nt, Homo sapiens
  misc_RNA (1)...(19): siRNA sense strand
gaagaggaaugcaggcagu

SEQ ID NO: 2500094 - RNA, 19 nt, Homo sapiens
  misc_RNA (1)...(19): siRNA sense strand
gcagauagaagaaaggaug

SEQ ID NO: 2500095 - RNA, 19 nt, Homo sapiens
  misc_RNA (1)...(19): siRNA sense strand
aggccaaaucacagaggga

SEQ ID NO: 2500096 - RNA, 19 nt, Homo sapiens
  misc_RNA (1)...(19): siRNA sense strand
aguacaugagacagggcua

SEQ ID NO: 2500097 - RNA, 19 nt, Homo sapiens
  misc_RNA (1)...(19): siRNA sense strand
gcgaguaugacuuggaucu

SEQ ID NO: 2500098 - RNA, 19 nt, Homo sapiens
  misc_RNA (1)...(19): siRNA sense strand
gauauaucgcaaagguuca

SEQ ID NO: 2500099 - RNA, 19 nt, Homo sapiens
  misc_RNA (1)...(19): siRNA sense strand
acaccuaguuuuaaagaga

SEQ ID NO: 2500100 - RNA, 19 nt, Homo sapiens
  misc_RNA (1)...(19): siRNA sense strand
cacacagacaguucagaaa

SEQ ID NO: 2500101 - RNA, 19 nt, Homo sapiens
  misc_RNA (1)...(19): siRNA sense strand
acagacagaccuaugggaa

SEQ ID NO: 2500102 - RNA, 19 nt, Homo sapiens
  misc_RNA (1)...(19): siRNA sense strand
aaaccugacaagcgaguau

SEQ ID NO: 2500103 - RNA, 19 nt, Homo sapiens
  misc_RNA (1)...(19): siRNA sense strand
guuaaggcugcaaggccaa

SEQ ID NO: 2500104 - RNA, 19 nt, Homo sapiens
  misc_RNA (1)...(19): siRNA sense strand
ugagacagggcuauggcaa

SEQ ID NO: 2500105 - RNA, 19 nt, Homo sapiens
  misc_RNA (1)...(19): siRNA sense strand
aaagaaaucagucaggaga

SEQ ID NO: 2500106 - RNA, 19 nt, Homo sapiens
  misc_RNA (1)...(19): siRNA sense strand
uguucuauguuaugacaga

SEQ ID NO: 2500107 - RNA, 19 nt, Homo sapiens
  misc_RNA (1)...(19): siRNA sense strand
cuaucaaagaaaucaguca

SEQ ID NO: 2500108 - RNA, 19 nt, Homo sapiens
  misc_RNA (1)...(19): siRNA sense strand
ugacaagcgaguaugacuu

SEQ ID NO: 2500109 - RNA, 19 nt, Homo sapiens
  misc_RNA (1)...(19): siRNA sense strand
gagauauaucgcaaagguu

SEQ ID NO: 2500110 - RNA, 19 nt, Homo sapiens
  misc_RNA (1)...(19): siRNA sense strand
gccaaaucacagagggaag

SEQ ID NO: 2500111 - RNA, 19 nt, Homo sapiens
  misc_RNA (1)...(19): siRNA sense strand
ugacagaggcggacaacac

SEQ ID NO: 2500112 - RNA, 19 nt, Homo sapiens
  misc_RNA (1)...(19): siRNA sense strand
cuacaaaggcagugaccau

SEQ ID NO: 2500113 - RNA, 19 nt, Homo sapiens
  misc_RNA (1)...(19): siRNA sense strand
cgauaauggcgaagaaaau

SEQ ID NO: 2500114 - RNA, 19 nt, Homo sapiens
  misc_RNA (1)...(19): siRNA sense strand
caagauagcuauaagguuc

SEQ ID NO: 2500115 - RNA, 19 nt, Homo sapiens
  misc_RNA (1)...(19): siRNA sense strand
gaguaagccuucuggacga

SEQ ID NO: 2500116 - RNA, 19 nt, Homo sapiens
  misc_RNA (1)...(19): siRNA sense strand
cuauguaggaacagcaauu

SEQ ID NO: 2500117 - RNA, 19 nt, Homo sapiens
  misc_RNA (1)...(19): siRNA sense strand
acugaauauuacaggauca

SEQ ID NO: 2500118 - RNA, 19 nt, Homo sapiens
  misc_RNA (1)...(19): siRNA sense strand
ccgauaauggcgaagaaaa

SEQ ID NO: 2500119 - RNA, 19 nt, Homo sapiens
  misc_RNA (1)...(19): siRNA sense strand
cauuggaagacuugaugaa

SEQ ID NO: 2500120 - RNA, 19 nt, Homo sapiens
  misc_RNA (1)...(19): siRNA sense strand
cugauaaaccagagugacu

SEQ ID NO: 2500121 - RNA, 19 nt, Homo sapiens
  misc_RNA (1)...(19): siRNA sense strand
ggcagugaccauuuggaaa

SEQ ID NO: 2500122 - RNA, 19 nt, Homo sapiens
  misc_RNA (1)...(19): siRNA sense strand
cugaaaacaacauggaaga

SEQ ID NO: 2500123 - RNA, 19 nt, Homo sapiens
  misc_RNA (1)...(19): siRNA sense strand
gugcuaaaggugggaguuu

SEQ ID NO: 2500124 - RNA, 19 nt, Homo sapiens
  misc_RNA (1)...(19): siRNA sense strand
ccacugaauauuacaggau

SEQ ID NO: 2500125 - RNA, 19 nt, Homo sapiens
  misc_RNA (1)...(19): siRNA sense strand
agauaugcaaacaggacau

SEQ ID NO: 2500126 - RNA, 19 nt, Homo sapiens
  misc_RNA (1)...(19): siRNA sense strand
ugaaguaugaaaagaggaa

SEQ ID NO: 2500127 - RNA, 19 nt, Homo sapiens
  misc_RNA (1)...(19): siRNA sense strand
cuagaagccaggaggagca

SEQ ID NO: 2500128 - RNA, 19 nt, Homo sapiens
  misc_RNA (1)...(19): siRNA sense strand
uggaacaaagagcugauaa

SEQ ID NO: 2500129 - RNA, 19 nt, Homo sapiens
  misc_RNA (1)...(19): siRNA sense strand
cuaugaauuugauggaucu

SEQ ID NO: 2500130 - RNA, 19 nt, Homo sapiens
  misc_RNA (1)...(19): siRNA sense strand
augaaaagaggaacacaaa

SEQ ID NO: 2500131 - RNA, 19 nt, Homo sapiens
  misc_RNA (1)...(19): siRNA sense strand
aaguaugaaaagaggaaca

SEQ ID NO: 2500132 - RNA, 19 nt, Homo sapiens
  misc_RNA (1)...(19): siRNA sense strand
agaaagauguugugucccu

SEQ ID NO: 2500133 - RNA, 19 nt, Homo sapiens
  misc_RNA (1)...(19): siRNA sense strand
acggagaagcagaggagga

SEQ ID NO: 2500134 - RNA, 19 nt, Homo sapiens
  misc_RNA (1)...(19): siRNA sense strand
caucuucggcagcgggaau

SEQ ID NO: 2500135 - RNA, 19 nt, Homo sapiens
  misc_RNA (1)...(19): siRNA sense strand
acggaagagcugaaggaau

SEQ ID NO: 2500136 - RNA, 19 nt, Homo sapiens
  misc_RNA (1)...(19): siRNA sense strand
agaucaguguggaaagcaa

SEQ ID NO: 2500137 - RNA, 19 nt, Homo sapiens
  misc_RNA (1)...(19): siRNA sense strand
ugaaggaauucuuugccaa

SEQ ID NO: 2500138 - RNA, 19 nt, Homo sapiens
  misc_RNA (1)...(19): siRNA sense strand
agguugugauugaggacga

SEQ ID NO: 2500139 - RNA, 19 nt, Homo sapiens
  misc_RNA (1)...(19): siRNA sense strand
gcagcaucaaggagcgaau

SEQ ID NO: 2500140 - RNA, 19 nt, Homo sapiens
  misc_RNA (1)...(19): siRNA sense strand
ccauugagcuggugcacac

SEQ ID NO: 2500141 - RNA, 19 nt, Homo sapiens
  misc_RNA (1)...(19): siRNA sense strand
gacagagaucaguguggaa

SEQ ID NO: 2500142 - RNA, 19 nt, Homo sapiens
  misc_RNA (1)...(19): siRNA sense strand
gcauuaacgaggugaagac

SEQ ID NO: 2500143 - RNA, 19 nt, Homo sapiens
  misc_RNA (1)...(19): siRNA sense strand
cgccaagaaaauugagauu

SEQ ID NO: 2500144 - RNA, 19 nt, Homo sapiens
  misc_RNA (1)...(19): siRNA sense strand
ccgaggaguacgagcucaa

SEQ ID NO: 2500145 - RNA, 19 nt, Homo sapiens
  misc_RNA (1)...(19): siRNA sense strand
cagaagcccuugauggaca

SEQ ID NO: 2500146 - RNA, 19 nt, Homo sapiens
  misc_RNA (1)...(19): siRNA sense strand
ccgagagcaugcuggacau

SEQ ID NO: 2500147 - RNA, 19 nt, Homo sapiens
  misc_RNA (1)...(19): siRNA sense strand
gagaugaggaagaggagga

SEQ ID NO: 2500148 - RNA, 19 nt, Homo sapiens
  misc_RNA (1)...(19): siRNA sense strand
cggaacaaccugugccaga

SEQ ID NO: 2500149 - RNA, 19 nt, Homo sapiens
  misc_RNA (1)...(19): siRNA sense strand
ucuacauggaagagaauau

SEQ ID NO: 2500150 - RNA, 19 nt, Homo sapiens
  misc_RNA (1)...(19): siRNA sense strand
cugaagaugaagaugauga

SEQ ID NO: 2500151 - RNA, 19 nt, Homo sapiens
  misc_RNA (1)...(19): siRNA sense strand
aggcugaagaugaagauga

SEQ ID NO: 2500152 - RNA, 19 nt, Homo sapiens
  misc_RNA (1)...(19): siRNA sense strand
aggcugaaccaguggcaca

SEQ ID NO: 2500153 - RNA, 19 nt, Homo sapiens
  misc_RNA (1)...(19): siRNA sense strand
uggcacaggaagaggcuga

SEQ ID NO: 2500154 - RNA, 19 nt, Homo sapiens
  misc_RNA (1)...(19): siRNA sense strand
ccuagggaccugagugaca

SEQ ID NO: 2500155 - RNA, 19 nt, Homo sapiens
  misc_RNA (1)...(19): siRNA sense strand
acucagaagaggaagagca

SEQ ID NO: 2500156 - RNA, 19 nt, Homo sapiens
  misc_RNA (1)...(19): siRNA sense strand
gaggaagagcaguguacca

SEQ ID NO: 2500157 - RNA, 19 nt, Homo sapiens
  misc_RNA (1)...(19): siRNA sense strand
ggccuggagaugaggaaga

SEQ ID NO: 2500158 - RNA, 19 nt, Homo sapiens
  misc_RNA (1)...(19): siRNA sense strand
cucccaggaucaagagcaa

SEQ ID NO: 2500159 - RNA, 19 nt, Homo sapiens
  misc_RNA (1)...(19): siRNA sense strand
acagugagcaggaggcaca

SEQ ID NO: 2500160 - RNA, 19 nt, Homo sapiens
  misc_RNA (1)...(19): siRNA sense strand
gaaaguaagugcuggucuc

SEQ ID NO: 2500161 - RNA, 19 nt, Homo sapiens
  misc_RNA (1)...(19): siRNA sense strand
aggaagaggaggaggccac

SEQ ID NO: 2500162 - RNA, 19 nt, Homo sapiens
  misc_RNA (1)...(19): siRNA sense strand
cagaagaggaagagcagug

SEQ ID NO: 2500163 - RNA, 19 nt, Homo sapiens
  misc_RNA (1)...(19): siRNA sense strand
gaacuugacaguaguggga

SEQ ID NO: 2500164 - RNA, 19 nt, Homo sapiens
  misc_RNA (1)...(19): siRNA sense strand
ccacuucaucaguagaaau

SEQ ID NO: 2500165 - RNA, 19 nt, Homo sapiens
  misc_RNA (1)...(19): siRNA sense strand
agaugaagaugaugaggag

SEQ ID NO: 2500166 - RNA, 19 nt, Homo sapiens
  misc_RNA (1)...(19): siRNA sense strand
auccagaaccugcgucaaa

SEQ ID NO: 2500167 - RNA, 19 nt, Homo sapiens
  misc_RNA (1)...(19): siRNA sense strand
uaggaaaagcaaagagaaa

SEQ ID NO: 2500168 - RNA, 19 nt, Homo sapiens
  misc_RNA (1)...(19): siRNA sense strand
ccagaaaggugcuugguuc

SEQ ID NO: 2500169 - RNA, 19 nt, Homo sapiens
  misc_RNA (1)...(19): siRNA sense strand
ccaacucccaaguggcaaa

SEQ ID NO: 2500170 - RNA, 19 nt, Homo sapiens
  misc_RNA (1)...(19): siRNA sense strand
uaaauaugcaggagggaac

SEQ ID NO: 2500171 - RNA, 19 nt, Homo sapiens
  misc_RNA (1)...(19): siRNA sense strand
aggaaaagcaaagagaaaa

SEQ ID NO: 2500172 - RNA, 19 nt, Homo sapiens
  misc_RNA (1)...(19): siRNA sense strand
ggaaaagcaaagagaaaag

SEQ ID NO: 2500173 - RNA, 19 nt, Homo sapiens
  misc_RNA (1)...(19): siRNA sense strand
caucaguuucaucgaggaa

SEQ ID NO: 2500174 - RNA, 19 nt, Homo sapiens
  misc_RNA (1)...(19): siRNA sense strand
auaaauaugcaggagggaa

SEQ ID NO: 2500175 - RNA, 19 nt, Homo sapiens
  misc_RNA (1)...(19): siRNA sense strand
aggaagacauugaggacau

SEQ ID NO: 2500176 - RNA, 19 nt, Homo sapiens
  misc_RNA (1)...(19): siRNA sense strand
uggaaaagcaccugggaaa

SEQ ID NO: 2500177 - RNA, 19 nt, Homo sapiens
  misc_RNA (1)...(19): siRNA sense strand
aggaggaagaggaggagaa

SEQ ID NO: 2500178 - RNA, 19 nt, Homo sapiens
  misc_RNA (1)...(19): siRNA sense strand
ccuccuggaucuagagcaa

SEQ ID NO: 2500179 - RNA, 19 nt, Homo sapiens
  misc_RNA (1)...(19): siRNA sense strand
uggaagugaaggaggacaa

SEQ ID NO: 2500180 - RNA, 19 nt, Homo sapiens
  misc_RNA (1)...(19): siRNA sense strand
gaggacaagugcugggaga

SEQ ID NO: 2500181 - RNA, 19 nt, Homo sapiens
  misc_RNA (1)...(19): siRNA sense strand
gcaaggagcacaagagcga

SEQ ID NO: 2500182 - RNA, 19 nt, Homo sapiens
  misc_RNA (1)...(19): siRNA sense strand
uguccaaggaugagaucua

SEQ ID NO: 2500183 - RNA, 19 nt, Homo sapiens
  misc_RNA (1)...(19): siRNA sense strand
cggagggagaggaggaaga

SEQ ID NO: 2500184 - RNA, 19 nt, Homo sapiens
  misc_RNA (1)...(19): siRNA sense strand
gagaggaggaagaggagga

SEQ ID NO: 2500185 - RNA, 19 nt, Homo sapiens
  misc_RNA (1)...(19): siRNA sense strand
aggacaugguugaggcuga

SEQ ID NO: 2500186 - RNA, 19 nt, Homo sapiens
  misc_RNA (1)...(19): siRNA sense strand
ccucaaggcccauggagau

SEQ ID NO: 2500187 - RNA, 19 nt, Homo sapiens
  misc_RNA (1)...(19): siRNA sense strand
gggagaagguggagguguc

SEQ ID NO: 2500188 - RNA, 19 nt, Homo sapiens
  misc_RNA (1)...(19): siRNA sense strand
uggaggauacagagaagaa

SEQ ID NO: 2500189 - RNA, 19 nt, Homo sapiens
  misc_RNA (1)...(19): siRNA sense strand
gagcgagaaggaagaggaa

SEQ ID NO: 2500190 - RNA, 19 nt, Homo sapiens
  misc_RNA (1)...(19): siRNA sense strand
uggauguggcggagggaga

SEQ ID NO: 2500191 - RNA, 19 nt, Homo sapiens
  misc_RNA (1)...(19): siRNA sense strand
gugaagacggccagaacuu

SEQ ID NO: 2500192 - RNA, 19 nt, Homo sapiens
  misc_RNA (1)...(19): siRNA sense strand
aggaugagaucuaugccaa

SEQ ID NO: 2500193 - RNA, 19 nt, Homo sapiens
  misc_RNA (1)...(19): siRNA sense strand
guguggaagugaaggagga

SEQ ID NO: 2500194 - RNA, 19 nt, Homo sapiens
  misc_RNA (1)...(19): siRNA sense strand
gugcuggaggagauggaaa

SEQ ID NO: 2500195 - RNA, 19 nt, Homo sapiens
  misc_RNA (1)...(19): siRNA sense strand
cuaaggagcugcagcgcca

SEQ ID NO: 2500196 - RNA, 19 nt, Homo sapiens
  misc_RNA (1)...(19): siRNA sense strand
acuccaacuucuacaacaa

SEQ ID NO: 2500197 - RNA, 19 nt, Homo sapiens
  misc_RNA (1)...(19): siRNA sense strand
gaggauacagagaagaaaa

SEQ ID NO: 2500198 - RNA, 19 nt, Homo sapiens
  misc_RNA (1)...(19): siRNA sense strand
uagaauuggcccaggacuu

SEQ ID NO: 2500199 - RNA, 19 nt, Homo sapiens
  misc_RNA (1)...(19): siRNA sense strand
uugagaaacaccuggauuu

SEQ ID NO: 2500200 - RNA, 19 nt, Homo sapiens
  misc_RNA (1)...(19): siRNA sense strand
ggcacaugcuggagaucuu

SEQ ID NO: 2500201 - RNA, 19 nt, Homo sapiens
  misc_RNA (1)...(19): siRNA sense strand
gcgaguuucggcagagcaa

SEQ ID NO: 2500202 - RNA, 19 nt, Homo sapiens
  misc_RNA (1)...(19): siRNA sense strand
agaacaaggucaagccacu

SEQ ID NO: 2500203 - RNA, 19 nt, Homo sapiens
  misc_RNA (1)...(19): siRNA sense strand
agugaggacucgaguuaca

SEQ ID NO: 2500204 - RNA, 19 nt, Homo sapiens
  misc_RNA (1)...(19): siRNA sense strand
ugguugaggcugaugagua

SEQ ID NO: 2500205 - RNA, 19 nt, Homo sapiens
  misc_RNA (1)...(19): siRNA sense strand
gcaaaauggcugugcggga

SEQ ID NO: 2500206 - RNA, 19 nt, Homo sapiens
  misc_RNA (1)...(19): siRNA sense strand
acaagagcgagaaggaaga

SEQ ID NO: 2500207 - RNA, 19 nt, Homo sapiens
  misc_RNA (1)...(19): siRNA sense strand
gcgagaaggaagaggaagc

SEQ ID NO: 2500208 - RNA, 19 nt, Homo sapiens
  misc_RNA (1)...(19): siRNA sense strand
gccacaagaugcugggcga

SEQ ID NO: 2500209 - RNA, 19 nt, Homo sapiens
  misc_RNA (1)...(19): siRNA sense strand
ggcuaaggacucagaagau

SEQ ID NO: 2500210 - RNA, 19 nt, Homo sapiens
  misc_RNA (1)...(19): siRNA sense strand
gggcuuugaggaagacauu

SEQ ID NO: 2500211 - RNA, 19 nt, Homo sapiens
  misc_RNA (1)...(19): siRNA sense strand
agauggaaaccgacgugaa

SEQ ID NO: 2500212 - RNA, 19 nt, Homo sapiens
  misc_RNA (1)...(19): siRNA sense strand
gcuuugaggaagacauuga

SEQ ID NO: 2500213 - RNA, 19 nt, Homo sapiens
  misc_RNA (1)...(19): siRNA sense strand
acucagaagaugcagccaa

SEQ ID NO: 2500214 - RNA, 19 nt, Homo sapiens
  misc_RNA (1)...(19): siRNA sense strand
aggcuaaggacucagaaga

SEQ ID NO: 2500215 - RNA, 19 nt, Homo sapiens
  misc_RNA (1)...(19): siRNA sense strand
agccaaaguggaagcaaaa

SEQ ID NO: 2500216 - RNA, 19 nt, Homo sapiens
  misc_RNA (1)...(19): siRNA sense strand
acaacaagagucagagcca

SEQ ID NO: 2500217 - RNA, 19 nt, Homo sapiens
  misc_RNA (1)...(19): siRNA sense strand
agggagaggaggaagagga

SEQ ID NO: 2500218 - RNA, 19 nt, Homo sapiens
  misc_RNA (1)...(19): siRNA sense strand
gagccaacaagaagccauu

SEQ ID NO: 2500219 - RNA, 19 nt, Homo sapiens
  misc_RNA (1)...(19): siRNA sense strand
acauugaggacaugguuga

SEQ ID NO: 2500220 - RNA, 19 nt, Homo sapiens
  misc_RNA (1)...(19): siRNA sense strand
agacguaccugcaagcuga

SEQ ID NO: 2500221 - RNA, 19 nt, Homo sapiens
  misc_RNA (1)...(19): siRNA sense strand
agaugcagccaaaguggaa

SEQ ID NO: 2500222 - RNA, 19 nt, Homo sapiens
  misc_RNA (1)...(19): siRNA sense strand
uugauguguuccucagaua

SEQ ID NO: 2500223 - RNA, 19 nt, Homo sapiens
  misc_RNA (1)...(19): siRNA sense strand
gacuggagcuccuuggcua

SEQ ID NO: 2500224 - RNA, 19 nt, Homo sapiens
  misc_RNA (1)...(19): siRNA sense strand
cuuccauacccuacagauu

SEQ ID NO: 2500225 - RNA, 19 nt, Homo sapiens
  misc_RNA (1)...(19): siRNA sense strand
ccaugucuuucgagggcau

SEQ ID NO: 2500226 - RNA, 19 nt, Homo sapiens
  misc_RNA (1)...(19): siRNA sense strand
ccauagaauuggcccagga

SEQ ID NO: 2500227 - RNA, 19 nt, Homo sapiens
  misc_RNA (1)...(19): siRNA sense strand
cccaggagaacaaggucaa

SEQ ID NO: 2500228 - RNA, 19 nt, Homo sapiens
  misc_RNA (1)...(19): siRNA sense strand
uggacacuccggagacuaa

SEQ ID NO: 2500229 - RNA, 19 nt, Homo sapiens
  misc_RNA (1)...(19): siRNA sense strand
acugcaaggcugagcacau

SEQ ID NO: 2500230 - RNA, 19 nt, Homo sapiens
  misc_RNA (1)...(19): siRNA sense strand
uggaugauuaugaggagau

SEQ ID NO: 2500231 - RNA, 19 nt, Homo sapiens
  misc_RNA (1)...(19): siRNA sense strand
gaguuucggcagagcaaca

SEQ ID NO: 2500232 - RNA, 19 nt, Homo sapiens
  misc_RNA (1)...(19): siRNA sense strand
cccaaaggcagaaacagaa

SEQ ID NO: 2500233 - RNA, 19 nt, Homo sapiens
  misc_RNA (1)...(19): siRNA sense strand
ugguggagaagcaggugaa

SEQ ID NO: 2500234 - RNA, 19 nt, Homo sapiens
  misc_RNA (1)...(19): siRNA sense strand
ggaugaugacuuugugcca

SEQ ID NO: 2500235 - RNA, 19 nt, Homo sapiens
  misc_RNA (1)...(19): siRNA sense strand
ggaggauacagagaagaaa

SEQ ID NO: 2500236 - RNA, 19 nt, Homo sapiens
  misc_RNA (1)...(19): siRNA sense strand
aacaagaagccauugagaa

SEQ ID NO: 2500237 - RNA, 19 nt, Homo sapiens
  misc_RNA (1)...(19): siRNA sense strand
acaugguguucaaguguga

SEQ ID NO: 2500238 - RNA, 19 nt, Homo sapiens
  misc_RNA (1)...(19): siRNA sense strand
uggaggagauggaaaccga

SEQ ID NO: 2500239 - RNA, 19 nt, Homo sapiens
  misc_RNA (1)...(19): siRNA sense strand
caguagaguccuggguaga

SEQ ID NO: 2500240 - RNA, 19 nt, Homo sapiens
  misc_RNA (1)...(19): siRNA sense strand
ugaugagauccuagcugaa

SEQ ID NO: 2500241 - RNA, 19 nt, Homo sapiens
  misc_RNA (1)...(19): siRNA sense strand
gaaucagcugggagcaaga

SEQ ID NO: 2500242 - RNA, 19 nt, Homo sapiens
  misc_RNA (1)...(19): siRNA sense strand
gcuggaggauacagagaag

SEQ ID NO: 2500243 - RNA, 19 nt, Homo sapiens
  misc_RNA (1)...(19): siRNA sense strand
aggaaagccaaucggauaa

SEQ ID NO: 2500244 - RNA, 19 nt, Homo sapiens
  misc_RNA (1)...(19): siRNA sense strand
uggaaaacaucaugaacaa

SEQ ID NO: 2500245 - RNA, 19 nt, Homo sapiens
  misc_RNA (1)...(19): siRNA sense strand
cuaaauaagcaucgcucaa

SEQ ID NO: 2500246 - RNA, 19 nt, Homo sapiens
  misc_RNA (1)...(19): siRNA sense strand
aggaauacuucgagcggca

SEQ ID NO: 2500247 - RNA, 19 nt, Homo sapiens
  misc_RNA (1)...(19): siRNA sense strand
cgggacaacuggaugaaaa

SEQ ID NO: 2500248 - RNA, 19 nt, Homo sapiens
  misc_RNA (1)...(19): siRNA sense strand
caucaaaauuccagagugu

SEQ ID NO: 2500249 - RNA, 19 nt, Homo sapiens
  misc_RNA (1)...(19): siRNA sense strand
gggugcaguuccugagaca

SEQ ID NO: 2500250 - RNA, 19 nt, Homo sapiens
  misc_RNA (1)...(19): siRNA sense strand
ugaggaugaugguggaaaa

SEQ ID NO: 2500251 - RNA, 19 nt, Homo sapiens
  misc_RNA (1)...(19): siRNA sense strand
gugucgacccagaggaaga

SEQ ID NO: 2500252 - RNA, 19 nt, Homo sapiens
  misc_RNA (1)...(19): siRNA sense strand
agcaaaggaacuuggcuua

SEQ ID NO: 2500253 - RNA, 19 nt, Homo sapiens
  misc_RNA (1)...(19): siRNA sense strand
cguaaggaaaucaaaucaa

SEQ ID NO: 2500254 - RNA, 19 nt, Homo sapiens
  misc_RNA (1)...(19): siRNA sense strand
gugcaguuccugagacaca

SEQ ID NO: 2500255 - RNA, 19 nt, Homo sapiens
  misc_RNA (1)...(19): siRNA sense strand
acacagacuuugaccggau

SEQ ID NO: 2500256 - RNA, 19 nt, Homo sapiens
  misc_RNA (1)...(19): siRNA sense strand
ggaugaugguggaaaacau

SEQ ID NO: 2500257 - RNA, 19 nt, Homo sapiens
  misc_RNA (1)...(19): siRNA sense strand
gugacaaugccguggggaa

SEQ ID NO: 2500258 - RNA, 19 nt, Homo sapiens
  misc_RNA (1)...(19): siRNA sense strand
gugccaacagugaggugua

SEQ ID NO: 2500259 - RNA, 19 nt, Homo sapiens
  misc_RNA (1)...(19): siRNA sense strand
ccgagagguagcaaaggaa

SEQ ID NO: 2500260 - RNA, 19 nt, Homo sapiens
  misc_RNA (1)...(19): siRNA sense strand
gaugaaaaggaaaaggauu

SEQ ID NO: 2500261 - RNA, 19 nt, Homo sapiens
  misc_RNA (1)...(19): siRNA sense strand
uagcaaaggaacuuggcuu

SEQ ID NO: 2500262 - RNA, 19 nt, Homo sapiens
  misc_RNA (1)...(19): siRNA sense strand
agaaagagaagcagagcag

SEQ ID NO: 2500263 - RNA, 19 nt, Homo sapiens
  misc_RNA (1)...(19): siRNA sense strand
gugaaaagcaugugguauc

SEQ ID NO: 2500264 - RNA, 19 nt, Homo sapiens
  misc_RNA (1)...(19): siRNA sense strand
acgaaagacccaacguuga

SEQ ID NO: 2500265 - RNA, 19 nt, Homo sapiens
  misc_RNA (1)...(19): siRNA sense strand
uggaaagugccaacaguga

SEQ ID NO: 2500266 - RNA, 19 nt, Homo sapiens
  misc_RNA (1)...(19): siRNA sense strand
aauguguggucguggguga

SEQ ID NO: 2500267 - RNA, 19 nt, Homo sapiens
  misc_RNA (1)...(19): siRNA sense strand
gagugucgacccagaggaa

SEQ ID NO: 2500268 - RNA, 19 nt, Homo sapiens
  misc_RNA (1)...(19): siRNA sense strand
gcgugggcauugacggaga

SEQ ID NO: 2500269 - RNA, 19 nt, Homo sapiens
  misc_RNA (1)...(19): siRNA sense strand
gagaaagagaagcagagca

SEQ ID NO: 2500270 - RNA, 19 nt, Homo sapiens
  misc_RNA (1)...(19): siRNA sense strand
uucccuaaaucaugugaaa

SEQ ID NO: 2500271 - RNA, 19 nt, Homo sapiens
  misc_RNA (1)...(19): siRNA sense strand
gagagguagcaaaggaacu

SEQ ID NO: 2500272 - RNA, 19 nt, Homo sapiens
  misc_RNA (1)...(19): siRNA sense strand
caguauuggauuaucucua

SEQ ID NO: 2500273 - RNA, 19 nt, Homo sapiens
  misc_RNA (1)...(19): siRNA sense strand
ccguucaggaguugaccaa

SEQ ID NO: 2500274 - RNA, 19 nt, Homo sapiens
  misc_RNA (1)...(19): siRNA sense strand
uggaauuggcucaguuuca

SEQ ID NO: 2500275 - RNA, 19 nt, Homo sapiens
  misc_RNA (1)...(19): siRNA sense strand
aaucaaaaucugcagacaa

SEQ ID NO: 2500276 - RNA, 19 nt, Homo sapiens
  misc_RNA (1)...(19): siRNA sense strand
ccgaacauaaacaagauau

SEQ ID NO: 2500277 - RNA, 19 nt, Homo sapiens
  misc_RNA (1)...(19): siRNA sense strand
ccauaaagagaggggauau

SEQ ID NO: 2500278 - RNA, 19 nt, Homo sapiens
  misc_RNA (1)...(19): siRNA sense strand
ucacguaaggaaagccaau

SEQ ID NO: 2500279 - RNA, 19 nt, Homo sapiens
  misc_RNA (1)...(19): siRNA sense strand
ucgggauguuguugaugaa

SEQ ID NO: 2500280 - RNA, 19 nt, Homo sapiens
  misc_RNA (1)...(19): siRNA sense strand
cugccuguuuacuggacaa

SEQ ID NO: 2500281 - RNA, 19 nt, Homo sapiens
  misc_RNA (1)...(19): siRNA sense strand
acgagagaaggaagauauu

SEQ ID NO: 2500282 - RNA, 19 nt, Homo sapiens
  misc_RNA (1)...(19): siRNA sense strand
ggucugauguugugguccu

SEQ ID NO: 2500283 - RNA, 19 nt, Homo sapiens
  misc_RNA (1)...(19): siRNA sense strand
ccugugagaaagagaagca

SEQ ID NO: 2500284 - RNA, 19 nt, Homo sapiens
  misc_RNA (1)...(19): siRNA sense strand
ccguaaggaaaucaaauca

SEQ ID NO: 2500285 - RNA, 19 nt, Homo sapiens
  misc_RNA (1)...(19): siRNA sense strand
aggaaagccaaucggauaa

SEQ ID NO: 2500286 - RNA, 19 nt, Homo sapiens
  misc_RNA (1)...(19): siRNA sense strand
uggaaaacaucaugaacaa

SEQ ID NO: 2500287 - RNA, 19 nt, Homo sapiens
  misc_RNA (1)...(19): siRNA sense strand
cuaaauaagcaucgcucaa

SEQ ID NO: 2500288 - RNA, 19 nt, Homo sapiens
  misc_RNA (1)...(19): siRNA sense strand
aggaauacuucgagcggca

SEQ ID NO: 2500289 - RNA, 19 nt, Homo sapiens
  misc_RNA (1)...(19): siRNA sense strand
cgggacaacuggaugaaaa

SEQ ID NO: 2500290 - RNA, 19 nt, Homo sapiens
  misc_RNA (1)...(19): siRNA sense strand
caucaaaauuccagagugu

SEQ ID NO: 2500291 - RNA, 19 nt, Homo sapiens
  misc_RNA (1)...(19): siRNA sense strand
gggugcaguuccugagaca

SEQ ID NO: 2500292 - RNA, 19 nt, Homo sapiens
  misc_RNA (1)...(19): siRNA sense strand
ugaggaugaugguggaaaa

SEQ ID NO: 2500293 - RNA, 19 nt, Homo sapiens
  misc_RNA (1)...(19): siRNA sense strand
gugucgacccagaggaaga

SEQ ID NO: 2500294 - RNA, 19 nt, Homo sapiens
  misc_RNA (1)...(19): siRNA sense strand
agcaaaggaacuuggcuua

SEQ ID NO: 2500295 - RNA, 19 nt, Homo sapiens
  misc_RNA (1)...(19): siRNA sense strand
cguaaggaaaucaaaucaa

SEQ ID NO: 2500296 - RNA, 19 nt, Homo sapiens
  misc_RNA (1)...(19): siRNA sense strand
gugcaguuccugagacaca

SEQ ID NO: 2500297 - RNA, 19 nt, Homo sapiens
  misc_RNA (1)...(19): siRNA sense strand
acacagacuuugaccggau

SEQ ID NO: 2500298 - RNA, 19 nt, Homo sapiens
  misc_RNA (1)...(19): siRNA sense strand
ggaugaugguggaaaacau

SEQ ID NO: 2500299 - RNA, 19 nt, Homo sapiens
  misc_RNA (1)...(19): siRNA sense strand
gugacaaugccguggggaa

SEQ ID NO: 2500300 - RNA, 19 nt, Homo sapiens
  misc_RNA (1)...(19): siRNA sense strand
gugccaacagugaggugua

SEQ ID NO: 2500301 - RNA, 19 nt, Homo sapiens
  misc_RNA (1)...(19): siRNA sense strand
ccgagagguagcaaaggaa

SEQ ID NO: 2500302 - RNA, 19 nt, Homo sapiens
  misc_RNA (1)...(19): siRNA sense strand
gaugaaaaggaaaaggauu

SEQ ID NO: 2500303 - RNA, 19 nt, Homo sapiens
  misc_RNA (1)...(19): siRNA sense strand
uagcaaaggaacuuggcuu

SEQ ID NO: 2500304 - RNA, 19 nt, Homo sapiens
  misc_RNA (1)...(19): siRNA sense strand
agaaagagaagcagagcag

SEQ ID NO: 2500305 - RNA, 19 nt, Homo sapiens
  misc_RNA (1)...(19): siRNA sense strand
gugaaaagcaugugguauc

SEQ ID NO: 2500306 - RNA, 19 nt, Homo sapiens
  misc_RNA (1)...(19): siRNA sense strand
acgaaagacccaacguuga

SEQ ID NO: 2500307 - RNA, 19 nt, Homo sapiens
  misc_RNA (1)...(19): siRNA sense strand
uggaaagugccaacaguga

SEQ ID NO: 2500308 - RNA, 19 nt, Homo sapiens
  misc_RNA (1)...(19): siRNA sense strand
aauguguggucguggguga

SEQ ID NO: 2500309 - RNA, 19 nt, Homo sapiens
  misc_RNA (1)...(19): siRNA sense strand
gagugucgacccagaggaa

SEQ ID NO: 2500310 - RNA, 19 nt, Homo sapiens
  misc_RNA (1)...(19): siRNA sense strand
gcgugggcauugacggaga

SEQ ID NO: 2500311 - RNA, 19 nt, Homo sapiens
  misc_RNA (1)...(19): siRNA sense strand
gagaaagagaagcagagca

SEQ ID NO: 2500312 - RNA, 19 nt, Homo sapiens
  misc_RNA (1)...(19): siRNA sense strand
uucccuaaaucaugugaaa

SEQ ID NO: 2500313 - RNA, 19 nt, Homo sapiens
  misc_RNA (1)...(19): siRNA sense strand
gagagguagcaaaggaacu

SEQ ID NO: 2500314 - RNA, 19 nt, Homo sapiens
  misc_RNA (1)...(19): siRNA sense strand
caguauuggauuaucucua

SEQ ID NO: 2500315 - RNA, 19 nt, Homo sapiens
  misc_RNA (1)...(19): siRNA sense strand
ccguucaggaguugaccaa

SEQ ID NO: 2500316 - RNA, 19 nt, Homo sapiens
  misc_RNA (1)...(19): siRNA sense strand
uggaauuggcucaguuuca

SEQ ID NO: 2500317 - RNA, 19 nt, Homo sapiens
  misc_RNA (1)...(19): siRNA sense strand
aaucaaaaucugcagacaa

SEQ ID NO: 2500318 - RNA, 19 nt, Homo sapiens
  misc_RNA (1)...(19): siRNA sense strand
ccgaacauaaacaagauau

SEQ ID NO: 2500319 - RNA, 19 nt, Homo sapiens
  misc_RNA (1)...(19): siRNA sense strand
ccauaaagagaggggauau

SEQ ID NO: 2500320 - RNA, 19 nt, Homo sapiens
  misc_RNA (1)...(19): siRNA sense strand
ucacguaaggaaagccaau

SEQ ID NO: 2500321 - RNA, 19 nt, Homo sapiens
  misc_RNA (1)...(19): siRNA sense strand
ucgggauguuguugaugaa

SEQ ID NO: 2500322 - RNA, 19 nt, Homo sapiens
  misc_RNA (1)...(19): siRNA sense strand
cugccuguuuacuggacaa

SEQ ID NO: 2500323 - RNA, 19 nt, Homo sapiens
  misc_RNA (1)...(19): siRNA sense strand
acgagagaaggaagauauu

SEQ ID NO: 2500324 - RNA, 19 nt, Homo sapiens
  misc_RNA (1)...(19): siRNA sense strand
ggucugauguugugguccu

SEQ ID NO: 2500325 - RNA, 19 nt, Homo sapiens
  misc_RNA (1)...(19): siRNA sense strand
ccugugagaaagagaagca

SEQ ID NO: 2500326 - RNA, 19 nt, Homo sapiens
  misc_RNA (1)...(19): siRNA sense strand
ccguaaggaaaucaaauca

SEQ ID NO: 2500327 - RNA, 19 nt, Homo sapiens
  misc_RNA (1)...(19): siRNA sense strand
cagaagagguagaggcuca

SEQ ID NO: 2500328 - RNA, 19 nt, Homo sapiens
  misc_RNA (1)...(19): siRNA sense strand
ggaaaggagacaaggccaa

SEQ ID NO: 2500329 - RNA, 19 nt, Homo sapiens
  misc_RNA (1)...(19): siRNA sense strand
ucacuaacgucaugggcuu

SEQ ID NO: 2500330 - RNA, 19 nt, Homo sapiens
  misc_RNA (1)...(19): siRNA sense strand
aagaagagcaugcugggaa

SEQ ID NO: 2500331 - RNA, 19 nt, Homo sapiens
  misc_RNA (1)...(19): siRNA sense strand
ggauuggaggcgagagcga

SEQ ID NO: 2500332 - RNA, 19 nt, Homo sapiens
  misc_RNA (1)...(19): siRNA sense strand
gaagcuguuuggugggaca

SEQ ID NO: 2500333 - RNA, 19 nt, Homo sapiens
  misc_RNA (1)...(19): siRNA sense strand
gaguugugugccauggaaa

SEQ ID NO: 2500334 - RNA, 19 nt, Homo sapiens
  misc_RNA (1)...(19): siRNA sense strand
gcucaucagaguuggagga

SEQ ID NO: 2500335 - RNA, 19 nt, Homo sapiens
  misc_RNA (1)...(19): siRNA sense strand
aggaaagaacugugaacuc

SEQ ID NO: 2500336 - RNA, 19 nt, Homo sapiens
  misc_RNA (1)...(19): siRNA sense strand
aggccaaaucugaaucauu

SEQ ID NO: 2500337 - RNA, 19 nt, Homo sapiens
  misc_RNA (1)...(19): siRNA sense strand
ccggaagaaggaagaggaa

SEQ ID NO: 2500338 - RNA, 19 nt, Homo sapiens
  misc_RNA (1)...(19): siRNA sense strand
cggaagaaggaagaggaaa

SEQ ID NO: 2500339 - RNA, 19 nt, Homo sapiens
  misc_RNA (1)...(19): siRNA sense strand
aggaugaagaagaugacua

SEQ ID NO: 2500340 - RNA, 19 nt, Homo sapiens
  misc_RNA (1)...(19): siRNA sense strand
auugagaagcagaaggcaa

SEQ ID NO: 2500341 - RNA, 19 nt, Homo sapiens
  misc_RNA (1)...(19): siRNA sense strand
gcugagaagcagaaggcca

SEQ ID NO: 2500342 - RNA, 19 nt, Homo sapiens
  misc_RNA (1)...(19): siRNA sense strand
gcaaaggcguugaagggcu

SEQ ID NO: 2500343 - RNA, 19 nt, Homo sapiens
  misc_RNA (1)...(19): siRNA sense strand
ccagggaagaagaggagca

SEQ ID NO: 2500344 - RNA, 19 nt, Homo sapiens
  misc_RNA (1)...(19): siRNA sense strand
agaggaaaggaaagcaaaa

SEQ ID NO: 2500345 - RNA, 19 nt, Homo sapiens
  misc_RNA (1)...(19): siRNA sense strand
gccuaaaggaggaagaaag

SEQ ID NO: 2500346 - RNA, 19 nt, Homo sapiens
  misc_RNA (1)...(19): siRNA sense strand
agucacucucccugaauaa

SEQ ID NO: 2500347 - RNA, 19 nt, Homo sapiens
  misc_RNA (1)...(19): siRNA sense strand
aagcagaaggccagggaag

SEQ ID NO: 2500348 - RNA, 19 nt, Homo sapiens
  misc_RNA (1)...(19): siRNA sense strand
ggaagacagagcaagccaa

SEQ ID NO: 2500349 - RNA, 19 nt, Homo sapiens
  misc_RNA (1)...(19): siRNA sense strand
gaagagauugagaagcaga

SEQ ID NO: 2500350 - RNA, 19 nt, Homo sapiens
  misc_RNA (1)...(19): siRNA sense strand
cgggcgaggcaguauacaa

SEQ ID NO: 2500351 - RNA, 19 nt, Homo sapiens
  misc_RNA (1)...(19): siRNA sense strand
uaaaggaggaagaaaggga

SEQ ID NO: 2500352 - RNA, 19 nt, Homo sapiens
  misc_RNA (1)...(19): siRNA sense strand
gagcuuucgaggagagaac

SEQ ID NO: 2500353 - RNA, 19 nt, Homo sapiens
  misc_RNA (1)...(19): siRNA sense strand
gcaagaacccaguggccua

SEQ ID NO: 2500354 - RNA, 19 nt, Homo sapiens
  misc_RNA (1)...(19): siRNA sense strand
acgaagugauagaggugaa

SEQ ID NO: 2500355 - RNA, 19 nt, Homo sapiens
  misc_RNA (1)...(19): siRNA sense strand
gggccaaagagaaaggaau

SEQ ID NO: 2500356 - RNA, 19 nt, Homo sapiens
  misc_RNA (1)...(19): siRNA sense strand
gcaagaagacaaaggagca

SEQ ID NO: 2500357 - RNA, 19 nt, Homo sapiens
  misc_RNA (1)...(19): siRNA sense strand
cugacgaugccgagguuua

SEQ ID NO: 2500358 - RNA, 19 nt, Homo sapiens
  misc_RNA (1)...(19): siRNA sense strand
cagaagagacccuugguga

SEQ ID NO: 2500359 - RNA, 19 nt, Homo sapiens
  misc_RNA (1)...(19): siRNA sense strand
ccaaacacccagaggagca

SEQ ID NO: 2500360 - RNA, 19 nt, Homo sapiens
  misc_RNA (1)...(19): siRNA sense strand
agagaaaggaaucggcaca

SEQ ID NO: 2500361 - RNA, 19 nt, Homo sapiens
  misc_RNA (1)...(19): siRNA sense strand
gaacugagauugugcguug

SEQ ID NO: 2500362 - RNA, 19 nt, Homo sapiens
  misc_RNA (1)...(19): siRNA sense strand
gugcguugguucaaggaga

SEQ ID NO: 2500363 - RNA, 19 nt, Homo sapiens
  misc_RNA (1)...(19): siRNA sense strand
caucaugaagccuggaaaa

SEQ ID NO: 2500364 - RNA, 19 nt, Homo sapiens
  misc_RNA (1)...(19): siRNA sense strand
cugggaucucggugaguaa

SEQ ID NO: 2500365 - RNA, 19 nt, Homo sapiens
  misc_RNA (1)...(19): siRNA sense strand
auaucaaccuugugcccaa

SEQ ID NO: 2500366 - RNA, 19 nt, Homo sapiens
  misc_RNA (1)...(19): siRNA sense strand
aagaaaacgaagugauaga

SEQ ID NO: 2500367 - RNA, 19 nt, Homo sapiens
  misc_RNA (1)...(19): siRNA sense strand
aggcggaagcuucgagaca

SEQ ID NO: 2500368 - RNA, 19 nt, Homo sapiens
  misc_RNA (1)...(19): siRNA sense strand
uggcagaugaucacggcua

SEQ ID NO: 2500369 - RNA, 19 nt, Homo sapiens
  misc_RNA (1)...(19): siRNA sense strand
cagaagagguggaggaggc

SEQ ID NO: 2500370 - RNA, 19 nt, Homo sapiens
  misc_RNA (1)...(19): siRNA sense strand
ugacagugauucugggauc

SEQ ID NO: 2500371 - RNA, 19 nt, Homo sapiens
  misc_RNA (1)...(19): siRNA sense strand
caacaaaacccauggccga

SEQ ID NO: 2500372 - RNA, 19 nt, Homo sapiens
  misc_RNA (1)...(19): siRNA sense strand
gagaucaagaagugguuca

SEQ ID NO: 2500373 - RNA, 19 nt, Homo sapiens
  misc_RNA (1)...(19): siRNA sense strand
gagaacagaugcuugcuga

SEQ ID NO: 2500374 - RNA, 19 nt, Homo sapiens
  misc_RNA (1)...(19): siRNA sense strand
gcagaauguaacuucacaa

SEQ ID NO: 2500375 - RNA, 19 nt, Homo sapiens
  misc_RNA (1)...(19): siRNA sense strand
aucacaaguaguagaacaa

SEQ ID NO: 2500376 - RNA, 19 nt, Homo sapiens
  misc_RNA (1)...(19): siRNA sense strand
cugaggagcacguuugcaa

SEQ ID NO: 2500377 - RNA, 19 nt, Homo sapiens
  misc_RNA (1)...(19): siRNA sense strand
ccccagaaguucaaagaga

SEQ ID NO: 2500378 - RNA, 19 nt, Homo sapiens
  misc_RNA (1)...(19): siRNA sense strand
cggcagaaggugugucgga

SEQ ID NO: 2500379 - RNA, 19 nt, Homo sapiens
  misc_RNA (1)...(19): siRNA sense strand
agacaaaggagcagauagc

SEQ ID NO: 2500380 - RNA, 19 nt, Homo sapiens
  misc_RNA (1)...(19): siRNA sense strand
ccaaagaaaacgaagugau

SEQ ID NO: 2500381 - RNA, 19 nt, Homo sapiens
  misc_RNA (1)...(19): siRNA sense strand
cgaagugauagaggugaaa

SEQ ID NO: 2500382 - RNA, 19 nt, Homo sapiens
  misc_RNA (1)...(19): siRNA sense strand
ugaucaacucuuucaacaa

SEQ ID NO: 2500383 - RNA, 19 nt, Homo sapiens
  misc_RNA (1)...(19): siRNA sense strand
caaaggagcagauagcaca

SEQ ID NO: 2500384 - RNA, 19 nt, Homo sapiens
  misc_RNA (1)...(19): siRNA sense strand
gguucagugaccaccgaua

SEQ ID NO: 2500385 - RNA, 19 nt, Homo sapiens
  misc_RNA (1)...(19): siRNA sense strand
aagaugugcccgaggaagu

SEQ ID NO: 2500386 - RNA, 19 nt, Homo sapiens
  misc_RNA (1)...(19): siRNA sense strand
ccaucaugaagccuggaaa

SEQ ID NO: 2500387 - RNA, 19 nt, Homo sapiens
  misc_RNA (1)...(19): siRNA sense strand
uagacagggccaaagagaa

SEQ ID NO: 2500388 - RNA, 19 nt, Homo sapiens
  misc_RNA (1)...(19): siRNA sense strand
cgggaaccgugaaguggau

SEQ ID NO: 2500389 - RNA, 19 nt, Homo sapiens
  misc_RNA (1)...(19): siRNA sense strand
ggaagaagcgcaagcccua

SEQ ID NO: 2500390 - RNA, 19 nt, Homo sapiens
  misc_RNA (1)...(19): siRNA sense strand
agggcgaguuucuggucaa

SEQ ID NO: 2500391 - RNA, 19 nt, Homo sapiens
  misc_RNA (1)...(19): siRNA sense strand
gagaaugucaagaggcgaa

SEQ ID NO: 2500392 - RNA, 19 nt, Homo sapiens
  misc_RNA (1)...(19): siRNA sense strand
ggaagaaauucgagcugcu

SEQ ID NO: 2500393 - RNA, 19 nt, Homo sapiens
  misc_RNA (1)...(19): siRNA sense strand
agaggaggaacgagcuaaa

SEQ ID NO: 2500394 - RNA, 19 nt, Homo sapiens
  misc_RNA (1)...(19): siRNA sense strand
aggaggaacaagaagauga

SEQ ID NO: 2500395 - RNA, 19 nt, Homo sapiens
  misc_RNA (1)...(19): siRNA sense strand
aagaggacuuguugcggaa

SEQ ID NO: 2500396 - RNA, 19 nt, Homo sapiens
  misc_RNA (1)...(19): siRNA sense strand
cguccaagcagaggagcaa

SEQ ID NO: 2500397 - RNA, 19 nt, Homo sapiens
  misc_RNA (1)...(19): siRNA sense strand
gcggaaacgacgagaacag

SEQ ID NO: 2500398 - RNA, 19 nt, Homo sapiens
  misc_RNA (1)...(19): siRNA sense strand
ccagaggaggaacgagcua

SEQ ID NO: 2500399 - RNA, 19 nt, Homo sapiens
  misc_RNA (1)...(19): siRNA sense strand
caagaagaugaggaagaaa

SEQ ID NO: 2500400 - RNA, 19 nt, Homo sapiens
  misc_RNA (1)...(19): siRNA sense strand
cugaggaggaacaagaaga

SEQ ID NO: 2500401 - RNA, 19 nt, Homo sapiens
  misc_RNA (1)...(19): siRNA sense strand
gcucauuucugaagaggac

SEQ ID NO: 2500402 - RNA, 19 nt, Homo sapiens
  misc_RNA (1)...(19): siRNA sense strand
aggauaucuggaagaaauu

SEQ ID NO: 2500403 - RNA, 19 nt, Homo sapiens
  misc_RNA (1)...(19): siRNA sense strand
cgaggauaucuggaagaaa

SEQ ID NO: 2500404 - RNA, 19 nt, Homo sapiens
  misc_RNA (1)...(19): siRNA sense strand
acugcgacgaggaggagaa

SEQ ID NO: 2500405 - RNA, 19 nt, Homo sapiens
  misc_RNA (1)...(19): siRNA sense strand
acucugaggaggaacaaga

SEQ ID NO: 2500406 - RNA, 19 nt, Homo sapiens
  misc_RNA (1)...(19): siRNA sense strand
gcagcgacucugaggagga

SEQ ID NO: 2500407 - RNA, 19 nt, Homo sapiens
  misc_RNA (1)...(19): siRNA sense strand
gcgacucugaggaggaaca

SEQ ID NO: 2500408 - RNA, 19 nt, Homo sapiens
  misc_RNA (1)...(19): siRNA sense strand
ggaagaacgugcuggguca

SEQ ID NO: 2500409 - RNA, 19 nt, Homo sapiens
  misc_RNA (1)...(19): siRNA sense strand
gggccaaccucuuccggaa

SEQ ID NO: 2500410 - RNA, 19 nt, Homo sapiens
  misc_RNA (1)...(19): siRNA sense strand
aggaacggccagaucgaua

SEQ ID NO: 2500411 - RNA, 19 nt, Homo sapiens
  misc_RNA (1)...(19): siRNA sense strand
gcaugggaguggaggcagu

SEQ ID NO: 2500412 - RNA, 19 nt, Homo sapiens
  misc_RNA (1)...(19): siRNA sense strand
caaagaaaucggcuggaca

SEQ ID NO: 2500413 - RNA, 19 nt, Homo sapiens
  misc_RNA (1)...(19): siRNA sense strand
uguauucagaagagggcaa

SEQ ID NO: 2500414 - RNA, 19 nt, Homo sapiens
  misc_RNA (1)...(19): siRNA sense strand
gcgauggacgagaggagau

SEQ ID NO: 2500415 - RNA, 19 nt, Homo sapiens
  misc_RNA (1)...(19): siRNA sense strand
acccaucaccucugagaaa

SEQ ID NO: 2500416 - RNA, 19 nt, Homo sapiens
  misc_RNA (1)...(19): siRNA sense strand
aaagaacagugguggcuca

SEQ ID NO: 2500417 - RNA, 19 nt, Homo sapiens
  misc_RNA (1)...(19): siRNA sense strand
ugagaaaaucaaagagcuu

SEQ ID NO: 2500418 - RNA, 19 nt, Homo sapiens
  misc_RNA (1)...(19): siRNA sense strand
gggaauaagcaaaagaaac

SEQ ID NO: 2500419 - RNA, 19 nt, Homo sapiens
  misc_RNA (1)...(19): siRNA sense strand
acuucaucuacgagggcua

SEQ ID NO: 2500420 - RNA, 19 nt, Homo sapiens
  misc_RNA (1)...(19): siRNA sense strand
gggacgacacuguggguac

SEQ ID NO: 2500421 - RNA, 19 nt, Homo sapiens
  misc_RNA (1)...(19): siRNA sense strand
ucaugaaaauccuggccaa

SEQ ID NO: 2500422 - RNA, 19 nt, Homo sapiens
  misc_RNA (1)...(19): siRNA sense strand
agaaguacgccuaccucaa

SEQ ID NO: 2500423 - RNA, 19 nt, Homo sapiens
  misc_RNA (1)...(19): siRNA sense strand
gggccagaucaaagaaauc

SEQ ID NO: 2500424 - RNA, 19 nt, Homo sapiens
  misc_RNA (1)...(19): siRNA sense strand
aggaggccgugcagaagua

SEQ ID NO: 2500425 - RNA, 19 nt, Homo sapiens
  misc_RNA (1)...(19): siRNA sense strand
ccaacaaugugccggguuc

SEQ ID NO: 2500426 - RNA, 19 nt, Homo sapiens
  misc_RNA (1)...(19): siRNA sense strand
ccguggugcgcauggguau

SEQ ID NO: 2500427 - RNA, 19 nt, Homo sapiens
  misc_RNA (1)...(19): siRNA sense strand
cggggaaguacuuggaaga

SEQ ID NO: 2500428 - RNA, 19 nt, Homo sapiens
  misc_RNA (1)...(19): siRNA sense strand
ucgguggauucgaggccua

SEQ ID NO: 2500429 - RNA, 19 nt, Homo sapiens
  misc_RNA (1)...(19): siRNA sense strand
augaagagacggugcgcaa

SEQ ID NO: 2500430 - RNA, 19 nt, Homo sapiens
  misc_RNA (1)...(19): siRNA sense strand
ggacagugcuagaugccau

SEQ ID NO: 2500431 - RNA, 19 nt, Homo sapiens
  misc_RNA (1)...(19): siRNA sense strand
augaauuggacaagaacuu

SEQ ID NO: 2500432 - RNA, 19 nt, Homo sapiens
  misc_RNA (1)...(19): siRNA sense strand
gaaggauacuauugccaga

SEQ ID NO: 2500433 - RNA, 19 nt, Homo sapiens
  misc_RNA (1)...(19): siRNA sense strand
gugaagaucuggaggcgcu

SEQ ID NO: 2500434 - RNA, 19 nt, Homo sapiens
  misc_RNA (1)...(19): siRNA sense strand
aggcuaucauggagcugaa

SEQ ID NO: 2500435 - RNA, 19 nt, Homo sapiens
  misc_RNA (1)...(19): siRNA sense strand
cggucucaauaaagcagaa

SEQ ID NO: 2500436 - RNA, 19 nt, Homo sapiens
  misc_RNA (1)...(19): siRNA sense strand
ucucaauaaagcagaaacu

SEQ ID NO: 2500437 - RNA, 19 nt, Homo sapiens
  misc_RNA (1)...(19): siRNA sense strand
cagcaacaucaguaaggau

SEQ ID NO: 2500438 - RNA, 19 nt, Homo sapiens
  misc_RNA (1)...(19): siRNA sense strand
ugauaugguguguggagau

SEQ ID NO: 2500439 - RNA, 19 nt, Homo sapiens
  misc_RNA (1)...(19): siRNA sense strand
gcgacaucaaggacgaaaa

SEQ ID NO: 2500440 - RNA, 19 nt, Homo sapiens
  misc_RNA (1)...(19): siRNA sense strand
cugaggaggaggugaggga

SEQ ID NO: 2500441 - RNA, 19 nt, Homo sapiens
  misc_RNA (1)...(19): siRNA sense strand
cggccauaguggacgaaaa

SEQ ID NO: 2500442 - RNA, 19 nt, Homo sapiens
  misc_RNA (1)...(19): siRNA sense strand
guuucuacgaugagugcaa

SEQ ID NO: 2500443 - RNA, 19 nt, Homo sapiens
  misc_RNA (1)...(19): siRNA sense strand
gcuacgaguucuuugccaa

SEQ ID NO: 2500444 - RNA, 19 nt, Homo sapiens
  misc_RNA (1)...(19): siRNA sense strand
ccgacaagaacaaggggaa

SEQ ID NO: 2500445 - RNA, 19 nt, Homo sapiens
  misc_RNA (1)...(19): siRNA sense strand
gcgagaagcucaaccugga

SEQ ID NO: 2500446 - RNA, 19 nt, Homo sapiens
  misc_RNA (1)...(19): siRNA sense strand
ccaugaugaguguggacga

SEQ ID NO: 2500447 - RNA, 19 nt, Homo sapiens
  misc_RNA (1)...(19): siRNA sense strand
cggccauaguggacgaaaa

SEQ ID NO: 2500448 - RNA, 19 nt, Homo sapiens
  misc_RNA (1)...(19): siRNA sense strand
guuucuacgaugagugcaa

SEQ ID NO: 2500449 - RNA, 19 nt, Homo sapiens
  misc_RNA (1)...(19): siRNA sense strand
gcuacgaguucuuugccaa

SEQ ID NO: 2500450 - RNA, 19 nt, Homo sapiens
  misc_RNA (1)...(19): siRNA sense strand
ccgacaagaacaaggggaa

SEQ ID NO: 2500451 - RNA, 19 nt, Homo sapiens
  misc_RNA (1)...(19): siRNA sense strand
gcgagaagcucaaccugga

SEQ ID NO: 2500452 - RNA, 19 nt, Homo sapiens
  misc_RNA (1)...(19): siRNA sense strand
ccaugaugaguguggacga

SEQ ID NO: 2500453 - RNA, 19 nt, Homo sapiens
  misc_RNA (1)...(19): siRNA sense strand
gagaagaaccaguuggaag

SEQ ID NO: 2500454 - RNA, 19 nt, Homo sapiens
  misc_RNA (1)...(19): siRNA sense strand
accucuaucuccagaacaa

SEQ ID NO: 2500455 - RNA, 19 nt, Homo sapiens
  misc_RNA (1)...(19): siRNA sense strand
ugaugaaccagcagagcca

SEQ ID NO: 2500456 - RNA, 19 nt, Homo sapiens
  misc_RNA (1)...(19): siRNA sense strand
gcaagauagaccagagggu

SEQ ID NO: 2500457 - RNA, 19 nt, Homo sapiens
  misc_RNA (1)...(19): siRNA sense strand
gagaagaaccaguuggaag

SEQ ID NO: 2500458 - RNA, 19 nt, Homo sapiens
  misc_RNA (1)...(19): siRNA sense strand
accucuaucuccagaacaa

SEQ ID NO: 2500459 - RNA, 19 nt, Homo sapiens
  misc_RNA (1)...(19): siRNA sense strand
ugaugaaccagcagagcca

SEQ ID NO: 2500460 - RNA, 19 nt, Homo sapiens
  misc_RNA (1)...(19): siRNA sense strand
gcaagauagaccagagggu

SEQ ID NO: 2500461 - RNA, 19 nt, Homo sapiens
  misc_RNA (1)...(19): siRNA sense strand
gggaaagagaaggcggaua

SEQ ID NO: 2500462 - RNA, 19 nt, Homo sapiens
  misc_RNA (1)...(19): siRNA sense strand
uggaagaagaagaugaaga

SEQ ID NO: 2500463 - RNA, 19 nt, Homo sapiens
  misc_RNA (1)...(19): siRNA sense strand
gugcacugugauagagaaa

SEQ ID NO: 2500464 - RNA, 19 nt, Homo sapiens
  misc_RNA (1)...(19): siRNA sense strand
cgugcagagaagagcauaa

SEQ ID NO: 2500465 - RNA, 19 nt, Homo sapiens
  misc_RNA (1)...(19): siRNA sense strand
cuauuggagacguggcaaa

SEQ ID NO: 2500466 - RNA, 19 nt, Homo sapiens
  misc_RNA (1)...(19): siRNA sense strand
gggaggaagagaaggagga

SEQ ID NO: 2500467 - RNA, 19 nt, Homo sapiens
  misc_RNA (1)...(19): siRNA sense strand
agagaagagcauaagaaaa

SEQ ID NO: 2500468 - RNA, 19 nt, Homo sapiens
  misc_RNA (1)...(19): siRNA sense strand
cugggugagauguggaaua

SEQ ID NO: 2500469 - RNA, 19 nt, Homo sapiens
  misc_RNA (1)...(19): siRNA sense strand
agauggaagaagaagauga

SEQ ID NO: 2500470 - RNA, 19 nt, Homo sapiens
  misc_RNA (1)...(19): siRNA sense strand
aagaagauggggaggaaga

SEQ ID NO: 2500471 - RNA, 19 nt, Homo sapiens
  misc_RNA (1)...(19): siRNA sense strand
aaugaaggauuauggacca

SEQ ID NO: 2500472 - RNA, 19 nt, Homo sapiens
  misc_RNA (1)...(19): siRNA sense strand
gugauagagaaaugaagga

SEQ ID NO: 2500473 - RNA, 19 nt, Homo sapiens
  misc_RNA (1)...(19): siRNA sense strand
guggcaaagcugaagaagu

SEQ ID NO: 2500474 - RNA, 19 nt, Homo sapiens
  misc_RNA (1)...(19): siRNA sense strand
cugagagguggaagacaau

SEQ ID NO: 2500475 - RNA, 19 nt, Homo sapiens
  misc_RNA (1)...(19): siRNA sense strand
cuaagguggcaaagcugaa

SEQ ID NO: 2500476 - RNA, 19 nt, Homo sapiens
  misc_RNA (1)...(19): siRNA sense strand
uggaauaauuugugccaga

SEQ ID NO: 2500477 - RNA, 19 nt, Homo sapiens
  misc_RNA (1)...(19): siRNA sense strand
cauacuugucugagaucaa

SEQ ID NO: 2500478 - RNA, 19 nt, Homo sapiens
  misc_RNA (1)...(19): siRNA sense strand
acaccaaagagaagcaaca

SEQ ID NO: 2500479 - RNA, 19 nt, Homo sapiens
  misc_RNA (1)...(19): siRNA sense strand
gaaagugaauugucgccau

SEQ ID NO: 2500480 - RNA, 19 nt, Homo sapiens
  misc_RNA (1)...(19): siRNA sense strand
ccuccagacaccaaagaga

SEQ ID NO: 2500481 - RNA, 19 nt, Homo sapiens
  misc_RNA (1)...(19): siRNA sense strand
caagauaacccugggcuga

SEQ ID NO: 2500482 - RNA, 19 nt, Homo sapiens
  misc_RNA (1)...(19): siRNA sense strand
cuuaagaagaggugguguu

SEQ ID NO: 2500483 - RNA, 19 nt, Homo sapiens
  misc_RNA (1)...(19): siRNA sense strand
ucguggagguccugggaga

SEQ ID NO: 2500484 - RNA, 19 nt, Homo sapiens
  misc_RNA (1)...(19): siRNA sense strand
aaucggaggacgaggccua

SEQ ID NO: 2500485 - RNA, 19 nt, Homo sapiens
  misc_RNA (1)...(19): siRNA sense strand
gggagcaaucggaggacga

SEQ ID NO: 2500486 - RNA, 19 nt, Homo sapiens
  misc_RNA (1)...(19): siRNA sense strand
gcagcuagccagugccaga

SEQ ID NO: 2500487 - RNA, 19 nt, Homo sapiens
  misc_RNA (1)...(19): siRNA sense strand
uggcggaaucggugguaga

SEQ ID NO: 2500488 - RNA, 19 nt, Homo sapiens
  misc_RNA (1)...(19): siRNA sense strand
ccuacauggcgcagacaga

SEQ ID NO: 2500489 - RNA, 19 nt, Homo sapiens
  misc_RNA (1)...(19): siRNA sense strand
gggcuuaagaagagguggu

SEQ ID NO: 2500490 - RNA, 19 nt, Homo sapiens
  misc_RNA (1)...(19): siRNA sense strand
augcugaguuggaugccua

SEQ ID NO: 2500491 - RNA, 19 nt, Homo sapiens
  misc_RNA (1)...(19): siRNA sense strand
cuguauugaccaaggagca

SEQ ID NO: 2500492 - RNA, 19 nt, Homo sapiens
  misc_RNA (1)...(19): siRNA sense strand
aggaggaagucuaacagga

SEQ ID NO: 2500493 - RNA, 19 nt, Homo sapiens
  misc_RNA (1)...(19): siRNA sense strand
acgaagaagaggagcggaa

SEQ ID NO: 2500494 - RNA, 19 nt, Homo sapiens
  misc_RNA (1)...(19): siRNA sense strand
gggagaauaccgugcggaa

SEQ ID NO: 2500495 - RNA, 19 nt, Homo sapiens
  misc_RNA (1)...(19): siRNA sense strand
gagaugagcugaagccaca

SEQ ID NO: 2500496 - RNA, 19 nt, Homo sapiens
  misc_RNA (1)...(19): siRNA sense strand
gcagcugugcagaggaaau

SEQ ID NO: 2500497 - RNA, 19 nt, Homo sapiens
  misc_RNA (1)...(19): siRNA sense strand
ccuuugaggcaguggcaca

SEQ ID NO: 2500498 - RNA, 19 nt, Homo sapiens
  misc_RNA (1)...(19): siRNA sense strand
gcaucaucauuguuggaga

SEQ ID NO: 2500499 - RNA, 19 nt, Homo sapiens
  misc_RNA (1)...(19): siRNA sense strand
augagauccuuaagggaca

SEQ ID NO: 2500500 - RNA, 19 nt, Homo sapiens
  misc_RNA (1)...(19): siRNA sense strand
agagaaggcaggaccauga

SEQ ID NO: 2500501 - RNA, 19 nt, Homo sapiens
  misc_RNA (1)...(19): siRNA sense strand
uggcacaggccuuuggaga

SEQ ID NO: 2500502 - RNA, 19 nt, Homo sapiens
  misc_RNA (1)...(19): siRNA sense strand
ccacuuuggacguaggcuu

SEQ ID NO: 2500503 - RNA, 19 nt, Homo sapiens
  misc_RNA (1)...(19): siRNA sense strand
ccuuuggagaugagcugaa

SEQ ID NO: 2500504 - RNA, 19 nt, Homo sapiens
  misc_RNA (1)...(19): siRNA sense strand
uggaggaaugcuuggccua

SEQ ID NO: 2500505 - RNA, 19 nt, Homo sapiens
  misc_RNA (1)...(19): siRNA sense strand
acgaagaagaggagcggaa

SEQ ID NO: 2500506 - RNA, 19 nt, Homo sapiens
  misc_RNA (1)...(19): siRNA sense strand
gggagaauaccgugcggaa

SEQ ID NO: 2500507 - RNA, 19 nt, Homo sapiens
  misc_RNA (1)...(19): siRNA sense strand
gagaugagcugaagccaca

SEQ ID NO: 2500508 - RNA, 19 nt, Homo sapiens
  misc_RNA (1)...(19): siRNA sense strand
gcagcugugcagaggaaau

SEQ ID NO: 2500509 - RNA, 19 nt, Homo sapiens
  misc_RNA (1)...(19): siRNA sense strand
ccuuugaggcaguggcaca

SEQ ID NO: 2500510 - RNA, 19 nt, Homo sapiens
  misc_RNA (1)...(19): siRNA sense strand
gcaucaucauuguuggaga

SEQ ID NO: 2500511 - RNA, 19 nt, Homo sapiens
  misc_RNA (1)...(19): siRNA sense strand
augagauccuuaagggaca

SEQ ID NO: 2500512 - RNA, 19 nt, Homo sapiens
  misc_RNA (1)...(19): siRNA sense strand
uggcacaggccuuuggaga

SEQ ID NO: 2500513 - RNA, 19 nt, Homo sapiens
  misc_RNA (1)...(19): siRNA sense strand
ccacuuuggacguaggcuu

SEQ ID NO: 2500514 - RNA, 19 nt, Homo sapiens
  misc_RNA (1)...(19): siRNA sense strand
ccuuuggagaugagcugaa

SEQ ID NO: 2500515 - RNA, 19 nt, Homo sapiens
  misc_RNA (1)...(19): siRNA sense strand
uggaggaaugcuuggccua

SEQ ID NO: 2500516 - RNA, 19 nt, Homo sapiens
  misc_RNA (1)...(19): siRNA sense strand
ggaaaggagugaagggcca

SEQ ID NO: 2500517 - RNA, 19 nt, Homo sapiens
  misc_RNA (1)...(19): siRNA sense strand
gggagaaguuggacggacu

SEQ ID NO: 2500518 - RNA, 19 nt, Homo sapiens
  misc_RNA (1)...(19): siRNA sense strand
ccaaaggacagaaaggaga

SEQ ID NO: 2500519 - RNA, 19 nt, Homo sapiens
  misc_RNA (1)...(19): siRNA sense strand
uggauggagcaaagggaga

SEQ ID NO: 2500520 - RNA, 19 nt, Homo sapiens
  misc_RNA (1)...(19): siRNA sense strand
aaucaggacgagauggcua

SEQ ID NO: 2500521 - RNA, 19 nt, Homo sapiens
  misc_RNA (1)...(19): siRNA sense strand
agaccaaggacaagaugga

SEQ ID NO: 2500522 - RNA, 19 nt, Homo sapiens
  misc_RNA (1)...(19): siRNA sense strand
cggacaagacggcgagaug

SEQ ID NO: 2500523 - RNA, 19 nt, Homo sapiens
  misc_RNA (1)...(19): siRNA sense strand
gauccggacugcucgggaa

SEQ ID NO: 2500524 - RNA, 19 nt, Homo sapiens
  misc_RNA (1)...(19): siRNA sense strand
cgagaugggcccaaaggga

SEQ ID NO: 2500525 - RNA, 19 nt, Homo sapiens
  misc_RNA (1)...(19): siRNA sense strand
agaaaggagacccaggaga

SEQ ID NO: 2500526 - RNA, 19 nt, Homo sapiens
  misc_RNA (1)...(19): siRNA sense strand
ggaaaagggugcaccagga

SEQ ID NO: 2500527 - RNA, 19 nt, Homo sapiens
  misc_RNA (1)...(19): siRNA sense strand
ccaaaggagagaagggcag

SEQ ID NO: 2500528 - RNA, 19 nt, Homo sapiens
  misc_RNA (1)...(19): siRNA sense strand
ccaaaggagagcccggaca

SEQ ID NO: 2500529 - RNA, 19 nt, Homo sapiens
  misc_RNA (1)...(19): siRNA sense strand
agauggagcugcugggccu

SEQ ID NO: 2500530 - RNA, 19 nt, Homo sapiens
  misc_RNA (1)...(19): siRNA sense strand
gcuugcuggaggauagaaa

SEQ ID NO: 2500531 - RNA, 19 nt, Homo sapiens
  misc_RNA (1)...(19): siRNA sense strand
guuacuacuacgacaggua

SEQ ID NO: 2500532 - RNA, 19 nt, Homo sapiens
  misc_RNA (1)...(19): siRNA sense strand
caggaaauaacgcggagau

SEQ ID NO: 2500533 - RNA, 19 nt, Homo sapiens
  misc_RNA (1)...(19): siRNA sense strand
ggucaaaggaagcggccau

SEQ ID NO: 2500534 - RNA, 19 nt, Homo sapiens
  misc_RNA (1)...(19): siRNA sense strand
ccauaggagaggugaccaa

SEQ ID NO: 2500535 - RNA, 19 nt, Homo sapiens
  misc_RNA (1)...(19): siRNA sense strand
cugaugaguuaaaggguga

SEQ ID NO: 2500536 - RNA, 19 nt, Homo sapiens
  misc_RNA (1)...(19): siRNA sense strand
gaaaggaggaccuggccaa

SEQ ID NO: 2500537 - RNA, 19 nt, Homo sapiens
  misc_RNA (1)...(19): siRNA sense strand
augagaaacgggaggguga

SEQ ID NO: 2500538 - RNA, 19 nt, Homo sapiens
  misc_RNA (1)...(19): siRNA sense strand
aguuaaagggugacaacau

SEQ ID NO: 2500539 - RNA, 19 nt, Homo sapiens
  misc_RNA (1)...(19): siRNA sense strand
gcaugaagaaccucgggaa

SEQ ID NO: 2500540 - RNA, 19 nt, Homo sapiens
  misc_RNA (1)...(19): siRNA sense strand
gguguaagaagcugcggaa

SEQ ID NO: 2500541 - RNA, 19 nt, Homo sapiens
  misc_RNA (1)...(19): siRNA sense strand
gguacgaguuugaugacca

SEQ ID NO: 2500542 - RNA, 19 nt, Homo sapiens
  misc_RNA (1)...(19): siRNA sense strand
ugcagaacgccgagggcua

SEQ ID NO: 2500543 - RNA, 19 nt, Homo sapiens
  misc_RNA (1)...(19): siRNA sense strand
gggcagauuucggaggaga

SEQ ID NO: 2500544 - RNA, 19 nt, Homo sapiens
  misc_RNA (1)...(19): siRNA sense strand
ccugugagaaggagguauu

SEQ ID NO: 2500545 - RNA, 19 nt, Homo sapiens
  misc_RNA (1)...(19): siRNA sense strand
ggaccaaaccuaugggccu

SEQ ID NO: 2500546 - RNA, 19 nt, Homo sapiens
  misc_RNA (1)...(19): siRNA sense strand
aagcacaacuugaccguga

SEQ ID NO: 2500547 - RNA, 19 nt, Homo sapiens
  misc_RNA (1)...(19): siRNA sense strand
ccauucaugcacaggcaaa

SEQ ID NO: 2500548 - RNA, 19 nt, Homo sapiens
  misc_RNA (1)...(19): siRNA sense strand
cugcucaaaucuaagggaa

SEQ ID NO: 2500549 - RNA, 19 nt, Homo sapiens
  misc_RNA (1)...(19): siRNA sense strand
agaucgaggcacuggccaa

SEQ ID NO: 2500550 - RNA, 19 nt, Homo sapiens
  misc_RNA (1)...(19): siRNA sense strand
cuauguuggcugcggagaa

SEQ ID NO: 2500551 - RNA, 19 nt, Homo sapiens
  misc_RNA (1)...(19): siRNA sense strand
uggccuucauuguggagua

SEQ ID NO: 2500552 - RNA, 19 nt, Homo sapiens
  misc_RNA (1)...(19): siRNA sense strand
agguggagaucgaggcacu

SEQ ID NO: 2500553 - RNA, 19 nt, Homo sapiens
  misc_RNA (1)...(19): siRNA sense strand
ccugaaaccucgaggccuc

SEQ ID NO: 2500554 - RNA, 19 nt, Homo sapiens
  misc_RNA (1)...(19): siRNA sense strand
cauucaagaucaacagcca

SEQ ID NO: 2500555 - RNA, 19 nt, Homo sapiens
  misc_RNA (1)...(19): siRNA sense strand
gcaggauugcacaggucaa

SEQ ID NO: 2500556 - RNA, 19 nt, Homo sapiens
  misc_RNA (1)...(19): siRNA sense strand
gcauucaccuaaagcgcuu

SEQ ID NO: 2500557 - RNA, 19 nt, Homo sapiens
  misc_RNA (1)...(19): siRNA sense strand
cggagcaaguggacgagga

SEQ ID NO: 2500558 - RNA, 19 nt, Homo sapiens
  misc_RNA (1)...(19): siRNA sense strand
gcguacaaacucggagcaa

SEQ ID NO: 2500559 - RNA, 19 nt, Homo sapiens
  misc_RNA (1)...(19): siRNA sense strand
acucggagcaaguggacga

SEQ ID NO: 2500560 - RNA, 19 nt, Homo sapiens
  misc_RNA (1)...(19): siRNA sense strand
ccuucauuguggaguacau

SEQ ID NO: 2500561 - RNA, 19 nt, Homo sapiens
  misc_RNA (1)...(19): siRNA sense strand
gcggagaauccuucgcuga

SEQ ID NO: 2500562 - RNA, 19 nt, Homo sapiens
  misc_RNA (1)...(19): siRNA sense strand
cccaauguuccgaggcuau

SEQ ID NO: 2500563 - RNA, 19 nt, Homo sapiens
  misc_RNA (1)...(19): siRNA sense strand
gugcaagccccgugaggau

SEQ ID NO: 2500564 - RNA, 19 nt, Homo sapiens
  misc_RNA (1)...(19): siRNA sense strand
ucugagaaggagcggauga

SEQ ID NO: 2500565 - RNA, 19 nt, Homo sapiens
  misc_RNA (1)...(19): siRNA sense strand
aagaggacuugcugcucaa

SEQ ID NO: 2500566 - RNA, 19 nt, Homo sapiens
  misc_RNA (1)...(19): siRNA sense strand
uguacucauucaagaucaa

SEQ ID NO: 2500567 - RNA, 19 nt, Homo sapiens
  misc_RNA (1)...(19): siRNA sense strand
cagaagaagugcugggaga

SEQ ID NO: 2500568 - RNA, 19 nt, Homo sapiens
  misc_RNA (1)...(19): siRNA sense strand
gcgaacgaggugacggaaa

SEQ ID NO: 2500569 - RNA, 19 nt, Homo sapiens
  misc_RNA (1)...(19): siRNA sense strand
gaauagaguuggagcggug

SEQ ID NO: 2500570 - RNA, 19 nt, Homo sapiens
  misc_RNA (1)...(19): siRNA sense strand
agaagaagugcugggagaa

SEQ ID NO: 2500571 - RNA, 19 nt, Homo sapiens
  misc_RNA (1)...(19): siRNA sense strand
ggagcuguauggagggcaa

SEQ ID NO: 2500572 - RNA, 19 nt, Homo sapiens
  misc_RNA (1)...(19): siRNA sense strand
ccuaugagcagcugggcua

SEQ ID NO: 2500573 - RNA, 19 nt, Homo sapiens
  misc_RNA (1)...(19): siRNA sense strand
agacagagaugguggagcu

SEQ ID NO: 2500574 - RNA, 19 nt, Homo sapiens
  misc_RNA (1)...(19): siRNA sense strand
ugguggagcuggugcccaa

SEQ ID NO: 2500575 - RNA, 19 nt, Homo sapiens
  misc_RNA (1)...(19): siRNA sense strand
ccaucuauacugagcucaa

SEQ ID NO: 2500576 - RNA, 19 nt, Homo sapiens
  misc_RNA (1)...(19): siRNA sense strand
ucacugacuucgaggggaa

SEQ ID NO: 2500577 - RNA, 19 nt, Homo sapiens
  misc_RNA (1)...(19): siRNA sense strand
guggagaucgugaaggaga

SEQ ID NO: 2500578 - RNA, 19 nt, Homo sapiens
  misc_RNA (1)...(19): siRNA sense strand
gggaagacaucauucggga

SEQ ID NO: 2500579 - RNA, 19 nt, Homo sapiens
  misc_RNA (1)...(19): siRNA sense strand
gguacaugaacgggaacua

SEQ ID NO: 2500580 - RNA, 19 nt, Homo sapiens
  misc_RNA (1)...(19): siRNA sense strand
ccaagaagaagaugcagca

SEQ ID NO: 2500581 - RNA, 19 nt, Homo sapiens
  misc_RNA (1)...(19): siRNA sense strand
aagaagaagaugcagcaca

SEQ ID NO: 2500582 - RNA, 19 nt, Homo sapiens
  misc_RNA (1)...(19): siRNA sense strand
gcuucuugcugaugaccau

SEQ ID NO: 2500583 - RNA, 19 nt, Homo sapiens
  misc_RNA (1)...(19): siRNA sense strand
gcgccuuugcagacagaga

SEQ ID NO: 2500584 - RNA, 19 nt, Homo sapiens
  misc_RNA (1)...(19): siRNA sense strand
ggguggaaguggaggagga

SEQ ID NO: 2500585 - RNA, 19 nt, Homo sapiens
  misc_RNA (1)...(19): siRNA sense strand
aggagguggccgaggcaua

SEQ ID NO: 2500586 - RNA, 19 nt, Homo sapiens
  misc_RNA (1)...(19): siRNA sense strand
agaagaaauuuaaggaggu

SEQ ID NO: 2500587 - RNA, 19 nt, Homo sapiens
  misc_RNA (1)...(19): siRNA sense strand
aagaguuugcugagaagaa

SEQ ID NO: 2500588 - RNA, 19 nt, Homo sapiens
  misc_RNA (1)...(19): siRNA sense strand
gagaagaaauuuaaggagg

SEQ ID NO: 2500589 - RNA, 19 nt, Homo sapiens
  misc_RNA (1)...(19): siRNA sense strand
agauggaggcagcugggaa

SEQ ID NO: 2500590 - RNA, 19 nt, Homo sapiens
  misc_RNA (1)...(19): siRNA sense strand
gggagauuuacgaccgcua

SEQ ID NO: 2500591 - RNA, 19 nt, Homo sapiens
  misc_RNA (1)...(19): siRNA sense strand
ggaagggcugacagggaca

SEQ ID NO: 2500592 - RNA, 19 nt, Homo sapiens
  misc_RNA (1)...(19): siRNA sense strand
cugacaagcacaagcggga

SEQ ID NO: 2500593 - RNA, 19 nt, Homo sapiens
  misc_RNA (1)...(19): siRNA sense strand
guguaaggaaggagaagau

SEQ ID NO: 2500594 - RNA, 19 nt, Homo sapiens
  misc_RNA (1)...(19): siRNA sense strand
aggaaggagaagaugaaca

SEQ ID NO: 2500595 - RNA, 19 nt, Homo sapiens
  misc_RNA (1)...(19): siRNA sense strand
cguacaggugcuaugguua

SEQ ID NO: 2500596 - RNA, 19 nt, Homo sapiens
  misc_RNA (1)...(19): siRNA sense strand
gggaacaugcagggcggua

SEQ ID NO: 2500597 - RNA, 19 nt, Homo sapiens
  misc_RNA (1)...(19): siRNA sense strand
cgacaggauucuaugcaga

SEQ ID NO: 2500598 - RNA, 19 nt, Homo sapiens
  misc_RNA (1)...(19): siRNA sense strand
cugacauccaggaggaaau

SEQ ID NO: 2500599 - RNA, 19 nt, Homo sapiens
  misc_RNA (1)...(19): siRNA sense strand
guuuguucuuguugaggaa

SEQ ID NO: 2500600 - RNA, 19 nt, Homo sapiens
  misc_RNA (1)...(19): siRNA sense strand
cccuggagacugaggagua

SEQ ID NO: 2500601 - RNA, 19 nt, Homo sapiens
  misc_RNA (1)...(19): siRNA sense strand
aggacugaucccugacaua

SEQ ID NO: 2500602 - RNA, 19 nt, Homo sapiens
  misc_RNA (1)...(19): siRNA sense strand
guaugacagugcagggcga

SEQ ID NO: 2500603 - RNA, 19 nt, Homo sapiens
  misc_RNA (1)...(19): siRNA sense strand
agcugaagccggagaacua

SEQ ID NO: 2500604 - RNA, 19 nt, Homo sapiens
  misc_RNA (1)...(19): siRNA sense strand
cggagaacuaugagaaugu

SEQ ID NO: 2500605 - RNA, 19 nt, Homo sapiens
  misc_RNA (1)...(19): siRNA sense strand
ugucgaagcugaagccgga

SEQ ID NO: 2500606 - RNA, 19 nt, Homo sapiens
  misc_RNA (1)...(19): siRNA sense strand
gcaucuaccuucaggacuc

SEQ ID NO: 2500607 - RNA, 19 nt, Homo sapiens
  misc_RNA (1)...(19): siRNA sense strand
agcugaagccggagaacua

SEQ ID NO: 2500608 - RNA, 19 nt, Homo sapiens
  misc_RNA (1)...(19): siRNA sense strand
cggagaacuaugagaaugu

SEQ ID NO: 2500609 - RNA, 19 nt, Homo sapiens
  misc_RNA (1)...(19): siRNA sense strand
ugucgaagcugaagccgga

SEQ ID NO: 2500610 - RNA, 19 nt, Homo sapiens
  misc_RNA (1)...(19): siRNA sense strand
gcaucuaccuucaggacuc

SEQ ID NO: 2500611 - RNA, 19 nt, Homo sapiens
  misc_RNA (1)...(19): siRNA sense strand
acgccgagcaugacgggaa

SEQ ID NO: 2500612 - RNA, 19 nt, Homo sapiens
  misc_RNA (1)...(19): siRNA sense strand
aaggcaagguccagcccua

SEQ ID NO: 2500613 - RNA, 19 nt, Homo sapiens
  misc_RNA (1)...(19): siRNA sense strand
gacccaaaggcgugaacau

SEQ ID NO: 2500614 - RNA, 19 nt, Homo sapiens
  misc_RNA (1)...(19): siRNA sense strand
ccguguacuucgccgagaa

SEQ ID NO: 2500615 - RNA, 19 nt, Homo sapiens
  misc_RNA (1)...(19): siRNA sense strand
gggaagccguucugccaca

SEQ ID NO: 2500616 - RNA, 19 nt, Homo sapiens
  misc_RNA (1)...(19): siRNA sense strand
aguugagaucugugggaaa

SEQ ID NO: 2500617 - RNA, 19 nt, Homo sapiens
  misc_RNA (1)...(19): siRNA sense strand
acaucaugcgagagaaaua

SEQ ID NO: 2500618 - RNA, 19 nt, Homo sapiens
  misc_RNA (1)...(19): siRNA sense strand
aggauuuagagaugaguaa

SEQ ID NO: 2500619 - RNA, 19 nt, Homo sapiens
  misc_RNA (1)...(19): siRNA sense strand
ccagaagacaaguuagaau

SEQ ID NO: 2500620 - RNA, 19 nt, Homo sapiens
  misc_RNA (1)...(19): siRNA sense strand
ccauuggguacgagggauu

SEQ ID NO: 2500621 - RNA, 19 nt, Homo sapiens
  misc_RNA (1)...(19): siRNA sense strand
cgagagaaauauccggaga

SEQ ID NO: 2500622 - RNA, 19 nt, Homo sapiens
  misc_RNA (1)...(19): siRNA sense strand
ucuagagaccauugacaaa

SEQ ID NO: 2500623 - RNA, 19 nt, Homo sapiens
  misc_RNA (1)...(19): siRNA sense strand
acagcagaaugaagaacaa

SEQ ID NO: 2500624 - RNA, 19 nt, Homo sapiens
  misc_RNA (1)...(19): siRNA sense strand
caggagaugaugaaagaga

SEQ ID NO: 2500625 - RNA, 19 nt, Homo sapiens
  misc_RNA (1)...(19): siRNA sense strand
uguacgacacggacagaaa

SEQ ID NO: 2500626 - RNA, 19 nt, Homo sapiens
  misc_RNA (1)...(19): siRNA sense strand
gaggauggcgagauggcua

SEQ ID NO: 2500627 - RNA, 19 nt, Homo sapiens
  misc_RNA (1)...(19): siRNA sense strand
ccaugcaaauugacggaga

SEQ ID NO: 2500628 - RNA, 19 nt, Homo sapiens
  misc_RNA (1)...(19): siRNA sense strand
gcucaagaaugcuggacgu

SEQ ID NO: 2500629 - RNA, 19 nt, Homo sapiens
  misc_RNA (1)...(19): siRNA sense strand
gauuuaaauuugagcaccu

SEQ ID NO: 2500630 - RNA, 19 nt, Homo sapiens
  misc_RNA (1)...(19): siRNA sense strand
cugaauaccuggauuggga

SEQ ID NO: 2500631 - RNA, 19 nt, Homo sapiens
  misc_RNA (1)...(19): siRNA sense strand
ccucuggaccggaucguaa

SEQ ID NO: 2500632 - RNA, 19 nt, Homo sapiens
  misc_RNA (1)...(19): siRNA sense strand
ugaugaaagagauugacua

SEQ ID NO: 2500633 - RNA, 19 nt, Homo sapiens
  misc_RNA (1)...(19): siRNA sense strand
ggagaacccuggaugcaga

SEQ ID NO: 2500634 - RNA, 19 nt, Homo sapiens
  misc_RNA (1)...(19): siRNA sense strand
agaugaugaaagagauuga

SEQ ID NO: 2500635 - RNA, 19 nt, Homo sapiens
  misc_RNA (1)...(19): siRNA sense strand
cagcacauguggaggccca

SEQ ID NO: 2500636 - RNA, 19 nt, Homo sapiens
  misc_RNA (1)...(19): siRNA sense strand
agaccauggaugauuuaaa

SEQ ID NO: 2500637 - RNA, 19 nt, Homo sapiens
  misc_RNA (1)...(19): siRNA sense strand
acauauggaucgauggucu

SEQ ID NO: 2500638 - RNA, 19 nt, Homo sapiens
  misc_RNA (1)...(19): siRNA sense strand
augcagacgcccuguacaa

SEQ ID NO: 2500639 - RNA, 19 nt, Homo sapiens
  misc_RNA (1)...(19): siRNA sense strand
acgagggauuccagcaauu

SEQ ID NO: 2500640 - RNA, 19 nt, Homo sapiens
  misc_RNA (1)...(19): siRNA sense strand
gagacuggucacugcuuaa

SEQ ID NO: 2500641 - RNA, 19 nt, Homo sapiens
  misc_RNA (1)...(19): siRNA sense strand
gcaauugagaugggccaaa

SEQ ID NO: 2500642 - RNA, 19 nt, Homo sapiens
  misc_RNA (1)...(19): siRNA sense strand
agaaugaagaacaagcuau

SEQ ID NO: 2500643 - RNA, 19 nt, Homo sapiens
  misc_RNA (1)...(19): siRNA sense strand
cggcacaguaggcuggauu

SEQ ID NO: 2500644 - RNA, 19 nt, Homo sapiens
  misc_RNA (1)...(19): siRNA sense strand
ccuaaagcucuucgaggau

SEQ ID NO: 2500645 - RNA, 19 nt, Homo sapiens
  misc_RNA (1)...(19): siRNA sense strand
acugcuuaaaugagacaaa

SEQ ID NO: 2500646 - RNA, 19 nt, Homo sapiens
  misc_RNA (1)...(19): siRNA sense strand
aaacaagccagaagaccau

SEQ ID NO: 2500647 - RNA, 19 nt, Homo sapiens
  misc_RNA (1)...(19): siRNA sense strand
ggacugagcuguaaccucu

SEQ ID NO: 2500648 - RNA, 19 nt, Homo sapiens
  misc_RNA (1)...(19): siRNA sense strand
gcuggauucuagagaccau

SEQ ID NO: 2500649 - RNA, 19 nt, Homo sapiens
  misc_RNA (1)...(19): siRNA sense strand
ugacaaagcuaacuugcca

SEQ ID NO: 2500650 - RNA, 19 nt, Homo sapiens
  misc_RNA (1)...(19): siRNA sense strand
ugaucuggcucgaugccua

SEQ ID NO: 2500651 - RNA, 19 nt, Homo sapiens
  misc_RNA (1)...(19): siRNA sense strand
augagacaaaugugacaaa

SEQ ID NO: 2500652 - RNA, 19 nt, Homo sapiens
  misc_RNA (1)...(19): siRNA sense strand
aggagaugaugaaagagau

SEQ ID NO: 2500653 - RNA, 19 nt, Homo sapiens
  misc_RNA (1)...(19): siRNA sense strand
ccggagaaguucaacagca

SEQ ID NO: 2500654 - RNA, 19 nt, Homo sapiens
  misc_RNA (1)...(19): siRNA sense strand
cagcuaaagucaucaccga

SEQ ID NO: 2500655 - RNA, 19 nt, Homo sapiens
  misc_RNA (1)...(19): siRNA sense strand
gugcaauugagaugggcca

SEQ ID NO: 2500656 - RNA, 19 nt, Homo sapiens
  misc_RNA (1)...(19): siRNA sense strand
cagaaugaagaacaagcua

SEQ ID NO: 2500657 - RNA, 19 nt, Homo sapiens
  misc_RNA (1)...(19): siRNA sense strand
ccucaacaaacugaagaaa

SEQ ID NO: 2500658 - RNA, 19 nt, Homo sapiens
  misc_RNA (1)...(19): siRNA sense strand
ucuuuggcuucuugagcua

SEQ ID NO: 2500659 - RNA, 19 nt, Homo sapiens
  misc_RNA (1)...(19): siRNA sense strand
aggauggcgagauggcuaa

SEQ ID NO: 2500660 - RNA, 19 nt, Homo sapiens
  misc_RNA (1)...(19): siRNA sense strand
agaaaugggauccuggaca

SEQ ID NO: 2500661 - RNA, 19 nt, Homo sapiens
  misc_RNA (1)...(19): siRNA sense strand
cugcgaccgcugucagaaa

SEQ ID NO: 2500662 - RNA, 19 nt, Homo sapiens
  misc_RNA (1)...(19): siRNA sense strand
cggagaaguucaacagcag

SEQ ID NO: 2500663 - RNA, 19 nt, Homo sapiens
  misc_RNA (1)...(19): siRNA sense strand
cuaaauauguccaaggaga

SEQ ID NO: 2500664 - RNA, 19 nt, Homo sapiens
  misc_RNA (1)...(19): siRNA sense strand
aguugagaucugugggaaa

SEQ ID NO: 2500665 - RNA, 19 nt, Homo sapiens
  misc_RNA (1)...(19): siRNA sense strand
acaucaugcgagagaaaua

SEQ ID NO: 2500666 - RNA, 19 nt, Homo sapiens
  misc_RNA (1)...(19): siRNA sense strand
aggauuuagagaugaguaa

SEQ ID NO: 2500667 - RNA, 19 nt, Homo sapiens
  misc_RNA (1)...(19): siRNA sense strand
ccagaagacaaguuagaau

SEQ ID NO: 2500668 - RNA, 19 nt, Homo sapiens
  misc_RNA (1)...(19): siRNA sense strand
ccauuggguacgagggauu

SEQ ID NO: 2500669 - RNA, 19 nt, Homo sapiens
  misc_RNA (1)...(19): siRNA sense strand
cgagagaaauauccggaga

SEQ ID NO: 2500670 - RNA, 19 nt, Homo sapiens
  misc_RNA (1)...(19): siRNA sense strand
ucuagagaccauugacaaa

SEQ ID NO: 2500671 - RNA, 19 nt, Homo sapiens
  misc_RNA (1)...(19): siRNA sense strand
acagcagaaugaagaacaa

SEQ ID NO: 2500672 - RNA, 19 nt, Homo sapiens
  misc_RNA (1)...(19): siRNA sense strand
caggagaugaugaaagaga

SEQ ID NO: 2500673 - RNA, 19 nt, Homo sapiens
  misc_RNA (1)...(19): siRNA sense strand
uguacgacacggacagaaa

SEQ ID NO: 2500674 - RNA, 19 nt, Homo sapiens
  misc_RNA (1)...(19): siRNA sense strand
gaggauggcgagauggcua

SEQ ID NO: 2500675 - RNA, 19 nt, Homo sapiens
  misc_RNA (1)...(19): siRNA sense strand
ccaugcaaauugacggaga

SEQ ID NO: 2500676 - RNA, 19 nt, Homo sapiens
  misc_RNA (1)...(19): siRNA sense strand
gcucaagaaugcuggacgu

SEQ ID NO: 2500677 - RNA, 19 nt, Homo sapiens
  misc_RNA (1)...(19): siRNA sense strand
ggcaaagggugcucuggaa

SEQ ID NO: 2500678 - RNA, 19 nt, Homo sapiens
  misc_RNA (1)...(19): siRNA sense strand
gauuuaaauuugagcaccu

SEQ ID NO: 2500679 - RNA, 19 nt, Homo sapiens
  misc_RNA (1)...(19): siRNA sense strand
cugaauaccuggauuggga

SEQ ID NO: 2500680 - RNA, 19 nt, Homo sapiens
  misc_RNA (1)...(19): siRNA sense strand
ccucuggaccggaucguaa

SEQ ID NO: 2500681 - RNA, 19 nt, Homo sapiens
  misc_RNA (1)...(19): siRNA sense strand
ugaugaaagagauugacua

SEQ ID NO: 2500682 - RNA, 19 nt, Homo sapiens
  misc_RNA (1)...(19): siRNA sense strand
ggagaacccuggaugcaga

SEQ ID NO: 2500683 - RNA, 19 nt, Homo sapiens
  misc_RNA (1)...(19): siRNA sense strand
agaugaugaaagagauuga

SEQ ID NO: 2500684 - RNA, 19 nt, Homo sapiens
  misc_RNA (1)...(19): siRNA sense strand
cagcacauguggaggccca

SEQ ID NO: 2500685 - RNA, 19 nt, Homo sapiens
  misc_RNA (1)...(19): siRNA sense strand
agaccauggaugauuuaaa

SEQ ID NO: 2500686 - RNA, 19 nt, Homo sapiens
  misc_RNA (1)...(19): siRNA sense strand
acauauggaucgauggucu

SEQ ID NO: 2500687 - RNA, 19 nt, Homo sapiens
  misc_RNA (1)...(19): siRNA sense strand
augcagacgcccuguacaa

SEQ ID NO: 2500688 - RNA, 19 nt, Homo sapiens
  misc_RNA (1)...(19): siRNA sense strand
acgagggauuccagcaauu

SEQ ID NO: 2500689 - RNA, 19 nt, Homo sapiens
  misc_RNA (1)...(19): siRNA sense strand
gagacuggucacugcuuaa

SEQ ID NO: 2500690 - RNA, 19 nt, Homo sapiens
  misc_RNA (1)...(19): siRNA sense strand
agguuaugaaggacagaau

SEQ ID NO: 2500691 - RNA, 19 nt, Homo sapiens
  misc_RNA (1)...(19): siRNA sense strand
gcaauugagaugggccaaa

SEQ ID NO: 2500692 - RNA, 19 nt, Homo sapiens
  misc_RNA (1)...(19): siRNA sense strand
agaaugaagaacaagcuau

SEQ ID NO: 2500693 - RNA, 19 nt, Homo sapiens
  misc_RNA (1)...(19): siRNA sense strand
cggcacaguaggcuggauu

SEQ ID NO: 2500694 - RNA, 19 nt, Homo sapiens
  misc_RNA (1)...(19): siRNA sense strand
ccuaaagcucuucgaggau

SEQ ID NO: 2500695 - RNA, 19 nt, Homo sapiens
  misc_RNA (1)...(19): siRNA sense strand
acugcuuaaaugagacaaa

SEQ ID NO: 2500696 - RNA, 19 nt, Homo sapiens
  misc_RNA (1)...(19): siRNA sense strand
aaacaagccagaagaccau

SEQ ID NO: 2500697 - RNA, 19 nt, Homo sapiens
  misc_RNA (1)...(19): siRNA sense strand
ggacugagcuguaaccucu

SEQ ID NO: 2500698 - RNA, 19 nt, Homo sapiens
  misc_RNA (1)...(19): siRNA sense strand
gcuggauucuagagaccau

SEQ ID NO: 2500699 - RNA, 19 nt, Homo sapiens
  misc_RNA (1)...(19): siRNA sense strand
ugacaaagcuaacuugcca

SEQ ID NO: 2500700 - RNA, 19 nt, Homo sapiens
  misc_RNA (1)...(19): siRNA sense strand
ugaucuggcucgaugccua

SEQ ID NO: 2500701 - RNA, 19 nt, Homo sapiens
  misc_RNA (1)...(19): siRNA sense strand
uaaauauguccaaggagau

SEQ ID NO: 2500702 - RNA, 19 nt, Homo sapiens
  misc_RNA (1)...(19): siRNA sense strand
augagacaaaugugacaaa

SEQ ID NO: 2500703 - RNA, 19 nt, Homo sapiens
  misc_RNA (1)...(19): siRNA sense strand
aggagaugaugaaagagau

SEQ ID NO: 2500704 - RNA, 19 nt, Homo sapiens
  misc_RNA (1)...(19): siRNA sense strand
ccggagaaguucaacagca

SEQ ID NO: 2500705 - RNA, 19 nt, Homo sapiens
  misc_RNA (1)...(19): siRNA sense strand
cagcuaaagucaucaccga

SEQ ID NO: 2500706 - RNA, 19 nt, Homo sapiens
  misc_RNA (1)...(19): siRNA sense strand
gugcaauugagaugggcca

SEQ ID NO: 2500707 - RNA, 19 nt, Homo sapiens
  misc_RNA (1)...(19): siRNA sense strand
cagaaugaagaacaagcua

SEQ ID NO: 2500708 - RNA, 19 nt, Homo sapiens
  misc_RNA (1)...(19): siRNA sense strand
ccucaacaaacugaagaaa

SEQ ID NO: 2500709 - RNA, 19 nt, Homo sapiens
  misc_RNA (1)...(19): siRNA sense strand
ucuuuggcuucuugagcua

SEQ ID NO: 2500710 - RNA, 19 nt, Homo sapiens
  misc_RNA (1)...(19): siRNA sense strand
agaaaugggauccuggaca

SEQ ID NO: 2500711 - RNA, 19 nt, Homo sapiens
  misc_RNA (1)...(19): siRNA sense strand
cugcgaccgcugucagaaa

SEQ ID NO: 2500712 - RNA, 19 nt, Homo sapiens
  misc_RNA (1)...(19): siRNA sense strand
aggauggcgagauggcuaa

SEQ ID NO: 2500713 - RNA, 19 nt, Homo sapiens
  misc_RNA (1)...(19): siRNA sense strand
gaggagguuaugaaggaca

SEQ ID NO: 2500714 - RNA, 19 nt, Homo sapiens
  misc_RNA (1)...(19): siRNA sense strand
cggagaaguucaacagcag

SEQ ID NO: 2500715 - RNA, 19 nt, Homo sapiens
  misc_RNA (1)...(19): siRNA sense strand
cuaaauauguccaaggaga

SEQ ID NO: 2500716 - RNA, 19 nt, Homo sapiens
  misc_RNA (1)...(19): siRNA sense strand
aguugagaucugugggaaa

SEQ ID NO: 2500717 - RNA, 19 nt, Homo sapiens
  misc_RNA (1)...(19): siRNA sense strand
acaucaugcgagagaaaua

SEQ ID NO: 2500718 - RNA, 19 nt, Homo sapiens
  misc_RNA (1)...(19): siRNA sense strand
aggauuuagagaugaguaa

SEQ ID NO: 2500719 - RNA, 19 nt, Homo sapiens
  misc_RNA (1)...(19): siRNA sense strand
ccagaagacaaguuagaau

SEQ ID NO: 2500720 - RNA, 19 nt, Homo sapiens
  misc_RNA (1)...(19): siRNA sense strand
ccauuggguacgagggauu

SEQ ID NO: 2500721 - RNA, 19 nt, Homo sapiens
  misc_RNA (1)...(19): siRNA sense strand
cgagagaaauauccggaga

SEQ ID NO: 2500722 - RNA, 19 nt, Homo sapiens
  misc_RNA (1)...(19): siRNA sense strand
ucuagagaccauugacaaa

SEQ ID NO: 2500723 - RNA, 19 nt, Homo sapiens
  misc_RNA (1)...(19): siRNA sense strand
acagcagaaugaagaacaa

SEQ ID NO: 2500724 - RNA, 19 nt, Homo sapiens
  misc_RNA (1)...(19): siRNA sense strand
caggagaugaugaaagaga

SEQ ID NO: 2500725 - RNA, 19 nt, Homo sapiens
  misc_RNA (1)...(19): siRNA sense strand
uguacgacacggacagaaa

SEQ ID NO: 2500726 - RNA, 19 nt, Homo sapiens
  misc_RNA (1)...(19): siRNA sense strand
gaggauggcgagauggcua

SEQ ID NO: 2500727 - RNA, 19 nt, Homo sapiens
  misc_RNA (1)...(19): siRNA sense strand
ccaugcaaauugacggaga

SEQ ID NO: 2500728 - RNA, 19 nt, Homo sapiens
  misc_RNA (1)...(19): siRNA sense strand
gcucaagaaugcuggacgu

SEQ ID NO: 2500729 - RNA, 19 nt, Homo sapiens
  misc_RNA (1)...(19): siRNA sense strand
ggcaaagggugcucuggaa

SEQ ID NO: 2500730 - RNA, 19 nt, Homo sapiens
  misc_RNA (1)...(19): siRNA sense strand
gauuuaaauuugagcaccu

SEQ ID NO: 2500731 - RNA, 19 nt, Homo sapiens
  misc_RNA (1)...(19): siRNA sense strand
cugaauaccuggauuggga

SEQ ID NO: 2500732 - RNA, 19 nt, Homo sapiens
  misc_RNA (1)...(19): siRNA sense strand
ccucuggaccggaucguaa

SEQ ID NO: 2500733 - RNA, 19 nt, Homo sapiens
  misc_RNA (1)...(19): siRNA sense strand
ugaugaaagagauugacua

SEQ ID NO: 2500734 - RNA, 19 nt, Homo sapiens
  misc_RNA (1)...(19): siRNA sense strand
ggagaacccuggaugcaga

SEQ ID NO: 2500735 - RNA, 19 nt, Homo sapiens
  misc_RNA (1)...(19): siRNA sense strand
agaugaugaaagagauuga

SEQ ID NO: 2500736 - RNA, 19 nt, Homo sapiens
  misc_RNA (1)...(19): siRNA sense strand
cagcacauguggaggccca

SEQ ID NO: 2500737 - RNA, 19 nt, Homo sapiens
  misc_RNA (1)...(19): siRNA sense strand
agaccauggaugauuuaaa

SEQ ID NO: 2500738 - RNA, 19 nt, Homo sapiens
  misc_RNA (1)...(19): siRNA sense strand
acauauggaucgauggucu

SEQ ID NO: 2500739 - RNA, 19 nt, Homo sapiens
  misc_RNA (1)...(19): siRNA sense strand
augcagacgcccuguacaa

SEQ ID NO: 2500740 - RNA, 19 nt, Homo sapiens
  misc_RNA (1)...(19): siRNA sense strand
acgagggauuccagcaauu

SEQ ID NO: 2500741 - RNA, 19 nt, Homo sapiens
  misc_RNA (1)...(19): siRNA sense strand
gagacuggucacugcuuaa

SEQ ID NO: 2500742 - RNA, 19 nt, Homo sapiens
  misc_RNA (1)...(19): siRNA sense strand
agguuaugaaggacagaau

SEQ ID NO: 2500743 - RNA, 19 nt, Homo sapiens
  misc_RNA (1)...(19): siRNA sense strand
gcaauugagaugggccaaa

SEQ ID NO: 2500744 - RNA, 19 nt, Homo sapiens
  misc_RNA (1)...(19): siRNA sense strand
agaaugaagaacaagcuau

SEQ ID NO: 2500745 - RNA, 19 nt, Homo sapiens
  misc_RNA (1)...(19): siRNA sense strand
cggcacaguaggcuggauu

SEQ ID NO: 2500746 - RNA, 19 nt, Homo sapiens
  misc_RNA (1)...(19): siRNA sense strand
ccuaaagcucuucgaggau

SEQ ID NO: 2500747 - RNA, 19 nt, Homo sapiens
  misc_RNA (1)...(19): siRNA sense strand
acugcuuaaaugagacaaa

SEQ ID NO: 2500748 - RNA, 19 nt, Homo sapiens
  misc_RNA (1)...(19): siRNA sense strand
aaacaagccagaagaccau

SEQ ID NO: 2500749 - RNA, 19 nt, Homo sapiens
  misc_RNA (1)...(19): siRNA sense strand
ggacugagcuguaaccucu

SEQ ID NO: 2500750 - RNA, 19 nt, Homo sapiens
  misc_RNA (1)...(19): siRNA sense strand
gcuggauucuagagaccau

SEQ ID NO: 2500751 - RNA, 19 nt, Homo sapiens
  misc_RNA (1)...(19): siRNA sense strand
ugacaaagcuaacuugcca

SEQ ID NO: 2500752 - RNA, 19 nt, Homo sapiens
  misc_RNA (1)...(19): siRNA sense strand
ugaucuggcucgaugccua

SEQ ID NO: 2500753 - RNA, 19 nt, Homo sapiens
  misc_RNA (1)...(19): siRNA sense strand
uaaauauguccaaggagau

SEQ ID NO: 2500754 - RNA, 19 nt, Homo sapiens
  misc_RNA (1)...(19): siRNA sense strand
augagacaaaugugacaaa

SEQ ID NO: 2500755 - RNA, 19 nt, Homo sapiens
  misc_RNA (1)...(19): siRNA sense strand
aggagaugaugaaagagau

SEQ ID NO: 2500756 - RNA, 19 nt, Homo sapiens
  misc_RNA (1)...(19): siRNA sense strand
ccggagaaguucaacagca

SEQ ID NO: 2500757 - RNA, 19 nt, Homo sapiens
  misc_RNA (1)...(19): siRNA sense strand
cagcuaaagucaucaccga

SEQ ID NO: 2500758 - RNA, 19 nt, Homo sapiens
  misc_RNA (1)...(19): siRNA sense strand
gugcaauugagaugggcca

SEQ ID NO: 2500759 - RNA, 19 nt, Homo sapiens
  misc_RNA (1)...(19): siRNA sense strand
cagaaugaagaacaagcua

SEQ ID NO: 2500760 - RNA, 19 nt, Homo sapiens
  misc_RNA (1)...(19): siRNA sense strand
ccucaacaaacugaagaaa

SEQ ID NO: 2500761 - RNA, 19 nt, Homo sapiens
  misc_RNA (1)...(19): siRNA sense strand
ucuuuggcuucuugagcua

SEQ ID NO: 2500762 - RNA, 19 nt, Homo sapiens
  misc_RNA (1)...(19): siRNA sense strand
agaaaugggauccuggaca

SEQ ID NO: 2500763 - RNA, 19 nt, Homo sapiens
  misc_RNA (1)...(19): siRNA sense strand
cugcgaccgcugucagaaa

SEQ ID NO: 2500764 - RNA, 19 nt, Homo sapiens
  misc_RNA (1)...(19): siRNA sense strand
aggauggcgagauggcuaa

SEQ ID NO: 2500765 - RNA, 19 nt, Homo sapiens
  misc_RNA (1)...(19): siRNA sense strand
gaggagguuaugaaggaca

SEQ ID NO: 2500766 - RNA, 19 nt, Homo sapiens
  misc_RNA (1)...(19): siRNA sense strand
cggagaaguucaacagcag

SEQ ID NO: 2500767 - RNA, 19 nt, Homo sapiens
  misc_RNA (1)...(19): siRNA sense strand
cuaaauauguccaaggaga

SEQ ID NO: 2500768 - RNA, 19 nt, Homo sapiens
  misc_RNA (1)...(19): siRNA sense strand
aguugagaucugugggaaa

SEQ ID NO: 2500769 - RNA, 19 nt, Homo sapiens
  misc_RNA (1)...(19): siRNA sense strand
acaucaugcgagagaaaua

SEQ ID NO: 2500770 - RNA, 19 nt, Homo sapiens
  misc_RNA (1)...(19): siRNA sense strand
aggauuuagagaugaguaa

SEQ ID NO: 2500771 - RNA, 19 nt, Homo sapiens
  misc_RNA (1)...(19): siRNA sense strand
ccagaagacaaguuagaau

SEQ ID NO: 2500772 - RNA, 19 nt, Homo sapiens
  misc_RNA (1)...(19): siRNA sense strand
ccauuggguacgagggauu

SEQ ID NO: 2500773 - RNA, 19 nt, Homo sapiens
  misc_RNA (1)...(19): siRNA sense strand
cgagagaaauauccggaga

SEQ ID NO: 2500774 - RNA, 19 nt, Homo sapiens
  misc_RNA (1)...(19): siRNA sense strand
ucuagagaccauugacaaa

SEQ ID NO: 2500775 - RNA, 19 nt, Homo sapiens
  misc_RNA (1)...(19): siRNA sense strand
acagcagaaugaagaacaa

SEQ ID NO: 2500776 - RNA, 19 nt, Homo sapiens
  misc_RNA (1)...(19): siRNA sense strand
caggagaugaugaaagaga

SEQ ID NO: 2500777 - RNA, 19 nt, Homo sapiens
  misc_RNA (1)...(19): siRNA sense strand
uguacgacacggacagaaa

SEQ ID NO: 2500778 - RNA, 19 nt, Homo sapiens
  misc_RNA (1)...(19): siRNA sense strand
gaggauggcgagauggcua

SEQ ID NO: 2500779 - RNA, 19 nt, Homo sapiens
  misc_RNA (1)...(19): siRNA sense strand
ccaugcaaauugacggaga

SEQ ID NO: 2500780 - RNA, 19 nt, Homo sapiens
  misc_RNA (1)...(19): siRNA sense strand
gcucaagaaugcuggacgu

SEQ ID NO: 2500781 - RNA, 19 nt, Homo sapiens
  misc_RNA (1)...(19): siRNA sense strand
ggcaaagggugcucuggaa

SEQ ID NO: 2500782 - RNA, 19 nt, Homo sapiens
  misc_RNA (1)...(19): siRNA sense strand
gauuuaaauuugagcaccu

SEQ ID NO: 2500783 - RNA, 19 nt, Homo sapiens
  misc_RNA (1)...(19): siRNA sense strand
cugaauaccuggauuggga

SEQ ID NO: 2500784 - RNA, 19 nt, Homo sapiens
  misc_RNA (1)...(19): siRNA sense strand
ccucuggaccggaucguaa

SEQ ID NO: 2500785 - RNA, 19 nt, Homo sapiens
  misc_RNA (1)...(19): siRNA sense strand
ugaugaaagagauugacua

SEQ ID NO: 2500786 - RNA, 19 nt, Homo sapiens
  misc_RNA (1)...(19): siRNA sense strand
ggagaacccuggaugcaga

SEQ ID NO: 2500787 - RNA, 19 nt, Homo sapiens
  misc_RNA (1)...(19): siRNA sense strand
agaugaugaaagagauuga

SEQ ID NO: 2500788 - RNA, 19 nt, Homo sapiens
  misc_RNA (1)...(19): siRNA sense strand
cagcacauguggaggccca

SEQ ID NO: 2500789 - RNA, 19 nt, Homo sapiens
  misc_RNA (1)...(19): siRNA sense strand
agaccauggaugauuuaaa

SEQ ID NO: 2500790 - RNA, 19 nt, Homo sapiens
  misc_RNA (1)...(19): siRNA sense strand
acauauggaucgauggucu

SEQ ID NO: 2500791 - RNA, 19 nt, Homo sapiens
  misc_RNA (1)...(19): siRNA sense strand
augcagacgcccuguacaa

SEQ ID NO: 2500792 - RNA, 19 nt, Homo sapiens
  misc_RNA (1)...(19): siRNA sense strand
acgagggauuccagcaauu

SEQ ID NO: 2500793 - RNA, 19 nt, Homo sapiens
  misc_RNA (1)...(19): siRNA sense strand
gagacuggucacugcuuaa

SEQ ID NO: 2500794 - RNA, 19 nt, Homo sapiens
  misc_RNA (1)...(19): siRNA sense strand
agguuaugaaggacagaau

SEQ ID NO: 2500795 - RNA, 19 nt, Homo sapiens
  misc_RNA (1)...(19): siRNA sense strand
gcaauugagaugggccaaa

SEQ ID NO: 2500796 - RNA, 19 nt, Homo sapiens
  misc_RNA (1)...(19): siRNA sense strand
agaaugaagaacaagcuau

SEQ ID NO: 2500797 - RNA, 19 nt, Homo sapiens
  misc_RNA (1)...(19): siRNA sense strand
cggcacaguaggcuggauu

SEQ ID NO: 2500798 - RNA, 19 nt, Homo sapiens
  misc_RNA (1)...(19): siRNA sense strand
ccuaaagcucuucgaggau

SEQ ID NO: 2500799 - RNA, 19 nt, Homo sapiens
  misc_RNA (1)...(19): siRNA sense strand
acugcuuaaaugagacaaa

SEQ ID NO: 2500800 - RNA, 19 nt, Homo sapiens
  misc_RNA (1)...(19): siRNA sense strand
aaacaagccagaagaccau

SEQ ID NO: 2500801 - RNA, 19 nt, Homo sapiens
  misc_RNA (1)...(19): siRNA sense strand
ggacugagcuguaaccucu

SEQ ID NO: 2500802 - RNA, 19 nt, Homo sapiens
  misc_RNA (1)...(19): siRNA sense strand
gcuggauucuagagaccau

SEQ ID NO: 2500803 - RNA, 19 nt, Homo sapiens
  misc_RNA (1)...(19): siRNA sense strand
ugacaaagcuaacuugcca

SEQ ID NO: 2500804 - RNA, 19 nt, Homo sapiens
  misc_RNA (1)...(19): siRNA sense strand
ugaucuggcucgaugccua

SEQ ID NO: 2500805 - RNA, 19 nt, Homo sapiens
  misc_RNA (1)...(19): siRNA sense strand
uaaauauguccaaggagau

SEQ ID NO: 2500806 - RNA, 19 nt, Homo sapiens
  misc_RNA (1)...(19): siRNA sense strand
augagacaaaugugacaaa

SEQ ID NO: 2500807 - RNA, 19 nt, Homo sapiens
  misc_RNA (1)...(19): siRNA sense strand
aggagaugaugaaagagau

SEQ ID NO: 2500808 - RNA, 19 nt, Homo sapiens
  misc_RNA (1)...(19): siRNA sense strand
ccggagaaguucaacagca

SEQ ID NO: 2500809 - RNA, 19 nt, Homo sapiens
  misc_RNA (1)...(19): siRNA sense strand
cagcuaaagucaucaccga

SEQ ID NO: 2500810 - RNA, 19 nt, Homo sapiens
  misc_RNA (1)...(19): siRNA sense strand
gugcaauugagaugggcca

SEQ ID NO: 2500811 - RNA, 19 nt, Homo sapiens
  misc_RNA (1)...(19): siRNA sense strand
cagaaugaagaacaagcua

SEQ ID NO: 2500812 - RNA, 19 nt, Homo sapiens
  misc_RNA (1)...(19): siRNA sense strand
ccucaacaaacugaagaaa

SEQ ID NO: 2500813 - RNA, 19 nt, Homo sapiens
  misc_RNA (1)...(19): siRNA sense strand
ucuuuggcuucuugagcua

SEQ ID NO: 2500814 - RNA, 19 nt, Homo sapiens
  misc_RNA (1)...(19): siRNA sense strand
agaaaugggauccuggaca

SEQ ID NO: 2500815 - RNA, 19 nt, Homo sapiens
  misc_RNA (1)...(19): siRNA sense strand
cugcgaccgcugucagaaa

SEQ ID NO: 2500816 - RNA, 19 nt, Homo sapiens
  misc_RNA (1)...(19): siRNA sense strand
aggauggcgagauggcuaa

SEQ ID NO: 2500817 - RNA, 19 nt, Homo sapiens
  misc_RNA (1)...(19): siRNA sense strand
gaggagguuaugaaggaca

SEQ ID NO: 2500818 - RNA, 19 nt, Homo sapiens
  misc_RNA (1)...(19): siRNA sense strand
cggagaaguucaacagcag

SEQ ID NO: 2500819 - RNA, 19 nt, Homo sapiens
  misc_RNA (1)...(19): siRNA sense strand
aggaagaggaggaggagga

SEQ ID NO: 2500820 - RNA, 19 nt, Homo sapiens
  misc_RNA (1)...(19): siRNA sense strand
aggaagaagaagaggagga

SEQ ID NO: 2500821 - RNA, 19 nt, Homo sapiens
  misc_RNA (1)...(19): siRNA sense strand
aggaggaggaggaggaaga

SEQ ID NO: 2500822 - RNA, 19 nt, Homo sapiens
  misc_RNA (1)...(19): siRNA sense strand
agguaaagauggagacaag

SEQ ID NO: 2500823 - RNA, 19 nt, Homo sapiens
  misc_RNA (1)...(19): siRNA sense strand
cugaagaggaggaggaucu

SEQ ID NO: 2500824 - RNA, 19 nt, Homo sapiens
  misc_RNA (1)...(19): siRNA sense strand
augaagaggaggacgaaga

SEQ ID NO: 2500825 - RNA, 19 nt, Homo sapiens
  misc_RNA (1)...(19): siRNA sense strand
aggaggacgaagaggaaga

SEQ ID NO: 2500826 - RNA, 19 nt, Homo sapiens
  misc_RNA (1)...(19): siRNA sense strand
gugaugaggaagaggagga

SEQ ID NO: 2500827 - RNA, 19 nt, Homo sapiens
  misc_RNA (1)...(19): siRNA sense strand
aggaggaggaggaagaaga

SEQ ID NO: 2500828 - RNA, 19 nt, Homo sapiens
  misc_RNA (1)...(19): siRNA sense strand
aggaggaggaagaagaaga

SEQ ID NO: 2500829 - RNA, 19 nt, Homo sapiens
  misc_RNA (1)...(19): siRNA sense strand
ccuccagagcugagacaga

SEQ ID NO: 2500830 - RNA, 19 nt, Homo sapiens
  misc_RNA (1)...(19): siRNA sense strand
aggagagugaugaggaaga

SEQ ID NO: 2500831 - RNA, 19 nt, Homo sapiens
  misc_RNA (1)...(19): siRNA sense strand
aggaggaggaucuggaaca

SEQ ID NO: 2500832 - RNA, 19 nt, Homo sapiens
  misc_RNA (1)...(19): siRNA sense strand
caaugagcccucugggaau

SEQ ID NO: 2500833 - RNA, 19 nt, Homo sapiens
  misc_RNA (1)...(19): siRNA sense strand
aggaaacagcuauguggaa

SEQ ID NO: 2500834 - RNA, 19 nt, Homo sapiens
  misc_RNA (1)...(19): siRNA sense strand
ccaaugagcccucugggaa

SEQ ID NO: 2500835 - RNA, 19 nt, Homo sapiens
  misc_RNA (1)...(19): siRNA sense strand
agacagaugacgaagacga

SEQ ID NO: 2500836 - RNA, 19 nt, Homo sapiens
  misc_RNA (1)...(19): siRNA sense strand
agaggaggacgaagaggaa

SEQ ID NO: 2500837 - RNA, 19 nt, Homo sapiens
  misc_RNA (1)...(19): siRNA sense strand
aagacgacgaggagaguga

SEQ ID NO: 2500838 - RNA, 19 nt, Homo sapiens
  misc_RNA (1)...(19): siRNA sense strand
gagaacagccugaggagcu

SEQ ID NO: 2500839 - RNA, 19 nt, Homo sapiens
  misc_RNA (1)...(19): siRNA sense strand
aagaggaggaggaggagga

SEQ ID NO: 2500840 - RNA, 19 nt, Homo sapiens
  misc_RNA (1)...(19): siRNA sense strand
ggaagaagcagcagcaggu

SEQ ID NO: 2500841 - RNA, 19 nt, Homo sapiens
  misc_RNA (1)...(19): siRNA sense strand
augaugaagaggaggacga

SEQ ID NO: 2500842 - RNA, 19 nt, Homo sapiens
  misc_RNA (1)...(19): siRNA sense strand
ugaugaugacgaagaugaa

SEQ ID NO: 2500843 - RNA, 19 nt, Homo sapiens
  misc_RNA (1)...(19): siRNA sense strand
aagaagcagcagcagguaa

SEQ ID NO: 2500844 - RNA, 19 nt, Homo sapiens
  misc_RNA (1)...(19): siRNA sense strand
ccugguacuugcaagacaa

SEQ ID NO: 2500845 - RNA, 19 nt, Homo sapiens
  misc_RNA (1)...(19): siRNA sense strand
aggaaaaggaguuggaucu

SEQ ID NO: 2500846 - RNA, 19 nt, Homo sapiens
  misc_RNA (1)...(19): siRNA sense strand
cuucaggggagcagcaaaa

SEQ ID NO: 2500847 - RNA, 19 nt, Homo sapiens
  misc_RNA (1)...(19): siRNA sense strand
cagaauuggaugacccaga

SEQ ID NO: 2500848 - RNA, 19 nt, Homo sapiens
  misc_RNA (1)...(19): siRNA sense strand
cgguugaagcguaagcuga

SEQ ID NO: 2500849 - RNA, 19 nt, Homo sapiens
  misc_RNA (1)...(19): siRNA sense strand
gagcugagacagaugacga

SEQ ID NO: 2500850 - RNA, 19 nt, Homo sapiens
  misc_RNA (1)...(19): siRNA sense strand
ggccauuaggaaacagcua

SEQ ID NO: 2500851 - RNA, 19 nt, Homo sapiens
  misc_RNA (1)...(19): siRNA sense strand
aggaugaugaagaggagga

SEQ ID NO: 2500852 - RNA, 19 nt, Homo sapiens
  misc_RNA (1)...(19): siRNA sense strand
gguugaagcguaagcugau

SEQ ID NO: 2500853 - RNA, 19 nt, Homo sapiens
  misc_RNA (1)...(19): siRNA sense strand
cccgcuacccagagguuaa

SEQ ID NO: 2500854 - RNA, 19 nt, Homo sapiens
  misc_RNA (1)...(19): siRNA sense strand
augaggaagaggaggagga

SEQ ID NO: 2500855 - RNA, 19 nt, Homo sapiens
  misc_RNA (1)...(19): siRNA sense strand
cagcagguaaagauggaga

SEQ ID NO: 2500856 - RNA, 19 nt, Homo sapiens
  misc_RNA (1)...(19): siRNA sense strand
cagcuauguggaaaggcaa

SEQ ID NO: 2500857 - RNA, 19 nt, Homo sapiens
  misc_RNA (1)...(19): siRNA sense strand
gggucaggaggaugaugaa

SEQ ID NO: 2500858 - RNA, 19 nt, Homo sapiens
  misc_RNA (1)...(19): siRNA sense strand
ccucacaacuggggagauu

SEQ ID NO: 2500859 - RNA, 19 nt, Homo sapiens
  misc_RNA (1)...(19): siRNA sense strand
aggaggaagaagaagagga

SEQ ID NO: 2500860 - RNA, 19 nt, Homo sapiens
  misc_RNA (1)...(19): siRNA sense strand
aggagggucaggaggauga

SEQ ID NO: 2500861 - RNA, 19 nt, Homo sapiens
  misc_RNA (1)...(19): siRNA sense strand
uggaugaugaugacgaaga

SEQ ID NO: 2500862 - RNA, 19 nt, Homo sapiens
  misc_RNA (1)...(19): siRNA sense strand
caccacugucuuagagaau

SEQ ID NO: 2500863 - RNA, 19 nt, Homo sapiens
  misc_RNA (1)...(19): siRNA sense strand
gaacuuuguaagaugcaga

SEQ ID NO: 2500864 - RNA, 19 nt, Homo sapiens
  misc_RNA (1)...(19): siRNA sense strand
acaaaagugaggagggcga

SEQ ID NO: 2500865 - RNA, 19 nt, Homo sapiens
  misc_RNA (1)...(19): siRNA sense strand
auucugaagaggaggagga

SEQ ID NO: 2500866 - RNA, 19 nt, Homo sapiens
  misc_RNA (1)...(19): siRNA sense strand
gcugaaagcaauggagaac

SEQ ID NO: 2500867 - RNA, 19 nt, Homo sapiens
  misc_RNA (1)...(19): siRNA sense strand
ccaaucaugaagaaggcaa

SEQ ID NO: 2500868 - RNA, 19 nt, Homo sapiens
  misc_RNA (1)...(19): siRNA sense strand
ugaaggaaaaggagcgcaa

SEQ ID NO: 2500869 - RNA, 19 nt, Homo sapiens
  misc_RNA (1)...(19): siRNA sense strand
guacaagaacaacgaggca

SEQ ID NO: 2500870 - RNA, 19 nt, Homo sapiens
  misc_RNA (1)...(19): siRNA sense strand
acguagaccuggacgccuu

SEQ ID NO: 2500871 - RNA, 19 nt, Homo sapiens
  misc_RNA (1)...(19): siRNA sense strand
cguucggcgauguggagua

SEQ ID NO: 2500872 - RNA, 19 nt, Homo sapiens
  misc_RNA (1)...(19): siRNA sense strand
auaaagaagcugaaggaga

SEQ ID NO: 2500873 - RNA, 19 nt, Homo sapiens
  misc_RNA (1)...(19): siRNA sense strand
cugacaaggaagagaucaa

SEQ ID NO: 2500874 - RNA, 19 nt, Homo sapiens
  misc_RNA (1)...(19): siRNA sense strand
ggaagagaucaaagaccaa

SEQ ID NO: 2500875 - RNA, 19 nt, Homo sapiens
  misc_RNA (1)...(19): siRNA sense strand
ugaggaugguagugaggaa

SEQ ID NO: 2500876 - RNA, 19 nt, Homo sapiens
  misc_RNA (1)...(19): siRNA sense strand
ggaagaaaugaaagggcga

SEQ ID NO: 2500877 - RNA, 19 nt, Homo sapiens
  misc_RNA (1)...(19): siRNA sense strand
uugaagaagccuuggaaaa

SEQ ID NO: 2500878 - RNA, 19 nt, Homo sapiens
  misc_RNA (1)...(19): siRNA sense strand
aggaagagaucaaagacca

SEQ ID NO: 2500879 - RNA, 19 nt, Homo sapiens
  misc_RNA (1)...(19): siRNA sense strand
ugaacuugacugugaggaa

SEQ ID NO: 2500880 - RNA, 19 nt, Homo sapiens
  misc_RNA (1)...(19): siRNA sense strand
gcaacaugguuuagagggu

SEQ ID NO: 2500881 - RNA, 19 nt, Homo sapiens
  misc_RNA (1)...(19): siRNA sense strand
aucugaagcuaguggaaau

SEQ ID NO: 2500882 - RNA, 19 nt, Homo sapiens
  misc_RNA (1)...(19): siRNA sense strand
ccaaauguuaugagaagga

SEQ ID NO: 2500883 - RNA, 19 nt, Homo sapiens
  misc_RNA (1)...(19): siRNA sense strand
aaguaagacaaaugcagaa

SEQ ID NO: 2500884 - RNA, 19 nt, Homo sapiens
  misc_RNA (1)...(19): siRNA sense strand
guguguaaccagauugaau

SEQ ID NO: 2500885 - RNA, 19 nt, Homo sapiens
  misc_RNA (1)...(19): siRNA sense strand
guggaaauaaagagaugau

SEQ ID NO: 2500886 - RNA, 19 nt, Homo sapiens
  misc_RNA (1)...(19): siRNA sense strand
ggauuaauucauaagcaga

SEQ ID NO: 2500887 - RNA, 19 nt, Homo sapiens
  misc_RNA (1)...(19): siRNA sense strand
auguagauaaggugaaaca

SEQ ID NO: 2500888 - RNA, 19 nt, Homo sapiens
  misc_RNA (1)...(19): siRNA sense strand
gaugaauaaagaagcugaa

SEQ ID NO: 2500889 - RNA, 19 nt, Homo sapiens
  misc_RNA (1)...(19): siRNA sense strand
guugaagaagccuuggaaa

SEQ ID NO: 2500890 - RNA, 19 nt, Homo sapiens
  misc_RNA (1)...(19): siRNA sense strand
gcuaguggaaauaaagaga

SEQ ID NO: 2500891 - RNA, 19 nt, Homo sapiens
  misc_RNA (1)...(19): siRNA sense strand
ugaaacugcagaagaugaa

SEQ ID NO: 2500892 - RNA, 19 nt, Homo sapiens
  misc_RNA (1)...(19): siRNA sense strand
cagccaaauguuaugagaa

SEQ ID NO: 2500893 - RNA, 19 nt, Homo sapiens
  misc_RNA (1)...(19): siRNA sense strand
cuucagaaauauaauggga

SEQ ID NO: 2500894 - RNA, 19 nt, Homo sapiens
  misc_RNA (1)...(19): siRNA sense strand
ccuggaaugcuuacggcaa

SEQ ID NO: 2500895 - RNA, 19 nt, Homo sapiens
  misc_RNA (1)...(19): siRNA sense strand
ggaaaagucuccuugccaa

SEQ ID NO: 2500896 - RNA, 19 nt, Homo sapiens
  misc_RNA (1)...(19): siRNA sense strand
agagcaguuuguugaagaa

SEQ ID NO: 2500897 - RNA, 19 nt, Homo sapiens
  misc_RNA (1)...(19): siRNA sense strand
ugaccuagacaaagcuauu

SEQ ID NO: 2500898 - RNA, 19 nt, Homo sapiens
  misc_RNA (1)...(19): siRNA sense strand
gggugcugcuacaaggcaa

SEQ ID NO: 2500899 - RNA, 19 nt, Homo sapiens
  misc_RNA (1)...(19): siRNA sense strand
ucagaaauauaaugggaag

SEQ ID NO: 2500900 - RNA, 19 nt, Homo sapiens
  misc_RNA (1)...(19): siRNA sense strand
cugauaaccaauacgucaa

SEQ ID NO: 2500901 - RNA, 19 nt, Homo sapiens
  misc_RNA (1)...(19): siRNA sense strand
gaaaagucuccuugccaaa

SEQ ID NO: 2500902 - RNA, 19 nt, Homo sapiens
  misc_RNA (1)...(19): siRNA sense strand
uugguaucuucaaggauua

SEQ ID NO: 2500903 - RNA, 19 nt, Homo sapiens
  misc_RNA (1)...(19): siRNA sense strand
ccugauaaccaauacguca

SEQ ID NO: 2500904 - RNA, 19 nt, Homo sapiens
  misc_RNA (1)...(19): siRNA sense strand
aaugcagaauacaggagaa

SEQ ID NO: 2500905 - RNA, 19 nt, Homo sapiens
  misc_RNA (1)...(19): siRNA sense strand
gaaucugaagcuaguggaa

SEQ ID NO: 2500906 - RNA, 19 nt, Homo sapiens
  misc_RNA (1)...(19): siRNA sense strand
agccaaauguuaugagaag

SEQ ID NO: 2500907 - RNA, 19 nt, Homo sapiens
  misc_RNA (1)...(19): siRNA sense strand
gugaaacaaaccugcaaga

SEQ ID NO: 2500908 - RNA, 19 nt, Homo sapiens
  misc_RNA (1)...(19): siRNA sense strand
cagaagaugaauaaagaag

SEQ ID NO: 2500909 - RNA, 19 nt, Homo sapiens
  misc_RNA (1)...(19): siRNA sense strand
uaaagaagcugaaggagag

SEQ ID NO: 2500910 - RNA, 19 nt, Homo sapiens
  misc_RNA (1)...(19): siRNA sense strand
gccaaauuuuacagaagaa

SEQ ID NO: 2500911 - RNA, 19 nt, Homo sapiens
  misc_RNA (1)...(19): siRNA sense strand
acuuguuggccuacauaaa

SEQ ID NO: 2500912 - RNA, 19 nt, Homo sapiens
  misc_RNA (1)...(19): siRNA sense strand
ucucaagggaucuagaaga

SEQ ID NO: 2500913 - RNA, 19 nt, Homo sapiens
  misc_RNA (1)...(19): siRNA sense strand
agaauucccuggagaaaau

SEQ ID NO: 2500914 - RNA, 19 nt, Homo sapiens
  misc_RNA (1)...(19): siRNA sense strand
auaaucacccagagaaaca

SEQ ID NO: 2500915 - RNA, 19 nt, Homo sapiens
  misc_RNA (1)...(19): siRNA sense strand
ccuccgcagugcagccaaa

SEQ ID NO: 2500916 - RNA, 19 nt, Homo sapiens
  misc_RNA (1)...(19): siRNA sense strand
cuacaaggcaaaaguaaga

SEQ ID NO: 2500917 - RNA, 19 nt, Homo sapiens
  misc_RNA (1)...(19): siRNA sense strand
aaugaaagggcgaaggugu

SEQ ID NO: 2500918 - RNA, 19 nt, Homo sapiens
  misc_RNA (1)...(19): siRNA sense strand
aggagaaucugaagcuagu

SEQ ID NO: 2500919 - RNA, 19 nt, Homo sapiens
  misc_RNA (1)...(19): siRNA sense strand
cugaaacugcagaagauga

SEQ ID NO: 2500920 - RNA, 19 nt, Homo sapiens
  misc_RNA (1)...(19): siRNA sense strand
ggugcugcuacaaggcaaa

SEQ ID NO: 2500921 - RNA, 19 nt, Homo sapiens
  misc_RNA (1)...(19): siRNA sense strand
aaucaacugacaaggaaga

SEQ ID NO: 2500922 - RNA, 19 nt, Homo sapiens
  misc_RNA (1)...(19): siRNA sense strand
gaggaugguagugaggaaa

SEQ ID NO: 2500923 - RNA, 19 nt, Homo sapiens
  misc_RNA (1)...(19): siRNA sense strand
aggaugguagugaggaaau

SEQ ID NO: 2500924 - RNA, 19 nt, Homo sapiens
  misc_RNA (1)...(19): siRNA sense strand
agcagaaaucagaagucua

SEQ ID NO: 2500925 - RNA, 19 nt, Homo sapiens
  misc_RNA (1)...(19): siRNA sense strand
aguuaauccagcaagaaca

SEQ ID NO: 2500926 - RNA, 19 nt, Homo sapiens
  misc_RNA (1)...(19): siRNA sense strand
ggauaaaggccuuggcaga

SEQ ID NO: 2500927 - RNA, 19 nt, Homo sapiens
  misc_RNA (1)...(19): siRNA sense strand
cugcagagcuccugggaca

SEQ ID NO: 2500928 - RNA, 19 nt, Homo sapiens
  misc_RNA (1)...(19): siRNA sense strand
gggacaaagugaaggccau

SEQ ID NO: 2500929 - RNA, 19 nt, Homo sapiens
  misc_RNA (1)...(19): siRNA sense strand
gggagaaggcagaggccau

SEQ ID NO: 2500930 - RNA, 19 nt, Homo sapiens
  misc_RNA (1)...(19): siRNA sense strand
agacaaagguaguggaguc

SEQ ID NO: 2500931 - RNA, 19 nt, Homo sapiens
  misc_RNA (1)...(19): siRNA sense strand
ccacaaaggagaagaccca

SEQ ID NO: 2500932 - RNA, 19 nt, Homo sapiens
  misc_RNA (1)...(19): siRNA sense strand
cggcaagguuauugaccau

SEQ ID NO: 2500933 - RNA, 19 nt, Homo sapiens
  misc_RNA (1)...(19): siRNA sense strand
gcuuugaggagcugagcaa

SEQ ID NO: 2500934 - RNA, 19 nt, Homo sapiens
  misc_RNA (1)...(19): siRNA sense strand
aggagaagcuagagcaacu

SEQ ID NO: 2500935 - RNA, 19 nt, Homo sapiens
  misc_RNA (1)...(19): siRNA sense strand
aggagaaggagcagaucua

SEQ ID NO: 2500936 - RNA, 19 nt, Homo sapiens
  misc_RNA (1)...(19): siRNA sense strand
ugucagggcuggagcguga

SEQ ID NO: 2500937 - RNA, 19 nt, Homo sapiens
  misc_RNA (1)...(19): siRNA sense strand
guguacaccuggagaacau

SEQ ID NO: 2500938 - RNA, 19 nt, Homo sapiens
  misc_RNA (1)...(19): siRNA sense strand
agaagaagcaugaggccau

SEQ ID NO: 2500939 - RNA, 19 nt, Homo sapiens
  misc_RNA (1)...(19): siRNA sense strand
ccauugagacugagaagau

SEQ ID NO: 2500940 - RNA, 19 nt, Homo sapiens
  misc_RNA (1)...(19): siRNA sense strand
gggagcuggcccugagaaa

SEQ ID NO: 2500941 - RNA, 19 nt, Homo sapiens
  misc_RNA (1)...(19): siRNA sense strand
cggaaaacccugaugagaa

SEQ ID NO: 2500942 - RNA, 19 nt, Homo sapiens
  misc_RNA (1)...(19): siRNA sense strand
acugagaagaugauugaaa

SEQ ID NO: 2500943 - RNA, 19 nt, Homo sapiens
  misc_RNA (1)...(19): siRNA sense strand
gggagauggaugaggcuga

SEQ ID NO: 2500944 - RNA, 19 nt, Homo sapiens
  misc_RNA (1)...(19): siRNA sense strand
ggaugggagagaaggagaa

SEQ ID NO: 2500945 - RNA, 19 nt, Homo sapiens
  misc_RNA (1)...(19): siRNA sense strand
ggaucacggacaagacaaa

SEQ ID NO: 2500946 - RNA, 19 nt, Homo sapiens
  misc_RNA (1)...(19): siRNA sense strand
aggaagaagcagcuggaau

SEQ ID NO: 2500947 - RNA, 19 nt, Homo sapiens
  misc_RNA (1)...(19): siRNA sense strand
cagacgacgagcuggauaa

SEQ ID NO: 2500948 - RNA, 19 nt, Homo sapiens
  misc_RNA (1)...(19): siRNA sense strand
acaucgaugcggaaggaaa

SEQ ID NO: 2500949 - RNA, 19 nt, Homo sapiens
  misc_RNA (1)...(19): siRNA sense strand
ggaucaaggagaaggagca

SEQ ID NO: 2500950 - RNA, 19 nt, Homo sapiens
  misc_RNA (1)...(19): siRNA sense strand
gcaggagaagcuagagcaa

SEQ ID NO: 2500951 - RNA, 19 nt, Homo sapiens
  misc_RNA (1)...(19): siRNA sense strand
agaggagauccgcgagaaa

SEQ ID NO: 2500952 - RNA, 19 nt, Homo sapiens
  misc_RNA (1)...(19): siRNA sense strand
aggaaagagaugaaugaga

SEQ ID NO: 2500953 - RNA, 19 nt, Homo sapiens
  misc_RNA (1)...(19): siRNA sense strand
gggaaagccuggaggaagc

SEQ ID NO: 2500954 - RNA, 19 nt, Homo sapiens
  misc_RNA (1)...(19): siRNA sense strand
gaggacaggcacaggaaga

SEQ ID NO: 2500955 - RNA, 19 nt, Homo sapiens
  misc_RNA (1)...(19): siRNA sense strand
auggagaacaaccgggaua

SEQ ID NO: 2500956 - RNA, 19 nt, Homo sapiens
  misc_RNA (1)...(19): siRNA sense strand
uggcuaagcugaagcgagu

SEQ ID NO: 2500957 - RNA, 19 nt, Homo sapiens
  misc_RNA (1)...(19): siRNA sense strand
cugagaagaugauugaaaa

SEQ ID NO: 2500958 - RNA, 19 nt, Homo sapiens
  misc_RNA (1)...(19): siRNA sense strand
gggauaaggucuugagucc

SEQ ID NO: 2500959 - RNA, 19 nt, Homo sapiens
  misc_RNA (1)...(19): siRNA sense strand
gggagaggagggaggagau

SEQ ID NO: 2500960 - RNA, 19 nt, Homo sapiens
  misc_RNA (1)...(19): siRNA sense strand
acgccagauugcagagaga

SEQ ID NO: 2500961 - RNA, 19 nt, Homo sapiens
  misc_RNA (1)...(19): siRNA sense strand
cuacagaagcacaaguuga

SEQ ID NO: 2500962 - RNA, 19 nt, Homo sapiens
  misc_RNA (1)...(19): siRNA sense strand
gcggaugaccugaaggcuu

SEQ ID NO: 2500963 - RNA, 19 nt, Homo sapiens
  misc_RNA (1)...(19): siRNA sense strand
aggagaaggugcagcugau

SEQ ID NO: 2500964 - RNA, 19 nt, Homo sapiens
  misc_RNA (1)...(19): siRNA sense strand
agaugaagacggcaggcua

SEQ ID NO: 2500965 - RNA, 19 nt, Homo sapiens
  misc_RNA (1)...(19): siRNA sense strand
ccaggauaacuuuggguau

SEQ ID NO: 2500966 - RNA, 19 nt, Homo sapiens
  misc_RNA (1)...(19): siRNA sense strand
agagcuggaucaaggagaa

SEQ ID NO: 2500967 - RNA, 19 nt, Homo sapiens
  misc_RNA (1)...(19): siRNA sense strand
auugaaacccggagcaaga

SEQ ID NO: 2500968 - RNA, 19 nt, Homo sapiens
  misc_RNA (1)...(19): siRNA sense strand
cuucacaauaaauggcuaa

SEQ ID NO: 2500969 - RNA, 19 nt, Homo sapiens
  misc_RNA (1)...(19): siRNA sense strand
auaaauggcuaaagcacca

SEQ ID NO: 2500970 - RNA, 19 nt, Homo sapiens
  misc_RNA (1)...(19): siRNA sense strand
ggauguuggcuaagcugaa

SEQ ID NO: 2500971 - RNA, 19 nt, Homo sapiens
  misc_RNA (1)...(19): siRNA sense strand
ccaggaggaaagagaugaa

SEQ ID NO: 2500972 - RNA, 19 nt, Homo sapiens
  misc_RNA (1)...(19): siRNA sense strand
gguuauugaccaugccauu

SEQ ID NO: 2500973 - RNA, 19 nt, Homo sapiens
  misc_RNA (1)...(19): siRNA sense strand
ccgccaagaagaagcauga

SEQ ID NO: 2500974 - RNA, 19 nt, Homo sapiens
  misc_RNA (1)...(19): siRNA sense strand
gccuggagaauguggacaa

SEQ ID NO: 2500975 - RNA, 19 nt, Homo sapiens
  misc_RNA (1)...(19): siRNA sense strand
agaugaaggugcuggcagu

SEQ ID NO: 2500976 - RNA, 19 nt, Homo sapiens
  misc_RNA (1)...(19): siRNA sense strand
cgcccaaguuucaagagaa

SEQ ID NO: 2500977 - RNA, 19 nt, Homo sapiens
  misc_RNA (1)...(19): siRNA sense strand
agaaagugauccaaggcca

SEQ ID NO: 2500978 - RNA, 19 nt, Homo sapiens
  misc_RNA (1)...(19): siRNA sense strand
aggcagaggccauccagaa

SEQ ID NO: 2500979 - RNA, 19 nt, Homo sapiens
  misc_RNA (1)...(19): siRNA sense strand
ggaugagagccaacaauca

SEQ ID NO: 2500980 - RNA, 19 nt, Homo sapiens
  misc_RNA (1)...(19): siRNA sense strand
cggacaagacaaagguagu

SEQ ID NO: 2500981 - RNA, 19 nt, Homo sapiens
  misc_RNA (1)...(19): siRNA sense strand
ggcuaaagcaccaggcguu

SEQ ID NO: 2500982 - RNA, 19 nt, Homo sapiens
  misc_RNA (1)...(19): siRNA sense strand
ggauaaugacaauagcuca

SEQ ID NO: 2500983 - RNA, 19 nt, Homo sapiens
  misc_RNA (1)...(19): siRNA sense strand
gagaccagcaaguggauca

SEQ ID NO: 2500984 - RNA, 19 nt, Homo sapiens
  misc_RNA (1)...(19): siRNA sense strand
ccuaugaccugcaccgcua

SEQ ID NO: 2500985 - RNA, 19 nt, Homo sapiens
  misc_RNA (1)...(19): siRNA sense strand
cgagcuggauaaugacaau

SEQ ID NO: 2500986 - RNA, 19 nt, Homo sapiens
  misc_RNA (1)...(19): siRNA sense strand
aggaauacacucuggcuca

SEQ ID NO: 2500987 - RNA, 19 nt, Homo sapiens
  misc_RNA (1)...(19): siRNA sense strand
uccggaaguuugaggauuu

SEQ ID NO: 2500988 - RNA, 19 nt, Homo sapiens
  misc_RNA (1)...(19): siRNA sense strand
agcgcaagcuggagaacau

SEQ ID NO: 2500989 - RNA, 19 nt, Homo sapiens
  misc_RNA (1)...(19): siRNA sense strand
ugaaguaucaccagggcau

SEQ ID NO: 2500990 - RNA, 19 nt, Homo sapiens
  misc_RNA (1)...(19): siRNA sense strand
aaggguggcuagagaacau

SEQ ID NO: 2500991 - RNA, 19 nt, Homo sapiens
  misc_RNA (1)...(19): siRNA sense strand
agaccuggcucaaugaaaa

SEQ ID NO: 2500992 - RNA, 19 nt, Homo sapiens
  misc_RNA (1)...(19): siRNA sense strand
ccaccuuacagcaggauca

SEQ ID NO: 2500993 - RNA, 19 nt, Homo sapiens
  misc_RNA (1)...(19): siRNA sense strand
gaacaaagaccauggcugu

SEQ ID NO: 2500994 - RNA, 19 nt, Homo sapiens
  misc_RNA (1)...(19): siRNA sense strand
ccaucaagacccugcgcaa

SEQ ID NO: 2500995 - RNA, 19 nt, Homo sapiens
  misc_RNA (1)...(19): siRNA sense strand
caggaaauuuugaaagaca

SEQ ID NO: 2500996 - RNA, 19 nt, Homo sapiens
  misc_RNA (1)...(19): siRNA sense strand
aagacaagaagcugaucaa

SEQ ID NO: 2500997 - RNA, 19 nt, Homo sapiens
  misc_RNA (1)...(19): siRNA sense strand
gcacagacuucgauggcuc

SEQ ID NO: 2500998 - RNA, 19 nt, Homo sapiens
  misc_RNA (1)...(19): siRNA sense strand
gcccaggaauccaaggaga

SEQ ID NO: 2500999 - RNA, 19 nt, Homo sapiens
  misc_RNA (1)...(19): siRNA sense strand
ggacaauaaugguggcugc

SEQ ID NO: 2501000 - RNA, 19 nt, Homo sapiens
  misc_RNA (1)...(19): siRNA sense strand
agacaugcaaagacaucaa

SEQ ID NO: 2501001 - RNA, 19 nt, Homo sapiens
  misc_RNA (1)...(19): siRNA sense strand
gagacauugacgaguguga

SEQ ID NO: 2501002 - RNA, 19 nt, Homo sapiens
  misc_RNA (1)...(19): siRNA sense strand
ucaaauccaaugaaggcaa

SEQ ID NO: 2501003 - RNA, 19 nt, Homo sapiens
  misc_RNA (1)...(19): siRNA sense strand
cugcaugaacaaagaccau

SEQ ID NO: 2501004 - RNA, 19 nt, Homo sapiens
  misc_RNA (1)...(19): siRNA sense strand
cacuggaaccggaaggauu

SEQ ID NO: 2501005 - RNA, 19 nt, Homo sapiens
  misc_RNA (1)...(19): siRNA sense strand
agggcaaggcgcugcagaa

SEQ ID NO: 2501006 - RNA, 19 nt, Homo sapiens
  misc_RNA (1)...(19): siRNA sense strand
gcuacaagcugcucaccga

SEQ ID NO: 2501007 - RNA, 19 nt, Homo sapiens
  misc_RNA (1)...(19): siRNA sense strand
gcugaaugcgucuggcaca

SEQ ID NO: 2501008 - RNA, 19 nt, Homo sapiens
  misc_RNA (1)...(19): siRNA sense strand
cauugacgagugugagaau

SEQ ID NO: 2501009 - RNA, 19 nt, Homo sapiens
  misc_RNA (1)...(19): siRNA sense strand
cggcuuugaccuugcccaa

SEQ ID NO: 2501010 - RNA, 19 nt, Homo sapiens
  misc_RNA (1)...(19): siRNA sense strand
uugaaagacaagaagcuga

SEQ ID NO: 2501011 - RNA, 19 nt, Homo sapiens
  misc_RNA (1)...(19): siRNA sense strand
uugacgagugugagaauga

SEQ ID NO: 2501012 - RNA, 19 nt, Homo sapiens
  misc_RNA (1)...(19): siRNA sense strand
uggauguggacgaguguca

SEQ ID NO: 2501013 - RNA, 19 nt, Homo sapiens
  misc_RNA (1)...(19): siRNA sense strand
agacaaagauggaagaggc

SEQ ID NO: 2501014 - RNA, 19 nt, Homo sapiens
  misc_RNA (1)...(19): siRNA sense strand
cgaugaggacuaccagcaa

SEQ ID NO: 2501015 - RNA, 19 nt, Homo sapiens
  misc_RNA (1)...(19): siRNA sense strand
aaaccaaagccguggccaa

SEQ ID NO: 2501016 - RNA, 19 nt, Homo sapiens
  misc_RNA (1)...(19): siRNA sense strand
caguggaggagaaggagaa

SEQ ID NO: 2501017 - RNA, 19 nt, Homo sapiens
  misc_RNA (1)...(19): siRNA sense strand
gagaaggagaagaaggcau

SEQ ID NO: 2501018 - RNA, 19 nt, Homo sapiens
  misc_RNA (1)...(19): siRNA sense strand
agacaguggaggagaagga

SEQ ID NO: 2501019 - RNA, 19 nt, Homo sapiens
  misc_RNA (1)...(19): siRNA sense strand
ccaagaacaucaaggaccu

SEQ ID NO: 2501020 - RNA, 19 nt, Homo sapiens
  misc_RNA (1)...(19): siRNA sense strand
gcgcccuggauguggacua

SEQ ID NO: 2501021 - RNA, 19 nt, Homo sapiens
  misc_RNA (1)...(19): siRNA sense strand
uggcuguggugauggacau

SEQ ID NO: 2501022 - RNA, 19 nt, Homo sapiens
  misc_RNA (1)...(19): siRNA sense strand
uggaagacuuugaccggga

SEQ ID NO: 2501023 - RNA, 19 nt, Homo sapiens
  misc_RNA (1)...(19): siRNA sense strand
ucaaggaccugcugcgcuu

SEQ ID NO: 2501024 - RNA, 19 nt, Homo sapiens
  misc_RNA (1)...(19): siRNA sense strand
augcgaagaaugugggaaa

SEQ ID NO: 2501025 - RNA, 19 nt, Homo sapiens
  misc_RNA (1)...(19): siRNA sense strand
aggaagaagaagaagaaca

SEQ ID NO: 2501026 - RNA, 19 nt, Homo sapiens
  misc_RNA (1)...(19): siRNA sense strand
gggcgaguaucgagcggaa

SEQ ID NO: 2501027 - RNA, 19 nt, Homo sapiens
  misc_RNA (1)...(19): siRNA sense strand
aagcauuagaagaagcaaa

SEQ ID NO: 2501028 - RNA, 19 nt, Homo sapiens
  misc_RNA (1)...(19): siRNA sense strand
aagcaaaggaaguccgaca

SEQ ID NO: 2501029 - RNA, 19 nt, Homo sapiens
  misc_RNA (1)...(19): siRNA sense strand
gauaauugacacaggagga

SEQ ID NO: 2501030 - RNA, 19 nt, Homo sapiens
  misc_RNA (1)...(19): siRNA sense strand
uaaccaaaacagaggcaaa

SEQ ID NO: 2501031 - RNA, 19 nt, Homo sapiens
  misc_RNA (1)...(19): siRNA sense strand
cgacaggaaaaccgagaaa

SEQ ID NO: 2501032 - RNA, 19 nt, Homo sapiens
  misc_RNA (1)...(19): siRNA sense strand
aagaggaagaagaagaaga

SEQ ID NO: 2501033 - RNA, 19 nt, Homo sapiens
  misc_RNA (1)...(19): siRNA sense strand
auuagaagaagcaaaggaa

SEQ ID NO: 2501034 - RNA, 19 nt, Homo sapiens
  misc_RNA (1)...(19): siRNA sense strand
aggaaguccgacaggaaaa

SEQ ID NO: 2501035 - RNA, 19 nt, Homo sapiens
  misc_RNA (1)...(19): siRNA sense strand
agaauugcggcgagcagua

SEQ ID NO: 2501036 - RNA, 19 nt, Homo sapiens
  misc_RNA (1)...(19): siRNA sense strand
aguauggaccagaagaaaa

SEQ ID NO: 2501037 - RNA, 19 nt, Homo sapiens
  misc_RNA (1)...(19): siRNA sense strand
gaagaugacauguaccgua

SEQ ID NO: 2501038 - RNA, 19 nt, Homo sapiens
  misc_RNA (1)...(19): siRNA sense strand
cccaaagauaauugacaca

SEQ ID NO: 2501039 - RNA, 19 nt, Homo sapiens
  misc_RNA (1)...(19): siRNA sense strand
cauuagaagaagcaaagga

SEQ ID NO: 2501040 - RNA, 19 nt, Homo sapiens
  misc_RNA (1)...(19): siRNA sense strand
gaucacaacuucuaaggga

SEQ ID NO: 2501041 - RNA, 19 nt, Homo sapiens
  misc_RNA (1)...(19): siRNA sense strand
aagaagaaaacaugggaca

SEQ ID NO: 2501042 - RNA, 19 nt, Homo sapiens
  misc_RNA (1)...(19): siRNA sense strand
ggucaauaaugcuggagug

SEQ ID NO: 2501043 - RNA, 19 nt, Homo sapiens
  misc_RNA (1)...(19): siRNA sense strand
gcaacaacugagagacacu

SEQ ID NO: 2501044 - RNA, 19 nt, Homo sapiens
  misc_RNA (1)...(19): siRNA sense strand
uaagcaaaauggaggugaa

SEQ ID NO: 2501045 - RNA, 19 nt, Homo sapiens
  misc_RNA (1)...(19): siRNA sense strand
gcugcuaaucuuaugaaca

SEQ ID NO: 2501046 - RNA, 19 nt, Homo sapiens
  misc_RNA (1)...(19): siRNA sense strand
aggaaagguugaagaaacu

SEQ ID NO: 2501047 - RNA, 19 nt, Homo sapiens
  misc_RNA (1)...(19): siRNA sense strand
auaccaaaccugaaggcaa

SEQ ID NO: 2501048 - RNA, 19 nt, Homo sapiens
  misc_RNA (1)...(19): siRNA sense strand
cccuaaaccaugagaugua

SEQ ID NO: 2501049 - RNA, 19 nt, Homo sapiens
  misc_RNA (1)...(19): siRNA sense strand
ugaaugagguugagcgucu

SEQ ID NO: 2501050 - RNA, 19 nt, Homo sapiens
  misc_RNA (1)...(19): siRNA sense strand
cagaagagugggacaacau

SEQ ID NO: 2501051 - RNA, 19 nt, Homo sapiens
  misc_RNA (1)...(19): siRNA sense strand
ugacauggggcgagagauu

SEQ ID NO: 2501052 - RNA, 19 nt, Homo sapiens
  misc_RNA (1)...(19): siRNA sense strand
ggaggacaggagaggaaau

SEQ ID NO: 2501053 - RNA, 19 nt, Homo sapiens
  misc_RNA (1)...(19): siRNA sense strand
augagauguaugaggcuaa

SEQ ID NO: 2501054 - RNA, 19 nt, Homo sapiens
  misc_RNA (1)...(19): siRNA sense strand
auggaggacaggagaggaa

SEQ ID NO: 2501055 - RNA, 19 nt, Homo sapiens
  misc_RNA (1)...(19): siRNA sense strand
agaccuacaaagugaauga

SEQ ID NO: 2501056 - RNA, 19 nt, Homo sapiens
  misc_RNA (1)...(19): siRNA sense strand
auguaaagggcaaaucaua

SEQ ID NO: 2501057 - RNA, 19 nt, Homo sapiens
  misc_RNA (1)...(19): siRNA sense strand
augagaaaccagaugauca

SEQ ID NO: 2501058 - RNA, 19 nt, Homo sapiens
  misc_RNA (1)...(19): siRNA sense strand
gcuacuugugagagucuaa

SEQ ID NO: 2501059 - RNA, 19 nt, Homo sapiens
  misc_RNA (1)...(19): siRNA sense strand
ugaccagacaagagaaaau

SEQ ID NO: 2501060 - RNA, 19 nt, Homo sapiens
  misc_RNA (1)...(19): siRNA sense strand
cauaacaacuuuuggagga

SEQ ID NO: 2501061 - RNA, 19 nt, Homo sapiens
  misc_RNA (1)...(19): siRNA sense strand
ugacaaugaaggagcuacu

SEQ ID NO: 2501062 - RNA, 19 nt, Homo sapiens
  misc_RNA (1)...(19): siRNA sense strand
ccuacuuagaucauaacaa

SEQ ID NO: 2501063 - RNA, 19 nt, Homo sapiens
  misc_RNA (1)...(19): siRNA sense strand
uugcagaagagugggacaa

SEQ ID NO: 2501064 - RNA, 19 nt, Homo sapiens
  misc_RNA (1)...(19): siRNA sense strand
uuaccaaagaggaaagguu

SEQ ID NO: 2501065 - RNA, 19 nt, Homo sapiens
  misc_RNA (1)...(19): siRNA sense strand
ggaugauaccaaaccugaa

SEQ ID NO: 2501066 - RNA, 19 nt, Homo sapiens
  misc_RNA (1)...(19): siRNA sense strand
agaggaaagguugaagaaa

SEQ ID NO: 2501067 - RNA, 19 nt, Homo sapiens
  misc_RNA (1)...(19): siRNA sense strand
gagugaagcuggagaggcc

SEQ ID NO: 2501068 - RNA, 19 nt, Homo sapiens
  misc_RNA (1)...(19): siRNA sense strand
ggaugaaaucuggcaguca

SEQ ID NO: 2501069 - RNA, 19 nt, Homo sapiens
  misc_RNA (1)...(19): siRNA sense strand
augagagaaagcacagaaa

SEQ ID NO: 2501070 - RNA, 19 nt, Homo sapiens
  misc_RNA (1)...(19): siRNA sense strand
gagaggacgagguggacca

SEQ ID NO: 2501071 - RNA, 19 nt, Homo sapiens
  misc_RNA (1)...(19): siRNA sense strand
aggcagacgaugagcacua

SEQ ID NO: 2501072 - RNA, 19 nt, Homo sapiens
  misc_RNA (1)...(19): siRNA sense strand
gugacagucuagagggcuu

SEQ ID NO: 2501073 - RNA, 19 nt, Homo sapiens
  misc_RNA (1)...(19): siRNA sense strand
gugugguggugcuggacaa

SEQ ID NO: 2501074 - RNA, 19 nt, Homo sapiens
  misc_RNA (1)...(19): siRNA sense strand
ucuacaacccagagaacau

SEQ ID NO: 2501075 - RNA, 19 nt, Homo sapiens
  misc_RNA (1)...(19): siRNA sense strand
ucauagaccgggaggcaga

SEQ ID NO: 2501076 - RNA, 19 nt, Homo sapiens
  misc_RNA (1)...(19): siRNA sense strand
gagaaaagauccaugagga

SEQ ID NO: 2501077 - RNA, 19 nt, Homo sapiens
  misc_RNA (1)...(19): siRNA sense strand
ucaacaucauccagggaga

SEQ ID NO: 2501078 - RNA, 19 nt, Homo sapiens
  misc_RNA (1)...(19): siRNA sense strand
aguaugacaagcugcguaa

SEQ ID NO: 2501079 - RNA, 19 nt, Homo sapiens
  misc_RNA (1)...(19): siRNA sense strand
aggacaacuuugaugagau

SEQ ID NO: 2501080 - RNA, 19 nt, Homo sapiens
  misc_RNA (1)...(19): siRNA sense strand
gguucgaguucuggaaaca

SEQ ID NO: 2501081 - RNA, 19 nt, Homo sapiens
  misc_RNA (1)...(19): siRNA sense strand
ggaacauggaggaggagcu

SEQ ID NO: 2501082 - RNA, 19 nt, Homo sapiens
  misc_RNA (1)...(19): siRNA sense strand
cuaagaagcuggugcagac

SEQ ID NO: 2501083 - RNA, 19 nt, Homo sapiens
  misc_RNA (1)...(19): siRNA sense strand
ccagggagauugugcagca

SEQ ID NO: 2501084 - RNA, 19 nt, Homo sapiens
  misc_RNA (1)...(19): siRNA sense strand
caucauagaccgggaggca

SEQ ID NO: 2501085 - RNA, 19 nt, Homo sapiens
  misc_RNA (1)...(19): siRNA sense strand
ggcagaugguagugacagu

SEQ ID NO: 2501086 - RNA, 19 nt, Homo sapiens
  misc_RNA (1)...(19): siRNA sense strand
gggaacgcaaguuggccaa

SEQ ID NO: 2501087 - RNA, 19 nt, Homo sapiens
  misc_RNA (1)...(19): siRNA sense strand
cucaagaggcugacgcaga

SEQ ID NO: 2501088 - RNA, 19 nt, Homo sapiens
  misc_RNA (1)...(19): siRNA sense strand
ggaacaagcuggaggagca

SEQ ID NO: 2501089 - RNA, 19 nt, Homo sapiens
  misc_RNA (1)...(19): siRNA sense strand
ccgucaacaacaagagaaa

SEQ ID NO: 2501090 - RNA, 19 nt, Homo sapiens
  misc_RNA (1)...(19): siRNA sense strand
ggaacaagcgugaggagca

SEQ ID NO: 2501091 - RNA, 19 nt, Homo sapiens
  misc_RNA (1)...(19): siRNA sense strand
acuauaagcuccagguuga

SEQ ID NO: 2501092 - RNA, 19 nt, Homo sapiens
  misc_RNA (1)...(19): siRNA sense strand
agagaaauggaguggccaa

SEQ ID NO: 2501093 - RNA, 19 nt, Homo sapiens
  misc_RNA (1)...(19): siRNA sense strand
gcgcagagcagaaugacuu

SEQ ID NO: 2501094 - RNA, 19 nt, Homo sapiens
  misc_RNA (1)...(19): siRNA sense strand
ggguaauggugcacgggca

SEQ ID NO: 2501095 - RNA, 19 nt, Homo sapiens
  misc_RNA (1)...(19): siRNA sense strand
gagaaauggaguggccaaa

SEQ ID NO: 2501096 - RNA, 19 nt, Homo sapiens
  misc_RNA (1)...(19): siRNA sense strand
cuuucaaugacaagaacaa

SEQ ID NO: 2501097 - RNA, 19 nt, Homo sapiens
  misc_RNA (1)...(19): siRNA sense strand
caagaauggcagugauguu

SEQ ID NO: 2501098 - RNA, 19 nt, Homo sapiens
  misc_RNA (1)...(19): siRNA sense strand
ucaaggagcugaacuacaa

SEQ ID NO: 2501099 - RNA, 19 nt, Homo sapiens
  misc_RNA (1)...(19): siRNA sense strand
acaauuacaccgucaacaa

SEQ ID NO: 2501100 - RNA, 19 nt, Homo sapiens
  misc_RNA (1)...(19): siRNA sense strand
acagguacccggaaauuaa

SEQ ID NO: 2501101 - RNA, 19 nt, Homo sapiens
  misc_RNA (1)...(19): siRNA sense strand
aggaggacacgcugggcaa

SEQ ID NO: 2501102 - RNA, 19 nt, Homo sapiens
  misc_RNA (1)...(19): siRNA sense strand
cagcacaaccgcaugaaga

SEQ ID NO: 2501103 - RNA, 19 nt, Homo sapiens
  misc_RNA (1)...(19): siRNA sense strand
ggcaugauguacuggcaau

SEQ ID NO: 2501104 - RNA, 19 nt, Homo sapiens
  misc_RNA (1)...(19): siRNA sense strand
uuaaagaggagcuggagga

SEQ ID NO: 2501105 - RNA, 19 nt, Homo sapiens
  misc_RNA (1)...(19): siRNA sense strand
uggaggagcuggaccgcau

SEQ ID NO: 2501106 - RNA, 19 nt, Homo sapiens
  misc_RNA (1)...(19): siRNA sense strand
cggaagccaugcagcguga

SEQ ID NO: 2501107 - RNA, 19 nt, Homo sapiens
  misc_RNA (1)...(19): siRNA sense strand
cagaacaauuacaccguca

SEQ ID NO: 2501108 - RNA, 19 nt, Homo sapiens
  misc_RNA (1)...(19): siRNA sense strand
ucggagaguacuucagcua

SEQ ID NO: 2501109 - RNA, 19 nt, Homo sapiens
  misc_RNA (1)...(19): siRNA sense strand
cccuacagguacccggaaa

SEQ ID NO: 2501110 - RNA, 19 nt, Homo sapiens
  misc_RNA (1)...(19): siRNA sense strand
agaacaaaucggacugcuu

SEQ ID NO: 2501111 - RNA, 19 nt, Homo sapiens
  misc_RNA (1)...(19): siRNA sense strand
auguauggaaacugcuaua

SEQ ID NO: 2501112 - RNA, 19 nt, Homo sapiens
  misc_RNA (1)...(19): siRNA sense strand
aggaaacccuggacagacu

SEQ ID NO: 2501113 - RNA, 19 nt, Homo sapiens
  misc_RNA (1)...(19): siRNA sense strand
gaucaaggaguguggcugu

SEQ ID NO: 2501114 - RNA, 19 nt, Homo sapiens
  misc_RNA (1)...(19): siRNA sense strand
uggccaaagucaacaucuu

SEQ ID NO: 2501115 - RNA, 19 nt, Homo sapiens
  misc_RNA (1)...(19): siRNA sense strand
cggaaauuaaagaggagcu

SEQ ID NO: 2501116 - RNA, 19 nt, Homo sapiens
  misc_RNA (1)...(19): siRNA sense strand
aaauuaaagaggagcugga

SEQ ID NO: 2501117 - RNA, 19 nt, Homo sapiens
  misc_RNA (1)...(19): siRNA sense strand
gcuauacuuucaaugacaa

SEQ ID NO: 2501118 - RNA, 19 nt, Homo sapiens
  misc_RNA (1)...(19): siRNA sense strand
ccuacagguacccggaaau

SEQ ID NO: 2501119 - RNA, 19 nt, Homo sapiens
  misc_RNA (1)...(19): siRNA sense strand
ccgucagccucaacaucaa

SEQ ID NO: 2501120 - RNA, 19 nt, Homo sapiens
  misc_RNA (1)...(19): siRNA sense strand
gaaauggaguggccaaagu

SEQ ID NO: 2501121 - RNA, 19 nt, Homo sapiens
  misc_RNA (1)...(19): siRNA sense strand
ggucaaaguuaccgggcag

SEQ ID NO: 2501122 - RNA, 19 nt, Homo sapiens
  misc_RNA (1)...(19): siRNA sense strand
gcgaagauggggagacauu

SEQ ID NO: 2501123 - RNA, 19 nt, Homo sapiens
  misc_RNA (1)...(19): siRNA sense strand
auucacaaauuuagggacu

SEQ ID NO: 2501124 - RNA, 19 nt, Homo sapiens
  misc_RNA (1)...(19): siRNA sense strand
aauugauugcaguuggaaa

SEQ ID NO: 2501125 - RNA, 19 nt, Homo sapiens
  misc_RNA (1)...(19): siRNA sense strand
uguuugagugugaagaaau

SEQ ID NO: 2501126 - RNA, 19 nt, Homo sapiens
  misc_RNA (1)...(19): siRNA sense strand
auugauugcaguuggaaaa

SEQ ID NO: 2501127 - RNA, 19 nt, Homo sapiens
  misc_RNA (1)...(19): siRNA sense strand
cucaaagaccuguggaacu

SEQ ID NO: 2501128 - RNA, 19 nt, Homo sapiens
  misc_RNA (1)...(19): siRNA sense strand
aagaaaugcagcaagacca

SEQ ID NO: 2501129 - RNA, 19 nt, Homo sapiens
  misc_RNA (1)...(19): siRNA sense strand
uaacaaagccgcaagccaa

SEQ ID NO: 2501130 - RNA, 19 nt, Homo sapiens
  misc_RNA (1)...(19): siRNA sense strand
uuguggaagaggagcgaaa

SEQ ID NO: 2501131 - RNA, 19 nt, Homo sapiens
  misc_RNA (1)...(19): siRNA sense strand
gcguagaguuuguagagag

SEQ ID NO: 2501132 - RNA, 19 nt, Homo sapiens
  misc_RNA (1)...(19): siRNA sense strand
agaaagcaauggaugagga

SEQ ID NO: 2501133 - RNA, 19 nt, Homo sapiens
  misc_RNA (1)...(19): siRNA sense strand
aggaagagcuuguggccau

SEQ ID NO: 2501134 - RNA, 19 nt, Homo sapiens
  misc_RNA (1)...(19): siRNA sense strand
ugacaagaacaguggagau

SEQ ID NO: 2501135 - RNA, 19 nt, Homo sapiens
  misc_RNA (1)...(19): siRNA sense strand
acggaugggccgagaguga

SEQ ID NO: 2501136 - RNA, 19 nt, Homo sapiens
  misc_RNA (1)...(19): siRNA sense strand
gggauuuggcagcaauaaa

SEQ ID NO: 2501137 - RNA, 19 nt, Homo sapiens
  misc_RNA (1)...(19): siRNA sense strand
gggacuaaagacagcaaau

SEQ ID NO: 2501138 - RNA, 19 nt, Homo sapiens
  misc_RNA (1)...(19): siRNA sense strand
cagaugaugucuuggcaga

SEQ ID NO: 2501139 - RNA, 19 nt, Homo sapiens
  misc_RNA (1)...(19): siRNA sense strand
guaccaaggcugggaggaa

SEQ ID NO: 2501140 - RNA, 19 nt, Homo sapiens
  misc_RNA (1)...(19): siRNA sense strand
accaaagggagcagcaaua

SEQ ID NO: 2501141 - RNA, 19 nt, Homo sapiens
  misc_RNA (1)...(19): siRNA sense strand
acagaauuuuggagguaaa

SEQ ID NO: 2501142 - RNA, 19 nt, Homo sapiens
  misc_RNA (1)...(19): siRNA sense strand
gcauggaccuugugccaga

SEQ ID NO: 2501143 - RNA, 19 nt, Homo sapiens
  misc_RNA (1)...(19): siRNA sense strand
gguccugguuacuggguga

SEQ ID NO: 2501144 - RNA, 19 nt, Homo sapiens
  misc_RNA (1)...(19): siRNA sense strand
gguacugauugcuguguuu

SEQ ID NO: 2501145 - RNA, 19 nt, Homo sapiens
  misc_RNA (1)...(19): siRNA sense strand
gaggagaagcagugaccca

SEQ ID NO: 2501146 - RNA, 19 nt, Homo sapiens
  misc_RNA (1)...(19): siRNA sense strand
acgcagaacuuggaagaca

SEQ ID NO: 2501147 - RNA, 19 nt, Homo sapiens
  misc_RNA (1)...(19): siRNA sense strand
guaaccaccucuaggcgaa

SEQ ID NO: 2501148 - RNA, 19 nt, Homo sapiens
  misc_RNA (1)...(19): siRNA sense strand
cuaaggacacauugaguga

SEQ ID NO: 2501149 - RNA, 19 nt, Homo sapiens
  misc_RNA (1)...(19): siRNA sense strand
ccucuaggcgaaaugauaa

SEQ ID NO: 2501150 - RNA, 19 nt, Homo sapiens
  misc_RNA (1)...(19): siRNA sense strand
gaauauacagauggaggaa

SEQ ID NO: 2501151 - RNA, 19 nt, Homo sapiens
  misc_RNA (1)...(19): siRNA sense strand
cuaacuucgccaagaacua

SEQ ID NO: 2501152 - RNA, 19 nt, Homo sapiens
  misc_RNA (1)...(19): siRNA sense strand
gguaauaaugauggcguuu

SEQ ID NO: 2501153 - RNA, 19 nt, Homo sapiens
  misc_RNA (1)...(19): siRNA sense strand
auauacagauggaggaauc

SEQ ID NO: 2501154 - RNA, 19 nt, Homo sapiens
  misc_RNA (1)...(19): siRNA sense strand
ccacgcagaacuuggaaga

SEQ ID NO: 2501155 - RNA, 19 nt, Homo sapiens
  misc_RNA (1)...(19): siRNA sense strand
uugcaguccacaagacaaa

SEQ ID NO: 2501156 - RNA, 19 nt, Homo sapiens
  misc_RNA (1)...(19): siRNA sense strand
ggcagauguuguugaagau

SEQ ID NO: 2501157 - RNA, 19 nt, Homo sapiens
  misc_RNA (1)...(19): siRNA sense strand
guuugaagaacaagaacca

SEQ ID NO: 2501158 - RNA, 19 nt, Homo sapiens
  misc_RNA (1)...(19): siRNA sense strand
cuuggaagacagagaaguu

SEQ ID NO: 2501159 - RNA, 19 nt, Homo sapiens
  misc_RNA (1)...(19): siRNA sense strand
gaauacauguagugcccuu

SEQ ID NO: 2501160 - RNA, 19 nt, Homo sapiens
  misc_RNA (1)...(19): siRNA sense strand
agaacuuggaagacagaga

SEQ ID NO: 2501161 - RNA, 19 nt, Homo sapiens
  misc_RNA (1)...(19): siRNA sense strand
ggaccuugugccagaugaa

SEQ ID NO: 2501162 - RNA, 19 nt, Homo sapiens
  misc_RNA (1)...(19): siRNA sense strand
gggauugggccucgaagau

SEQ ID NO: 2501163 - RNA, 19 nt, Homo sapiens
  misc_RNA (1)...(19): siRNA sense strand
gagcauggaccuugugcca

SEQ ID NO: 2501164 - RNA, 19 nt, Homo sapiens
  misc_RNA (1)...(19): siRNA sense strand
uuugaaugguguacagaca

SEQ ID NO: 2501165 - RNA, 19 nt, Homo sapiens
  misc_RNA (1)...(19): siRNA sense strand
cagcaaaucucacaggaac

SEQ ID NO: 2501166 - RNA, 19 nt, Homo sapiens
  misc_RNA (1)...(19): siRNA sense strand
ggcgaaaugauaauaguau

SEQ ID NO: 2501167 - RNA, 19 nt, Homo sapiens
  misc_RNA (1)...(19): siRNA sense strand
auguggaucucguagacaa

SEQ ID NO: 2501168 - RNA, 19 nt, Homo sapiens
  misc_RNA (1)...(19): siRNA sense strand
ugguaauaaugauggcguu

SEQ ID NO: 2501169 - RNA, 19 nt, Homo sapiens
  misc_RNA (1)...(19): siRNA sense strand
uccacaagacaaacagaaa

SEQ ID NO: 2501170 - RNA, 19 nt, Homo sapiens
  misc_RNA (1)...(19): siRNA sense strand
ggguggauucagcaguaua

SEQ ID NO: 2501171 - RNA, 19 nt, Homo sapiens
  misc_RNA (1)...(19): siRNA sense strand
aagauaaagacaagguacu

SEQ ID NO: 2501172 - RNA, 19 nt, Homo sapiens
  misc_RNA (1)...(19): siRNA sense strand
ucgccaagaacuaaggaca

SEQ ID NO: 2501173 - RNA, 19 nt, Homo sapiens
  misc_RNA (1)...(19): siRNA sense strand
cgauaguccugaaacagau

SEQ ID NO: 2501174 - RNA, 19 nt, Homo sapiens
  misc_RNA (1)...(19): siRNA sense strand
agaaaggcccugaaggacu

SEQ ID NO: 2501175 - RNA, 19 nt, Homo sapiens
  misc_RNA (1)...(19): siRNA sense strand
gagguaaaugggagagaug

SEQ ID NO: 2501176 - RNA, 19 nt, Homo sapiens
  misc_RNA (1)...(19): siRNA sense strand
gguaaaugggagagauguc

SEQ ID NO: 2501177 - RNA, 19 nt, Homo sapiens
  misc_RNA (1)...(19): siRNA sense strand
agaauauacagauggagga

SEQ ID NO: 2501178 - RNA, 19 nt, Homo sapiens
  misc_RNA (1)...(19): siRNA sense strand
gccaagaacuaaggacaca

SEQ ID NO: 2501179 - RNA, 19 nt, Homo sapiens
  misc_RNA (1)...(19): siRNA sense strand
acauugagugauaugacaa

SEQ ID NO: 2501180 - RNA, 19 nt, Homo sapiens
  misc_RNA (1)...(19): siRNA sense strand
acagcaaaucucacaggaa

SEQ ID NO: 2501181 - RNA, 19 nt, Homo sapiens
  misc_RNA (1)...(19): siRNA sense strand
cagagagaccaauggagga

SEQ ID NO: 2501182 - RNA, 19 nt, Homo sapiens
  misc_RNA (1)...(19): siRNA sense strand
uugaaagccucgaagagca

SEQ ID NO: 2501183 - RNA, 19 nt, Homo sapiens
  misc_RNA (1)...(19): siRNA sense strand
ugguguacagacagaacua

SEQ ID NO: 2501184 - RNA, 19 nt, Homo sapiens
  misc_RNA (1)...(19): siRNA sense strand
cuuagaauauacagaugga

SEQ ID NO: 2501185 - RNA, 19 nt, Homo sapiens
  misc_RNA (1)...(19): siRNA sense strand
uggaaggauucuaggacuc

SEQ ID NO: 2501186 - RNA, 19 nt, Homo sapiens
  misc_RNA (1)...(19): siRNA sense strand
ccgauaguccugaaacaga

SEQ ID NO: 2501187 - RNA, 19 nt, Homo sapiens
  misc_RNA (1)...(19): siRNA sense strand
ggauuuggcagcaauaaaa

SEQ ID NO: 2501188 - RNA, 19 nt, Homo sapiens
  misc_RNA (1)...(19): siRNA sense strand
aguccaaccacgaagcuau

SEQ ID NO: 2501189 - RNA, 19 nt, Homo sapiens
  misc_RNA (1)...(19): siRNA sense strand
uguggaucucguagacaaa

SEQ ID NO: 2501190 - RNA, 19 nt, Homo sapiens
  misc_RNA (1)...(19): siRNA sense strand
aggcgaaaugauaauagua

SEQ ID NO: 2501191 - RNA, 19 nt, Homo sapiens
  misc_RNA (1)...(19): siRNA sense strand
guggaaaggcugagcagaa

SEQ ID NO: 2501192 - RNA, 19 nt, Homo sapiens
  misc_RNA (1)...(19): siRNA sense strand
aggaagagcuuguggccau

SEQ ID NO: 2501193 - RNA, 19 nt, Homo sapiens
  misc_RNA (1)...(19): siRNA sense strand
aaacgaaagagaaggagaa

SEQ ID NO: 2501194 - RNA, 19 nt, Homo sapiens
  misc_RNA (1)...(19): siRNA sense strand
aaauaaagaagaagggcuu

SEQ ID NO: 2501195 - RNA, 19 nt, Homo sapiens
  misc_RNA (1)...(19): siRNA sense strand
ggauaaggguggaaaggcu

SEQ ID NO: 2501196 - RNA, 19 nt, Homo sapiens
  misc_RNA (1)...(19): siRNA sense strand
agaagaagagcuggagaaa

SEQ ID NO: 2501197 - RNA, 19 nt, Homo sapiens
  misc_RNA (1)...(19): siRNA sense strand
aaaugaaagaagagcguga

SEQ ID NO: 2501198 - RNA, 19 nt, Homo sapiens
  misc_RNA (1)...(19): siRNA sense strand
ugacaagaacaguggagau

SEQ ID NO: 2501199 - RNA, 19 nt, Homo sapiens
  misc_RNA (1)...(19): siRNA sense strand
acggaugggccgagaguga

SEQ ID NO: 2501200 - RNA, 19 nt, Homo sapiens
  misc_RNA (1)...(19): siRNA sense strand
augaagauccagaaaggaa

SEQ ID NO: 2501201 - RNA, 19 nt, Homo sapiens
  misc_RNA (1)...(19): siRNA sense strand
gggauuuggcagcaauaaa

SEQ ID NO: 2501202 - RNA, 19 nt, Homo sapiens
  misc_RNA (1)...(19): siRNA sense strand
gggacuaaagacagcaaau

SEQ ID NO: 2501203 - RNA, 19 nt, Homo sapiens
  misc_RNA (1)...(19): siRNA sense strand
auucggagcuagaggacau

SEQ ID NO: 2501204 - RNA, 19 nt, Homo sapiens
  misc_RNA (1)...(19): siRNA sense strand
gagcuagaggacauggaaa

SEQ ID NO: 2501205 - RNA, 19 nt, Homo sapiens
  misc_RNA (1)...(19): siRNA sense strand
ccaaagaaugccagccuau

SEQ ID NO: 2501206 - RNA, 19 nt, Homo sapiens
  misc_RNA (1)...(19): siRNA sense strand
cagaugaugucuuggcaga

SEQ ID NO: 2501207 - RNA, 19 nt, Homo sapiens
  misc_RNA (1)...(19): siRNA sense strand
guaccaaggcugggaggaa

SEQ ID NO: 2501208 - RNA, 19 nt, Homo sapiens
  misc_RNA (1)...(19): siRNA sense strand
accaaagggagcagcaaua

SEQ ID NO: 2501209 - RNA, 19 nt, Homo sapiens
  misc_RNA (1)...(19): siRNA sense strand
acagaauuuuggagguaaa

SEQ ID NO: 2501210 - RNA, 19 nt, Homo sapiens
  misc_RNA (1)...(19): siRNA sense strand
gcauggaccuugugccaga

SEQ ID NO: 2501211 - RNA, 19 nt, Homo sapiens
  misc_RNA (1)...(19): siRNA sense strand
ggaaaauaaagccaggaaa

SEQ ID NO: 2501212 - RNA, 19 nt, Homo sapiens
  misc_RNA (1)...(19): siRNA sense strand
ugaagauccagaaaggaaa

SEQ ID NO: 2501213 - RNA, 19 nt, Homo sapiens
  misc_RNA (1)...(19): siRNA sense strand
gguccugguuacuggguga

SEQ ID NO: 2501214 - RNA, 19 nt, Homo sapiens
  misc_RNA (1)...(19): siRNA sense strand
augaaagaagagcgugaaa

SEQ ID NO: 2501215 - RNA, 19 nt, Homo sapiens
  misc_RNA (1)...(19): siRNA sense strand
aaagagaaggagaagaaaa

SEQ ID NO: 2501216 - RNA, 19 nt, Homo sapiens
  misc_RNA (1)...(19): siRNA sense strand
gagcaaggccaucugagua

SEQ ID NO: 2501217 - RNA, 19 nt, Homo sapiens
  misc_RNA (1)...(19): siRNA sense strand
gguacugauugcuguguuu

SEQ ID NO: 2501218 - RNA, 19 nt, Homo sapiens
  misc_RNA (1)...(19): siRNA sense strand
gaggagaagcagugaccca

SEQ ID NO: 2501219 - RNA, 19 nt, Homo sapiens
  misc_RNA (1)...(19): siRNA sense strand
acgcagaacuuggaagaca

SEQ ID NO: 2501220 - RNA, 19 nt, Homo sapiens
  misc_RNA (1)...(19): siRNA sense strand
guaaccaccucuaggcgaa

SEQ ID NO: 2501221 - RNA, 19 nt, Homo sapiens
  misc_RNA (1)...(19): siRNA sense strand
uugaagggauggagaggca

SEQ ID NO: 2501222 - RNA, 19 nt, Homo sapiens
  misc_RNA (1)...(19): siRNA sense strand
cuaaggacacauugaguga

SEQ ID NO: 2501223 - RNA, 19 nt, Homo sapiens
  misc_RNA (1)...(19): siRNA sense strand
ccucuaggcgaaaugauaa

SEQ ID NO: 2501224 - RNA, 19 nt, Homo sapiens
  misc_RNA (1)...(19): siRNA sense strand
uggaaagaagaaagaggau

SEQ ID NO: 2501225 - RNA, 19 nt, Homo sapiens
  misc_RNA (1)...(19): siRNA sense strand
gaauauacagauggaggaa

SEQ ID NO: 2501226 - RNA, 19 nt, Homo sapiens
  misc_RNA (1)...(19): siRNA sense strand
cuaacuucgccaagaacua

SEQ ID NO: 2501227 - RNA, 19 nt, Homo sapiens
  misc_RNA (1)...(19): siRNA sense strand
aauaaagccaggaaaguca

SEQ ID NO: 2501228 - RNA, 19 nt, Homo sapiens
  misc_RNA (1)...(19): siRNA sense strand
gguaauaaugauggcguuu

SEQ ID NO: 2501229 - RNA, 19 nt, Homo sapiens
  misc_RNA (1)...(19): siRNA sense strand
agaaagguacucugaaaca

SEQ ID NO: 2501230 - RNA, 19 nt, Homo sapiens
  misc_RNA (1)...(19): siRNA sense strand
auauacagauggaggaauc

SEQ ID NO: 2501231 - RNA, 19 nt, Homo sapiens
  misc_RNA (1)...(19): siRNA sense strand
ccacgcagaacuuggaaga

SEQ ID NO: 2501232 - RNA, 19 nt, Homo sapiens
  misc_RNA (1)...(19): siRNA sense strand
uugcaguccacaagacaaa

SEQ ID NO: 2501233 - RNA, 19 nt, Homo sapiens
  misc_RNA (1)...(19): siRNA sense strand
agcuagaggacauggaaaa

SEQ ID NO: 2501234 - RNA, 19 nt, Homo sapiens
  misc_RNA (1)...(19): siRNA sense strand
ccagaaaggaaaauaaaga

SEQ ID NO: 2501235 - RNA, 19 nt, Homo sapiens
  misc_RNA (1)...(19): siRNA sense strand
ggcagauguuguugaagau

SEQ ID NO: 2501236 - RNA, 19 nt, Homo sapiens
  misc_RNA (1)...(19): siRNA sense strand
guuugaagaacaagaacca

SEQ ID NO: 2501237 - RNA, 19 nt, Homo sapiens
  misc_RNA (1)...(19): siRNA sense strand
cuuggaagacagagaaguu

SEQ ID NO: 2501238 - RNA, 19 nt, Homo sapiens
  misc_RNA (1)...(19): siRNA sense strand
gaauacauguagugcccuu

SEQ ID NO: 2501239 - RNA, 19 nt, Homo sapiens
  misc_RNA (1)...(19): siRNA sense strand
agaacuuggaagacagaga

SEQ ID NO: 2501240 - RNA, 19 nt, Homo sapiens
  misc_RNA (1)...(19): siRNA sense strand
ggaccuugugccagaugaa

SEQ ID NO: 2501241 - RNA, 19 nt, Homo sapiens
  misc_RNA (1)...(19): siRNA sense strand
gauuuggaaagaagaaaga

SEQ ID NO: 2501242 - RNA, 19 nt, Homo sapiens
  misc_RNA (1)...(19): siRNA sense strand
gggauugggccucgaagau

SEQ ID NO: 2501243 - RNA, 19 nt, Homo sapiens
  misc_RNA (1)...(19): siRNA sense strand
gagcauggaccuugugcca

SEQ ID NO: 2501244 - RNA, 19 nt, Homo sapiens
  misc_RNA (1)...(19): siRNA sense strand
cgaaggaagagcaaggcca

SEQ ID NO: 2501245 - RNA, 19 nt, Homo sapiens
  misc_RNA (1)...(19): siRNA sense strand
uuugaaugguguacagaca

SEQ ID NO: 2501246 - RNA, 19 nt, Homo sapiens
  misc_RNA (1)...(19): siRNA sense strand
cagcaaaucucacaggaac

SEQ ID NO: 2501247 - RNA, 19 nt, Homo sapiens
  misc_RNA (1)...(19): siRNA sense strand
ggcgaaaugauaauaguau

SEQ ID NO: 2501248 - RNA, 19 nt, Homo sapiens
  misc_RNA (1)...(19): siRNA sense strand
auguggaucucguagacaa

SEQ ID NO: 2501249 - RNA, 19 nt, Homo sapiens
  misc_RNA (1)...(19): siRNA sense strand
ugguaauaaugauggcguu

SEQ ID NO: 2501250 - RNA, 19 nt, Homo sapiens
  misc_RNA (1)...(19): siRNA sense strand
uccacaagacaaacagaaa

SEQ ID NO: 2501251 - RNA, 19 nt, Homo sapiens
  misc_RNA (1)...(19): siRNA sense strand
gauccagaaaggaaaauaa

SEQ ID NO: 2501252 - RNA, 19 nt, Homo sapiens
  misc_RNA (1)...(19): siRNA sense strand
cgcagauccuguagacuau

SEQ ID NO: 2501253 - RNA, 19 nt, Homo sapiens
  misc_RNA (1)...(19): siRNA sense strand
ggguggauucagcaguaua

SEQ ID NO: 2501254 - RNA, 19 nt, Homo sapiens
  misc_RNA (1)...(19): siRNA sense strand
ugagauuuggaaagaagaa

SEQ ID NO: 2501255 - RNA, 19 nt, Homo sapiens
  misc_RNA (1)...(19): siRNA sense strand
ucgccaagaacuaaggaca

SEQ ID NO: 2501256 - RNA, 19 nt, Homo sapiens
  misc_RNA (1)...(19): siRNA sense strand
cgauaguccugaaacagau

SEQ ID NO: 2501257 - RNA, 19 nt, Homo sapiens
  misc_RNA (1)...(19): siRNA sense strand
aagauaaagacaagguacu

SEQ ID NO: 2501258 - RNA, 19 nt, Homo sapiens
  misc_RNA (1)...(19): siRNA sense strand
uggagaaaaugaaagaaga

SEQ ID NO: 2501259 - RNA, 19 nt, Homo sapiens
  misc_RNA (1)...(19): siRNA sense strand
guggaaaggcugagcagaa

SEQ ID NO: 2501260 - RNA, 19 nt, Homo sapiens
  misc_RNA (1)...(19): siRNA sense strand
aggaagagcuuguggccau

SEQ ID NO: 2501261 - RNA, 19 nt, Homo sapiens
  misc_RNA (1)...(19): siRNA sense strand
aaacgaaagagaaggagaa

SEQ ID NO: 2501262 - RNA, 19 nt, Homo sapiens
  misc_RNA (1)...(19): siRNA sense strand
aaauaaagaagaagggcuu

SEQ ID NO: 2501263 - RNA, 19 nt, Homo sapiens
  misc_RNA (1)...(19): siRNA sense strand
ggauaaggguggaaaggcu

SEQ ID NO: 2501264 - RNA, 19 nt, Homo sapiens
  misc_RNA (1)...(19): siRNA sense strand
agaagaagagcuggagaaa

SEQ ID NO: 2501265 - RNA, 19 nt, Homo sapiens
  misc_RNA (1)...(19): siRNA sense strand
aaaugaaagaagagcguga

SEQ ID NO: 2501266 - RNA, 19 nt, Homo sapiens
  misc_RNA (1)...(19): siRNA sense strand
ugacaagaacaguggagau

SEQ ID NO: 2501267 - RNA, 19 nt, Homo sapiens
  misc_RNA (1)...(19): siRNA sense strand
acggaugggccgagaguga

SEQ ID NO: 2501268 - RNA, 19 nt, Homo sapiens
  misc_RNA (1)...(19): siRNA sense strand
augaagauccagaaaggaa

SEQ ID NO: 2501269 - RNA, 19 nt, Homo sapiens
  misc_RNA (1)...(19): siRNA sense strand
gggauuuggcagcaauaaa

SEQ ID NO: 2501270 - RNA, 19 nt, Homo sapiens
  misc_RNA (1)...(19): siRNA sense strand
gggacuaaagacagcaaau

SEQ ID NO: 2501271 - RNA, 19 nt, Homo sapiens
  misc_RNA (1)...(19): siRNA sense strand
auucggagcuagaggacau

SEQ ID NO: 2501272 - RNA, 19 nt, Homo sapiens
  misc_RNA (1)...(19): siRNA sense strand
gagcuagaggacauggaaa

SEQ ID NO: 2501273 - RNA, 19 nt, Homo sapiens
  misc_RNA (1)...(19): siRNA sense strand
ccaaagaaugccagccuau

SEQ ID NO: 2501274 - RNA, 19 nt, Homo sapiens
  misc_RNA (1)...(19): siRNA sense strand
cagaugaugucuuggcaga

SEQ ID NO: 2501275 - RNA, 19 nt, Homo sapiens
  misc_RNA (1)...(19): siRNA sense strand
guaccaaggcugggaggaa

SEQ ID NO: 2501276 - RNA, 19 nt, Homo sapiens
  misc_RNA (1)...(19): siRNA sense strand
accaaagggagcagcaaua

SEQ ID NO: 2501277 - RNA, 19 nt, Homo sapiens
  misc_RNA (1)...(19): siRNA sense strand
acagaauuuuggagguaaa

SEQ ID NO: 2501278 - RNA, 19 nt, Homo sapiens
  misc_RNA (1)...(19): siRNA sense strand
gcauggaccuugugccaga

SEQ ID NO: 2501279 - RNA, 19 nt, Homo sapiens
  misc_RNA (1)...(19): siRNA sense strand
ggaaaauaaagccaggaaa

SEQ ID NO: 2501280 - RNA, 19 nt, Homo sapiens
  misc_RNA (1)...(19): siRNA sense strand
ugaagauccagaaaggaaa

SEQ ID NO: 2501281 - RNA, 19 nt, Homo sapiens
  misc_RNA (1)...(19): siRNA sense strand
gguccugguuacuggguga

SEQ ID NO: 2501282 - RNA, 19 nt, Homo sapiens
  misc_RNA (1)...(19): siRNA sense strand
augaaagaagagcgugaaa

SEQ ID NO: 2501283 - RNA, 19 nt, Homo sapiens
  misc_RNA (1)...(19): siRNA sense strand
aaagagaaggagaagaaaa

SEQ ID NO: 2501284 - RNA, 19 nt, Homo sapiens
  misc_RNA (1)...(19): siRNA sense strand
gagcaaggccaucugagua

SEQ ID NO: 2501285 - RNA, 19 nt, Homo sapiens
  misc_RNA (1)...(19): siRNA sense strand
gguacugauugcuguguuu

SEQ ID NO: 2501286 - RNA, 19 nt, Homo sapiens
  misc_RNA (1)...(19): siRNA sense strand
gaggagaagcagugaccca

SEQ ID NO: 2501287 - RNA, 19 nt, Homo sapiens
  misc_RNA (1)...(19): siRNA sense strand
acgcagaacuuggaagaca

SEQ ID NO: 2501288 - RNA, 19 nt, Homo sapiens
  misc_RNA (1)...(19): siRNA sense strand
guaaccaccucuaggcgaa

SEQ ID NO: 2501289 - RNA, 19 nt, Homo sapiens
  misc_RNA (1)...(19): siRNA sense strand
uugaagggauggagaggca

SEQ ID NO: 2501290 - RNA, 19 nt, Homo sapiens
  misc_RNA (1)...(19): siRNA sense strand
cuaaggacacauugaguga

SEQ ID NO: 2501291 - RNA, 19 nt, Homo sapiens
  misc_RNA (1)...(19): siRNA sense strand
ccucuaggcgaaaugauaa

SEQ ID NO: 2501292 - RNA, 19 nt, Homo sapiens
  misc_RNA (1)...(19): siRNA sense strand
uggaaagaagaaagaggau

SEQ ID NO: 2501293 - RNA, 19 nt, Homo sapiens
  misc_RNA (1)...(19): siRNA sense strand
gaauauacagauggaggaa

SEQ ID NO: 2501294 - RNA, 19 nt, Homo sapiens
  misc_RNA (1)...(19): siRNA sense strand
cuaacuucgccaagaacua

SEQ ID NO: 2501295 - RNA, 19 nt, Homo sapiens
  misc_RNA (1)...(19): siRNA sense strand
aauaaagccaggaaaguca

SEQ ID NO: 2501296 - RNA, 19 nt, Homo sapiens
  misc_RNA (1)...(19): siRNA sense strand
gguaauaaugauggcguuu

SEQ ID NO: 2501297 - RNA, 19 nt, Homo sapiens
  misc_RNA (1)...(19): siRNA sense strand
agaaagguacucugaaaca

SEQ ID NO: 2501298 - RNA, 19 nt, Homo sapiens
  misc_RNA (1)...(19): siRNA sense strand
auauacagauggaggaauc

SEQ ID NO: 2501299 - RNA, 19 nt, Homo sapiens
  misc_RNA (1)...(19): siRNA sense strand
ccacgcagaacuuggaaga

SEQ ID NO: 2501300 - RNA, 19 nt, Homo sapiens
  misc_RNA (1)...(19): siRNA sense strand
uugcaguccacaagacaaa

SEQ ID NO: 2501301 - RNA, 19 nt, Homo sapiens
  misc_RNA (1)...(19): siRNA sense strand
agcuagaggacauggaaaa

SEQ ID NO: 2501302 - RNA, 19 nt, Homo sapiens
  misc_RNA (1)...(19): siRNA sense strand
ccagaaaggaaaauaaaga

SEQ ID NO: 2501303 - RNA, 19 nt, Homo sapiens
  misc_RNA (1)...(19): siRNA sense strand
ggcagauguuguugaagau

SEQ ID NO: 2501304 - RNA, 19 nt, Homo sapiens
  misc_RNA (1)...(19): siRNA sense strand
guuugaagaacaagaacca

SEQ ID NO: 2501305 - RNA, 19 nt, Homo sapiens
  misc_RNA (1)...(19): siRNA sense strand
cuuggaagacagagaaguu

SEQ ID NO: 2501306 - RNA, 19 nt, Homo sapiens
  misc_RNA (1)...(19): siRNA sense strand
gaauacauguagugcccuu

SEQ ID NO: 2501307 - RNA, 19 nt, Homo sapiens
  misc_RNA (1)...(19): siRNA sense strand
agaacuuggaagacagaga

SEQ ID NO: 2501308 - RNA, 19 nt, Homo sapiens
  misc_RNA (1)...(19): siRNA sense strand
ggaccuugugccagaugaa

SEQ ID NO: 2501309 - RNA, 19 nt, Homo sapiens
  misc_RNA (1)...(19): siRNA sense strand
gauuuggaaagaagaaaga

SEQ ID NO: 2501310 - RNA, 19 nt, Homo sapiens
  misc_RNA (1)...(19): siRNA sense strand
gggauugggccucgaagau

SEQ ID NO: 2501311 - RNA, 19 nt, Homo sapiens
  misc_RNA (1)...(19): siRNA sense strand
gagcauggaccuugugcca

SEQ ID NO: 2501312 - RNA, 19 nt, Homo sapiens
  misc_RNA (1)...(19): siRNA sense strand
cgaaggaagagcaaggcca

SEQ ID NO: 2501313 - RNA, 19 nt, Homo sapiens
  misc_RNA (1)...(19): siRNA sense strand
uuugaaugguguacagaca

SEQ ID NO: 2501314 - RNA, 19 nt, Homo sapiens
  misc_RNA (1)...(19): siRNA sense strand
cagcaaaucucacaggaac

SEQ ID NO: 2501315 - RNA, 19 nt, Homo sapiens
  misc_RNA (1)...(19): siRNA sense strand
ggcgaaaugauaauaguau

SEQ ID NO: 2501316 - RNA, 19 nt, Homo sapiens
  misc_RNA (1)...(19): siRNA sense strand
auguggaucucguagacaa

SEQ ID NO: 2501317 - RNA, 19 nt, Homo sapiens
  misc_RNA (1)...(19): siRNA sense strand
ugguaauaaugauggcguu

SEQ ID NO: 2501318 - RNA, 19 nt, Homo sapiens
  misc_RNA (1)...(19): siRNA sense strand
uccacaagacaaacagaaa

SEQ ID NO: 2501319 - RNA, 19 nt, Homo sapiens
  misc_RNA (1)...(19): siRNA sense strand
gauccagaaaggaaaauaa

SEQ ID NO: 2501320 - RNA, 19 nt, Homo sapiens
  misc_RNA (1)...(19): siRNA sense strand
cgcagauccuguagacuau

SEQ ID NO: 2501321 - RNA, 19 nt, Homo sapiens
  misc_RNA (1)...(19): siRNA sense strand
ggguggauucagcaguaua

SEQ ID NO: 2501322 - RNA, 19 nt, Homo sapiens
  misc_RNA (1)...(19): siRNA sense strand
ugagauuuggaaagaagaa

SEQ ID NO: 2501323 - RNA, 19 nt, Homo sapiens
  misc_RNA (1)...(19): siRNA sense strand
ucgccaagaacuaaggaca

SEQ ID NO: 2501324 - RNA, 19 nt, Homo sapiens
  misc_RNA (1)...(19): siRNA sense strand
cgauaguccugaaacagau

SEQ ID NO: 2501325 - RNA, 19 nt, Homo sapiens
  misc_RNA (1)...(19): siRNA sense strand
aagauaaagacaagguacu

SEQ ID NO: 2501326 - RNA, 19 nt, Homo sapiens
  misc_RNA (1)...(19): siRNA sense strand
uggagaaaaugaaagaaga

SEQ ID NO: 2501327 - RNA, 19 nt, Homo sapiens
  misc_RNA (1)...(19): siRNA sense strand
gccaaggagagccgggaaa

SEQ ID NO: 2501328 - RNA, 19 nt, Homo sapiens
  misc_RNA (1)...(19): siRNA sense strand
gggcacgaaggguggacaa

SEQ ID NO: 2501329 - RNA, 19 nt, Homo sapiens
  misc_RNA (1)...(19): siRNA sense strand
ccugcaagaucgugcccua

SEQ ID NO: 2501330 - RNA, 19 nt, Homo sapiens
  misc_RNA (1)...(19): siRNA sense strand
ccgggaaacuccaggguuc

SEQ ID NO: 2501331 - RNA, 19 nt, Homo sapiens
  misc_RNA (1)...(19): siRNA sense strand
agaauggauccuuggguga

SEQ ID NO: 2501332 - RNA, 19 nt, Homo sapiens
  misc_RNA (1)...(19): siRNA sense strand
ccggcagaaaggugcauua

SEQ ID NO: 2501333 - RNA, 19 nt, Homo sapiens
  misc_RNA (1)...(19): siRNA sense strand
cuacauggcuacagggguu

SEQ ID NO: 2501334 - RNA, 19 nt, Homo sapiens
  misc_RNA (1)...(19): siRNA sense strand
agaaguggcugcuggagga

SEQ ID NO: 2501335 - RNA, 19 nt, Homo sapiens
  misc_RNA (1)...(19): siRNA sense strand
ggaccggcaucauuggcaa

SEQ ID NO: 2501336 - RNA, 19 nt, Homo sapiens
  misc_RNA (1)...(19): siRNA sense strand
gcaaggaggauuugggguu

SEQ ID NO: 2501337 - RNA, 19 nt, Homo sapiens
  misc_RNA (1)...(19): siRNA sense strand
cugcuguugcugugaggaa

SEQ ID NO: 2501338 - RNA, 19 nt, Homo sapiens
  misc_RNA (1)...(19): siRNA sense strand
agccuguacccgagggaau

SEQ ID NO: 2501339 - RNA, 19 nt, Homo sapiens
  misc_RNA (1)...(19): siRNA sense strand
agaucucagaggaggaaga

SEQ ID NO: 2501340 - RNA, 19 nt, Homo sapiens
  misc_RNA (1)...(19): siRNA sense strand
acuacgaaaugaucgaaaa

SEQ ID NO: 2501341 - RNA, 19 nt, Homo sapiens
  misc_RNA (1)...(19): siRNA sense strand
guuacugccuacauggcua

SEQ ID NO: 2501342 - RNA, 19 nt, Homo sapiens
  misc_RNA (1)...(19): siRNA sense strand
cggcagauucaacuagaga

SEQ ID NO: 2501343 - RNA, 19 nt, Homo sapiens
  misc_RNA (1)...(19): siRNA sense strand
cuagagagucagaugaacu

SEQ ID NO: 2501344 - RNA, 19 nt, Homo sapiens
  misc_RNA (1)...(19): siRNA sense strand
ggguuucacagcagacaau

SEQ ID NO: 2501345 - RNA, 19 nt, Homo sapiens
  misc_RNA (1)...(19): siRNA sense strand
cuagugacugcgaggaaaa

SEQ ID NO: 2501346 - RNA, 19 nt, Homo sapiens
  misc_RNA (1)...(19): siRNA sense strand
gggaaauucugcaagagac

SEQ ID NO: 2501347 - RNA, 19 nt, Homo sapiens
  misc_RNA (1)...(19): siRNA sense strand
agccaggagcagaguguga

SEQ ID NO: 2501348 - RNA, 19 nt, Homo sapiens
  misc_RNA (1)...(19): siRNA sense strand
agagaaagccuguacccga

SEQ ID NO: 2501349 - RNA, 19 nt, Homo sapiens
  misc_RNA (1)...(19): siRNA sense strand
caguaugcacagagagaua

SEQ ID NO: 2501350 - RNA, 19 nt, Homo sapiens
  misc_RNA (1)...(19): siRNA sense strand
acuaaacagcaaagggaaa

SEQ ID NO: 2501351 - RNA, 19 nt, Homo sapiens
  misc_RNA (1)...(19): siRNA sense strand
ggagauuacuacaagggaa

SEQ ID NO: 2501352 - RNA, 19 nt, Homo sapiens
  misc_RNA (1)...(19): siRNA sense strand
cuacaagggaagacauaaa

SEQ ID NO: 2501353 - RNA, 19 nt, Homo sapiens
  misc_RNA (1)...(19): siRNA sense strand
agagaauggcugugaggaa

SEQ ID NO: 2501354 - RNA, 19 nt, Homo sapiens
  misc_RNA (1)...(19): siRNA sense strand
ggaaaaccaaugaggaaaa

SEQ ID NO: 2501355 - RNA, 19 nt, Homo sapiens
  misc_RNA (1)...(19): siRNA sense strand
gauuaaagacagugaugga

SEQ ID NO: 2501356 - RNA, 19 nt, Homo sapiens
  misc_RNA (1)...(19): siRNA sense strand
aggaaguaacacugaggaa

SEQ ID NO: 2501357 - RNA, 19 nt, Homo sapiens
  misc_RNA (1)...(19): siRNA sense strand
ccuaaagaagacagcacaa

SEQ ID NO: 2501358 - RNA, 19 nt, Homo sapiens
  misc_RNA (1)...(19): siRNA sense strand
ucagaaaccuaaagggacu

SEQ ID NO: 2501359 - RNA, 19 nt, Homo sapiens
  misc_RNA (1)...(19): siRNA sense strand
ugguggaggaggagaauuu

SEQ ID NO: 2501360 - RNA, 19 nt, Homo sapiens
  misc_RNA (1)...(19): siRNA sense strand
agaauggcugugaggaaua

SEQ ID NO: 2501361 - RNA, 19 nt, Homo sapiens
  misc_RNA (1)...(19): siRNA sense strand
cggugguggaggaggagaa

SEQ ID NO: 2501362 - RNA, 19 nt, Homo sapiens
  misc_RNA (1)...(19): siRNA sense strand
aggaaauagacucaagaau

SEQ ID NO: 2501363 - RNA, 19 nt, Homo sapiens
  misc_RNA (1)...(19): siRNA sense strand
cugcaauguacaaagaaau

SEQ ID NO: 2501364 - RNA, 19 nt, Homo sapiens
  misc_RNA (1)...(19): siRNA sense strand
aaauaugccuuguggggaa

SEQ ID NO: 2501365 - RNA, 19 nt, Homo sapiens
  misc_RNA (1)...(19): siRNA sense strand
aggcagaagagcuacgcaa

SEQ ID NO: 2501366 - RNA, 19 nt, Homo sapiens
  misc_RNA (1)...(19): siRNA sense strand
aauccgagaugcagguaau

SEQ ID NO: 2501367 - RNA, 19 nt, Homo sapiens
  misc_RNA (1)...(19): siRNA sense strand
ugaacugcgacaagauaaa

SEQ ID NO: 2501368 - RNA, 19 nt, Homo sapiens
  misc_RNA (1)...(19): siRNA sense strand
cagaaauauaugcagaaga

SEQ ID NO: 2501369 - RNA, 19 nt, Homo sapiens
  misc_RNA (1)...(19): siRNA sense strand
uguuuaugguacuggaaaa

SEQ ID NO: 2501370 - RNA, 19 nt, Homo sapiens
  misc_RNA (1)...(19): siRNA sense strand
cgaauauaccagagaaccu

SEQ ID NO: 2501371 - RNA, 19 nt, Homo sapiens
  misc_RNA (1)...(19): siRNA sense strand
cugaaacaauugaggauuc

SEQ ID NO: 2501372 - RNA, 19 nt, Homo sapiens
  misc_RNA (1)...(19): siRNA sense strand
cagugcugauggugauuaa

SEQ ID NO: 2501373 - RNA, 19 nt, Homo sapiens
  misc_RNA (1)...(19): siRNA sense strand
aggcugaaguagaaagucu

SEQ ID NO: 2501374 - RNA, 19 nt, Homo sapiens
  misc_RNA (1)...(19): siRNA sense strand
cauuaaggaagaucagauu

SEQ ID NO: 2501375 - RNA, 19 nt, Homo sapiens
  misc_RNA (1)...(19): siRNA sense strand
caccaagaagagagucaaa

SEQ ID NO: 2501376 - RNA, 19 nt, Homo sapiens
  misc_RNA (1)...(19): siRNA sense strand
ggcagaagagcuacgcaaa

SEQ ID NO: 2501377 - RNA, 19 nt, Homo sapiens
  misc_RNA (1)...(19): siRNA sense strand
cgaccaaaccuaagugauc

SEQ ID NO: 2501378 - RNA, 19 nt, Homo sapiens
  misc_RNA (1)...(19): siRNA sense strand
ucgaacaaugacagguuua

SEQ ID NO: 2501379 - RNA, 19 nt, Homo sapiens
  misc_RNA (1)...(19): siRNA sense strand
cccuuugguucaagagaau

SEQ ID NO: 2501380 - RNA, 19 nt, Homo sapiens
  misc_RNA (1)...(19): siRNA sense strand
acucacagacagaggcaga

SEQ ID NO: 2501381 - RNA, 19 nt, Homo sapiens
  misc_RNA (1)...(19): siRNA sense strand
ccacaagaaaggacagauc

SEQ ID NO: 2501382 - RNA, 19 nt, Homo sapiens
  misc_RNA (1)...(19): siRNA sense strand
acaaaggaaaacaaggaaa

SEQ ID NO: 2501383 - RNA, 19 nt, Homo sapiens
  misc_RNA (1)...(19): siRNA sense strand
cugaggaggaggaagcauu

SEQ ID NO: 2501384 - RNA, 19 nt, Homo sapiens
  misc_RNA (1)...(19): siRNA sense strand
agacauaaauucaaagcag

SEQ ID NO: 2501385 - RNA, 19 nt, Homo sapiens
  misc_RNA (1)...(19): siRNA sense strand
ccauuaaggaagaucagau

SEQ ID NO: 2501386 - RNA, 19 nt, Homo sapiens
  misc_RNA (1)...(19): siRNA sense strand
uuguaaaacguuugggaau

SEQ ID NO: 2501387 - RNA, 19 nt, Homo sapiens
  misc_RNA (1)...(19): siRNA sense strand
agaagacagcacaaguaua

SEQ ID NO: 2501388 - RNA, 19 nt, Homo sapiens
  misc_RNA (1)...(19): siRNA sense strand
agacagaggcagaagagcu

SEQ ID NO: 2501389 - RNA, 19 nt, Homo sapiens
  misc_RNA (1)...(19): siRNA sense strand
gcuaguuacaccaaauaau

SEQ ID NO: 2501390 - RNA, 19 nt, Homo sapiens
  misc_RNA (1)...(19): siRNA sense strand
guccagaaauauaugcaga

SEQ ID NO: 2501391 - RNA, 19 nt, Homo sapiens
  misc_RNA (1)...(19): siRNA sense strand
agagaaugggagauuacua

SEQ ID NO: 2501392 - RNA, 19 nt, Homo sapiens
  misc_RNA (1)...(19): siRNA sense strand
gcugcuaguuacaccaaau

SEQ ID NO: 2501393 - RNA, 19 nt, Homo sapiens
  misc_RNA (1)...(19): siRNA sense strand
gaauuugauaagaccacua

SEQ ID NO: 2501394 - RNA, 19 nt, Homo sapiens
  misc_RNA (1)...(19): siRNA sense strand
ugcagaagauacuggcgaa

SEQ ID NO: 2501395 - RNA, 19 nt, Homo sapiens
  misc_RNA (1)...(19): siRNA sense strand
ccuaagugaucccagugaa

SEQ ID NO: 2501396 - RNA, 19 nt, Homo sapiens
  misc_RNA (1)...(19): siRNA sense strand
ccagagaaugggagauuac

SEQ ID NO: 2501397 - RNA, 19 nt, Homo sapiens
  misc_RNA (1)...(19): siRNA sense strand
cgcuuuggcuugauggaga

SEQ ID NO: 2501398 - RNA, 19 nt, Homo sapiens
  misc_RNA (1)...(19): siRNA sense strand
aaacuaaacagcaaaggga

SEQ ID NO: 2501399 - RNA, 19 nt, Homo sapiens
  misc_RNA (1)...(19): siRNA sense strand
gggaaaauauucaacaagu

SEQ ID NO: 2501400 - RNA, 19 nt, Homo sapiens
  misc_RNA (1)...(19): siRNA sense strand
gcagaagauacuggcgaau

SEQ ID NO: 2501401 - RNA, 19 nt, Homo sapiens
  misc_RNA (1)...(19): siRNA sense strand
gagauuacuacaagggaag

SEQ ID NO: 2501402 - RNA, 19 nt, Homo sapiens
  misc_RNA (1)...(19): siRNA sense strand
uuaaagacagugauggaca

SEQ ID NO: 2501403 - RNA, 19 nt, Homo sapiens
  misc_RNA (1)...(19): siRNA sense strand
cagaaggccaagaggaaca

SEQ ID NO: 2501404 - RNA, 19 nt, Homo sapiens
  misc_RNA (1)...(19): siRNA sense strand
guggaagagaggaagaaaa

SEQ ID NO: 2501405 - RNA, 19 nt, Homo sapiens
  misc_RNA (1)...(19): siRNA sense strand
ugaugauggcgcugagcaa

SEQ ID NO: 2501406 - RNA, 19 nt, Homo sapiens
  misc_RNA (1)...(19): siRNA sense strand
gggacaugucagagaagga

SEQ ID NO: 2501407 - RNA, 19 nt, Homo sapiens
  misc_RNA (1)...(19): siRNA sense strand
gaaaauaguugcaucguca

SEQ ID NO: 2501408 - RNA, 19 nt, Homo sapiens
  misc_RNA (1)...(19): siRNA sense strand
cggaaguggaagagauucu

SEQ ID NO: 2501409 - RNA, 19 nt, Homo sapiens
  misc_RNA (1)...(19): siRNA sense strand
aagagauucuggauggcaa

SEQ ID NO: 2501410 - RNA, 19 nt, Homo sapiens
  misc_RNA (1)...(19): siRNA sense strand
gaacagaaggccaagagga

SEQ ID NO: 2501411 - RNA, 19 nt, Homo sapiens
  misc_RNA (1)...(19): siRNA sense strand
uggaagagaggaagaaaau

SEQ ID NO: 2501412 - RNA, 19 nt, Homo sapiens
  misc_RNA (1)...(19): siRNA sense strand
aggaacagccaguggguac

SEQ ID NO: 2501413 - RNA, 19 nt, Homo sapiens
  misc_RNA (1)...(19): siRNA sense strand
auggcaacgaugagaagua

SEQ ID NO: 2501414 - RNA, 19 nt, Homo sapiens
  misc_RNA (1)...(19): siRNA sense strand
ggccgagacaagaagagaa

SEQ ID NO: 2501415 - RNA, 19 nt, Homo sapiens
  misc_RNA (1)...(19): siRNA sense strand
cugagauggagaagaagau

SEQ ID NO: 2501416 - RNA, 19 nt, Homo sapiens
  misc_RNA (1)...(19): siRNA sense strand
gcgucaucaucaagcugaa

SEQ ID NO: 2501417 - RNA, 19 nt, Homo sapiens
  misc_RNA (1)...(19): siRNA sense strand
cgagacaagaagagaaccu

SEQ ID NO: 2501418 - RNA, 19 nt, Homo sapiens
  misc_RNA (1)...(19): siRNA sense strand
aggaacacgaggcggauga

SEQ ID NO: 2501419 - RNA, 19 nt, Homo sapiens
  misc_RNA (1)...(19): siRNA sense strand
aguacaaggcuguguccau

SEQ ID NO: 2501420 - RNA, 19 nt, Homo sapiens
  misc_RNA (1)...(19): siRNA sense strand
ucagggaacagaaggccaa

SEQ ID NO: 2501421 - RNA, 19 nt, Homo sapiens
  misc_RNA (1)...(19): siRNA sense strand
acauggagaucgaugggca

SEQ ID NO: 2501422 - RNA, 19 nt, Homo sapiens
  misc_RNA (1)...(19): siRNA sense strand
ccacuuagaugccgugcca

SEQ ID NO: 2501423 - RNA, 19 nt, Homo sapiens
  misc_RNA (1)...(19): siRNA sense strand
augaaugagaaguugauga

SEQ ID NO: 2501424 - RNA, 19 nt, Homo sapiens
  misc_RNA (1)...(19): siRNA sense strand
ugucagagaaggagaacuc

SEQ ID NO: 2501425 - RNA, 19 nt, Homo sapiens
  misc_RNA (1)...(19): siRNA sense strand
ccgagaaccugaaggagga

SEQ ID NO: 2501426 - RNA, 19 nt, Homo sapiens
  misc_RNA (1)...(19): siRNA sense strand
ugaagaagcuugaggacac

SEQ ID NO: 2501427 - RNA, 19 nt, Homo sapiens
  misc_RNA (1)...(19): siRNA sense strand
aagcagugggauugguaaa

SEQ ID NO: 2501428 - RNA, 19 nt, Homo sapiens
  misc_RNA (1)...(19): siRNA sense strand
cuuuaaaggcagacauuga

SEQ ID NO: 2501429 - RNA, 19 nt, Homo sapiens
  misc_RNA (1)...(19): siRNA sense strand
aaaugaagcucgugaccga

SEQ ID NO: 2501430 - RNA, 19 nt, Homo sapiens
  misc_RNA (1)...(19): siRNA sense strand
cuugaaaaucuuagagcua

SEQ ID NO: 2501431 - RNA, 19 nt, Homo sapiens
  misc_RNA (1)...(19): siRNA sense strand
guaucagcccauagagaau

SEQ ID NO: 2501432 - RNA, 19 nt, Homo sapiens
  misc_RNA (1)...(19): siRNA sense strand
uggaaagcgggaaggagaa

SEQ ID NO: 2501433 - RNA, 19 nt, Homo sapiens
  misc_RNA (1)...(19): siRNA sense strand
auggaaagcgggaaggaga

SEQ ID NO: 2501434 - RNA, 19 nt, Homo sapiens
  misc_RNA (1)...(19): siRNA sense strand
cugguuacccucaggcaaa

SEQ ID NO: 2501435 - RNA, 19 nt, Homo sapiens
  misc_RNA (1)...(19): siRNA sense strand
cggcauauccagaugaaac

SEQ ID NO: 2501436 - RNA, 19 nt, Homo sapiens
  misc_RNA (1)...(19): siRNA sense strand
aaggaggaaccaauggaaa

SEQ ID NO: 2501437 - RNA, 19 nt, Homo sapiens
  misc_RNA (1)...(19): siRNA sense strand
gugugcgggugaagaggaa

SEQ ID NO: 2501438 - RNA, 19 nt, Homo sapiens
  misc_RNA (1)...(19): siRNA sense strand
auacagaaccagacagaac

SEQ ID NO: 2501439 - RNA, 19 nt, Homo sapiens
  misc_RNA (1)...(19): siRNA sense strand
ccagaugaaacuagccaga

SEQ ID NO: 2501440 - RNA, 19 nt, Homo sapiens
  misc_RNA (1)...(19): siRNA sense strand
agaugaaacuagccagacu

SEQ ID NO: 2501441 - RNA, 19 nt, Homo sapiens
  misc_RNA (1)...(19): siRNA sense strand
acauacagaaccagacaga

SEQ ID NO: 2501442 - RNA, 19 nt, Homo sapiens
  misc_RNA (1)...(19): siRNA sense strand
gauaacaccaugagagccu

SEQ ID NO: 2501443 - RNA, 19 nt, Homo sapiens
  misc_RNA (1)...(19): siRNA sense strand
cagcaaaugaagcucguga

SEQ ID NO: 2501444 - RNA, 19 nt, Homo sapiens
  misc_RNA (1)...(19): siRNA sense strand
augaugauuuccugacaau

SEQ ID NO: 2501445 - RNA, 19 nt, Homo sapiens
  misc_RNA (1)...(19): siRNA sense strand
aagcauggugugcggguga

SEQ ID NO: 2501446 - RNA, 19 nt, Homo sapiens
  misc_RNA (1)...(19): siRNA sense strand
gggugaagaggaaggugca

SEQ ID NO: 2501447 - RNA, 19 nt, Homo sapiens
  misc_RNA (1)...(19): siRNA sense strand
ggugcaggcuuuaaaggca

SEQ ID NO: 2501448 - RNA, 19 nt, Homo sapiens
  misc_RNA (1)...(19): siRNA sense strand
ucucagaaccuucagccaa

SEQ ID NO: 2501449 - RNA, 19 nt, Homo sapiens
  misc_RNA (1)...(19): siRNA sense strand
cacucaagcagcagcaaau

SEQ ID NO: 2501450 - RNA, 19 nt, Homo sapiens
  misc_RNA (1)...(19): siRNA sense strand
cugaagaagcuugaggaca

SEQ ID NO: 2501451 - RNA, 19 nt, Homo sapiens
  misc_RNA (1)...(19): siRNA sense strand
cggaagcacucgagggaga

SEQ ID NO: 2501452 - RNA, 19 nt, Homo sapiens
  misc_RNA (1)...(19): siRNA sense strand
cagaagguccugagggaga

SEQ ID NO: 2501453 - RNA, 19 nt, Homo sapiens
  misc_RNA (1)...(19): siRNA sense strand
gggcgaugcuucaggcaga

SEQ ID NO: 2501454 - RNA, 19 nt, Homo sapiens
  misc_RNA (1)...(19): siRNA sense strand
gugcagagaguguggccaa

SEQ ID NO: 2501455 - RNA, 19 nt, Homo sapiens
  misc_RNA (1)...(19): siRNA sense strand
gggcacagcuucagccaga

SEQ ID NO: 2501456 - RNA, 19 nt, Homo sapiens
  misc_RNA (1)...(19): siRNA sense strand
acucaaaggagaagcccua

SEQ ID NO: 2501457 - RNA, 19 nt, Homo sapiens
  misc_RNA (1)...(19): siRNA sense strand
agucaaaccuuguugcaca

SEQ ID NO: 2501458 - RNA, 19 nt, Homo sapiens
  misc_RNA (1)...(19): siRNA sense strand
agucuuaggauuuggaaca

SEQ ID NO: 2501459 - RNA, 19 nt, Homo sapiens
  misc_RNA (1)...(19): siRNA sense strand
gcuugugugcagaagguaa

SEQ ID NO: 2501460 - RNA, 19 nt, Homo sapiens
  misc_RNA (1)...(19): siRNA sense strand
ccagcuggagcaagggaaa

SEQ ID NO: 2501461 - RNA, 19 nt, Homo sapiens
  misc_RNA (1)...(19): siRNA sense strand
ggguaugugagaagggcuu

SEQ ID NO: 2501462 - RNA, 19 nt, Homo sapiens
  misc_RNA (1)...(19): siRNA sense strand
ggcuuuaaccggaagucaa

SEQ ID NO: 2501463 - RNA, 19 nt, Homo sapiens
  misc_RNA (1)...(19): siRNA sense strand
cugcaaggagugugggcga

SEQ ID NO: 2501464 - RNA, 19 nt, Homo sapiens
  misc_RNA (1)...(19): siRNA sense strand
agaccuggagagaggaaaa

SEQ ID NO: 2501465 - RNA, 19 nt, Homo sapiens
  misc_RNA (1)...(19): siRNA sense strand
gcuucagcaagaugacaaa

SEQ ID NO: 2501466 - RNA, 19 nt, Homo sapiens
  misc_RNA (1)...(19): siRNA sense strand
agcagaagguccugaggga

SEQ ID NO: 2501467 - RNA, 19 nt, Homo sapiens
  misc_RNA (1)...(19): siRNA sense strand
aaucauacacgaacggaca

SEQ ID NO: 2501468 - RNA, 19 nt, Homo sapiens
  misc_RNA (1)...(19): siRNA sense strand
gugcagugagugugggcga

SEQ ID NO: 2501469 - RNA, 19 nt, Homo sapiens
  misc_RNA (1)...(19): siRNA sense strand
gggaauguggcaaaggcuu

SEQ ID NO: 2501470 - RNA, 19 nt, Homo sapiens
  misc_RNA (1)...(19): siRNA sense strand
ggacacacucaggggaaaa

SEQ ID NO: 2501471 - RNA, 19 nt, Homo sapiens
  misc_RNA (1)...(19): siRNA sense strand
aggacacacucaaaggaga

SEQ ID NO: 2501472 - RNA, 19 nt, Homo sapiens
  misc_RNA (1)...(19): siRNA sense strand
ucaacagacaccagaacau

SEQ ID NO: 2501473 - RNA, 19 nt, Homo sapiens
  misc_RNA (1)...(19): siRNA sense strand
acagagaggugaugcugga

SEQ ID NO: 2501474 - RNA, 19 nt, Homo sapiens
  misc_RNA (1)...(19): siRNA sense strand
ggucaaaccucaucuccca

SEQ ID NO: 2501475 - RNA, 19 nt, Homo sapiens
  misc_RNA (1)...(19): siRNA sense strand
gaacauacacucaggagag

SEQ ID NO: 2501476 - RNA, 19 nt, Homo sapiens
  misc_RNA (1)...(19): siRNA sense strand
uggcaauaagucagcucua

SEQ ID NO: 2501477 - RNA, 19 nt, Homo sapiens
  misc_RNA (1)...(19): siRNA sense strand
gggaaagagaccuggagag

SEQ ID NO: 2501478 - RNA, 19 nt, Homo sapiens
  misc_RNA (1)...(19): siRNA sense strand
ucaucaggcacaagcggaa

SEQ ID NO: 2501479 - RNA, 19 nt, Homo sapiens
  misc_RNA (1)...(19): siRNA sense strand
ggacgaggcuuuaaccgga

SEQ ID NO: 2501480 - RNA, 19 nt, Homo sapiens
  misc_RNA (1)...(19): siRNA sense strand
ccguaugugugccgagagu

SEQ ID NO: 2501481 - RNA, 19 nt, Homo sapiens
  misc_RNA (1)...(19): siRNA sense strand
uggacugggcuuuggcaau

SEQ ID NO: 2501482 - RNA, 19 nt, Homo sapiens
  misc_RNA (1)...(19): siRNA sense strand
cccugaggaaacagacaaa

SEQ ID NO: 2501483 - RNA, 19 nt, Homo sapiens
  misc_RNA (1)...(19): siRNA sense strand
aaagagaccuggagagagg

SEQ ID NO: 2501484 - RNA, 19 nt, Homo sapiens
  misc_RNA (1)...(19): siRNA sense strand
aagcagggccucagggcaa

SEQ ID NO: 2501485 - RNA, 19 nt, Homo sapiens
  misc_RNA (1)...(19): siRNA sense strand
uggcaucaguacagggaca

SEQ ID NO: 2501486 - RNA, 19 nt, Homo sapiens
  misc_RNA (1)...(19): siRNA sense strand
gagaaaaggccgaaggaag

SEQ ID NO: 2501487 - RNA, 19 nt, Homo sapiens
  misc_RNA (1)...(19): siRNA sense strand
cuggagugguggagggaug

SEQ ID NO: 2501488 - RNA, 19 nt, Homo sapiens
  misc_RNA (1)...(19): siRNA sense strand
gcaucugcugcccgagaaa

SEQ ID NO: 2501489 - RNA, 19 nt, Homo sapiens
  misc_RNA (1)...(19): siRNA sense strand
gcacaaagcuuucgcccga

SEQ ID NO: 2501490 - RNA, 19 nt, Homo sapiens
  misc_RNA (1)...(19): siRNA sense strand
cugcuuggcccguggguau

SEQ ID NO: 2501491 - RNA, 19 nt, Homo sapiens
  misc_RNA (1)...(19): siRNA sense strand
uugaacaggagcagggcaa

SEQ ID NO: 2501492 - RNA, 19 nt, Homo sapiens
  misc_RNA (1)...(19): siRNA sense strand
caggaguuacagugggaga

SEQ ID NO: 2501493 - RNA, 19 nt, Homo sapiens
  misc_RNA (1)...(19): siRNA sense strand
gaagaggagcugcuggaga

SEQ ID NO: 2501494 - RNA, 19 nt, Homo sapiens
  misc_RNA (1)...(19): siRNA sense strand
acauguaccagcugcacaa

SEQ ID NO: 2501495 - RNA, 19 nt, Homo sapiens
  misc_RNA (1)...(19): siRNA sense strand
cagaacaagaagaggagcu

SEQ ID NO: 2501496 - RNA, 19 nt, Homo sapiens
  misc_RNA (1)...(19): siRNA sense strand
gagcugggcaucaggcaga

SEQ ID NO: 2501497 - RNA, 19 nt, Homo sapiens
  misc_RNA (1)...(19): siRNA sense strand
gggacuacuucacggagca

SEQ ID NO: 2501498 - RNA, 19 nt, Homo sapiens
  misc_RNA (1)...(19): siRNA sense strand
gggacggaucuuugggaaa

SEQ ID NO: 2501499 - RNA, 19 nt, Homo sapiens
  misc_RNA (1)...(19): siRNA sense strand
ggaaacugaaagaggaaaa

SEQ ID NO: 2501500 - RNA, 19 nt, Homo sapiens
  misc_RNA (1)...(19): siRNA sense strand
cagcgcaagaucagggaaa

SEQ ID NO: 2501501 - RNA, 19 nt, Homo sapiens
  misc_RNA (1)...(19): siRNA sense strand
aagcuaaggagcaggaaaa

SEQ ID NO: 2501502 - RNA, 19 nt, Homo sapiens
  misc_RNA (1)...(19): siRNA sense strand
ccaaagaagaagugaagcu

SEQ ID NO: 2501503 - RNA, 19 nt, Homo sapiens
  misc_RNA (1)...(19): siRNA sense strand
gcgcaagaucagggaaauu

SEQ ID NO: 2501504 - RNA, 19 nt, Homo sapiens
  misc_RNA (1)...(19): siRNA sense strand
caguggagaauguggaaca

SEQ ID NO: 2501505 - RNA, 19 nt, Homo sapiens
  misc_RNA (1)...(19): siRNA sense strand
ugggaaacugaaagaggaa

SEQ ID NO: 2501506 - RNA, 19 nt, Homo sapiens
  misc_RNA (1)...(19): siRNA sense strand
aagaagaagugaagcugga

SEQ ID NO: 2501507 - RNA, 19 nt, Homo sapiens
  misc_RNA (1)...(19): siRNA sense strand
uggaagacugauuggaaaa

SEQ ID NO: 2501508 - RNA, 19 nt, Homo sapiens
  misc_RNA (1)...(19): siRNA sense strand
aguggaauugcaugggaaa

SEQ ID NO: 2501509 - RNA, 19 nt, Homo sapiens
  misc_RNA (1)...(19): siRNA sense strand
ggguaaaguggaauugcau

SEQ ID NO: 2501510 - RNA, 19 nt, Homo sapiens
  misc_RNA (1)...(19): siRNA sense strand
ggagaagcuaagcgggcau

SEQ ID NO: 2501511 - RNA, 19 nt, Homo sapiens
  misc_RNA (1)...(19): siRNA sense strand
auaugcaacaagagaagaa

SEQ ID NO: 2501512 - RNA, 19 nt, Homo sapiens
  misc_RNA (1)...(19): siRNA sense strand
gguagauauccauagaaaa

SEQ ID NO: 2501513 - RNA, 19 nt, Homo sapiens
  misc_RNA (1)...(19): siRNA sense strand
ggcccagacgucagcgaaa

SEQ ID NO: 2501514 - RNA, 19 nt, Homo sapiens
  misc_RNA (1)...(19): siRNA sense strand
aauaugggacaguggagaa

SEQ ID NO: 2501515 - RNA, 19 nt, Homo sapiens
  misc_RNA (1)...(19): siRNA sense strand
gcgugaggccuuugaaaau

SEQ ID NO: 2501516 - RNA, 19 nt, Homo sapiens
  misc_RNA (1)...(19): siRNA sense strand
ccgugaacgaacugcagaa

SEQ ID NO: 2501517 - RNA, 19 nt, Homo sapiens
  misc_RNA (1)...(19): siRNA sense strand
cgucagaauuaucgggcac

SEQ ID NO: 2501518 - RNA, 19 nt, Homo sapiens
  misc_RNA (1)...(19): siRNA sense strand
aaguggaauugcaugggaa

SEQ ID NO: 2501519 - RNA, 19 nt, Homo sapiens
  misc_RNA (1)...(19): siRNA sense strand
ccaaacuagccgaagagau

SEQ ID NO: 2501520 - RNA, 19 nt, Homo sapiens
  misc_RNA (1)...(19): siRNA sense strand
gggagguguuggauggacu

SEQ ID NO: 2501521 - RNA, 19 nt, Homo sapiens
  misc_RNA (1)...(19): siRNA sense strand
guggcaagaccgugaacga

SEQ ID NO: 2501522 - RNA, 19 nt, Homo sapiens
  misc_RNA (1)...(19): siRNA sense strand
agcagcaggagcagaaaua

SEQ ID NO: 2501523 - RNA, 19 nt, Homo sapiens
  misc_RNA (1)...(19): siRNA sense strand
aaagcuaaggagcaggaaa

SEQ ID NO: 2501524 - RNA, 19 nt, Homo sapiens
  misc_RNA (1)...(19): siRNA sense strand
uggaaaagaaggcagaaau

SEQ ID NO: 2501525 - RNA, 19 nt, Homo sapiens
  misc_RNA (1)...(19): siRNA sense strand
gugccagugcugagauaga

SEQ ID NO: 2501526 - RNA, 19 nt, Homo sapiens
  misc_RNA (1)...(19): siRNA sense strand
aggugaagcagcaggagca

SEQ ID NO: 2501527 - RNA, 19 nt, Homo sapiens
  misc_RNA (1)...(19): siRNA sense strand
cggaugaagaggugagcuc

SEQ ID NO: 2501528 - RNA, 19 nt, Homo sapiens
  misc_RNA (1)...(19): siRNA sense strand
cagaaaccgccguugucaa

SEQ ID NO: 2501529 - RNA, 19 nt, Homo sapiens
  misc_RNA (1)...(19): siRNA sense strand
aacaagagaagaagcaaaa

SEQ ID NO: 2501530 - RNA, 19 nt, Homo sapiens
  misc_RNA (1)...(19): siRNA sense strand
agaaagaggcagaugagac

SEQ ID NO: 2501531 - RNA, 19 nt, Homo sapiens
  misc_RNA (1)...(19): siRNA sense strand
gcgccaucaucgggaagaa

SEQ ID NO: 2501532 - RNA, 19 nt, Homo sapiens
  misc_RNA (1)...(19): siRNA sense strand
ccucucggguaaaguggaa

SEQ ID NO: 2501533 - RNA, 19 nt, Homo sapiens
  misc_RNA (1)...(19): siRNA sense strand
gggaaacugaaagaggaaa

SEQ ID NO: 2501534 - RNA, 19 nt, Homo sapiens
  misc_RNA (1)...(19): siRNA sense strand
aagugaagcuggaagcgca

SEQ ID NO: 2501535 - RNA, 19 nt, Homo sapiens
  misc_RNA (1)...(19): siRNA sense strand
gggcuugaccauaaagaac

SEQ ID NO: 2501536 - RNA, 19 nt, Homo sapiens
  misc_RNA (1)...(19): siRNA sense strand
acagggaccaagauaacaa

SEQ ID NO: 2501537 - RNA, 19 nt, Homo sapiens
  misc_RNA (1)...(19): siRNA sense strand
gagcauauacaacccggaa

SEQ ID NO: 2501538 - RNA, 19 nt, Homo sapiens
  misc_RNA (1)...(19): siRNA sense strand
gcauauacaacccggaaag

SEQ ID NO: 2501539 - RNA, 19 nt, Homo sapiens
  misc_RNA (1)...(19): siRNA sense strand
cugugccagugcugagaua

SEQ ID NO: 2501540 - RNA, 19 nt, Homo sapiens
  misc_RNA (1)...(19): siRNA sense strand
cugaagaagaggagcugaa

SEQ ID NO: 2501541 - RNA, 19 nt, Homo sapiens
  misc_RNA (1)...(19): siRNA sense strand
aauugaaguuugaagggaa

SEQ ID NO: 2501542 - RNA, 19 nt, Homo sapiens
  misc_RNA (1)...(19): siRNA sense strand
guuccaagauccagaggga

SEQ ID NO: 2501543 - RNA, 19 nt, Homo sapiens
  misc_RNA (1)...(19): siRNA sense strand
uagugaagaggaagauaaa

SEQ ID NO: 2501544 - RNA, 19 nt, Homo sapiens
  misc_RNA (1)...(19): siRNA sense strand
gugaagaggaagauaaaau

SEQ ID NO: 2501545 - RNA, 19 nt, Homo sapiens
  misc_RNA (1)...(19): siRNA sense strand
ugccacauccagagggaaa

SEQ ID NO: 2501546 - RNA, 19 nt, Homo sapiens
  misc_RNA (1)...(19): siRNA sense strand
ccuaaagaggagaacauuu

SEQ ID NO: 2501547 - RNA, 19 nt, Homo sapiens
  misc_RNA (1)...(19): siRNA sense strand
ccgccagacaccagaguuu

SEQ ID NO: 2501548 - RNA, 19 nt, Homo sapiens
  misc_RNA (1)...(19): siRNA sense strand
ggaaguguggaguggaaaa

SEQ ID NO: 2501549 - RNA, 19 nt, Homo sapiens
  misc_RNA (1)...(19): siRNA sense strand
uggaaagagaagacacaga

SEQ ID NO: 2501550 - RNA, 19 nt, Homo sapiens
  misc_RNA (1)...(19): siRNA sense strand
uuggaaguguggaguggaa

SEQ ID NO: 2501551 - RNA, 19 nt, Homo sapiens
  misc_RNA (1)...(19): siRNA sense strand
ccagagaagcaaaggcacu

SEQ ID NO: 2501552 - RNA, 19 nt, Homo sapiens
  misc_RNA (1)...(19): siRNA sense strand
ccaaagaggugguggaggc

SEQ ID NO: 2501553 - RNA, 19 nt, Homo sapiens
  misc_RNA (1)...(19): siRNA sense strand
ccagcgagcaagaagaaga

SEQ ID NO: 2501554 - RNA, 19 nt, Homo sapiens
  misc_RNA (1)...(19): siRNA sense strand
aagagaagacacagauuca

SEQ ID NO: 2501555 - RNA, 19 nt, Homo sapiens
  misc_RNA (1)...(19): siRNA sense strand
aggaaguagauuucgauau

SEQ ID NO: 2501556 - RNA, 19 nt, Homo sapiens
  misc_RNA (1)...(19): siRNA sense strand
gagugaaauucuacccaca

SEQ ID NO: 2501557 - RNA, 19 nt, Homo sapiens
  misc_RNA (1)...(19): siRNA sense strand
cagcgagcaagaagaagaa

SEQ ID NO: 2501558 - RNA, 19 nt, Homo sapiens
  misc_RNA (1)...(19): siRNA sense strand
uggaugacgaugagauuga

SEQ ID NO: 2501559 - RNA, 19 nt, Homo sapiens
  misc_RNA (1)...(19): siRNA sense strand
ugccuaaagaggagaacau

SEQ ID NO: 2501560 - RNA, 19 nt, Homo sapiens
  misc_RNA (1)...(19): siRNA sense strand
guuggaaagagaagacaca

SEQ ID NO: 2501561 - RNA, 19 nt, Homo sapiens
  misc_RNA (1)...(19): siRNA sense strand
aggaguggguggcugggaa

SEQ ID NO: 2501562 - RNA, 19 nt, Homo sapiens
  misc_RNA (1)...(19): siRNA sense strand
aguccaucuucaagcaaau

SEQ ID NO: 2501563 - RNA, 19 nt, Homo sapiens
  misc_RNA (1)...(19): siRNA sense strand
cugcaggcuuuguggucuu

SEQ ID NO: 2501564 - RNA, 19 nt, Homo sapiens
  misc_RNA (1)...(19): siRNA sense strand
aguuugaagggaagacauu

SEQ ID NO: 2501565 - RNA, 19 nt, Homo sapiens
  misc_RNA (1)...(19): siRNA sense strand
gaacuaguguacaacccaa

SEQ ID NO: 2501566 - RNA, 19 nt, Homo sapiens
  misc_RNA (1)...(19): siRNA sense strand
uuucggagcuccagcguca

SEQ ID NO: 2501567 - RNA, 19 nt, Homo sapiens
  misc_RNA (1)...(19): siRNA sense strand
gaauuuaacuugcuccuga

SEQ ID NO: 2501568 - RNA, 19 nt, Homo sapiens
  misc_RNA (1)...(19): siRNA sense strand
gggaaauaagagaauccau

SEQ ID NO: 2501569 - RNA, 19 nt, Homo sapiens
  misc_RNA (1)...(19): siRNA sense strand
acccacuggucaagaguuu

SEQ ID NO: 2501570 - RNA, 19 nt, Homo sapiens
  misc_RNA (1)...(19): siRNA sense strand
agguggagaugauggcuca

SEQ ID NO: 2501571 - RNA, 19 nt, Homo sapiens
  misc_RNA (1)...(19): siRNA sense strand
agguggagaugauggcuca

SEQ ID NO: 2501572 - RNA, 19 nt, Homo sapiens
  misc_RNA (1)...(19): siRNA sense strand
cugaaaagacagaagguaa

SEQ ID NO: 2501573 - RNA, 19 nt, Homo sapiens
  misc_RNA (1)...(19): siRNA sense strand
guuuaaagucagcaagaau

SEQ ID NO: 2501574 - RNA, 19 nt, Homo sapiens
  misc_RNA (1)...(19): siRNA sense strand
ugaaaagacagaagguaaa

SEQ ID NO: 2501575 - RNA, 19 nt, Homo sapiens
  misc_RNA (1)...(19): siRNA sense strand
cagcaagaccaacgggauu

SEQ ID NO: 2501576 - RNA, 19 nt, Homo sapiens
  misc_RNA (1)...(19): siRNA sense strand
gggaugaacaguuugacaa

SEQ ID NO: 2501577 - RNA, 19 nt, Homo sapiens
  misc_RNA (1)...(19): siRNA sense strand
augaagaggagguggaagu

SEQ ID NO: 2501578 - RNA, 19 nt, Homo sapiens
  misc_RNA (1)...(19): siRNA sense strand
aagcagagauggaggagcu

SEQ ID NO: 2501579 - RNA, 19 nt, Homo sapiens
  misc_RNA (1)...(19): siRNA sense strand
gcgguuuaaacuagaggaa

SEQ ID NO: 2501580 - RNA, 19 nt, Homo sapiens
  misc_RNA (1)...(19): siRNA sense strand
gaggaaacugggaugaaca

SEQ ID NO: 2501581 - RNA, 19 nt, Homo sapiens
  misc_RNA (1)...(19): siRNA sense strand
cuugagaacgguggagaaa

SEQ ID NO: 2501582 - RNA, 19 nt, Homo sapiens
  misc_RNA (1)...(19): siRNA sense strand
acuugagaacgguggagaa

SEQ ID NO: 2501583 - RNA, 19 nt, Homo sapiens
  misc_RNA (1)...(19): siRNA sense strand
acacauaaacaccugggua

SEQ ID NO: 2501584 - RNA, 19 nt, Homo sapiens
  misc_RNA (1)...(19): siRNA sense strand
uggagaguguccugcgcaa

SEQ ID NO: 2501585 - RNA, 19 nt, Homo sapiens
  misc_RNA (1)...(19): siRNA sense strand
cagagauggaggagcuuga

SEQ ID NO: 2501586 - RNA, 19 nt, Homo sapiens
  misc_RNA (1)...(19): siRNA sense strand
cgguuuaaacuagaggaaa

SEQ ID NO: 2501587 - RNA, 19 nt, Homo sapiens
  misc_RNA (1)...(19): siRNA sense strand
uuuagagauuccugccaaa

SEQ ID NO: 2501588 - RNA, 19 nt, Homo sapiens
  misc_RNA (1)...(19): siRNA sense strand
uuaaacuagaggaaagcua

SEQ ID NO: 2501589 - RNA, 19 nt, Homo sapiens
  misc_RNA (1)...(19): siRNA sense strand
gagacauccaccagggcuu

SEQ ID NO: 2501590 - RNA, 19 nt, Homo sapiens
  misc_RNA (1)...(19): siRNA sense strand
uggaugaagaggaggugga

SEQ ID NO: 2501591 - RNA, 19 nt, Homo sapiens
  misc_RNA (1)...(19): siRNA sense strand
caacaggcucuuuggggaa

SEQ ID NO: 2501592 - RNA, 19 nt, Homo sapiens
  misc_RNA (1)...(19): siRNA sense strand
gcugucuauuucagaggaa

SEQ ID NO: 2501593 - RNA, 19 nt, Homo sapiens
  misc_RNA (1)...(19): siRNA sense strand
gaacaguuugacaaggaga

SEQ ID NO: 2501594 - RNA, 19 nt, Homo sapiens
  misc_RNA (1)...(19): siRNA sense strand
augaacaguuugacaagga

SEQ ID NO: 2501595 - RNA, 19 nt, Homo sapiens
  misc_RNA (1)...(19): siRNA sense strand
aggagaaauauuuacccaa

SEQ ID NO: 2501596 - RNA, 19 nt, Homo sapiens
  misc_RNA (1)...(19): siRNA sense strand
aagcagaugacuugggcaa

SEQ ID NO: 2501597 - RNA, 19 nt, Homo sapiens
  misc_RNA (1)...(19): siRNA sense strand
gaaggaaaguaauggacca

SEQ ID NO: 2501598 - RNA, 19 nt, Homo sapiens
  misc_RNA (1)...(19): siRNA sense strand
caaaggaugaagagaggca

SEQ ID NO: 2501599 - RNA, 19 nt, Homo sapiens
  misc_RNA (1)...(19): siRNA sense strand
agguggaaaugaagaaagu

SEQ ID NO: 2501600 - RNA, 19 nt, Homo sapiens
  misc_RNA (1)...(19): siRNA sense strand
cagaaaacacggugggcca

SEQ ID NO: 2501601 - RNA, 19 nt, Homo sapiens
  misc_RNA (1)...(19): siRNA sense strand
uggaaaugaagaaaguaca

SEQ ID NO: 2501602 - RNA, 19 nt, Homo sapiens
  misc_RNA (1)...(19): siRNA sense strand
acaaagaugguguggccga

SEQ ID NO: 2501603 - RNA, 19 nt, Homo sapiens
  misc_RNA (1)...(19): siRNA sense strand
ccagugaagguguggggaa

SEQ ID NO: 2501604 - RNA, 19 nt, Homo sapiens
  misc_RNA (1)...(19): siRNA sense strand
guggaaaugaagaaaguac

SEQ ID NO: 2501605 - RNA, 19 nt, Homo sapiens
  misc_RNA (1)...(19): siRNA sense strand
aagagaggcauguuggaga

SEQ ID NO: 2501606 - RNA, 19 nt, Homo sapiens
  misc_RNA (1)...(19): siRNA sense strand
auguuggagacuugggcaa

SEQ ID NO: 2501607 - RNA, 19 nt, Homo sapiens
  misc_RNA (1)...(19): siRNA sense strand
aagaugaagaagaaaggaa

SEQ ID NO: 2501608 - RNA, 19 nt, Homo sapiens
  misc_RNA (1)...(19): siRNA sense strand
gaauaagaauggaggagug

SEQ ID NO: 2501609 - RNA, 19 nt, Homo sapiens
  misc_RNA (1)...(19): siRNA sense strand
gcugaggaugucaaggaaa

SEQ ID NO: 2501610 - RNA, 19 nt, Homo sapiens
  misc_RNA (1)...(19): siRNA sense strand
agaagaaggcugugaaccu

SEQ ID NO: 2501611 - RNA, 19 nt, Homo sapiens
  misc_RNA (1)...(19): siRNA sense strand
gggcacaacaaguggucca

SEQ ID NO: 2501612 - RNA, 19 nt, Homo sapiens
  misc_RNA (1)...(19): siRNA sense strand
gcagcaaacauaugcccaa

SEQ ID NO: 2501613 - RNA, 19 nt, Homo sapiens
  misc_RNA (1)...(19): siRNA sense strand
uggaggacagagagaagaa

SEQ ID NO: 2501614 - RNA, 19 nt, Homo sapiens
  misc_RNA (1)...(19): siRNA sense strand
aagcaggagcugaggaugu

SEQ ID NO: 2501615 - RNA, 19 nt, Homo sapiens
  misc_RNA (1)...(19): siRNA sense strand
uugaaguggaggacagaga

SEQ ID NO: 2501616 - RNA, 19 nt, Homo sapiens
  misc_RNA (1)...(19): siRNA sense strand
ugucaaggaaacugaagau

SEQ ID NO: 2501617 - RNA, 19 nt, Homo sapiens
  misc_RNA (1)...(19): siRNA sense strand
gguccaaagucaggcacau

SEQ ID NO: 2501618 - RNA, 19 nt, Homo sapiens
  misc_RNA (1)...(19): siRNA sense strand
ggaagaagcuggacucccu

SEQ ID NO: 2501619 - RNA, 19 nt, Homo sapiens
  misc_RNA (1)...(19): siRNA sense strand
aggaaacugaagaugaaga

SEQ ID NO: 2501620 - RNA, 19 nt, Homo sapiens
  misc_RNA (1)...(19): siRNA sense strand
cgaaggacgucgaaaggag

SEQ ID NO: 2501621 - RNA, 19 nt, Homo sapiens
  misc_RNA (1)...(19): siRNA sense strand
ugguugaaguggaggacag

SEQ ID NO: 2501622 - RNA, 19 nt, Homo sapiens
  misc_RNA (1)...(19): siRNA sense strand
cugaagaugaagaagaaag

SEQ ID NO: 2501623 - RNA, 19 nt, Homo sapiens
  misc_RNA (1)...(19): siRNA sense strand
caaaggagguggaaggaca

SEQ ID NO: 2501624 - RNA, 19 nt, Homo sapiens
  misc_RNA (1)...(19): siRNA sense strand
gccucuaaggagugggaua

SEQ ID NO: 2501625 - RNA, 19 nt, Homo sapiens
  misc_RNA (1)...(19): siRNA sense strand
ugugaauguaagugacaaa

SEQ ID NO: 2501626 - RNA, 19 nt, Homo sapiens
  misc_RNA (1)...(19): siRNA sense strand
aaagcugaguugaaggcaa

SEQ ID NO: 2501627 - RNA, 19 nt, Homo sapiens
  misc_RNA (1)...(19): siRNA sense strand
acguuuguaucaagggcua

SEQ ID NO: 2501628 - RNA, 19 nt, Homo sapiens
  misc_RNA (1)...(19): siRNA sense strand
aggaaaguggcaugacaau

SEQ ID NO: 2501629 - RNA, 19 nt, Homo sapiens
  misc_RNA (1)...(19): siRNA sense strand
uugccuuucaggagaguaa

SEQ ID NO: 2501630 - RNA, 19 nt, Homo sapiens
  misc_RNA (1)...(19): siRNA sense strand
aaggaaaguggcaugacaa

SEQ ID NO: 2501631 - RNA, 19 nt, Homo sapiens
  misc_RNA (1)...(19): siRNA sense strand
aguaagaaccucugcgaag

SEQ ID NO: 2501632 - RNA, 19 nt, Homo sapiens
  misc_RNA (1)...(19): siRNA sense strand
caauuaaaggaaaguggca

SEQ ID NO: 2501633 - RNA, 19 nt, Homo sapiens
  misc_RNA (1)...(19): siRNA sense strand
ggaauccaguucauggcua

SEQ ID NO: 2501634 - RNA, 19 nt, Homo sapiens
  misc_RNA (1)...(19): siRNA sense strand
cugugacccuccugggaau

SEQ ID NO: 2501635 - RNA, 19 nt, Homo sapiens
  misc_RNA (1)...(19): siRNA sense strand
ucagaaaccaggaggugaa

SEQ ID NO: 2501636 - RNA, 19 nt, Homo sapiens
  misc_RNA (1)...(19): siRNA sense strand
guaucaugugagaaggaaa

SEQ ID NO: 2501637 - RNA, 19 nt, Homo sapiens
  misc_RNA (1)...(19): siRNA sense strand
cuggauaaauggagaccca

SEQ ID NO: 2501638 - RNA, 19 nt, Homo sapiens
  misc_RNA (1)...(19): siRNA sense strand
uuuaaugacaguagaguga

SEQ ID NO: 2501639 - RNA, 19 nt, Homo sapiens
  misc_RNA (1)...(19): siRNA sense strand
cagaaugauugacuggcua

SEQ ID NO: 2501640 - RNA, 19 nt, Homo sapiens
  misc_RNA (1)...(19): siRNA sense strand
agguagagguguuacggau

SEQ ID NO: 2501641 - RNA, 19 nt, Homo sapiens
  misc_RNA (1)...(19): siRNA sense strand
ggauauucuuugaggcuuc

SEQ ID NO: 2501642 - RNA, 19 nt, Homo sapiens
  misc_RNA (1)...(19): siRNA sense strand
uguccaagauccagcauca

SEQ ID NO: 2501643 - RNA, 19 nt, Homo sapiens
  misc_RNA (1)...(19): siRNA sense strand
acagcugguucgaacgaua

SEQ ID NO: 2501644 - RNA, 19 nt, Homo sapiens
  misc_RNA (1)...(19): siRNA sense strand
uuucaggagacaaguauua

SEQ ID NO: 2501645 - RNA, 19 nt, Homo sapiens
  misc_RNA (1)...(19): siRNA sense strand
ugacaggcuccaugaagaa

SEQ ID NO: 2501646 - RNA, 19 nt, Homo sapiens
  misc_RNA (1)...(19): siRNA sense strand
agaaagaacuuauggaugc

SEQ ID NO: 2501647 - RNA, 19 nt, Homo sapiens
  misc_RNA (1)...(19): siRNA sense strand
gaacaagaguugaaugcuc

SEQ ID NO: 2501648 - RNA, 19 nt, Homo sapiens
  misc_RNA (1)...(19): siRNA sense strand
ucugcaaaaugcugagaaa

SEQ ID NO: 2501649 - RNA, 19 nt, Homo sapiens
  misc_RNA (1)...(19): siRNA sense strand
ggaaagagagcugcgggaa

SEQ ID NO: 2501650 - RNA, 19 nt, Homo sapiens
  misc_RNA (1)...(19): siRNA sense strand
agaugguggucuaaugcaa

SEQ ID NO: 2501651 - RNA, 19 nt, Homo sapiens
  misc_RNA (1)...(19): siRNA sense strand
uaaagauguaccucagaaa

SEQ ID NO: 2501652 - RNA, 19 nt, Homo sapiens
  misc_RNA (1)...(19): siRNA sense strand
auuaaagccuucagggacu

SEQ ID NO: 2501653 - RNA, 19 nt, Homo sapiens
  misc_RNA (1)...(19): siRNA sense strand
cauuuacuagggagagaua

SEQ ID NO: 2501654 - RNA, 19 nt, Homo sapiens
  misc_RNA (1)...(19): siRNA sense strand
uugaacaggauuuggaaaa

SEQ ID NO: 2501655 - RNA, 19 nt, Homo sapiens
  misc_RNA (1)...(19): siRNA sense strand
gaauaugucucccagguga

SEQ ID NO: 2501656 - RNA, 19 nt, Homo sapiens
  misc_RNA (1)...(19): siRNA sense strand
auacacagagggaagcaua

SEQ ID NO: 2501657 - RNA, 19 nt, Homo sapiens
  misc_RNA (1)...(19): siRNA sense strand
gugaguaacuugcugcaga

SEQ ID NO: 2501658 - RNA, 19 nt, Homo sapiens
  misc_RNA (1)...(19): siRNA sense strand
agucugaggcucuggcauu

SEQ ID NO: 2501659 - RNA, 19 nt, Homo sapiens
  misc_RNA (1)...(19): siRNA sense strand
acaggaaguagcuaguaaa

SEQ ID NO: 2501660 - RNA, 19 nt, Homo sapiens
  misc_RNA (1)...(19): siRNA sense strand
ggguggaggaggauuuaau

SEQ ID NO: 2501661 - RNA, 19 nt, Homo sapiens
  misc_RNA (1)...(19): siRNA sense strand
gcccauacacagagggaag

SEQ ID NO: 2501662 - RNA, 19 nt, Homo sapiens
  misc_RNA (1)...(19): siRNA sense strand
gcugagaaaacuaugcaaa

SEQ ID NO: 2501663 - RNA, 19 nt, Homo sapiens
  misc_RNA (1)...(19): siRNA sense strand
ugguauauccucugaaagu

SEQ ID NO: 2501664 - RNA, 19 nt, Homo sapiens
  misc_RNA (1)...(19): siRNA sense strand
gagucauuuacuagggaga

SEQ ID NO: 2501665 - RNA, 19 nt, Homo sapiens
  misc_RNA (1)...(19): siRNA sense strand
uaaugacaguagagugaca

SEQ ID NO: 2501666 - RNA, 19 nt, Homo sapiens
  misc_RNA (1)...(19): siRNA sense strand
agaaguaucaugugagaag

SEQ ID NO: 2501667 - RNA, 19 nt, Homo sapiens
  misc_RNA (1)...(19): siRNA sense strand
uaucaugugagaaggaaaa

SEQ ID NO: 2501668 - RNA, 19 nt, Homo sapiens
  misc_RNA (1)...(19): siRNA sense strand
auuuaauacaguuggcaga

SEQ ID NO: 2501669 - RNA, 19 nt, Homo sapiens
  misc_RNA (1)...(19): siRNA sense strand
aggaaagagagcugcggga

SEQ ID NO: 2501670 - RNA, 19 nt, Homo sapiens
  misc_RNA (1)...(19): siRNA sense strand
uagugagaaccuugcuaaa

SEQ ID NO: 2501671 - RNA, 19 nt, Homo sapiens
  misc_RNA (1)...(19): siRNA sense strand
gguucgaacgauaggccau

SEQ ID NO: 2501672 - RNA, 19 nt, Homo sapiens
  misc_RNA (1)...(19): siRNA sense strand
gaguuuuacuguucugaaa

SEQ ID NO: 2501673 - RNA, 19 nt, Homo sapiens
  misc_RNA (1)...(19): siRNA sense strand
uggaggcaauaaaggauuu

SEQ ID NO: 2501674 - RNA, 19 nt, Homo sapiens
  misc_RNA (1)...(19): siRNA sense strand
ggccacagauuucaggaga

SEQ ID NO: 2501675 - RNA, 19 nt, Homo sapiens
  misc_RNA (1)...(19): siRNA sense strand
acaagauccuggagggccu

SEQ ID NO: 2501676 - RNA, 19 nt, Homo sapiens
  misc_RNA (1)...(19): siRNA sense strand
cagaaagaacuuauggaug

SEQ ID NO: 2501677 - RNA, 19 nt, Homo sapiens
  misc_RNA (1)...(19): siRNA sense strand
ugugagaccuggugcucuu

SEQ ID NO: 2501678 - RNA, 19 nt, Homo sapiens
  misc_RNA (1)...(19): siRNA sense strand
gauucuuacuggugauaac

SEQ ID NO: 2501679 - RNA, 19 nt, Homo sapiens
  misc_RNA (1)...(19): siRNA sense strand
acagaaagaacuuauggau

SEQ ID NO: 2501680 - RNA, 19 nt, Homo sapiens
  misc_RNA (1)...(19): siRNA sense strand
agaacuuauggaugcuaua

SEQ ID NO: 2501681 - RNA, 19 nt, Homo sapiens
  misc_RNA (1)...(19): siRNA sense strand
gcuucaagaacaugugcaa

SEQ ID NO: 2501682 - RNA, 19 nt, Homo sapiens
  misc_RNA (1)...(19): siRNA sense strand
ggcagaaggagaagcgcau

SEQ ID NO: 2501683 - RNA, 19 nt, Homo sapiens
  misc_RNA (1)...(19): siRNA sense strand
agaaggagguggugcgcgu

SEQ ID NO: 2501684 - RNA, 19 nt, Homo sapiens
  misc_RNA (1)...(19): siRNA sense strand
cggcagaaggagaagcgca

SEQ ID NO: 2501685 - RNA, 19 nt, Homo sapiens
  misc_RNA (1)...(19): siRNA sense strand
cgcccauggacgauguaua

SEQ ID NO: 2501686 - RNA, 19 nt, Homo sapiens
  misc_RNA (1)...(19): siRNA sense strand
acaaguggcuggaggagac

SEQ ID NO: 2501687 - RNA, 19 nt, Homo sapiens
  misc_RNA (1)...(19): siRNA sense strand
ugaugaugccacugugaau

SEQ ID NO: 2501688 - RNA, 19 nt, Homo sapiens
  misc_RNA (1)...(19): siRNA sense strand
gcacaggcaucaucgggaa

SEQ ID NO: 2501689 - RNA, 19 nt, Homo sapiens
  misc_RNA (1)...(19): siRNA sense strand
uugcguacacggaggagaa

SEQ ID NO: 2501690 - RNA, 19 nt, Homo sapiens
  misc_RNA (1)...(19): siRNA sense strand
gguacaaggaccuccguca

SEQ ID NO: 2501691 - RNA, 19 nt, Homo sapiens
  misc_RNA (1)...(19): siRNA sense strand
gcguacaacaacagcgcca

SEQ ID NO: 2501692 - RNA, 19 nt, Homo sapiens
  misc_RNA (1)...(19): siRNA sense strand
ccgggaguacauugagaua

SEQ ID NO: 2501693 - RNA, 19 nt, Homo sapiens
  misc_RNA (1)...(19): siRNA sense strand
ugacaaaaggugagacacu

SEQ ID NO: 2501694 - RNA, 19 nt, Homo sapiens
  misc_RNA (1)...(19): siRNA sense strand
gagauaaucaccagcagca

SEQ ID NO: 2501695 - RNA, 19 nt, Homo sapiens
  misc_RNA (1)...(19): siRNA sense strand
ggugacaaaaggugagaca

SEQ ID NO: 2501696 - RNA, 19 nt, Homo sapiens
  misc_RNA (1)...(19): siRNA sense strand
ccaaauauaucaugggcua

SEQ ID NO: 2501697 - RNA, 19 nt, Homo sapiens
  misc_RNA (1)...(19): siRNA sense strand
agggaauggccaagggaaa

SEQ ID NO: 2501698 - RNA, 19 nt, Homo sapiens
  misc_RNA (1)...(19): siRNA sense strand
ccgagaagcuggauggaga

SEQ ID NO: 2501699 - RNA, 19 nt, Homo sapiens
  misc_RNA (1)...(19): siRNA sense strand
ugugauugggcgagagaaa

SEQ ID NO: 2501700 - RNA, 19 nt, Homo sapiens
  misc_RNA (1)...(19): siRNA sense strand
caggaaacuacguggagaa

SEQ ID NO: 2501701 - RNA, 19 nt, Homo sapiens
  misc_RNA (1)...(19): siRNA sense strand
aggccgagcaggaggagua

SEQ ID NO: 2501702 - RNA, 19 nt, Homo sapiens
  misc_RNA (1)...(19): siRNA sense strand
ugaagaagaaaguggacau

SEQ ID NO: 2501703 - RNA, 19 nt, Homo sapiens
  misc_RNA (1)...(19): siRNA sense strand
aggaggugcgagagcgaaa

SEQ ID NO: 2501704 - RNA, 19 nt, Homo sapiens
  misc_RNA (1)...(19): siRNA sense strand
acgccaagacugugcgcaa

SEQ ID NO: 2501705 - RNA, 19 nt, Homo sapiens
  misc_RNA (1)...(19): siRNA sense strand
cggacaacauguaccggaa

SEQ ID NO: 2501706 - RNA, 19 nt, Homo sapiens
  misc_RNA (1)...(19): siRNA sense strand
cccaagagcuccaagccua

SEQ ID NO: 2501707 - RNA, 19 nt, Homo sapiens
  misc_RNA (1)...(19): siRNA sense strand
gcgagaagguccagcacgu

SEQ ID NO: 2501708 - RNA, 19 nt, Homo sapiens
  misc_RNA (1)...(19): siRNA sense strand
gcuccaagccuacgcggaa

SEQ ID NO: 2501709 - RNA, 19 nt, Homo sapiens
  misc_RNA (1)...(19): siRNA sense strand
gggaauggccaagggaaaa

SEQ ID NO: 2501710 - RNA, 19 nt, Homo sapiens
  misc_RNA (1)...(19): siRNA sense strand
cagcaaaucuuuaucgaac

SEQ ID NO: 2501711 - RNA, 19 nt, Homo sapiens
  misc_RNA (1)...(19): siRNA sense strand
gcgacuuggcagugcucaa

SEQ ID NO: 2501712 - RNA, 19 nt, Homo sapiens
  misc_RNA (1)...(19): siRNA sense strand
ugugagaaccaguguguca

SEQ ID NO: 2501713 - RNA, 19 nt, Homo sapiens
  misc_RNA (1)...(19): siRNA sense strand
ccagaggcauggaucgcaa

SEQ ID NO: 2501714 - RNA, 19 nt, Homo sapiens
  misc_RNA (1)...(19): siRNA sense strand
agaacagagucaagcacca

SEQ ID NO: 2501715 - RNA, 19 nt, Homo sapiens
  misc_RNA (1)...(19): siRNA sense strand
gcaacagcaucaaucggaa

SEQ ID NO: 2501716 - RNA, 19 nt, Homo sapiens
  misc_RNA (1)...(19): siRNA sense strand
aagccuacgcggaagggaa

SEQ ID NO: 2501717 - RNA, 19 nt, Homo sapiens
  misc_RNA (1)...(19): siRNA sense strand
gggugaagaaggagggcug

SEQ ID NO: 2501718 - RNA, 19 nt, Homo sapiens
  misc_RNA (1)...(19): siRNA sense strand
ccuucaagcagaugcccua

SEQ ID NO: 2501719 - RNA, 19 nt, Homo sapiens
  misc_RNA (1)...(19): siRNA sense strand
agaucaagaaacaagccaa

SEQ ID NO: 2501720 - RNA, 19 nt, Homo sapiens
  misc_RNA (1)...(19): siRNA sense strand
cggucaacauggagcccga

SEQ ID NO: 2501721 - RNA, 19 nt, Homo sapiens
  misc_RNA (1)...(19): siRNA sense strand
acacuacaguuucggguga

SEQ ID NO: 2501722 - RNA, 19 nt, Homo sapiens
  misc_RNA (1)...(19): siRNA sense strand
gcuuaucgacugugagaac

SEQ ID NO: 2501723 - RNA, 19 nt, Homo sapiens
  misc_RNA (1)...(19): siRNA sense strand
ugggaggagaacagaguca

SEQ ID NO: 2501724 - RNA, 19 nt, Homo sapiens
  misc_RNA (1)...(19): siRNA sense strand
cuucgagaucuuccagaaa

SEQ ID NO: 2501725 - RNA, 19 nt, Homo sapiens
  misc_RNA (1)...(19): siRNA sense strand
cccgagacugggaggagaa

SEQ ID NO: 2501726 - RNA, 19 nt, Homo sapiens
  misc_RNA (1)...(19): siRNA sense strand
gcaucggugugcuggacau

SEQ ID NO: 2501727 - RNA, 19 nt, Homo sapiens
  misc_RNA (1)...(19): siRNA sense strand
cuuccaacauccugcugaa

SEQ ID NO: 2501728 - RNA, 19 nt, Homo sapiens
  misc_RNA (1)...(19): siRNA sense strand
aagaaggagcggaggcgca

SEQ ID NO: 2501729 - RNA, 19 nt, Homo sapiens
  misc_RNA (1)...(19): siRNA sense strand
agagggagcggguggacuu

SEQ ID NO: 2501730 - RNA, 19 nt, Homo sapiens
  misc_RNA (1)...(19): siRNA sense strand
ccgacaugauggugggcau

SEQ ID NO: 2501731 - RNA, 19 nt, Homo sapiens
  misc_RNA (1)...(19): siRNA sense strand
cggauguggaccuggacaa

SEQ ID NO: 2501732 - RNA, 19 nt, Homo sapiens
  misc_RNA (1)...(19): siRNA sense strand
uuaaauaagucaucagcca

SEQ ID NO: 2501733 - RNA, 19 nt, Homo sapiens
  misc_RNA (1)...(19): siRNA sense strand
cggagaggaagacgaguau

SEQ ID NO: 2501734 - RNA, 19 nt, Homo sapiens
  misc_RNA (1)...(19): siRNA sense strand
gggucugggaugacuuaaa

SEQ ID NO: 2501735 - RNA, 19 nt, Homo sapiens
  misc_RNA (1)...(19): siRNA sense strand
cggagcagcaugaagguca

SEQ ID NO: 2501736 - RNA, 19 nt, Homo sapiens
  misc_RNA (1)...(19): siRNA sense strand
aaaucauagucaagaggaa

SEQ ID NO: 2501737 - RNA, 19 nt, Homo sapiens
  misc_RNA (1)...(19): siRNA sense strand
gacacaaagaggaggagaa

SEQ ID NO: 2501738 - RNA, 19 nt, Homo sapiens
  misc_RNA (1)...(19): siRNA sense strand
ggcuacagaagcaggguaa

SEQ ID NO: 2501739 - RNA, 19 nt, Homo sapiens
  misc_RNA (1)...(19): siRNA sense strand
acaacgaaggcgugaaaga

SEQ ID NO: 2501740 - RNA, 19 nt, Homo sapiens
  misc_RNA (1)...(19): siRNA sense strand
agcauuaaucagaggcuua

SEQ ID NO: 2501741 - RNA, 19 nt, Homo sapiens
  misc_RNA (1)...(19): siRNA sense strand
ggaucauaugguaaguaua

SEQ ID NO: 2501742 - RNA, 19 nt, Homo sapiens
  misc_RNA (1)...(19): siRNA sense strand
cuacagaagcaggguaaau

SEQ ID NO: 2501743 - RNA, 19 nt, Homo sapiens
  misc_RNA (1)...(19): siRNA sense strand
aagagagaaaggagcaaau

SEQ ID NO: 2501744 - RNA, 19 nt, Homo sapiens
  misc_RNA (1)...(19): siRNA sense strand
aaacagaaaucacaggcuu

SEQ ID NO: 2501745 - RNA, 19 nt, Homo sapiens
  misc_RNA (1)...(19): siRNA sense strand
aaucauagucaagaggaaa

SEQ ID NO: 2501746 - RNA, 19 nt, Homo sapiens
  misc_RNA (1)...(19): siRNA sense strand
agucaagaggaaacaagua

SEQ ID NO: 2501747 - RNA, 19 nt, Homo sapiens
  misc_RNA (1)...(19): siRNA sense strand
uugaagaaucuaagaagga

SEQ ID NO: 2501748 - RNA, 19 nt, Homo sapiens
  misc_RNA (1)...(19): siRNA sense strand
uuugagaugaagaacgaaa

SEQ ID NO: 2501749 - RNA, 19 nt, Homo sapiens
  misc_RNA (1)...(19): siRNA sense strand
ccucagaccaggaagagca

SEQ ID NO: 2501750 - RNA, 19 nt, Homo sapiens
  misc_RNA (1)...(19): siRNA sense strand
uauucuucguuguuggaaa

SEQ ID NO: 2501751 - RNA, 19 nt, Homo sapiens
  misc_RNA (1)...(19): siRNA sense strand
aauaagagagaaaggagca

SEQ ID NO: 2501752 - RNA, 19 nt, Homo sapiens
  misc_RNA (1)...(19): siRNA sense strand
gcugacaggugguggcucu

SEQ ID NO: 2501753 - RNA, 19 nt, Homo sapiens
  misc_RNA (1)...(19): siRNA sense strand
ccaguggacaguuggaaaa

SEQ ID NO: 2501754 - RNA, 19 nt, Homo sapiens
  misc_RNA (1)...(19): siRNA sense strand
ccgaaauaauaaugacccu

SEQ ID NO: 2501755 - RNA, 19 nt, Homo sapiens
  misc_RNA (1)...(19): siRNA sense strand
gugacuggcagaugcgcua

SEQ ID NO: 2501756 - RNA, 19 nt, Homo sapiens
  misc_RNA (1)...(19): siRNA sense strand
gaaucuaagaaggaaacaa

SEQ ID NO: 2501757 - RNA, 19 nt, Homo sapiens
  misc_RNA (1)...(19): siRNA sense strand
cccaguggacaguuggaaa

SEQ ID NO: 2501758 - RNA, 19 nt, Homo sapiens
  misc_RNA (1)...(19): siRNA sense strand
cguuguuggaaauguagaa

SEQ ID NO: 2501759 - RNA, 19 nt, Homo sapiens
  misc_RNA (1)...(19): siRNA sense strand
uggaagauuaacagaagca

SEQ ID NO: 2501760 - RNA, 19 nt, Homo sapiens
  misc_RNA (1)...(19): siRNA sense strand
gugaaagauggcuacagaa

SEQ ID NO: 2501761 - RNA, 19 nt, Homo sapiens
  misc_RNA (1)...(19): siRNA sense strand
gguauagacugcuuggcaa

SEQ ID NO: 2501762 - RNA, 19 nt, Homo sapiens
  misc_RNA (1)...(19): siRNA sense strand
gcuggaaucaugagggaga

SEQ ID NO: 2501763 - RNA, 19 nt, Homo sapiens
  misc_RNA (1)...(19): siRNA sense strand
cagaggaacgagauggcua

SEQ ID NO: 2501764 - RNA, 19 nt, Homo sapiens
  misc_RNA (1)...(19): siRNA sense strand
agguaauacgggaagaaga

SEQ ID NO: 2501765 - RNA, 19 nt, Homo sapiens
  misc_RNA (1)...(19): siRNA sense strand
ggccaguaacagaggcaga

SEQ ID NO: 2501766 - RNA, 19 nt, Homo sapiens
  misc_RNA (1)...(19): siRNA sense strand
ccuaucaggaggaaggaga

SEQ ID NO: 2501767 - RNA, 19 nt, Homo sapiens
  misc_RNA (1)...(19): siRNA sense strand
gcgaguauucucagggagu

SEQ ID NO: 2501768 - RNA, 19 nt, Homo sapiens
  misc_RNA (1)...(19): siRNA sense strand
uugaggaggcugagauuca

SEQ ID NO: 2501769 - RNA, 19 nt, Homo sapiens
  misc_RNA (1)...(19): siRNA sense strand
acauagugcaggcagacaa

SEQ ID NO: 2501770 - RNA, 19 nt, Homo sapiens
  misc_RNA (1)...(19): siRNA sense strand
caggauaaugaguguggau

SEQ ID NO: 2501771 - RNA, 19 nt, Homo sapiens
  misc_RNA (1)...(19): siRNA sense strand
ggaagcaggagaaugccaa

SEQ ID NO: 2501772 - RNA, 19 nt, Homo sapiens
  misc_RNA (1)...(19): siRNA sense strand
caucaguguagaagagugu

SEQ ID NO: 2501773 - RNA, 19 nt, Homo sapiens
  misc_RNA (1)...(19): siRNA sense strand
ggagauagucaaagagugg

SEQ ID NO: 2501774 - RNA, 19 nt, Homo sapiens
  misc_RNA (1)...(19): siRNA sense strand
ccgcuggaaucaugaggga

SEQ ID NO: 2501775 - RNA, 19 nt, Homo sapiens
  misc_RNA (1)...(19): siRNA sense strand
ccuagagagccgcaggaca

SEQ ID NO: 2501776 - RNA, 19 nt, Homo sapiens
  misc_RNA (1)...(19): siRNA sense strand
aaugaagguaauacgggaa

SEQ ID NO: 2501777 - RNA, 19 nt, Homo sapiens
  misc_RNA (1)...(19): siRNA sense strand
ugaguguggaugagcagaa

SEQ ID NO: 2501778 - RNA, 19 nt, Homo sapiens
  misc_RNA (1)...(19): siRNA sense strand
agaggaacgagauggcuau

SEQ ID NO: 2501779 - RNA, 19 nt, Homo sapiens
  misc_RNA (1)...(19): siRNA sense strand
augcauagauaauggucau

SEQ ID NO: 2501780 - RNA, 19 nt, Homo sapiens
  misc_RNA (1)...(19): siRNA sense strand
ccacguucuccgaggguuu

SEQ ID NO: 2501781 - RNA, 19 nt, Homo sapiens
  misc_RNA (1)...(19): siRNA sense strand
ugugcauggugguggguca

SEQ ID NO: 2501782 - RNA, 19 nt, Homo sapiens
  misc_RNA (1)...(19): siRNA sense strand
ucuccgaggguuugggaau

SEQ ID NO: 2501783 - RNA, 19 nt, Homo sapiens
  misc_RNA (1)...(19): siRNA sense strand
gcuccgugcgccaggaaaa

SEQ ID NO: 2501784 - RNA, 19 nt, Homo sapiens
  misc_RNA (1)...(19): siRNA sense strand
gcguuauaggcaagagcaa

SEQ ID NO: 2501785 - RNA, 19 nt, Homo sapiens
  misc_RNA (1)...(19): siRNA sense strand
agcaagaaguucagcgaga

SEQ ID NO: 2501786 - RNA, 19 nt, Homo sapiens
  misc_RNA (1)...(19): siRNA sense strand
cggucacaaucaaggaauu

SEQ ID NO: 2501787 - RNA, 19 nt, Homo sapiens
  misc_RNA (1)...(19): siRNA sense strand
gcaucgaguaccuggugaa

SEQ ID NO: 2501788 - RNA, 19 nt, Homo sapiens
  misc_RNA (1)...(19): siRNA sense strand
caaucaaggaauucugcaa

SEQ ID NO: 2501789 - RNA, 19 nt, Homo sapiens
  misc_RNA (1)...(19): siRNA sense strand
cuguaugggcccaagaaga

SEQ ID NO: 2501790 - RNA, 19 nt, Homo sapiens
  misc_RNA (1)...(19): siRNA sense strand
ggaaccgcguuauaggcaa

SEQ ID NO: 2501791 - RNA, 19 nt, Homo sapiens
  misc_RNA (1)...(19): siRNA sense strand
gaacaaaaggagagggagc

SEQ ID NO: 2501792 - RNA, 19 nt, Homo sapiens
  misc_RNA (1)...(19): siRNA sense strand
gaagguggcugcuggggua

SEQ ID NO: 2501793 - RNA, 19 nt, Homo sapiens
  misc_RNA (1)...(19): siRNA sense strand
ucaucaaccgcaaggugaa

SEQ ID NO: 2501794 - RNA, 19 nt, Homo sapiens
  misc_RNA (1)...(19): siRNA sense strand
cggccgaauccaucaucaa

SEQ ID NO: 2501795 - RNA, 19 nt, Homo sapiens
  misc_RNA (1)...(19): siRNA sense strand
ggacaagagcagccgggaa

SEQ ID NO: 2501796 - RNA, 19 nt, Homo sapiens
  misc_RNA (1)...(19): siRNA sense strand
cuaaucaugcagagagcaa

SEQ ID NO: 2501797 - RNA, 19 nt, Homo sapiens
  misc_RNA (1)...(19): siRNA sense strand
cuguuaagcugugggacaa

SEQ ID NO: 2501798 - RNA, 19 nt, Homo sapiens
  misc_RNA (1)...(19): siRNA sense strand
acuguuaagcugugggaca

SEQ ID NO: 2501799 - RNA, 19 nt, Homo sapiens
  misc_RNA (1)...(19): siRNA sense strand
ugacacugacagaagacaa

SEQ ID NO: 2501800 - RNA, 19 nt, Homo sapiens
  misc_RNA (1)...(19): siRNA sense strand
uggagaaccagcagcuaau

SEQ ID NO: 2501801 - RNA, 19 nt, Homo sapiens
  misc_RNA (1)...(19): siRNA sense strand
ugaugguuuggaagaguaa

SEQ ID NO: 2501802 - RNA, 19 nt, Homo sapiens
  misc_RNA (1)...(19): siRNA sense strand
cagcauuaucaguugcaca

SEQ ID NO: 2501803 - RNA, 19 nt, Homo sapiens
  misc_RNA (1)...(19): siRNA sense strand
ugaucaaauucaagagcau

SEQ ID NO: 2501804 - RNA, 19 nt, Homo sapiens
  misc_RNA (1)...(19): siRNA sense strand
aagaaaugaagguggaaca

SEQ ID NO: 2501805 - RNA, 19 nt, Homo sapiens
  misc_RNA (1)...(19): siRNA sense strand
uggaagaaaugaaggugga

SEQ ID NO: 2501806 - RNA, 19 nt, Homo sapiens
  misc_RNA (1)...(19): siRNA sense strand
agacaguggaagaaaugaa

SEQ ID NO: 2501807 - RNA, 19 nt, Homo sapiens
  misc_RNA (1)...(19): siRNA sense strand
ccgugacauucaaggcuaa

SEQ ID NO: 2501808 - RNA, 19 nt, Homo sapiens
  misc_RNA (1)...(19): siRNA sense strand
caauaggugcagaggcuga

SEQ ID NO: 2501809 - RNA, 19 nt, Homo sapiens
  misc_RNA (1)...(19): siRNA sense strand
agaaccagacaguggaaga

SEQ ID NO: 2501810 - RNA, 19 nt, Homo sapiens
  misc_RNA (1)...(19): siRNA sense strand
agaaaugaagguggaacaa

SEQ ID NO: 2501811 - RNA, 19 nt, Homo sapiens
  misc_RNA (1)...(19): siRNA sense strand
cucuauggcuggaugaaca

SEQ ID NO: 2501812 - RNA, 19 nt, Homo sapiens
  misc_RNA (1)...(19): siRNA sense strand
gcuuauagauaguaccaag

SEQ ID NO: 2501813 - RNA, 19 nt, Homo sapiens
  misc_RNA (1)...(19): siRNA sense strand
gagaagagcaucuauggca

SEQ ID NO: 2501814 - RNA, 19 nt, Homo sapiens
  misc_RNA (1)...(19): siRNA sense strand
agcaagaucuccaagcgaa

SEQ ID NO: 2501815 - RNA, 19 nt, Homo sapiens
  misc_RNA (1)...(19): siRNA sense strand
ccguugacauugacagcca

SEQ ID NO: 2501816 - RNA, 19 nt, Homo sapiens
  misc_RNA (1)...(19): siRNA sense strand
gcuccauggaauagagauu

SEQ ID NO: 2501817 - RNA, 19 nt, Homo sapiens
  misc_RNA (1)...(19): siRNA sense strand
ccagauuucuucagccaga

SEQ ID NO: 2501818 - RNA, 19 nt, Homo sapiens
  misc_RNA (1)...(19): siRNA sense strand
uuugaagaagccaaggaaa

SEQ ID NO: 2501819 - RNA, 19 nt, Homo sapiens
  misc_RNA (1)...(19): siRNA sense strand
uaugaaauggacaggcaau

SEQ ID NO: 2501820 - RNA, 19 nt, Homo sapiens
  misc_RNA (1)...(19): siRNA sense strand
cugccaugaaagagauuga

SEQ ID NO: 2501821 - RNA, 19 nt, Homo sapiens
  misc_RNA (1)...(19): siRNA sense strand
cagcgaagcuccagcacag

SEQ ID NO: 2501822 - RNA, 19 nt, Homo sapiens
  misc_RNA (1)...(19): siRNA sense strand
gaacagaaccugagucgga

SEQ ID NO: 2501823 - RNA, 19 nt, Homo sapiens
  misc_RNA (1)...(19): siRNA sense strand
gagcaagcgaugagagugu

SEQ ID NO: 2501824 - RNA, 19 nt, Homo sapiens
  misc_RNA (1)...(19): siRNA sense strand
ccucuaaacugguaccgaa

SEQ ID NO: 2501825 - RNA, 19 nt, Homo sapiens
  misc_RNA (1)...(19): siRNA sense strand
cucccgaaauagaagaaua

SEQ ID NO: 2501826 - RNA, 19 nt, Homo sapiens
  misc_RNA (1)...(19): siRNA sense strand
gcuuaugaaaggagagauc

SEQ ID NO: 2501827 - RNA, 19 nt, Homo sapiens
  misc_RNA (1)...(19): siRNA sense strand
uuauguaaggagaugguaa

SEQ ID NO: 2501828 - RNA, 19 nt, Homo sapiens
  misc_RNA (1)...(19): siRNA sense strand
cuauggacaugaaaggcua

SEQ ID NO: 2501829 - RNA, 19 nt, Homo sapiens
  misc_RNA (1)...(19): siRNA sense strand
caggaguggcugaggcuga

SEQ ID NO: 2501830 - RNA, 19 nt, Homo sapiens
  misc_RNA (1)...(19): siRNA sense strand
acaugaaaggcuauggaga

SEQ ID NO: 2501831 - RNA, 19 nt, Homo sapiens
  misc_RNA (1)...(19): siRNA sense strand
agaagaauauugcauggaa

SEQ ID NO: 2501832 - RNA, 19 nt, Homo sapiens
  misc_RNA (1)...(19): siRNA sense strand
cccugaaagaacuggagaa

SEQ ID NO: 2501833 - RNA, 19 nt, Homo sapiens
  misc_RNA (1)...(19): siRNA sense strand
agucgugucaggugggaau

SEQ ID NO: 2501834 - RNA, 19 nt, Homo sapiens
  misc_RNA (1)...(19): siRNA sense strand
ccagaagagcccagccuca

SEQ ID NO: 2501835 - RNA, 19 nt, Homo sapiens
  misc_RNA (1)...(19): siRNA sense strand
uggaagugggcuugcaaaa

SEQ ID NO: 2501836 - RNA, 19 nt, Homo sapiens
  misc_RNA (1)...(19): siRNA sense strand
gaagaauauugcauggaag

SEQ ID NO: 2501837 - RNA, 19 nt, Homo sapiens
  misc_RNA (1)...(19): siRNA sense strand
cgaaacauggaaaggaacu

SEQ ID NO: 2501838 - RNA, 19 nt, Homo sapiens
  misc_RNA (1)...(19): siRNA sense strand
aggaacuggaagugggcuu

SEQ ID NO: 2501839 - RNA, 19 nt, Homo sapiens
  misc_RNA (1)...(19): siRNA sense strand
auggaaaggaacuggaagu

SEQ ID NO: 2501840 - RNA, 19 nt, Homo sapiens
  misc_RNA (1)...(19): siRNA sense strand
cuggagaaagugaccggaa

SEQ ID NO: 2501841 - RNA, 19 nt, Homo sapiens
  misc_RNA (1)...(19): siRNA sense strand
gaaguguuauguaaggaga

SEQ ID NO: 2501842 - RNA, 19 nt, Homo sapiens
  misc_RNA (1)...(19): siRNA sense strand
ucccgaaauagaagaauau

SEQ ID NO: 2501843 - RNA, 19 nt, Homo sapiens
  misc_RNA (1)...(19): siRNA sense strand
ggauggucacugaggagga

SEQ ID NO: 2501844 - RNA, 19 nt, Homo sapiens
  misc_RNA (1)...(19): siRNA sense strand
cucuaaacugguaccgaaa

SEQ ID NO: 2501845 - RNA, 19 nt, Homo sapiens
  misc_RNA (1)...(19): siRNA sense strand
ccucagaugucccagcaca

SEQ ID NO: 2501846 - RNA, 19 nt, Homo sapiens
  misc_RNA (1)...(19): siRNA sense strand
cuagaaaugacuuuggaaa

SEQ ID NO: 2501847 - RNA, 19 nt, Homo sapiens
  misc_RNA (1)...(19): siRNA sense strand
guaaauuugcacauggaaa

SEQ ID NO: 2501848 - RNA, 19 nt, Homo sapiens
  misc_RNA (1)...(19): siRNA sense strand
agucauugaaccagacaaa

SEQ ID NO: 2501849 - RNA, 19 nt, Homo sapiens
  misc_RNA (1)...(19): siRNA sense strand
gcaccugcccagaaggaaa

SEQ ID NO: 2501850 - RNA, 19 nt, Homo sapiens
  misc_RNA (1)...(19): siRNA sense strand
aggaugagcauguaauaaa

SEQ ID NO: 2501851 - RNA, 19 nt, Homo sapiens
  misc_RNA (1)...(19): siRNA sense strand
caugaaggagaaugggaua

SEQ ID NO: 2501852 - RNA, 19 nt, Homo sapiens
  misc_RNA (1)...(19): siRNA sense strand
ccgagaagcacaaagagaa

SEQ ID NO: 2501853 - RNA, 19 nt, Homo sapiens
  misc_RNA (1)...(19): siRNA sense strand
cccuaaagaugaagcucaa

SEQ ID NO: 2501854 - RNA, 19 nt, Homo sapiens
  misc_RNA (1)...(19): siRNA sense strand
agauauugagccagauuua

SEQ ID NO: 2501855 - RNA, 19 nt, Homo sapiens
  misc_RNA (1)...(19): siRNA sense strand
agaaagaagagaugcccua

SEQ ID NO: 2501856 - RNA, 19 nt, Homo sapiens
  misc_RNA (1)...(19): siRNA sense strand
uggaagauauugagccaga

SEQ ID NO: 2501857 - RNA, 19 nt, Homo sapiens
  misc_RNA (1)...(19): siRNA sense strand
caaacaaggaaaauggaaa

SEQ ID NO: 2501858 - RNA, 19 nt, Homo sapiens
  misc_RNA (1)...(19): siRNA sense strand
ccgcuuaacaacaguaauu

SEQ ID NO: 2501859 - RNA, 19 nt, Homo sapiens
  misc_RNA (1)...(19): siRNA sense strand
ggaaagagaaguuuggacu

SEQ ID NO: 2501860 - RNA, 19 nt, Homo sapiens
  misc_RNA (1)...(19): siRNA sense strand
uuuauuaacuccaaggcaa

SEQ ID NO: 2501861 - RNA, 19 nt, Homo sapiens
  misc_RNA (1)...(19): siRNA sense strand
gagauaugguccuuggaga

SEQ ID NO: 2501862 - RNA, 19 nt, Homo sapiens
  misc_RNA (1)...(19): siRNA sense strand
gguuacaaagcaugaguuu

SEQ ID NO: 2501863 - RNA, 19 nt, Homo sapiens
  misc_RNA (1)...(19): siRNA sense strand
caaggaaaauggaaaacaa

SEQ ID NO: 2501864 - RNA, 19 nt, Homo sapiens
  misc_RNA (1)...(19): siRNA sense strand
gguccuuggagaugaacua

SEQ ID NO: 2501865 - RNA, 19 nt, Homo sapiens
  misc_RNA (1)...(19): siRNA sense strand
cugcuggaugugugggaaa

SEQ ID NO: 2501866 - RNA, 19 nt, Homo sapiens
  misc_RNA (1)...(19): siRNA sense strand
gauuggaacaacucgauaa

SEQ ID NO: 2501867 - RNA, 19 nt, Homo sapiens
  misc_RNA (1)...(19): siRNA sense strand
guaagaaguggaugaacau

SEQ ID NO: 2501868 - RNA, 19 nt, Homo sapiens
  misc_RNA (1)...(19): siRNA sense strand
gcggcaauggaaagauuaa

SEQ ID NO: 2501869 - RNA, 19 nt, Homo sapiens
  misc_RNA (1)...(19): siRNA sense strand
uggcagaauuuggaagcaa

SEQ ID NO: 2501870 - RNA, 19 nt, Homo sapiens
  misc_RNA (1)...(19): siRNA sense strand
caguauuugugauagguau

SEQ ID NO: 2501871 - RNA, 19 nt, Homo sapiens
  misc_RNA (1)...(19): siRNA sense strand
aggaaacagcuguaaauuu

SEQ ID NO: 2501872 - RNA, 19 nt, Homo sapiens
  misc_RNA (1)...(19): siRNA sense strand
gccuagaaugauaaguaaa

SEQ ID NO: 2501873 - RNA, 19 nt, Homo sapiens
  misc_RNA (1)...(19): siRNA sense strand
agcaugaguuugaagacaa

SEQ ID NO: 2501874 - RNA, 19 nt, Homo sapiens
  misc_RNA (1)...(19): siRNA sense strand
gcgcccagugucugagaaa

SEQ ID NO: 2501875 - RNA, 19 nt, Homo sapiens
  misc_RNA (1)...(19): siRNA sense strand
cccaaaugauaaugacuuu

SEQ ID NO: 2501876 - RNA, 19 nt, Homo sapiens
  misc_RNA (1)...(19): siRNA sense strand
ucaagaacuagcucagaaa

SEQ ID NO: 2501877 - RNA, 19 nt, Homo sapiens
  misc_RNA (1)...(19): siRNA sense strand
cuaccaaggcuuugaacca

SEQ ID NO: 2501878 - RNA, 19 nt, Homo sapiens
  misc_RNA (1)...(19): siRNA sense strand
cucaagagucuaaacgaua

SEQ ID NO: 2501879 - RNA, 19 nt, Homo sapiens
  misc_RNA (1)...(19): siRNA sense strand
cggcgugcgaugagaguga

SEQ ID NO: 2501880 - RNA, 19 nt, Homo sapiens
  misc_RNA (1)...(19): siRNA sense strand
agauaugguccuuggagau

SEQ ID NO: 2501881 - RNA, 19 nt, Homo sapiens
  misc_RNA (1)...(19): siRNA sense strand
ggagauagauguguggaca

SEQ ID NO: 2501882 - RNA, 19 nt, Homo sapiens
  misc_RNA (1)...(19): siRNA sense strand
acaugaugcuauugcucaa

SEQ ID NO: 2501883 - RNA, 19 nt, Homo sapiens
  misc_RNA (1)...(19): siRNA sense strand
cgaugagagugaugucuau

SEQ ID NO: 2501884 - RNA, 19 nt, Homo sapiens
  misc_RNA (1)...(19): siRNA sense strand
ggauacaagauauggagca

SEQ ID NO: 2501885 - RNA, 19 nt, Homo sapiens
  misc_RNA (1)...(19): siRNA sense strand
gcgagagacaacaguaaaa

SEQ ID NO: 2501886 - RNA, 19 nt, Homo sapiens
  misc_RNA (1)...(19): siRNA sense strand
agucagucaaacaaggaaa

SEQ ID NO: 2501887 - RNA, 19 nt, Homo sapiens
  misc_RNA (1)...(19): siRNA sense strand
gcaaagcucuguaucggaa

SEQ ID NO: 2501888 - RNA, 19 nt, Homo sapiens
  misc_RNA (1)...(19): siRNA sense strand
agaaggaaacagcuguaaa

SEQ ID NO: 2501889 - RNA, 19 nt, Homo sapiens
  misc_RNA (1)...(19): siRNA sense strand
ucuaaggcuuuaagugauu

SEQ ID NO: 2501890 - RNA, 19 nt, Homo sapiens
  misc_RNA (1)...(19): siRNA sense strand
gcuuuaagugauuuaggaa

SEQ ID NO: 2501891 - RNA, 19 nt, Homo sapiens
  misc_RNA (1)...(19): siRNA sense strand
aagaacuagcucagaaauu

SEQ ID NO: 2501892 - RNA, 19 nt, Homo sapiens
  misc_RNA (1)...(19): siRNA sense strand
guaaagauguugcugcuga

SEQ ID NO: 2501893 - RNA, 19 nt, Homo sapiens
  misc_RNA (1)...(19): siRNA sense strand
uagcagugccucaggauga

SEQ ID NO: 2501894 - RNA, 19 nt, Homo sapiens
  misc_RNA (1)...(19): siRNA sense strand
caucugcagugcuggcaaa

SEQ ID NO: 2501895 - RNA, 19 nt, Homo sapiens
  misc_RNA (1)...(19): siRNA sense strand
gcgaugagagugaugucua

SEQ ID NO: 2501896 - RNA, 19 nt, Homo sapiens
  misc_RNA (1)...(19): siRNA sense strand
aacuauggcucaagaguca

SEQ ID NO: 2501897 - RNA, 19 nt, Homo sapiens
  misc_RNA (1)...(19): siRNA sense strand
cagcagaacauuaaggaag

SEQ ID NO: 2501898 - RNA, 19 nt, Homo sapiens
  misc_RNA (1)...(19): siRNA sense strand
aaaucaggcccuaaguuaa

SEQ ID NO: 2501899 - RNA, 19 nt, Homo sapiens
  misc_RNA (1)...(19): siRNA sense strand
agauuaugcugaaguuaca

SEQ ID NO: 2501900 - RNA, 19 nt, Homo sapiens
  misc_RNA (1)...(19): siRNA sense strand
cgaacuucaugaaugggaa

SEQ ID NO: 2501901 - RNA, 19 nt, Homo sapiens
  misc_RNA (1)...(19): siRNA sense strand
ucuaaacgauauuggcaga

SEQ ID NO: 2501902 - RNA, 19 nt, Homo sapiens
  misc_RNA (1)...(19): siRNA sense strand
ggagaaugggauacaagau

SEQ ID NO: 2501903 - RNA, 19 nt, Homo sapiens
  misc_RNA (1)...(19): siRNA sense strand
ggaugagcauguaauaaaa

SEQ ID NO: 2501904 - RNA, 19 nt, Homo sapiens
  misc_RNA (1)...(19): siRNA sense strand
aaacaaauucacaugccaa

SEQ ID NO: 2501905 - RNA, 19 nt, Homo sapiens
  misc_RNA (1)...(19): siRNA sense strand
augaaggaaaugacguuua

SEQ ID NO: 2501906 - RNA, 19 nt, Homo sapiens
  misc_RNA (1)...(19): siRNA sense strand
ccagaaggaaacagcugua

SEQ ID NO: 2501907 - RNA, 19 nt, Homo sapiens
  misc_RNA (1)...(19): siRNA sense strand
gggccaaacuacagcggga

SEQ ID NO: 2501908 - RNA, 19 nt, Homo sapiens
  misc_RNA (1)...(19): siRNA sense strand
aagaagauguuguuggauc

SEQ ID NO: 2501909 - RNA, 19 nt, Homo sapiens
  misc_RNA (1)...(19): siRNA sense strand
gggcaaacacugugggaac

SEQ ID NO: 2501910 - RNA, 19 nt, Homo sapiens
  misc_RNA (1)...(19): siRNA sense strand
gggaaacacagaauggcua

SEQ ID NO: 2501911 - RNA, 19 nt, Homo sapiens
  misc_RNA (1)...(19): siRNA sense strand
ccagagcauuugugcgcaa

SEQ ID NO: 2501912 - RNA, 19 nt, Homo sapiens
  misc_RNA (1)...(19): siRNA sense strand
acaccaagugagaggccaa

SEQ ID NO: 2501913 - RNA, 19 nt, Homo sapiens
  misc_RNA (1)...(19): siRNA sense strand
ggagaggacuggauggugu

SEQ ID NO: 2501914 - RNA, 19 nt, Homo sapiens
  misc_RNA (1)...(19): siRNA sense strand
acuuugaaaucgagaagca

SEQ ID NO: 2501915 - RNA, 19 nt, Homo sapiens
  misc_RNA (1)...(19): siRNA sense strand
ucgagaagcacgacugcaa

SEQ ID NO: 2501916 - RNA, 19 nt, Homo sapiens
  misc_RNA (1)...(19): siRNA sense strand
cagaauggcuacuauguca

SEQ ID NO: 2501917 - RNA, 19 nt, Homo sapiens
  misc_RNA (1)...(19): siRNA sense strand
ccuacagccuaaacggcaa

SEQ ID NO: 2501918 - RNA, 19 nt, Homo sapiens
  misc_RNA (1)...(19): siRNA sense strand
gcuacuaugucaaauccua

SEQ ID NO: 2501919 - RNA, 19 nt, Homo sapiens
  misc_RNA (1)...(19): siRNA sense strand
ccaagagccacuagagaac

SEQ ID NO: 2501920 - RNA, 19 nt, Homo sapiens
  misc_RNA (1)...(19): siRNA sense strand
aacccaagauggagaucau

SEQ ID NO: 2501921 - RNA, 19 nt, Homo sapiens
  misc_RNA (1)...(19): siRNA sense strand
accaagagccacuagagaa

SEQ ID NO: 2501922 - RNA, 19 nt, Homo sapiens
  misc_RNA (1)...(19): siRNA sense strand
acggcaaggacugggaaua

SEQ ID NO: 2501923 - RNA, 19 nt, Homo sapiens
  misc_RNA (1)...(19): siRNA sense strand
gcaauguuccucugggcau

SEQ ID NO: 2501924 - RNA, 19 nt, Homo sapiens
  misc_RNA (1)...(19): siRNA sense strand
uggccaaacccaagaugga

SEQ ID NO: 2501925 - RNA, 19 nt, Homo sapiens
  misc_RNA (1)...(19): siRNA sense strand
acaagguauuucaagccaa

SEQ ID NO: 2501926 - RNA, 19 nt, Homo sapiens
  misc_RNA (1)...(19): siRNA sense strand
gggcaaacacugugggaac

SEQ ID NO: 2501927 - RNA, 19 nt, Homo sapiens
  misc_RNA (1)...(19): siRNA sense strand
gggaaacacagaauggcua

SEQ ID NO: 2501928 - RNA, 19 nt, Homo sapiens
  misc_RNA (1)...(19): siRNA sense strand
ccagagcauuugugcgcaa

SEQ ID NO: 2501929 - RNA, 19 nt, Homo sapiens
  misc_RNA (1)...(19): siRNA sense strand
acaccaagugagaggccaa

SEQ ID NO: 2501930 - RNA, 19 nt, Homo sapiens
  misc_RNA (1)...(19): siRNA sense strand
ggagaggacuggauggugu

SEQ ID NO: 2501931 - RNA, 19 nt, Homo sapiens
  misc_RNA (1)...(19): siRNA sense strand
acuuugaaaucgagaagca

SEQ ID NO: 2501932 - RNA, 19 nt, Homo sapiens
  misc_RNA (1)...(19): siRNA sense strand
ucgagaagcacgacugcaa

SEQ ID NO: 2501933 - RNA, 19 nt, Homo sapiens
  misc_RNA (1)...(19): siRNA sense strand
cagaauggcuacuauguca

SEQ ID NO: 2501934 - RNA, 19 nt, Homo sapiens
  misc_RNA (1)...(19): siRNA sense strand
ccuacagccuaaacggcaa

SEQ ID NO: 2501935 - RNA, 19 nt, Homo sapiens
  misc_RNA (1)...(19): siRNA sense strand
gcuacuaugucaaauccua

SEQ ID NO: 2501936 - RNA, 19 nt, Homo sapiens
  misc_RNA (1)...(19): siRNA sense strand
ccaagagccacuagagaac

SEQ ID NO: 2501937 - RNA, 19 nt, Homo sapiens
  misc_RNA (1)...(19): siRNA sense strand
aacccaagauggagaucau

SEQ ID NO: 2501938 - RNA, 19 nt, Homo sapiens
  misc_RNA (1)...(19): siRNA sense strand
accaagagccacuagagaa

SEQ ID NO: 2501939 - RNA, 19 nt, Homo sapiens
  misc_RNA (1)...(19): siRNA sense strand
acggcaaggacugggaaua

SEQ ID NO: 2501940 - RNA, 19 nt, Homo sapiens
  misc_RNA (1)...(19): siRNA sense strand
gcaauguuccucugggcau

SEQ ID NO: 2501941 - RNA, 19 nt, Homo sapiens
  misc_RNA (1)...(19): siRNA sense strand
uggccaaacccaagaugga

SEQ ID NO: 2501942 - RNA, 19 nt, Homo sapiens
  misc_RNA (1)...(19): siRNA sense strand
acaagguauuucaagccaa

SEQ ID NO: 2501943 - RNA, 19 nt, Homo sapiens
  misc_RNA (1)...(19): siRNA sense strand
gggcaaacacugugggaac

SEQ ID NO: 2501944 - RNA, 19 nt, Homo sapiens
  misc_RNA (1)...(19): siRNA sense strand
gggaaacacagaauggcua

SEQ ID NO: 2501945 - RNA, 19 nt, Homo sapiens
  misc_RNA (1)...(19): siRNA sense strand
ccagagcauuugugcgcaa

SEQ ID NO: 2501946 - RNA, 19 nt, Homo sapiens
  misc_RNA (1)...(19): siRNA sense strand
acaccaagugagaggccaa

SEQ ID NO: 2501947 - RNA, 19 nt, Homo sapiens
  misc_RNA (1)...(19): siRNA sense strand
ggagaggacuggauggugu

SEQ ID NO: 2501948 - RNA, 19 nt, Homo sapiens
  misc_RNA (1)...(19): siRNA sense strand
acuuugaaaucgagaagca

SEQ ID NO: 2501949 - RNA, 19 nt, Homo sapiens
  misc_RNA (1)...(19): siRNA sense strand
ucgagaagcacgacugcaa

SEQ ID NO: 2501950 - RNA, 19 nt, Homo sapiens
  misc_RNA (1)...(19): siRNA sense strand
cagaauggcuacuauguca

SEQ ID NO: 2501951 - RNA, 19 nt, Homo sapiens
  misc_RNA (1)...(19): siRNA sense strand
ccuacagccuaaacggcaa

SEQ ID NO: 2501952 - RNA, 19 nt, Homo sapiens
  misc_RNA (1)...(19): siRNA sense strand
gcuacuaugucaaauccua

SEQ ID NO: 2501953 - RNA, 19 nt, Homo sapiens
  misc_RNA (1)...(19): siRNA sense strand
ccaagagccacuagagaac

SEQ ID NO: 2501954 - RNA, 19 nt, Homo sapiens
  misc_RNA (1)...(19): siRNA sense strand
aacccaagauggagaucau

SEQ ID NO: 2501955 - RNA, 19 nt, Homo sapiens
  misc_RNA (1)...(19): siRNA sense strand
accaagagccacuagagaa

SEQ ID NO: 2501956 - RNA, 19 nt, Homo sapiens
  misc_RNA (1)...(19): siRNA sense strand
acggcaaggacugggaaua

SEQ ID NO: 2501957 - RNA, 19 nt, Homo sapiens
  misc_RNA (1)...(19): siRNA sense strand
gcaauguuccucugggcau

SEQ ID NO: 2501958 - RNA, 19 nt, Homo sapiens
  misc_RNA (1)...(19): siRNA sense strand
uggccaaacccaagaugga

SEQ ID NO: 2501959 - RNA, 19 nt, Homo sapiens
  misc_RNA (1)...(19): siRNA sense strand
acaagguauuucaagccaa

SEQ ID NO: 2501960 - RNA, 19 nt, Homo sapiens
  misc_RNA (1)...(19): siRNA sense strand
gggcaaacacugugggaac

SEQ ID NO: 2501961 - RNA, 19 nt, Homo sapiens
  misc_RNA (1)...(19): siRNA sense strand
gggaaacacagaauggcua

SEQ ID NO: 2501962 - RNA, 19 nt, Homo sapiens
  misc_RNA (1)...(19): siRNA sense strand
ccagagcauuugugcgcaa

SEQ ID NO: 2501963 - RNA, 19 nt, Homo sapiens
  misc_RNA (1)...(19): siRNA sense strand
acaccaagugagaggccaa

SEQ ID NO: 2501964 - RNA, 19 nt, Homo sapiens
  misc_RNA (1)...(19): siRNA sense strand
ggagaggacuggauggugu

SEQ ID NO: 2501965 - RNA, 19 nt, Homo sapiens
  misc_RNA (1)...(19): siRNA sense strand
acuuugaaaucgagaagca

SEQ ID NO: 2501966 - RNA, 19 nt, Homo sapiens
  misc_RNA (1)...(19): siRNA sense strand
ucgagaagcacgacugcaa

SEQ ID NO: 2501967 - RNA, 19 nt, Homo sapiens
  misc_RNA (1)...(19): siRNA sense strand
cagaauggcuacuauguca

SEQ ID NO: 2501968 - RNA, 19 nt, Homo sapiens
  misc_RNA (1)...(19): siRNA sense strand
ccuacagccuaaacggcaa

SEQ ID NO: 2501969 - RNA, 19 nt, Homo sapiens
  misc_RNA (1)...(19): siRNA sense strand
gcuacuaugucaaauccua

SEQ ID NO: 2501970 - RNA, 19 nt, Homo sapiens
  misc_RNA (1)...(19): siRNA sense strand
ccaagagccacuagagaac

SEQ ID NO: 2501971 - RNA, 19 nt, Homo sapiens
  misc_RNA (1)...(19): siRNA sense strand
aacccaagauggagaucau

SEQ ID NO: 2501972 - RNA, 19 nt, Homo sapiens
  misc_RNA (1)...(19): siRNA sense strand
accaagagccacuagagaa

SEQ ID NO: 2501973 - RNA, 19 nt, Homo sapiens
  misc_RNA (1)...(19): siRNA sense strand
acggcaaggacugggaaua

SEQ ID NO: 2501974 - RNA, 19 nt, Homo sapiens
  misc_RNA (1)...(19): siRNA sense strand
gcaauguuccucugggcau

SEQ ID NO: 2501975 - RNA, 19 nt, Homo sapiens
  misc_RNA (1)...(19): siRNA sense strand
uggccaaacccaagaugga

SEQ ID NO: 2501976 - RNA, 19 nt, Homo sapiens
  misc_RNA (1)...(19): siRNA sense strand
acaagguauuucaagccaa

SEQ ID NO: 2501977 - RNA, 19 nt, Homo sapiens
  misc_RNA (1)...(19): siRNA sense strand
gggcaaacacugugggaac

SEQ ID NO: 2501978 - RNA, 19 nt, Homo sapiens
  misc_RNA (1)...(19): siRNA sense strand
gggaaacacagaauggcua

SEQ ID NO: 2501979 - RNA, 19 nt, Homo sapiens
  misc_RNA (1)...(19): siRNA sense strand
ccagagcauuugugcgcaa

SEQ ID NO: 2501980 - RNA, 19 nt, Homo sapiens
  misc_RNA (1)...(19): siRNA sense strand
acaccaagugagaggccaa

SEQ ID NO: 2501981 - RNA, 19 nt, Homo sapiens
  misc_RNA (1)...(19): siRNA sense strand
ggagaggacuggauggugu

SEQ ID NO: 2501982 - RNA, 19 nt, Homo sapiens
  misc_RNA (1)...(19): siRNA sense strand
acuuugaaaucgagaagca

SEQ ID NO: 2501983 - RNA, 19 nt, Homo sapiens
  misc_RNA (1)...(19): siRNA sense strand
ucgagaagcacgacugcaa

SEQ ID NO: 2501984 - RNA, 19 nt, Homo sapiens
  misc_RNA (1)...(19): siRNA sense strand
cagaauggcuacuauguca

SEQ ID NO: 2501985 - RNA, 19 nt, Homo sapiens
  misc_RNA (1)...(19): siRNA sense strand
ccuacagccuaaacggcaa

SEQ ID NO: 2501986 - RNA, 19 nt, Homo sapiens
  misc_RNA (1)...(19): siRNA sense strand
gcuacuaugucaaauccua

SEQ ID NO: 2501987 - RNA, 19 nt, Homo sapiens
  misc_RNA (1)...(19): siRNA sense strand
ccaagagccacuagagaac

SEQ ID NO: 2501988 - RNA, 19 nt, Homo sapiens
  misc_RNA (1)...(19): siRNA sense strand
aacccaagauggagaucau

SEQ ID NO: 2501989 - RNA, 19 nt, Homo sapiens
  misc_RNA (1)...(19): siRNA sense strand
accaagagccacuagagaa

SEQ ID NO: 2501990 - RNA, 19 nt, Homo sapiens
  misc_RNA (1)...(19): siRNA sense strand
acggcaaggacugggaaua

SEQ ID NO: 2501991 - RNA, 19 nt, Homo sapiens
  misc_RNA (1)...(19): siRNA sense strand
gcaauguuccucugggcau

SEQ ID NO: 2501992 - RNA, 19 nt, Homo sapiens
  misc_RNA (1)...(19): siRNA sense strand
uggccaaacccaagaugga

SEQ ID NO: 2501993 - RNA, 19 nt, Homo sapiens
  misc_RNA (1)...(19): siRNA sense strand
acaagguauuucaagccaa

SEQ ID NO: 2501994 - RNA, 19 nt, Homo sapiens
  misc_RNA (1)...(19): siRNA sense strand
gggcaaacacugugggaac

SEQ ID NO: 2501995 - RNA, 19 nt, Homo sapiens
  misc_RNA (1)...(19): siRNA sense strand
gggaaacacagaauggcua

SEQ ID NO: 2501996 - RNA, 19 nt, Homo sapiens
  misc_RNA (1)...(19): siRNA sense strand
ccagagcauuugugcgcaa

SEQ ID NO: 2501997 - RNA, 19 nt, Homo sapiens
  misc_RNA (1)...(19): siRNA sense strand
acaccaagugagaggccaa

SEQ ID NO: 2501998 - RNA, 19 nt, Homo sapiens
  misc_RNA (1)...(19): siRNA sense strand
ggagaggacuggauggugu

SEQ ID NO: 2501999 - RNA, 19 nt, Homo sapiens
  misc_RNA (1)...(19): siRNA sense strand
acuuugaaaucgagaagca

SEQ ID NO: 2502000 - RNA, 19 nt, Homo sapiens
  misc_RNA (1)...(19): siRNA sense strand
ucgagaagcacgacugcaa

SEQ ID NO: 2502001 - RNA, 19 nt, Homo sapiens
  misc_RNA (1)...(19): siRNA sense strand
cagaauggcuacuauguca

SEQ ID NO: 2502002 - RNA, 19 nt, Homo sapiens
  misc_RNA (1)...(19): siRNA sense strand
ccuacagccuaaacggcaa

SEQ ID NO: 2502003 - RNA, 19 nt, Homo sapiens
  misc_RNA (1)...(19): siRNA sense strand
gcuacuaugucaaauccua

SEQ ID NO: 2502004 - RNA, 19 nt, Homo sapiens
  misc_RNA (1)...(19): siRNA sense strand
ccaagagccacuagagaac

SEQ ID NO: 2502005 - RNA, 19 nt, Homo sapiens
  misc_RNA (1)...(19): siRNA sense strand
aacccaagauggagaucau

SEQ ID NO: 2502006 - RNA, 19 nt, Homo sapiens
  misc_RNA (1)...(19): siRNA sense strand
accaagagccacuagagaa

SEQ ID NO: 2502007 - RNA, 19 nt, Homo sapiens
  misc_RNA (1)...(19): siRNA sense strand
acggcaaggacugggaaua

SEQ ID NO: 2502008 - RNA, 19 nt, Homo sapiens
  misc_RNA (1)...(19): siRNA sense strand
gcaauguuccucugggcau

SEQ ID NO: 2502009 - RNA, 19 nt, Homo sapiens
  misc_RNA (1)...(19): siRNA sense strand
uggccaaacccaagaugga

SEQ ID NO: 2502010 - RNA, 19 nt, Homo sapiens
  misc_RNA (1)...(19): siRNA sense strand
acaagguauuucaagccaa

SEQ ID NO: 2502011 - RNA, 19 nt, Homo sapiens
  misc_RNA (1)...(19): siRNA sense strand
ugaaaagaguacaggacuu

SEQ ID NO: 2502012 - RNA, 19 nt, Homo sapiens
  misc_RNA (1)...(19): siRNA sense strand
caguagagagcuugaaaau

SEQ ID NO: 2502013 - RNA, 19 nt, Homo sapiens
  misc_RNA (1)...(19): siRNA sense strand
ggauggucuguuagaagaa

SEQ ID NO: 2502014 - RNA, 19 nt, Homo sapiens
  misc_RNA (1)...(19): siRNA sense strand
gagaaaugcagaaaaccaa

SEQ ID NO: 2502015 - RNA, 19 nt, Homo sapiens
  misc_RNA (1)...(19): siRNA sense strand
ccacaaguucugaagagca

SEQ ID NO: 2502016 - RNA, 19 nt, Homo sapiens
  misc_RNA (1)...(19): siRNA sense strand
accaaagaacuaaugacaa

SEQ ID NO: 2502017 - RNA, 19 nt, Homo sapiens
  misc_RNA (1)...(19): siRNA sense strand
aggaagaggaggaggauaa

SEQ ID NO: 2502018 - RNA, 19 nt, Homo sapiens
  misc_RNA (1)...(19): siRNA sense strand
acacauaagcaguaagaaa

SEQ ID NO: 2502019 - RNA, 19 nt, Homo sapiens
  misc_RNA (1)...(19): siRNA sense strand
aggaagaaguggaagaaga

SEQ ID NO: 2502020 - RNA, 19 nt, Homo sapiens
  misc_RNA (1)...(19): siRNA sense strand
uggaagaauugcaggaaga

SEQ ID NO: 2502021 - RNA, 19 nt, Homo sapiens
  misc_RNA (1)...(19): siRNA sense strand
aggcagagaaugagggaga

SEQ ID NO: 2502022 - RNA, 19 nt, Homo sapiens
  misc_RNA (1)...(19): siRNA sense strand
gguagaagaggcagagaau

SEQ ID NO: 2502023 - RNA, 19 nt, Homo sapiens
  misc_RNA (1)...(19): siRNA sense strand
aggcgagaguagugagcaa

SEQ ID NO: 2502024 - RNA, 19 nt, Homo sapiens
  misc_RNA (1)...(19): siRNA sense strand
ugacaagggaagaggauga

SEQ ID NO: 2502025 - RNA, 19 nt, Homo sapiens
  misc_RNA (1)...(19): siRNA sense strand
cagugaaagagaagggaau

SEQ ID NO: 2502026 - RNA, 19 nt, Homo sapiens
  misc_RNA (1)...(19): siRNA sense strand
uggaagaagaagagguaga

SEQ ID NO: 2502027 - RNA, 19 nt, Homo sapiens
  misc_RNA (1)...(19): siRNA sense strand
aggaagaacccuugaacuu

SEQ ID NO: 2502028 - RNA, 19 nt, Homo sapiens
  misc_RNA (1)...(19): siRNA sense strand
gcauauuguggaagaagaa

SEQ ID NO: 2502029 - RNA, 19 nt, Homo sapiens
  misc_RNA (1)...(19): siRNA sense strand
gcugggaggaugacagaaa

SEQ ID NO: 2502030 - RNA, 19 nt, Homo sapiens
  misc_RNA (1)...(19): siRNA sense strand
acucagaaccaguuguaaa

SEQ ID NO: 2502031 - RNA, 19 nt, Homo sapiens
  misc_RNA (1)...(19): siRNA sense strand
aggaagaggaggaggagga

SEQ ID NO: 2502032 - RNA, 19 nt, Homo sapiens
  misc_RNA (1)...(19): siRNA sense strand
aggaggaggaggaggaaga

SEQ ID NO: 2502033 - RNA, 19 nt, Homo sapiens
  misc_RNA (1)...(19): siRNA sense strand
aggaagagaucaaagacau

SEQ ID NO: 2502034 - RNA, 19 nt, Homo sapiens
  misc_RNA (1)...(19): siRNA sense strand
ggauaaagagauggaagaa

SEQ ID NO: 2502035 - RNA, 19 nt, Homo sapiens
  misc_RNA (1)...(19): siRNA sense strand
ccagggaggagcagugaaa

SEQ ID NO: 2502036 - RNA, 19 nt, Homo sapiens
  misc_RNA (1)...(19): siRNA sense strand
cggacgagagagagaguuu

SEQ ID NO: 2502037 - RNA, 19 nt, Homo sapiens
  misc_RNA (1)...(19): siRNA sense strand
aggauaaagagauggaaga

SEQ ID NO: 2502038 - RNA, 19 nt, Homo sapiens
  misc_RNA (1)...(19): siRNA sense strand
gggaugaggaagaggagga

SEQ ID NO: 2502039 - RNA, 19 nt, Homo sapiens
  misc_RNA (1)...(19): siRNA sense strand
agagaaugagggagaagaa

SEQ ID NO: 2502040 - RNA, 19 nt, Homo sapiens
  misc_RNA (1)...(19): siRNA sense strand
gcucagaaggaguaucaaa

SEQ ID NO: 2502041 - RNA, 19 nt, Homo sapiens
  misc_RNA (1)...(19): siRNA sense strand
aagaagaagagguagaaga

SEQ ID NO: 2502042 - RNA, 19 nt, Homo sapiens
  misc_RNA (1)...(19): siRNA sense strand
aggaggaagaaguggaaga

SEQ ID NO: 2502043 - RNA, 19 nt, Homo sapiens
  misc_RNA (1)...(19): siRNA sense strand
gaggaugaagacagugaaa

SEQ ID NO: 2502044 - RNA, 19 nt, Homo sapiens
  misc_RNA (1)...(19): siRNA sense strand
cuguaagagagaagcggaa

SEQ ID NO: 2502045 - RNA, 19 nt, Homo sapiens
  misc_RNA (1)...(19): siRNA sense strand
gcgcaauaacguuacaaau

SEQ ID NO: 2502046 - RNA, 19 nt, Homo sapiens
  misc_RNA (1)...(19): siRNA sense strand
ggaggaugacagaaaggaa

SEQ ID NO: 2502047 - RNA, 19 nt, Homo sapiens
  misc_RNA (1)...(19): siRNA sense strand
ggaugaaagacaagauacu

SEQ ID NO: 2502048 - RNA, 19 nt, Homo sapiens
  misc_RNA (1)...(19): siRNA sense strand
augcagaaaaugagcaaaa

SEQ ID NO: 2502049 - RNA, 19 nt, Homo sapiens
  misc_RNA (1)...(19): siRNA sense strand
cugaagaggaccagaggca

SEQ ID NO: 2502050 - RNA, 19 nt, Homo sapiens
  misc_RNA (1)...(19): siRNA sense strand
auacugugguagaaacaaa

SEQ ID NO: 2502051 - RNA, 19 nt, Homo sapiens
  misc_RNA (1)...(19): siRNA sense strand
auguagaggaucagaauga

SEQ ID NO: 2502052 - RNA, 19 nt, Homo sapiens
  misc_RNA (1)...(19): siRNA sense strand
aagaauugcaggaagaaaa

SEQ ID NO: 2502053 - RNA, 19 nt, Homo sapiens
  misc_RNA (1)...(19): siRNA sense strand
guggaagaagaaaguguua

SEQ ID NO: 2502054 - RNA, 19 nt, Homo sapiens
  misc_RNA (1)...(19): siRNA sense strand
ugguaauguaauaaggcaa

SEQ ID NO: 2502055 - RNA, 19 nt, Homo sapiens
  misc_RNA (1)...(19): siRNA sense strand
auaugaacacacagguaaa

SEQ ID NO: 2502056 - RNA, 19 nt, Homo sapiens
  misc_RNA (1)...(19): siRNA sense strand
agggaggagcagugaaaga

SEQ ID NO: 2502057 - RNA, 19 nt, Homo sapiens
  misc_RNA (1)...(19): siRNA sense strand
acauaaaucaggaagagau

SEQ ID NO: 2502058 - RNA, 19 nt, Homo sapiens
  misc_RNA (1)...(19): siRNA sense strand
aggcaaguguuggagaaua

SEQ ID NO: 2502059 - RNA, 19 nt, Homo sapiens
  misc_RNA (1)...(19): siRNA sense strand
uaccaaagcaacagggaga

SEQ ID NO: 2502060 - RNA, 19 nt, Homo sapiens
  misc_RNA (1)...(19): siRNA sense strand
aguagaaccucuugaucuu

SEQ ID NO: 2502061 - RNA, 19 nt, Homo sapiens
  misc_RNA (1)...(19): siRNA sense strand
guaagagagaagcggaaga

SEQ ID NO: 2502062 - RNA, 19 nt, Homo sapiens
  misc_RNA (1)...(19): siRNA sense strand
aguggaagaagaagaggua

SEQ ID NO: 2502063 - RNA, 19 nt, Homo sapiens
  misc_RNA (1)...(19): siRNA sense strand
aagaaguggaagaagaaga

SEQ ID NO: 2502064 - RNA, 19 nt, Homo sapiens
  misc_RNA (1)...(19): siRNA sense strand
agguagaagaggcagagaa

SEQ ID NO: 2502065 - RNA, 19 nt, Homo sapiens
  misc_RNA (1)...(19): siRNA sense strand
gcgauagaugguaauguaa

SEQ ID NO: 2502066 - RNA, 19 nt, Homo sapiens
  misc_RNA (1)...(19): siRNA sense strand
gcuugugauuugugugaca

SEQ ID NO: 2502067 - RNA, 19 nt, Homo sapiens
  misc_RNA (1)...(19): siRNA sense strand
gauaaagagauggaagaau

SEQ ID NO: 2502068 - RNA, 19 nt, Homo sapiens
  misc_RNA (1)...(19): siRNA sense strand
gcagugaaagagaagggaa

SEQ ID NO: 2502069 - RNA, 19 nt, Homo sapiens
  misc_RNA (1)...(19): siRNA sense strand
cuguuaagucugagaagga

SEQ ID NO: 2502070 - RNA, 19 nt, Homo sapiens
  misc_RNA (1)...(19): siRNA sense strand
aagaagagccacaaguaga

SEQ ID NO: 2502071 - RNA, 19 nt, Homo sapiens
  misc_RNA (1)...(19): siRNA sense strand
gcuaagaacugcugggagg

SEQ ID NO: 2502072 - RNA, 19 nt, Homo sapiens
  misc_RNA (1)...(19): siRNA sense strand
uccuaauguugaagaguuu

SEQ ID NO: 2502073 - RNA, 19 nt, Homo sapiens
  misc_RNA (1)...(19): siRNA sense strand
cacauaagcaguaagaaau

SEQ ID NO: 2502074 - RNA, 19 nt, Homo sapiens
  misc_RNA (1)...(19): siRNA sense strand
gugcagaagagcucucaaa

SEQ ID NO: 2502075 - RNA, 19 nt, Homo sapiens
  misc_RNA (1)...(19): siRNA sense strand
gagagagagaguuugacaa

SEQ ID NO: 2502076 - RNA, 19 nt, Homo sapiens
  misc_RNA (1)...(19): siRNA sense strand
uaaaucaggaagagaucaa

SEQ ID NO: 2502077 - RNA, 19 nt, Homo sapiens
  misc_RNA (1)...(19): siRNA sense strand
gaagaauugcaggaagaaa

SEQ ID NO: 2502078 - RNA, 19 nt, Homo sapiens
  misc_RNA (1)...(19): siRNA sense strand
gugacaagauauuccaaaa

SEQ ID NO: 2502079 - RNA, 19 nt, Homo sapiens
  misc_RNA (1)...(19): siRNA sense strand
ggaagaacgugacagcaca

SEQ ID NO: 2502080 - RNA, 19 nt, Homo sapiens
  misc_RNA (1)...(19): siRNA sense strand
gggaagaggaugaagacag

SEQ ID NO: 2502081 - RNA, 19 nt, Homo sapiens
  misc_RNA (1)...(19): siRNA sense strand
gagaaaggcccgagcgcau

SEQ ID NO: 2502082 - RNA, 19 nt, Homo sapiens
  misc_RNA (1)...(19): siRNA sense strand
cgguagaaggugugccauu

SEQ ID NO: 2502083 - RNA, 19 nt, Homo sapiens
  misc_RNA (1)...(19): siRNA sense strand
gcuucgaaagagacggaaa

SEQ ID NO: 2502084 - RNA, 19 nt, Homo sapiens
  misc_RNA (1)...(19): siRNA sense strand
aggcagagcaccagccaga

SEQ ID NO: 2502085 - RNA, 19 nt, Homo sapiens
  misc_RNA (1)...(19): siRNA sense strand
ggaauugcaugcuggcaga

SEQ ID NO: 2502086 - RNA, 19 nt, Homo sapiens
  misc_RNA (1)...(19): siRNA sense strand
uggagaacaucuugggcca

SEQ ID NO: 2502087 - RNA, 19 nt, Homo sapiens
  misc_RNA (1)...(19): siRNA sense strand
cagcgaugaacuaaaggaa

SEQ ID NO: 2502088 - RNA, 19 nt, Homo sapiens
  misc_RNA (1)...(19): siRNA sense strand
ggauguugggcaaaggaga

SEQ ID NO: 2502089 - RNA, 19 nt, Homo sapiens
  misc_RNA (1)...(19): siRNA sense strand
caucgaaaacgcugagauu

SEQ ID NO: 2502090 - RNA, 19 nt, Homo sapiens
  misc_RNA (1)...(19): siRNA sense strand
gcaugaaggaguuugacca

SEQ ID NO: 2502091 - RNA, 19 nt, Homo sapiens
  misc_RNA (1)...(19): siRNA sense strand
ccugacauccaguggguga

SEQ ID NO: 2502092 - RNA, 19 nt, Homo sapiens
  misc_RNA (1)...(19): siRNA sense strand
ugaagaugcugaaagcuga

SEQ ID NO: 2502093 - RNA, 19 nt, Homo sapiens
  misc_RNA (1)...(19): siRNA sense strand
gagcagggcuaaaggccgu

SEQ ID NO: 2502094 - RNA, 19 nt, Homo sapiens
  misc_RNA (1)...(19): siRNA sense strand
uggcagaggacaugacagu

SEQ ID NO: 2502095 - RNA, 19 nt, Homo sapiens
  misc_RNA (1)...(19): siRNA sense strand
agcgaugaacuaaaggaaa

SEQ ID NO: 2502096 - RNA, 19 nt, Homo sapiens
  misc_RNA (1)...(19): siRNA sense strand
gcaugcuggcagaggacau

SEQ ID NO: 2502097 - RNA, 19 nt, Homo sapiens
  misc_RNA (1)...(19): siRNA sense strand
gaucaugacacgugggcag

SEQ ID NO: 2502098 - RNA, 19 nt, Homo sapiens
  misc_RNA (1)...(19): siRNA sense strand
ggaacuucauccaccgaga

SEQ ID NO: 2502099 - RNA, 19 nt, Homo sapiens
  misc_RNA (1)...(19): siRNA sense strand
ugacaguguguguggcuga

SEQ ID NO: 2502100 - RNA, 19 nt, Homo sapiens
  misc_RNA (1)...(19): siRNA sense strand
ugacaaagcuuuccagcag

SEQ ID NO: 2502101 - RNA, 19 nt, Homo sapiens
  misc_RNA (1)...(19): siRNA sense strand
cggaaagagacgcgguuug

SEQ ID NO: 2502102 - RNA, 19 nt, Homo sapiens
  misc_RNA (1)...(19): siRNA sense strand
aagaggagaaggagagaaa

SEQ ID NO: 2502103 - RNA, 19 nt, Homo sapiens
  misc_RNA (1)...(19): siRNA sense strand
ggucgaguccagugagaaa

SEQ ID NO: 2502104 - RNA, 19 nt, Homo sapiens
  misc_RNA (1)...(19): siRNA sense strand
gagaagaggaugaggagga

SEQ ID NO: 2502105 - RNA, 19 nt, Homo sapiens
  misc_RNA (1)...(19): siRNA sense strand
ccacagagaucaaccggaa

SEQ ID NO: 2502106 - RNA, 19 nt, Homo sapiens
  misc_RNA (1)...(19): siRNA sense strand
ccaaugaaaaugaggauaa

SEQ ID NO: 2502107 - RNA, 19 nt, Homo sapiens
  misc_RNA (1)...(19): siRNA sense strand
aggaggaggaagaggagaa

SEQ ID NO: 2502108 - RNA, 19 nt, Homo sapiens
  misc_RNA (1)...(19): siRNA sense strand
uagcaaucaccgagguaaa

SEQ ID NO: 2502109 - RNA, 19 nt, Homo sapiens
  misc_RNA (1)...(19): siRNA sense strand
gcaugaagcugcuggacca

SEQ ID NO: 2502110 - RNA, 19 nt, Homo sapiens
  misc_RNA (1)...(19): siRNA sense strand
cuacaggagaagaggauga

SEQ ID NO: 2502111 - RNA, 19 nt, Homo sapiens
  misc_RNA (1)...(19): siRNA sense strand
gaggugacaucgagggaga

SEQ ID NO: 2502112 - RNA, 19 nt, Homo sapiens
  misc_RNA (1)...(19): siRNA sense strand
cuaugaacgcagaggaaaa

SEQ ID NO: 2502113 - RNA, 19 nt, Homo sapiens
  misc_RNA (1)...(19): siRNA sense strand
gcuacaaccaggagggcau

SEQ ID NO: 2502114 - RNA, 19 nt, Homo sapiens
  misc_RNA (1)...(19): siRNA sense strand
gaggaggacaagagggaca

SEQ ID NO: 2502115 - RNA, 19 nt, Homo sapiens
  misc_RNA (1)...(19): siRNA sense strand
gggaauccaaggaggagaa

SEQ ID NO: 2502116 - RNA, 19 nt, Homo sapiens
  misc_RNA (1)...(19): siRNA sense strand
ggcuaaagcaugugguuca

SEQ ID NO: 2502117 - RNA, 19 nt, Homo sapiens
  misc_RNA (1)...(19): siRNA sense strand
ccuucaaacccaagcacua

SEQ ID NO: 2502118 - RNA, 19 nt, Homo sapiens
  misc_RNA (1)...(19): siRNA sense strand
gagaauacgaggauguaca

SEQ ID NO: 2502119 - RNA, 19 nt, Homo sapiens
  misc_RNA (1)...(19): siRNA sense strand
agaagggaaccuagaacaa

SEQ ID NO: 2502120 - RNA, 19 nt, Homo sapiens
  misc_RNA (1)...(19): siRNA sense strand
gcaacagcacggaggguga

SEQ ID NO: 2502121 - RNA, 19 nt, Homo sapiens
  misc_RNA (1)...(19): siRNA sense strand
cccaaaaggaggaggaaga

SEQ ID NO: 2502122 - RNA, 19 nt, Homo sapiens
  misc_RNA (1)...(19): siRNA sense strand
ggaugcagguguuugggaa

SEQ ID NO: 2502123 - RNA, 19 nt, Homo sapiens
  misc_RNA (1)...(19): siRNA sense strand
gaggaagaggagaaggaga

SEQ ID NO: 2502124 - RNA, 19 nt, Homo sapiens
  misc_RNA (1)...(19): siRNA sense strand
cugaggaggagcuggacaa

SEQ ID NO: 2502125 - RNA, 19 nt, Homo sapiens
  misc_RNA (1)...(19): siRNA sense strand
agaaugaggacgaaggcau

SEQ ID NO: 2502126 - RNA, 19 nt, Homo sapiens
  misc_RNA (1)...(19): siRNA sense strand
ggaucaaaacagaagggaa

SEQ ID NO: 2502127 - RNA, 19 nt, Homo sapiens
  misc_RNA (1)...(19): siRNA sense strand
gggcgaucaucaagaagau

SEQ ID NO: 2502128 - RNA, 19 nt, Homo sapiens
  misc_RNA (1)...(19): siRNA sense strand
aauccaaggaggagaagau

SEQ ID NO: 2502129 - RNA, 19 nt, Homo sapiens
  misc_RNA (1)...(19): siRNA sense strand
gaugcagguguuugggaaa

SEQ ID NO: 2502130 - RNA, 19 nt, Homo sapiens
  misc_RNA (1)...(19): siRNA sense strand
aggcggaaugcaagggcaa

SEQ ID NO: 2502131 - RNA, 19 nt, Homo sapiens
  misc_RNA (1)...(19): siRNA sense strand
aagaggaucucaaaggcua

SEQ ID NO: 2502132 - RNA, 19 nt, Homo sapiens
  misc_RNA (1)...(19): siRNA sense strand
ggaaguucaagaagcgcaa

SEQ ID NO: 2502133 - RNA, 19 nt, Homo sapiens
  misc_RNA (1)...(19): siRNA sense strand
aggaggaagaggagaagga

SEQ ID NO: 2502134 - RNA, 19 nt, Homo sapiens
  misc_RNA (1)...(19): siRNA sense strand
ggaaaauugcccugaauga

SEQ ID NO: 2502135 - RNA, 19 nt, Homo sapiens
  misc_RNA (1)...(19): siRNA sense strand
agccaagggucguaucaaa

SEQ ID NO: 2502136 - RNA, 19 nt, Homo sapiens
  misc_RNA (1)...(19): siRNA sense strand
gggcauagcagauguucca

SEQ ID NO: 2502137 - RNA, 19 nt, Homo sapiens
  misc_RNA (1)...(19): siRNA sense strand
gaucaaaacagaagggaac

SEQ ID NO: 2502138 - RNA, 19 nt, Homo sapiens
  misc_RNA (1)...(19): siRNA sense strand
caaccuggaacgaguggaa

SEQ ID NO: 2502139 - RNA, 19 nt, Homo sapiens
  misc_RNA (1)...(19): siRNA sense strand
cagaggaggacaagaggga

SEQ ID NO: 2502140 - RNA, 19 nt, Homo sapiens
  misc_RNA (1)...(19): siRNA sense strand
ccgaagacaucgauccuga

SEQ ID NO: 2502141 - RNA, 19 nt, Homo sapiens
  misc_RNA (1)...(19): siRNA sense strand
cugccagcccagagaagaa

SEQ ID NO: 2502142 - RNA, 19 nt, Homo sapiens
  misc_RNA (1)...(19): siRNA sense strand
gggcagaguaugacccuga

SEQ ID NO: 2502143 - RNA, 19 nt, Homo sapiens
  misc_RNA (1)...(19): siRNA sense strand
acaucgauccugagaauga

SEQ ID NO: 2502144 - RNA, 19 nt, Homo sapiens
  misc_RNA (1)...(19): siRNA sense strand
gggagcaggaguacaagaa

SEQ ID NO: 2502145 - RNA, 19 nt, Homo sapiens
  misc_RNA (1)...(19): siRNA sense strand
aggaugaggaggagccaga

SEQ ID NO: 2502146 - RNA, 19 nt, Homo sapiens
  misc_RNA (1)...(19): siRNA sense strand
ugaacaucuucgugggcuu

SEQ ID NO: 2502147 - RNA, 19 nt, Homo sapiens
  misc_RNA (1)...(19): siRNA sense strand
acgagaagcugguggacuc

SEQ ID NO: 2502148 - RNA, 19 nt, Homo sapiens
  misc_RNA (1)...(19): siRNA sense strand
uggacaagaaccagcgaca

SEQ ID NO: 2502149 - RNA, 19 nt, Homo sapiens
  misc_RNA (1)...(19): siRNA sense strand
cgagguaaacccagcugaa

SEQ ID NO: 2502150 - RNA, 19 nt, Homo sapiens
  misc_RNA (1)...(19): siRNA sense strand
gguaaacccagcugaacau

SEQ ID NO: 2502151 - RNA, 19 nt, Homo sapiens
  misc_RNA (1)...(19): siRNA sense strand
cgacaugaccauagaggag

SEQ ID NO: 2502152 - RNA, 19 nt, Homo sapiens
  misc_RNA (1)...(19): siRNA sense strand
accuggaacgaguggaaua

SEQ ID NO: 2502153 - RNA, 19 nt, Homo sapiens
  misc_RNA (1)...(19): siRNA sense strand
acuggaacuccuugagcaa

SEQ ID NO: 2502154 - RNA, 19 nt, Homo sapiens
  misc_RNA (1)...(19): siRNA sense strand
aaacaagaguugguggaga

SEQ ID NO: 2502155 - RNA, 19 nt, Homo sapiens
  misc_RNA (1)...(19): siRNA sense strand
acaacaacuuucagaccuu

SEQ ID NO: 2502156 - RNA, 19 nt, Homo sapiens
  misc_RNA (1)...(19): siRNA sense strand
gcuccaacgccaacaucaa

SEQ ID NO: 2502157 - RNA, 19 nt, Homo sapiens
  misc_RNA (1)...(19): siRNA sense strand
gcucaagaucccaaguuca

SEQ ID NO: 2502158 - RNA, 19 nt, Homo sapiens
  misc_RNA (1)...(19): siRNA sense strand
aagagagggagaaggccaa

SEQ ID NO: 2502159 - RNA, 19 nt, Homo sapiens
  misc_RNA (1)...(19): siRNA sense strand
agguaaacccagcugaaca

SEQ ID NO: 2502160 - RNA, 19 nt, Homo sapiens
  misc_RNA (1)...(19): siRNA sense strand
aaacgcucucggagggaaa

SEQ ID NO: 2502161 - RNA, 19 nt, Homo sapiens
  misc_RNA (1)...(19): siRNA sense strand
ggucaaugaugccguagga

SEQ ID NO: 2502162 - RNA, 19 nt, Homo sapiens
  misc_RNA (1)...(19): siRNA sense strand
aaggcauggaugaggagaa

SEQ ID NO: 2502163 - RNA, 19 nt, Homo sapiens
  misc_RNA (1)...(19): siRNA sense strand
augcagacccggaggagca

SEQ ID NO: 2502164 - RNA, 19 nt, Homo sapiens
  misc_RNA (1)...(19): siRNA sense strand
uggccauugcuguggacaa

SEQ ID NO: 2502165 - RNA, 19 nt, Homo sapiens
  misc_RNA (1)...(19): siRNA sense strand
gagaagauugagcugaaau

SEQ ID NO: 2502166 - RNA, 19 nt, Homo sapiens
  misc_RNA (1)...(19): siRNA sense strand
cugaaugauaccacagaga

SEQ ID NO: 2502167 - RNA, 19 nt, Homo sapiens
  misc_RNA (1)...(19): siRNA sense strand
gaaugauaccacagagauc

SEQ ID NO: 2502168 - RNA, 19 nt, Homo sapiens
  misc_RNA (1)...(19): siRNA sense strand
uggacaaggccaugaagga

SEQ ID NO: 2502169 - RNA, 19 nt, Homo sapiens
  misc_RNA (1)...(19): siRNA sense strand
agaccuaugaagugaagau

SEQ ID NO: 2502170 - RNA, 19 nt, Homo sapiens
  misc_RNA (1)...(19): siRNA sense strand
aaugagaauacgaggaugu

SEQ ID NO: 2502171 - RNA, 19 nt, Homo sapiens
  misc_RNA (1)...(19): siRNA sense strand
guggaaggcaagagggaaa

SEQ ID NO: 2502172 - RNA, 19 nt, Homo sapiens
  misc_RNA (1)...(19): siRNA sense strand
aggaagaggacgaggacga

SEQ ID NO: 2502173 - RNA, 19 nt, Homo sapiens
  misc_RNA (1)...(19): siRNA sense strand
aggaggaggaggaggaaaa

SEQ ID NO: 2502174 - RNA, 19 nt, Homo sapiens
  misc_RNA (1)...(19): siRNA sense strand
gcgaggaggaagaggacga

SEQ ID NO: 2502175 - RNA, 19 nt, Homo sapiens
  misc_RNA (1)...(19): siRNA sense strand
uaaagaagaauguggguca

SEQ ID NO: 2502176 - RNA, 19 nt, Homo sapiens
  misc_RNA (1)...(19): siRNA sense strand
uuacaauugcacaaggaaa

SEQ ID NO: 2502177 - RNA, 19 nt, Homo sapiens
  misc_RNA (1)...(19): siRNA sense strand
aggaaguguccaauauaaa

SEQ ID NO: 2502178 - RNA, 19 nt, Homo sapiens
  misc_RNA (1)...(19): siRNA sense strand
augaagaguuaaaggaaac

SEQ ID NO: 2502179 - RNA, 19 nt, Homo sapiens
  misc_RNA (1)...(19): siRNA sense strand
gugaacuagugaagaggau

SEQ ID NO: 2502180 - RNA, 19 nt, Homo sapiens
  misc_RNA (1)...(19): siRNA sense strand
ggaauggcaaggaaggcua

SEQ ID NO: 2502181 - RNA, 19 nt, Homo sapiens
  misc_RNA (1)...(19): siRNA sense strand
gcaaggaaggcuaagcgaa

SEQ ID NO: 2502182 - RNA, 19 nt, Homo sapiens
  misc_RNA (1)...(19): siRNA sense strand
aggagagcgaggaggaaga

SEQ ID NO: 2502183 - RNA, 19 nt, Homo sapiens
  misc_RNA (1)...(19): siRNA sense strand
aggcaagagggaaaagaaa

SEQ ID NO: 2502184 - RNA, 19 nt, Homo sapiens
  misc_RNA (1)...(19): siRNA sense strand
ggcaagagggaaaagaaaa

SEQ ID NO: 2502185 - RNA, 19 nt, Homo sapiens
  misc_RNA (1)...(19): siRNA sense strand
aggaggaggaggaggagga

SEQ ID NO: 2502186 - RNA, 19 nt, Homo sapiens
  misc_RNA (1)...(19): siRNA sense strand
aaguagagagguugacaau

SEQ ID NO: 2502187 - RNA, 19 nt, Homo sapiens
  misc_RNA (1)...(19): siRNA sense strand
gagaggagagcgaggagga

SEQ ID NO: 2502188 - RNA, 19 nt, Homo sapiens
  misc_RNA (1)...(19): siRNA sense strand
acgaggaggaggaggagga

SEQ ID NO: 2502189 - RNA, 19 nt, Homo sapiens
  misc_RNA (1)...(19): siRNA sense strand
agauaaagaaagugaagag

SEQ ID NO: 2502190 - RNA, 19 nt, Homo sapiens
  misc_RNA (1)...(19): siRNA sense strand
agaaggaagaaauguugaa

SEQ ID NO: 2502191 - RNA, 19 nt, Homo sapiens
  misc_RNA (1)...(19): siRNA sense strand
ccgagaaagaacccgaaau

SEQ ID NO: 2502192 - RNA, 19 nt, Homo sapiens
  misc_RNA (1)...(19): siRNA sense strand
uaaagaaagugaagaggag

SEQ ID NO: 2502193 - RNA, 19 nt, Homo sapiens
  misc_RNA (1)...(19): siRNA sense strand
acgacgaggaggaggagga

SEQ ID NO: 2502194 - RNA, 19 nt, Homo sapiens
  misc_RNA (1)...(19): siRNA sense strand
gugaugaagaugaaaagaa

SEQ ID NO: 2502195 - RNA, 19 nt, Homo sapiens
  misc_RNA (1)...(19): siRNA sense strand
agaaagugagucugaggau

SEQ ID NO: 2502196 - RNA, 19 nt, Homo sapiens
  misc_RNA (1)...(19): siRNA sense strand
uuugugaaauugagaggau

SEQ ID NO: 2502197 - RNA, 19 nt, Homo sapiens
  misc_RNA (1)...(19): siRNA sense strand
ccaccaagaagaaucaaaa

SEQ ID NO: 2502198 - RNA, 19 nt, Homo sapiens
  misc_RNA (1)...(19): siRNA sense strand
auaaagaaagugaagagga

SEQ ID NO: 2502199 - RNA, 19 nt, Homo sapiens
  misc_RNA (1)...(19): siRNA sense strand
aagaagucacaaugaaaca

SEQ ID NO: 2502200 - RNA, 19 nt, Homo sapiens
  misc_RNA (1)...(19): siRNA sense strand
ccuuacagagagagccauu

SEQ ID NO: 2502201 - RNA, 19 nt, Homo sapiens
  misc_RNA (1)...(19): siRNA sense strand
caaggaaggcuaagcgaac

SEQ ID NO: 2502202 - RNA, 19 nt, Homo sapiens
  misc_RNA (1)...(19): siRNA sense strand
aagacagccaaaagagaaa

SEQ ID NO: 2502203 - RNA, 19 nt, Homo sapiens
  misc_RNA (1)...(19): siRNA sense strand
gcagauagcagcaccacca

SEQ ID NO: 2502204 - RNA, 19 nt, Homo sapiens
  misc_RNA (1)...(19): siRNA sense strand
cgaaaugcccggucccaga

SEQ ID NO: 2502205 - RNA, 19 nt, Homo sapiens
  misc_RNA (1)...(19): siRNA sense strand
uguccucauuaaagaagaa

SEQ ID NO: 2502206 - RNA, 19 nt, Homo sapiens
  misc_RNA (1)...(19): siRNA sense strand
acgaggacgacgaggagga

SEQ ID NO: 2502207 - RNA, 19 nt, Homo sapiens
  misc_RNA (1)...(19): siRNA sense strand
gguucuugauuuggagaga

SEQ ID NO: 2502208 - RNA, 19 nt, Homo sapiens
  misc_RNA (1)...(19): siRNA sense strand
aggacgacgaggaggagga

SEQ ID NO: 2502209 - RNA, 19 nt, Homo sapiens
  misc_RNA (1)...(19): siRNA sense strand
gaggaggaggaggaggaaa

SEQ ID NO: 2502210 - RNA, 19 nt, Homo sapiens
  misc_RNA (1)...(19): siRNA sense strand
gccauuuacaauugcacaa

SEQ ID NO: 2502211 - RNA, 19 nt, Homo sapiens
  misc_RNA (1)...(19): siRNA sense strand
gaaucaaaacaguuccaaa

SEQ ID NO: 2502212 - RNA, 19 nt, Homo sapiens
  misc_RNA (1)...(19): siRNA sense strand
ugaggauaguucagaugau

SEQ ID NO: 2502213 - RNA, 19 nt, Homo sapiens
  misc_RNA (1)...(19): siRNA sense strand
cuccaaaggcugagggaca

SEQ ID NO: 2502214 - RNA, 19 nt, Homo sapiens
  misc_RNA (1)...(19): siRNA sense strand
ugucagugcuccagugcca

SEQ ID NO: 2502215 - RNA, 19 nt, Homo sapiens
  misc_RNA (1)...(19): siRNA sense strand
cuccuuacggccugggaaa

SEQ ID NO: 2502216 - RNA, 19 nt, Homo sapiens
  misc_RNA (1)...(19): siRNA sense strand
ggccacuacaggagagcuu

SEQ ID NO: 2502217 - RNA, 19 nt, Homo sapiens
  misc_RNA (1)...(19): siRNA sense strand
cuucaaagauguagguuca

SEQ ID NO: 2502218 - RNA, 19 nt, Homo sapiens
  misc_RNA (1)...(19): siRNA sense strand
aggcaaaguugguagacuc

SEQ ID NO: 2502219 - RNA, 19 nt, Homo sapiens
  misc_RNA (1)...(19): siRNA sense strand
gaacagaaaccaccagcca

SEQ ID NO: 2502220 - RNA, 19 nt, Homo sapiens
  misc_RNA (1)...(19): siRNA sense strand
cagcaacuucaaagaugua

SEQ ID NO: 2502221 - RNA, 19 nt, Homo sapiens
  misc_RNA (1)...(19): siRNA sense strand
ucaaagauguagguucaaa

SEQ ID NO: 2502222 - RNA, 19 nt, Homo sapiens
  misc_RNA (1)...(19): siRNA sense strand
caaggaauuugcugggucu

SEQ ID NO: 2502223 - RNA, 19 nt, Homo sapiens
  misc_RNA (1)...(19): siRNA sense strand
aagaauaucugaagcgaca

SEQ ID NO: 2502224 - RNA, 19 nt, Homo sapiens
  misc_RNA (1)...(19): siRNA sense strand
aguaauagaugggaaguau

SEQ ID NO: 2502225 - RNA, 19 nt, Homo sapiens
  misc_RNA (1)...(19): siRNA sense strand
ggcuaaugacugaggcuuu

SEQ ID NO: 2502226 - RNA, 19 nt, Homo sapiens
  misc_RNA (1)...(19): siRNA sense strand
uugaaguaauagaugggaa

SEQ ID NO: 2502227 - RNA, 19 nt, Homo sapiens
  misc_RNA (1)...(19): siRNA sense strand
cuuucaagcccaaguacaa

SEQ ID NO: 2502228 - RNA, 19 nt, Homo sapiens
  misc_RNA (1)...(19): siRNA sense strand
uagaagaagcacugcccaa

SEQ ID NO: 2502229 - RNA, 19 nt, Homo sapiens
  misc_RNA (1)...(19): siRNA sense strand
ccauggacgaggagaaaau

SEQ ID NO: 2502230 - RNA, 19 nt, Homo sapiens
  misc_RNA (1)...(19): siRNA sense strand
auuccauggacgaggagaa

SEQ ID NO: 2502231 - RNA, 19 nt, Homo sapiens
  misc_RNA (1)...(19): siRNA sense strand
ucgucaaagaagaagaaaa

SEQ ID NO: 2502232 - RNA, 19 nt, Homo sapiens
  misc_RNA (1)...(19): siRNA sense strand
cgucaaagaagaagaaaac

SEQ ID NO: 2502233 - RNA, 19 nt, Homo sapiens
  misc_RNA (1)...(19): siRNA sense strand
agaagaaaacaaagguaga

SEQ ID NO: 2502234 - RNA, 19 nt, Homo sapiens
  misc_RNA (1)...(19): siRNA sense strand
aaguaauagaugggaagua

SEQ ID NO: 2502235 - RNA, 19 nt, Homo sapiens
  misc_RNA (1)...(19): siRNA sense strand
cccuauucagagaaggaaa

SEQ ID NO: 2502236 - RNA, 19 nt, Homo sapiens
  misc_RNA (1)...(19): siRNA sense strand
gguagaacauggaggaucg

SEQ ID NO: 2502237 - RNA, 19 nt, Homo sapiens
  misc_RNA (1)...(19): siRNA sense strand
ccagcgaggauuaggagga

SEQ ID NO: 2502238 - RNA, 19 nt, Homo sapiens
  misc_RNA (1)...(19): siRNA sense strand
ccuauucagagaaggaaaa

SEQ ID NO: 2502239 - RNA, 19 nt, Homo sapiens
  misc_RNA (1)...(19): siRNA sense strand
aaacaaagguagaacaugg

SEQ ID NO: 2502240 - RNA, 19 nt, Homo sapiens
  misc_RNA (1)...(19): siRNA sense strand
aaacuguggaggaguguca

SEQ ID NO: 2502241 - RNA, 19 nt, Homo sapiens
  misc_RNA (1)...(19): siRNA sense strand
cuguagauuccauggacga

SEQ ID NO: 2502242 - RNA, 19 nt, Homo sapiens
  misc_RNA (1)...(19): siRNA sense strand
aggaagacggcgagcgcua

SEQ ID NO: 2502243 - RNA, 19 nt, Homo sapiens
  misc_RNA (1)...(19): siRNA sense strand
aggaaaaguucgggaggaa

SEQ ID NO: 2502244 - RNA, 19 nt, Homo sapiens
  misc_RNA (1)...(19): siRNA sense strand
uggcacagagugaggagaa

SEQ ID NO: 2502245 - RNA, 19 nt, Homo sapiens
  misc_RNA (1)...(19): siRNA sense strand
ccgacagggugaaggugau

SEQ ID NO: 2502246 - RNA, 19 nt, Homo sapiens
  misc_RNA (1)...(19): siRNA sense strand
cagacgaaggcgaagguga

SEQ ID NO: 2502247 - RNA, 19 nt, Homo sapiens
  misc_RNA (1)...(19): siRNA sense strand
uggccugggagguggcuaa

SEQ ID NO: 2502248 - RNA, 19 nt, Homo sapiens
  misc_RNA (1)...(19): siRNA sense strand
agaacuucaacguggacaa

SEQ ID NO: 2502249 - RNA, 19 nt, Homo sapiens
  misc_RNA (1)...(19): siRNA sense strand
augaacaagaugcuggaua

SEQ ID NO: 2502250 - RNA, 19 nt, Homo sapiens
  misc_RNA (1)...(19): siRNA sense strand
cggccaacacggugaagga

SEQ ID NO: 2502251 - RNA, 19 nt, Homo sapiens
  misc_RNA (1)...(19): siRNA sense strand
gcugcuucauggaggaaca

SEQ ID NO: 2502252 - RNA, 19 nt, Homo sapiens
  misc_RNA (1)...(19): siRNA sense strand
agagugaggacgaggagga

SEQ ID NO: 2502253 - RNA, 19 nt, Homo sapiens
  misc_RNA (1)...(19): siRNA sense strand
augaauucgaccuggagaa

SEQ ID NO: 2502254 - RNA, 19 nt, Homo sapiens
  misc_RNA (1)...(19): siRNA sense strand
ccaucgaggcacagcacuu

SEQ ID NO: 2502255 - RNA, 19 nt, Homo sapiens
  misc_RNA (1)...(19): siRNA sense strand
aggacugggaggaugaauu

SEQ ID NO: 2502256 - RNA, 19 nt, Homo sapiens
  misc_RNA (1)...(19): siRNA sense strand
ucuacaacaaccuggagaa

SEQ ID NO: 2502257 - RNA, 19 nt, Homo sapiens
  misc_RNA (1)...(19): siRNA sense strand
gcgcaacauccgugcacca

SEQ ID NO: 2502258 - RNA, 19 nt, Homo sapiens
  misc_RNA (1)...(19): siRNA sense strand
uggaggacugggaggauga

SEQ ID NO: 2502259 - RNA, 19 nt, Homo sapiens
  misc_RNA (1)...(19): siRNA sense strand
acuaugaugaagagagcca

SEQ ID NO: 2502260 - RNA, 19 nt, Homo sapiens
  misc_RNA (1)...(19): siRNA sense strand
agugcacgguuaugggaau

SEQ ID NO: 2502261 - RNA, 19 nt, Homo sapiens
  misc_RNA (1)...(19): siRNA sense strand
ccaccaaucucuccggcuu

SEQ ID NO: 2502262 - RNA, 19 nt, Homo sapiens
  misc_RNA (1)...(19): siRNA sense strand
caacaagggugcugacguc

SEQ ID NO: 2502263 - RNA, 19 nt, Homo sapiens
  misc_RNA (1)...(19): siRNA sense strand
gcugaagguuggugggaca

SEQ ID NO: 2502264 - RNA, 19 nt, Homo sapiens
  misc_RNA (1)...(19): siRNA sense strand
cugaagauguugauggaga

SEQ ID NO: 2502265 - RNA, 19 nt, Homo sapiens
  misc_RNA (1)...(19): siRNA sense strand
ucacaguaaaggauggaaa

SEQ ID NO: 2502266 - RNA, 19 nt, Homo sapiens
  misc_RNA (1)...(19): siRNA sense strand
gagacaaagaaauuggcaa

SEQ ID NO: 2502267 - RNA, 19 nt, Homo sapiens
  misc_RNA (1)...(19): siRNA sense strand
cuuaaugcuucaaggugua

SEQ ID NO: 2502268 - RNA, 19 nt, Homo sapiens
  misc_RNA (1)...(19): siRNA sense strand
cugcaaacggagacaaaga

SEQ ID NO: 2502269 - RNA, 19 nt, Homo sapiens
  misc_RNA (1)...(19): siRNA sense strand
aguuguagucacagaaauu

SEQ ID NO: 2502270 - RNA, 19 nt, Homo sapiens
  misc_RNA (1)...(19): siRNA sense strand
aagaaaucauugagcaguu

SEQ ID NO: 2502271 - RNA, 19 nt, Homo sapiens
  misc_RNA (1)...(19): siRNA sense strand
agggaagaacagugauuau

SEQ ID NO: 2502272 - RNA, 19 nt, Homo sapiens
  misc_RNA (1)...(19): siRNA sense strand
gaaugaacggcuugcaaaa

SEQ ID NO: 2502273 - RNA, 19 nt, Homo sapiens
  misc_RNA (1)...(19): siRNA sense strand
cuguaauugcugaacuuaa

SEQ ID NO: 2502274 - RNA, 19 nt, Homo sapiens
  misc_RNA (1)...(19): siRNA sense strand
aagugauguugaagugaau

SEQ ID NO: 2502275 - RNA, 19 nt, Homo sapiens
  misc_RNA (1)...(19): siRNA sense strand
uugugaauaugguggaaaa

SEQ ID NO: 2502276 - RNA, 19 nt, Homo sapiens
  misc_RNA (1)...(19): siRNA sense strand
cagcuuaaagauauggcua

SEQ ID NO: 2502277 - RNA, 19 nt, Homo sapiens
  misc_RNA (1)...(19): siRNA sense strand
uguuuggagaagagggauu

SEQ ID NO: 2502278 - RNA, 19 nt, Homo sapiens
  misc_RNA (1)...(19): siRNA sense strand
uguucaagauguugccaau

SEQ ID NO: 2502279 - RNA, 19 nt, Homo sapiens
  misc_RNA (1)...(19): siRNA sense strand
gguuuggugacaauagaaa

SEQ ID NO: 2502280 - RNA, 19 nt, Homo sapiens
  misc_RNA (1)...(19): siRNA sense strand
aggaaaaguuggagagguc

SEQ ID NO: 2502281 - RNA, 19 nt, Homo sapiens
  misc_RNA (1)...(19): siRNA sense strand
agaaauuauugaaggcaug

SEQ ID NO: 2502282 - RNA, 19 nt, Homo sapiens
  misc_RNA (1)...(19): siRNA sense strand
gguugugagaacugcuuua

SEQ ID NO: 2502283 - RNA, 19 nt, Homo sapiens
  misc_RNA (1)...(19): siRNA sense strand
cagaaguuguagucacaga

SEQ ID NO: 2502284 - RNA, 19 nt, Homo sapiens
  misc_RNA (1)...(19): siRNA sense strand
caaacggagacaaagaaau

SEQ ID NO: 2502285 - RNA, 19 nt, Homo sapiens
  misc_RNA (1)...(19): siRNA sense strand
aagaaccagcuuaaagaua

SEQ ID NO: 2502286 - RNA, 19 nt, Homo sapiens
  misc_RNA (1)...(19): siRNA sense strand
cuggagauuuugugaauau

SEQ ID NO: 2502287 - RNA, 19 nt, Homo sapiens
  misc_RNA (1)...(19): siRNA sense strand
gugaauuccaggaugccua

SEQ ID NO: 2502288 - RNA, 19 nt, Homo sapiens
  misc_RNA (1)...(19): siRNA sense strand
agauauggcuauugcuacu

SEQ ID NO: 2502289 - RNA, 19 nt, Homo sapiens
  misc_RNA (1)...(19): siRNA sense strand
uguugaaggaucuuugaua

SEQ ID NO: 2502290 - RNA, 19 nt, Homo sapiens
  misc_RNA (1)...(19): siRNA sense strand
gaacagugauuauugagca

SEQ ID NO: 2502291 - RNA, 19 nt, Homo sapiens
  misc_RNA (1)...(19): siRNA sense strand
cagcuaaugaagaucaaaa

SEQ ID NO: 2502292 - RNA, 19 nt, Homo sapiens
  misc_RNA (1)...(19): siRNA sense strand
cagcagaaguuguagucac

SEQ ID NO: 2502293 - RNA, 19 nt, Homo sapiens
  misc_RNA (1)...(19): siRNA sense strand
uguaaaauuuggugcagau

SEQ ID NO: 2502294 - RNA, 19 nt, Homo sapiens
  misc_RNA (1)...(19): siRNA sense strand
aaagggaagaacagugauu

SEQ ID NO: 2502295 - RNA, 19 nt, Homo sapiens
  misc_RNA (1)...(19): siRNA sense strand
ggcuuaugccaaagaugua

SEQ ID NO: 2502296 - RNA, 19 nt, Homo sapiens
  misc_RNA (1)...(19): siRNA sense strand
uguaccugcucuugaaauu

SEQ ID NO: 2502297 - RNA, 19 nt, Homo sapiens
  misc_RNA (1)...(19): siRNA sense strand
gugaaugaaaagaaagaca

SEQ ID NO: 2502298 - RNA, 19 nt, Homo sapiens
  misc_RNA (1)...(19): siRNA sense strand
gugauguugaagugaauga

SEQ ID NO: 2502299 - RNA, 19 nt, Homo sapiens
  misc_RNA (1)...(19): siRNA sense strand
agaaagacagaguuacaga

SEQ ID NO: 2502300 - RNA, 19 nt, Homo sapiens
  misc_RNA (1)...(19): siRNA sense strand
augcaaaguuccucagaag

SEQ ID NO: 2502301 - RNA, 19 nt, Homo sapiens
  misc_RNA (1)...(19): siRNA sense strand
ugggacaagugauguugaa

SEQ ID NO: 2502302 - RNA, 19 nt, Homo sapiens
  misc_RNA (1)...(19): siRNA sense strand
agcagaaguuguagucaca

SEQ ID NO: 2502303 - RNA, 19 nt, Homo sapiens
  misc_RNA (1)...(19): siRNA sense strand
cuacaagagcugcuguuga

SEQ ID NO: 2502304 - RNA, 19 nt, Homo sapiens
  misc_RNA (1)...(19): siRNA sense strand
agucacagaaauuccuaaa

SEQ ID NO: 2502305 - RNA, 19 nt, Homo sapiens
  misc_RNA (1)...(19): siRNA sense strand
aagagaaggacccuggaau

SEQ ID NO: 2502306 - RNA, 19 nt, Homo sapiens
  misc_RNA (1)...(19): siRNA sense strand
aaacauuggagcuaaacuu

SEQ ID NO: 2502307 - RNA, 19 nt, Homo sapiens
  misc_RNA (1)...(19): siRNA sense strand
aauagaaagaaccagcuua

SEQ ID NO: 2502308 - RNA, 19 nt, Homo sapiens
  misc_RNA (1)...(19): siRNA sense strand
ugcagaugcccgagccuua

SEQ ID NO: 2502309 - RNA, 19 nt, Homo sapiens
  misc_RNA (1)...(19): siRNA sense strand
gcugaagguuggugggaca

SEQ ID NO: 2502310 - RNA, 19 nt, Homo sapiens
  misc_RNA (1)...(19): siRNA sense strand
cugaagauguugauggaga

SEQ ID NO: 2502311 - RNA, 19 nt, Homo sapiens
  misc_RNA (1)...(19): siRNA sense strand
ucacaguaaaggauggaaa

SEQ ID NO: 2502312 - RNA, 19 nt, Homo sapiens
  misc_RNA (1)...(19): siRNA sense strand
gagacaaagaaauuggcaa

SEQ ID NO: 2502313 - RNA, 19 nt, Homo sapiens
  misc_RNA (1)...(19): siRNA sense strand
cuuaaugcuucaaggugua

SEQ ID NO: 2502314 - RNA, 19 nt, Homo sapiens
  misc_RNA (1)...(19): siRNA sense strand
cugcaaacggagacaaaga

SEQ ID NO: 2502315 - RNA, 19 nt, Homo sapiens
  misc_RNA (1)...(19): siRNA sense strand
aguuguagucacagaaauu

SEQ ID NO: 2502316 - RNA, 19 nt, Homo sapiens
  misc_RNA (1)...(19): siRNA sense strand
aagaaaucauugagcaguu

SEQ ID NO: 2502317 - RNA, 19 nt, Homo sapiens
  misc_RNA (1)...(19): siRNA sense strand
agggaagaacagugauuau

SEQ ID NO: 2502318 - RNA, 19 nt, Homo sapiens
  misc_RNA (1)...(19): siRNA sense strand
gaaugaacggcuugcaaaa

SEQ ID NO: 2502319 - RNA, 19 nt, Homo sapiens
  misc_RNA (1)...(19): siRNA sense strand
cuguaauugcugaacuuaa

SEQ ID NO: 2502320 - RNA, 19 nt, Homo sapiens
  misc_RNA (1)...(19): siRNA sense strand
aagugauguugaagugaau

SEQ ID NO: 2502321 - RNA, 19 nt, Homo sapiens
  misc_RNA (1)...(19): siRNA sense strand
uugugaauaugguggaaaa

SEQ ID NO: 2502322 - RNA, 19 nt, Homo sapiens
  misc_RNA (1)...(19): siRNA sense strand
cagcuuaaagauauggcua

SEQ ID NO: 2502323 - RNA, 19 nt, Homo sapiens
  misc_RNA (1)...(19): siRNA sense strand
uguuuggagaagagggauu

SEQ ID NO: 2502324 - RNA, 19 nt, Homo sapiens
  misc_RNA (1)...(19): siRNA sense strand
uguucaagauguugccaau

SEQ ID NO: 2502325 - RNA, 19 nt, Homo sapiens
  misc_RNA (1)...(19): siRNA sense strand
gguuuggugacaauagaaa

SEQ ID NO: 2502326 - RNA, 19 nt, Homo sapiens
  misc_RNA (1)...(19): siRNA sense strand
aggaaaaguuggagagguc

SEQ ID NO: 2502327 - RNA, 19 nt, Homo sapiens
  misc_RNA (1)...(19): siRNA sense strand
agaaauuauugaaggcaug

SEQ ID NO: 2502328 - RNA, 19 nt, Homo sapiens
  misc_RNA (1)...(19): siRNA sense strand
gguugugagaacugcuuua

SEQ ID NO: 2502329 - RNA, 19 nt, Homo sapiens
  misc_RNA (1)...(19): siRNA sense strand
cagaaguuguagucacaga

SEQ ID NO: 2502330 - RNA, 19 nt, Homo sapiens
  misc_RNA (1)...(19): siRNA sense strand
caaacggagacaaagaaau

SEQ ID NO: 2502331 - RNA, 19 nt, Homo sapiens
  misc_RNA (1)...(19): siRNA sense strand
aagaaccagcuuaaagaua

SEQ ID NO: 2502332 - RNA, 19 nt, Homo sapiens
  misc_RNA (1)...(19): siRNA sense strand
cuggagauuuugugaauau

SEQ ID NO: 2502333 - RNA, 19 nt, Homo sapiens
  misc_RNA (1)...(19): siRNA sense strand
gugaauuccaggaugccua

SEQ ID NO: 2502334 - RNA, 19 nt, Homo sapiens
  misc_RNA (1)...(19): siRNA sense strand
agauauggcuauugcuacu

SEQ ID NO: 2502335 - RNA, 19 nt, Homo sapiens
  misc_RNA (1)...(19): siRNA sense strand
uguugaaggaucuuugaua

SEQ ID NO: 2502336 - RNA, 19 nt, Homo sapiens
  misc_RNA (1)...(19): siRNA sense strand
gaacagugauuauugagca

SEQ ID NO: 2502337 - RNA, 19 nt, Homo sapiens
  misc_RNA (1)...(19): siRNA sense strand
cagcuaaugaagaucaaaa

SEQ ID NO: 2502338 - RNA, 19 nt, Homo sapiens
  misc_RNA (1)...(19): siRNA sense strand
cagcagaaguuguagucac

SEQ ID NO: 2502339 - RNA, 19 nt, Homo sapiens
  misc_RNA (1)...(19): siRNA sense strand
uguaaaauuuggugcagau

SEQ ID NO: 2502340 - RNA, 19 nt, Homo sapiens
  misc_RNA (1)...(19): siRNA sense strand
aaagggaagaacagugauu

SEQ ID NO: 2502341 - RNA, 19 nt, Homo sapiens
  misc_RNA (1)...(19): siRNA sense strand
ggcuuaugccaaagaugua

SEQ ID NO: 2502342 - RNA, 19 nt, Homo sapiens
  misc_RNA (1)...(19): siRNA sense strand
uguaccugcucuugaaauu

SEQ ID NO: 2502343 - RNA, 19 nt, Homo sapiens
  misc_RNA (1)...(19): siRNA sense strand
gugaaugaaaagaaagaca

SEQ ID NO: 2502344 - RNA, 19 nt, Homo sapiens
  misc_RNA (1)...(19): siRNA sense strand
gugauguugaagugaauga

SEQ ID NO: 2502345 - RNA, 19 nt, Homo sapiens
  misc_RNA (1)...(19): siRNA sense strand
agaaagacagaguuacaga

SEQ ID NO: 2502346 - RNA, 19 nt, Homo sapiens
  misc_RNA (1)...(19): siRNA sense strand
augcaaaguuccucagaag

SEQ ID NO: 2502347 - RNA, 19 nt, Homo sapiens
  misc_RNA (1)...(19): siRNA sense strand
ugggacaagugauguugaa

SEQ ID NO: 2502348 - RNA, 19 nt, Homo sapiens
  misc_RNA (1)...(19): siRNA sense strand
agcagaaguuguagucaca

SEQ ID NO: 2502349 - RNA, 19 nt, Homo sapiens
  misc_RNA (1)...(19): siRNA sense strand
cuacaagagcugcuguuga

SEQ ID NO: 2502350 - RNA, 19 nt, Homo sapiens
  misc_RNA (1)...(19): siRNA sense strand
agucacagaaauuccuaaa

SEQ ID NO: 2502351 - RNA, 19 nt, Homo sapiens
  misc_RNA (1)...(19): siRNA sense strand
aagagaaggacccuggaau

SEQ ID NO: 2502352 - RNA, 19 nt, Homo sapiens
  misc_RNA (1)...(19): siRNA sense strand
aaacauuggagcuaaacuu

SEQ ID NO: 2502353 - RNA, 19 nt, Homo sapiens
  misc_RNA (1)...(19): siRNA sense strand
aauagaaagaaccagcuua

SEQ ID NO: 2502354 - RNA, 19 nt, Homo sapiens
  misc_RNA (1)...(19): siRNA sense strand
ugcagaugcccgagccuua

SEQ ID NO: 2502355 - RNA, 19 nt, Homo sapiens
  misc_RNA (1)...(19): siRNA sense strand
aagaaguacaacugagaaa

SEQ ID NO: 2502356 - RNA, 19 nt, Homo sapiens
  misc_RNA (1)...(19): siRNA sense strand
caaaggaacuggaggcacu

SEQ ID NO: 2502357 - RNA, 19 nt, Homo sapiens
  misc_RNA (1)...(19): siRNA sense strand
auggaaaacuccuggacaa

SEQ ID NO: 2502358 - RNA, 19 nt, Homo sapiens
  misc_RNA (1)...(19): siRNA sense strand
uggccagcuucgagaaaga

SEQ ID NO: 2502359 - RNA, 19 nt, Homo sapiens
  misc_RNA (1)...(19): siRNA sense strand
ggaaauagcuucuugcuug

SEQ ID NO: 2502360 - RNA, 19 nt, Homo sapiens
  misc_RNA (1)...(19): siRNA sense strand
cugccaaauccacaggaaa

SEQ ID NO: 2502361 - RNA, 19 nt, Homo sapiens
  misc_RNA (1)...(19): siRNA sense strand
cuacuguauucaaggcaau

SEQ ID NO: 2502362 - RNA, 19 nt, Homo sapiens
  misc_RNA (1)...(19): siRNA sense strand
ugccaaauccacaggaaaa

SEQ ID NO: 2502363 - RNA, 19 nt, Homo sapiens
  misc_RNA (1)...(19): siRNA sense strand
uuggcaaacuggaagaaaa

SEQ ID NO: 2502364 - RNA, 19 nt, Homo sapiens
  misc_RNA (1)...(19): siRNA sense strand
cagccaaaggagaauaaga

SEQ ID NO: 2502365 - RNA, 19 nt, Homo sapiens
  misc_RNA (1)...(19): siRNA sense strand
uauucaaggcaaugcaaau

SEQ ID NO: 2502366 - RNA, 19 nt, Homo sapiens
  misc_RNA (1)...(19): siRNA sense strand
uugaugaagaagugggcuu

SEQ ID NO: 2502367 - RNA, 19 nt, Homo sapiens
  misc_RNA (1)...(19): siRNA sense strand
ccuacuguauucaaggcaa

SEQ ID NO: 2502368 - RNA, 19 nt, Homo sapiens
  misc_RNA (1)...(19): siRNA sense strand
aggcacugauuuaaugaau

SEQ ID NO: 2502369 - RNA, 19 nt, Homo sapiens
  misc_RNA (1)...(19): siRNA sense strand
ucgagaaagaguugagaag

SEQ ID NO: 2502370 - RNA, 19 nt, Homo sapiens
  misc_RNA (1)...(19): siRNA sense strand
guaugaaggguucugggaa

SEQ ID NO: 2502371 - RNA, 19 nt, Homo sapiens
  misc_RNA (1)...(19): siRNA sense strand
gcuucugcaaucaaaguaa

SEQ ID NO: 2502372 - RNA, 19 nt, Homo sapiens
  misc_RNA (1)...(19): siRNA sense strand
cuggauguucauugcuaaa

SEQ ID NO: 2502373 - RNA, 19 nt, Homo sapiens
  misc_RNA (1)...(19): siRNA sense strand
uggcauauguguggggcaa

SEQ ID NO: 2502374 - RNA, 19 nt, Homo sapiens
  misc_RNA (1)...(19): siRNA sense strand
ucucucuauugguggaaau

SEQ ID NO: 2502375 - RNA, 19 nt, Homo sapiens
  misc_RNA (1)...(19): siRNA sense strand
cucacaaagaaaaggaaaa

SEQ ID NO: 2502376 - RNA, 19 nt, Homo sapiens
  misc_RNA (1)...(19): siRNA sense strand
ggcaacagcugacggggaa

SEQ ID NO: 2502377 - RNA, 19 nt, Homo sapiens
  misc_RNA (1)...(19): siRNA sense strand
cggugaaagccacgcuaaa

SEQ ID NO: 2502378 - RNA, 19 nt, Homo sapiens
  misc_RNA (1)...(19): siRNA sense strand
cgcuaaacccuguguggaa

SEQ ID NO: 2502379 - RNA, 19 nt, Homo sapiens
  misc_RNA (1)...(19): siRNA sense strand
cagaagacccgaacgguga

SEQ ID NO: 2502380 - RNA, 19 nt, Homo sapiens
  misc_RNA (1)...(19): siRNA sense strand
acauucaacagcugggcaa

SEQ ID NO: 2502381 - RNA, 19 nt, Homo sapiens
  misc_RNA (1)...(19): siRNA sense strand
ccacagcagaugagaucca

SEQ ID NO: 2502382 - RNA, 19 nt, Homo sapiens
  misc_RNA (1)...(19): siRNA sense strand
ggaaggugaugcuggccga

SEQ ID NO: 2502383 - RNA, 19 nt, Homo sapiens
  misc_RNA (1)...(19): siRNA sense strand
cugaugagcucuacgccau

SEQ ID NO: 2502384 - RNA, 19 nt, Homo sapiens
  misc_RNA (1)...(19): siRNA sense strand
aggccgauuuccagggcuu

SEQ ID NO: 2502385 - RNA, 19 nt, Homo sapiens
  misc_RNA (1)...(19): siRNA sense strand
augugaaacugaagcucau

SEQ ID NO: 2502386 - RNA, 19 nt, Homo sapiens
  misc_RNA (1)...(19): siRNA sense strand
ccuaccagcccuaugggaa

SEQ ID NO: 2502387 - RNA, 19 nt, Homo sapiens
  misc_RNA (1)...(19): siRNA sense strand
ugaccaagcacccagggaa

SEQ ID NO: 2502388 - RNA, 19 nt, Homo sapiens
  misc_RNA (1)...(19): siRNA sense strand
ugaaccaggaggagggcga

SEQ ID NO: 2502389 - RNA, 19 nt, Homo sapiens
  misc_RNA (1)...(19): siRNA sense strand
gcggcgagaacuuugacaa

SEQ ID NO: 2502390 - RNA, 19 nt, Homo sapiens
  misc_RNA (1)...(19): siRNA sense strand
gggaacugcuagaccggua

SEQ ID NO: 2502391 - RNA, 19 nt, Homo sapiens
  misc_RNA (1)...(19): siRNA sense strand
ggacagaggaggaggaugc

SEQ ID NO: 2502392 - RNA, 19 nt, Homo sapiens
  misc_RNA (1)...(19): siRNA sense strand
gcugauuguggaugggcaa

SEQ ID NO: 2502393 - RNA, 19 nt, Homo sapiens
  misc_RNA (1)...(19): siRNA sense strand
ugguagacaucgaugacau

SEQ ID NO: 2502394 - RNA, 19 nt, Homo sapiens
  misc_RNA (1)...(19): siRNA sense strand
augacaucuuugugggcaa

SEQ ID NO: 2502395 - RNA, 19 nt, Homo sapiens
  misc_RNA (1)...(19): siRNA sense strand
gggcaagagcugcguacca

SEQ ID NO: 2502396 - RNA, 19 nt, Homo sapiens
  misc_RNA (1)...(19): siRNA sense strand
ugaccagcacugaggagua

SEQ ID NO: 2502397 - RNA, 19 nt, Homo sapiens
  misc_RNA (1)...(19): siRNA sense strand
acuugaaggugguaagacu

SEQ ID NO: 2502398 - RNA, 19 nt, Homo sapiens
  misc_RNA (1)...(19): siRNA sense strand
ggcaggaaauuguggccau

SEQ ID NO: 2502399 - RNA, 19 nt, Homo sapiens
  misc_RNA (1)...(19): siRNA sense strand
ccaccagcccuaaggccaa

SEQ ID NO: 2502400 - RNA, 19 nt, Homo sapiens
  misc_RNA (1)...(19): siRNA sense strand
guucuaucauacugggaca

SEQ ID NO: 2502401 - RNA, 19 nt, Homo sapiens
  misc_RNA (1)...(19): siRNA sense strand
cauccgagguggagagcuc

SEQ ID NO: 2502402 - RNA, 19 nt, Homo sapiens
  misc_RNA (1)...(19): siRNA sense strand
cagccucaauggagagcau

SEQ ID NO: 2502403 - RNA, 19 nt, Homo sapiens
  misc_RNA (1)...(19): siRNA sense strand
uugaugaugauaagggauu

SEQ ID NO: 2502404 - RNA, 19 nt, Homo sapiens
  misc_RNA (1)...(19): siRNA sense strand
gauaucugguccaaggaga

SEQ ID NO: 2502405 - RNA, 19 nt, Homo sapiens
  misc_RNA (1)...(19): siRNA sense strand
ggagaaaaccugugaucgu

SEQ ID NO: 2502406 - RNA, 19 nt, Homo sapiens
  misc_RNA (1)...(19): siRNA sense strand
ccagcacauuugaggagau

SEQ ID NO: 2502407 - RNA, 19 nt, Homo sapiens
  misc_RNA (1)...(19): siRNA sense strand
uggaguauggugugggcau

SEQ ID NO: 2502408 - RNA, 19 nt, Homo sapiens
  misc_RNA (1)...(19): siRNA sense strand
gaacugaacccgugguccu

SEQ ID NO: 2502409 - RNA, 19 nt, Homo sapiens
  misc_RNA (1)...(19): siRNA sense strand
gccuggaccuugaccgcua

SEQ ID NO: 2502410 - RNA, 19 nt, Homo sapiens
  misc_RNA (1)...(19): siRNA sense strand
gcucuaugaggccuggaaa

SEQ ID NO: 2502411 - RNA, 19 nt, Homo sapiens
  misc_RNA (1)...(19): siRNA sense strand
ccagcagccucaauggaga

SEQ ID NO: 2502412 - RNA, 19 nt, Homo sapiens
  misc_RNA (1)...(19): siRNA sense strand
ggagcaaaggccggaggua

SEQ ID NO: 2502413 - RNA, 19 nt, Homo sapiens
  misc_RNA (1)...(19): siRNA sense strand
cgggaagaacugcagcauu

SEQ ID NO: 2502414 - RNA, 19 nt, Homo sapiens
  misc_RNA (1)...(19): siRNA sense strand
ccucaagguaccagggaau

SEQ ID NO: 2502415 - RNA, 19 nt, Homo sapiens
  misc_RNA (1)...(19): siRNA sense strand
cgacagagcaguggggaaa

SEQ ID NO: 2502416 - RNA, 19 nt, Homo sapiens
  misc_RNA (1)...(19): siRNA sense strand
ggaagaacgucgaccgagu

SEQ ID NO: 2502417 - RNA, 19 nt, Homo sapiens
  misc_RNA (1)...(19): siRNA sense strand
aggaaaaggcgguggcaga

SEQ ID NO: 2502418 - RNA, 19 nt, Homo sapiens
  misc_RNA (1)...(19): siRNA sense strand
uggcaguugaagagaggaa

SEQ ID NO: 2502419 - RNA, 19 nt, Homo sapiens
  misc_RNA (1)...(19): siRNA sense strand
cccuacaaccguaaggaaa

SEQ ID NO: 2502420 - RNA, 19 nt, Homo sapiens
  misc_RNA (1)...(19): siRNA sense strand
ggcagauacaagagaucaa

SEQ ID NO: 2502421 - RNA, 19 nt, Homo sapiens
  misc_RNA (1)...(19): siRNA sense strand
ggguuaaggcccaguacga

SEQ ID NO: 2502422 - RNA, 19 nt, Homo sapiens
  misc_RNA (1)...(19): siRNA sense strand
ccgagauggccuacaaaga

SEQ ID NO: 2502423 - RNA, 19 nt, Homo sapiens
  misc_RNA (1)...(19): siRNA sense strand
uucgagaacuccagggaau

SEQ ID NO: 2502424 - RNA, 19 nt, Homo sapiens
  misc_RNA (1)...(19): siRNA sense strand
ucaagauuaucgaaggaga

SEQ ID NO: 2502425 - RNA, 19 nt, Homo sapiens
  misc_RNA (1)...(19): siRNA sense strand
cggaggaaaagaagaguuu

SEQ ID NO: 2502426 - RNA, 19 nt, Homo sapiens
  misc_RNA (1)...(19): siRNA sense strand
aaauaugcaggcagggcua

SEQ ID NO: 2502427 - RNA, 19 nt, Homo sapiens
  misc_RNA (1)...(19): siRNA sense strand
ccgacagagcaguggggaa

SEQ ID NO: 2502428 - RNA, 19 nt, Homo sapiens
  misc_RNA (1)...(19): siRNA sense strand
gauuaucgaaggagaacca

SEQ ID NO: 2502429 - RNA, 19 nt, Homo sapiens
  misc_RNA (1)...(19): siRNA sense strand
guaauaagaagaaugcuga

SEQ ID NO: 2502430 - RNA, 19 nt, Homo sapiens
  misc_RNA (1)...(19): siRNA sense strand
aaucagaagcuacaggaca

SEQ ID NO: 2502431 - RNA, 19 nt, Homo sapiens
  misc_RNA (1)...(19): siRNA sense strand
cugaugagaaggugcuaga

SEQ ID NO: 2502432 - RNA, 19 nt, Homo sapiens
  misc_RNA (1)...(19): siRNA sense strand
aaagaacccaagaaggcaa

SEQ ID NO: 2502433 - RNA, 19 nt, Homo sapiens
  misc_RNA (1)...(19): siRNA sense strand
acaaagacuuccugcucca

SEQ ID NO: 2502434 - RNA, 19 nt, Homo sapiens
  misc_RNA (1)...(19): siRNA sense strand
ggaugauuccaauaguaau

SEQ ID NO: 2502435 - RNA, 19 nt, Homo sapiens
  misc_RNA (1)...(19): siRNA sense strand
gauugagaacaaagccauu

SEQ ID NO: 2502436 - RNA, 19 nt, Homo sapiens
  misc_RNA (1)...(19): siRNA sense strand
agaccaaagaacccaagaa

SEQ ID NO: 2502437 - RNA, 19 nt, Homo sapiens
  misc_RNA (1)...(19): siRNA sense strand
ggaacaagguggaagcucc

SEQ ID NO: 2502438 - RNA, 19 nt, Homo sapiens
  misc_RNA (1)...(19): siRNA sense strand
acaaaguaacugugggaga

SEQ ID NO: 2502439 - RNA, 19 nt, Homo sapiens
  misc_RNA (1)...(19): siRNA sense strand
gcaugaaucuauuggacca

SEQ ID NO: 2502440 - RNA, 19 nt, Homo sapiens
  misc_RNA (1)...(19): siRNA sense strand
gcaagaaguggguucggaa

SEQ ID NO: 2502441 - RNA, 19 nt, Homo sapiens
  misc_RNA (1)...(19): siRNA sense strand
guacaaaguaacuguggga

SEQ ID NO: 2502442 - RNA, 19 nt, Homo sapiens
  misc_RNA (1)...(19): siRNA sense strand
cgcucaaaggcauggacaa

SEQ ID NO: 2502443 - RNA, 19 nt, Homo sapiens
  misc_RNA (1)...(19): siRNA sense strand
acgaagauaucuaugagga

SEQ ID NO: 2502444 - RNA, 19 nt, Homo sapiens
  misc_RNA (1)...(19): siRNA sense strand
aggaggagaaacacaggaa

SEQ ID NO: 2502445 - RNA, 19 nt, Homo sapiens
  misc_RNA (1)...(19): siRNA sense strand
augucaaguacgaagauau

SEQ ID NO: 2502446 - RNA, 19 nt, Homo sapiens
  misc_RNA (1)...(19): siRNA sense strand
aagaauaugcuguuggcca

SEQ ID NO: 2502447 - RNA, 19 nt, Homo sapiens
  misc_RNA (1)...(19): siRNA sense strand
cuggcgacaaggaggagaa

SEQ ID NO: 2502448 - RNA, 19 nt, Homo sapiens
  misc_RNA (1)...(19): siRNA sense strand
guguaaggaaugugggaaa

SEQ ID NO: 2502449 - RNA, 19 nt, Homo sapiens
  misc_RNA (1)...(19): siRNA sense strand
guguaaggagugugagaaa

SEQ ID NO: 2502450 - RNA, 19 nt, Homo sapiens
  misc_RNA (1)...(19): siRNA sense strand
aauucauacuggugagaaa

SEQ ID NO: 2502451 - RNA, 19 nt, Homo sapiens
  misc_RNA (1)...(19): siRNA sense strand
aauucauacuggugagaaa

SEQ ID NO: 2502452 - RNA, 19 nt, Homo sapiens
  misc_RNA (1)...(19): siRNA sense strand
aauucauacuggugagaaa

SEQ ID NO: 2502453 - RNA, 19 nt, Homo sapiens
  misc_RNA (1)...(19): siRNA sense strand
aauucauacuggugagaaa

SEQ ID NO: 2502454 - RNA, 19 nt, Homo sapiens
  misc_RNA (1)...(19): siRNA sense strand
aaugcauacuggagagaaa

SEQ ID NO: 2502455 - RNA, 19 nt, Homo sapiens
  misc_RNA (1)...(19): siRNA sense strand
ccuuaugaaugcaaagaau

SEQ ID NO: 2502456 - RNA, 19 nt, Homo sapiens
  misc_RNA (1)...(19): siRNA sense strand
aauucauaccggugagaaa

SEQ ID NO: 2502457 - RNA, 19 nt, Homo sapiens
  misc_RNA (1)...(19): siRNA sense strand
aauucauacaggugagaaa

SEQ ID NO: 2502458 - RNA, 19 nt, Homo sapiens
  misc_RNA (1)...(19): siRNA sense strand
auucagaguuucagcaaca

SEQ ID NO: 2502459 - RNA, 19 nt, Homo sapiens
  misc_RNA (1)...(19): siRNA sense strand
cccuaugaguguaaggaau

SEQ ID NO: 2502460 - RNA, 19 nt, Homo sapiens
  misc_RNA (1)...(19): siRNA sense strand
cuuuagaagugguucaaaa

SEQ ID NO: 2502461 - RNA, 19 nt, Homo sapiens
  misc_RNA (1)...(19): siRNA sense strand
uuucagaggugauugggaa

SEQ ID NO: 2502462 - RNA, 19 nt, Homo sapiens
  misc_RNA (1)...(19): siRNA sense strand
cccuaugaauguaaagaau

SEQ ID NO: 2502463 - RNA, 19 nt, Homo sapiens
  misc_RNA (1)...(19): siRNA sense strand
gaguguaaggagugugaga

SEQ ID NO: 2502464 - RNA, 19 nt, Homo sapiens
  misc_RNA (1)...(19): siRNA sense strand
cccuaugaauguaaggaau

SEQ ID NO: 2502465 - RNA, 19 nt, Homo sapiens
  misc_RNA (1)...(19): siRNA sense strand
guauccagcaucagagaau

SEQ ID NO: 2502466 - RNA, 19 nt, Homo sapiens
  misc_RNA (1)...(19): siRNA sense strand
aggaaugugggaaggauuu

SEQ ID NO: 2502467 - RNA, 19 nt, Homo sapiens
  misc_RNA (1)...(19): siRNA sense strand
auguaaagaaugugggaag

SEQ ID NO: 2502468 - RNA, 19 nt, Homo sapiens
  misc_RNA (1)...(19): siRNA sense strand
guguaaggaaugugggaag

SEQ ID NO: 2502469 - RNA, 19 nt, Homo sapiens
  misc_RNA (1)...(19): siRNA sense strand
auguaaagaauguggaaag

SEQ ID NO: 2502470 - RNA, 19 nt, Homo sapiens
  misc_RNA (1)...(19): siRNA sense strand
cggugagaaaccauauaua

SEQ ID NO: 2502471 - RNA, 19 nt, Homo sapiens
  misc_RNA (1)...(19): siRNA sense strand
aggaaggacauuucaguga

SEQ ID NO: 2502472 - RNA, 19 nt, Homo sapiens
  misc_RNA (1)...(19): siRNA sense strand
aaggaaugugggaaggauu

SEQ ID NO: 2502473 - RNA, 19 nt, Homo sapiens
  misc_RNA (1)...(19): siRNA sense strand
uggcaaggccuuugguagu

SEQ ID NO: 2502474 - RNA, 19 nt, Homo sapiens
  misc_RNA (1)...(19): siRNA sense strand
gaauguaaggaguguggga

SEQ ID NO: 2502475 - RNA, 19 nt, Homo sapiens
  misc_RNA (1)...(19): siRNA sense strand
ggugauugggaauguaaaa

SEQ ID NO: 2502476 - RNA, 19 nt, Homo sapiens
  misc_RNA (1)...(19): siRNA sense strand
uaguagugguucagaccuu

SEQ ID NO: 2502477 - RNA, 19 nt, Homo sapiens
  misc_RNA (1)...(19): siRNA sense strand
ggccuuugguaguggcuca

SEQ ID NO: 2502478 - RNA, 19 nt, Homo sapiens
  misc_RNA (1)...(19): siRNA sense strand
agaaacccuaugaguguaa

SEQ ID NO: 2502479 - RNA, 19 nt, Homo sapiens
  misc_RNA (1)...(19): siRNA sense strand
agaaacccuaugaguguaa

SEQ ID NO: 2502480 - RNA, 19 nt, Homo sapiens
  misc_RNA (1)...(19): siRNA sense strand
ggccuuugguaguggcuca

SEQ ID NO: 2502481 - RNA, 19 nt, Homo sapiens
  misc_RNA (1)...(19): siRNA sense strand
uuacucagcaucagagaau

SEQ ID NO: 2502482 - RNA, 19 nt, Homo sapiens
  misc_RNA (1)...(19): siRNA sense strand
gaucaggccuuauucgaca

SEQ ID NO: 2502483 - RNA, 19 nt, Homo sapiens
  misc_RNA (1)...(19): siRNA sense strand
uguaaggaaugugggaaga

SEQ ID NO: 2502484 - RNA, 19 nt, Homo sapiens
  misc_RNA (1)...(19): siRNA sense strand
gaccuuuaguagugguuca

SEQ ID NO: 2502485 - RNA, 19 nt, Homo sapiens
  misc_RNA (1)...(19): siRNA sense strand
gaauguaagaacuguggga

SEQ ID NO: 2502486 - RNA, 19 nt, Homo sapiens
  misc_RNA (1)...(19): siRNA sense strand
ggauucagaguuucagcaa

SEQ ID NO: 2502487 - RNA, 19 nt, Homo sapiens
  misc_RNA (1)...(19): siRNA sense strand
aggaaugugggaaggcuuu

SEQ ID NO: 2502488 - RNA, 19 nt, Homo sapiens
  misc_RNA (1)...(19): siRNA sense strand
augcaaagaauguggcaag

SEQ ID NO: 2502489 - RNA, 19 nt, Homo sapiens
  misc_RNA (1)...(19): siRNA sense strand
gcucaaaccuuacucacca

SEQ ID NO: 2502490 - RNA, 19 nt, Homo sapiens
  misc_RNA (1)...(19): siRNA sense strand
agaacugugggaaggcuua

SEQ ID NO: 2502491 - RNA, 19 nt, Homo sapiens
  misc_RNA (1)...(19): siRNA sense strand
cccuaugaguguaaggagu

SEQ ID NO: 2502492 - RNA, 19 nt, Homo sapiens
  misc_RNA (1)...(19): siRNA sense strand
agucauaaugguaagaaac

SEQ ID NO: 2502493 - RNA, 19 nt, Homo sapiens
  misc_RNA (1)...(19): siRNA sense strand
aggccauacuggagagaaa

SEQ ID NO: 2502494 - RNA, 19 nt, Homo sapiens
  misc_RNA (1)...(19): siRNA sense strand
acagauuacaagagaguua

SEQ ID NO: 2502495 - RNA, 19 nt, Homo sapiens
  misc_RNA (1)...(19): siRNA sense strand
acuauaaagaugagggauu

SEQ ID NO: 2502496 - RNA, 19 nt, Homo sapiens
  misc_RNA (1)...(19): siRNA sense strand
aggccacacuggagagaaa

SEQ ID NO: 2502497 - RNA, 19 nt, Homo sapiens
  misc_RNA (1)...(19): siRNA sense strand
aguucacacuggagagaaa

SEQ ID NO: 2502498 - RNA, 19 nt, Homo sapiens
  misc_RNA (1)...(19): siRNA sense strand
aguucauacgggagagaaa

SEQ ID NO: 2502499 - RNA, 19 nt, Homo sapiens
  misc_RNA (1)...(19): siRNA sense strand
ccucaaaucugcuggacca

SEQ ID NO: 2502500 - RNA, 19 nt, Homo sapiens
  misc_RNA (1)...(19): siRNA sense strand
gagcaaaaucauacacaaa

SEQ ID NO: 2502501 - RNA, 19 nt, Homo sapiens
  misc_RNA (1)...(19): siRNA sense strand
gugugaggagugugggaaa

SEQ ID NO: 2502502 - RNA, 19 nt, Homo sapiens
  misc_RNA (1)...(19): siRNA sense strand
auggcaacccagagagaua

SEQ ID NO: 2502503 - RNA, 19 nt, Homo sapiens
  misc_RNA (1)...(19): siRNA sense strand
aguucacacuggaaagaaa

SEQ ID NO: 2502504 - RNA, 19 nt, Homo sapiens
  misc_RNA (1)...(19): siRNA sense strand
aauccacacaggagagaaa

SEQ ID NO: 2502505 - RNA, 19 nt, Homo sapiens
  misc_RNA (1)...(19): siRNA sense strand
aauccacacaggagagaaa

SEQ ID NO: 2502506 - RNA, 19 nt, Homo sapiens
  misc_RNA (1)...(19): siRNA sense strand
augugaggaaugugggaaa

SEQ ID NO: 2502507 - RNA, 19 nt, Homo sapiens
  misc_RNA (1)...(19): siRNA sense strand
caacagauuacaagagagu

SEQ ID NO: 2502508 - RNA, 19 nt, Homo sapiens
  misc_RNA (1)...(19): siRNA sense strand
gguccacacaggagagaga

SEQ ID NO: 2502509 - RNA, 19 nt, Homo sapiens
  misc_RNA (1)...(19): siRNA sense strand
acaguuagagagagaagaa

SEQ ID NO: 2502510 - RNA, 19 nt, Homo sapiens
  misc_RNA (1)...(19): siRNA sense strand
ccucaaaucuucuggccca

SEQ ID NO: 2502511 - RNA, 19 nt, Homo sapiens
  misc_RNA (1)...(19): siRNA sense strand
agaggaagcuguaccgaga

SEQ ID NO: 2502512 - RNA, 19 nt, Homo sapiens
  misc_RNA (1)...(19): siRNA sense strand
aguuagagagagaagaaaa

SEQ ID NO: 2502513 - RNA, 19 nt, Homo sapiens
  misc_RNA (1)...(19): siRNA sense strand
aagaugagggauucaguaa

SEQ ID NO: 2502514 - RNA, 19 nt, Homo sapiens
  misc_RNA (1)...(19): siRNA sense strand
augugaggagugugggaaa

SEQ ID NO: 2502515 - RNA, 19 nt, Homo sapiens
  misc_RNA (1)...(19): siRNA sense strand
gggaaagucuucagcugga

SEQ ID NO: 2502516 - RNA, 19 nt, Homo sapiens
  misc_RNA (1)...(19): siRNA sense strand
augugaugcuggagaacuu

SEQ ID NO: 2502517 - RNA, 19 nt, Homo sapiens
  misc_RNA (1)...(19): siRNA sense strand
uaccacaguuagagagaga

SEQ ID NO: 2502518 - RNA, 19 nt, Homo sapiens
  misc_RNA (1)...(19): siRNA sense strand
ccuucaggcccaucagaua

SEQ ID NO: 2502519 - RNA, 19 nt, Homo sapiens
  misc_RNA (1)...(19): siRNA sense strand
caguguagguucacagcuu

SEQ ID NO: 2502520 - RNA, 19 nt, Homo sapiens
  misc_RNA (1)...(19): siRNA sense strand
gcucauaccuucaagccca

SEQ ID NO: 2502521 - RNA, 19 nt, Homo sapiens
  misc_RNA (1)...(19): siRNA sense strand
aucaagauucugugguaaa

SEQ ID NO: 2502522 - RNA, 19 nt, Homo sapiens
  misc_RNA (1)...(19): siRNA sense strand
ccauauaagugugaagagu

SEQ ID NO: 2502523 - RNA, 19 nt, Homo sapiens
  misc_RNA (1)...(19): siRNA sense strand
auauaagugugaagagugu

SEQ ID NO: 2502524 - RNA, 19 nt, Homo sapiens
  misc_RNA (1)...(19): siRNA sense strand
gaggauucacacaggaaaa

SEQ ID NO: 2502525 - RNA, 19 nt, Homo sapiens
  misc_RNA (1)...(19): siRNA sense strand
ccucaggagccaagaaucu

SEQ ID NO: 2502526 - RNA, 19 nt, Homo sapiens
  misc_RNA (1)...(19): siRNA sense strand
aggagagagaccauacaaa

SEQ ID NO: 2502527 - RNA, 19 nt, Homo sapiens
  misc_RNA (1)...(19): siRNA sense strand
guacaugugggaagggcuu

SEQ ID NO: 2502528 - RNA, 19 nt, Homo sapiens
  misc_RNA (1)...(19): siRNA sense strand
uggaugaugaagauggcaa

SEQ ID NO: 2502529 - RNA, 19 nt, Homo sapiens
  misc_RNA (1)...(19): siRNA sense strand
ccuucaagcccaucaaaga

SEQ ID NO: 2502530 - RNA, 19 nt, Homo sapiens
  misc_RNA (1)...(19): siRNA sense strand
gcacuauaaagaugaggga

SEQ ID NO: 2502531 - RNA, 19 nt, Homo sapiens
  misc_RNA (1)...(19): siRNA sense strand
aguccacaguagagcaaaa

SEQ ID NO: 2502532 - RNA, 19 nt, Homo sapiens
  misc_RNA (1)...(19): siRNA sense strand
caaauuaaccaaagggcuc

SEQ ID NO: 2502533 - RNA, 19 nt, Homo sapiens
  misc_RNA (1)...(19): siRNA sense strand
aagaaguaggauuaaggua

SEQ ID NO: 2502534 - RNA, 19 nt, Homo sapiens
  misc_RNA (1)...(19): siRNA sense strand
uaucaagauucugugguaa

SEQ ID NO: 2502535 - RNA, 19 nt, Homo sapiens
  misc_RNA (1)...(19): siRNA sense strand
gggagagaaacccuauaaa

SEQ ID NO: 2502536 - RNA, 19 nt, Homo sapiens
  misc_RNA (1)...(19): siRNA sense strand
cgaugugauguguguggua

SEQ ID NO: 2502537 - RNA, 19 nt, Homo sapiens
  misc_RNA (1)...(19): siRNA sense strand
augcugaugaugaggguga

SEQ ID NO: 2502538 - RNA, 19 nt, Homo sapiens
  misc_RNA (1)...(19): siRNA sense strand
cuggaaagaaaccauauaa

SEQ ID NO: 2502539 - RNA, 19 nt, Homo sapiens
  misc_RNA (1)...(19): siRNA sense strand
cauacaaaugugaggaaug

SEQ ID NO: 2502540 - RNA, 19 nt, Homo sapiens
  misc_RNA (1)...(19): siRNA sense strand
cuauaaaugugaggagugu

SEQ ID NO: 2502541 - RNA, 19 nt, Homo sapiens
  misc_RNA (1)...(19): siRNA sense strand
guucacgacugcaggcuca

SEQ ID NO: 2502542 - RNA, 19 nt, Homo sapiens
  misc_RNA (1)...(19): siRNA sense strand
ggaccaucaaagaggccau

SEQ ID NO: 2502543 - RNA, 19 nt, Homo sapiens
  misc_RNA (1)...(19): siRNA sense strand
aagaaagaucugaaggaaa

SEQ ID NO: 2502544 - RNA, 19 nt, Homo sapiens
  misc_RNA (1)...(19): siRNA sense strand
gcgcacaagagaugagcua

SEQ ID NO: 2502545 - RNA, 19 nt, Homo sapiens
  misc_RNA (1)...(19): siRNA sense strand
aggcagaaccacaaagcaa

SEQ ID NO: 2502546 - RNA, 19 nt, Homo sapiens
  misc_RNA (1)...(19): siRNA sense strand
cgacauaagcacaaaacaa

SEQ ID NO: 2502547 - RNA, 19 nt, Homo sapiens
  misc_RNA (1)...(19): siRNA sense strand
ggauggauauguauggcaa

SEQ ID NO: 2502548 - RNA, 19 nt, Homo sapiens
  misc_RNA (1)...(19): siRNA sense strand
cagugaaggacuugcaauu

SEQ ID NO: 2502549 - RNA, 19 nt, Homo sapiens
  misc_RNA (1)...(19): siRNA sense strand
gagaaagugaagcgcacaa

SEQ ID NO: 2502550 - RNA, 19 nt, Homo sapiens
  misc_RNA (1)...(19): siRNA sense strand
ggucauggucucagaggga

SEQ ID NO: 2502551 - RNA, 19 nt, Homo sapiens
  misc_RNA (1)...(19): siRNA sense strand
ucauggucucagagggaaa

SEQ ID NO: 2502552 - RNA, 19 nt, Homo sapiens
  misc_RNA (1)...(19): siRNA sense strand
agucuaaagagguauggaa

SEQ ID NO: 2502553 - RNA, 19 nt, Homo sapiens
  misc_RNA (1)...(19): siRNA sense strand
gcacaaaacaagcagcauu

SEQ ID NO: 2502554 - RNA, 19 nt, Homo sapiens
  misc_RNA (1)...(19): siRNA sense strand
acuaaggaaucuaggaaag

SEQ ID NO: 2502555 - RNA, 19 nt, Homo sapiens
  misc_RNA (1)...(19): siRNA sense strand
ugaagauggcagaggaugu

SEQ ID NO: 2502556 - RNA, 19 nt, Homo sapiens
  misc_RNA (1)...(19): siRNA sense strand
cuaggaaagaugacugcua

SEQ ID NO: 2502557 - RNA, 19 nt, Homo sapiens
  misc_RNA (1)...(19): siRNA sense strand
gguaguauacucaacgcua

SEQ ID NO: 2502558 - RNA, 19 nt, Homo sapiens
  misc_RNA (1)...(19): siRNA sense strand
cugagggaguaucgaaaga

SEQ ID NO: 2502559 - RNA, 19 nt, Homo sapiens
  misc_RNA (1)...(19): siRNA sense strand
gggaguaucgaaagaaaau

SEQ ID NO: 2502560 - RNA, 19 nt, Homo sapiens
  misc_RNA (1)...(19): siRNA sense strand
gaggaugugaagugauaca

SEQ ID NO: 2502561 - RNA, 19 nt, Homo sapiens
  misc_RNA (1)...(19): siRNA sense strand
cuggaaagaaguucaugaa

SEQ ID NO: 2502562 - RNA, 19 nt, Homo sapiens
  misc_RNA (1)...(19): siRNA sense strand
aguacuugaaccaggaaau

SEQ ID NO: 2502563 - RNA, 19 nt, Homo sapiens
  misc_RNA (1)...(19): siRNA sense strand
cugaaggaaagcaugaaau

SEQ ID NO: 2502564 - RNA, 19 nt, Homo sapiens
  misc_RNA (1)...(19): siRNA sense strand
uuacaaagggcuggaaaga

SEQ ID NO: 2502565 - RNA, 19 nt, Homo sapiens
  misc_RNA (1)...(19): siRNA sense strand
uaaaguaucuggaggcugu

SEQ ID NO: 2502566 - RNA, 19 nt, Homo sapiens
  misc_RNA (1)...(19): siRNA sense strand
gauugaagauggcagagga

SEQ ID NO: 2502567 - RNA, 19 nt, Homo sapiens
  misc_RNA (1)...(19): siRNA sense strand
ucaagaaggcagaaccaca

SEQ ID NO: 2502568 - RNA, 19 nt, Homo sapiens
  misc_RNA (1)...(19): siRNA sense strand
aggaaagaugacugcuaau

SEQ ID NO: 2502569 - RNA, 19 nt, Homo sapiens
  misc_RNA (1)...(19): siRNA sense strand
gcuauugcucugagggagu

SEQ ID NO: 2502570 - RNA, 19 nt, Homo sapiens
  misc_RNA (1)...(19): siRNA sense strand
ccacugaaugagaagcaga

SEQ ID NO: 2502571 - RNA, 19 nt, Homo sapiens
  misc_RNA (1)...(19): siRNA sense strand
uguccagugacuacagaua

SEQ ID NO: 2502572 - RNA, 19 nt, Homo sapiens
  misc_RNA (1)...(19): siRNA sense strand
agucaagaaggcagaacca

SEQ ID NO: 2502573 - RNA, 19 nt, Homo sapiens
  misc_RNA (1)...(19): siRNA sense strand
gcucuuugcacuugccauu

SEQ ID NO: 2502574 - RNA, 19 nt, Homo sapiens
  misc_RNA (1)...(19): siRNA sense strand
uuaagaaagaucugaagga

SEQ ID NO: 2502575 - RNA, 19 nt, Homo sapiens
  misc_RNA (1)...(19): siRNA sense strand
aggcuauagcggacuggua

SEQ ID NO: 2502576 - RNA, 19 nt, Homo sapiens
  misc_RNA (1)...(19): siRNA sense strand
gcauuagaaacuuacaaga

SEQ ID NO: 2502577 - RNA, 19 nt, Homo sapiens
  misc_RNA (1)...(19): siRNA sense strand
aaugagaagcagauagcca

SEQ ID NO: 2502578 - RNA, 19 nt, Homo sapiens
  misc_RNA (1)...(19): siRNA sense strand
auuuaagacaguugaacca

SEQ ID NO: 2502579 - RNA, 19 nt, Homo sapiens
  misc_RNA (1)...(19): siRNA sense strand
gauuguuuguggaaugaca

SEQ ID NO: 2502580 - RNA, 19 nt, Homo sapiens
  misc_RNA (1)...(19): siRNA sense strand
ugugaagugauacaagaaa

SEQ ID NO: 2502581 - RNA, 19 nt, Homo sapiens
  misc_RNA (1)...(19): siRNA sense strand
cggacugguacaaugagaa

SEQ ID NO: 2502582 - RNA, 19 nt, Homo sapiens
  misc_RNA (1)...(19): siRNA sense strand
gcuggaaagaaguucauga

SEQ ID NO: 2502583 - RNA, 19 nt, Homo sapiens
  misc_RNA (1)...(19): siRNA sense strand
uacuaaggaaucuaggaaa

SEQ ID NO: 2502584 - RNA, 19 nt, Homo sapiens
  misc_RNA (1)...(19): siRNA sense strand
ggaugauguguaugcgaaa

SEQ ID NO: 2502585 - RNA, 19 nt, Homo sapiens
  misc_RNA (1)...(19): siRNA sense strand
cuacaaaaccauaaagaca

SEQ ID NO: 2502586 - RNA, 19 nt, Homo sapiens
  misc_RNA (1)...(19): siRNA sense strand
ccagcuucauagagagcaa

SEQ ID NO: 2502587 - RNA, 19 nt, Homo sapiens
  misc_RNA (1)...(19): siRNA sense strand
gaucaaacauucuguggga

SEQ ID NO: 2502588 - RNA, 19 nt, Homo sapiens
  misc_RNA (1)...(19): siRNA sense strand
ugauagauccuuagcccaa

SEQ ID NO: 2502589 - RNA, 19 nt, Homo sapiens
  misc_RNA (1)...(19): siRNA sense strand
gugagaaguacaaggaagu

SEQ ID NO: 2502590 - RNA, 19 nt, Homo sapiens
  misc_RNA (1)...(19): siRNA sense strand
uaugaguggaugagagaga

SEQ ID NO: 2502591 - RNA, 19 nt, Homo sapiens
  misc_RNA (1)...(19): siRNA sense strand
acguuugagcugagggaca

SEQ ID NO: 2502592 - RNA, 19 nt, Homo sapiens
  misc_RNA (1)...(19): siRNA sense strand
ucaaacauucugugggaca

SEQ ID NO: 2502593 - RNA, 19 nt, Homo sapiens
  misc_RNA (1)...(19): siRNA sense strand
ggcccgagacauugggauu

SEQ ID NO: 2502594 - RNA, 19 nt, Homo sapiens
  misc_RNA (1)...(19): siRNA sense strand
ggacagugcuggaagggug

SEQ ID NO: 2502595 - RNA, 19 nt, Homo sapiens
  misc_RNA (1)...(19): siRNA sense strand
agagcaagaaggaugauau

SEQ ID NO: 2502596 - RNA, 19 nt, Homo sapiens
  misc_RNA (1)...(19): siRNA sense strand
uuggauggacuguggaauu

SEQ ID NO: 2502597 - RNA, 19 nt, Homo sapiens
  misc_RNA (1)...(19): siRNA sense strand
gagagagaucagugagaag

SEQ ID NO: 2502598 - RNA, 19 nt, Homo sapiens
  misc_RNA (1)...(19): siRNA sense strand
agugagaaguacaaggaag

SEQ ID NO: 2502599 - RNA, 19 nt, Homo sapiens
  misc_RNA (1)...(19): siRNA sense strand
uuauagaguuggaucgagu

SEQ ID NO: 2502600 - RNA, 19 nt, Homo sapiens
  misc_RNA (1)...(19): siRNA sense strand
ccacuaugcugcugggccu

SEQ ID NO: 2502601 - RNA, 19 nt, Homo sapiens
  misc_RNA (1)...(19): siRNA sense strand
ucuaugaguggaugagaga

SEQ ID NO: 2502602 - RNA, 19 nt, Homo sapiens
  misc_RNA (1)...(19): siRNA sense strand
uggaugauguguaugcgaa

SEQ ID NO: 2502603 - RNA, 19 nt, Homo sapiens
  misc_RNA (1)...(19): siRNA sense strand
cagcaaaugcauugaaagc

SEQ ID NO: 2502604 - RNA, 19 nt, Homo sapiens
  misc_RNA (1)...(19): siRNA sense strand
gagagaucuaugaguggau

SEQ ID NO: 2502605 - RNA, 19 nt, Homo sapiens
  misc_RNA (1)...(19): siRNA sense strand
aggaagagacugagcacaa

SEQ ID NO: 2502606 - RNA, 19 nt, Homo sapiens
  misc_RNA (1)...(19): siRNA sense strand
cuauagaacagaugagcaa

SEQ ID NO: 2502607 - RNA, 19 nt, Homo sapiens
  misc_RNA (1)...(19): siRNA sense strand
agauugacuuggagggcaa

SEQ ID NO: 2502608 - RNA, 19 nt, Homo sapiens
  misc_RNA (1)...(19): siRNA sense strand
agacugaaccugaggaaca

SEQ ID NO: 2502609 - RNA, 19 nt, Homo sapiens
  misc_RNA (1)...(19): siRNA sense strand
caguaaaauuguuguggaa

SEQ ID NO: 2502610 - RNA, 19 nt, Homo sapiens
  misc_RNA (1)...(19): siRNA sense strand
ggcuauaucucaauggcaa

SEQ ID NO: 2502611 - RNA, 19 nt, Homo sapiens
  misc_RNA (1)...(19): siRNA sense strand
cauuaaagcaguugcacuu

SEQ ID NO: 2502612 - RNA, 19 nt, Homo sapiens
  misc_RNA (1)...(19): siRNA sense strand
uuacagugauuaagggaga

SEQ ID NO: 2502613 - RNA, 19 nt, Homo sapiens
  misc_RNA (1)...(19): siRNA sense strand
acaaaggaagagugaguau

SEQ ID NO: 2502614 - RNA, 19 nt, Homo sapiens
  misc_RNA (1)...(19): siRNA sense strand
ccgacaaggagaaagauuu

SEQ ID NO: 2502615 - RNA, 19 nt, Homo sapiens
  misc_RNA (1)...(19): siRNA sense strand
aagcuuggcuggagaacau

SEQ ID NO: 2502616 - RNA, 19 nt, Homo sapiens
  misc_RNA (1)...(19): siRNA sense strand
gcgaagaagcugcacguca

SEQ ID NO: 2502617 - RNA, 19 nt, Homo sapiens
  misc_RNA (1)...(19): siRNA sense strand
cugacauaucgguggaaau

SEQ ID NO: 2502618 - RNA, 19 nt, Homo sapiens
  misc_RNA (1)...(19): siRNA sense strand
ugugaacugccaagagaaa

SEQ ID NO: 2502619 - RNA, 19 nt, Homo sapiens
  misc_RNA (1)...(19): siRNA sense strand
cagaugagcaagagccaca

SEQ ID NO: 2502620 - RNA, 19 nt, Homo sapiens
  misc_RNA (1)...(19): siRNA sense strand
ggguggagaaguugagcga

SEQ ID NO: 2502621 - RNA, 19 nt, Homo sapiens
  misc_RNA (1)...(19): siRNA sense strand
ugacuuauauggaaggcuu

SEQ ID NO: 2502622 - RNA, 19 nt, Homo sapiens
  misc_RNA (1)...(19): siRNA sense strand
cuggagaacaugccauaua

SEQ ID NO: 2502623 - RNA, 19 nt, Homo sapiens
  misc_RNA (1)...(19): siRNA sense strand
aggagaagcuaucugugaa

SEQ ID NO: 2502624 - RNA, 19 nt, Homo sapiens
  misc_RNA (1)...(19): siRNA sense strand
ggcuugaaagagucagaaa

SEQ ID NO: 2502625 - RNA, 19 nt, Homo sapiens
  misc_RNA (1)...(19): siRNA sense strand
uggaacaaaggaagaguga

SEQ ID NO: 2502626 - RNA, 19 nt, Homo sapiens
  misc_RNA (1)...(19): siRNA sense strand
ugauuaagggagacguauu

SEQ ID NO: 2502627 - RNA, 19 nt, Homo sapiens
  misc_RNA (1)...(19): siRNA sense strand
agggagacguauuucacaa

SEQ ID NO: 2502628 - RNA, 19 nt, Homo sapiens
  misc_RNA (1)...(19): siRNA sense strand
gcacaauugaugagcugga

SEQ ID NO: 2502629 - RNA, 19 nt, Homo sapiens
  misc_RNA (1)...(19): siRNA sense strand
caguugagaaugugcucua

SEQ ID NO: 2502630 - RNA, 19 nt, Homo sapiens
  misc_RNA (1)...(19): siRNA sense strand
gggaauaauaaacugcaga

SEQ ID NO: 2502631 - RNA, 19 nt, Homo sapiens
  misc_RNA (1)...(19): siRNA sense strand
ggaacagaauccagaagcu

SEQ ID NO: 2502632 - RNA, 19 nt, Homo sapiens
  misc_RNA (1)...(19): siRNA sense strand
uugaauugcaacuggaaga

SEQ ID NO: 2502633 - RNA, 19 nt, Homo sapiens
  misc_RNA (1)...(19): siRNA sense strand
ucucaauggcaaucaaauu

SEQ ID NO: 2502634 - RNA, 19 nt, Homo sapiens
  misc_RNA (1)...(19): siRNA sense strand
cagcuuugaacaagaucua

SEQ ID NO: 2502635 - RNA, 19 nt, Homo sapiens
  misc_RNA (1)...(19): siRNA sense strand
gcgugucaguugagaaugu

SEQ ID NO: 2502636 - RNA, 19 nt, Homo sapiens
  misc_RNA (1)...(19): siRNA sense strand
ggaaauuugcaaugugugu

SEQ ID NO: 2502637 - RNA, 19 nt, Homo sapiens
  misc_RNA (1)...(19): siRNA sense strand
cauuaaagcugugggugga

SEQ ID NO: 2502638 - RNA, 19 nt, Homo sapiens
  misc_RNA (1)...(19): siRNA sense strand
acgggauuguugugaaaga

SEQ ID NO: 2502639 - RNA, 19 nt, Homo sapiens
  misc_RNA (1)...(19): siRNA sense strand
cagaaaguuguuaugagaa

SEQ ID NO: 2502640 - RNA, 19 nt, Homo sapiens
  misc_RNA (1)...(19): siRNA sense strand
uggccgacaaggagaaaga

SEQ ID NO: 2502641 - RNA, 19 nt, Homo sapiens
  misc_RNA (1)...(19): siRNA sense strand
caguaucuguauuuggaau

SEQ ID NO: 2502642 - RNA, 19 nt, Homo sapiens
  misc_RNA (1)...(19): siRNA sense strand
gugacuugguggcauuaaa

SEQ ID NO: 2502643 - RNA, 19 nt, Homo sapiens
  misc_RNA (1)...(19): siRNA sense strand
gauaccaggaagagacuga

SEQ ID NO: 2502644 - RNA, 19 nt, Homo sapiens
  misc_RNA (1)...(19): siRNA sense strand
caauugaugagcuggauga

SEQ ID NO: 2502645 - RNA, 19 nt, Homo sapiens
  misc_RNA (1)...(19): siRNA sense strand
ccaacaaacaagagcuaug

SEQ ID NO: 2502646 - RNA, 19 nt, Homo sapiens
  misc_RNA (1)...(19): siRNA sense strand
gcacgaaggccuggggaau

SEQ ID NO: 2502647 - RNA, 19 nt, Homo sapiens
  misc_RNA (1)...(19): siRNA sense strand
aaguaagaagucacugaua

SEQ ID NO: 2502648 - RNA, 19 nt, Homo sapiens
  misc_RNA (1)...(19): siRNA sense strand
ccuucagauuugggacuaa

SEQ ID NO: 2502649 - RNA, 19 nt, Homo sapiens
  misc_RNA (1)...(19): siRNA sense strand
cuugaaagagucagaaacu

SEQ ID NO: 2502650 - RNA, 19 nt, Homo sapiens
  misc_RNA (1)...(19): siRNA sense strand
agugauuaagggagacgua

SEQ ID NO: 2502651 - RNA, 19 nt, Homo sapiens
  misc_RNA (1)...(19): siRNA sense strand
gcuauaucucaauggcaau

SEQ ID NO: 2502652 - RNA, 19 nt, Homo sapiens
  misc_RNA (1)...(19): siRNA sense strand
ugaugagcuggaugaauua

SEQ ID NO: 2502653 - RNA, 19 nt, Homo sapiens
  misc_RNA (1)...(19): siRNA sense strand
gcauuaaagcugugggugg

SEQ ID NO: 2502654 - RNA, 19 nt, Homo sapiens
  misc_RNA (1)...(19): siRNA sense strand
gcauuaaagcaguugcacu

SEQ ID NO: 2502655 - RNA, 19 nt, Homo sapiens
  misc_RNA (1)...(19): siRNA sense strand
cugcgugucaguugagaau

SEQ ID NO: 2502656 - RNA, 19 nt, Homo sapiens
  misc_RNA (1)...(19): siRNA sense strand
cauugagggaggagccuuu

SEQ ID NO: 2502657 - RNA, 19 nt, Homo sapiens
  misc_RNA (1)...(19): siRNA sense strand
ugacacuuuccuuggcaua

SEQ ID NO: 2502658 - RNA, 19 nt, Homo sapiens
  misc_RNA (1)...(19): siRNA sense strand
ggauauacgagggaacaga

SEQ ID NO: 2502659 - RNA, 19 nt, Homo sapiens
  misc_RNA (1)...(19): siRNA sense strand
gucaauggcaauagcauca

SEQ ID NO: 2502660 - RNA, 19 nt, Homo sapiens
  misc_RNA (1)...(19): siRNA sense strand
cuugugacuugguggcauu

SEQ ID NO: 2502661 - RNA, 19 nt, Homo sapiens
  misc_RNA (1)...(19): siRNA sense strand
auagaacagaugagcaaga

SEQ ID NO: 2502662 - RNA, 19 nt, Homo sapiens
  misc_RNA (1)...(19): siRNA sense strand
agaacaugccauauaacau

SEQ ID NO: 2502663 - RNA, 19 nt, Homo sapiens
  misc_RNA (1)...(19): siRNA sense strand
acaacaaauccuuccaaga

SEQ ID NO: 2502664 - RNA, 19 nt, Homo sapiens
  misc_RNA (1)...(19): siRNA sense strand
ucauuuaggcagcaaucaa

SEQ ID NO: 2502665 - RNA, 19 nt, Homo sapiens
  misc_RNA (1)...(19): siRNA sense strand
ugggcagagaugaaaguaa

SEQ ID NO: 2502666 - RNA, 19 nt, Homo sapiens
  misc_RNA (1)...(19): siRNA sense strand
aaguaaaagccccgacaua

SEQ ID NO: 2502667 - RNA, 19 nt, Homo sapiens
  misc_RNA (1)...(19): siRNA sense strand
ggcacaaacagcagguaca

SEQ ID NO: 2502668 - RNA, 19 nt, Homo sapiens
  misc_RNA (1)...(19): siRNA sense strand
ugaugaagucacaaaguca

SEQ ID NO: 2502669 - RNA, 19 nt, Homo sapiens
  misc_RNA (1)...(19): siRNA sense strand
ccuuccacaugcugguaaa

SEQ ID NO: 2502670 - RNA, 19 nt, Homo sapiens
  misc_RNA (1)...(19): siRNA sense strand
gguugaaacauuuugacaa

SEQ ID NO: 2502671 - RNA, 19 nt, Homo sapiens
  misc_RNA (1)...(19): siRNA sense strand
aaagaaucccagagaccau

SEQ ID NO: 2502672 - RNA, 19 nt, Homo sapiens
  misc_RNA (1)...(19): siRNA sense strand
cugcagaagaaauagacga

SEQ ID NO: 2502673 - RNA, 19 nt, Homo sapiens
  misc_RNA (1)...(19): siRNA sense strand
ggcaaauggagcaacaaca

SEQ ID NO: 2502674 - RNA, 19 nt, Homo sapiens
  misc_RNA (1)...(19): siRNA sense strand
caucacaaagaaaggagau

SEQ ID NO: 2502675 - RNA, 19 nt, Homo sapiens
  misc_RNA (1)...(19): siRNA sense strand
cgaaagacgaagaggagga

SEQ ID NO: 2502676 - RNA, 19 nt, Homo sapiens
  misc_RNA (1)...(19): siRNA sense strand
cuggaaacccaaagggaga

SEQ ID NO: 2502677 - RNA, 19 nt, Homo sapiens
  misc_RNA (1)...(19): siRNA sense strand
acucagaauugaaggccuu

SEQ ID NO: 2502678 - RNA, 19 nt, Homo sapiens
  misc_RNA (1)...(19): siRNA sense strand
ugacuauggcugugcggaa

SEQ ID NO: 2502679 - RNA, 19 nt, Homo sapiens
  misc_RNA (1)...(19): siRNA sense strand
gugaagaaaguccgggaga

SEQ ID NO: 2502680 - RNA, 19 nt, Homo sapiens
  misc_RNA (1)...(19): siRNA sense strand
ggccaaaggcgaaagacga

SEQ ID NO: 2502681 - RNA, 19 nt, Homo sapiens
  misc_RNA (1)...(19): siRNA sense strand
cccaaagggagaagcagaa

SEQ ID NO: 2502682 - RNA, 19 nt, Homo sapiens
  misc_RNA (1)...(19): siRNA sense strand
ccuccaacccuguggcaga

SEQ ID NO: 2502683 - RNA, 19 nt, Homo sapiens
  misc_RNA (1)...(19): siRNA sense strand
ccgugguguuggaaagaca

SEQ ID NO: 2502684 - RNA, 19 nt, Homo sapiens
  misc_RNA (1)...(19): siRNA sense strand
gcagacaggugguggacac

SEQ ID NO: 2502685 - RNA, 19 nt, Homo sapiens
  misc_RNA (1)...(19): siRNA sense strand
uuggaaagacagcggguga

SEQ ID NO: 2502686 - RNA, 19 nt, Homo sapiens
  misc_RNA (1)...(19): siRNA sense strand
aggaaaagcaagagcgucu

SEQ ID NO: 2502687 - RNA, 19 nt, Homo sapiens
  misc_RNA (1)...(19): siRNA sense strand
ggguccaggcugacagaga

SEQ ID NO: 2502688 - RNA, 19 nt, Homo sapiens
  misc_RNA (1)...(19): siRNA sense strand
aggcgaaagacgaagagga

SEQ ID NO: 2502689 - RNA, 19 nt, Homo sapiens
  misc_RNA (1)...(19): siRNA sense strand
cgucugguguccuggguga

SEQ ID NO: 2502690 - RNA, 19 nt, Homo sapiens
  misc_RNA (1)...(19): siRNA sense strand
agggagaagcagaaagaac

SEQ ID NO: 2502691 - RNA, 19 nt, Homo sapiens
  misc_RNA (1)...(19): siRNA sense strand
agaaagaacugauacugca

SEQ ID NO: 2502692 - RNA, 19 nt, Homo sapiens
  misc_RNA (1)...(19): siRNA sense strand
aagacgaagaggaggagga

SEQ ID NO: 2502693 - RNA, 19 nt, Homo sapiens
  misc_RNA (1)...(19): siRNA sense strand
agaacaguugguugagcaa

SEQ ID NO: 2502694 - RNA, 19 nt, Homo sapiens
  misc_RNA (1)...(19): siRNA sense strand
cggugggaagacaggaaau

SEQ ID NO: 2502695 - RNA, 19 nt, Homo sapiens
  misc_RNA (1)...(19): siRNA sense strand
acccaaagggagaagcaga
